United States Patent Application Publication US 2016/0078168 A1 - sequence listing, part 9

SEQ ID NO: 189439 - RNA, 58 nt, Homo sapiens
ggcacaaaacaaggaaagagagggaaagcaacggcgcaagcggcggcggcgggcagag

SEQ ID NO: 189440 - RNA, 60 nt, Homo sapiens
cccccaccagccaccaggcagcagaaagagaaccggccagcggaggcgggaagccaagac

SEQ ID NO: 189441 - RNA, 76 nt, Homo sapiens
gacacacaaggacgaccaggccaagcaagaagagacgacaacccccccggcggaagcccccgaacggcaaaacacc

SEQ ID NO: 189442 - RNA, 76 nt, Homo sapiens
gccaagcgggggccccgaggacggcgacggagggggaagacaggacccgcccacagaaagccagcaagaaaaacag

SEQ ID NO: 189443 - RNA, 77 nt, Homo sapiens
cggccgccccaccggcggaacccagcaagccagacagacacagcacagcagccacgaagagcaaagcaagccgaaaa

SEQ ID NO: 189444 - RNA, 78 nt, Homo sapiens
gagaggcacacccggcagaccacacgagcggcaccaaccagcggacacacggaaaagggacgggaaaagccgagaaag

SEQ ID NO: 189445 - RNA, 66 nt, Homo sapiens
agacgcaaggagccaccagcacggaccaggaggcgagcaacagaccaagagcgagccagagcaaag

SEQ ID NO: 189446 - RNA, 68 nt, Homo sapiens
caaagggggccgggacagcacgaaaaagagccacgcccccacgagcgccccccggaccacgaagggga

SEQ ID NO: 189447 - RNA, 79 nt, Homo sapiens
cagcagaaaacacccagcccgcacggagaagaagcaaggacagccaggacacgccaaaaggcacaggagggagcaggaa

SEQ ID NO: 189448 - RNA, 79 nt, Homo sapiens
gcggcggcggcggcgcccgcgggcaggcgcgaacggcggaggcaaaaaaggagaaagaacaccaagcagagggaagacg

SEQ ID NO: 189449 - RNA, 59 nt, Homo sapiens
agagcagagcacccccaaagacagagaagaaagcagagacagggcaacaacacggcacc

SEQ ID NO: 189450 - RNA, 97 nt, Homo sapiens
ggggccaggaggagcgaacaccgccgcggcccccgccggcgcggcaaggcgccaccggaagaaacgggaggggaggagccgggaaagacagcgccaa

SEQ ID NO: 189451 - RNA, 76 nt, Homo sapiens
aaacaagaccaaaaaggggggacgcgcagaacaaaagaaccagcacaggcaagaagaaggagaaagacaaagcccc

SEQ ID NO: 189452 - RNA, 85 nt, Homo sapiens
gggcagcacgaccgcagcgacaagaacgcaggacggccgcggcaccgaaccacaaggaggacgaggcacacggaagcaggcgaac

SEQ ID NO: 189453 - RNA, 80 nt, Homo sapiens
caaagaccaggagagacgagcagcccagggagcgggagacaggcgcagcagcacgacggaacaaaaaagcgagccaaaaa

SEQ ID NO: 189454 - RNA, 74 nt, Homo sapiens
agaggagcacacaaggggcgagagcgcagagccacggcccgagacagggaaagagaaggcacagggcagagcaa

SEQ ID NO: 189455 - RNA, 81 nt, Homo sapiens
gaaccagaagcagagccaacagaccgaacaaagaaacaggaacacgaaagaggaaaaacgcacaagaaaccgaagccaagg

SEQ ID NO: 189456 - RNA, 75 nt, Homo sapiens
gccggagggaccacaaggcagaccagaaaaacaaagacggcgcgcacgagccaaacggcaaggccagaacacacc

SEQ ID NO: 189457 - RNA, 56 nt, Homo sapiens
gaaccgacaccggagacaccacaccaacggaagcagaccgcaaggggagagacgag

SEQ ID NO: 189458 - RNA, 44 nt, Homo sapiens
gacggaacagcccaaccagcacccgcagcgggacaagcagcagc

SEQ ID NO: 189459 - RNA, 102 nt, Homo sapiens
cccccccaggacagcggaggggaaccgcgcgcgcaacccccggccggggaacagaaagaacagccaaaagagaaagaccgggcgagccacagaggcgaccac

SEQ ID NO: 189460 - RNA, 96 nt, Homo sapiens
cgaggccccagcgcacggaccgccggccgggcggccccgccacccacaggcgccaccaggggccagaaccgcccacggcccccacagcggacccgg

SEQ ID NO: 189461 - RNA, 68 nt, Homo sapiens
gcaccaaccagaggaaagaaggcaagagcaacgcgcaacggaccgaaccgaaaaacagagggaggagc

SEQ ID NO: 189462 - RNA, 63 nt, Homo sapiens
cggcgcggaaggacgaggcgaggcgagaaacgaggaccagcaacccagccccagaccacggca

SEQ ID NO: 189463 - RNA, 77 nt, Homo sapiens
gagggccaggacacaggaaagagaggaccgcggccgagcgacacaagcccggaacaaccaaagccacaacaggggac

SEQ ID NO: 189464 - RNA, 73 nt, Homo sapiens
cgcacaccacaaggagcagccgggcccagagcgaaagggaaagcccccccagcgggcccgcaggcacgcccca

SEQ ID NO: 189465 - RNA, 70 nt, Homo sapiens
gggaagccgcagcggaaagcaggagcacagaaacgccccggagcagccaggcacacgggacaagaccacc

SEQ ID NO: 189466 - RNA, 76 nt, Homo sapiens
gcacaagggcagcaccagaaaggcgcccggcgcaggccaaagggcccccgaaccagcgaaaacaaacccggccgaa

SEQ ID NO: 189467 - RNA, 94 nt, Homo sapiens
caggccagcgccccaggccaagagggacccacccggcgccggaaccaaaaagaagccccagagccggggccaggagccccaagcgccccagcag

SEQ ID NO: 189468 - RNA, 77 nt, Homo sapiens
gcgaaaggcagaagagcacagaaagagggcagaagagcgagaagcagagagcgacacagcggcagcggaggaacaaa

SEQ ID NO: 189469 - RNA, 72 nt, Homo sapiens
ggaaaaggagagagagccacacaaagaacccccacaaaacagggaagaccaaagcaagggaggagaagccag

SEQ ID NO: 189470 - RNA, 74 nt, Homo sapiens
cgcggagaacaccagagcaaagccaccccccgaggaaaaagcagaaacagcaaagaaaacagacaacagaccag

SEQ ID NO: 189471 - RNA, 42 nt, Homo sapiens
gggggcggcccggccccgcaggccaccagcgggcccccacgg

SEQ ID NO: 189472 - RNA, 75 nt, Homo sapiens
ccaacggaaacagccacgagagacgagcaacccccgggaagccaagccgcaggggcagagagcaggcgagcgaga

SEQ ID NO: 189473 - RNA, 80 nt, Homo sapiens
cagccgcccaaccgcgggaccaaccacccgagcggcgcggacgaagagggcaacagcaccgacccggaagcgagacaagc

SEQ ID NO: 189474 - RNA, 81 nt, Homo sapiens
acaaggccacgaagcgcccacggacaacccccagccaaagcaaagcagagaagggaagaggccagcacgccgggcaggaag

SEQ ID NO: 189475 - RNA, 66 nt, Homo sapiens
aacaaaggcccaggcaacagaggggaagaacgaaaagacaacaaagaccggaaccaaacagagcaa

SEQ ID NO: 189476 - RNA, 69 nt, Homo sapiens
aagagagaccccacagcgccgggcgaagaaccaagcaggccacggaacaacaggcgccaaaagcagggc

SEQ ID NO: 189477 - RNA, 75 nt, Homo sapiens
ccaacacagagcagcggaaccagacaggcaggaaaagacaggccgcgaaaagacgaaaaaacgggagggagcggg

SEQ ID NO: 189478 - RNA, 57 nt, Homo sapiens
cgcccggcgccggcccgggccgccagggcagcagcaggcgagaggcagaacccggaa

SEQ ID NO: 189479 - RNA, 63 nt, Homo sapiens
gcacgcacgcaacccccaggacacgggacccaggccacgggccggggcccccaccggaagcag

SEQ ID NO: 189480 - RNA, 90 nt, Homo sapiens
caagacacgcggagcaggagacgccaccaccgcagccgccgagggccaggacgccaacggaccccgaggccggagcagaccaagagcgag

SEQ ID NO: 189481 - RNA, 92 nt, Homo sapiens
aaaccaaccagaagacgaacaaacagcaagaaagaccacaagaccaacaagcagaccggaagaccgacggaagaccacaccccgagggagcc

SEQ ID NO: 189482 - RNA, 84 nt, Homo sapiens
ggaaagccggccgccggggagacgccccagggccggcccgccacggggccgcccccgacaccagggcgcacgggaggagaacag

SEQ ID NO: 189483 - RNA, 52 nt, Homo sapiens
ccggagagggccggaccgagcggccgggggacgagccgcgcaaccgcagcga

SEQ ID NO: 189484 - RNA, 75 nt, Homo sapiens
gaagaggccgccacaaagaggcagaacaggcccaaacccgagcccgcaagcagagaccgggagcaaagaggcaga

SEQ ID NO: 189485 - RNA, 75 nt, Homo sapiens
aggccgccggagaggagggcccgcccgcgacagagagcgaagagacgaacacaaagcacagacagccccgcacaa

SEQ ID NO: 189486 - RNA, 65 nt, Homo sapiens
cggggaccccggagcccagaagacagagggcgaggcagccaccggaagagaaaaccaagaacgac

SEQ ID NO: 189487 - RNA, 97 nt, Homo sapiens
aaacaaagggaagccgcaacaagaagcgaagaccgaagcaagagcggcagacggagcgagcggcgccccggcccggccaccaaggaacagagccagg

SEQ ID NO: 189488 - RNA, 71 nt, Homo sapiens
agaaacccacgaaccaaaagggacggacaaaggaacaggaccagacgacaggagccaagaggaaggcagaa

SEQ ID NO: 189489 - RNA, 86 nt, Homo sapiens
ccggaagcccaaggaccccaacaacagcccaccccgggcacgaccaaggaagaaggagagacgaccacgcaacagaaaaagagcgc

SEQ ID NO: 189490 - RNA, 82 nt, Homo sapiens
gaagaagaacagagaagagccagaaacagagacggaacggcaagaacccgaccacaggacagggaccaagcagacacccaga

SEQ ID NO: 189491 - RNA, 75 nt, Homo sapiens
gagcgcggcgcgccgagaaaggccaagaagggacccagacacgacccggagaaaaagccagaccagcgccacaag

SEQ ID NO: 189492 - RNA, 73 nt, Homo sapiens
cccgcggaaaagcaaccaacaaccccacagaggacaggagaaaggcgaaggcaggaggggggcacgcccacgg

SEQ ID NO: 189493 - RNA, 71 nt, Homo sapiens
agagacgaaacacgcaccaaaaacaaaagagagcgcacgaccgcaaaaacggacgcgccggcacaagcgac

SEQ ID NO: 189494 - RNA, 72 nt, Homo sapiens
acggccgggcgagcggcacagccacgccaagaaccggcccagcccggcaggacagcccggccgccgcccgcc

SEQ ID NO: 189495 - RNA, 77 nt, Homo sapiens
gcggcggcgagcggccggggcagaggcgagaggcccgggggccaagccgaccacaaagacccccggcgaaagaagca

SEQ ID NO: 189496 - RNA, 72 nt, Homo sapiens
cagcgaggccaggaacccggggagaccccgacgggaggccgagggccggaaggcgcgagcagcaagcccaga

SEQ ID NO: 189497 - RNA, 38 nt, Homo sapiens
acgccagcccacccacaagaagaaacaagcccaggacg

SEQ ID NO: 189498 - RNA, 79 nt, Homo sapiens
aaagaccaggacggacaagcacagccggaaggaagaaagagggccacggacagaggcgcagcagaggaaccgcagaaga

SEQ ID NO: 189499 - RNA, 60 nt, Homo sapiens
acagagcaaccgccggaaggggacccccaaaagacaagggcaaaacggaccagacacaaa

SEQ ID NO: 189500 - RNA, 61 nt, Homo sapiens
agagaggaccccggacacgaaagccgggaaagaagagagcaaaaaccgaccaggaccccaa

SEQ ID NO: 189501 - RNA, 82 nt, Homo sapiens
ccacgggacagagacggaagaagaccaccccggaagggggcagcaggcccagaagaccgggacacacggaaaagaacccagg

SEQ ID NO: 189502 - RNA, 77 nt, Homo sapiens
cacgccccggcccaagcagcacaagcaaccacagcacgggaagcccaagggacaaccaagacagcagaagaggcccg

SEQ ID NO: 189503 - RNA, 53 nt, Homo sapiens
gaaacggccaccacccgcgcgaaccaagccaacagggaacgacaggggagaga

SEQ ID NO: 189504 - RNA, 73 nt, Homo sapiens
gacaaagcagacgcagggaacgaaacaagaacaccaggaggaagacaaaagagggaagcaccaccacaaaacc

SEQ ID NO: 189505 - RNA, 70 nt, Homo sapiens
gaagaggaaagaagggagccgcgacgaaaccagagagagaaacacaaggaggcccaagggaagagcaacc

SEQ ID NO: 189506 - RNA, 69 nt, Homo sapiens
gcagcccaccgacaggcccggaggcagcagaagggggccaaagggcgagggcacaaaaaaccacacccc

SEQ ID NO: 189507 - RNA, 70 nt, Homo sapiens
ggacaaacaagaaacaaggcacagaaccgcggaaacaacgccgcaagaccagaggaacccgagcaggaac

SEQ ID NO: 189508 - RNA, 79 nt, Homo sapiens
gccaggcccagcagggccacggccaacccgaaaaaaccgggaccagcggagaacaccaccaaacaaacacaaggaaccc

SEQ ID NO: 189509 - RNA, 74 nt, Homo sapiens
ccgaccccgcggagacagcgagacccgccaggagcaaaggcacaacccgaaggaccagaccccaccaaagaccc

SEQ ID NO: 189510 - RNA, 68 nt, Homo sapiens
ccagaggcgaaaggagaaagacacagcaggccaagcaaagagggccaggaaaaggacaggaaccagca

SEQ ID NO: 189511 - RNA, 75 nt, Homo sapiens
aggcacggggagaaggccaggagaaaaaaggagcccgaaagccccaaggaaaaaaagaaagcgaaagaagaccag

SEQ ID NO: 189512 - RNA, 75 nt, Homo sapiens
agcagaaacgcaccaggccaaagaaagagaaagccaacggcgggacaagagcagcggggccccgcccaccaaccg

SEQ ID NO: 189513 - RNA, 82 nt, Homo sapiens
gagcaggagcccgcggccggccagccgaagaggggcggcacccccgccagcgcacgcgagcgaggacaccacaggccccgca

SEQ ID NO: 189514 - RNA, 59 nt, Homo sapiens
ggagaacccgaagcacccccggcgccgggacgcccgccgggcccaccagcggcgccacc

SEQ ID NO: 189515 - RNA, 78 nt, Homo sapiens
cgacacgcaagcaggcaaccgaaacagcggaagccgcagaaggaccggccagaagcaagccggagaacagaaagacaa

SEQ ID NO: 189516 - RNA, 58 nt, Homo sapiens
acagaacaggggaggcagccagggcaggggaccaaaacgaagagaggggaaaaggaga

SEQ ID NO: 189517 - RNA, 70 nt, Homo sapiens
cgccagaggaggccccccagccacggaaacaggggcgaggaggcgggccaggaaaggagggaaaaccagc

SEQ ID NO: 189518 - RNA, 81 nt, Homo sapiens
agagaggaccccggacacgaaagccgggaaaggagccccaagccagaacgacaccgcggagcaaggaaaaaaacccgaccg

SEQ ID NO: 189519 - RNA, 59 nt, Homo sapiens
gggaaggcccgcaccccaggagaagccaggccaccaaagggccaggcagaaaagacagg

SEQ ID NO: 189520 - RNA, 65 nt, Homo sapiens
gaagccaaggaagggacacaccagaaaaggaaaggagcagaacccgggccaaacagcacggcggc

SEQ ID NO: 189521 - RNA, 74 nt, Homo sapiens
gaagccaggacaccgccacaggagggaccagcaccggaggaaccgcaccagacgccggggcccggcgccaccac

SEQ ID NO: 189522 - RNA, 67 nt, Homo sapiens
gaagcccaaggaaacacaagcaggaaccaggagccgcgacccgggcacgccgggccgcccggcggcc

SEQ ID NO: 189523 - RNA, 89 nt, Homo sapiens
ccgaaacgcgagccggagaggagccgcaggagaaggaaccagcggggagaaggcccagcgaaaggaaggcccgaagccacagagcggaa

SEQ ID NO: 189524 - RNA, 80 nt, Homo sapiens
ccgaccaggccaggggagggggcacggccccggccagcccaggacaagaacaaagggcgaaacaagcccacaagagggag

SEQ ID NO: 189525 - RNA, 70 nt, Homo sapiens
gagggaaggccgcagccgagaagcggcggccgccgggggcgccggcgccccgccagaggaacaccaggga

SEQ ID NO: 189526 - RNA, 85 nt, Homo sapiens
ggccccggcgaggaggcgcggaaccaggccgagggggcgagggcgaagacgagaccagccgcgaacggcaccgccgaccgaaacc

SEQ ID NO: 189527 - RNA, 71 nt, Homo sapiens
caccccgggcacccagcccccccgcacaaaagaagagaggagaagcaagcgaagcacacaggaggaagcac

SEQ ID NO: 189528 - RNA, 71 nt, Homo sapiens
gaccaagaaccagaaggcacaaagagcacacggaacgccagggaaggaccaggacaaaccccggacacaac

SEQ ID NO: 189529 - RNA, 68 nt, Homo sapiens
gacgccagaagagaaccacaaggggcaagacgccaagagaaaaggcgagagcacaaagcaccaagagc

SEQ ID NO: 189530 - RNA, 75 nt, Homo sapiens
gcccggagccgcgcacacgggccacccccaaccaggaccaaagacgaccaccaaagccagcccccagaacacgcc

SEQ ID NO: 189531 - RNA, 61 nt, Homo sapiens
cccagcacggggaggcgagaccaacaccacaagcaacaaaagacggcagggaaccggaacg

SEQ ID NO: 189532 - RNA, 52 nt, Homo sapiens
ccgcggacgcgcacgagggacggggaaaggcgaacaagaggcgccagcgggc

SEQ ID NO: 189533 - RNA, 80 nt, Homo sapiens
aaacagaggaagaaaagaaagagaagaagggagccccgacccacaaaagagcgaaaacgccacaacagagggggccaggg

SEQ ID NO: 189534 - RNA, 67 nt, Homo sapiens
gggaagaacccgagcgaagcgggaagaggcgcagacaagccgcaggggccaaccacccagcagcaca

SEQ ID NO: 189535 - RNA, 60 nt, Homo sapiens
cggggagcaaaaccaacgccggccggagcagcagcccgagagaggacggggacgggcccc

SEQ ID NO: 189536 - RNA, 80 nt, Homo sapiens
ccacaggcgggaccagcccacacccaaggagagaaggggcaacaccggaggacagcaacccccaccgaacaaagaaggaa

SEQ ID NO: 189537 - RNA, 79 nt, Homo sapiens
cgaggcgcgcccggagcgcagagaccggaagcacagccccgaggggcgaagccaccaacggaaccgcaaggaagcgaag

SEQ ID NO: 189538 - RNA, 74 nt, Homo sapiens
gcccggagagcgaccaaacacaaggcaaccaccgaaacgggcgaaaaagaagaacagcaaaacacgaaaggcaa

SEQ ID NO: 189539 - RNA, 69 nt, Homo sapiens
ggaagcgagggcacgggcggcagcccgagaccgcagcaggaacaggaaaagggaggcaaagacaaccag

SEQ ID NO: 189540 - RNA, 73 nt, Homo sapiens
gacgcaccaccaccgaggacagagggacacgggaccaggcgggaggcccgaggccccgcaagcgaggcaccga

SEQ ID NO: 189541 - RNA, 79 nt, Homo sapiens
ccaacaacaagagggcaggcaaaagcagaccggaaaacccaccggcaagaccacacccgaggggagcccaggacaccac

SEQ ID NO: 189542 - RNA, 78 nt, Homo sapiens
cgggacgcagccggaggaggcgagggcagagggccaggaccgccgccacggcggccgcaggcccacgccaccccaagg

SEQ ID NO: 189543 - RNA, 77 nt, Homo sapiens
gaccaacaagaggacccaggagaaacgccccaaaggaaagacaaggagccgggccgagaaaccgaaccagagaccag

SEQ ID NO: 189544 - RNA, 94 nt, Homo sapiens
agagagccagagcaacgcacaagaacgaaaccggaaccagacagaaggcagagacccagagaacccaaacaagaccaaaaccacgagcgaagag

SEQ ID NO: 189545 - RNA, 38 nt, Homo sapiens
aaggaccaggccccaagaaggccaagggaggaaaaacg

SEQ ID NO: 189546 - RNA, 76 nt, Homo sapiens
ggaagagcaacgaacgaaccaaggacagcaacagaaacccaagggccaaagccaaagcccaccaagaacgacgcca

SEQ ID NO: 189547 - RNA, 58 nt, Homo sapiens
ggaagcgacaccggaggaagacccacacgaaaagacacggcaaaacaagcagacgccc

SEQ ID NO: 189548 - RNA, 74 nt, Homo sapiens
cagcaacagccccaccgacagcccagagggcccacaggaccccagccagcaccgccccggagccacagcaaagc

SEQ ID NO: 189549 - RNA, 43 nt, Homo sapiens
gccccacagaccagcccagcacaggcgcgcaggcaggcacaag

SEQ ID NO: 189550 - RNA, 81 nt, Homo sapiens
agagacgcaggacaagaggaccgcagggccaaaaaggggggacgcgggcgagaagccgggcagcggaaggaacaccgaagg

SEQ ID NO: 189551 - RNA, 76 nt, Homo sapiens
ccaacccgagggcaaagccgcgaagaaaaccaagaaccgaggaggcgcagccagccagccggcaccaggggggcgc

SEQ ID NO: 189552 - RNA, 81 nt, Homo sapiens
gcgcggggacgggcaggcgaagcagcccccgcggaccagagcgacgccgagaaccggcccagaggagagaagcaggcccag

SEQ ID NO: 189553 - RNA, 81 nt, Homo sapiens
gcggcgggcgaagagcggcagggcccaccgcgaccggcacaagagggccagggaccaggggacgcccaagacggccacccg

SEQ ID NO: 189554 - RNA, 72 nt, Homo sapiens
agcgcgcaacgccaacccaggcgagagcacaggaaccgacaagagaggggaaaaggaccagagcgacgagaa

SEQ ID NO: 189555 - RNA, 51 nt, Homo sapiens
gccaacggaggacccaagcagggcacaggaacaggagcacacacaagaaag

SEQ ID NO: 189556 - RNA, 59 nt, Homo sapiens
cagcaacaagccgcagcgcagcagcgcaacaacagagggcccagaggagacaggggaac

SEQ ID NO: 189557 - RNA, 88 nt, Homo sapiens
gggacgcgcgcgggcacccacggagccccggggcgagagccccgcagggccgccccgcgcgagagcccagccccgccgcgcccgcccg

SEQ ID NO: 189558 - RNA, 83 nt, Homo sapiens
gacaaaggagagaagggacccagcacaaaccacgagaagcaaaaacagaggaagagccaaggacaagaaccagcgagaagccg

SEQ ID NO: 189559 - RNA, 82 nt, Homo sapiens
ccgggcggcccgggggggcgggcgcagcgcggacagcacagcaggcggccacacggcggaggggagagcgaggacgccaggc

SEQ ID NO: 189560 - RNA, 41 nt, Homo sapiens
cccccccaggaacagaagcagagcgggcacaaaccaaaaac

SEQ ID NO: 189561 - RNA, 57 nt, Homo sapiens
ccaacggaggaaaagcaagcggggcacaggaagaacgcgagaagacaagcagcaaac

SEQ ID NO: 189562 - RNA, 72 nt, Homo sapiens
ggagacccggagacagggggggacaaggaggaaggaagaaaagaaagacagagacagagcccaagcacaaga

SEQ ID NO: 189563 - RNA, 76 nt, Homo sapiens
cccaggcgcgcggagagcagagggagaacaaaacagaagaaaggagaaacgaaacaaaaccaacccaaagcagagc

SEQ ID NO: 189564 - RNA, 73 nt, Homo sapiens
aaagcacacccgaaaagcgccaaggaaaaggacgagaacgccgcgacagaaaccccccccacaagagcggaaa

SEQ ID NO: 189565 - RNA, 56 nt, Homo sapiens
aggacgaaaaaagggcaagaagccagaagcacacagccaccagggacggggcccac

SEQ ID NO: 189566 - RNA, 56 nt, Homo sapiens
ccgcggcgagcgccaccgcaggcgagcaggcgacccaaaagagcgaaggaaaacca

SEQ ID NO: 189567 - RNA, 77 nt, Homo sapiens
gaccgggcaagcccagagccgccggaaggcccccggcgcgagacccgccggaggaacaccagccgacagcgaccaag

SEQ ID NO: 189568 - RNA, 85 nt, Homo sapiens
ccccaggggccggcccccccggggcaacccagacggcaacaaaggcgagaccggccgcagagagaacagcccagaaaagaaagcc

SEQ ID NO: 189569 - RNA, 69 nt, Homo sapiens
agccgacccagcagcaaaacaccccacacaacccacgaggaagcggggggcaagcaccggaagcagaaa

SEQ ID NO: 189570 - RNA, 83 nt, Homo sapiens
ggcaggaccgggcggaggccgccaagacgaaacccgcaaagaagcgagccagcaaagaaacggggggacccacgagagaaccc

SEQ ID NO: 189571 - RNA, 57 nt, Homo sapiens
acagaaaaggaggcgcagaccgccgaacggggaaaaccagcgccccacaggaaagcc

SEQ ID NO: 189572 - RNA, 66 nt, Homo sapiens
acgaaaaacccgaaaccggaaaggccggcgggcaaaacacggccgccgaagcaaaaaccccacgac

SEQ ID NO: 189573 - RNA, 55 nt, Homo sapiens
aaagagaagccccggaggagcccaaaagaaacagggcgcaggaaaagacgagcca

SEQ ID NO: 189574 - RNA, 59 nt, Homo sapiens
caagaaggcccggacacagcaaaccgggccacagggcacccgccccgggccaccaccac

SEQ ID NO: 189575 - RNA, 80 nt, Homo sapiens
cacggagccagccgggcccggcagccaaggagggcgcggagccaggccgcgaaaaccacaacgcaccagagggcaagagc

SEQ ID NO: 189576 - RNA, 80 nt, Homo sapiens
ggcgccgccgccgccaggcccagcaaagaaaccccaaagccagcaagaccacagcagcacgcaccagccagcgaaccggc

SEQ ID NO: 189577 - RNA, 77 nt, Homo sapiens
aggaagacacgccagaagcagccagaagcagcagcaaagggcccccagcacaacagaagggcaaagacagcccaaga

SEQ ID NO: 189578 - RNA, 76 nt, Homo sapiens
gaagccacgcaacaggggcaaacgcccagggaaaacgaaacagaaccgccaaaagagccagggccaccaccaagag

SEQ ID NO: 189579 - RNA, 75 nt, Homo sapiens
ggagacagaagaggggcccccacagcggaggaaagcagcacaaagcacacgcaaaagggcggaagacggcagcaa

SEQ ID NO: 189580 - RNA, 72 nt, Homo sapiens
accaaaaagcaaacggaccagaccgaccaccaaaaggaggacaccaggagaacgaagcaaaagcgggccggg

SEQ ID NO: 189581 - RNA, 39 nt, Homo sapiens
cccgagagcgcgaacagaccggcacaggaagcaccgagg

SEQ ID NO: 189582 - RNA, 93 nt, Homo sapiens
gagagggaaggacaacagggacacagaaaccgcaagagcaagaggcggcaccaggacgccgaaaagcgaccggacgcaggcacagggacacgc

SEQ ID NO: 189583 - RNA, 85 nt, Homo sapiens
cgagccgcggcagaggaggcaggcaacccgagggcggagcgaccgcggagacgggccaccagagaacccaggagccgcagacgac

SEQ ID NO: 189584 - RNA, 82 nt, Homo sapiens
gcagagggagaggcggcaaagaagaaggcacacgcagggagaaccggccgagccgaagcggaggaaaccacggacggcaaag

SEQ ID NO: 189585 - RNA, 85 nt, Homo sapiens
gaacgggaacggccagagcacgcagcgagcgagaagaggaggacaacagcacaaccggggggcgccggccgagcccgggaaaacg

SEQ ID NO: 189586 - RNA, 62 nt, Homo sapiens
gaaggagacaagcggaggccaggaacaaagcgcagcccagcccgaaagcagaacgacgccgg

SEQ ID NO: 189587 - RNA, 77 nt, Homo sapiens
gcccagccagcgcagcaggagaaccagcagaccaagcaccaaggaaagaaagaggaagccaaaccgaggagaacagc

SEQ ID NO: 189588 - RNA, 83 nt, Homo sapiens
ccggagggggaccacaagacccacgacagggcggaaaacaccccaaaagccaaaagggaaaggaaaagaccaacaacagcgca

SEQ ID NO: 189589 - RNA, 64 nt, Homo sapiens
ccccacccgcccgagccgggagcacagcagaaggaaggaagcagccaccccgccaggccccccg

SEQ ID NO: 189590 - RNA, 82 nt, Homo sapiens
agcaaaaaaagagcccgcaagaagaacagagacagcagccaaacccccagacaggagacagaccacagagcaaggacaacca

SEQ ID NO: 189591 - RNA, 80 nt, Homo sapiens
gggcaccgagcagaagggcgaagaaggcaacgcgaaaggaggcacaccagaggcagaaccacaacccacccaaggagaag

SEQ ID NO: 189592 - RNA, 82 nt, Homo sapiens
acaggggcgacggcagaggagaagacgggacagacagagaagcacgggagcaggcaccagcaaccccccggcggaacacccg

SEQ ID NO: 189593 - RNA, 64 nt, Homo sapiens
gcagccagagcggaccggggcagaccaaacggcaaggaggagggagacaggggcaaaaaacggc

SEQ ID NO: 189594 - RNA, 72 nt, Homo sapiens
gccggccgggccaggaagagcggagacggaggaggggccggcgggggacgagcagacccaacagaggaagcc

SEQ ID NO: 189595 - RNA, 73 nt, Homo sapiens
cccgaacgcgaggccaacagccccgagccaaacgagcaagagaagacagagagagggaggaaggacaagacag

SEQ ID NO: 189596 - RNA, 76 nt, Homo sapiens
cacaaaaagggacggggccaaaaagaacagggaagaaaacgccagagaagcagagcagcccggagcgaggggagac

SEQ ID NO: 189597 - RNA, 80 nt, Homo sapiens
ccagcagaggaaaaaagaacacagggagcgagaacgggccaggcaggaaggccgaagaccccaagaagagagagaagaac

SEQ ID NO: 189598 - RNA, 71 nt, Homo sapiens
gcacaccgccaaacccaggccagagcacagggcaaacgaagaaaacgacccagccagaggacaaaggaccg

SEQ ID NO: 189599 - RNA, 52 nt, Homo sapiens
gcaacagaacagcccacccaaacaagaacacgggaaagacaccccagggaca

SEQ ID NO: 189600 - RNA, 86 nt, Homo sapiens
gagaagcgggaccgcaagaccggacggaggggggcggcccacgggaggcaggaaaagaagccagaagcccccaagcgccaagaaga

SEQ ID NO: 189601 - RNA, 38 nt, Homo sapiens
gaacggcacacgcgagcgggcagcggggaagaagaaaa

SEQ ID NO: 189602 - RNA, 72 nt, Homo sapiens
acgccgagacaacgcaaaaaggcaccacccccaggaccgaaccaaaccacggaaacaggcacggccacagaa

SEQ ID NO: 189603 - RNA, 65 nt, Homo sapiens
cggcagccaacaacagccagggaaggggaagccggcacaggacgggggcaaacccgaccagccac

SEQ ID NO: 189604 - RNA, 88 nt, Homo sapiens
gcagaccgaaagccggcggagaggaccggagcggaaaacccgaaaggcagaaacggggacacaagcgaaaggcaacggcgcacagaac

SEQ ID NO: 189605 - RNA, 57 nt, Homo sapiens
cacccaacaagacaccggacaagacccgggcgcccacaagccgcccggcgcccccca

SEQ ID NO: 189606 - RNA, 62 nt, Homo sapiens
agaggagcggagcgccagggggccacaggaaacaaacagaagcgcacgagaacccaggccgc

SEQ ID NO: 189607 - RNA, 59 nt, Homo sapiens
aaccagaagacgaacaaacagcaagaaagaccacaagaccaacccggaggaaagcccag

SEQ ID NO: 189608 - RNA, 42 nt, Homo sapiens
gcacggaagagacgcccccggcaggagagggcgaggagccag

SEQ ID NO: 189609 - RNA, 59 nt, Homo sapiens
cagcgcccagcagcgcaggccgggcccgggaggagcaggggcagaggggagaacccagc

SEQ ID NO: 189610 - RNA, 78 nt, Homo sapiens
gacggaagcaagaggcagagcagccaccggaaggccgcgggggaaggaggacgcagagagggcacacggggcgaagga

SEQ ID NO: 189611 - RNA, 77 nt, Homo sapiens
ggaaccccagcagcaccacaagacacaacaggaaaagcagcaaaagggaaagcaaggggaagggcccaagaagacac

SEQ ID NO: 189612 - RNA, 69 nt, Homo sapiens
ccagaccccggcacccaagagcagccagggcaggggagcacccagccaaacccaggcccgagaagaaga

SEQ ID NO: 189613 - RNA, 64 nt, Homo sapiens
agaaaaagccggccagggcggaaaaagggggagaaggggagaaaaggaggacaggacgaaaacg

SEQ ID NO: 189614 - RNA, 37 nt, Homo sapiens
caggaagaagcagcaaaaggaaacacgagccagccaa

SEQ ID NO: 189615 - RNA, 81 nt, Homo sapiens
agcacgaggaggcgcgaggagagccccaagagacgacagaaaggcagagaaggaaaaaaggaccagagacggagcaagaac

SEQ ID NO: 189616 - RNA, 79 nt, Homo sapiens
gggggacgcggggacaccacaagcacgggcccgaccagcccggccaggcagcccaccgccccacgcgccccccgaccac

SEQ ID NO: 189617 - RNA, 79 nt, Homo sapiens
agcagaaagagcagaaaggagggggcgagaaggcgggaagccgaaggcagccacagagcggcaggcggggcagaagaga

SEQ ID NO: 189618 - RNA, 60 nt, Homo sapiens
acagacaggaccacgcaaaggaggaccagaaaaacaagacacacggggagaagacgaagg

SEQ ID NO: 189619 - RNA, 61 nt, Homo sapiens
ggagcagagaggagggcaaccagaccaaggcagcggaagggagagaccggggacagggcgg

SEQ ID NO: 189620 - RNA, 53 nt, Homo sapiens
agcccaacccccaagccaagcagcaggaagacgagggccaggcgccggcagga

SEQ ID NO: 189621 - RNA, 68 nt, Homo sapiens
cccagaaggacccagagggaggaagaaaagccccgccggagggcaccaccaagggcggaccgaaggga

SEQ ID NO: 189622 - RNA, 77 nt, Homo sapiens
gcccgacgcccgcaggcccgcgggcgcaccggcgacgacgagaaaacaagggagaggcgaccgggaacgcgcagccc

SEQ ID NO: 189623 - RNA, 81 nt, Homo sapiens
gggaaaggcgacggcgaaggagcggcggcgcgcggggaaacgggagacgagagagaaaaaaaagaggaagcagaagaaaac

SEQ ID NO: 189624 - RNA, 68 nt, Homo sapiens
caaggaccacaaggagggaccagccagcaaagacagagaggaagaagagagggcgaaggaggccacac

SEQ ID NO: 189625 - RNA, 63 nt, Homo sapiens
cgcccacggcaaaggggacgccgggccccagacccggcccacggagagccgcaggagaaggcg

SEQ ID NO: 189626 - RNA, 35 nt, Homo sapiens
agggacgacggaccgaaaagcggaagccgcagaag

SEQ ID NO: 189627 - RNA, 77 nt, Homo sapiens
gcgcggaacagggccgccaggggcccccccagaacagggagcccagaaagggaagccacacaggccggggaagaagc

SEQ ID NO: 189628 - RNA, 83 nt, Homo sapiens
gagacggcccggccagccagggaacagcccacccaacaagacaccggacaaggccaggagaaggaaggagcaggaggccaagc

SEQ ID NO: 189629 - RNA, 84 nt, Homo sapiens
gcgggaacccaccgccaccagcgcgggcgcgggccaagcggagcccaaacacgcgccgcaccagagcggcgggaccagggacag

SEQ ID NO: 189630 - RNA, 77 nt, Homo sapiens
ggccgggaaccaccgcaggggcgggacaggagaaacaggccgccaggccgaggccccagccagagaggggcaccgga

SEQ ID NO: 189631 - RNA, 87 nt, Homo sapiens
acggaggcacggaggcggcgcgagagggcagaggagcggcggagagcggccgcgggcgacgggccgaggacaccagaggaccagaac

SEQ ID NO: 189632 - RNA, 69 nt, Homo sapiens
cgcaggcaagacggacccagggggagcgcaaccccagaagacgcagagccagaagacgcaaaagcggca

SEQ ID NO: 189633 - RNA, 56 nt, Homo sapiens
aagaaacaaacggagagagcacacacaacgaccaagccaaggaccagccaaagaaa

SEQ ID NO: 189634 - RNA, 72 nt, Homo sapiens
gagaggaagcaaacgcggaaaggaccacccgccggacagcaaggaccagcaaaaggaccggaccaagaagaa

SEQ ID NO: 189635 - RNA, 68 nt, Homo sapiens
accaggacgcccccccacccccccccaagaaacaagaaacgcccggaacaaacacccaaagcagccag

SEQ ID NO: 189636 - RNA, 100 nt, Homo sapiens
ccacagaacaggacaagacaaggccgacgcagacacgggggaaacaagaccagagaacaagagggagggacgaagcgcacagcaaacagcgcacggcgga

SEQ ID NO: 189637 - RNA, 104 nt, Homo sapiens
gacccgcgggcccaagcacaccggagcaacaaccggcgggccgaggccgcaggaggagggagcccccccgccaccagcccagccgacccggagaggaaagccca

SEQ ID NO: 189638 - RNA, 80 nt, Homo sapiens
gagcgggcggcacgcacgcaggccagcggaccccagggaagcacacccgggccgggaccaggacgggagcggccgaccgc

SEQ ID NO: 189639 - RNA, 84 nt, Homo sapiens
cgggagcgggccgccgaagcagcgcgcccgggccacccccggaccccggagaagcagaggaaaagaaaaccagacgagagacag

SEQ ID NO: 189640 - RNA, 75 nt, Homo sapiens
gacagggaggaaggagcggaaggaagccagaagaagggaaccccaccaccgacggaccaagcgcacaaacagaca

SEQ ID NO: 189641 - RNA, 78 nt, Homo sapiens
cccgaagaggaccagggagggaaaagcagacccaagcggagggcgacacgagaacaaaagggagaccaaagaggaagg

SEQ ID NO: 189642 - RNA, 74 nt, Homo sapiens
ccgccgaaaaagagaaggccgcggcgagccgcacagggcaacacacgcaccgcacggcccccgcccacaaagcg

SEQ ID NO: 189643 - RNA, 105 nt, Homo sapiens
ccaaaggaagaagcgaagacggaaacgaggaaaccgggaaagccaccgaaaagagggcaggaaagacaaccaggcaaggaaacaccaaaagaggaaggcccgaaa

SEQ ID NO: 189644 - RNA, 66 nt, Homo sapiens
ccagcggaaacccggagaacggcgagaaggaacgaagaaacaaccacggaacaacagacagccacg

SEQ ID NO: 189645 - RNA, 80 nt, Homo sapiens
aaggacaacgcagaccggcccaacccgaccagaaggaccgacgcgggaaagaaaaacgagaggacacagagcaccaacac

SEQ ID NO: 189646 - RNA, 72 nt, Homo sapiens
aaaccccccagagaagaaagacaaaagaacgaagggagggaaacgcggaccacgaaaaacacacaacacgac

SEQ ID NO: 189647 - RNA, 68 nt, Homo sapiens
cgacaccagaggagaagacgagcagaaggggggagacacagccagagcgaggaaaacccagcccggac

SEQ ID NO: 189648 - RNA, 113 nt, Homo sapiens
ccgcgagacgcagacggagggagggagagcccacgacagaacgaaaagaaaggaccccaggccccaacgggaccggaggcgggcaaccacggggccgggagagcggaagaaga

SEQ ID NO: 189649 - RNA, 62 nt, Homo sapiens
caaggcgaggcggaaagaggaaccaagccgccacagggagaaaagagcagaggccgacccca

SEQ ID NO: 189650 - RNA, 76 nt, Homo sapiens
agcgcggcccgaggcccgcccagagaaaccccaccacgcggcaggggccgccgaggaaaaagcaacaagaagaaaa

SEQ ID NO: 189651 - RNA, 64 nt, Homo sapiens
acccagacaagggacaggggaccccaaaaagcccggcccacgcacgccagagaagcacccacgg

SEQ ID NO: 189652 - RNA, 88 nt, Homo sapiens
aggaaacaaaaaccgaggcaacaaaacaagcaagagggaaacgccaaaggaagaccagaccccccccccggggacccgagcagccagc

SEQ ID NO: 189653 - RNA, 57 nt, Homo sapiens
gccacaacccggggacagaggaaagcaagaacagagcaacagggaaggcagaagcgg

SEQ ID NO: 189654 - RNA, 59 nt, Homo sapiens
gcggaaggccagagcaaagccaagcagccagggaagcgcagaagcagaaagaggaagag

SEQ ID NO: 189655 - RNA, 79 nt, Homo sapiens
cgacagccgccacgaccacccccggaccggcagagcgcggaggccgaaccccgaaggaaaggggggccgaagaagccag

SEQ ID NO: 189656 - RNA, 41 nt, Homo sapiens
cgcccaggcccgcgggcccagacgagccaaaccaggcgacc

SEQ ID NO: 189657 - RNA, 71 nt, Homo sapiens
acacaacacggaacaagagaaacgccaaagggccgagcaccacagacagcgcgccccccgggccggccccc

SEQ ID NO: 189658 - RNA, 34 nt, Homo sapiens
ccaaagaccagcccagaccaaaccaggcaagaac

SEQ ID NO: 189659 - RNA, 84 nt, Homo sapiens
aagaaggcaccgcaagccgccccggccacgcgggacggaaccaagaaggagcgagggaggagcagcgagacagcaagagacgac

SEQ ID NO: 189660 - RNA, 78 nt, Homo sapiens
ggaccagacaacaaggccaggcccaacacccggacagggacgggagaggggcagaacaacacggaggaaaccaccgag

SEQ ID NO: 189661 - RNA, 59 nt, Homo sapiens
agaaacgcaaaaaggggccagaggacacacacaagaaaccccaccacgcggcaggggcc

SEQ ID NO: 189662 - RNA, 70 nt, Homo sapiens
ccggggaggcaccgacgaggagcacagaagacggcggaggagaagaaaggccagagcccaccaggcagca

SEQ ID NO: 189663 - RNA, 70 nt, Homo sapiens
aacgagcccccaccccggcaagaaaggggcgacgagaagagcaccccccagagcaccgacccaccacaag

SEQ ID NO: 189664 - RNA, 74 nt, Homo sapiens
caacagacaacaagagcccaaacaagaggacgaaccaagagcgggcacccacacccaaagccaggagaagccca

SEQ ID NO: 189665 - RNA, 76 nt, Homo sapiens
cgcacgccccgacgcaagacgcccggcccggggcgaaccgaccaagaacaacacccagagggccaggagaaggcga

SEQ ID NO: 189666 - RNA, 79 nt, Homo sapiens
acagcgaagccacccagcgccgagggaaggcgccgcgccaggccggggggcggagccaagacacccgaacccgcccaaa

SEQ ID NO: 189667 - RNA, 79 nt, Homo sapiens
agacaaaggacaaaaccaccaaaaccaaggcacacagaaagcccaagcagacccccagcgaacaacccagccgccagcc

SEQ ID NO: 189668 - RNA, 59 nt, Homo sapiens
aaaacagcaaggcaagagcaacagaacacacgagaggacgccacaggcacacggacacc

SEQ ID NO: 189669 - RNA, 79 nt, Homo sapiens
agcgggagacagcgggacaggagcagcggccgggagcccagggaggcagaaccggccacgagaaccaagaggagcgagg

SEQ ID NO: 189670 - RNA, 82 nt, Homo sapiens
aggacgaagaccagcgccagggaaagaaggagaagaaagcgaggacccagggccacacgaacgccccgaccgcacgggccag

SEQ ID NO: 189671 - RNA, 68 nt, Homo sapiens
caagacaaagcagagaggaggggcaaaggaggggaggcagcaagcacccaaagaggggcaggcacgga

SEQ ID NO: 189672 - RNA, 81 nt, Homo sapiens
gccccgagcgccgcggacgcgcacgagggacggggaaagaccgggaacagccaggagggacgcgagccgcccgaccggagc

SEQ ID NO: 189673 - RNA, 68 nt, Homo sapiens
gcacagcacgaacagacagaaagcaccacagaaagggacagaagaaagggagcccccaagaacagcga

SEQ ID NO: 189674 - RNA, 82 nt, Homo sapiens
ccgggcccacaggccaggaaggccggcgcggaagaggccggcggcgggacggccccacgggacccgccccgaccacagcagc

SEQ ID NO: 189675 - RNA, 84 nt, Homo sapiens
gcgacgcggggccaggcaggacccaacgacaggcgccccggcccaacgggcagagcggcgggaaaccaccaacaacacccccaa

SEQ ID NO: 189676 - RNA, 57 nt, Homo sapiens
acacaagcgaaggcgcgcaccggaagcaccagcgaggaagacccaacagaggaagcc

SEQ ID NO: 189677 - RNA, 63 nt, Homo sapiens
cccacgagaggcagcgccaggcggagcagaccaccgggacccagaagaccccagacggggagc

SEQ ID NO: 189678 - RNA, 79 nt, Homo sapiens
caagaggccacggcgggggcaccgagaagccccgaccgacgccgagacacaagccccaaggggaagcacccggacccga

SEQ ID NO: 189679 - RNA, 79 nt, Homo sapiens
cgcacgcaccacgacggcgccacaccgagcgcgaggcgcggagagcaacgccgggacagcgcaaggcgcagcaacccgg

SEQ ID NO: 189680 - RNA, 71 nt, Homo sapiens
aggggagcccgcgcccgccgcgggagagaggacccccccccccccccaagagaggcacgaaaaaacaagac

SEQ ID NO: 189681 - RNA, 73 nt, Homo sapiens
gcccgggccacgaggacgcaccagggcagcagcgccggagcagcaccaaggagaaagggccagcaacgcgcca

SEQ ID NO: 189682 - RNA, 64 nt, Homo sapiens
gaggaagagggagaaaaaagcagcccagcaggacgggccagcggcagggcgccgaaaccccgga

SEQ ID NO: 189683 - RNA, 78 nt, Homo sapiens
gcagcaaccccagaaccagcggggaacagcccggccaccaagccaaacagaggcagaagcaaccaggaacggccagca

SEQ ID NO: 189684 - RNA, 89 nt, Homo sapiens
gccggaccaggggggcgcgccacggcgacgccccagcccgcccaaagaaagaaggaggagcagcaccaagccaaagcgggaccgaggag

SEQ ID NO: 189685 - RNA, 79 nt, Homo sapiens
agcccacacccccggccagccggcgccggagcgaaacacgacggaaggcagaaccaagagagcagaaccggcaacacca

SEQ ID NO: 189686 - RNA, 76 nt, Homo sapiens
ggcagcgcgggacccagcccaggcggcgcggacggggcggaccagacccacaccggggcagggccccacgagacac

SEQ ID NO: 189687 - RNA, 72 nt, Homo sapiens
cccccgaacgcccacacacccacgcgggcgaaggcgcaggaagaagggaaggaagcccaaagagacaaaaag

SEQ ID NO: 189688 - RNA, 74 nt, Homo sapiens
gggagcaaacggagcgagcccagaagcacgagagaaacagaggacgaccgggaggacaagaagaggaagaggac

SEQ ID NO: 189689 - RNA, 81 nt, Homo sapiens
ggacacaacggcagaccgcagaacacccagccagggaagggaaaaggccgaggcacagcgggaagaccgcaaagacgaccc

SEQ ID NO: 189690 - RNA, 82 nt, Homo sapiens
cgagccgcacgccccgaggaagcgggagggaccacgggcggagacgagccgaaaaggaagagcagccgaggagaggaaagcg

SEQ ID NO: 189691 - RNA, 76 nt, Homo sapiens
cccagccccgaagcgggaacagaaaagagcaccggccagcagaaccagccggggccggcaagccccgcccaagaag

SEQ ID NO: 189692 - RNA, 77 nt, Homo sapiens
aaacagcagacagaagcggaagaggccaagaggcgggaaggagcagcacggcccaggcccggggagcggaagaccag

SEQ ID NO: 189693 - RNA, 103 nt, Homo sapiens
cggaaaccacggagacgcagggccagagaggcagcagaagcgcaacaaacgagcgcgagagccaccggcggcccccggaagacgccccacaccccgaaacggc

SEQ ID NO: 189694 - RNA, 79 nt, Homo sapiens
agcccagggaagcagccgaccagccgcggagccgggggcaggcagccggcgaggggggagcccagcaggagcgggaaaa

SEQ ID NO: 189695 - RNA, 56 nt, Homo sapiens
cggaaacagcaacacaaaggaaaccggaagagaagggagcaaagcccagaaagcaa

SEQ ID NO: 189696 - RNA, 71 nt, Homo sapiens
ggacaagggcccagcagaacaggccagagaggcagaagaccaaacagaagcgcaggacaaaacggaaagca

SEQ ID NO: 189697 - RNA, 77 nt, Homo sapiens
cgcacccagcccacacggccggcaggcggagaaagcaaaccccacgagaacaaagcacggcagaaacggaaaaaaac

SEQ ID NO: 189698 - RNA, 103 nt, Homo sapiens
ccccagccacccaggccccgccgcccgggggcgccgcccaccgcgcccgccgaggcgggaggcggcagaagcagccagaggagggcacaggcggcgcggagcg

SEQ ID NO: 189699 - RNA, 80 nt, Homo sapiens
cggcgggcggaggagcaaagaagggcggccagagggacaacagagaaggagcgcgcacgaggcaaccacacaacaacaca

SEQ ID NO: 189700 - RNA, 77 nt, Homo sapiens
ccccggcagcagacacagccacgcacgaccgggggcgggaagaagcccgccgccaccaccccaccaccagcgcagca

SEQ ID NO: 189701 - RNA, 78 nt, Homo sapiens
ggacccggccccggcccacaggggggggcaaacccgagagaacgggcccaggaggagcgaagaggaaaaaaaacagga

SEQ ID NO: 189702 - RNA, 68 nt, Homo sapiens
ccccggagaaaaggccaagaaggcaggaggcaagcgccaggaccgcggggggcgagccgccgcgcccc

SEQ ID NO: 189703 - RNA, 71 nt, Homo sapiens
ggggcgcgcggcgccggcggcgcgcgacccccgcgcagggacaagagaaaaaaagggcgggcgaacaaaaa

SEQ ID NO: 189704 - RNA, 84 nt, Homo sapiens
gaagaggcgcggccggaggaaaccaagacagcccaaacgccccacgaccaggacgaaaccccgacccccgagacacgcgcaaga

SEQ ID NO: 189705 - RNA, 107 nt, Homo sapiens
acaccgcgcccggaagcccgcggccggaggagccgcaggggcccggacaaggagggcgccggccgagcccgggaaaacgacagcagcagcagggccggaagacgcca

SEQ ID NO: 189706 - RNA, 38 nt, Homo sapiens
gggacgaagcgagagaagaacaccgagagagaagaagg

SEQ ID NO: 189707 - RNA, 80 nt, Homo sapiens
gccccagagaaaaacggcagagacagcgccagaaccacggcaaagaacagaacgaaggggaagaacaccgagaaagcgca

SEQ ID NO: 189708 - RNA, 64 nt, Homo sapiens
gcggacccagacagcgaccccagagaagaaagccaaggacacgcaggacgaagaaggaggagag

SEQ ID NO: 189709 - RNA, 51 nt, Homo sapiens
cgccccccccggcgggcgccaggcagcaggggagaagcgcagcgccaaccc

SEQ ID NO: 189710 - RNA, 78 nt, Homo sapiens
ccccagcagcagcagaccaagcgcccacacccggaggccaggccacaacggccagccgccgaggaggagacaaggcag

SEQ ID NO: 189711 - RNA, 94 nt, Homo sapiens
agccgcagccagcccccaacccggcagcagggccggaaagaacacaggcacgaccaagacaaacccccggggcgcccaagagcgcaggggaacg

SEQ ID NO: 189712 - RNA, 79 nt, Homo sapiens
cgagcccagcgcgcagcccggaccagccaagccccaacggcccccgcgccgggcgcagcgagcaagcccccaacaccag

SEQ ID NO: 189713 - RNA, 71 nt, Homo sapiens
caagaacaaaaggagccacagcaaaaagccacgccacaacaaaggagagccagagcgaacccaagacgggg

SEQ ID NO: 189714 - RNA, 76 nt, Homo sapiens
cagggcggcggcgccagcgagagcggcggggaggaaagagagacgggacgggagaaggaccaaaacaaacgcagga

SEQ ID NO: 189715 - RNA, 75 nt, Homo sapiens
agaaccaaagaagcaaaacacgagccaggcccggcaaaggccaacagcaaaaaagcaaggagaccggggagcgaa

SEQ ID NO: 189716 - RNA, 65 nt, Homo sapiens
cagcaaccaccacccaacagcacaaaagacagcaacaaaaccaggaaacagagcggaaacagaca

SEQ ID NO: 189717 - RNA, 36 nt, Homo sapiens
cggaggggaacgggacccgagaccgacaaaaaggag

SEQ ID NO: 189718 - RNA, 74 nt, Homo sapiens
gaaagaaggcccaaagagcagaacagagagacagccagcccagaccagcacgagacagcggaaagaagaaaaac

SEQ ID NO: 189719 - RNA, 61 nt, Homo sapiens
cgacaaggggcccgaacagagggacaagggaggcgaggacggacaaaaggaaacggacggg

SEQ ID NO: 189720 - RNA, 78 nt, Homo sapiens
aagcgacgagccgcgaggaggggccagagaacaagcccagacagcaagacgcgagcgcaggggaccaggcagaggagg

SEQ ID NO: 189721 - RNA, 79 nt, Homo sapiens
gggcggcgccgcgcggccgaggacacgagggcccagcagcagcgaacagagagagggaagagaaaccagagagaagaag

SEQ ID NO: 189722 - RNA, 74 nt, Homo sapiens
cagaaaggcagcagcaagagaaaccaaaaaacccagacagaaccggccaagccaagcaagcgccaccgggggcc

SEQ ID NO: 189723 - RNA, 76 nt, Homo sapiens
cgagcagacacgaaggcccccaccccggacggagaaacaggcggaccaaaccgccgcggacaaaccggcgaccaca

SEQ ID NO: 189724 - RNA, 82 nt, Homo sapiens
gcagggccgacaccgagcccgcccgacccgggccccaccgcccccagcgcaccaggccgcacaccagaggacgggaacccag

SEQ ID NO: 189725 - RNA, 70 nt, Homo sapiens
ccagagacacggggggaacgacgaacagggcaaaccgcaggcacaacacaaggacagggcagaccgccag

SEQ ID NO: 189726 - RNA, 89 nt, Homo sapiens
cagaggccggaggagcggacggagcggaagcacaaagccgagcagggagaggaggaagaagcgagaagcaaaggagcacagaacgagga

SEQ ID NO: 189727 - RNA, 85 nt, Homo sapiens
aggagggcccagggagaaccaaaacgagacggacgccaccagcgcacagaagagcggaggaggccaaacaagcccgaaacaggac

SEQ ID NO: 189728 - RNA, 82 nt, Homo sapiens
aacaggcagccaacacaacaacaacagcggaaaacagccaaagagcggggggggaagaggaggaggcgcccgacacgacaaa

SEQ ID NO: 189729 - RNA, 95 nt, Homo sapiens
cacaccagaggccggccgagaaaagaccaaccgagaagccgaccaaaccaagacgaaagccgaccgagcaaagagagaaacgaagcagacagaac

SEQ ID NO: 189730 - RNA, 75 nt, Homo sapiens
cccagcagcccaggggaaaggaacacccccagcggccaggcaaggacccacagaccggcgacacaagaaaacaac

SEQ ID NO: 189731 - RNA, 73 nt, Homo sapiens
gaccacaagcaaggaggccgcaaagggcacgaagcaggaaagaacgacgccagggagacaagccgagaccacc

SEQ ID NO: 189732 - RNA, 75 nt, Homo sapiens
ggggcagggggaggcaaaggaggaagaggaaaggggaggagaggaaagaaggagcaaagcccagggaaaaggacg

SEQ ID NO: 189733 - RNA, 90 nt, Homo sapiens
ccaaagaccagcagaaggaagccaccaagaagggcaaagaaaaggagccagggacggcccccagacaaccagggccgaacggccagcccc

SEQ ID NO: 189734 - RNA, 84 nt, Homo sapiens
cgggagagccgggccggcggacgcggcgccacgcagcagccacacgcacagacgccgggaccggaaagcagcaagcccgagaaa

SEQ ID NO: 189735 - RNA, 52 nt, Homo sapiens
gcaggacgcagaaccaccaaaagccaagaaacgaacgcggaaccccagagag

SEQ ID NO: 189736 - RNA, 76 nt, Homo sapiens
cggccgccggcccaaagaacacacgcaggacgaaagagacaaaagccacacgagaacaggaacagaaaacggcagc

SEQ ID NO: 189737 - RNA, 79 nt, Homo sapiens
agaagcggcggccgacgcaggcacccccagcgcgccggcagggcgcgaaagaaaaacccggaaagagagaaaccaggaa

SEQ ID NO: 189738 - RNA, 71 nt, Homo sapiens
gcgagcagccgggagacaccgccaccgccagaaccgcccagcgcggggccaccaggccgcaaacgacaccc

SEQ ID NO: 189739 - RNA, 77 nt, Homo sapiens
ggaccccagggcagcgaagcagagccgagcccacccgaccagggcccggcacccagcagaaggacagaaaagagaag

SEQ ID NO: 189740 - RNA, 81 nt, Homo sapiens
gagcacccgcacccggagggaaacgggcaagaggccccagcccggaaaaggaggaaaccccccaggcaagaggcgcaggac

SEQ ID NO: 189741 - RNA, 41 nt, Homo sapiens
gggacaccggcccaacacagcccccagacaggccaacaagg

SEQ ID NO: 189742 - RNA, 86 nt, Homo sapiens
ccggaaccggacaaagccgcgaaaccaagggacacagagagagcaagggccagagaaggaggagaaggagacaggcggcaagcagg

SEQ ID NO: 189743 - RNA, 123 nt, Homo sapiens
cgaaacccagagcaagcccagcagcaagaggagagccaaccagcaagagacagagcagacacaggccagaggacaccagagacccagcccacccccgcgcacgaggagacagagcaccacacg

SEQ ID NO: 189744 - RNA, 76 nt, Homo sapiens
ccgagggggagcagcgcggggccgggagcaccggggcccgcacgcggaggacagcccaaggcggaaaagcgaagga

SEQ ID NO: 189745 - RNA, 81 nt, Homo sapiens
gccaagagcgaggagccgcacgcaggccagcggggcggggacgagcagccaaaggcacgacgcccgggaagagggggagcg

SEQ ID NO: 189746 - RNA, 73 nt, Homo sapiens
ccgaggccgacaaaaagaacgggcagcccagggaaaccggcaagcagcccagccgagcagccccagaccgcgc

SEQ ID NO: 189747 - RNA, 87 nt, Homo sapiens
ccgaaaccagccccggacgagaagcgcagcaacggcgggggaccacgagagcgccaagccgacgccagcgggcgccacccaacaggc

SEQ ID NO: 189748 - RNA, 63 nt, Homo sapiens
cgcaagcgcccaaagccaagggaacaccggcaagaggaccgagcgaaaaaaaacgaaagagaa

SEQ ID NO: 189749 - RNA, 50 nt, Homo sapiens
aagagcagaagggacgagcgcggacacagcaggggccagacaaccagacc

SEQ ID NO: 189750 - RNA, 77 nt, Homo sapiens
acggccagaggaccaggcgaccagcaccagcccgaccagacaccaaagaaaccgccacccgagaaaacaggaaaaaa

SEQ ID NO: 189751 - RNA, 80 nt, Homo sapiens
aggaaagcgccaaaccagggcaccgaaggggaagagcaagagcagcagggagccgaagaggagagaaacagagaagacaa

SEQ ID NO: 189752 - RNA, 61 nt, Homo sapiens
ccaaggggacaaaccaacagaagggcaaccagccgaggccgccggagccccagacaccccc

SEQ ID NO: 189753 - RNA, 82 nt, Homo sapiens
cgccgcgccccgacaagcccgcaggagcgcggcggcgaagcggagagcaccggggggaggagaggccacccccgaccgggga

SEQ ID NO: 189754 - RNA, 62 nt, Homo sapiens
aaagagaggagggagaacacagaaacccgccccggagccggaaaacagcacagaaacgggcc

SEQ ID NO: 189755 - RNA, 81 nt, Homo sapiens
cacgaccccgacgcgagaagcaaaacccggacaaccagcggggcacaacaagggcacaacagagccaccccaccaccccca

SEQ ID NO: 189756 - RNA, 79 nt, Homo sapiens
ggaagggccggcccccgggccggcggaggcagagcacaggccggagagcaccaccagggcagaaaaggcaaaggaaagg

SEQ ID NO: 189757 - RNA, 55 nt, Homo sapiens
acagggacccagcaaaggagagcaggagaaaaacggcagcagccgaaagaaaacc

SEQ ID NO: 189758 - RNA, 67 nt, Homo sapiens
gaagggccggcccggagggcagggccgacaccacaacgggcaggaggagagaaagaacccacgcagg

SEQ ID NO: 189759 - RNA, 82 nt, Homo sapiens
aacaggaagagaagaggggccccagaaacagcacggagaaagagagacgcaaggaccgaagcccagacaacaacaccgagcc

SEQ ID NO: 189760 - RNA, 105 nt, Homo sapiens
gcaccgcgcccggagccacgccccacgcacgcaccaaccgaggcaacggcacaggcccccggagggacccagaagcccaggccaaggcaagcaacagaaagagag

SEQ ID NO: 189761 - RNA, 88 nt, Homo sapiens
agaccggaggagaggccggacggcgcgggcgccggcgaggagagcccgcggcgcagcccaccgggggacggcacggcaggcggacgcc

SEQ ID NO: 189762 - RNA, 52 nt, Homo sapiens
cagaaacaggacgaaaaaagggcaagaagccagaagagaagccccagagggg

SEQ ID NO: 189763 - RNA, 79 nt, Homo sapiens
ccggccaggaacagggacagcacccaccccggagggggaccacaagacccacgacagcaagagaaccacccaaaagacc

SEQ ID NO: 189764 - RNA, 70 nt, Homo sapiens
cccacagaggccaaggcaagccagagaacacccgccgcgcaaaaggcacgcagcacgggggcaggggccg

SEQ ID NO: 189765 - RNA, 68 nt, Homo sapiens
gaacggcgcagcggacaaggaaggaacacaacaaagcaagcacagaagaggagagcgaccccggccgc

SEQ ID NO: 189766 - RNA, 82 nt, Homo sapiens
cggggccgcacgggacgccggcacgcgaagggccgcaccgcaagcgcaccccccggaggcggccgagcccacgcgacgaaga

SEQ ID NO: 189767 - RNA, 78 nt, Homo sapiens
gacggacacccagcggcgacacgcgacgcgccaaaacccgcccggaaaggggacaccgagcgcacaaaaggagcggag

SEQ ID NO: 189768 - RNA, 78 nt, Homo sapiens
ccggccgggagggcccagggcggggcccgagaaagggcagcaagacacgaagccgagaaagagcagcgacaacaagga

SEQ ID NO: 189769 - RNA, 83 nt, Homo sapiens
ccagagaggagggagccgggggggcggagcagccagaagggaggccacgaagcaggcccgaccagcgggcgacgcggaaacca

SEQ ID NO: 189770 - RNA, 75 nt, Homo sapiens
gcagacggaaacaaggcaacagaaagagcaacagcagggcaacagaccccagaacggaccaacaccccaggccag

SEQ ID NO: 189771 - RNA, 70 nt, Homo sapiens
acagcagaggggcaaggccaagggacccaggcagcaacacgcaaccccccgacccccaaaaaggccgacc

SEQ ID NO: 189772 - RNA, 76 nt, Homo sapiens
caacaagcgggagccggacagcaaacacaggggaaaacagcggcaaaccgccaaaagcccgaggaccagacgggcg

SEQ ID NO: 189773 - RNA, 76 nt, Homo sapiens
gcacccgggaacaacccaagcgaagaacccaccgagacaggggccaggccaggggcaggggaagcacccaaccaac

SEQ ID NO: 189774 - RNA, 75 nt, Homo sapiens
aagacccgccccgagagacagccggagaggcccacggagaccaggcgccccgacccggccaaccaccacggccga

SEQ ID NO: 189775 - RNA, 73 nt, Homo sapiens
ccaaggaaacaacgacgggcagcaaaggaacacagacagagcagaaagggccggcccagggagaacgcaaaac

SEQ ID NO: 189776 - RNA, 86 nt, Homo sapiens
aagacgcgcggagaaagagaccaccgagacaagcagaccggaagaccgacggaagaccacaccccgagggagcccaggacaccacg

SEQ ID NO: 189777 - RNA, 100 nt, Homo sapiens
gaagaaagaagaaccgaaagacagaccagcaacagaacaggagcgaaccggaacaaacaggacacaggagcggagagcccccgcgacaccaccccagggc

SEQ ID NO: 189778 - RNA, 76 nt, Homo sapiens
gggaggcgacgcaaggcgacgggcggcaacagcacccacccggagccggagccgggccagcgccgaggagcgaccg

SEQ ID NO: 189779 - RNA, 108 nt, Homo sapiens
ccacggcccgcgccgacggagcgaagagcggccccgaaggaggggaagggacggggggcggccacggcagccccacgcccaccagcccgcacccccccccaggcccca

SEQ ID NO: 189780 - RNA, 64 nt, Homo sapiens
cccagcagcgcccacccggcacagggacgagacaagggcaacgagacacccagcggcccggccc

SEQ ID NO: 189781 - RNA, 73 nt, Homo sapiens
gggaccaccggcccacccggcagcacccaccccgagccccggcacccagcaagggccaaagccagggagcgag

SEQ ID NO: 189782 - RNA, 73 nt, Homo sapiens
gcaggaggcacccggggcagggcaaagaaggcgacgagaagaggcgaccccaccgcgcaaacagcgaagcggc

SEQ ID NO: 189783 - RNA, 73 nt, Homo sapiens
aaggggaacccgagccaggcaacagacagagaagcagacggaaggagggaaaagcgggacgagccggagggaa

SEQ ID NO: 189784 - RNA, 80 nt, Homo sapiens
aggcacggcaaggggccggagggccggcccagaacgcagggccggccaaagaacagaggaaccaagcggaggaagcagga

SEQ ID NO: 189785 - RNA, 79 nt, Homo sapiens
ggggacgggacggcggccagaggcgcggggcgccgccgcgcagcgccgcgcggaccagcgggcgccgacggcgcaaacg

SEQ ID NO: 189786 - RNA, 68 nt, Homo sapiens
agggcgcccccgcaaccgccccaacaagcacagaggccgaaaacccggagaaaaggacacacaagaac

SEQ ID NO: 189787 - RNA, 62 nt, Homo sapiens
ggacacgggggccacaaagccccccggagacgcaaccaagccgagagcggcccaggaggaac

SEQ ID NO: 189788 - RNA, 66 nt, Homo sapiens
ggcggggagacacagcagacggcccaaccagagaaaggaaaacccagcgaagcaagagaacagagc

SEQ ID NO: 189789 - RNA, 87 nt, Homo sapiens
agcgcgaggcgcggagagcaacgccgggacagcgcaaggaccgaaggagaagaaggagaaggggaggagaaggcaagccggaaagag

SEQ ID NO: 189790 - RNA, 76 nt, Homo sapiens
ggcggccagagaccgcggaagaggccccacccgcggagaacaagggcacagagacccagaaaagcaggaggggaag

SEQ ID NO: 189791 - RNA, 53 nt, Homo sapiens
agacgcagggcgcccccgcagcccaaacggacggaaggccaaaccacgggcgc

SEQ ID NO: 189792 - RNA, 73 nt, Homo sapiens
gggcggaggccacgaacacgccggagccgccagacgggagagaagcgccggccggaaagaagacggggaggag

SEQ ID NO: 189793 - RNA, 79 nt, Homo sapiens
cgagccacggagccgcaccagacaacgccccgggaccggagcagaacccccgcagagaaagggaacaagaaagcggcaa

SEQ ID NO: 189794 - RNA, 75 nt, Homo sapiens
ccagaagaagggcaccagcgaagaacacgcccaggacgggacagaagccacgagaccgccaaacacccgcacgcc

SEQ ID NO: 189795 - RNA, 100 nt, Homo sapiens
cgcggaaaaacccaacagccaaggacagaggaccaaagcggaccagagacaggaaacgggccccaccccgcggaaaccgccgaacgggggaaagcaccac

SEQ ID NO: 189796 - RNA, 79 nt, Homo sapiens
gcagggaaggaggccgagccgggaccaggcccgggggcggcggccacgccaaggacggggagcaggcgaagcgagccag

SEQ ID NO: 189797 - RNA, 79 nt, Homo sapiens
acaccaaggaccccaagggcccagccacaagccggccgacccggggcggcaggcccaggaggccagagccacgaagcgg

SEQ ID NO: 189798 - RNA, 73 nt, Homo sapiens
cacgcagaaggccgggcacgagcaggcggagaacggaaaagcaccaggaagcagagaggaccgcagaagggaa

SEQ ID NO: 189799 - RNA, 79 nt, Homo sapiens
acaagcggacagaggggacggcaagcagggcacaggaaagggcggagaagcagacaacaccaagggccggagacaccgg

SEQ ID NO: 189800 - RNA, 44 nt, Homo sapiens
ccgagggaggggaaaggcgcagggcgcaaggaagaagagacgcc

SEQ ID NO: 189801 - RNA, 90 nt, Homo sapiens
ggcccagcagcggacgagggagggccgccgcgcccaggagggcgggaagaagcgagagccaaacaagcagaccggaagaccgacggaaga

SEQ ID NO: 189802 - RNA, 55 nt, Homo sapiens
ggccgcaggcgaaggggcccacccgcgcccgccaacagcacccggacgacgggaa

SEQ ID NO: 189803 - RNA, 73 nt, Homo sapiens
agaaagcacagggacgagacagaacaacgagagagagcaaaaacaccagacaagaaacaacaagaaggagaaa

SEQ ID NO: 189804 - RNA, 79 nt, Homo sapiens
gcgcacagcgccagaccccgggaccagcccgcaggacgggcccagcgcgcccgcacaccagagcaaggcgcggaccagg

SEQ ID NO: 189805 - RNA, 69 nt, Homo sapiens
ccaggagaagagccagagcgggaggacgacgagagagccggccaccacacaaagaacccagagaagcag

SEQ ID NO: 189806 - RNA, 54 nt, Homo sapiens
gcaagaggacgccacaaacacccaccacagcagagaaccccacggacaggcaaa

SEQ ID NO: 189807 - RNA, 52 nt, Homo sapiens
gaaaccgagccaccccgggcgaaaagccaggagcaaaagacgagcgcgacgc

SEQ ID NO: 189808 - RNA, 50 nt, Homo sapiens
cccacagaggggcgacggggaaccagaagaggccaaccagcacgaacgcc

SEQ ID NO: 189809 - RNA, 83 nt, Homo sapiens
ggacccacagaagagcgaagcgaggacacacccaggaaaagaccaggacggacaagcacagccggaagggcaagggcaaagag

SEQ ID NO: 189810 - RNA, 75 nt, Homo sapiens
ccgccccaccgcagcccaccccagagaaagaccagggaggagccaaacggggcgccgcgccaagagccccccaac

SEQ ID NO: 189811 - RNA, 82 nt, Homo sapiens
gaaacaacgagagagccgaggagccagagcaaggggaacgccacggacggggaagagggaccgcaagcaaaagacaagagga

SEQ ID NO: 189812 - RNA, 58 nt, Homo sapiens
aaaacagaccgcgagcccagagagaaagggcgcaaaaagaaagaaaacaaaagccagc

SEQ ID NO: 189813 - RNA, 72 nt, Homo sapiens
agaaaaccagggaaaaaacacggcacaaaacaaggaaagagagggagaaaaggaggacaggacgaaaacgcg

SEQ ID NO: 189814 - RNA, 67 nt, Homo sapiens
caaagcgggaaccaaaggcacggagaacggcaacgaaaagagacacgacgcaaacccccaagagaaa

SEQ ID NO: 189815 - RNA, 83 nt, Homo sapiens
gacccccggggcgccaccggacagaacgccaccagaggaagacgagagaagaggaggcagcccgggaacggcgccgccgagcc

SEQ ID NO: 189816 - RNA, 71 nt, Homo sapiens
cagaacgcggaccagccagccagagccacccggaagacccaccaccaaaaaaaaaaggcaacagaggcccc

SEQ ID NO: 189817 - RNA, 57 nt, Homo sapiens
agagaagccgggcaccagagcaaggcaaccacaggggcccaagcagagaccccccag

SEQ ID NO: 189818 - RNA, 77 nt, Homo sapiens
aagcgcacgaggcccagaagcacgcacaaaaaaacaccgggggcaaacagcgcacagcaagggcagaggaaaaggac

SEQ ID NO: 189819 - RNA, 87 nt, Homo sapiens
cgagccgccgcccccgggaggccggcgccgcagcccgggcccaggccccggcagcgccgggacaagacgccaccccgccccaccgag

SEQ ID NO: 189820 - RNA, 96 nt, Homo sapiens
gagcgccggaggaccacacccggccacagccgcaggaacaagagacacccgagggagagcgcaccaccccacgcgccaggcgagaccccagggcac

SEQ ID NO: 189821 - RNA, 78 nt, Homo sapiens
ggacggagcggagaaaaggaaccggccccgggaaccaggaccccgggagggcgggacacccaggaggaagggggcagc

SEQ ID NO: 189822 - RNA, 69 nt, Homo sapiens
ccagggggggcagccagcggaaaacccgccccagaaggaaccaagcgacccgagaggaggaacgaggac

SEQ ID NO: 189823 - RNA, 81 nt, Homo sapiens
ggcagcgccccgcgagaaggaggagcccccgcccggcagccaccccacgggaaggcagaaacagacagggagaggaaaagc

SEQ ID NO: 189824 - RNA, 65 nt, Homo sapiens
gcacgcggcaacaccgaaggacaagacgggccgggagacccacacccacacggcccgcggcggag

SEQ ID NO: 189825 - RNA, 82 nt, Homo sapiens
ggagggaaagaaagagcccggacggaagaggaggagaccaagcgcacagccagaaaccagaaaccagagagccgcaacaaaa

SEQ ID NO: 189826 - RNA, 72 nt, Homo sapiens
gaccgaggaaaaggagagaggagcacccacgggagaccggggggcaagaaaaggaagaagaagcacaccacc

SEQ ID NO: 189827 - RNA, 75 nt, Homo sapiens
aggacacggggaaccaacagaagaaggcgcgcaggcaggcacaaggcccaggcacaggccccaggaggcccaaaa

SEQ ID NO: 189828 - RNA, 70 nt, Homo sapiens
ggcggcgcccgcgccacagccaccagagccggcagcaaagagggaacagggagcagcagccccgagaagg

SEQ ID NO: 189829 - RNA, 78 nt, Homo sapiens
agaggaacccgaagaagaaaggacgacagccagagaggaagccccaacagcgggcacccggcaggcagcaagacaaag

SEQ ID NO: 189830 - RNA, 95 nt, Homo sapiens
ggggcgacccgcgaccccgccggccgagcccaccgagccgcagccagcggggacgagcaggaaaagcccaggcggggcaggcccagcacgagccc

SEQ ID NO: 189831 - RNA, 74 nt, Homo sapiens
cgaaaggccccccaccccacagaaaaaagggagaagcaggagaccccggcgccgaggcaagaggggagagggcg

SEQ ID NO: 189832 - RNA, 58 nt, Homo sapiens
gcagcaaagagcgcacagaaaacggccggagaccccccagacacagcacgcccccacc

SEQ ID NO: 189833 - RNA, 84 nt, Homo sapiens
aaaaggcaaaagacgcaggcaaaggcacaccaccacaaacgaagagggaaaaaaaggaggggacacaggcaaaacggacaaaga

SEQ ID NO: 189834 - RNA, 81 nt, Homo sapiens
cccccggggcaaaaggaagcaccgcgggaacagggagcacaaccgaaggaaagcgcaggaaggaaagggacaaagagcgaa

SEQ ID NO: 189835 - RNA, 67 nt, Homo sapiens
acaccaacgggaccagaaggaaaggcccgagccaaaagacccagagaaaggagcacgaaggaacaaa

SEQ ID NO: 189836 - RNA, 76 nt, Homo sapiens
ggggcacacagaaaaggcaccgcccgggcgcccggccagggggagagcccgggccccagaagcgagcgcagggcca

SEQ ID NO: 189837 - RNA, 83 nt, Homo sapiens
aagacgaaggggccccagagccaaggaggaaggggccgggggaaaagcagcacgaagaaaagaggaacaggaagaaaagagaa

SEQ ID NO: 189838 - RNA, 33 nt, Homo sapiens
aagcaaggacaaggccagaaccggccgagacag

SEQ ID NO: 189839 - RNA, 79 nt, Homo sapiens
cgagcccggcagagcggcgaggccggcggggcccggggcgacagggcgggaccaccaggagcagagcggaggccaccag

SEQ ID NO: 189840 - RNA, 86 nt, Homo sapiens
gcccggccgccccgccgcccccgcggccccggccggaggagacaggagcaacgacaaggacagaacaccaggccccgaaggccaaa

SEQ ID NO: 189841 - RNA, 64 nt, Homo sapiens
ccccgggaagccaagccgcaggaaagcggaccaaaccaaacagcgccaccagggaccgagacaa

SEQ ID NO: 189842 - RNA, 78 nt, Homo sapiens
cgcagacccagcagccaagagggaagcagacgagagcaaggaacaagcgggaaacggagccaccaacaagcgggagaa

SEQ ID NO: 189843 - RNA, 86 nt, Homo sapiens
agcccccgggggaaggagacagccggagcccagggcccaagccaggacccaggagggagagaagggaccccgacccccaacaggac

SEQ ID NO: 189844 - RNA, 84 nt, Homo sapiens
gaacaccgaggaggccaaggcaaaagagagccaggaagaacaaccaggcaccacccaagaaaccagcaggaccaaaaagagagc

SEQ ID NO: 189845 - RNA, 55 nt, Homo sapiens
ggacagcgcaggcagcaggacccccgaccggcgggggcccacaaccggggccgaa

SEQ ID NO: 189846 - RNA, 51 nt, Homo sapiens
caagaccgcagagaagaacacggagaaacacgaaaggccgccgacggcccg

SEQ ID NO: 189847 - RNA, 64 nt, Homo sapiens
accccaaaggagcgacaaaaaccgccggggcggagacacacaccaagaccaagaacggcgggcc

SEQ ID NO: 189848 - RNA, 67 nt, Homo sapiens
gcggcagcggcgcccgagcggcagaccgaccaccccccagcccaggaacacagaccaccaggagcca

SEQ ID NO: 189849 - RNA, 76 nt, Homo sapiens
cggaaggagcagaacaaacggccaagaagggccaccccacagacgaacgccccaggggaaaaaaagaaaaagccac

SEQ ID NO: 189850 - RNA, 73 nt, Homo sapiens
gccacggcgccccgcaagaaagagccgcagacgcacagcaaccaccggacccgaaggccaccacccagagggg

SEQ ID NO: 189851 - RNA, 66 nt, Homo sapiens
agcaaacgcagaaggacgcccacgagcaaccaagacaccaggagacaaagccacaaaaacaccaga

SEQ ID NO: 189852 - RNA, 62 nt, Homo sapiens
cccacagcggggcggcggcggcggcggcgcggcccaaaagcagcaggcgcaaaaacgaaccc

SEQ ID NO: 189853 - RNA, 72 nt, Homo sapiens
ccgcagggccccgcggacacaggggagaagcgcagcgccaacccgaaaagaagcagaacaaaaaagcgccca

SEQ ID NO: 189854 - RNA, 64 nt, Homo sapiens
agggacccggaggccgggacaccacacgacgggaaccccggcacaaaaggcggcagaagaggag

SEQ ID NO: 189855 - RNA, 84 nt, Homo sapiens
ggcgagcgggggcggagaccaggagaccccacggagcgggcgacgagcgacccgggagacacgacggcggccagggaccccaca

SEQ ID NO: 189856 - RNA, 83 nt, Homo sapiens
ggccgggcacagacgggaaggacaaagggaggcccaccacggagaagcaacagccgacaaacaaacggcccacgccgccccac

SEQ ID NO: 189857 - RNA, 76 nt, Homo sapiens
gggagaaggaacgccaggcacagggccgcgaagagccagaagagaggaagaagaagccacagaggaaacagacaca

SEQ ID NO: 189858 - RNA, 62 nt, Homo sapiens
ggcaacagcacgcagaagcaaggggggccggaggccaagcagagggcagcgcagcagaagca

SEQ ID NO: 189859 - RNA, 60 nt, Homo sapiens
agaggaagaacgaccagagcgacccgagcagcgcagaccccgaaaagagcgaccaaggac

SEQ ID NO: 189860 - RNA, 80 nt, Homo sapiens
acaaggcagaagagcaacaagcaggacgacagcaggaagcagcggccaggagaaaacagggaaaagcaaaacaacgaaaa

SEQ ID NO: 189861 - RNA, 74 nt, Homo sapiens
acgcaagcaaggacgaagcgaagaaacgggaagcaaggaacaagggcaaggaaacagaacgacagcccgcaccg

SEQ ID NO: 189862 - RNA, 73 nt, Homo sapiens
agcaggcaccaaggacagagcaggaccaaaagaagcaaagggacggaccccggcacccaaacgcgacaccaag

SEQ ID NO: 189863 - RNA, 60 nt, Homo sapiens
aggagcagaacaaacggccaagaagggccaccccacagacgcccacaccgggggcacggg

SEQ ID NO: 189864 - RNA, 58 nt, Homo sapiens
aggagcagggccgacgcgcaggagaggaagacagacaaggcagaagaacggcccacaa

SEQ ID NO: 189865 - RNA, 84 nt, Homo sapiens
acaagccaacccaagaagcggagcgaagcgcgggaggcccccagccccgggaacgcccgcggacggcagggcgcgacaagaagc

SEQ ID NO: 189866 - RNA, 56 nt, Homo sapiens
acagaccaagaaaggaacgacaacaaggaccgggagcagacagagccgccgcgccc

SEQ ID NO: 189867 - RNA, 82 nt, Homo sapiens
agaagaaaagggacgcaagaaacccaggacgagaacagcaacagagaagagaggagcaggaggcacgccaccggaaaaccgg

SEQ ID NO: 189868 - RNA, 48 nt, Homo sapiens
acgccggccaaacacgcccgggggaggcgaggccccgggggcgccgag

SEQ ID NO: 189869 - RNA, 64 nt, Homo sapiens
ccgaggaccacggaagggcccagagaggccgccaagcaggaccagcaggacaagaaaccaaggc

SEQ ID NO: 189870 - RNA, 76 nt, Homo sapiens
ggcaaggagcgcccaacacccaggggagaaccgaacgggagcgaccagcaggaaggaaacgcacagagggagagcg

SEQ ID NO: 189871 - RNA, 68 nt, Homo sapiens
gccgaccagagaacaggggcccccccagcgaaggggcgaagggcacaggaacgccccagggaacgaac

SEQ ID NO: 189872 - RNA, 80 nt, Homo sapiens
acaccgcacggccgaaccccaacaacacgcaacgacaggcgcccccgccaaccgggcagcacggaccccgggacggcaac

SEQ ID NO: 189873 - RNA, 42 nt, Homo sapiens
caagggaagaccccagaagcaagggccccgggaggagcaccc

SEQ ID NO: 189874 - RNA, 76 nt, Homo sapiens
gagagaggccgaacaaagcggagagaaagagagaaaacgccggcacagagcaagaaagaaagccaacaacagggag

SEQ ID NO: 189875 - RNA, 75 nt, Homo sapiens
cccggccaccccgcgcgcaaggagcccgggacggagaggccgcaggagcacgacccgagccccaaagacagaaaa

SEQ ID NO: 189876 - RNA, 76 nt, Homo sapiens
gagagacccagcgacgagcaaaaggccaaggaagcagggaaaagcaggacagaccaggagaagagggaaagacaag

SEQ ID NO: 189877 - RNA, 37 nt, Homo sapiens
accgcaacccagcacggaacgcggaggacacagaagg

SEQ ID NO: 189878 - RNA, 84 nt, Homo sapiens
gcgcgcaacgacaaacccggcccggggacccacgcggaggccgcaaggcaccaccaagcgaagacggcgcgcgaagaaacaaga

SEQ ID NO: 189879 - RNA, 78 nt, Homo sapiens
cggccggaggcaccagcaccgacagaacaagcgcaaaaaaagaagagcagaaacgccaacaaaaagaccaaagaaggc

SEQ ID NO: 189880 - RNA, 74 nt, Homo sapiens
caccaacgccaccgcgagacggccacaaaagaagacccaaagcaccaacaaaaagcaacgagaacaaggacaaa

SEQ ID NO: 189881 - RNA, 73 nt, Homo sapiens
aagggcaaaggcgccaaaacgagacggaaagagacccagggcgccaaaaacaggcggaggacccacaggagag

SEQ ID NO: 189882 - RNA, 85 nt, Homo sapiens
agaccgaagggcgaccaccacaacgccgcggacgaccgcacgggcagagaggcgagggagccgaccacagcgaagcagaaggccc

SEQ ID NO: 189883 - RNA, 72 nt, Homo sapiens
gaaccggccccccagggccacagagcaaccaaaaaccggccgcaggcacaaaagaagacgggaaaagggcca

SEQ ID NO: 189884 - RNA, 64 nt, Homo sapiens
gcacccagaggagaaaaaccagacaaggccaggagaggaacaggaagccagcagaccgcagaac

SEQ ID NO: 189885 - RNA, 71 nt, Homo sapiens
aggagcaagagcaagacaccggacaccgagggcccccaaaaggcgggaaaacggcacaaggcgacgaggga

SEQ ID NO: 189886 - RNA, 41 nt, Homo sapiens
cccaaaggcggggacaggccacgacgcccagaggacacagg

SEQ ID NO: 189887 - RNA, 79 nt, Homo sapiens
ccgcaacacgagcaggcaggccccgcaggccacccaggcccggaggcagcgcagagcagaagaaagggaaagcaaaacg

SEQ ID NO: 189888 - RNA, 74 nt, Homo sapiens
aaggcaccaaaagcaagaaacacaacgaaaggaaaagagcgaccaagccagaagaacaaccagaaacaaacaac

SEQ ID NO: 189889 - RNA, 50 nt, Homo sapiens
gcgcgcgagaccaggagaacggggaggccaagggaggacaccaggcccag

SEQ ID NO: 189890 - RNA, 84 nt, Homo sapiens
gaagacaacgcacaacagcacagacgcagccagcaaggaaggcgggaacgcccggaggaacccaggaagagccgcagggggcca

SEQ ID NO: 189891 - RNA, 78 nt, Homo sapiens
gcggcacggagagcacgagacccggggcgggaacgcagcaggacaaacggacccaagcgagggagaccacaaaaggcc

SEQ ID NO: 189892 - RNA, 44 nt, Homo sapiens
ggggaccgaccgcaacagaacggacccgcccaagggaagaacag

SEQ ID NO: 189893 - RNA, 74 nt, Homo sapiens
cagcacaacagaggagacgaggcaagaaaaggggaagcaacacgcagcaacaacaacagccaggccaggagcaa

SEQ ID NO: 189894 - RNA, 71 nt, Homo sapiens
gccgaaagcacccacaagcagagcggcgaagacggaggcgacagccccacgagccgaaacccacggaggcc

SEQ ID NO: 189895 - RNA, 79 nt, Homo sapiens
accccgaccggcgagccagccgcgcgacaaaccccagcccgcccacgcaagggagcaaccaagggagacacgagaccgg

SEQ ID NO: 189896 - RNA, 70 nt, Homo sapiens
ggacaaccccagcggcccaagaaacaaaaaaaggaaacacacaaacgcagggccaaggaaagaccaccca

SEQ ID NO: 189897 - RNA, 76 nt, Homo sapiens
gggccgagcgaggaggccgaggccgggaggccggcccggaggaacacgaggacccaaagaacaaacccggagagaa

SEQ ID NO: 189898 - RNA, 33 nt, Homo sapiens
ggaaccacccgcggcagagaggagcaccgcgcc

SEQ ID NO: 189899 - RNA, 78 nt, Homo sapiens
gacccggagacagcccaaaacccggaagagcgccccaggagaaacaaggaaacagcaacaggagcgccccagagagga

SEQ ID NO: 189900 - RNA, 62 nt, Homo sapiens
cacaacgccacggggcacacccaagcaaggggcaggcggccagcagcagcagagcaggcagg

SEQ ID NO: 189901 - RNA, 82 nt, Homo sapiens
agaaacccacagaacacagcaaaggagacgagacccaacaggcagaagccaaaggaagcagcagaccaaggaaagaccaagc

SEQ ID NO: 189902 - RNA, 69 nt, Homo sapiens
gaggaacaacaagcaggcaggcgacggacaggcggaaaaagggcggaagaaacgaaggaagaagaggcg

SEQ ID NO: 189903 - RNA, 84 nt, Homo sapiens
ccccagcaccggcccaaggccacaccggacacgaggacgcacagaaggacggcgcccagcgaggggccggcacccgcccgagca

SEQ ID NO: 189904 - RNA, 83 nt, Homo sapiens
ggaaggaggaagcgcaggcgcggcccgcgcccgccgcgccgggagcagcaccgcggggccagcaggagcagggcgcagaagcc

SEQ ID NO: 189905 - RNA, 76 nt, Homo sapiens
cccgaggcccccacaacccgaccggaggccaggggggcacaccgaacccagcacggggaagccagggcaggggagc

SEQ ID NO: 189906 - RNA, 78 nt, Homo sapiens
ggagaaacaaggagagcaggagcaacaagcccacaaagcacgcaaacaagagaacgggcccacacaacccaggcaacc

SEQ ID NO: 189907 - RNA, 72 nt, Homo sapiens
gccagcgaagcaaggacccggccacccggccagaagaacagaaacgaccaacggaagaacgagaaagggggc

SEQ ID NO: 189908 - RNA, 74 nt, Homo sapiens
agcagcaggagcgcagcacgaaaacggaaagggaaggggccagcccgccagaggcccacccacagagcgcggag

SEQ ID NO: 189909 - RNA, 102 nt, Homo sapiens
ggcccggccggcccgccgccgcacccaggacggaggcgcagcccgaggaccaggccggcgcagccagcagaaccacaaagaagcgccaaccagccgcaagga

SEQ ID NO: 189910 - RNA, 77 nt, Homo sapiens
gccccggggacagccagccccgcggaccagaccaggccgcggcccgccgaggggggcgccgggccacggggacccgc

SEQ ID NO: 189911 - RNA, 83 nt, Homo sapiens
agaggcacacgccggcaggcaggagcggaggaggcgcaggcagagggagccacagacaggggaccgaggaagccacgccccca

SEQ ID NO: 189912 - RNA, 70 nt, Homo sapiens
cagggagcggacgagcgaggccgcgcggacaaggggccgcaaggccaggcgcgcagaggcacccaacggc

SEQ ID NO: 189913 - RNA, 74 nt, Homo sapiens
cagacgcggaccaacaacaaggcggagaacggaaaagcaccaggaagcagagaggaccgcagaagggaaggaga

SEQ ID NO: 189914 - RNA, 69 nt, Homo sapiens
aaacccccaggcaacccacacccgcagaacacaaccgcaacaaaggaccgaaacagcaacaaccgcaac

SEQ ID NO: 189915 - RNA, 87 nt, Homo sapiens
cccgcccagagcccaacggcgccggacaccgagcgccaaaaaacccgcagcccaaagggcagaagaagaagaagacgcaagacggca

SEQ ID NO: 189916 - RNA, 36 nt, Homo sapiens
ccacacccccccgggggggccccgggcaaggggagc

SEQ ID NO: 189917 - RNA, 54 nt, Homo sapiens
cggaacagaaggacgaaaaagaaaaacggcagcagccaagcacgcaaccaagag

SEQ ID NO: 189918 - RNA, 85 nt, Homo sapiens
gggagggggggggcggcggccgaacgaggcgagaacgcgcagaccggggagggaaagaaaggcacgacgccagcccccggggggc

SEQ ID NO: 189919 - RNA, 84 nt, Homo sapiens
aaccccgggccggcggcggcggccaggcccgcgaacacacgccgccaccgggaggcccagggaagaacgcagagagggaagagc

SEQ ID NO: 189920 - RNA, 51 nt, Homo sapiens
gccccagccggagaaggagcccacaacaaccacaggaccccgaagaagaaa

SEQ ID NO: 189921 - RNA, 90 nt, Homo sapiens
aagcaaacggaaaggaaaacaagcaggaacaaaacccagcgggcccaagcacaggacgcagcgacccgcccccgggaacacaggcaggac

SEQ ID NO: 189922 - RNA, 76 nt, Homo sapiens
gcagcccgaaaaccgggaagcacgaaagggacaggagagacgaggacgcgcacaggaaaggacgcggaacaagcag

SEQ ID NO: 189923 - RNA, 58 nt, Homo sapiens
accggagaagccccagaacaacaggccgacggagaccgccccagggccaaccgggcag

SEQ ID NO: 189924 - RNA, 83 nt, Homo sapiens
aaaaggcggaacacaaggaccgaagccgaaaaaccggaaagacccacaaagcacacagcaagaaggaggccacagcaaacggg

SEQ ID NO: 189925 - RNA, 75 nt, Homo sapiens
caccaccacccaggccacacaggagcagcccgggcccccgcggcgggccccccccgccggcggagcaaggacagc

SEQ ID NO: 189926 - RNA, 72 nt, Homo sapiens
ccggagccagggacccacccccgacagggacacagggagccccagacccacaggaaagaccacagcaagacc

SEQ ID NO: 189927 - RNA, 37 nt, Homo sapiens
aaaaggggacaacaccaacaagcaccggacaagagca

SEQ ID NO: 189928 - RNA, 93 nt, Homo sapiens
cggcagcgggaagacagggggccccaagaccggcagcgccccgagccaaacggaacagccccaagccggaaacccaggaacggaaacagaacg

SEQ ID NO: 189929 - RNA, 73 nt, Homo sapiens
agacgagcggaggacacccaacccggggaaacacaaagaagacaccagaagggccagcaccacgacaacacgg

SEQ ID NO: 189930 - RNA, 79 nt, Homo sapiens
cggcccccgcccgccccggccggcggcggcaccggcacaccagcgcccgcaggagcccagggcaagagaagaaacaaaa

SEQ ID NO: 189931 - RNA, 75 nt, Homo sapiens
acaaaacaaaagaacagaaagcgagcagagcccgcgaacaagacaaggacacagagcgaagaacgaaccccaaaa

SEQ ID NO: 189932 - RNA, 68 nt, Homo sapiens
ccaaggagacgccccacgaggcccaaaccgccaagggagagccgcccagagaaagcacaaggacaaca

SEQ ID NO: 189933 - RNA, 74 nt, Homo sapiens
ggccaggcgagaagagaagaagaagcgcggaggccgaaaagaagcggcgaacgaacccgcgcccagaagggaag

SEQ ID NO: 189934 - RNA, 70 nt, Homo sapiens
ccgcgggaagcaggacgcgccgcgccccaagccccaaaagcacgcacgaaaccggcaagccagcggaggg

SEQ ID NO: 189935 - RNA, 74 nt, Homo sapiens
agcagccgagacgaggagaaaacccagaaaaaagggcaggaaagcccggagaagaaaggcagcccagaagacca

SEQ ID NO: 189936 - RNA, 58 nt, Homo sapiens
ccagaagaagagagacccagacggggcgaagagggcaagaaggaacagacaaaaacgg

SEQ ID NO: 189937 - RNA, 87 nt, Homo sapiens
ggagcagccagcccggggcgagccgcccgcccgccgagcagccagagccggaaggggcgaccggaccgggagaagaaggcgccgagg

SEQ ID NO: 189938 - RNA, 76 nt, Homo sapiens
ggccagccacccgaacccccaggcgcgcgccaacacacgcgcaggaagcgggaggaccggacgaaagccaggagaa

SEQ ID NO: 189939 - RNA, 63 nt, Homo sapiens
acaggacacaggaccaagaccacagcacccgggaggagaacagcagacaggagagacaacgga

SEQ ID NO: 189940 - RNA, 87 nt, Homo sapiens
ccggggccgcgggaccaaggcggccggccaaggaacagcacgccaggaggcgacccgccgcggaccccaagaagaagcggaagagga

SEQ ID NO: 189941 - RNA, 81 nt, Homo sapiens
gaaaaaagagcgacaccgccagccccaacgagcaaacccgccccagaggggcggcgccagagacgagcacccaaagaaccc

SEQ ID NO: 189942 - RNA, 85 nt, Homo sapiens
cggccagagccgcggaagcgagcgggccgaaaggcaggaggccagcggccaccagcgccacgggccagagcccgcccgaagagcg

SEQ ID NO: 189943 - RNA, 59 nt, Homo sapiens
aaaggagcgcgcccggcggggagcgcagcgcgagcagccacagcagggaccccacgaaa

SEQ ID NO: 189944 - RNA, 75 nt, Homo sapiens
ccggaaagaccgcgagaaaaggccagggcccacgcaaggccggggggggcacagagccccggaagacagccccca

SEQ ID NO: 189945 - RNA, 58 nt, Homo sapiens
cggacgaccccagcggcagcccccgacccaagggagagcccgaccagagaaaaggcgg

SEQ ID NO: 189946 - RNA, 36 nt, Homo sapiens
cgccaccgaaaaggaagggccacccacccaggaccc

SEQ ID NO: 189947 - RNA, 70 nt, Homo sapiens
aagcagggggaaagaaggccgaaggacccccacaacgagcgcccggaggaggagcgcccggcccaggcgg

SEQ ID NO: 189948 - RNA, 70 nt, Homo sapiens
ccagcagacggggccccacaggacagcaccgcagcggaaggccgagccggaccgggaagcagaacacagc

SEQ ID NO: 189949 - RNA, 81 nt, Homo sapiens
gacgacaccgcagccccccgggaggcccgacgcgacgggcccccagggcaacgacaggggaaccccagggaccagcggaca

SEQ ID NO: 189950 - RNA, 78 nt, Homo sapiens
accgcccagcgccaccacgccgcaccggacccgcgcggcgggacggccggccggaacggccgagcgaccaggagagga

SEQ ID NO: 189951 - RNA, 75 nt, Homo sapiens
agcaacaagcccacagacacaggagcaccaggcccaccgacccagcgaaagaagggaggcagcgcagaagaaaaa

SEQ ID NO: 189952 - RNA, 83 nt, Homo sapiens
caggaccggcaacgaaaacgcggcgggggacggcgccccgggaagaaaggacgagaccgaagagaaggaaggacagcgagaga

SEQ ID NO: 189953 - RNA, 69 nt, Homo sapiens
cgaaaacagacacagccagccagccacacggcagaaaaagaagccgcaaggaaacccaggggaaacaga

SEQ ID NO: 189954 - RNA, 83 nt, Homo sapiens
aacaaagacccaccgcgagcgccccccaccaccaacggcaagcaacgcacagcgaggagggcgaaaacacagaaacaccaaag

SEQ ID NO: 189955 - RNA, 74 nt, Homo sapiens
ccccacgcccccaaacagcccacccgcacgcaccacaggccagcgcgccaaacgaacgccgaggggccggcgcc

SEQ ID NO: 189956 - RNA, 86 nt, Homo sapiens
gcggcgacggcggggcagcgcaccggcaggcgggccagagagcacaagaagaaggacacacccaggggacacaacaacgggagagc

SEQ ID NO: 189957 - RNA, 76 nt, Homo sapiens
aaagcagcagagcaaaaacccaaaccccccaccagcgccaagaggagcggcagcccacaagcaggaagaccagccc

SEQ ID NO: 189958 - RNA, 79 nt, Homo sapiens
ccccgagagcgggaacagggggggcgcggaggggagacgcgagggaaggggacagggagagaccggggggcgcaccggg

SEQ ID NO: 189959 - RNA, 82 nt, Homo sapiens
gcggaccggaggcgccgccgcgacagcagcagccaggaggacgagagcccaagaccggagagaacagcacacagaggcgcaa

SEQ ID NO: 189960 - RNA, 72 nt, Homo sapiens
ggcccacccgccgcgcccaagccccgcggggaagaacggcacgcggccgcaagcaggaagaaaagagcgggg

SEQ ID NO: 189961 - RNA, 82 nt, Homo sapiens
ccagagaagcggcacagcagagaaggagcagagaacgaccaagaggagggggaaagcaggggagaaaagaaaagaaagacgg

SEQ ID NO: 189962 - RNA, 76 nt, Homo sapiens
gaaagacgccaaaaacagggaaagggccagcacaggagagacaagcaccagcagaagcaaacaggcagaaaaagaa

SEQ ID NO: 189963 - RNA, 86 nt, Homo sapiens
ggagagagcgagcgagggggggcgcgccggaaaccggagcgcgcagcaggcaaccgagaggggcgagccggggccggagcaggagg

SEQ ID NO: 189964 - RNA, 65 nt, Homo sapiens
cccccaagggcgggaacagccaggagacagaaccacaagcagccggaaccccacggacccgcagg

SEQ ID NO: 189965 - RNA, 81 nt, Homo sapiens
aacccagagaagagagaagaacaccgaaaccagaagggggcgggaaaagaacagggaaaagaccaaacaaaaacagaaaac

SEQ ID NO: 189966 - RNA, 73 nt, Homo sapiens
ggcgaggacaaaaccgaaggaggggggaaacccgcccagggcgggagaccgccaagaaacaccacaaggagac

SEQ ID NO: 189967 - RNA, 82 nt, Homo sapiens
acgggaagcagaagcccaccgaggggaggggaccgcacagggaacgagagaacgccagcgagggaaagcgaggcaggcccag

SEQ ID NO: 189968 - RNA, 65 nt, Homo sapiens
ggaaggggaagaggcccacccggagaaccccacggagaaccagagaaacccgcgccagagagcca

SEQ ID NO: 189969 - RNA, 73 nt, Homo sapiens
gcaaccccgcggaaacccaaaaaaaggaccggagagcaaggaaaccccagaagcacgaaacacgccaccgcca

SEQ ID NO: 189970 - RNA, 55 nt, Homo sapiens
cagaacaaaaagggccagggcacccgccccgggccaccaccacagaccagacggc

SEQ ID NO: 189971 - RNA, 63 nt, Homo sapiens
gggccagccccgggacggacgaagcgggcgcaaggacaggaagaaccggcaccggaagaaaag

SEQ ID NO: 189972 - RNA, 52 nt, Homo sapiens
gcaaaaaggaccaggggcaaggcaaaccgacaccagcgacacaagcgcgagg

SEQ ID NO: 189973 - RNA, 78 nt, Homo sapiens
gcgcaccccgcccgcgcgccaccgcacgagcccgccaaggaggaggaagggaggacggcgaccacgcagggcccccag

SEQ ID NO: 189974 - RNA, 85 nt, Homo sapiens
gcgcggccagagccaagaccacagcagggggcgcggggcagggcgcggggacaggggcccgacaggagcgcccagccaccgaagc

SEQ ID NO: 189975 - RNA, 86 nt, Homo sapiens
cagacccccggccgacaggcggcgcgggcggcgggcggaaaacaccccaaaagccaaaagggaaaggaaaagaccaacaacagcgc

SEQ ID NO: 189976 - RNA, 74 nt, Homo sapiens
aaggagaacggagaggaagaacgagccgcacaggcgagcaccacgccgaaaaacgggagaacgccaaaaaacaa

SEQ ID NO: 189977 - RNA, 57 nt, Homo sapiens
ccgggacccaccacccaggccccgacgccccgagggggagaggcaccagcaacagac

SEQ ID NO: 189978 - RNA, 64 nt, Homo sapiens
ccaccaggagacaaaaccagcaaaacacaaggcaacggccacccacaaggcacaacaagccacc

SEQ ID NO: 189979 - RNA, 57 nt, Homo sapiens
cgagccgccagagacggcaggcccggccaaaggcacgaagacagccccaacagacga

SEQ ID NO: 189980 - RNA, 43 nt, Homo sapiens
accggcagcggccccagggagagaagaaggcaggcccacacca

SEQ ID NO: 189981 - RNA, 80 nt, Homo sapiens
cccggagcggccgccccagcaaagccaaacggcccgcggcaacaaagcacagccccgaagacaggaaacaaccccaacaa

SEQ ID NO: 189982 - RNA, 74 nt, Homo sapiens
gcagggacgaacaaaacagcggaaaagggcacagaccaggcacggggccagcaggggcaggcaggcagaacaag

SEQ ID NO: 189983 - RNA, 69 nt, Homo sapiens
ggagagaggacccccccccccccccaagaacagagagaagggcgggagaaaccaaggaaagagaaaagc

SEQ ID NO: 189984 - RNA, 72 nt, Homo sapiens
cgagccaccaaggagcagcccgggccaggaccggaggcaaggaggccacggggccgaagacaccaaccgggc

SEQ ID NO: 189985 - RNA, 75 nt, Homo sapiens
gagggaaacaacggaagaccaaggcaagggagggcgcacgggaggagaacagcggggggcgccgacgccacgacg

SEQ ID NO: 189986 - RNA, 79 nt, Homo sapiens
cgccccccccccggaaaaggcccacgccgggcgagaagacaaaggaccagggaagaaccggggagaaacgaagaaggcc

SEQ ID NO: 189987 - RNA, 79 nt, Homo sapiens
agcagaggacagacaaccaaccagcggaagaacgccccagcccagacacggaacaccggcgcaagagacagaaacgaag

SEQ ID NO: 189988 - RNA, 82 nt, Homo sapiens
acaagacgaccaaaggaggaaggagggacggccgagaacaaacacacgacccaagagaaaggagagagaggggcagagggaa

SEQ ID NO: 189989 - RNA, 72 nt, Homo sapiens
agaggcggagcccgcagaccgcagaaggccggagacaccagcaggcccccgggccacgggcaccagggccca

SEQ ID NO: 189990 - RNA, 66 nt, Homo sapiens
cgaaagagaagccccggagggaacaccaaaacccgacgccacaagaccaggacagggaaacggagg

SEQ ID NO: 189991 - RNA, 82 nt, Homo sapiens
gccgcaacaggaaagcagcccgaaaaagacgcgagaagccacacgaccccaagaagaagcggaagaggagccgcggaaccaa

SEQ ID NO: 189992 - RNA, 85 nt, Homo sapiens
ggagacagcccaaaacccggaagagcgccccaggagaaacaaaaccaagccgccacagggagaaaagagcagaggccgaccccag

SEQ ID NO: 189993 - RNA, 80 nt, Homo sapiens
gacccggaaacgaagagagggccagggaacgcggacgcaacacaggccgcagacaaacgggacacgcaccaaggaaccga

SEQ ID NO: 189994 - RNA, 92 nt, Homo sapiens
gccccagcaccaaaggcaaggaggacggccagacagcgaacacgcagcaaagaaaaaaagcccaggaaagaaccaggaaacacagagagaga

SEQ ID NO: 189995 - RNA, 76 nt, Homo sapiens
ggagaagccaggaggcgccggcccgccgaaccagagacacccgcgggcccgagcgagacaccgcccggagggcccg

SEQ ID NO: 189996 - RNA, 68 nt, Homo sapiens
acgaaaacagagccacaggacaacccaacaaaacgaggcagcaagcaccaggggcaagacagccccca

SEQ ID NO: 189997 - RNA, 64 nt, Homo sapiens
ccaacaccagggaagagacacacccagaaggaagaggcccagcagaagggaccgcgagccaccc

SEQ ID NO: 189998 - RNA, 36 nt, Homo sapiens
ggaaggaagagaacaaggggcgcggggggccaccaa

SEQ ID NO: 189999 - RNA, 71 nt, Homo sapiens
cgccccaccccacagagggaggaaccgaaaggaaaccgaggacacagaaaagggcacagcaaagcagcaca

SEQ ID NO: 190000 - RNA, 81 nt, Homo sapiens
gacggagggcagccggggggccggaaggcgcggccggaggacaccccacggcagggaggcacccgagcagagcacagaaga

SEQ ID NO: 190001 - RNA, 84 nt, Homo sapiens
ccgcgcgcggagcccccgccgcccgcccgggagcgcggccccggcccgaccacacaagaagcgagggcagaaagggcccagccg

SEQ ID NO: 190002 - RNA, 76 nt, Homo sapiens
gcggaccggggcaccggagagagcgagagcggaggcgggcacacaaacaccagccgcccaccaagcgggggagacc

SEQ ID NO: 190003 - RNA, 79 nt, Homo sapiens
cggccgcgcgcagcacgcgccgccgacaagcagaccggaagaccgacggaagaccacaccccgagggagcccaggacac

SEQ ID NO: 190004 - RNA, 55 nt, Homo sapiens
ccgaaaacaccagccggcccaagcgggcccccggagcaggaggagaagaaacccc

SEQ ID NO: 190005 - RNA, 69 nt, Homo sapiens
ccacccccccccggaagggcgaaagcaggcgggacgccgggaggagaggaggcggaggagcggcccggc

SEQ ID NO: 190006 - RNA, 80 nt, Homo sapiens
agagaagagaagccgccgagaaagacccaccaacaaccgaaaacaggggaacagaagcaggcggcagagacagcccaccc

SEQ ID NO: 190007 - RNA, 78 nt, Homo sapiens
agacaggacacagaacagaagcgaagaagggacgaaaggcagaggagagaaagaacccacgcaggacgacagaagagg

SEQ ID NO: 190008 - RNA, 75 nt, Homo sapiens
aggaagagccgcccgagggaggcgacgggggcgaagagcgcgccgcccccgcccacccaggggggggaacccaag

SEQ ID NO: 190009 - RNA, 59 nt, Homo sapiens
acggcagcggagaaaacaaccaggaaaggcaggagagcgaaagagagcggaaaaacgac

SEQ ID NO: 190010 - RNA, 70 nt, Homo sapiens
caaaacccccaacaagacgacggcaagaggagcgggaaacccgccgaaaagaaaaggcaggaggacccga

SEQ ID NO: 190011 - RNA, 72 nt, Homo sapiens
aggcgggggcgccaacgaccacagcggagcgcgggcagccagaccgaaaggaacgcccaaaacccgccggac

SEQ ID NO: 190012 - RNA, 76 nt, Homo sapiens
agccccgagagcgagacacagaacaacaggaacgcccaccaccaccgggcaaaaccaaccagcaccccacagcacc

SEQ ID NO: 190013 - RNA, 52 nt, Homo sapiens
gagcaggaggccaggccggaggagaacaaccgcaacgaacaaacaggagaca

SEQ ID NO: 190014 - RNA, 71 nt, Homo sapiens
gaccccaaggaagccacggcagacacacaacccgacccgacgaggaaacacaaagaagacaccagaagggc

SEQ ID NO: 190015 - RNA, 83 nt, Homo sapiens
gggaagaggcggcgccgccacccccccccagcaggccccgagccccggccccaaagacccaaaacagagacaccccccagccc

SEQ ID NO: 190016 - RNA, 54 nt, Homo sapiens
ggcggccaccgccaggaggcgaaggggagagagacgcgggaaccgccagcaaac

SEQ ID NO: 190017 - RNA, 71 nt, Homo sapiens
aagggccaggacaccaggggccgggacccgggacagggggccagcacggcagagagagcccacaggaagac

SEQ ID NO: 190018 - RNA, 69 nt, Homo sapiens
gggaaccgccgagccaccaggaagacgagggagaccggaagcagaagaccccccggagcgagggaaaac

SEQ ID NO: 190019 - RNA, 59 nt, Homo sapiens
cgcccgcgcggcgcggggaccgcggcccgccccagggcgaagacccccccccagggcaa

SEQ ID NO: 190020 - RNA, 52 nt, Homo sapiens
gccacgggagaaggcagaagggaaggagacacagagaagagggaccacccca

SEQ ID NO: 190021 - RNA, 77 nt, Homo sapiens
ggaagcaaagaaacacaccacccaggcaaacgaccaaagacaagaagccgcaaaggaccccaccccccagaagagga

SEQ ID NO: 190022 - RNA, 66 nt, Homo sapiens
aaaagccgccacacgccaaaggaggggaagaggacacagcaagacaccccggcccgggacccagac

SEQ ID NO: 190023 - RNA, 78 nt, Homo sapiens
caccgaggccacgggacccggccaacgacacagacagaccgaggggacgcccacagaagaggccgcggcaccccggaa

SEQ ID NO: 190024 - RNA, 75 nt, Homo sapiens
agggaccccagcccagcccaggggcgggggcaggcgggggagccaagggagagggaagaaaacaccggcgaaacc

SEQ ID NO: 190025 - RNA, 54 nt, Homo sapiens
aaccgcgacagagggcaacaccaaaggaaggcagaagacacagaaaaagaaccg

SEQ ID NO: 190026 - RNA, 61 nt, Homo sapiens
cgggcccgggcagagccgcccagaacccacgcccaggaagaaagaggcaagccagaagaag

SEQ ID NO: 190027 - RNA, 38 nt, Homo sapiens
agagggacgagcgaaaccagacggaagccccagcagag

SEQ ID NO: 190028 - RNA, 79 nt, Homo sapiens
ggccagaggacacaaaaggacaacccccaagaaagggagcccagaacgaaacaacccagcagagacccacaaaccaccg

SEQ ID NO: 190029 - RNA, 77 nt, Homo sapiens
ggagccccggggaacccgcagcacaccagggggcaggcccgcacgggacacggggaaccaccggggacgaagaaaag

SEQ ID NO: 190030 - RNA, 79 nt, Homo sapiens
caaggagggcagacaacccgcagccacgcgaaaaagcggggaaggggggcaaaaaaaagaagcaagcgaagcaccgagc

SEQ ID NO: 190031 - RNA, 75 nt, Homo sapiens
aaggaccaagaaccaggggacaggcaaaggagaaacaagaccccagggacgacaccccccagagacacacgcaga

SEQ ID NO: 190032 - RNA, 75 nt, Homo sapiens
gaaggacgccagcggagaacgcggcaaagcgaggagaagcacgcgacagaacagcgaaggcaaaaacagccacag

SEQ ID NO: 190033 - RNA, 74 nt, Homo sapiens
ggccaggggggcccgggaagcgggccacccccggcgcaccagcgcggccccacccgggaaagaaggaaaccccc

SEQ ID NO: 190034 - RNA, 57 nt, Homo sapiens
gcagaccgagacccggacagggcaggaaacagagggaagagcaagggacaacagaca

SEQ ID NO: 190035 - RNA, 75 nt, Homo sapiens
agagggacacgcgggcacggccggagggagcaggcccagaaagaacagacaaagaccgaaaaacacgaggaaagc

SEQ ID NO: 190036 - RNA, 74 nt, Homo sapiens
agaccggaacggggccgcacccgcggggcccccagcgcccaccccacgggaggccgggacgggacaacgaacca

SEQ ID NO: 190037 - RNA, 68 nt, Homo sapiens
cgcaagcgagaggaaacgggccccaaggcgaccgggcgacaccgaaacccagagaccagccccgggaa

SEQ ID NO: 190038 - RNA, 81 nt, Homo sapiens
agaacagagcagaaacaaagaagagagcaggaagaaggaagaaaaggaccgcagggagcgccacgaagggcaccaacccgc

SEQ ID NO: 190039 - RNA, 82 nt, Homo sapiens
ggaaaaggcaaaaacccacaccgcaacccagcgagagaaagggaagcagccgagaggcgagaaagaagaaagaaaggaaaga

SEQ ID NO: 190040 - RNA, 76 nt, Homo sapiens
agcaacagaccaacacccagagacgaaccagagaacccagcagaagccagccgccacgccgagccagccagcacca

SEQ ID NO: 190041 - RNA, 77 nt, Homo sapiens
gcgccaacgccccggggagaagcgaggacccaccaacaaccgaaaacaggggaacagaagcaggcggcagagacagc

SEQ ID NO: 190042 - RNA, 75 nt, Homo sapiens
cggccgggcccggcagccccgacgcagccgggaagaacaccccaccagaccacccagcaagcccacaaaaaaggc

SEQ ID NO: 190043 - RNA, 73 nt, Homo sapiens
accacgccgaccgccagcaaggagaacgcggccaagaccgagaagagggcccgaagagaacaacaaagcacaa

SEQ ID NO: 190044 - RNA, 83 nt, Homo sapiens
caccagcccccagacaggccaacgaaagacccgaacagagcccaggcaaccgaaaaaaagcggggaaaacaaaaaaaagaagg

SEQ ID NO: 190045 - RNA, 89 nt, Homo sapiens
aacgacaaagcccgcgcgaggggagcgcgacaaccggccgaggacacagcgccccgggagaaaacagaaaggccccggagcagcgcgac

SEQ ID NO: 190046 - RNA, 79 nt, Homo sapiens
agcaggaggcaagaaaggggaaccccggagaaaaggccaagaaggcagggccagaccaaaggaaccagagcaggagaaa

SEQ ID NO: 190047 - RNA, 77 nt, Homo sapiens
aagaggacagaacaagcagcagccagagaagggaggaaaaaaagcggaaaggacacgacaaccaaagcaaaagaagc

SEQ ID NO: 190048 - RNA, 58 nt, Homo sapiens
gggggagcacagaacacagcccgccccccaaagcgaagccaaagcgaaggcaaaggcc

SEQ ID NO: 190049 - RNA, 80 nt, Homo sapiens
aaaaagaggagcagacgccagcgcccgaccgacgacaacacacgggacgcggccaaagaagcccggggcaagaacggggc

SEQ ID NO: 190050 - RNA, 75 nt, Homo sapiens
cccaggggacccccacgcccagcccgcacgccggaccagcccgcgccaggccccgggaccaaggacacgcagacc

SEQ ID NO: 190051 - RNA, 56 nt, Homo sapiens
cagcggccggggacccagcaagggacccagacccgccagccaggagccagcgacca

SEQ ID NO: 190052 - RNA, 84 nt, Homo sapiens
cagaaaaaggagcaaagagcacaacaacaaaagaaaacaccaccggaccacgaccaggcgagccccaacagaccgggaggaacg

SEQ ID NO: 190053 - RNA, 70 nt, Homo sapiens
aggagagaaagcgagaacaaaaccagcgaggacaaacggacaccaggccggcgaggaggggaaaaccaaa

SEQ ID NO: 190054 - RNA, 101 nt, Homo sapiens
aaggaggccgagccgggaccaggcccgggggcggcggccacgccaaggacgggcaaggcaaggaggaccaagcgaaaaacccagaagaaacagacagaagg

SEQ ID NO: 190055 - RNA, 81 nt, Homo sapiens
gcccaagagggcccaaaagagagaaacagaggaaaacccagagaaaaggaaacaacaggacacagaggacagagacgaggc

SEQ ID NO: 190056 - RNA, 79 nt, Homo sapiens
gacaggccagcgcggccaagacccaccgcaaggagggggaacccacccggccacgccgaaagagcccagaaccaccccg

SEQ ID NO: 190057 - RNA, 116 nt, Homo sapiens
cacgccagccgcaccagccgcccaagccgcacagccgcggcggcagcagcaggagaggacagcccagagcaagcacacggaggcccgggagccagaccgggagcccgccccagcca

SEQ ID NO: 190058 - RNA, 69 nt, Homo sapiens
ccagcggaagacgcagcaaaggggcgcgggaaggacaacagccccaaaggcaagcccacaggaaagaac

SEQ ID NO: 190059 - RNA, 74 nt, Homo sapiens
caagggcggccccgaggaagcaaggccgcggggggagaccccaccaccggggaacggcgagggaacccaggaag

SEQ ID NO: 190060 - RNA, 81 nt, Homo sapiens
agaagcacggcagacagggcaaagaaaagggacgggaccaacggggaaccccggagggggacggaaagcaagccgcagaac

SEQ ID NO: 190061 - RNA, 78 nt, Homo sapiens
ccgccccccaagagacccggaaggaaggagacgaggcgaagccgacgagcccgaacagacgcaccagcgggaggaaga

SEQ ID NO: 190062 - RNA, 76 nt, Homo sapiens
caaaaggaaggaagagcaaaaagccagagagccagaggaaagccaagagaaaccaccaagagccaggaaggcaaag

SEQ ID NO: 190063 - RNA, 78 nt, Homo sapiens
gaagacgcgaggaggcagccgccgcccgcccgccaaacgcagaaagcaggagcacaaaggaacggaaaccaagccaaa

SEQ ID NO: 190064 - RNA, 40 nt, Homo sapiens
agcggaggccggcaaagccaagaccacaggcccaccaacc

SEQ ID NO: 190065 - RNA, 72 nt, Homo sapiens
agagacaacgggccggagggacaaaaagcaagcaagagcgcgacacccaaggccgcggaaaggcagccacag

SEQ ID NO: 190066 - RNA, 72 nt, Homo sapiens
ggggggaaggccaagaggcggcgggagaccccaaccgcagagcgcccggggccggaggacgcggggaaccag

SEQ ID NO: 190067 - RNA, 64 nt, Homo sapiens
aggaagaggccaagcgaggaacaccgaggacagaggcgagccagaaaacccgcagcccaaaggg

SEQ ID NO: 190068 - RNA, 76 nt, Homo sapiens
cggggcccccagcaagaacgggaacaaaaccggggacgcccagaaccagcgcaccggcccgccgcaccacgccgca

SEQ ID NO: 190069 - RNA, 80 nt, Homo sapiens
gggcgcggcggcgcgcggagaaggcggcggagcggcgccgcaagcaggcgcagaaggagaaacggaaacagacgaacagg

SEQ ID NO: 190070 - RNA, 82 nt, Homo sapiens
cgagaccggaccgagagcggaccgagagcgcgaaacgcacgagaaggaagggggagcaacagacaagcccgaaaggaacagc

SEQ ID NO: 190071 - RNA, 74 nt, Homo sapiens
agagcaacacaacggaaaggagcaagagaagccaagaggaaacccaaagccggggaaaacagaggccacaggaa

SEQ ID NO: 190072 - RNA, 69 nt, Homo sapiens
gacgacccgaccacggcgggggaggcaagcaggggggcaaaggaaagaaggcagaaagggaggccagga

SEQ ID NO: 190073 - RNA, 78 nt, Homo sapiens
agccgccgcccgccaacccaccgacacgcaggcaagaccggaccagaaccgcagaaccaaacacagccggagccgacg

SEQ ID NO: 190074 - RNA, 78 nt, Homo sapiens
ccagcaccaccccagccccgcgcccgacgagccacagaccacccaaggccccccagccaacccgacagaaccagcaga

SEQ ID NO: 190075 - RNA, 76 nt, Homo sapiens
gagggccggagacccagagccgggaaacagcccgccgcagggaaacaaagagaaaggcggaaccgggagcaccagc

SEQ ID NO: 190076 - RNA, 50 nt, Homo sapiens
agcgagacgaaaggagaaaggacccggagacaaccaccccgcacaaccag

SEQ ID NO: 190077 - RNA, 75 nt, Homo sapiens
gcagccagggaagagaaaccgagcaacagacaaagcccggggaggaaagacaagccccaaaagcagccgggaaag

SEQ ID NO: 190078 - RNA, 74 nt, Homo sapiens
ccgcgcggcaagaagacggcgcggcaaccggggagcccgccagaaccggaaccgccccgcccggacgacggcca

SEQ ID NO: 190079 - RNA, 83 nt, Homo sapiens
acaggcggaggccccagggaagcgcagaaagcaggcgaacccgcggcgcaaaacgcggagacggagcggcggcaagcagcgag

SEQ ID NO: 190080 - RNA, 72 nt, Homo sapiens
ccggccccgaagagagcccggaaccaccggccgcagccgcagccgggcggcggcgagaaacaccacccgcca

SEQ ID NO: 190081 - RNA, 34 nt, Homo sapiens
ccagaccggggccaaacaaacggggaaaacagaa

SEQ ID NO: 190082 - RNA, 62 nt, Homo sapiens
cacaaaggaaaagcacaagaagaaacggcgaggaaagagaggagccccggaaagaaaaggac

SEQ ID NO: 190083 - RNA, 53 nt, Homo sapiens
gcccgaaaaagacgcgagaagccacacgcaccgccggccaggaggagagcgca

SEQ ID NO: 190084 - RNA, 71 nt, Homo sapiens
ccagaaaaccacagacaaggaaccaacaaaagcgaagccaccagaacggaagaaagcgaaccaacacacac

SEQ ID NO: 190085 - RNA, 84 nt, Homo sapiens
cccggagccgcccaagccgcgccccagagagcgcccgagagaacagggggccgcggccagccagagaagcaaaagaaacaaggc

SEQ ID NO: 190086 - RNA, 80 nt, Homo sapiens
ccacagagaagcagcggaagcagcgaacagcccggaagaggccgcccagggaggccaagccaagagccgggcccccaaga

SEQ ID NO: 190087 - RNA, 87 nt, Homo sapiens
gggcggccgaccacccggcccggaccacgcccagccgcgccgagcaccgcagccccagcgaaccggagaggacacagcagaagagaa

SEQ ID NO: 190088 - RNA, 83 nt, Homo sapiens
gcggcccacgaggaggaccagaaggagacgggaccccggcccagcagcagcaggggaaaagagacgcaaaccacgaggacaga

SEQ ID NO: 190089 - RNA, 68 nt, Homo sapiens
ggcgcggggcggggaggcgggaccagacgaggaacagcaaaaagaacagaaaggagagcaaaaaaccg

SEQ ID NO: 190090 - RNA, 40 nt, Homo sapiens
gccggccgcgggaaggagagggggcaaggcagaaggaggg

SEQ ID NO: 190091 - RNA, 75 nt, Homo sapiens
aaggccccgaccacaaagacaccacagcaggccgggggaaaagccagaaaggcccagcgaaccgccagggagcca

SEQ ID NO: 190092 - RNA, 69 nt, Homo sapiens
caagagcaggagcgaggagcccggcgagaagaggagaggggaagacgaagaacggaagcgccccagagg

SEQ ID NO: 190093 - RNA, 60 nt, Homo sapiens
gccgacccaggccgccggccccacagggaccaagaacgcccagcccgcgggcaccggcag

SEQ ID NO: 190094 - RNA, 85 nt, Homo sapiens
cggggaccgcaggagagaaagggcgggagcggagcgagaggcagccaggacggagagaaggacgaggacacggaggccaaagaag

SEQ ID NO: 190095 - RNA, 81 nt, Homo sapiens
ggggcaggacaagagaagcacaaaacagcagacccaagagcagcggaaaagaccagcacaggcgaaggggcgccgaaccga

SEQ ID NO: 190096 - RNA, 60 nt, Homo sapiens
cgacggcagccggcaggcagggcggagcgggaccgccgcccgggcgcgagacgcgcgcca

SEQ ID NO: 190097 - RNA, 87 nt, Homo sapiens
gcaaagcccccacgcccagccaggagcaccgccgaggacccagcacaccgaggggggcacccgaggaggaagagggcagggcccacg

SEQ ID NO: 190098 - RNA, 78 nt, Homo sapiens
caaccaccaggaggaaagcccagggggcgaggccggaaggcaaaggagcagggaagaaaggccgcagggcaaggccac

SEQ ID NO: 190099 - RNA, 69 nt, Homo sapiens
ggaagaggaagagccagcacagacccgagggaagaccgcaggaaagcaggaaggcaagaaagccaagga

SEQ ID NO: 190100 - RNA, 73 nt, Homo sapiens
ggggcagccccaggagagaaagcccggaggagcggaaaggcccccgcgggcgcacacaggaaggcggagggaa

SEQ ID NO: 190101 - RNA, 77 nt, Homo sapiens
agggaccggaacggcggcgacaaggggcccgaacagagggagaccaggcaccaacgagaccaagaaacccagaggcc

SEQ ID NO: 190102 - RNA, 75 nt, Homo sapiens
gcgaacaaaaagcagcaaaccggaccaccccgaagaaagcacagcggggagcgccagggccggcccaggaccaca

SEQ ID NO: 190103 - RNA, 99 nt, Homo sapiens
gagagcccacagcccggagacgagagggccaccagagggccacaggcccacagacgggagaagaaggcacggacgcaggagacaaagccagcaaaggga

SEQ ID NO: 190104 - RNA, 50 nt, Homo sapiens
gggcgcaccacgaaaacaacacagcagggaagcagaaggaaggggaggcc

SEQ ID NO: 190105 - RNA, 77 nt, Homo sapiens
gagcgcaaggagaacaaaacagccaacgggacccaggggagcgacagccaaagcaacaagcccgaaaacagcccagc

SEQ ID NO: 190106 - RNA, 72 nt, Homo sapiens
aagccacagcgcgacaggaccgacagggaacgcagaggaagggagaaccggggaacaccaggcgacaaagac

SEQ ID NO: 190107 - RNA, 62 nt, Homo sapiens
cgaacaaggcagccaaaagacaacaggggagggcaggggagcacgcggacagaacggagcgc

SEQ ID NO: 190108 - RNA, 55 nt, Homo sapiens
cggggagaccccgacgggaggccgaggcaccacacccagaccaccaaaacaaagg

SEQ ID NO: 190109 - RNA, 68 nt, Homo sapiens
acggggggcagcaggagccccagccgaggaggccccaaggaccagcaccggacgggaccaccagcccg

SEQ ID NO: 190110 - RNA, 78 nt, Homo sapiens
gcacaccagccaagccaagacagggaggggacggaaacgccaccagcaggaggaagaggcggccgaaccccgacccag

SEQ ID NO: 190111 - RNA, 80 nt, Homo sapiens
aaacggagcacaggaacgaaaaccagcgaccacaagccgagcgccccccaagggggaggcagcagaggcgaaacgaccga

SEQ ID NO: 190112 - RNA, 73 nt, Homo sapiens
ggccagcaggaggcgagaagacagaagcgaaggggacagggggagaaccgccagggaaacccgggggacagac

SEQ ID NO: 190113 - RNA, 72 nt, Homo sapiens
caagcacacgaggaaaaaaggacacggagagaagccgaaggaagccaagagcccaaaggcgcaggggaaagc

SEQ ID NO: 190114 - RNA, 73 nt, Homo sapiens
agcagcccgaggagcaggggcccgcgacgggccgcccggcaaggcgcccccaaaagagacggggcgccagggc

SEQ ID NO: 190115 - RNA, 76 nt, Homo sapiens
gaccggcggggcccagggagaaaggcccaccggccgggagggcccagggcggggcccgaggaaggcccggcggggg

SEQ ID NO: 190116 - RNA, 75 nt, Homo sapiens
gcccccccaagaccaggcgccagggcgagcaccgaacaagaggagaaaggagccggaacaaacccgggagaaccg

SEQ ID NO: 190117 - RNA, 76 nt, Homo sapiens
gccaaaggaaacgccacacccgcgcaggagcgcccggaggagggcgagaccaccagagaggagggggccacccaac

SEQ ID NO: 190118 - RNA, 49 nt, Homo sapiens
cgcaccccaggaaaccagcacgcaggaaagacagggaagacaaggaacg

SEQ ID NO: 190119 - RNA, 79 nt, Homo sapiens
agaacgaaaaaaagagaaaccggggaaccacggacaacccagaggacaacgaaggcggaaagagggcaaccccgcagga

SEQ ID NO: 190120 - RNA, 111 nt, Homo sapiens
ccggcccaagcaagagcgacgcaagaggcagccaccacgggccggacacacagcgaagacgacaacaacccggccaagggcccgggacaccgggaacggccggcgggagaa

SEQ ID NO: 190121 - RNA, 82 nt, Homo sapiens
cccgacgacagcgggccgggaaaagggcacgaggccggaaccgcccagccccgacccaacagaggaagccgcaagaaacggg

SEQ ID NO: 190122 - RNA, 89 nt, Homo sapiens
ccaaacaggagcggagcagccaaagagacgcggggaggaggaggaggaagggagcggcagcaggaaggagaccccccgccacgaaggca

SEQ ID NO: 190123 - RNA, 73 nt, Homo sapiens
agccgcagcggaaagcaggagcacaggcagaacaagaagggcaaccaggggggaaggagggagcggagaacgc

SEQ ID NO: 190124 - RNA, 64 nt, Homo sapiens
caccaaccgcaccagcaagggccaaggagaccgcacgccggacggagcccaccaccaggagaaa

SEQ ID NO: 190125 - RNA, 81 nt, Homo sapiens
gccgcccccaggccgcgccgagcccgccgcgcgggcccgcccgacgcggaaggccggagaaaaacagcagggccggagaca

SEQ ID NO: 190126 - RNA, 79 nt, Homo sapiens
gaggcggaagaaaggagcgcagaccgggggaaggagaggccaccaaacagaagaggagagcgacccccaaccacaagga

SEQ ID NO: 190127 - RNA, 83 nt, Homo sapiens
cggggggggcacacagaacaacaaggggagccgccggacggcagcaaagccgaacccagaaggcgagaacaggagggagaagg

SEQ ID NO: 190128 - RNA, 61 nt, Homo sapiens
caagacggcgaagcgcgcgccgcgcccggaccccagggcggagaacggaaaagcaccagga

SEQ ID NO: 190129 - RNA, 76 nt, Homo sapiens
acggggacgaaagaaagaggacaagaagacgaaggccagcgcaggaaggaagaagccgcgagagaaagaaaaggcc

SEQ ID NO: 190130 - RNA, 89 nt, Homo sapiens
ggaggagaagccggaggaggacaacgacaccaccgcagcgacgagcagcacacaaacgaaggacaaaacaggcaagcacgggcacaggc

SEQ ID NO: 190131 - RNA, 100 nt, Homo sapiens
agcggccggggcccgggcggcgggcggagacggggcgcccccccgccaaggcccggcgaggcagccgccgcaaagggacgacgaagggacagccagaagg

SEQ ID NO: 190132 - RNA, 73 nt, Homo sapiens
ggagacagcggcggacggaggaggcagaagcgcgcgagcccgggaggcggcccggcagcaaggcgagaagaaa

SEQ ID NO: 190133 - RNA, 77 nt, Homo sapiens
cagcgcgagccggcaggccaccgcggccaccgcgcgaaccgccgcaggagcccaggccggacaggaggcacccccaa

SEQ ID NO: 190134 - RNA, 86 nt, Homo sapiens
cccagcccccgagcagcgggacacagggcccgccaccacacccaggacggccagcagaagcaggcgagccccccgagaaaaagaag

SEQ ID NO: 190135 - RNA, 88 nt, Homo sapiens
cagaaacaacgcggcaggaccaagcaacaccgccaacaccacaacccccgagaccagcgggaccaggagcggcggacggcgggagacg

SEQ ID NO: 190136 - RNA, 54 nt, Homo sapiens
ccaacagcaagaccagaaccagacacaaaagcaggaaacaggagcggcagccca

SEQ ID NO: 190137 - RNA, 87 nt, Homo sapiens
gaggagaagaagagcggaaacccagcggagcggccagggccccacaggggcacaaccgagcgggcccgaaggagcccagcaagccca

SEQ ID NO: 190138 - RNA, 71 nt, Homo sapiens
aagacaggccacccagcggggagcacggcgagcagccaggccaggagagcgcagcaacggaggagagacgg

SEQ ID NO: 190139 - RNA, 87 nt, Homo sapiens
cggccaggggcgaacagccacggccaacaaacagccgagagcagcagaggccgcgacaagacaaccggccacgacagcaccaccagc

SEQ ID NO: 190140 - RNA, 80 nt, Homo sapiens
accggaccgagagcggaccgagagcgcgaaacgcacgagaagcacaagacagacccaaggaccaccaccagagggcacca

SEQ ID NO: 190141 - RNA, 60 nt, Homo sapiens
aaaagccaagaggaggacagcgcacacagcaagcacgagaaaaccagaaggcaccgacag

SEQ ID NO: 190142 - RNA, 53 nt, Homo sapiens
cacgccccccgcaacaacccacaagaggagaaggccaaggagaaaagacgggg

SEQ ID NO: 190143 - RNA, 77 nt, Homo sapiens
aaacagccaggccacacaaagccgggggcccccacggacgcgcgagacaagaggagacgccgagagaaccaccgaga

SEQ ID NO: 190144 - RNA, 79 nt, Homo sapiens
ccggaccccgggaggcgaggacggccgccagaaaagcaggacggaacagagacgccaagcccgggcccggaggcacgag

SEQ ID NO: 190145 - RNA, 82 nt, Homo sapiens
ccccgcaacgcggaacccaagaaggcggagagaggaaggacagaaggcaagcagcaaggaacaaggaaagagcgaaggccac

SEQ ID NO: 190146 - RNA, 60 nt, Homo sapiens
gaccgaccaccaaaagacggaaaacgggcccggagaaacagccagggcgaacgggggggg

SEQ ID NO: 190147 - RNA, 78 nt, Homo sapiens
gggaaccggcgcgccggcgcgcggcgcggacaggcccaaacggcacgcagcacgggggcaggggccgacccagaacgc

SEQ ID NO: 190148 - RNA, 79 nt, Homo sapiens
ggcggagaggagcggccggagcagcgagggcccggcgaggagaaccaacggcccgaaagaggaagaagagagggcgaag

SEQ ID NO: 190149 - RNA, 74 nt, Homo sapiens
ggcaggggacaccagcgagggccacacaggagcccggacggcacaggggggagaaggacggcagaaaacgagac

SEQ ID NO: 190150 - RNA, 84 nt, Homo sapiens
gcgggccccaggccgcccagggacgcagaggcgggccgaggacgcgcagacccaggggagcccaccagccagcaacaggcccgg

SEQ ID NO: 190151 - RNA, 73 nt, Homo sapiens
acaagacaccagccaaaccagcccaaggcaccaggaccgcccccaccaagagaaccacggcggcagcacgccc

SEQ ID NO: 190152 - RNA, 55 nt, Homo sapiens
aacagcggcgggcggggcaccccaggaacccagcagaagccagccgccacgccga

SEQ ID NO: 190153 - RNA, 75 nt, Homo sapiens
aaccgagcgggggagaggacgcgcgaaccagcagcaggcccagacccagagcccagagaaagaggacaggcagaa

SEQ ID NO: 190154 - RNA, 38 nt, Homo sapiens
ggccagcgcaccacgagcagacgcggagcacaggcgac

SEQ ID NO: 190155 - RNA, 44 nt, Homo sapiens
agccccgccagacgccccaaacaaacacaaaagcagccaacaca

SEQ ID NO: 190156 - RNA, 86 nt, Homo sapiens
ggggcagaacccagaggcgggaggggccgggaggcagaggggcagggaccgagacaggggcccggcaccgcgcccgagcccaccca

SEQ ID NO: 190157 - RNA, 81 nt, Homo sapiens
cgggaacagccgagcgcaagagcaacaaagagacagacacgcagcacacgaaccagccggccgacgaggagcagggccccc

SEQ ID NO: 190158 - RNA, 74 nt, Homo sapiens
caagcgacaaccagaaggggaacgaaagacagaagcagagcgaacagaggccaaagagggcgaaaaaaaggagc

SEQ ID NO: 190159 - RNA, 71 nt, Homo sapiens
caccgcagcgaacagacccagagcgcacagaaagacccgaggggacccaagcgcaacgacccaaaccaagc

SEQ ID NO: 190160 - RNA, 79 nt, Homo sapiens
gaggaagaggagcaaggcacgaggaaaggaaaacccacaccacagaaggaggagagaccgccgggcgcaggcacaggaa

SEQ ID NO: 190161 - RNA, 40 nt, Homo sapiens
aacacaggcaaaagggaaaggaagagggaggaacagcagc

SEQ ID NO: 190162 - RNA, 85 nt, Homo sapiens
gacaaggaaagaggaggaggcaaaggacaaagccccagaaaacgggacacagacccccagcccgcccaacggagccgccgcgccc

SEQ ID NO: 190163 - RNA, 59 nt, Homo sapiens
gcacaccggaccaggaaacggaggcggcacgcccgggaagaacaggagaggagacgcgg

SEQ ID NO: 190164 - RNA, 83 nt, Homo sapiens
caagagcaaaggagcacaccagggcaaacgggagacagcgccaccacgaccgaaaaccccccgggccacagcagcgaggcgca

SEQ ID NO: 190165 - RNA, 78 nt, Homo sapiens
cggggacggcgcccgcgccaccaccggcgaagggacccggcaaagagagaggcacacgccgccgaaggccaggagcag

SEQ ID NO: 190166 - RNA, 67 nt, Homo sapiens
ccggcgcgccccacgggccaggaggggcaacaaggacccagacaaggcggggcccgccgcccggaga

SEQ ID NO: 190167 - RNA, 84 nt, Homo sapiens
ggaaaggacggacgagagggaacgcacaccagcaccagcccaccaaaccagcacgaccccggagcagaagaaggagcgcgacac

SEQ ID NO: 190168 - RNA, 64 nt, Homo sapiens
caggcccaagcaacaagccaaacggagacaggagaagcagagaaccccagacacagagcgaaag

SEQ ID NO: 190169 - RNA, 86 nt, Homo sapiens
cccggagaggagacccggaagacaacaagaaccagcagaagacacccaaacgaaagcaagaggacagcacggaccaaaaagagcgg

SEQ ID NO: 190170 - RNA, 37 nt, Homo sapiens
agagaggagagccggggcacaagacaagaaagaccca

SEQ ID NO: 190171 - RNA, 77 nt, Homo sapiens
gaaaaagaagacacgagcacaaaagcaaaagcagcaaccaaccaaagaggcagaaccccacccgggcagcgcgaaga

SEQ ID NO: 190172 - RNA, 83 nt, Homo sapiens
gagacgcgcaggaggccgcaagaagggccgaccgcggaggccggcacgaagaccgcccacagaaggccgcgccccccagagag

SEQ ID NO: 190173 - RNA, 80 nt, Homo sapiens
gaagagcaaagagaaaaggccgcacaccacagcccgccccaggggccaaacagcccaccccacacccccccccgccccgc

SEQ ID NO: 190174 - RNA, 68 nt, Homo sapiens
cagaagagggagacaggaaccaacggaaaaacggggaagacgcagaaaacgcaggacccccgcggacg

SEQ ID NO: 190175 - RNA, 80 nt, Homo sapiens
ccagagccgaggcggcggcacgagggccccgacccaggcaggagagcagggcaagggaaaaaacgacaccagaaagaagc

SEQ ID NO: 190176 - RNA, 84 nt, Homo sapiens
cgacagcagccaggagcagagcgacagcggcgagcagaacacggcgagcggaacccgaacggcaacagacgaagagagacagaa

SEQ ID NO: 190177 - RNA, 73 nt, Homo sapiens
gaaggaaccaaaaacagcacacaggaaaaccaaacggcaaccaaggccaaaagcacagcaagggcaaagcccg

SEQ ID NO: 190178 - RNA, 73 nt, Homo sapiens
ccaggacccacccgacccgagaaccaggggaccagcagagggggcgcaaggcagccgccgcaaagggacgacg

SEQ ID NO: 190179 - RNA, 84 nt, Homo sapiens
gaagacagcagcgcaagagggaccccgacggacaccccccagggcaaaaaacagagccaaacagcccaagaccacaagagcaaa

SEQ ID NO: 190180 - RNA, 41 nt, Homo sapiens
caacacccagagacgaaaggcccaaaaggagaagccagaac

SEQ ID NO: 190181 - RNA, 77 nt, Homo sapiens
gggccggcagcaccgcggccgcagaagaaaagaagagccccaggccaagggcgggagcaccccggcgaaagcagaag

SEQ ID NO: 190182 - RNA, 76 nt, Homo sapiens
gagcgagacagaagacaacggcgaccagcccaccgaaaggagagaagcagagccggcggcacgacagcaaaagcca

SEQ ID NO: 190183 - RNA, 42 nt, Homo sapiens
cgagaacgaccccgagacggccggcaagaagccaacggagaa

SEQ ID NO: 190184 - RNA, 39 nt, Homo sapiens
aggcgagcagcgcccccgaacgccaacggcaagaaaggg

SEQ ID NO: 190185 - RNA, 94 nt, Homo sapiens
gaggacagcaaagaagacagggagcaagccagaccggcccggaccgcccccagcgccacagaccgggccaaacaacccaggaggaagagacacg

SEQ ID NO: 190186 - RNA, 88 nt, Homo sapiens
cacggagccagcacaccccaggggcgcgacgcgcggggccaagaccaaggcccccagcaaaaagaagcgacgcaggcagaaaaacgag

SEQ ID NO: 190187 - RNA, 84 nt, Homo sapiens
agagacacagagaaggaggaaacaggccccaggcccgacggccggccgggaacaccagcggcgagagccggagaacccgccagc

SEQ ID NO: 190188 - RNA, 70 nt, Homo sapiens
cgcaggaccgccggagacagggcaacccacaaacagccacacagaaaagaaagaagacaggcgaaaagac

SEQ ID NO: 190189 - RNA, 73 nt, Homo sapiens
accgacacaaaccgagacgcaaggggggaacgaaccaggcagcccacccaggcacacccacgccgcgccaccg

SEQ ID NO: 190190 - RNA, 88 nt, Homo sapiens
aacacccaagggaagcagaagaaaaggagaaggaaagcgaaggggaaggcgccgaagaggacgaaggcaacggggggcaccacgccag

SEQ ID NO: 190191 - RNA, 67 nt, Homo sapiens
cccccagagcgggaacagaggaagaccagcacaggacgcccgaaaccggggcaacgcggaggaaggc

SEQ ID NO: 190192 - RNA, 52 nt, Homo sapiens
gagccagagagcgaggaaagcggcgggcgccccgccaagccgccaacaagcc

SEQ ID NO: 190193 - RNA, 77 nt, Homo sapiens
caccgagccaccgaacagaccgcccggggccccaggacggggacagggccgaagggcacacacgaaacgggcaaccg

SEQ ID NO: 190194 - RNA, 80 nt, Homo sapiens
gagagcgcagaggcaccacaggcaacacacaggacaacccaacccagagaaacaaggacagcgaccgggcagccggaagc

SEQ ID NO: 190195 - RNA, 83 nt, Homo sapiens
gcccgcagccgccgccacccaggccggccgcccccaaccagcagcccgaggccgcaaccagaaagaggaacagagcgaaggcg

SEQ ID NO: 190196 - RNA, 61 nt, Homo sapiens
ggcccgagcgggggcagccgcagaggcgcgaacgagggcaccagagcacagcggacccccg

SEQ ID NO: 190197 - RNA, 81 nt, Homo sapiens
cacccagacgcccccggcgggccgcccaacaacgccgagagagccccaccacacaggaccacagagaagcaggcgaccagg

SEQ ID NO: 190198 - RNA, 77 nt, Homo sapiens
caggcaacacgacaggcgcaggaccccggacaaacaacagcagggacaggaccagaaggagagagagacagagggaa

SEQ ID NO: 190199 - RNA, 73 nt, Homo sapiens
gaccaaccccccggagccaggacgcagcccggacaaaacccccggaggaacagcccaagcaaagcagccggga

SEQ ID NO: 190200 - RNA, 65 nt, Homo sapiens
ccaacgggacgggcaagacgagagggcccgacggaggggaggaaggcaggggcagcggaggcaga

SEQ ID NO: 190201 - RNA, 84 nt, Homo sapiens
gggaagcagaccacggaaggagggagagggagccgccccgcaggggccagggcacgcacgcaggccaggaagcccggggcggcg

SEQ ID NO: 190202 - RNA, 81 nt, Homo sapiens
cacacgcccacaaagcccagaagaagggcaccagcgaaggggcgaaacaccggaaaacggagccgcacaccaaggaccaag

SEQ ID NO: 190203 - RNA, 64 nt, Homo sapiens
gaaagcgcgcagggccgccaggcacccggaaggcagccccccagggacgccaggaacaaaagaa

SEQ ID NO: 190204 - RNA, 57 nt, Homo sapiens
ccaacacaaaaaaaaccaacagccccccaggacccggccgccgaacgacaggaggac

SEQ ID NO: 190205 - RNA, 97 nt, Homo sapiens
ggggcccagcccggggccggcgcagggcggaaggacaacagcccgacaaccaggggcaaaggaccggaagcggggccaggaggaaagccagacacag

SEQ ID NO: 190206 - RNA, 74 nt, Homo sapiens
gcacgaaccaggaggagaccccacgccggacccaaggcggccccacaaagaaacagacagagaagggaaagacg

SEQ ID NO: 190207 - RNA, 81 nt, Homo sapiens
gaccaggaaacaaccgaaagcgcaccacccggagcgagacgcgccgaaggggggagccaccgaacgagaagaagcgggggc

SEQ ID NO: 190208 - RNA, 77 nt, Homo sapiens
cacaggaggcggcgggccccgcccgccgaaggggccggcccagggagaacgcaaaaccaccacccccacaaaaaacg

SEQ ID NO: 190209 - RNA, 75 nt, Homo sapiens
acaccaacaaacgaagaagccggggacgagccggaagaaccgggaaaaccggaggccagcccacccagagaggcc

SEQ ID NO: 190210 - RNA, 73 nt, Homo sapiens
ccgcggagaacaaccgcgagagggagggccccgcggaccaccgccggggacaccaccagccacaagaacaagc

SEQ ID NO: 190211 - RNA, 76 nt, Homo sapiens
gggcgggggaacgaccgaaccaaaggggccaagcgcacccggaagggcaggagaaacaaaaccaagaaaccacaac

SEQ ID NO: 190212 - RNA, 78 nt, Homo sapiens
gacggcgcgaggcgcgggcacaggcacaagcagaggaaccagggaaccgccgccagcaaccaacaggcacgaggaagg

SEQ ID NO: 190213 - RNA, 82 nt, Homo sapiens
ggggaccccagcggacacggccacgggcagggcccgcgggaaaggaaaaggggaagaaggagaccagaaaagcagagcagac

SEQ ID NO: 190214 - RNA, 73 nt, Homo sapiens
ccaggccgccaggcaccggaacacgaccccgcacaccgcacgagcagacacagccgcaccaggagggaccaaa

SEQ ID NO: 190215 - RNA, 81 nt, Homo sapiens
agcgggagcggagaaccagacacacgagcaggccgggagcagaaaccaccaaggacaagagcccacccaggagccaaacag

SEQ ID NO: 190216 - RNA, 81 nt, Homo sapiens
ggccgcccgacccaaagggaaaacagaaacagacaagggaggcgaggacggacaaaaggaaacggacgggaggccagccag

SEQ ID NO: 190217 - RNA, 71 nt, Homo sapiens
gagccacgaacacaaaggagggacagcagcaagagccccaaagccaccagacccgggagagggcccaaggc

SEQ ID NO: 190218 - RNA, 86 nt, Homo sapiens
ggaggagcggagacagagaggaccgagcgcgggcaggcgggaggcaacggagcaccagccggcacgcgagaaggggagggggagaa

SEQ ID NO: 190219 - RNA, 84 nt, Homo sapiens
ggaggccgagaccagacgcggagccaggccgaggggcggacgcggccgggagaagcccaccacgcaacgggacggcgcggcgga

SEQ ID NO: 190220 - RNA, 50 nt, Homo sapiens
gagacagggccacgaacccgggaaagcaacgcccgaggaggagaaacaag

SEQ ID NO: 190221 - RNA, 78 nt, Homo sapiens
gaggaagaaaagaaaggagccgaagaaccacggaaaggccaaagaagagacgaagcaaaggcgcccggagccccagaa

SEQ ID NO: 190222 - RNA, 76 nt, Homo sapiens
caggagcggccccaggagcaaaggcgaagccaggggcccccccgaccgagcagaggaccaagaggagcacagggca

SEQ ID NO: 190223 - RNA, 60 nt, Homo sapiens
gagacggggaggacaggccagcgcggccaagacccgccgcaagaggaccggacacagaca

SEQ ID NO: 190224 - RNA, 69 nt, Homo sapiens
acgcacggaccaaaaacccgcaacagcccccgcccaacacggaacggaaacagaggcggaggcggccgg

SEQ ID NO: 190225 - RNA, 66 nt, Homo sapiens
aggaaaagaagaaacacggcggcaggaccacgcagacaaagaacaggggcaaccgcgcaacggcgc

SEQ ID NO: 190226 - RNA, 72 nt, Homo sapiens
aggccgagccaggagaagggacagacacaacggaccaagcggaggccgaggagagaaaaaacacccagaaaa

SEQ ID NO: 190227 - RNA, 71 nt, Homo sapiens
gagcccagggcggagagggaaaggaccgcagaccccagaggccaggggaggcaaggaggccacggggccga

SEQ ID NO: 190228 - RNA, 71 nt, Homo sapiens
ggagcaccagccagaccgggaagaaacgaaggggggaggcccaggccaaaagagagagcgccagcggaaag

SEQ ID NO: 190229 - RNA, 70 nt, Homo sapiens
ggcggcgcccgcgccacagccaccagagccggcagcaaagagggaacagaaacgccgaagggaccaggca

SEQ ID NO: 190230 - RNA, 83 nt, Homo sapiens
cgcaggcgggggcagggcgccacacagccccacaacacaccgcaccggcccggcaaggcacccacaccgcggggcggaacaac

SEQ ID NO: 190231 - RNA, 76 nt, Homo sapiens
ggcaccggaccgaggaaaccaggaagaagacagagacccccgcgagccaaaagccgagaacaaagcgggagcccac

SEQ ID NO: 190232 - RNA, 74 nt, Homo sapiens
cagcagggacacgagacggcagacccagcgccgggccaaaacagaagaggcaaagcccagccacagcagcagcc

SEQ ID NO: 190233 - RNA, 86 nt, Homo sapiens
cgcaggggacgcgggggcgcaggacgagcaaggagcacagaccagcgcgcgaccggagccccacagcggcacaggccccagccaag

SEQ ID NO: 190234 - RNA, 81 nt, Homo sapiens
ccagccaacccaagaccaacaccgcacaacggccacaacacaggggacccaagggagagagggaacggcgaaagggcagcc

SEQ ID NO: 190235 - RNA, 72 nt, Homo sapiens
ggagaggcggggagcagcgccgggagaaggaccacgcaggggaaaccaagacacaaaacagggaccagcccg

SEQ ID NO: 190236 - RNA, 68 nt, Homo sapiens
cgagggcagggcggaagccgaagccaggcggaaagcaaaagacgaaacccggagcaggggcgggagcg

SEQ ID NO: 190237 - RNA, 71 nt, Homo sapiens
agacagcaccaacgaaaaccagaaggcaccgacaggaaaggaaaaggagaaccaggcacccgggggcaagg

SEQ ID NO: 190238 - RNA, 76 nt, Homo sapiens
gacccagagaggacacgaaccaagaggaggaggagaaagaaggaagaggcagaaggagaagaaaagaagaccaaaa

SEQ ID NO: 190239 - RNA, 61 nt, Homo sapiens
ggagagcgcgccgccgccgccgccgccgccacgagaggcagaggacagaaggaacagagac

SEQ ID NO: 190240 - RNA, 74 nt, Homo sapiens
ggaaggaagcagaggcggggccgaaaaggaaaaccaagaagggaggggacgccaccgaaagaaaccaagagaac

SEQ ID NO: 190241 - RNA, 64 nt, Homo sapiens
caagcacgggcgcccacgaacgccaagcccggccccaggaccccaagcaggaggagcaccgacc

SEQ ID NO: 190242 - RNA, 72 nt, Homo sapiens
accaaggcccccggacacacagaggaggcaaaaacaagcacacacaaacagcagcaagcggcgcccccagag

SEQ ID NO: 190243 - RNA, 63 nt, Homo sapiens
gaaggacaccagcgcggaagcggcggcagcagaccgcaggggaagcgcagcacgcaccaggag

SEQ ID NO: 190244 - RNA, 80 nt, Homo sapiens
ccaacacgcccgaacgggcaggcccagacaggccagacagaggcaagacgagacgcaaaagcgcagcggaacgcaacaag

SEQ ID NO: 190245 - RNA, 95 nt, Homo sapiens
gaggcggcggaggaacccagcagcagaagcaggagccgcgggcagcgacccgaaggcacgacgacggagagaggaagaagacggggcggcaccac

SEQ ID NO: 190246 - RNA, 35 nt, Homo sapiens
gggaaaggaaacaccgggcaccggcccgaccagcc

SEQ ID NO: 190247 - RNA, 70 nt, Homo sapiens
ccggcaagagaagacaagggaagagcacaaagcagcaaccccagagggaacgggacgggggagcagaacc

SEQ ID NO: 190248 - RNA, 74 nt, Homo sapiens
agcggaaaccagggccacagcacgcagccccaggcaggaaggagggccccggagcagccacaccaccgaggccc

SEQ ID NO: 190249 - RNA, 67 nt, Homo sapiens
acccagaggaggagagcaggaggagagaggaccagagaccgagacaggggcccggcaccgcgcccga

SEQ ID NO: 190250 - RNA, 41 nt, Homo sapiens
cacccgcccacaacacaagaaggcagccccaaaacccagag

SEQ ID NO: 190251 - RNA, 67 nt, Homo sapiens
gcgaggagcaggcggagcacccaccacggagggaaagaccaggcaggccccaaacacaaggcacgca

SEQ ID NO: 190252 - RNA, 76 nt, Homo sapiens
ccaacccggaaaggcagaagggaaggagcagaacggaggggaacacaaaaagaacccaggacgagaaaaaacagag

SEQ ID NO: 190253 - RNA, 89 nt, Homo sapiens
gaccccgaaggcgcaaacgacaccacccgaccgagcccacgcggaagagggcagcccggcaagcccgggcccgagccggacccagcggg

SEQ ID NO: 190254 - RNA, 54 nt, Homo sapiens
gcccccaacaaccagagagcggcggagaacggaaaagcaccaggaagcagagag

SEQ ID NO: 190255 - RNA, 71 nt, Homo sapiens
aaaccggaggcaggaaacgcagcaaagccacgggggagaaggggagccgccaccaaaagcagacggaaaac

SEQ ID NO: 190256 - RNA, 79 nt, Homo sapiens
ggcgccaaccccgaacggggggagacgccacggaacgcaggaacacacccgcagaacggagaaaagggaagacaaggca

SEQ ID NO: 190257 - RNA, 76 nt, Homo sapiens
caagaaaaaggcaggaacaaccacaagacgcgagggccacaagacaagaccggacaaccagcacaccagaggcccc

SEQ ID NO: 190258 - RNA, 62 nt, Homo sapiens
aggcgccgaacacaggagggaaaccggcacagggaagagaaacagagaaaccgcgaccaagc

SEQ ID NO: 190259 - RNA, 63 nt, Homo sapiens
agccaggcgcgcgagaaggcggccacagcaggaggacgcggaacggaacacagcacccaccca

SEQ ID NO: 190260 - RNA, 76 nt, Homo sapiens
acaacgggcacccacaacagaagacagccggcaaccaagaagaaaagagggcaagacaagacccgacccgggagcg

SEQ ID NO: 190261 - RNA, 67 nt, Homo sapiens
agagacagggcacaccaaacccacgacagcaagaaagcaccagccaagcagaagggagccagcggac

SEQ ID NO: 190262 - RNA, 78 nt, Homo sapiens
aaccacggggaaaaggcaaaaacccacaccgcaacccagcgagagaaaggacaacaaacgagcacggagaaccgccag

SEQ ID NO: 190263 - RNA, 76 nt, Homo sapiens
cgagagccaccggaccccagagccaccaacaacccaccagcagccaccaaggaggcaaggaggccacggggccgaa

SEQ ID NO: 190264 - RNA, 80 nt, Homo sapiens
cccccaggcagcagacaaagacagcagcgagagccagccccgaggaagaggaggagagaagagaggaagcgagcagcacg

SEQ ID NO: 190265 - RNA, 55 nt, Homo sapiens
ccgaagaggcaacaggaggagcaaaaaggacagagcacagagccagcacaggaag

SEQ ID NO: 190266 - RNA, 79 nt, Homo sapiens
aaaggaccgggaccggggcgcccagacgaccggaagagcaccgaacccagaagcccgagagacgagacagacaccaaag

SEQ ID NO: 190267 - RNA, 80 nt, Homo sapiens
acaaaaggagaaaccacagagcccagggccaaaaagacaaaaaacccaggcggcagcagcagacggggcgccagggccag

SEQ ID NO: 190268 - RNA, 73 nt, Homo sapiens
ggcgggggaggcgagcgcgccgcccggagccgcgcacacgcaaacgaacacaagagacagggaacaccagacc

SEQ ID NO: 190269 - RNA, 76 nt, Homo sapiens
aggaggaagaagagacgaagagacagcggagaaggaggcagcacccccaggcagagcggccgggacagaacggccc

SEQ ID NO: 190270 - RNA, 90 nt, Homo sapiens
aaggcaagaccgaacagaaggaacgacgcggaccagaagccagagcgaggacgccggcagcaaaccaggcgagacagcaggagcaccaaa

SEQ ID NO: 190271 - RNA, 68 nt, Homo sapiens
agagcgcgcggccaagacaagcggggacgagagccccggcacaaacggaccaccagaaagcaccccac

SEQ ID NO: 190272 - RNA, 75 nt, Homo sapiens
ccccacgcccggacccgccgccagcccgcgagaaacgcaccacccaccaaccacagaaacacgaagacaccgacg

SEQ ID NO: 190273 - RNA, 59 nt, Homo sapiens
ggggggaccaaaacaggagcagaacggaccagaccacggagagacaggagcggggcaac

SEQ ID NO: 190274 - RNA, 61 nt, Homo sapiens
acagaccacaacaccaggaggaccagcggacgacccccgggacaggagagggaagcggcag

SEQ ID NO: 190275 - RNA, 83 nt, Homo sapiens
gaacaggcggcgcgcgcggcgcgggacgcgcgcgggcacccacggagccccggggcgccacgaaccgacggggaccccaagag

SEQ ID NO: 190276 - RNA, 58 nt, Homo sapiens
cgggagacgcgcccacagaaacccggacgagaggcagcgagaggggaaaaggaaacca

SEQ ID NO: 190277 - RNA, 84 nt, Homo sapiens
gccagaagccagggcaggagcccagccggcggacgccaggaaacaggggaaaaccggacagacaagccccgagggacacggaaa

SEQ ID NO: 190278 - RNA, 77 nt, Homo sapiens
ggagcggagcccggagcgcgggaaagacgcagaaaacagacacacagcggagacaagcagggccggcaggaggcggg

SEQ ID NO: 190279 - RNA, 68 nt, Homo sapiens
gcaacagggggaaaaaaggcaaaggaacaaaagcggaagagaaaacagggggcgggaggacaagggag

SEQ ID NO: 190280 - RNA, 76 nt, Homo sapiens
ggccaccacagaaacaaaagcaacaaagagggagggcaggagaaaggagaaaaagaggcagggagaagaaacggca

SEQ ID NO: 190281 - RNA, 66 nt, Homo sapiens
gggccgacgccagggaacaagaagaaggaggccagccgacgaaacaacacaagaaaggagggaaaa

SEQ ID NO: 190282 - RNA, 69 nt, Homo sapiens
aaacgcggaaaaccgacacaacaggccaacagagagagaaacacagaaggacgaacacgaaacccaaaa

SEQ ID NO: 190283 - RNA, 78 nt, Homo sapiens
gccgggagcccgggcccaagcgccccggggggcagcccgaaccagccacaaagcaaagagccggggccggacgagaaa

SEQ ID NO: 190284 - RNA, 79 nt, Homo sapiens
cacacagcgaagaagaccgcgaggcacagagaggcaggaaaggaggaaacagcaacgaacaggaaaaaacgaagaggga

SEQ ID NO: 190285 - RNA, 85 nt, Homo sapiens
cggcccgcgaccccagcagggccagacccgggccacgcgccccgcagcccggcagcggggcgaacggaaaaaagaggcagagcga

SEQ ID NO: 190286 - RNA, 82 nt, Homo sapiens
agagaaagcgagaacaaaaccagcgagggggcagacccaaaggaaacgcacgaaagaaacaggagagcgcagcgaagcccgg

SEQ ID NO: 190287 - RNA, 81 nt, Homo sapiens
agcacaaacagaagagcgaaagcgaagcaggaagaggacgacccagagagggaccagggccaaagaagagccggggggcag

SEQ ID NO: 190288 - RNA, 83 nt, Homo sapiens
gaaacacccacaacaggagacaccaaagaagagaaagacaaggagaccaggaagggaaagccccagccccacaagcgggcccg

SEQ ID NO: 190289 - RNA, 53 nt, Homo sapiens
ggcagagaccgcaggaagaagcgaagagaccaaaaaaccaaggacgacgggaa

SEQ ID NO: 190290 - RNA, 74 nt, Homo sapiens
gggccaagagcagaccgggcgaagggagaggacagcagggaggcgggacgcggcaacggagcaaggaaagagca

SEQ ID NO: 190291 - RNA, 88 nt, Homo sapiens
gcccaacaagggccacaaaggaccaagaacggagcaagcccaggcacagccgacgccgcggggcgcggggaggcccagcccgccgcag

SEQ ID NO: 190292 - RNA, 73 nt, Homo sapiens
cgcgggacacaagacgggcaagacccagcgccaccccccaccagaagcgaggacaaaccaccacccaaaacaa

SEQ ID NO: 190293 - RNA, 72 nt, Homo sapiens
ccacggccgcgaccggccgcccgacacgggagcgcgaggccaggccaacgccgggaagaccgaagggcgcac

SEQ ID NO: 190294 - RNA, 76 nt, Homo sapiens
gacggaacgcggcaacgacaacagggcgaccggcacccacgaccgacaaggaagccacccgaggagcacccacggg

SEQ ID NO: 190295 - RNA, 48 nt, Homo sapiens
cgccgccgaaggcgccaagaaagccggacagggccagcaaacaagaac

SEQ ID NO: 190296 - RNA, 73 nt, Homo sapiens
cacggagagggaggaaccagagacccacacaagaaagaggaagaagcaagccggacccacgacggcaggaaag

SEQ ID NO: 190297 - RNA, 79 nt, Homo sapiens
gggaaagaggccggagagaagagacagagacaggggccaaacccacagacaagacgcagccagacccgagcgaaaccac

SEQ ID NO: 190298 - RNA, 75 nt, Homo sapiens
ccgaccgcggccccgccggccgccggccgcgcggggggacaccccgggccaagaggacaacaagaagcgccggcc

SEQ ID NO: 190299 - RNA, 73 nt, Homo sapiens
caaagaaccaaagcagcgaccccagcagcagcgacagaccgcggagcggcggacaccagaagagaaaagggca

SEQ ID NO: 190300 - RNA, 48 nt, Homo sapiens
gcacagcacccacaaagcaacggacagagggcaggaaccccacaaacg

SEQ ID NO: 190301 - RNA, 76 nt, Homo sapiens
ccccagcgcgggggagggaaggcgcgacccccccccccacacccgcgcgcggggccgacggagcaagcgcaaagca

SEQ ID NO: 190302 - RNA, 70 nt, Homo sapiens
acggagagccaaagggacccacgagaggacgcgggagcagcccaggacccacacaggggcacgcagaggc

SEQ ID NO: 190303 - RNA, 60 nt, Homo sapiens
cgcaccggacacagcggaggagaagcgcaggagaaagggcccccaagccggcaggggaac

SEQ ID NO: 190304 - RNA, 78 nt, Homo sapiens
agaagaagggacaggagagaaggagagagcgacaacaaaaaacccccccagcgcccgccccagcacccgaagacgccg

SEQ ID NO: 190305 - RNA, 78 nt, Homo sapiens
ccggcgagagccgaccagcgcagaacgcccgccccgccccgggaaagcgacaagcgaccaacccaacgggaccggaac

SEQ ID NO: 190306 - RNA, 80 nt, Homo sapiens
cccgagaggaaggaggaagaggagccagcagaacgcacaccagccccggcccaggacccccaaaaagacggggcgacggg

SEQ ID NO: 190307 - RNA, 52 nt, Homo sapiens
cagcccaagagcccaggaggacaaaacgccgaaacaggcaacaggcaaacag

SEQ ID NO: 190308 - RNA, 40 nt, Homo sapiens
gcgaagggagcggggaggaaaaggacaagcaggagacgcc

SEQ ID NO: 190309 - RNA, 74 nt, Homo sapiens
cagccaaagcggacgccggcgccgacgcgggaggacagagccagcgaaagagggaggaaaagaccggacccaga

SEQ ID NO: 190310 - RNA, 80 nt, Homo sapiens
acggcagcccagagagacggaaacaggaacaccaaggaagcaaaagccccagaaccacccggaggagaagaggcgcggaa

SEQ ID NO: 190311 - RNA, 75 nt, Homo sapiens
caaacagaaaagaagaggagaagcaagcagagcagagacagaccagaagacggcacggcacgggaccgagcggcc

SEQ ID NO: 190312 - RNA, 91 nt, Homo sapiens
cagcgcacacagcaagcacgagggaagccggaggggggagaaggcgacccggagagggcggggccgcagggccgaccagccacggacaccc

SEQ ID NO: 190313 - RNA, 88 nt, Homo sapiens
cggggaaagaccacgaccgcaggggccacaacgaagaagacagagagacaacgcaaagcagacgcgcacaaaaagaaaaacgaagaaa

SEQ ID NO: 190314 - RNA, 72 nt, Homo sapiens
caaggggacagaggcccggagcgcccccagagccagccaccaaagcagccaggaacacagggcacccaccac

SEQ ID NO: 190315 - RNA, 86 nt, Homo sapiens
gaagcgaggagggagaggcaagacggaaagcaaaccagccagcacgggggcccagccagccagcagcgaggggggacggaggcggc

SEQ ID NO: 190316 - RNA, 76 nt, Homo sapiens
accagagacggagcgggccgccgggagcgcgcggggcccagaagagggagaccaaccgaaggacaagggaaggagc

SEQ ID NO: 190317 - RNA, 79 nt, Homo sapiens
ggaccccaagaagaccacagagggacccggacaaccagaggcagccagcagggggaggaagcaacggaggcggggggcc

SEQ ID NO: 190318 - RNA, 69 nt, Homo sapiens
aaacacagaggaaaagggaaagaggaacccaagaaggaggagagggaaaagcccagccaaccagaaaaa

SEQ ID NO: 190319 - RNA, 73 nt, Homo sapiens
gaaccgagcgggccgaccaccgacaggccagaaaccgcagggagaggcccaccagaagaagccaaaaagaagc

SEQ ID NO: 190320 - RNA, 81 nt, Homo sapiens
cccccccccagggccaggcgccgccagaacgacaagcagaccggaagaccgacggaagaccacaccccgagggagcccagg

SEQ ID NO: 190321 - RNA, 62 nt, Homo sapiens
ccaaggagaagccccagcggcagaagccagagaggaaccaaccagaggcggggccaaagcac

SEQ ID NO: 190322 - RNA, 74 nt, Homo sapiens
cgacccgggggcggcgaccggagggcgcacagaagagcaacaagcggaagaccacaacgacgggggcacgagca

SEQ ID NO: 190323 - RNA, 82 nt, Homo sapiens
agaacgggggagaggggcagcgcccagccccggccgagggaccgcgcccccaaccagccaggcccaaccaaacgggcacccc

SEQ ID NO: 190324 - RNA, 60 nt, Homo sapiens
cgcacgcgcgcccgaagggcaacgccgcccaacaggcgaggagaaaaacaccgacagcac

SEQ ID NO: 190325 - RNA, 77 nt, Homo sapiens
caagaccaaaagagaggcaccgcggaacacaagaggccccgaagagcgaaagcgccaccggaggccgagccaccacc

SEQ ID NO: 190326 - RNA, 44 nt, Homo sapiens
aacagggagaagagacgacaggaaggaagccagcgaagcaccgg

SEQ ID NO: 190327 - RNA, 63 nt, Homo sapiens
ccgccgcgggcaggacgcgcgcgcaggcagccagaacgaaaaggcacagagagccagcggaag

SEQ ID NO: 190328 - RNA, 66 nt, Homo sapiens
caagaccgcaacaagaccccgaaaaagagacgagaagggaagcaaggagaaggagaagcagagacg

SEQ ID NO: 190329 - RNA, 79 nt, Homo sapiens
ccgggcccggggagaagacgcggcggcggccggcgcggaagaggccggcggcgggacggccccacgggacccgccccga

SEQ ID NO: 190330 - RNA, 86 nt, Homo sapiens
cggcagggccacgagcaccgcgccggcccagcaccccgagaaccgcaggagccagagagcaggaggccagcaccaccccgaacaaa

SEQ ID NO: 190331 - RNA, 88 nt, Homo sapiens
cggcaggccgcagcgcccgagcgagcaccccccaacgggcaaaccccgcccagcaggagaaccagccaaaaaagggcagaaccgacaa

SEQ ID NO: 190332 - RNA, 70 nt, Homo sapiens
agcagaccgccacacgaacacacgcgagaagaagaggacgaaaaccagaaggcgagacagcacaacaacg

SEQ ID NO: 190333 - RNA, 84 nt, Homo sapiens
gcggacgcgggaggaggcggcggcggcgggacacaggacaaggagccaccggagaggaagcggcagacagcgaaaggcacgcag

SEQ ID NO: 190334 - RNA, 61 nt, Homo sapiens
caggacggcggggcaccagggaaacggaagacaggacaggaccgaaaagacgcggccccaa

SEQ ID NO: 190335 - RNA, 79 nt, Homo sapiens
ggcgaaggagcggccgggagcccgccgcgcggagcgggaaaagccgggccacagaagcaccaccacaagccacaccaac

SEQ ID NO: 190336 - RNA, 53 nt, Homo sapiens
ccaaaaaagcaagcacaccaaagaacccaccacgcagaaggacagaaaggcca

SEQ ID NO: 190337 - RNA, 63 nt, Homo sapiens
cccaagggaccaccaaagacgaggcgcgcgcggaagagacagacaggcggggggcacaaagca

SEQ ID NO: 190338 - RNA, 86 nt, Homo sapiens
ccggaccgggccgcgcacgccgcccaggcaccgccagggaggagagcggggcacgcgcccaacgcgcaagaagcccaccacggagg

SEQ ID NO: 190339 - RNA, 116 nt, Homo sapiens
gcacagccggcggcgaaggcagcgccgacggcagccggcaccgacggcggaccgacccgagccgagcaaaccccggccacacgagacacaggccaccagaagaggaaaagcaccgg

SEQ ID NO: 190340 - RNA, 87 nt, Homo sapiens
caggagccccccgcccagacaagaaagggacgcggcacagaacgaagaagaaagcagaagcaagagaaaaaagaaacaccgagacgg

SEQ ID NO: 190341 - RNA, 83 nt, Homo sapiens
ggccacacacgcaaaaaacccagcgggaggaagaagaggccgccagcagcagagcagccaaggggcccaaccccacacccaag

SEQ ID NO: 190342 - RNA, 92 nt, Homo sapiens
cgggggcgcaaggacccagcagcggcccaagccgaccccacccggaaacagcgggagacgcaggcagaaggaaagggcgcagaccgggcagc

SEQ ID NO: 190343 - RNA, 75 nt, Homo sapiens
agcagaaacacaaagcagcccaaccaaagggaaaaagagggacgcggacagagacgggacgccagcaaagagcag

SEQ ID NO: 190344 - RNA, 75 nt, Homo sapiens
gagaaacgggagcaccaaaaaggcccgcacacagggacagcccacgccgaagcaccacaagcgacaggaaggaga

SEQ ID NO: 190345 - RNA, 79 nt, Homo sapiens
ccccaggagcgcgagcccacaacacccccagcggccgccggccccccacgaggcggccaaggaacaagacacagaagga

SEQ ID NO: 190346 - RNA, 82 nt, Homo sapiens
cgccgccaccaggccccccgccccggccgccaggagcagccgccggcgccaagagcaccgggaaccccaagaggaacagcag

SEQ ID NO: 190347 - RNA, 87 nt, Homo sapiens
cgcccaagccgcacagccgcggcggcagcagcaggagaggcacacagagaaaaaaagggaacaaaacacagcaagcagacaaaaggg

SEQ ID NO: 190348 - RNA, 67 nt, Homo sapiens
cgccaagcccggcaggacgacaggagggacaaaaaggaacagggaaggaccacgagccacccccacg

SEQ ID NO: 190349 - RNA, 75 nt, Homo sapiens
ccaaaggcacccgcgagcgcaacccaaggcgcgaacggcggaggcaaaaaaggagaaagaacaccaagcagaggg

SEQ ID NO: 190350 - RNA, 75 nt, Homo sapiens
cgccaggcagcgcccccaaacgccaagcgaaacagcgggaaccccaaacaaaaaaaaagaagaaaaaagccagac

SEQ ID NO: 190351 - RNA, 71 nt, Homo sapiens
ccgaacgcgaaaaaccggacggaaggcaagagagagaagaagccggcagcccggcccaggccgagaaaaaa

SEQ ID NO: 190352 - RNA, 59 nt, Homo sapiens
gcgcacgaggagcgacccaagaacacacgccgaaaggggacgagacaccaaaacgaaga

SEQ ID NO: 190353 - RNA, 74 nt, Homo sapiens
cccgccccagcccgccggcggcggcgggcggagacaacagggggaaaacagcaaggaaccggcaccagaacggg

SEQ ID NO: 190354 - RNA, 71 nt, Homo sapiens
gcggccccagccaccgacacaaacggcaaagcacagagccaagaaacaccagaaaaccaagggggagagcc

SEQ ID NO: 190355 - RNA, 80 nt, Homo sapiens
ggggcagggaaaggagaaacaccagacacggaagccacgccgagcacgcaacagggcggagaacggaaggagagggacga

SEQ ID NO: 190356 - RNA, 50 nt, Homo sapiens
caccccaccacgacacgggaggacggggcgaaggagccagggaggcagcc

SEQ ID NO: 190357 - RNA, 69 nt, Homo sapiens
agacccgagcagaggagcagggagaagagaaagagacgcaggaagcccagaaagaggacggccaggcga

SEQ ID NO: 190358 - RNA, 75 nt, Homo sapiens
acaaagggagccaggcacagaggcagaaagcacagagagcaggaacaaggcagccaagcacaaggacgagaccca

SEQ ID NO: 190359 - RNA, 69 nt, Homo sapiens
ggacggggagggagaagcggaagagacccgcggagccagggggaagacagccagcaagggcgaagacca

SEQ ID NO: 190360 - RNA, 75 nt, Homo sapiens
ccaccagaaacgcacgaacccggccagcgcggaaaaaggacaggacccaaccgacagcccgaccgacggcagaaa

SEQ ID NO: 190361 - RNA, 72 nt, Homo sapiens
cacccacggaccagcagcgccgagggaaacccggagaccaaaccggccgacgcccgccgcggccggggaaca

SEQ ID NO: 190362 - RNA, 76 nt, Homo sapiens
ggagagccaaagacaaggcgagagaagccagaccgaagaagaaggacaagagcaccaccagagaaagaggcccgcc

SEQ ID NO: 190363 - RNA, 73 nt, Homo sapiens
accgggagaccaagggagagccgagcagaaggacgcaggcagcgggcccagaccacaggcaaagacacggcag

SEQ ID NO: 190364 - RNA, 78 nt, Homo sapiens
agacaccgccacaaaccgagggcggagcagaggaggccgggcaggcacgacgggcccccgagagaaccgaggaccgcg

SEQ ID NO: 190365 - RNA, 75 nt, Homo sapiens
cgggaagcagaagcaagcgcgggcgaacacgacaacacagcgagcgaaaccaggaacggagcgacgaagacgggg

SEQ ID NO: 190366 - RNA, 79 nt, Homo sapiens
gccaggcacgcgaggcccccagggagagaaggcgcgcaggagagcgcagagacccgcccggaagcgaggcaacaggcgg

SEQ ID NO: 190367 - RNA, 73 nt, Homo sapiens
ggggccggcgaccaggcgggacgcagggaaggagcgaggaagacggacggcagacaacggcaagcggagaaga

SEQ ID NO: 190368 - RNA, 72 nt, Homo sapiens
gccccagcccggggcgcagcagcgaaggcggggaaggaaaacagcaacacagagcgaacaaaaaaccaggcc

SEQ ID NO: 190369 - RNA, 77 nt, Homo sapiens
gcccggcagcaccgcgggcacccacccgagcgcgcggcagcaccggccagcgcaggaccaccgccagggagaaaacc

SEQ ID NO: 190370 - RNA, 83 nt, Homo sapiens
ggcaagagacggaagcagcagcaacacacaaggaagccgggaggaagaacaggaaggcgagcggagaaaccgaaacgaaccca

SEQ ID NO: 190371 - RNA, 72 nt, Homo sapiens
ggaagcagccggagaacagggacggacacaagcaccagaacagaagaggaacgacagcgccaccccccagaa

SEQ ID NO: 190372 - RNA, 38 nt, Homo sapiens
cagcgaggaggacccccaaagagaccagggacagaagg

SEQ ID NO: 190373 - RNA, 86 nt, Homo sapiens
cgaggcgcccggcccccgcccgccgcgcccagagaagggagcacgcacgcgcaagcccgggaccgggagcccgggaccgggagccg

SEQ ID NO: 190374 - RNA, 70 nt, Homo sapiens
cacccgcgaaaagagccacggggccaagaaggcgggaacgacacgcaggccgcacgggcccaggcagccc

SEQ ID NO: 190375 - RNA, 70 nt, Homo sapiens
aagggccagaagagggccggcagacccccacaggcacccagacaaacaggaccgcgacagcaggccgccc

SEQ ID NO: 190376 - RNA, 74 nt, Homo sapiens
agggccaaagcacagccaagccagcagccgggcaaggaggggaggcgagaacacgaggaggcggacgggccccg

SEQ ID NO: 190377 - RNA, 104 nt, Homo sapiens
cagggaggacaggcacgcagcggaacccgggccaaaccacccccacccagccgaggacgcacccagacccagccaacgagcacagcccacagcaagggccgaaa

SEQ ID NO: 190378 - RNA, 82 nt, Homo sapiens
gaggacgaggcggcggccgcggggaggaggagggggcaaccagaggggccaacggacgacagacaccacgccacccaagaga

SEQ ID NO: 190379 - RNA, 72 nt, Homo sapiens
aggacaaagggggagaaagagcgcacagagacacaacagccacaagaaggagagacgcagagccagacaaga

SEQ ID NO: 190380 - RNA, 70 nt, Homo sapiens
agacaagccgggaagagaaagcggcacagcaagcaacccggccgaggggggcaccccgggaggaagcaac

SEQ ID NO: 190381 - RNA, 70 nt, Homo sapiens
cccaccaccaaccaaagagagagcaggacaagagcgcccaagcggacagccccacccgacaccagcggag

SEQ ID NO: 190382 - RNA, 80 nt, Homo sapiens
acgcgagcacggaagagcgcgcaggagcgcccgcaggaccaggcaagagcgaaggagaaaggcaacaaggcccgagcggg

SEQ ID NO: 190383 - RNA, 77 nt, Homo sapiens
gaaacgaacaaacgcacggagaaaaccaggcagccgcaagcgagagcacggcaagggacacaaggggacggaaccaa

SEQ ID NO: 190384 - RNA, 64 nt, Homo sapiens
cagcacgaggaggcgcgaggagaggcgccggcggcagagcggggagacgagacaaccgccccgc

SEQ ID NO: 190385 - RNA, 73 nt, Homo sapiens
ggcagagccgccccagcagcaggggcgccaggagcgggaacccaaggcaaaagcaaggggaagaaccaaaaac

SEQ ID NO: 190386 - RNA, 77 nt, Homo sapiens
ggcaagcggggccgcaagcaggcaagacccaccccacggacccaccgcgcaggacgaaagagggccccacgcccaaa

SEQ ID NO: 190387 - RNA, 55 nt, Homo sapiens
gcgagcccccgccgcgccccacgccggcacacacacagagggagcacggcccagg

SEQ ID NO: 190388 - RNA, 86 nt, Homo sapiens
ggagccgaggcgccgaaggaccgacgcccggggggcacggaccaggagcacccacccaggccccccgacaccacaaagcacccggc

SEQ ID NO: 190389 - RNA, 74 nt, Homo sapiens
ggcacaacacacaaaggcaaaagcggaccggaaaacccaccggcaagacacacccgaagggagcccaggccaca

SEQ ID NO: 190390 - RNA, 62 nt, Homo sapiens
ccgcgccccccagcaagaacagcgcgagccacaaggcaaggaagcaggcggcaccacccaag

SEQ ID NO: 190391 - RNA, 71 nt, Homo sapiens
ggcccgaaacaggagccgaggcaaggcaccgaacagggcaagacggacgagacgcgcgggcagaggcagaa

SEQ ID NO: 190392 - RNA, 73 nt, Homo sapiens
aaggaagaaggccccgcaaaccagacagacaacacccacagagagcggagcaggcaggcagaacgacacaaga

SEQ ID NO: 190393 - RNA, 111 nt, Homo sapiens
gcagaacgccaagccccgcgagcgcacgccaacgacgaggaccgacgcaggggcaccgagaaggagcgaggagccaaggagaagaaccaccagcacaagcccacaccaacg

SEQ ID NO: 190394 - RNA, 76 nt, Homo sapiens
gacgcgggccacagcgacgagcggacggaggggcacaggaaagggccgagaaagaagagaggaagaagaggaggag

SEQ ID NO: 190395 - RNA, 56 nt, Homo sapiens
aagagggaagcagacgagagcaagaccaaaacaagaaggcagacaggagggcaaga

SEQ ID NO: 190396 - RNA, 79 nt, Homo sapiens
gaccccccaggggccgggcgggacaggaccagccccaggccggagccagcagaaccccgccggagacaccacggcaagg

SEQ ID NO: 190397 - RNA, 83 nt, Homo sapiens
gagcgggaggccacagcagccagccggcccgaggacaccgacaccagcagaagacgaccccgacgcaggccaggagccgcgga

SEQ ID NO: 190398 - RNA, 82 nt, Homo sapiens
cgggaccgggaaccacgggggccgcggccggaccgagcgcccgacccggcgaggcgaaagagaagagaagaaaggcaaaaca

SEQ ID NO: 190399 - RNA, 80 nt, Homo sapiens
gcgcaggggagaaccggaaggaaccgacagaagccaggaccccagagagggccaagcccaagaacaaaaaccgaaaagga

SEQ ID NO: 190400 - RNA, 84 nt, Homo sapiens
ccagaaagaaccagacaagaacgagaggaggcgggcagaggagccagaagggggaagcccaagcagaccagccagccccaagca

SEQ ID NO: 190401 - RNA, 80 nt, Homo sapiens
gcacaggcccgggcgaaggggccacgcgaggcggcgggaacgcccgcggaaggagaacccaagcccagaaaaccgcaccc

SEQ ID NO: 190402 - RNA, 79 nt, Homo sapiens
gagcagcaacacaggcacaagcagaacgggaaagcagagaaaggacgggcaaaacaggcgccgcgggcggacacgccag

SEQ ID NO: 190403 - RNA, 77 nt, Homo sapiens
ggggcacggcgcggcgggcgcgcagacggagggccgcgccacaagcagcaggccaaggccggcgcggaagaggccgg

SEQ ID NO: 190404 - RNA, 74 nt, Homo sapiens
gcccgccaagaggcggaaggccaaggcaccggcccccacgggcggcgcagggggaggcaagaacaacccaagaa

SEQ ID NO: 190405 - RNA, 58 nt, Homo sapiens
gcagggcgaggcggaggcgcccaccccacgggaagacgacaacgaagagaggaaagaa

SEQ ID NO: 190406 - RNA, 78 nt, Homo sapiens
agggaaagcacagcaggacaccaggaccggccgaagacaccccccccccggaccagagggggacaggagccagagaaa

SEQ ID NO: 190407 - RNA, 40 nt, Homo sapiens
ggcaccccggcccaccagcccgcggagaggccccagccgc

SEQ ID NO: 190408 - RNA, 76 nt, Homo sapiens
gcagccaagagcaggacaagcagcacaagcaccaagccaccgccaggccggaaaggaaaaacaccagaacggaaac

SEQ ID NO: 190409 - RNA, 80 nt, Homo sapiens
gaacagaaggcaaaagagggaggagagcgaccgaagcagaaagggcaaaaaaacagcacagcagagaacggagcagccga

SEQ ID NO: 190410 - RNA, 78 nt, Homo sapiens
cacaccagccagcacccacgccaggcccagcgagccagaagcccccccagcaggggcacaagggagcgccggaaaccc

SEQ ID NO: 190411 - RNA, 50 nt, Homo sapiens
gggaacgggaaagaacagagaagaaaaaaggaaccgcgagaaagggccag

SEQ ID NO: 190412 - RNA, 76 nt, Homo sapiens
aggaaagaagaaaaagaaagggcagccaaagaagacacgcggaagcgaggagggccgcaaacaagaacgacccaca

SEQ ID NO: 190413 - RNA, 81 nt, Homo sapiens
agcggcgccgcgggcacggcgaggggggcggccgcccaccggcaagccaccgaaaaagacaaaagaaccaaagacggaaac

SEQ ID NO: 190414 - RNA, 83 nt, Homo sapiens
agcccaagaggaagacgaaagcgcaggcccagcccagaagcgcacaaagaccgcccagaaggggaagacccccagcgaacaga

SEQ ID NO: 190415 - RNA, 73 nt, Homo sapiens
ccccaaagaaaaccaaccccacgccgggaaagaagcccagcagcaggcagaagaagggagaggagccaaaaga

SEQ ID NO: 190416 - RNA, 75 nt, Homo sapiens
cagcaagcgcagacccagcaggcaccgcacacagcaaggaaggaagggaacacggacgacgagacacgaccaaca

SEQ ID NO: 190417 - RNA, 61 nt, Homo sapiens
aaaggaacagagccaaaccagaagaggagggcccagaagaaaaagggagaagaaaaagcag

SEQ ID NO: 190418 - RNA, 75 nt, Homo sapiens
aggacagaaaaccggagagagcaccagcccgaagaagccgggcagaccaggcagcagcggaaaggagcagggaag

SEQ ID NO: 190419 - RNA, 74 nt, Homo sapiens
gagacgccgcaaccggcacagccgagcgccagccgaaagaaaccacccccagcaagagaagccagcgagggcca

SEQ ID NO: 190420 - RNA, 80 nt, Homo sapiens
cggcgagagaacaggccgaaagggccacaaacccaaggacccaaagacaggaccacgcaccagcagagaaggaaagcaaa

SEQ ID NO: 190421 - RNA, 92 nt, Homo sapiens
caggagcagaagaagccaaaaacacgggcagagcagagcgggcggaggaccccgggcgcgggcgcggacggcacgcggggcagaaccggagg

SEQ ID NO: 190422 - RNA, 78 nt, Homo sapiens
cggaagggaggccacaaagccacggacgggcgccaagaagcggagacagaaacccgagaggagcaggagcaaccgaca

SEQ ID NO: 190423 - RNA, 68 nt, Homo sapiens
aggaaaggggaccgggcaaaaggggcaaaggaccggaagcggggccaggaggaaagccagacacagcg

SEQ ID NO: 190424 - RNA, 81 nt, Homo sapiens
gagagcggcggggcggcggcaccaaggcccccaagccccccggcgacgacgcccgagaaaagacaagcggagaaaggaccg

SEQ ID NO: 190425 - RNA, 80 nt, Homo sapiens
ggagcgggcacaggccaggagacagggaaacgaaaaccaccgggcaccacgagcccacgagagaggacagccccaggaag

SEQ ID NO: 190426 - RNA, 50 nt, Homo sapiens
caagagccgccgaaagggggggccccagcccggccgaacgggcgcacgac

SEQ ID NO: 190427 - RNA, 75 nt, Homo sapiens
gcaagaacaccagcagccagaagaacgaaacaagaaggcccaaacaggccaacacaggaagggagcaagaggacc

SEQ ID NO: 190428 - RNA, 75 nt, Homo sapiens
cgccaccgcccacacggccacagcggggaagccagaggagcagccaagaagccccccaggggcccgcagaccaac

SEQ ID NO: 190429 - RNA, 71 nt, Homo sapiens
ggggacacccgggcggggcagagcagcccccagccagccgcgaggccggggggggcacagagccccggaag

SEQ ID NO: 190430 - RNA, 77 nt, Homo sapiens
aagagggacccacccggcgcaaacggggacagcgccgaccggaacagggaccacggaagcccaggaccagccccgac

SEQ ID NO: 190431 - RNA, 81 nt, Homo sapiens
gccaaccgccggcaaccccgggcggccgcaccgccagacaacagcagcgagagagaaaagaaggaaggcaggacgggcaag

SEQ ID NO: 190432 - RNA, 72 nt, Homo sapiens
agcagagcgccaagacggcaaccagcaccagcagagagaaggcaagagaaggcagggggcaggccacagagg

SEQ ID NO: 190433 - RNA, 62 nt, Homo sapiens
cgcgcccgcgccgccgcacgagaagacgaccccgacgcaggccaggagccgcggacagaagc

SEQ ID NO: 190434 - RNA, 56 nt, Homo sapiens
agcagcccgaaaaagacgcgagaagccacacgcccacaaccccacgcagaggggga

SEQ ID NO: 190435 - RNA, 77 nt, Homo sapiens
ccaagacagaccacaagggaaggccgagaagacacacccaaaggaaccccgcgaaacgaacggcgaaacaacacaag

SEQ ID NO: 190436 - RNA, 67 nt, Homo sapiens
aaagaaaaccggaaagcggccagagcagaggccgcgagacagagagaaaagacacagacggcaaaac

SEQ ID NO: 190437 - RNA, 61 nt, Homo sapiens
cagaggcaccgccacaggacccaaggccggccggaaggggggcgacgcggaaggcacaaca

SEQ ID NO: 190438 - RNA, 85 nt, Homo sapiens
ccaaccaacggacaccaccaggggacggcacggacgacagaagcgacgggagaccgccacacagaacacacccaaacggagccag

SEQ ID NO: 190439 - RNA, 84 nt, Homo sapiens
agcagcaggaggacaccaaaggcgaacagacaagcagagggagccaaggcccagacagaggccagccagcagaaggcggaacca

SEQ ID NO: 190440 - RNA, 71 nt, Homo sapiens
ccgagcgaacaacgaaggaccgaagacaccggcaagagaaagaaggacccaaaacgggcgaaggcaagaag

SEQ ID NO: 190441 - RNA, 74 nt, Homo sapiens
aaaggagggggcggggagaaagggacaacaaggcaggaagagaacacagaagaagaggagaggaaccagcaagg

SEQ ID NO: 190442 - RNA, 71 nt, Homo sapiens
aggccggaaaccccaccccggaaaggagagccagacaacaaacccgagccagagaaacagaaccaagagga

SEQ ID NO: 190443 - RNA, 75 nt, Homo sapiens
accagagcggggaccccaaacaagcgcgcaaaagcgaggagggccgcggcagggcggagaacggaaaagcaccag

SEQ ID NO: 190444 - RNA, 78 nt, Homo sapiens
gcgggagagcggggaagggggaaaggcaccaggacaagcaaaggcagcacccacagggcacaccaaagcggggaaaag

SEQ ID NO: 190445 - RNA, 67 nt, Homo sapiens
ggaaggagaccgaaaagaccgaagaaacggacgaaaggacacagagccacaaaagaggaaacaaaca

SEQ ID NO: 190446 - RNA, 110 nt, Homo sapiens
accaacagcaccagaagcccaggcaggaaccaccaccacagacccagacagggaagacaaggggaagcaacaccagagaacacggaagacgaaaaaaaaccggacaaggg

SEQ ID NO: 190447 - RNA, 72 nt, Homo sapiens
caagcggagcacaggcacccaggcccacagagaacaaggagccagagggaaccaagccagagccaggagaga

SEQ ID NO: 190448 - RNA, 74 nt, Homo sapiens
agcggcagcgaggggccggagagggccggaccgagcggccgggcaaaacaggcggaaacggaagacacaacccg

SEQ ID NO: 190449 - RNA, 79 nt, Homo sapiens
aaacgcaggacacgcacacgaaaagagagcagaaggagggaggaaggccccacagggaagccagagcaggccaccccag

SEQ ID NO: 190450 - RNA, 78 nt, Homo sapiens
cgagcaggcgcgcgcgagggggcacccgaggaggaagagggcagggcccacggaaagaagggaaacccggggagaaaa

SEQ ID NO: 190451 - RNA, 73 nt, Homo sapiens
gcgccagagccaagaacggcggagagaccaaccaaagcgcacaagaagaggaaaagagagcgaccgaacagac

SEQ ID NO: 190452 - RNA, 74 nt, Homo sapiens
caaacccaccggcccagccacgagcccccagcggaacaggagggccgcccaacgccggcaggaacaaagcccgc

SEQ ID NO: 190453 - RNA, 90 nt, Homo sapiens
cggcgaagaggacggaaaaaccagccgcacgccaaggaaacaggccaagaacccaaagcaaggcgagacaaggggccaaccagccagggc

SEQ ID NO: 190454 - RNA, 104 nt, Homo sapiens
ggaggcgaacaagagacggaagacggagcggacggaccccgggcggcccaaggcagccagagaacccacccggaaacccaggaaggcgagggcagcaagccgcc

SEQ ID NO: 190455 - RNA, 70 nt, Homo sapiens
gagcacccgacccacaggccagagaggacgacacggcagcaggaacaaacgggaacgcccaaaaaaccag

SEQ ID NO: 190456 - RNA, 72 nt, Homo sapiens
cccacgaacccgaagcccccaaagagagaaccggagagcacccaacagcggacagcagccagaagacacccc

SEQ ID NO: 190457 - RNA, 75 nt, Homo sapiens
aaagaaggaccggaggaggagagagcgacgcgcacaccaaagcaagggaaagcacagcagacagaaccacacacg

SEQ ID NO: 190458 - RNA, 52 nt, Homo sapiens
ggcacggccgacgccccgccgggcgacaggcagcagcagagcgaacaggacg

SEQ ID NO: 190459 - RNA, 73 nt, Homo sapiens
agcaaagaaggcacggaaagagagagccgagggaaaaccagccagggagccaagaggaacacaaagaagcaac

SEQ ID NO: 190460 - RNA, 79 nt, Homo sapiens
agagaaaccggggaaccacggacaacccagaggacaacgaaggcggcaagaaggggaaccccacccaaaaagcagacaa

SEQ ID NO: 190461 - RNA, 65 nt, Homo sapiens
gagaaagcaaagaaacaacgacccagaaccgaccgggcaggacgaagcggaaagaaaggacgaaa

SEQ ID NO: 190462 - RNA, 71 nt, Homo sapiens
cgcccggcaaggacaaggcccacaaaacacggccgaaggccgccagcagagcggcccggacggacccggaa

SEQ ID NO: 190463 - RNA, 79 nt, Homo sapiens
gcgccagaaggaagaggcggacggaggagcaggcgagaagagaaggaggggggaaggcaggcaggcaaacccacacgac

SEQ ID NO: 190464 - RNA, 80 nt, Homo sapiens
caggggcgagccacagcgaaaggccagcgcgggccgccagcggcggccaccacagcgccgcagcccagcgaggcccaggg

SEQ ID NO: 190465 - RNA, 86 nt, Homo sapiens
cagcagaagagccaaggaaaaacagcaagaacccaaaaggggaaaagccaacaaggaccgggaaggcgcgacggaggcgcgcgacg

SEQ ID NO: 190466 - RNA, 80 nt, Homo sapiens
cccgcgccagcagagccggacagcggacccgaacccccaggccggacgcccagggcccggagcaggcccgagccggcaaa

SEQ ID NO: 190467 - RNA, 72 nt, Homo sapiens
ccccacgcggccagcgaaaacgcccagcgggcaacaaccagccacggagcccgcacgccaccgcccccaccg

SEQ ID NO: 190468 - RNA, 71 nt, Homo sapiens
ccaagagaccacagagcagcccaaggagaaaggaaagccaaccacacgaccagagagaacggaccgagaga

SEQ ID NO: 190469 - RNA, 74 nt, Homo sapiens
aaaaggcgaagccagaggaggcagccgcagagaagagcaaggaaacaaaacagcccaccgcgcagcaaagaaga

SEQ ID NO: 190470 - RNA, 81 nt, Homo sapiens
acaagaggcggacggggagcgaacgggacagcccacacccggcgcggaggggaggagaggacaggcggacccccagccaaa

SEQ ID NO: 190471 - RNA, 58 nt, Homo sapiens
acagacgacacaccacaggggaaggacgagaagggcggcgcgaaaggacaaaggaaag

SEQ ID NO: 190472 - RNA, 67 nt, Homo sapiens
caagagaccacacccaggaagccaggcacgcacagcgcagaaaaaccacagaaacgaaagaaaagac

SEQ ID NO: 190473 - RNA, 73 nt, Homo sapiens
caaagggcaaccagggaaacaggagagggggaaacgagcaacaccggaagacgagacagaggggaaaaaccaa

SEQ ID NO: 190474 - RNA, 86 nt, Homo sapiens
acgggcgccaggaacgcggaacagaaccaaaggcaggacagccagcaggaaaaacaaccaccagcgagcaaaaaggcaaagaccaa

SEQ ID NO: 190475 - RNA, 78 nt, Homo sapiens
cagcccgcagccccgccagccacccccagcgcagacccaggggagcccaccagccagcaacaggcccggaagacagcc

SEQ ID NO: 190476 - RNA, 56 nt, Homo sapiens
gcggaggccgaaaacaggccggggccgaaaagccaggcacccggaaacaagccacg

SEQ ID NO: 190477 - RNA, 74 nt, Homo sapiens
aaggacgggaacaaagcgaaacagcacacggaaaaagagcgaggcggagaacggaaaagcaccaggaagcagag

SEQ ID NO: 190478 - RNA, 73 nt, Homo sapiens
ccaggggcagggcaagcccggaggaccaccgcccgcagggaaaaagaaggcacaaagagcacacggaacgcca

SEQ ID NO: 190479 - RNA, 78 nt, Homo sapiens
aaaccgccacgaggagggccagagcgccccacacaacaaggagagcggaagaggcgccgcgacgggaagaggacagag

SEQ ID NO: 190480 - RNA, 81 nt, Homo sapiens
cgcggagcagcgaccagagagcgcggccggaggacaggaggcagcacggcaggagacgaggagaggacagcaggacacccg

SEQ ID NO: 190481 - RNA, 86 nt, Homo sapiens
cggccaccaccaccacgacaccagccggccaaaggacgcggaggaaggaaaggccacggcccgccggcagaaaaacaccagcgagc

SEQ ID NO: 190482 - RNA, 72 nt, Homo sapiens
cagcagaaaggcaaaccagccagggacggccaggcggcgcccagcggccacacgccccaagcgccacgcccg

SEQ ID NO: 190483 - RNA, 64 nt, Homo sapiens
acaggaggcagcggacaacagaggagcacccacgggagaccggggggcaagaaaaggaagaaga

SEQ ID NO: 190484 - RNA, 61 nt, Homo sapiens
agggacgcccagaaggaacgcaggcgccggaccgaaggcgcgaccacgacgagaagcgggg

SEQ ID NO: 190485 - RNA, 84 nt, Homo sapiens
gaacggaggccccggacggagaaaaagaggaaggagaacgaccgccagaagagaagaggaaggagaaaaacaaaaaagaggagg

SEQ ID NO: 190486 - RNA, 41 nt, Homo sapiens
acaaacacccaccacagcagaggaaacgaaaagcaccccaa

SEQ ID NO: 190487 - RNA, 78 nt, Homo sapiens
gggaacagcaaaacaaaggacaaggcaaagaacaaggagacacacggcagccaggccgaagggccaaccacaggcccc

SEQ ID NO: 190488 - RNA, 78 nt, Homo sapiens
gaaaggggccccgcgagacggaccgggggagaccaacgggacaaggaagcaggggagaggcagacaccaccgaacgca

SEQ ID NO: 190489 - RNA, 82 nt, Homo sapiens
ccggccggcacaacgaccgcggccggggcaggaagcgccgagcagcagccccgcgggcggaggagaggagaaaaccaggggc

SEQ ID NO: 190490 - RNA, 78 nt, Homo sapiens
aaacaggagaaaagccacacggacaagagaaggaccgaacaccaaaaaagaacagcaacccgccaggaccacgcagac

SEQ ID NO: 190491 - RNA, 78 nt, Homo sapiens
accaaccggaaaaagacccccgcgccccgcgaccccacacggcaagcggggcgcagcccgcccacccagcaagggggc

SEQ ID NO: 190492 - RNA, 62 nt, Homo sapiens
ccgcaacacgaagagccccgacacagggacgcagcgcagaagggccaggagcggagacggga

SEQ ID NO: 190493 - RNA, 61 nt, Homo sapiens
ggacagggcggaggcacgcacaggaccacaggagcagggacaggaccagaaggagagagag

SEQ ID NO: 190494 - RNA, 79 nt, Homo sapiens
cggccccgcgagcgacccaccgaagcagcggccccggggagcccgaggcccagaaggggaagacccccagcgaacagag

SEQ ID NO: 190495 - RNA, 102 nt, Homo sapiens
gacgcaaggggagcacggggccggaccagccccgaaacacgggcaagccaggcggcagacaaacggaaccaaccaaagcaaaacagggaaccagaagagaca

SEQ ID NO: 190496 - RNA, 58 nt, Homo sapiens
gggggaccacggcgacaagaagcaccacacccacccaaggagccccagagcacgccca

SEQ ID NO: 190497 - RNA, 76 nt, Homo sapiens
gagggagaccacagcaagacaccgggaccccggaagccaaaaagggcccagagaagcgacagcaaagcacgggacc

SEQ ID NO: 190498 - RNA, 75 nt, Homo sapiens
cgccgccccgccagcgccagacggacgaggcggcggagaacaagcggcaggaggagcgagcgacagaaaccaacc

SEQ ID NO: 190499 - RNA, 68 nt, Homo sapiens
agaaaggcggaccacaaggaaaagaaaaacagaagcacagaaaacagcgggagggacaggagaacagg

SEQ ID NO: 190500 - RNA, 77 nt, Homo sapiens
aggacccagccacaggcacaccgaccaccacaaggcaacgaccaaagggaggggaaacaagaaccagacaggcacag

SEQ ID NO: 190501 - RNA, 37 nt, Homo sapiens
gaagcaaacaccagagaggggaaaagaaacaaacaac

SEQ ID NO: 190502 - RNA, 85 nt, Homo sapiens
gaggcgcggagccgcagccgcccagaccgcgcagcgcgggaggcaggccgcacggccagcgcgggccgccagcggcggccaccac

SEQ ID NO: 190503 - RNA, 79 nt, Homo sapiens
aggaaccgaaaaggcgaggagaagacggcaaaaaacgcggcaggagcgggcggagccgacgaccccgcacccgcggcga

SEQ ID NO: 190504 - RNA, 78 nt, Homo sapiens
gaggcacgcagaaaggggccgagcccgaggagacgggcgcaggaacccgccagggaggaccacaggccacccagaagg

SEQ ID NO: 190505 - RNA, 82 nt, Homo sapiens
ccaccccggacccagggcagccggcccaccccagggcaggagaagaagcccaggacccaggaaggagacacaggaaaacaaa

SEQ ID NO: 190506 - RNA, 64 nt, Homo sapiens
ccgagggcccccaaaagaccagagaggacaaccaaaagcaccgaaccggaacaaagcccacaca

SEQ ID NO: 190507 - RNA, 74 nt, Homo sapiens
acaagcggacacgggaaaaccgaagccgaagaggccaagacccacagcgaagcaaaccaacaccccccgggaac

SEQ ID NO: 190508 - RNA, 72 nt, Homo sapiens
ggaagaaacaccaagggccagacccgacgggagaggggcgacagggcaaaggacaaggcagcagaggagcaa

SEQ ID NO: 190509 - RNA, 73 nt, Homo sapiens
cgcaaacccggaagcggacgggggaggaggcaacgccgcgcgcacacaagagagggccgggcgggaagaaagg

SEQ ID NO: 190510 - RNA, 75 nt, Homo sapiens
cagaaacggaaacagaacaacgcaaaggacagcaaggcggcaaggcgggagaccagagagacccagcgggggagg

SEQ ID NO: 190511 - RNA, 55 nt, Homo sapiens
caccgccagaacacccaacacccgccaccagcagccaaggagaccgggagagaga

SEQ ID NO: 190512 - RNA, 73 nt, Homo sapiens
gcccgaccgcggaaagaggggagcgaggacacaccacgaaaccggagagaacagaaaaaaagcggcccgggac

SEQ ID NO: 190513 - RNA, 65 nt, Homo sapiens
gaaaaagaaaggagaaggagaacgaagacagcacaacaggccaaaggcccaacgaggcgcacagc

SEQ ID NO: 190514 - RNA, 76 nt, Homo sapiens
cgccgcggagcagcccccccgcgcccccgcccgcccgggacccgcggccccgccgcggacccaaggccagccagcc

SEQ ID NO: 190515 - RNA, 77 nt, Homo sapiens
gcccggggggggacagcaggcgagacagaagcgaaggggacagggggagaaccgccagggaaacccgggggacagac

SEQ ID NO: 190516 - RNA, 74 nt, Homo sapiens
aaacagcgacgagagaccggcaggcacagccacagacagaaaccgaaacaacccagggcccaaaccaaggaaaa

SEQ ID NO: 190517 - RNA, 53 nt, Homo sapiens
cccacccaccacacaacaaaggccgcaggagggaagcgcacggaaaccgcccc

SEQ ID NO: 190518 - RNA, 120 nt, Homo sapiens
cccggaccagaggcccgcaggccgcccgccggaggggggccgggccgaggggaggagggaggaggagccccgccagagccagagcccgagccggaaccagagcggagccggagaaagccg

SEQ ID NO: 190519 - RNA, 75 nt, Homo sapiens
aagccccagccacccacaaacagagagaaggaaccacccacgcaggcagacagaaaggagacgaccagaagggga

SEQ ID NO: 190520 - RNA, 111 nt, Homo sapiens
gcgcacaacaccacccccgcccgggccgggggccgccgggacccggccaccagcaagccgacaacccagaaaagaaaaggccaggggcgccgaaaaacccgggaacaaaca

SEQ ID NO: 190521 - RNA, 73 nt, Homo sapiens
aagcgccccagcgcacgggcaaggcgcccaaaacaagcgaagagggcccaggagagcggacacgacagcccag

SEQ ID NO: 190522 - RNA, 85 nt, Homo sapiens
ggagcgcgaaggccgggacccggccccggcccacaggggggggcaaacccgagagaacggggcggagaacggaaaagcaccagga

SEQ ID NO: 190523 - RNA, 73 nt, Homo sapiens
gcggcgagggccgccgaaaggccagagcacccacgggaggcaggggaggcaagcaggggggcaaaggaaagaa

SEQ ID NO: 190524 - RNA, 55 nt, Homo sapiens
ggaaacgacgcaggaggccggaaaggaaaaacaccagaacggaaacagaaggaca

SEQ ID NO: 190525 - RNA, 87 nt, Homo sapiens
gagaccggacccgaaaaaacacaaaaagaaaaaaaagcgaacaacacaggaggagaaggccccagacgaaacccacagacaccagag

SEQ ID NO: 190526 - RNA, 81 nt, Homo sapiens
cgacaagaccggggggaccgggcggcgagacccaccgcaggacccacagaggccgcggaagaccagcgggagcccacgccg

SEQ ID NO: 190527 - RNA, 76 nt, Homo sapiens
accgcgcagaagggaagaaagagccccagggcaggcgagaagcgcgcaggacccggaagaccggaacgacagggca

SEQ ID NO: 190528 - RNA, 101 nt, Homo sapiens
gggcaggcccgagccacccagggccagcaggcaggcaggcaggacagggaggcacccgagcagagcacagaagaagcggcgggagaccaggagcaccggga

SEQ ID NO: 190529 - RNA, 66 nt, Homo sapiens
cgcggccaacggggccacaaggcgaaagagaggacacaggcagagaacacagccgagaagagacac

SEQ ID NO: 190530 - RNA, 82 nt, Homo sapiens
ggaccgagaccggaccgagagcggaccgagagcgcgaaacgcacgagaaggaagcgagcgaacacaacgaggagaggaaaca

SEQ ID NO: 190531 - RNA, 52 nt, Homo sapiens
cgcagggcgcccccggagacaaaggacaggcagaaaccagaacaggcaaagg

SEQ ID NO: 190532 - RNA, 78 nt, Homo sapiens
cgcgcgccagaccggcgagcccgagcagaaaagcaaaccaagccgcccccaggcggagcaagaagacccaccaagcac

SEQ ID NO: 190533 - RNA, 78 nt, Homo sapiens
ccgcgccgccgaccccccggcgccgcgccggcggcggcagaccagaagaagccccgaaggcaaacccggcacggccgc

SEQ ID NO: 190534 - RNA, 71 nt, Homo sapiens
gaggggagccaggacaacagcgcacggcaaggcagcgccgaagggcgagcgagagggggagagaagagccg

SEQ ID NO: 190535 - RNA, 88 nt, Homo sapiens
cccccgagaagcgggaacagggagcaaggggacgcgagagaccacagggagccacagcccggagcggccaagcagacggacacagaag

SEQ ID NO: 190536 - RNA, 69 nt, Homo sapiens
agacacggagcaaggaggaaaacacacggcgccggcgaaagcaacgaagggacgccagaacaagagaag

SEQ ID NO: 190537 - RNA, 87 nt, Homo sapiens
aacaccacagccggaccgcacccgcaccgccaaccacgggcgaggaggcgccgcgcaggaggccaagaaccgcaaagaaagacccag

SEQ ID NO: 190538 - RNA, 68 nt, Homo sapiens
ggcaccaccccagagaccgcgacgaaacaccacagcccaaggggaccccggcggggcccgggaaacac

SEQ ID NO: 190539 - RNA, 80 nt, Homo sapiens
cggacgacgccaagaaaggagagaagagaaagccggaggagagaagcaggaaggaaaaaaaccagaagaggaccagcaca

SEQ ID NO: 190540 - RNA, 77 nt, Homo sapiens
gcggcagggagcgcgggggcccgcgcagcagcgaccacgacagcgccgaaggggaaacccaacccaacaaccagaag

SEQ ID NO: 190541 - RNA, 59 nt, Homo sapiens
accgccccaacccacgagaggacagcccagccaccaggaagacaaagcccggaaaaaga

SEQ ID NO: 190542 - RNA, 71 nt, Homo sapiens
aggccggggccagccccaccacgcccccaccacagcccggacgcggcgcagccaccccagccaaccccgcc

SEQ ID NO: 190543 - RNA, 74 nt, Homo sapiens
gcccgggggagaaggccgagggccgggagcccgcaccgggccggcagacaacggcaagcggagaagagcaaggc

SEQ ID NO: 190544 - RNA, 58 nt, Homo sapiens
ccccaagagcgggacacaggcggcagaggagaaagagcacaaaagaggcgggaacccg

SEQ ID NO: 190545 - RNA, 74 nt, Homo sapiens
gaggaagaggaagaagaacagaccaaaggagggggaaagccaggcggaacacggacgggcggcccaggagagca

SEQ ID NO: 190546 - RNA, 83 nt, Homo sapiens
aaagcgaaagcacaccaagagagacaagagagacaccccaaccgacaaagagcaccagacagccgggaacgacccccacgaaa

SEQ ID NO: 190547 - RNA, 49 nt, Homo sapiens
accacaggaagccaagaaccagccagagaacaagaaacaaagaaagaaa

SEQ ID NO: 190548 - RNA, 66 nt, Homo sapiens
agcccgcgccaaaaaacgaggggcagccagccagcaggcaacaggcccagaccaggcccaaagagc

SEQ ID NO: 190549 - RNA, 60 nt, Homo sapiens
ccgcagaagccagggacccaaacccacaggcgaaaccaaggcgcgaagagccccagaccc

SEQ ID NO: 190550 - RNA, 74 nt, Homo sapiens
gagaagaaaggagaaacagagggagaacaagacgccagcaacccagagggggaaagaccaaccgaaaccgacaa

SEQ ID NO: 190551 - RNA, 69 nt, Homo sapiens
cccaacgaaggcaaaccaacccagcacaaacccgaaaaacgagaacgggaaccagggaacaagcagcag

SEQ ID NO: 190552 - RNA, 76 nt, Homo sapiens
gacagacgccgcaagggagacaagaacaagaaggcaaccaagcaacaccaggcaggaggagagcgacacgcgggag

SEQ ID NO: 190553 - RNA, 84 nt, Homo sapiens
acagggcacagcggggggagaacgacgggagaaccaaccaagaggcgagacccccaccaggacgcgggacagaccaggacccag

SEQ ID NO: 190554 - RNA, 73 nt, Homo sapiens
gcgggggacgggcaccggggcggagaacggaaaagcaccaggaagcagagaggaccgcagaagggaaggagag

SEQ ID NO: 190555 - RNA, 66 nt, Homo sapiens
aaggccggggcgcccggcgccggccgagaaggcagaggcgggaggccaggccgagacggaaagacg

SEQ ID NO: 190556 - RNA, 40 nt, Homo sapiens
aggagcccgcgccccccaccagaccggaccaaaccagaga

SEQ ID NO: 190557 - RNA, 71 nt, Homo sapiens
ggggcggacagaggggaaacaagaaaacacagaacgaggaccacccgaggagcgcggccgccagccagaac

SEQ ID NO: 190558 - RNA, 70 nt, Homo sapiens
accagaaaagggagcccaccacgaaagcagcaacagaaggagaagaagcaccagccgacgcgaacggaac

SEQ ID NO: 190559 - RNA, 84 nt, Homo sapiens
gggaggcgcccccgacccaccgagggacggcccggggcccgggcaggacggggcggggaccaggagaggcgccaccgcccggac

SEQ ID NO: 190560 - RNA, 53 nt, Homo sapiens
agcacccccgaagcacccaggcaccacccgcaacgggagagaaaccgaggggc

SEQ ID NO: 190561 - RNA, 86 nt, Homo sapiens
gacaagcccgcgggccggcggggaggcaccacagcgaacacaacccccggggccggccagaacacagggccccccagcccaccagc

SEQ ID NO: 190562 - RNA, 59 nt, Homo sapiens
agccgagcagaggacaaaacaagagggccagaaacccgcgcgaccgcagcaagaagcca

SEQ ID NO: 190563 - RNA, 74 nt, Homo sapiens
agccggagggaacagcagggcaaagcaacagccaaaaaacaggaaacacaaagccggggaagcaaagagaacaa

SEQ ID NO: 190564 - RNA, 62 nt, Homo sapiens
gacaaccagaggcagccagcagggggagagaacgacaacccgagagcggagcgacccgacga

SEQ ID NO: 190565 - RNA, 73 nt, Homo sapiens
ccacgcacccccggcgcgggggaccgaggggacaggaccgcagccaggacccgaaaagccagcaagcgagacc

SEQ ID NO: 190566 - RNA, 76 nt, Homo sapiens
cgccaccagcaggacgccgccgcggccggcacgaaaacacaaagaaaaccgccaaaaagggaacagcaaggaaaag

SEQ ID NO: 190567 - RNA, 72 nt, Homo sapiens
aaccgcgggggcggggacggcgccgagagcaagggaacaggccaggggccgcacagacacagccgccacaag

SEQ ID NO: 190568 - RNA, 55 nt, Homo sapiens
gcagcaagccgcggacggagcacaagcagacaaggaaggcggcgcagaagaaggc

SEQ ID NO: 190569 - RNA, 78 nt, Homo sapiens
ccgagaagcgaagaggagcggcaggagacacacaacaaccacaggaaaccaccccacccaacccccgacacagaagag

SEQ ID NO: 190570 - RNA, 72 nt, Homo sapiens
gggagccccacaacagggcagaaggagggcaccggaagagcggaaagccgcccagagcccggaccaagcacc

SEQ ID NO: 190571 - RNA, 72 nt, Homo sapiens
ggacacaggagacccgaacaacacaggagaacaacgacggaacgcccaaaggcaggcccggcaccgaggccg

SEQ ID NO: 190572 - RNA, 80 nt, Homo sapiens
gggccgccgggccgcgcgcggcgcggcggcgcccggcccccgccgcaggacaccagaggaccagaacccacgagaaacag

SEQ ID NO: 190573 - RNA, 75 nt, Homo sapiens
gaggagaaaggaaaaaggcacccggacacgaccaaaacccccaaagccaccagaaagccgcgagcccacagagga

SEQ ID NO: 190574 - RNA, 73 nt, Homo sapiens
gaccagaaacaggaaacagccccgacaggacaccccaacgacagcaaaacaagggccccagggggggaaagca

SEQ ID NO: 190575 - RNA, 87 nt, Homo sapiens
gggaccgccaccccgcaggacgggggcggggcacggacgccggagccgcaggggagcgcaaccccagaagacgcagagccagaagac

SEQ ID NO: 190576 - RNA, 60 nt, Homo sapiens
acgacgcaccgcaggcagacaaaagggccaaagaagggagagagccagacccacggcaag

SEQ ID NO: 190577 - RNA, 74 nt, Homo sapiens
cacgcgccagcgggagcgagccaccagagccagaccaggaccaggcggggcgaaccagcgcggaccagggagcg

SEQ ID NO: 190578 - RNA, 75 nt, Homo sapiens
aggggggagaaaaggcagaaacccgcgagcagaacgccgccagaagcccccggcgagacacgccccacgcgcggg

SEQ ID NO: 190579 - RNA, 71 nt, Homo sapiens
cggagagcccagagacacaacagaacacgagcgagaaaacagagcagacagagacaaaaaccagcacagaa

SEQ ID NO: 190580 - RNA, 87 nt, Homo sapiens
gcccgggcccccggagaagagaggcgcagcaggaaagaggagacaagagccccagcccacacagacccaagaaaagaaccggaaccg

SEQ ID NO: 190581 - RNA, 56 nt, Homo sapiens
gaggcaccaaaaagaaccgcagacagggacccaacacccagaagagccagaagaca

SEQ ID NO: 190582 - RNA, 80 nt, Homo sapiens
agcacgaaccggcgcagccgacacaacagacgacgggaggagcaggcaggggggagcgccggaggacgggagaagcgcaa

SEQ ID NO: 190583 - RNA, 84 nt, Homo sapiens
cggcccaggacccccaaaaaacaggaaacccaggcccaacggcaggggagcaagaagaaagccccaaaacgacccaggacaggg

SEQ ID NO: 190584 - RNA, 84 nt, Homo sapiens
gacgacccgagggaccccggccggcccccgccggcccggccccacggggaagccacaccaccgaagcggcagaagcagcgcgga

SEQ ID NO: 190585 - RNA, 78 nt, Homo sapiens
ccgaccgagacgggcggagaggagaaggaaagcgagaaccccgaacagaggagccaacagaacgacacgcaaggagag

SEQ ID NO: 190586 - RNA, 72 nt, Homo sapiens
ggcccggccggcccggcgccccagggagcacggcccaggcagccaagaaggcagagagacacacaagaaacg

SEQ ID NO: 190587 - RNA, 55 nt, Homo sapiens
aaacagagacgaccaaagcgggacaaggcacccggaaagaccccaaggcgagccc

SEQ ID NO: 190588 - RNA, 60 nt, Homo sapiens
cacaaccaagccacaaaagacacgccacaaccgggaggggggaagacagggcccagcacc

SEQ ID NO: 190589 - RNA, 74 nt, Homo sapiens
ccggggggaaccagcagcgcccacaccaccaaacagaaagcccaagcgcaaaaaaaaggccccaacaaaacaca

SEQ ID NO: 190590 - RNA, 115 nt, Homo sapiens
gcaggccgcggaggggcacgcccgagcggcccgccgagcccgggggcgcgccccgcaggaaaacccgaggagagagcccaaaagagccaaagccagcgcaaacagccgaagcaaa

SEQ ID NO: 190591 - RNA, 74 nt, Homo sapiens
aaggaaaggacccccccaggggaaaaagaaacaccgcccaaacgggaaaggagcaccaccaaagacgcgaacca

SEQ ID NO: 190592 - RNA, 59 nt, Homo sapiens
cgaggaaacgggaaccggagcgcggaccaggacgaagagcccgggcccgccacagaggg

SEQ ID NO: 190593 - RNA, 74 nt, Homo sapiens
accgaagaccaccagagccggaccaggagaacggcggcgggaccagccaaggaagcaacacagcagcgagagaa

SEQ ID NO: 190594 - RNA, 62 nt, Homo sapiens
aaggggcggacagaaaaggggaccagagacagagaagcaccgcaccgggcccggacgacgag

SEQ ID NO: 190595 - RNA, 63 nt, Homo sapiens
cggggggacgacagcccgagaccgccgaggaccagccgcaggcaagccacagccaggaaacac

SEQ ID NO: 190596 - RNA, 63 nt, Homo sapiens
ggacgggaggaaagccgcgccaaagccgaagccccaagaaagcaaggagaggccaccaaggag

SEQ ID NO: 190597 - RNA, 91 nt, Homo sapiens
aaggcagacgcaggagcgcggaagggacagcccagaaggcacgcgcacccccaacagcccccgggcgcgccggacaggccgccgcggcggg

SEQ ID NO: 190598 - RNA, 73 nt, Homo sapiens
aggcggccgccgcgccaccaccgggcgccgaggggcgacgaaacaacagaggcgggagcaccagacagcgaca

SEQ ID NO: 190599 - RNA, 81 nt, Homo sapiens
cgggcaagaggcgcaaacaagccaacccaggaggaaaaacgagcaggacccaggcccaaaaggaaaagccagacacacccc

SEQ ID NO: 190600 - RNA, 73 nt, Homo sapiens
aagggcgcccccccggaacggcaccacaaggaggcagaaggcaaagcaagcccgcacagccggagacacaccc

SEQ ID NO: 190601 - RNA, 75 nt, Homo sapiens
agaggagaccaaaaaaaacaacagcagagcaaggaaagccagacaccgcgagaacgcggacaagcaaacaaagag

SEQ ID NO: 190602 - RNA, 76 nt, Homo sapiens
ggacgaggcggcggccgcggggaggaggagggggcaaccagaggggccaacggacgacagagacccaaagagacag

SEQ ID NO: 190603 - RNA, 74 nt, Homo sapiens
cggagggagaagccccagccagccacaccagcaggcacgaagcgaaaagagaaaagcgagaaagaccccggaca

SEQ ID NO: 190604 - RNA, 122 nt, Homo sapiens
gcaggaccgcaagaaccagggagaccacaaaagagcagaggaggaacaccaggcacaagcgcagagccccaaggagccgaaaccaagccgaagcaacgacaagcaagaggcgaggcgaccag

SEQ ID NO: 190605 - RNA, 64 nt, Homo sapiens
cgcaccacgagggacggcgaacaggagcccagccacacggagcggagccgcagcaaaaagcccc

SEQ ID NO: 190606 - RNA, 86 nt, Homo sapiens
aaggacccaaggcggagcaggccaaaggaagaagggcagaggccggacagagccacgcgaggacaccccggaagagcggaaggaga

SEQ ID NO: 190607 - RNA, 70 nt, Homo sapiens
aacgaaaagcgccagaaagcccacccaggacggagaaagaacaccgggcagagaacggcccggagacaca

SEQ ID NO: 190608 - RNA, 41 nt, Homo sapiens
cccagaggggcccaccgcgccccgccggccgcccgcaggac

SEQ ID NO: 190609 - RNA, 84 nt, Homo sapiens
cagaagccgagcaacaccccggccaccgacccacaagaagccagcaggacacccgcaagacgggagccagcggagccccacagg

SEQ ID NO: 190610 - RNA, 74 nt, Homo sapiens
agggggggacaagggaggcgggcacagcacgggaaagggggccagcacagacacagccagccaaacacaccaac

SEQ ID NO: 190611 - RNA, 67 nt, Homo sapiens
cgccccgacggagcgccaggacggaaaccgaagaagaacccgagccaaagggaggaaaacagacaaa

SEQ ID NO: 190612 - RNA, 102 nt, Homo sapiens
aaagaaacaagcggcaagagaggcaccccgaagaggcgaggagcaacccaacacacggcagggaaccccaccccggaaggcggggacacagacgagaacacg

SEQ ID NO: 190613 - RNA, 76 nt, Homo sapiens
cgagaccgcgccggcgaccaggcggggagccaggaacgggggacaaggagaggcacacacacagaaccacacccca

SEQ ID NO: 190614 - RNA, 72 nt, Homo sapiens
cagcagaagacagcccaagggcccagcaaccaaacacagaggaaaaagacaaaccagccccgccgaagaagc

SEQ ID NO: 190615 - RNA, 68 nt, Homo sapiens
gacaccagcggccgacaccaacccccgcggacccagggagaaaccccccagagaccggcccgccggcg

SEQ ID NO: 190616 - RNA, 80 nt, Homo sapiens
cggggaagacaggccagcgcggccaagacccaccgcaaggaggaagagcacgaggggagcaaacgccccaaggggagagg

SEQ ID NO: 190617 - RNA, 76 nt, Homo sapiens
cccccagaggggggcccgcgcccaggacaggcccagcgcagcccggagcgcgaggagcagcgcgagccgaccagcc

SEQ ID NO: 190618 - RNA, 80 nt, Homo sapiens
gccggcggacccgcacccaaggcccgcggcaggcgggggccaaccagaccacgcgcagcacgcgagcgaagggaggcaac

SEQ ID NO: 190619 - RNA, 66 nt, Homo sapiens
caagcgaaacaaaggccaagcaacgaaccaaaccaggaccgaggggaacgccccaaaagaaaaacg

SEQ ID NO: 190620 - RNA, 69 nt, Homo sapiens
aaacgcccacagaacaccgagagccgggggccccacccgccaagggccccgccgaaagcccaacaccag

SEQ ID NO: 190621 - RNA, 75 nt, Homo sapiens
acacagcacgggcgggggacgggcagaaaaacagaggagacgagagacggaccgaacacaccggaaaagaaaaag

SEQ ID NO: 190622 - RNA, 77 nt, Homo sapiens
acacggccgggcccggcggcggagccacgcccgaaggccgcaaggccacgcgagaagacgcacccccccccccggcg

SEQ ID NO: 190623 - RNA, 78 nt, Homo sapiens
ggacccagccagaaccaacccacaccagaaaggacacacagcccgaccgcggggagaacaccagcgcgggcgccgggg

SEQ ID NO: 190624 - RNA, 58 nt, Homo sapiens
gccgcagaagacagggcggcgggccggacgacaaggagggaagagacgaagggaaaac

SEQ ID NO: 190625 - RNA, 97 nt, Homo sapiens
aacagaaggagcggcggacacacagacccccaccaagcaggacaaaagccacgaggcacaaagaggagacagccaagcacagggaggaagccgagga

SEQ ID NO: 190626 - RNA, 91 nt, Homo sapiens
gcggcggggaagcagcacagcggacaacgcacgcgggagagcagcagaaggacaaccacaccgaaggccaccccaagaagaggggacagaa

SEQ ID NO: 190627 - RNA, 84 nt, Homo sapiens
agacgcggcacagagagggccgggagcgcgcagccagaccccaccaccacacaggcaacggagagcaaaggaggcgcggagggg

SEQ ID NO: 190628 - RNA, 55 nt, Homo sapiens
gcgagccaagaacacggccacccaacagaagaaaaaacaccagcagcccagcaac

SEQ ID NO: 190629 - RNA, 62 nt, Homo sapiens
acggcagccgggaacaggccagaggcacaacggaccgccccaaagagaagagaggccaagaa

SEQ ID NO: 190630 - RNA, 77 nt, Homo sapiens
gcccccgcagacgggcaggcacccagagagcccagccccgagggaggcagggaaaaggggacagggcaggcaacaag

SEQ ID NO: 190631 - RNA, 77 nt, Homo sapiens
gcgcagggcagccccagcgagcacccgaggaagagagccgaggacgggaccgaaagggggggacgggaaaacgcacc

SEQ ID NO: 190632 - RNA, 74 nt, Homo sapiens
aaagccagggaacccagaagagggacgacaccgcacccgaagagccggcacggagaaacaccccggcggaggca

SEQ ID NO: 190633 - RNA, 79 nt, Homo sapiens
cagaaaggagggggggacgcggggggaggacacccaacacacacacaggccggaaaaccagcagaggaaggaggcacag

SEQ ID NO: 190634 - RNA, 66 nt, Homo sapiens
cgagagccacagcggcagcccagcccggcccggcagcgacaggaagccacgaagaccgggcgccag

SEQ ID NO: 190635 - RNA, 67 nt, Homo sapiens
cccagcacaggccaacaccaggggacgaagggaacccgccgggcggcccggcacccagccccccggc

SEQ ID NO: 190636 - RNA, 77 nt, Homo sapiens
cgccacgcgagaacagagaagggagccaagcggagggagaacgcaagggaaaacccaaccaaagcccaaacagcgaa

SEQ ID NO: 190637 - RNA, 55 nt, Homo sapiens
ccacgcgcggaaggcagcgcccagcagcgcagggcgacacaccaaacgcaggaac

SEQ ID NO: 190638 - RNA, 75 nt, Homo sapiens
cagaggcagaaagaacagccgcgacacaaaggccggaagaggacacaccaacaggcagcgaagacacgggacaca

SEQ ID NO: 190639 - RNA, 62 nt, Homo sapiens
gccgcagagcgggcaccaggagacacgacacagagagcacacagcaccacggggggaccaag

SEQ ID NO: 190640 - RNA, 60 nt, Homo sapiens
cagaagcgggggggggaacagacacaaaccagccagcacgggggcccagccagccagcag

SEQ ID NO: 190641 - RNA, 69 nt, Homo sapiens
acagggcaagaagacgggcaaaccccgcagcagaggcagagcaacagggacacaagcaagaagaaaggg

SEQ ID NO: 190642 - RNA, 75 nt, Homo sapiens
cccagccggagcgagggcggccaaagaagccccgaaaaacgaagccgggcgcaggcacaacaagaaggagggaag

SEQ ID NO: 190643 - RNA, 79 nt, Homo sapiens
ggcaaaccaccaaaccgcaacaggaaccgcggcccaggagcccgccggcccggcccccggccgcccgggccgcgccgcc

SEQ ID NO: 190644 - RNA, 74 nt, Homo sapiens
gcgaaagagccacccgcagcgaaggagagcacaggcgaggagggcgaggcagggcaaggcaacgaacagaaagg

SEQ ID NO: 190645 - RNA, 97 nt, Homo sapiens
cagcccccaggaacagggcaaaggagagcacaaccacgcagggaagcccaggggcagggaaagacaagggagcaaacaaagccccgccggaagaagc

SEQ ID NO: 190646 - RNA, 128 nt, Homo sapiens
ggaggagaagcagcgccgcgcggcgccggcggcggaggccgcgggccgggcagcagcgcagccggaggaagccggcaaaggaccccaccacagacagccagaccacccccccaagcacaaagagccaa

SEQ ID NO: 190647 - RNA, 67 nt, Homo sapiens
ccagaaaagcgcgaacaggcgcaaagaggggaaggcacacggcacggacagggcgggacgcagaacc

SEQ ID NO: 190648 - RNA, 115 nt, Homo sapiens
caagccaagaaaccacagcaacccagcaaccaggagagggccagcaggagaaacaccaaccgacagaacaagcgcaaaaaaagaagagcagaaacgccaacaaaaagaccaaaga

SEQ ID NO: 190649 - RNA, 69 nt, Homo sapiens
ggcgcgggcgcgcacccgagccgcaagcacacaggccgaagacaagcaaccaacccgaacggacacaga

SEQ ID NO: 190650 - RNA, 79 nt, Homo sapiens
cacagacccgccagagagagaaccgagggaaacgacaagaagcagcagcgccgacgaaaagcaagaagaacaaagcgca

SEQ ID NO: 190651 - RNA, 77 nt, Homo sapiens
cgagaagacacaagggaaaagggggaggaagagaagacaacgcacaacagggggggaacaccagccccaaaacagcg

SEQ ID NO: 190652 - RNA, 73 nt, Homo sapiens
gaaagccaaggaaaaacggagagccacaaaaaaggaagcgaaaacagcaaagaggaaaggacagggcggagag

SEQ ID NO: 190653 - RNA, 37 nt, Homo sapiens
gccaagcacgccacccggaagacaagcagaccggaag

SEQ ID NO: 190654 - RNA, 81 nt, Homo sapiens
ccgcgccgccgcacgggaccgccgagccacaccgggggcaaggccacaggccccaagaaccgacgagccccgcccccacag

SEQ ID NO: 190655 - RNA, 85 nt, Homo sapiens
ccggaagcgcccgaggcccgggcccgcgggggcaaccgggcgcagacgagacagacgcgaagcaaagcgccacccagaagacgac

SEQ ID NO: 190656 - RNA, 79 nt, Homo sapiens
ccgccgggaaaacagcaaagacccgaaagacagccgagcaagacccaacaaagaacaagccggaaaagcgaggcccgag

SEQ ID NO: 190657 - RNA, 65 nt, Homo sapiens
cccgacggcccacgccagggagggggagagacgggccaacgcacggcccggcagagccagcaccc

SEQ ID NO: 190658 - RNA, 65 nt, Homo sapiens
ggacaaggaccagaagaaacgcaccggaaaggccaccaggacgagcacggaaggcacaccgggca

SEQ ID NO: 190659 - RNA, 78 nt, Homo sapiens
ggacgcaggcacacaccaccagacccagcaacaaaacaaacggagagaggagggagaaacaaaggccaaagacgcagg

SEQ ID NO: 190660 - RNA, 45 nt, Homo sapiens
gaacaggaggaaaccacagagagccccccccagcgccgaaggccc

SEQ ID NO: 190661 - RNA, 44 nt, Homo sapiens
aaaccggcaggagggggacaagccaagggaaggaaaggagcacg

SEQ ID NO: 190662 - RNA, 83 nt, Homo sapiens
gcccccgccgccgggccggggccccgcagcgacaacaggaggccggaagacccaaagcgagggcacagggacggcagcagaga

SEQ ID NO: 190663 - RNA, 76 nt, Homo sapiens
ccgccggccgagccccgccacccacccgaaggacaagcgcgggacccgcagagacagggagcgcagaaacggagaa

SEQ ID NO: 190664 - RNA, 75 nt, Homo sapiens
cgccaggacggaagaccccggccaaagcgaaaggcagcccagcaagaccccggccgcccccagcggggagcacgc

SEQ ID NO: 190665 - RNA, 69 nt, Homo sapiens
cacaagcaaccccgcggagaccccaccaaggccacagcaacgcgagaaaacaaggagagaagaagagcc

SEQ ID NO: 190666 - RNA, 70 nt, Homo sapiens
gaaggaaagcacagcccagaacagggagaaaggcggagggcggcggccccaccccgggcgggacaggagg

SEQ ID NO: 190667 - RNA, 60 nt, Homo sapiens
cagccggacggcggggccgggcccccggccgcaagcaggacagagcgggagccaccagcg

SEQ ID NO: 190668 - RNA, 74 nt, Homo sapiens
agagaacacagagaaccgcagcaccagagcgacaacccacccaggggcaccaagggcaggagaagggccagacc

SEQ ID NO: 190669 - RNA, 73 nt, Homo sapiens
gagaacccgaccccgcggagacagcgagacccgccaggagcaaagaaccacacagaagcagcaggcgcacggc

SEQ ID NO: 190670 - RNA, 43 nt, Homo sapiens
accgacgccggggcggggcacggaaaaaggagagcccaggccg

SEQ ID NO: 190671 - RNA, 42 nt, Homo sapiens
gcacgcagccaggaaaccacgagcgaacgaccggaccggggc

SEQ ID NO: 190672 - RNA, 86 nt, Homo sapiens
cagcagacagacagccaggcgcccagaggggccccggagccagagggacgaggccacagcagaaaaaaccgggaggaaaaacgaaa

SEQ ID NO: 190673 - RNA, 69 nt, Homo sapiens
aagggacccaaaaagacggacagcccacgggaacaagaggggacagaaaggccccgacggcagcccacc

SEQ ID NO: 190674 - RNA, 82 nt, Homo sapiens
gccggagagcccccggacccgcaggacaggaacgggcgcaccacgccaccccgccacgagagcaggaaacggaacgcccggg

SEQ ID NO: 190675 - RNA, 76 nt, Homo sapiens
agcagacagaccagagagacgcaacgcgcacggaacggcggagaacagaggaagcgcgcgcagaaggggaagggaa

SEQ ID NO: 190676 - RNA, 89 nt, Homo sapiens
cgcgcacgccagccccccagccacagggaccggccgggacggccgcaagacccgcccagcagccgcaaagaaagccagccgccacaaaa

SEQ ID NO: 190677 - RNA, 77 nt, Homo sapiens
ggagcccggaggaagaaggagggcgaccgcaccagcaacagaaacggagacgcacgacccagccacagcgggccaca

SEQ ID NO: 190678 - RNA, 74 nt, Homo sapiens
aaggggagcgggcgcgcgcgaccgcgccccgggaacagcagaaccaaaaacaggaggagccaggcaagcaccag

SEQ ID NO: 190679 - RNA, 59 nt, Homo sapiens
acaagagagaccaggggagagaacgaaagaggcgaaaagagaacgggagcaaggaaaaa

SEQ ID NO: 190680 - RNA, 76 nt, Homo sapiens
ccaggaagcgggcggccgcaacccgccaccccccaggggaggcaagcaggggggcaaaggaaagaaggcagaaagg

SEQ ID NO: 190681 - RNA, 86 nt, Homo sapiens
agacgcggggaagaggaggcggaaaaggacgcaaagcccggcgaggaaagaaagggcgggcaagaaggaaaagaagcaacaaaacg

SEQ ID NO: 190682 - RNA, 75 nt, Homo sapiens
cacaaaacagaaaaagacaagcaaggcggagggcaggccacacagaaagaaaaagagcccaagacccaccgagac

SEQ ID NO: 190683 - RNA, 72 nt, Homo sapiens
cgggcagccacaaacaaaccgagggaacagggggcccgagggcaggacagcaggcaccggcgaagcacagag

SEQ ID NO: 190684 - RNA, 65 nt, Homo sapiens
aaagaggaccccccgggcaaaaaaaccgaagacggcggacaacaggagggaggcccaggacggga

SEQ ID NO: 190685 - RNA, 75 nt, Homo sapiens
acacacaagagggagagggcccaaacgacaccccaaggcgaggccaggccagagggaccaacgaaggcaaacacc

SEQ ID NO: 190686 - RNA, 72 nt, Homo sapiens
gagagcaagaggaaagaaaaagaacagacggcagacgaaacaaacaggaaaaacagcccaggagccacaaag

SEQ ID NO: 190687 - RNA, 84 nt, Homo sapiens
ccgagaccggaccgagagcggaccgagagcgcgaaacgcacgagaagaacagccacggaaaggaagaaggaaccgggaaggaga

SEQ ID NO: 190688 - RNA, 51 nt, Homo sapiens
cggcaccacacagaaaccacgaggagacaaggccaaccagcgaccaaagcc

SEQ ID NO: 190689 - RNA, 57 nt, Homo sapiens
gacaggaacgagggcagaagacggggagccagcaggcaggacccaaagaaagggaag

SEQ ID NO: 190690 - RNA, 103 nt, Homo sapiens
gggaaagaaaagccaaagacaccgaaagcaagaacacgggaggacgcaggcaggaagggccacgggaacaaaagaggacgcgcggaaggggaacagaaaccca

SEQ ID NO: 190691 - RNA, 85 nt, Homo sapiens
ggcggggaggcgcccccgggggcccgacgcacacgggggcggacaccacaagaagggcgccaggcagcagcaaggacaagaggag

SEQ ID NO: 190692 - RNA, 75 nt, Homo sapiens
ggccagcaccaccaggacgcccgccgcaaaccagagagcaggcagcccccagaccacaaccgagagcaagaccgc

SEQ ID NO: 190693 - RNA, 52 nt, Homo sapiens
gcgcgcgcggcaccaggccggacaagaagagaagaaaagaaacaaaccggga

SEQ ID NO: 190694 - RNA, 79 nt, Homo sapiens
gaggggacagcccggcagcggacagacccagccacacacagccaagaaaaccaggggaaaggcgacagccccgaagaga

SEQ ID NO: 190695 - RNA, 57 nt, Homo sapiens
ccaccaccccaccagacggcgccccaagaccaggccgagaacaacgagcgaccccca

SEQ ID NO: 190696 - RNA, 55 nt, Homo sapiens
acccagcaccacccggaggagaccggcagcaggaacaaagaccaggaacggagcc

SEQ ID NO: 190697 - RNA, 104 nt, Homo sapiens
aagccgagcgcaccggccccacggcagacaggcgacagacagggccagccgccacccggacagagaaagccaacaggcagaccagagacagcgccacgcacccg

SEQ ID NO: 190698 - RNA, 63 nt, Homo sapiens
cgcccagaaggcgcccagagaaggcagaaccagcgagcaaggcgcggggccgagaggccgccg

SEQ ID NO: 190699 - RNA, 81 nt, Homo sapiens
gagcaaagaaggacacagcacacacaccaccgcaccaacgaccgaagcaccaggcacacccacaagccgagcgcccaggga

SEQ ID NO: 190700 - RNA, 89 nt, Homo sapiens
gagaacccaaggcggggaaccgcagcgcaggacaggcagaaccccggcgcggcccgaacccgcacggggcgcgcagccagccagagcag

SEQ ID NO: 190701 - RNA, 85 nt, Homo sapiens
ggcgaccccagaagagggagggagcgaacgccaacacgagcgccggccgcccgcaggacaccgagggcccagccgcgcaccagcg

SEQ ID NO: 190702 - RNA, 71 nt, Homo sapiens
ggaaaggaaagcagcccgaaaagaagcgcggacaccgaagcccgaggccacaggacacgccaagggagcgg

SEQ ID NO: 190703 - RNA, 68 nt, Homo sapiens
accaaacaaaaggaaaccacaccaaccaagaagagccagaggcgcggccagcgaagaagacgcagcca

SEQ ID NO: 190704 - RNA, 73 nt, Homo sapiens
cggaccaccggaaaaagaagcacagacaagcccgacggagcagcagcgccgggaaggaaagcacacaggacag

SEQ ID NO: 190705 - RNA, 77 nt, Homo sapiens
ccgcaggcccaaccgccgccagcaccaggccagcaccaccgcccccaaaacacaagaggacggagaagcgacgaaag

SEQ ID NO: 190706 - RNA, 73 nt, Homo sapiens
gcacgaagggaacaaagcgagagacgacaggcgggcaacacagaaacgaggagaggcggagcggaggagaaaa

SEQ ID NO: 190707 - RNA, 79 nt, Homo sapiens
cgggaaggcccgcaccccaggagaagccaggccaccacgcgccccagaccaccggcagggaacagccgagcagaccgag

SEQ ID NO: 190708 - RNA, 85 nt, Homo sapiens
cgggacgcaccgaggccagaccgccgaggcgaccccgcacacacacccaccagccacggcagcccagcggggacccagccgcccc

SEQ ID NO: 190709 - RNA, 82 nt, Homo sapiens
agagcgaccaagccgggaacccacacagcacccgcaacacccgggacacacggagcgcgcccggcccgcacagcagcaaccg

SEQ ID NO: 190710 - RNA, 50 nt, Homo sapiens
acaaggaaccaagacagcgccacagacagaaaagggccacgcacccaggc

SEQ ID NO: 190711 - RNA, 53 nt, Homo sapiens
gacaacccaaggacaaaccggcagcagggccggcaccgccagaaggacgaaaa

SEQ ID NO: 190712 - RNA, 78 nt, Homo sapiens
cggcgagaggggcgagaacgccacgcgggccggcgaaagcggccagcccgcgggagcgccacacagagcggaagaacc

SEQ ID NO: 190713 - RNA, 70 nt, Homo sapiens
gaggagaagacaagcaaaaagacgggaaacggcaaaggaaggagagcccggacccacccaccggccaaca

SEQ ID NO: 190714 - RNA, 69 nt, Homo sapiens
cacgaccccccgacaccgcccaggagaaaagaccaaggagacagaggggggggagcaaaggccagagac

SEQ ID NO: 190715 - RNA, 75 nt, Homo sapiens
caacgccagcacacggaagaaagggaaccggagaagagagagaaagaccaaggcggagggagaggagaggagggg

SEQ ID NO: 190716 - RNA, 70 nt, Homo sapiens
cggaggcagaggggaggcgcgaaaggccagcacaaagcgagaaggagggagaagggcgcgagaaccaaga

SEQ ID NO: 190717 - RNA, 70 nt, Homo sapiens
aaaagggaaccagacgcaggagaacaaagagcgggaagacgcagacaaaaagcgacgaaggagaacagcc

SEQ ID NO: 190718 - RNA, 79 nt, Homo sapiens
cacagccacgcagcagaccccgaccgccgcgcccggaggaaagaccacagcaagaccacgcccccagccgggggaccag

SEQ ID NO: 190719 - RNA, 73 nt, Homo sapiens
gggagggaaaggagaagcgaggagagggcacagcgaaggacccccagccgcccagaaaggaggaccaaaccga

SEQ ID NO: 190720 - RNA, 72 nt, Homo sapiens
gggcagccagaagaaggaccggaagcacacaacaggaaaacaaaagaggagaaagggaaaagcaaacgaaag

SEQ ID NO: 190721 - RNA, 55 nt, Homo sapiens
agcaaagcgcaacagaaacagagagagaacccaggccgcacagcccagggacgaa

SEQ ID NO: 190722 - RNA, 70 nt, Homo sapiens
gggccccccggggcggggcgcgcggggccgcaaggagaacagcagacacggagggcacagaacgcaggag

SEQ ID NO: 190723 - RNA, 39 nt, Homo sapiens
gagagagagagggagggaaacagccaagggacaaggaga

SEQ ID NO: 190724 - RNA, 68 nt, Homo sapiens
ccaacaaaacacaaagacaagaagcaggagggaagccacgccaaggggaagaaccagaaaaacccaac

SEQ ID NO: 190725 - RNA, 77 nt, Homo sapiens
aacaggcaggagagaaccacaggcacacggaccgagcccgccaccgagcaggccggagggaaggggaaggaaggccc

SEQ ID NO: 190726 - RNA, 92 nt, Homo sapiens
aaagggagggagggccgcccgcccagagggcccgccgagaggcagggccaagcggagaaggagcgcgacgggccaggggacaggagggaccc

SEQ ID NO: 190727 - RNA, 72 nt, Homo sapiens
gaaagcaaaccagcaggcaccaaggaaagcagaagacaagccaagacaagcgcgcacgcggccacacggcca

SEQ ID NO: 190728 - RNA, 70 nt, Homo sapiens
aggaggacgagcaggagaccgcgaacaaaaacccgggcgagagacaccacaaaccgaaggaaagggagac

SEQ ID NO: 190729 - RNA, 111 nt, Homo sapiens
gagacacccccgagaaggacagccagggcccggagacagccaacgagagacccaagaggcaaaagcagaccggaaaacccaccggcaagaccacacccgaggggagcccag

SEQ ID NO: 190730 - RNA, 82 nt, Homo sapiens
aggggaccggcagcagggacaccgcccggagcggccaaggccaaggcgccgcggagaacaccacagccgggcccagggaccc

SEQ ID NO: 190731 - RNA, 82 nt, Homo sapiens
agaaaggacgaggagcaggcgcaacaaaaggccacaaaccaaggggcaaaaaggcagaaacgcacaggcagaaaaacgccaa

SEQ ID NO: 190732 - RNA, 58 nt, Homo sapiens
gcggagcccccaccaccaccgccagcgcaggcaagcgacgaaacagaacgacagcccg

SEQ ID NO: 190733 - RNA, 71 nt, Homo sapiens
ggcggggggcccaagcaaggccggaagaagagcgcagaggacccccagcccacaagggccccaccgaaccc

SEQ ID NO: 190734 - RNA, 83 nt, Homo sapiens
ccggccccagaggagggacggaacggaggaccaagagcagggagagcaagaagaaagagccaccagcacaaaggagccaaaag

SEQ ID NO: 190735 - RNA, 72 nt, Homo sapiens
gaggccccagcggaccgaacagaaggacagaaaggacaccagccaccacgggacaccagcacagaaagcagc

SEQ ID NO: 190736 - RNA, 75 nt, Homo sapiens
aaagacgccaaggagaaggcagaccgggaaccgggagcagcaacacacccggcacgcggcccgggcccggcgccc

SEQ ID NO: 190737 - RNA, 76 nt, Homo sapiens
cggagccaaagagaaccaccgccaccaaaaaccccgccccccgaggcgcagcccgaacccagcagccacacgccaa

SEQ ID NO: 190738 - RNA, 59 nt, Homo sapiens
cgaggaacgccgggcgcgggcccacgcggcgcaggaccaaagacgaccaccaaagccag

SEQ ID NO: 190739 - RNA, 86 nt, Homo sapiens
gcgcggcgcggcggccgggccccgagacggggacgggcaccgagagggcgcgagggcgcgcacaaccggcccagcaggcacccgag

SEQ ID NO: 190740 - RNA, 87 nt, Homo sapiens
gacacagaaggggaggggagggaaaggcccaggaaaaaggcacacagagaaaaaaagggaacaaaacacagcaagcagacaaaaggg

SEQ ID NO: 190741 - RNA, 103 nt, Homo sapiens
ccaaaacagccagccgcagagaccccaaaccccggcccgacaggagcacagacagccgaaaaaaaaggagaccagcagcgaagaaagagggccaaggagaagc

SEQ ID NO: 190742 - RNA, 54 nt, Homo sapiens
cgacacgcagcagcggccaggaaaacgccacggaaccccaccgcaggcacaaag

SEQ ID NO: 190743 - RNA, 60 nt, Homo sapiens
ccgagcgggacccccgccgccccgggggccggacgaaacagcccggcagagggaccgcca

SEQ ID NO: 190744 - RNA, 57 nt, Homo sapiens
caggcacccagcacgaaggaggaaccaacaacaacacaagaagcaggagacaccaaa

SEQ ID NO: 190745 - RNA, 78 nt, Homo sapiens
gaaaggcagccgcggacgccgcgccagcgacaaacaaaacccaaccaggaaacagggggccaagacaggggagccagc

SEQ ID NO: 190746 - RNA, 77 nt, Homo sapiens
gaaaaaccaaaggaaccagaaaggcggagccaaggccagaccaagggaaaccacccagagagcagaccggcggcccc

SEQ ID NO: 190747 - RNA, 80 nt, Homo sapiens
gaggaaggcggcaaaaggcggaccgcccccgccaacgaagaccgagaccaggccccagccaacccgaaaaccccccagcg

SEQ ID NO: 190748 - RNA, 83 nt, Homo sapiens
ggcaccagcccgagaaaggagaaagaccacacagggaaacgaccagggagagaccaacaggaaccacagcggccgcggggcac

SEQ ID NO: 190749 - RNA, 83 nt, Homo sapiens
ccgggagccacacacgacgggaagcgggggacaagaacccaagaaacaggaaaaaacccaaaacaccaaaaggaccagcgaga

SEQ ID NO: 190750 - RNA, 99 nt, Homo sapiens
cggcgcgccgcccaccgggcccgggcaccacgggcggcgccaggccggcccagaacaagcacaaggaagagcccacagaaaagacccccacacgagaag

SEQ ID NO: 190751 - RNA, 79 nt, Homo sapiens
gaagagacccagaacagggcaaaaaacagagccaaacagcccaagaccacaagagcaaacagaagaacccaaaaggcga

SEQ ID NO: 190752 - RNA, 80 nt, Homo sapiens
agaccggaccgagagcggaccgagagcgcgaaacgcacgagaagcggagccggagcgaggcgggggaggcagcagaagcc

SEQ ID NO: 190753 - RNA, 53 nt, Homo sapiens
aaaggagggaacacagacccagccgccaaccacgccggaaggagccaccacaa

SEQ ID NO: 190754 - RNA, 79 nt, Homo sapiens
acccaggggaccacgcgaccaaggacggagagcggaagaccggcccagagaaaacgacgcccacaccaaccccacaccc

SEQ ID NO: 190755 - RNA, 62 nt, Homo sapiens
gagagccgagcagggacacaccaccacaaccagggcaacaaaccaggaccccccgaggaaag

SEQ ID NO: 190756 - RNA, 76 nt, Homo sapiens
agcgaaagcacaccaagaccgccaccggcggacgaccccagggacagggcggcgaagaagagggaggcaccacaga

SEQ ID NO: 190757 - RNA, 74 nt, Homo sapiens
gcggagcggcagaaaccacacccgaagaacacgcaggccgagggcacacgcccaggaaacagaacgacagcccg

SEQ ID NO: 190758 - RNA, 54 nt, Homo sapiens
acaagaagcacggaaacacaacagggaagaaggacaaggaccacccggcggacg

SEQ ID NO: 190759 - RNA, 76 nt, Homo sapiens
cggcgacgccccccgcccaccacagcccagagggaacccaccagaaaacgacacacaaacgcagccaacccaaaaa

SEQ ID NO: 190760 - RNA, 54 nt, Homo sapiens
ggcaccggaccgagggcagccacacaaaagggaagcgggcagaaccgagaaaaa

SEQ ID NO: 190761 - RNA, 72 nt, Homo sapiens
gaaggggacaagcagcgccaggcaggcagacggcacaggagagggccaaaacgaaggagaagcccagaagag

SEQ ID NO: 190762 - RNA, 104 nt, Homo sapiens
cgacgacacccgcaccacaccagcaggcagccgggagccgggcccgggcacggccagcaccccgaggggcggccgagcccgggggaggccccggagcgcagccg

SEQ ID NO: 190763 - RNA, 85 nt, Homo sapiens
cccgaggaggagggcgagcaggaccgacccgggcacccgggcccgggaccccccgcgccgcagcagagcgccgggcccaggcgga

SEQ ID NO: 190764 - RNA, 80 nt, Homo sapiens
ccgcccaggcgcagagcgggcccgcggaccagccagggcacggccgggacgggaaacccagacgacaaggaaggccaagg

SEQ ID NO: 190765 - RNA, 74 nt, Homo sapiens
ggggccacccagaaagagaagacaaccacggagccgagaaccaggagaagcgccacgcgagcaacaaacaagac

SEQ ID NO: 190766 - RNA, 87 nt, Homo sapiens
ggaagccggccagaagacggccacccagcacaagcccgggggaaaggcagcgcgcagcagcggcacacaagccaaacagagagaagg

SEQ ID NO: 190767 - RNA, 74 nt, Homo sapiens
cgcgaagaagacagcaagcccacgagcggccccccgagacggaggagagggccggaaagaccacagcaagacca

SEQ ID NO: 190768 - RNA, 37 nt, Homo sapiens
accagccccaggacaggaacacacgcaggacgaaaga

SEQ ID NO: 190769 - RNA, 69 nt, Homo sapiens
ccaagccaaccagccagcaggccgggcggggacaacaggcacaaagagagaaggaacacccacagggca

SEQ ID NO: 190770 - RNA, 73 nt, Homo sapiens
accaacagcccaggaggccgagcgcgggaaagcagcgacagcgaacccacccaacacggcaaaacaaagacac

SEQ ID NO: 190771 - RNA, 52 nt, Homo sapiens
aggccaagaaggcagcacaaacacacgaagaacaaacaaggcaaacgccgga

SEQ ID NO: 190772 - RNA, 73 nt, Homo sapiens
cagcgcgggccgggacccagccaggcagaccccgggcagcaggcagcagccccagcagacgcccccgggaacc

SEQ ID NO: 190773 - RNA, 78 nt, Homo sapiens
cgccgccgccggagccgcagcacgaaaccagccaccggacaaagaggccggaaaacccgcacagaaaggacaggaacc

SEQ ID NO: 190774 - RNA, 74 nt, Homo sapiens
cagcccccgagagcggaacagcgcgcggacacccaccgcgaagaggccgccgacccccccacagccgcaggggg

SEQ ID NO: 190775 - RNA, 76 nt, Homo sapiens
gaggggagcccacaagcggcagccagggacgaaaaaagagcccaaaaaaaggggagacagccaaggcaacggggac

SEQ ID NO: 190776 - RNA, 63 nt, Homo sapiens
gaggacgacgacgaggggaacggccaacgagcgcacccccaccaaggaagagaagaccccagc

SEQ ID NO: 190777 - RNA, 77 nt, Homo sapiens
ggcggacaaccggaggacacggcagagacacacagcaaggggcggccgcaaaagagcacaggcgcagaagccaaccc

SEQ ID NO: 190778 - RNA, 76 nt, Homo sapiens
ggacccagggagagcagggcagggaaaagcgccgggcggaccagcagacgacacacaagagccagaacagaaagaa

SEQ ID NO: 190779 - RNA, 67 nt, Homo sapiens
agaggacaaaagagcggaggagcggcgaggccagaagaaccgaaaccgcagaggggggccccgccgg

SEQ ID NO: 190780 - RNA, 73 nt, Homo sapiens
agaagacggggcccgggaccacaggccccggcccagaaagagcacaacacagaagaaacggcaagcaaggacg

SEQ ID NO: 190781 - RNA, 62 nt, Homo sapiens
cggaagccacggaaaaagaaggaggaagaaacagaccagagccgaggaaggcaccaggagag

SEQ ID NO: 190782 - RNA, 81 nt, Homo sapiens
ccggaccgaaccgacacaacaacaggcggagcgggcccagagaccgaacacgcccgggagaccccgaaggggacaggaccg

SEQ ID NO: 190783 - RNA, 68 nt, Homo sapiens
gaaacacagccaacacgaggccaggcggaaccacgcaaagaacaaacacaaaagccggaaacagaggc

SEQ ID NO: 190784 - RNA, 54 nt, Homo sapiens
agagccaaaaagaccaagcccggagcaggcaagggaaccaacaggcgagcagaa

SEQ ID NO: 190785 - RNA, 59 nt, Homo sapiens
gcaaagaaagaaaagcggaaaccgaagcgggagacggagcgcgccccaccgcggccgcc

SEQ ID NO: 190786 - RNA, 55 nt, Homo sapiens
aagagggacagccgcacggaggcgaaacacaaaggggcacacggaacaagagcga

SEQ ID NO: 190787 - RNA, 63 nt, Homo sapiens
agagacgcacgaaaacacacaggcacaccgcacaagagacaacccaaaacgaaggcaacaaaa

SEQ ID NO: 190788 - RNA, 61 nt, Homo sapiens
gcaccagaggcccgagcagccagcacggaggcaaaagcagaccggaaaacccaccggcaag

SEQ ID NO: 190789 - RNA, 76 nt, Homo sapiens
cccaccggaccaggaccacagaagcaaaagccaccaaacgaaaccccaaggcgcagacaccgacggagcgggagcc

SEQ ID NO: 190790 - RNA, 67 nt, Homo sapiens
ccgaggggaccagccacaggaggcggccgcacaaagaccaaacgaagcgccgagaaccagaaacggg

SEQ ID NO: 190791 - RNA, 75 nt, Homo sapiens
ggagcaccggaaagaggacgaagcagaaagcaaggaaacgagcagaagaccgcgaaaccagccgcgggacgagcc

SEQ ID NO: 190792 - RNA, 79 nt, Homo sapiens
cacccgggcggggcagagcagcccccagccagccgcgagagagaagaagaaggaggccgcggccagaaacccaagaaaa

SEQ ID NO: 190793 - RNA, 81 nt, Homo sapiens
cagcacgacggagaaccagggcacaagaacaaacggacccaggacaaaacgacaccagccaaaccagcagcccccagcacc

SEQ ID NO: 190794 - RNA, 83 nt, Homo sapiens
cgcacccagccgggcgacagacccgaagcggaggacccggcccagccgggcaggccgacccccaccagccgagacacaagcag

SEQ ID NO: 190795 - RNA, 54 nt, Homo sapiens
agaaacaacaggacccaaaaagcacacgaccgcgagagggcgaagaacgccaaa

SEQ ID NO: 190796 - RNA, 35 nt, Homo sapiens
gggcgaggacccccgagccagaggaacaacaccga

SEQ ID NO: 190797 - RNA, 89 nt, Homo sapiens
caacgagaggaacggccacgcgccaggggcacggccgagcagagaggacggggacgaccgggccagacaccgggaggaacggcgccggg

SEQ ID NO: 190798 - RNA, 87 nt, Homo sapiens
accggagacgccgaaggaccggaggaggaccacgccgcaccccacaagacgccgacaaagcgaacaaggacgaaggagaaggcagca

SEQ ID NO: 190799 - RNA, 55 nt, Homo sapiens
gacaaccggcgggaggaaaccagggcgggcgcgcgcggaagagacagacaggcgg

SEQ ID NO: 190800 - RNA, 78 nt, Homo sapiens
gacgccacccgggggcacagcaaggaggaggagagaaagaaagccagcgcaacgagagaaccagcagaaaagaagccc

SEQ ID NO: 190801 - RNA, 84 nt, Homo sapiens
cggaggccgagaccagacgcggagccaggccgaggggcggacgcggccgggcggagaacggaaaagcaccaggaagcagagagg

SEQ ID NO: 190802 - RNA, 76 nt, Homo sapiens
agcggagagaagaccccaggggcgacaggccgcagcacacaaaggggaaaaagaaaagggcgaagacccgaagcag

SEQ ID NO: 190803 - RNA, 75 nt, Homo sapiens
ccaacaggccccaggaacacaggagccaccaggaccgcgcgagcagaggacaggagagacaacggaggcaagaaa

SEQ ID NO: 190804 - RNA, 77 nt, Homo sapiens
cagagggcgaccagaaaaacaaaaaggacgaccagagcaacagggccaaagggggacgggaggagggccggcccagg

SEQ ID NO: 190805 - RNA, 84 nt, Homo sapiens
caccgcgccgggccccggacgccgcgcggaaaagggaccgaaagacaacaacgcagagaagaacgccggccaacggaagcggag

SEQ ID NO: 190806 - RNA, 76 nt, Homo sapiens
agagaccacagaaggacgggagaacaccccacagggaagaggcaagccagacaacaggccaaagccagggagggcc

SEQ ID NO: 190807 - RNA, 86 nt, Homo sapiens
gagggagcagccagcccggcagccgccgcgcgaggaaaggccgaggggccggagccacagaggaagcgcagcgggaaagaaagcag

SEQ ID NO: 190808 - RNA, 68 nt, Homo sapiens
aggcccagggaggcaggggcagaaacagagaaggaacagaaaacaacccgcgcacagaagggagcggc

SEQ ID NO: 190809 - RNA, 67 nt, Homo sapiens
ccccaccaaaaccacaaaacccggggcgcaaacgcgggaaaacaggcgaggaggacccgggaaaaga

SEQ ID NO: 190810 - RNA, 53 nt, Homo sapiens
gcgcggcgcggggaccgcggcccggggagacgcaagccacccggacgcgaaga

SEQ ID NO: 190811 - RNA, 78 nt, Homo sapiens
ggcacaggcccacaacgcaacgggacaggggaaaggcagcgcaaaaagcggcaggagcggccccagcgcacccgaagc

SEQ ID NO: 190812 - RNA, 74 nt, Homo sapiens
aagcgggaccagagcaaggagaggaacggccaaaacggagcagagaggagcccaggggaagagaggggccgagg

SEQ ID NO: 190813 - RNA, 71 nt, Homo sapiens
cacaccccgggccccaggccaccaaagaggaagcagaccagcgagagaagaagagaagagagcccacaccc

SEQ ID NO: 190814 - RNA, 70 nt, Homo sapiens
gaggaagccaaaggagaaggccggccacccaccaacaaagaggcagcccaagagaacgaaagcaaaaagc

SEQ ID NO: 190815 - RNA, 85 nt, Homo sapiens
ggaggagagcggggccggcaagaaggacaagggcccacgagcagcgagcgcccccggcccccggccaccaaccacagccccccgc

SEQ ID NO: 190816 - RNA, 119 nt, Homo sapiens
agcggccggaccacaccacccaccgcacggagggaagccggccagaagacggccacccagcacaaaccacgagaagcaaaaacagaggaagagccaaggacaagaaccagcgagaagcc

SEQ ID NO: 190817 - RNA, 68 nt, Homo sapiens
cgacggcccgaacgagcggaggccaacaaagacaaacagcaagacaagacagccaccccaccccaagc

SEQ ID NO: 190818 - RNA, 78 nt, Homo sapiens
ccagccccagcaccaccggggaagaaccagcgccagggacaaccaaagccaagcaacgaaggacaggaccgcccccag

SEQ ID NO: 190819 - RNA, 72 nt, Homo sapiens
cgcaccgccaacaaacgcacaagacaacacccgacggcaggacagaaaagcgccaccacaaggaacaacaac

SEQ ID NO: 190820 - RNA, 111 nt, Homo sapiens
cggcgggcgccccgcccagcccagcccaagagccagagacgggcagaagcggcagccaacccagcaaaccgcgggcgacagcggaccagagcccggaagcgccgcagggcc

SEQ ID NO: 190821 - RNA, 72 nt, Homo sapiens
gcgcgcaccaaacccccggacccggcaacgccaaacccaccaccagcagaagaccgcgcgagggaagggacg

SEQ ID NO: 190822 - RNA, 69 nt, Homo sapiens
cagcagaagaagagaggagggagaacacagaaaccggccccagggagccgaaaaaacagggaaagcagg

SEQ ID NO: 190823 - RNA, 76 nt, Homo sapiens
cggggggaaccagaagcacaagcacgaaagccacaaaaggggagaggcccaggaggacagcggggggggaagagga

SEQ ID NO: 190824 - RNA, 85 nt, Homo sapiens
ggcgccggggggcaaggcgcaaacaaggaggcaacccaggaggcagaagcgggccagaacagacaaagaggcggggaaaggcaga

SEQ ID NO: 190825 - RNA, 68 nt, Homo sapiens
cgggcccggggggacggggggaggcaggaccggaccgcaacaggcaaggagaacgacagcgcgggcgc

SEQ ID NO: 190826 - RNA, 94 nt, Homo sapiens
cagaggagcgaagaaaaacggagacacagcccgcggaagccgcacaagagagacacggcacgccggacagggaggcgcacccacaagccccaca

SEQ ID NO: 190827 - RNA, 71 nt, Homo sapiens
gcgccagcaagaaagacagagcaccaggaggaaggaagaaggaaaagcggaagcgcagacaagaaaagaga

SEQ ID NO: 190828 - RNA, 72 nt, Homo sapiens
acaggaaaaaccgcagaccgccacccgagggacaggcgagggccagggcaggaaaggagggcgaaacacaag

SEQ ID NO: 190829 - RNA, 62 nt, Homo sapiens
ggacaccaccccaggaaaaggcccacgaacacacacagacccaagggcccgcagcaaggcga

SEQ ID NO: 190830 - RNA, 74 nt, Homo sapiens
ggcaagaagcacgagaagaagggcaacccaggagcaaaagaacccgaagaaagaggacacgagcccagccaggc

SEQ ID NO: 190831 - RNA, 73 nt, Homo sapiens
caacgagaaaaagccaagaacagcaccagggaaaggcacacccagaagccacaggagaagcaagaggcggccc

SEQ ID NO: 190832 - RNA, 55 nt, Homo sapiens
cgccacagaacagacgggggcgggcagggcccgaaggagcaaagcgcggccaagc

SEQ ID NO: 190833 - RNA, 76 nt, Homo sapiens
agccggcagcggcgcgggaggccggcgggcacaccggaaaaagacgagaaggaaaacgccggaacagagcaggagg

SEQ ID NO: 190834 - RNA, 81 nt, Homo sapiens
ccggcccgcgggccccgggacaaggggaggccgagcaaccgcacagagccggcgaccccaaccaagcggccggaccccaag

SEQ ID NO: 190835 - RNA, 74 nt, Homo sapiens
gcccgacccgcgggccgggcgcagccgccgccccgccccagaaggaaggcacggcgcaaacggcgccgggccag

SEQ ID NO: 190836 - RNA, 76 nt, Homo sapiens
gagagaagcgcggagccccaaggaaagaccacagcaagaccacgcccccagccgggggaccaggccgaacgacccg

SEQ ID NO: 190837 - RNA, 87 nt, Homo sapiens
gcacccgggcgggacccgaccccgcccgaggcccccacaagaagcagcggacgcgcccccaagaaagaacaccccaccagaccaccc

SEQ ID NO: 190838 - RNA, 65 nt, Homo sapiens
gccaagacacacaagcaggggagcccggagcaaccaggagcaaaaggcaaaacaaagcaaaagga

SEQ ID NO: 190839 - RNA, 79 nt, Homo sapiens
gaagcccagggggaggggacagaagcacggccccccagggagccacagacagggggacacccacggccaaccaaaaacc

SEQ ID NO: 190840 - RNA, 62 nt, Homo sapiens
cgcgccccggccaggaagcgccggcagcccgcggcacggagacaggcggaggccaggcagac

SEQ ID NO: 190841 - RNA, 85 nt, Homo sapiens
caagggaagacacagagacagagccaaagccccaggcacacaggaaaagaaccaaaaggcaacagcacacgagagcaacacacca

SEQ ID NO: 190842 - RNA, 64 nt, Homo sapiens
ccgccacgaccgggagaccgggccagaaacagagaggcagaccacagcgggaggaccacgaaag

SEQ ID NO: 190843 - RNA, 81 nt, Homo sapiens
ccggcccacgacacaggaagaagacaggcgcgggggcaggcagggcgcgcgggccaaggcccggccaacggcccacgaccc

SEQ ID NO: 190844 - RNA, 62 nt, Homo sapiens
cgccggcgcgggaaacgggcgaagcgacgagccgcgaggaggaccaccccggggccacagac

SEQ ID NO: 190845 - RNA, 76 nt, Homo sapiens
cagccgcacggcggagaccgaccaggacaaagagaacccaccgcaagagaccaaaggccaagagcaccgcagccac

SEQ ID NO: 190846 - RNA, 74 nt, Homo sapiens
ccggaaagcgcaagggcgggcagggagcccgcagaggggaccggacagagcccacccccagagggcgcgacacg

SEQ ID NO: 190847 - RNA, 60 nt, Homo sapiens
caggcgcgcgaaaacccacacgcagcagggcacaagagcagaccgcgcgaaacgcccaga

SEQ ID NO: 190848 - RNA, 79 nt, Homo sapiens
cgagacccggaggaggcgaagcgagaggacaggccacaaacgaacagcgaaacggagaacggaagaaagccccagcacc

SEQ ID NO: 190849 - RNA, 70 nt, Homo sapiens
cccaccgccgagacacggaagggaaaaagacccgagaagcgcagacccaccagggaaagcaaaggcaggg

SEQ ID NO: 190850 - RNA, 83 nt, Homo sapiens
ggacgggccaacccaaaaccagggcggcaaaacgagcgggccagcgcgggaaggacgggcacaggaccccggacgcaagaccc

SEQ ID NO: 190851 - RNA, 42 nt, Homo sapiens
aaaccagcaacaaccccgggaaaggggcgaccacgaccgaag

SEQ ID NO: 190852 - RNA, 82 nt, Homo sapiens
gagacgcgacaggacaaaagcagccaacaaggcgcaccaagagcggacgccccgccagaccggccaggaacacgcagagggc

SEQ ID NO: 190853 - RNA, 76 nt, Homo sapiens
gaaaaggcaaggcgccagggccagaccaaaggaaccagagcaggagaaaacgaggggcgagcgaaacacagagaag

SEQ ID NO: 190854 - RNA, 37 nt, Homo sapiens
agccgacccccaccgcaagaccccgcagggacagcgg

SEQ ID NO: 190855 - RNA, 70 nt, Homo sapiens
ccacaagcggcgcccgacacccgccagggccgggaggaagggaaggggccgacgcgggcagccacgccag

SEQ ID NO: 190856 - RNA, 71 nt, Homo sapiens
caaagcggccgggagcgcgccccccaccccgagacagacaccgaaaacgagaaacgaaagagacacggggg

SEQ ID NO: 190857 - RNA, 82 nt, Homo sapiens
ccccgcgaccaggggcgcagcgaccagcggaggccccgagccgccggcgcacaggaagccgccaccgcggcgcacgggagaa

SEQ ID NO: 190858 - RNA, 90 nt, Homo sapiens
ggcaggcagccccgggcaggacccgaacccgccgcgaggggcgagaaaggcccacgcagcccccaagcaggaacgggggacccacggggc

SEQ ID NO: 190859 - RNA, 78 nt, Homo sapiens
ggggacccagaggacccagcagaccaagagcgaaggaagaggcaaagacgggacagggagcagcgcggaagaggaggg

SEQ ID NO: 190860 - RNA, 73 nt, Homo sapiens
caggaaggagggaggacccacgaaggagcagacaccaggcgggaacgggcagcggggaagaagaaaaggaacc

SEQ ID NO: 190861 - RNA, 80 nt, Homo sapiens
cagccagccaagcacgccccgagcaccaggagacaaagccacaaaaacaccagaaaaaccaagcagaaaaggagcggcag

SEQ ID NO: 190862 - RNA, 66 nt, Homo sapiens
ggaacagcaaaggcacaagcagcccaagcaggcccaaggagaaagaagggagcccacacaacccac

SEQ ID NO: 190863 - RNA, 78 nt, Homo sapiens
gaagccgacacaaaaacacagaacgccaaggagccgcccccccggaaacgcacgcccaggggagaggcaccagcaaca

SEQ ID NO: 190864 - RNA, 76 nt, Homo sapiens
agcccagccgaaggagaagggggggcggagaacggaaaagcaccaggaagcagagaggaccgcagaagggaaggag

SEQ ID NO: 190865 - RNA, 85 nt, Homo sapiens
gacccgggccggcccccaccagagaccgagcagacagacagcgaacacggaagccacgaaaagcaaaagcacaggaagccggcag

SEQ ID NO: 190866 - RNA, 74 nt, Homo sapiens
acggccaagaagggccaccccacagacggaagaaaacaggcgaaacaaggcacccccagcgccgaacacaggac

SEQ ID NO: 190867 - RNA, 81 nt, Homo sapiens
cacgagggaaacagcccggaccggcagacccagcaaaagcgccacaggaggaagaggaggcaagacgcaaccaaccacgga

SEQ ID NO: 190868 - RNA, 82 nt, Homo sapiens
gccggagaccgagaaccggaggcggagagcaaaaccgggagcacggagaagaagggaccccagggcagagcaacaggcggaa

SEQ ID NO: 190869 - RNA, 81 nt, Homo sapiens
cgcacagcgaaggggcgccagcagcagcgcgcaagccaggcggcgaagagagcaggccgcccagaaggccagggcccagaa

SEQ ID NO: 190870 - RNA, 82 nt, Homo sapiens
accagccgcagcccgacgccaggcagcacaaccagacagagagacggcaggaccacaggaagcagcgggaaagcgaaaagga

SEQ ID NO: 190871 - RNA, 70 nt, Homo sapiens
aaagcagggaggagaagcgggccagaacaagagccaagaggaaggaggaagaggagaaaggcccaaaggg

SEQ ID NO: 190872 - RNA, 57 nt, Homo sapiens
gagacacgcagcggcggccagggaccaaaggcccggaggcgcccgcgggccagcgcg

SEQ ID NO: 190873 - RNA, 94 nt, Homo sapiens
cgcacaagcacagagcacacagggaacaaaacgagcgcacagcccaggagccggcacggccggagcccgcagcccaccacccaacacgggcggc

SEQ ID NO: 190874 - RNA, 79 nt, Homo sapiens
gaggggccagcacgcacggacacccgagcacagagacgaagaggaccaggagcaaacagaaaaaggagccaagcaaaca

SEQ ID NO: 190875 - RNA, 74 nt, Homo sapiens
ccaccagagggcgccacaaacgggagcaaccagcagcagggcgagcacccccagccagcagaaacagagacccc

SEQ ID NO: 190876 - RNA, 70 nt, Homo sapiens
gaaaagaaagcagggaaaaaagcagcaaacacgggacaaaaaccagaccagcggagcaacaccccgcacc

SEQ ID NO: 190877 - RNA, 64 nt, Homo sapiens
cacaagcagaaggcgggacagaaagaaaacggaagacaaaacacagggcgcagcgcagaaagaa

SEQ ID NO: 190878 - RNA, 77 nt, Homo sapiens
agccccagagagcgggacacagagaggagcgcgacaaccaggcggcgaacccggcccaagggaccccaccaccggcc

SEQ ID NO: 190879 - RNA, 77 nt, Homo sapiens
gcaccaaaagaaccccagaacagggcgcggggcagggagaaaaaggcggaacacgggaagaaaccaacaaagacgag

SEQ ID NO: 190880 - RNA, 68 nt, Homo sapiens
gcacacacgaagccagaaaaacggcgaagagcggggcccccgacgaccaaccaggcagcaggcagccg

SEQ ID NO: 190881 - RNA, 63 nt, Homo sapiens
gacacgggcgccgaggaggacgcgccagcagaccagcccaccgcacccagggaaaaaacagca

SEQ ID NO: 190882 - RNA, 85 nt, Homo sapiens
gcgccgccgccccgagcccggcaaaagcagaccggaaaacccaccggcaagaccacacccgaggggagcccaggacaccacgaaa

SEQ ID NO: 190883 - RNA, 77 nt, Homo sapiens
ccaccaccgccccggcgccagcgccccggacgagccgaacgccgggcgcagagcgaagacacacaccagcggaacaa

SEQ ID NO: 190884 - RNA, 72 nt, Homo sapiens
agcgagggggggcgcgccggaaaccggagcgcgcagcagagagcgaagggccgggcaggagggcggcacggc

SEQ ID NO: 190885 - RNA, 79 nt, Homo sapiens
caagaaccggcagcgaacaaggagaaagccacaacagggcggcaacaggggcgagaaagggagagccagggacaaagga

SEQ ID NO: 190886 - RNA, 82 nt, Homo sapiens
aggagcagcgcaccgggagcagggagacggaccgccaacggggagcacgggcacgcaagggccgaggaggaagcccacaggc

SEQ ID NO: 190887 - RNA, 78 nt, Homo sapiens
ggggggggaggcccgaggcagaacaacggcgaggacccagggggcccagaccgccgccacccacaccacaagaaaaca

SEQ ID NO: 190888 - RNA, 76 nt, Homo sapiens
gaggccggccgacacaaacagacgaaggggaggaccaggcggcgagaagagaagagagaagggagacgagggcgag

SEQ ID NO: 190889 - RNA, 83 nt, Homo sapiens
gagaggccgggcagccaggaggggaaaacagaggaaagcaagaaagaagcggaagggaggcgcgcgaccagagagcaaagccg

SEQ ID NO: 190890 - RNA, 70 nt, Homo sapiens
gacacgcacaccacaccacggggagggacacccacgaaaaacagacaagcaccagccggagagccaaagc

SEQ ID NO: 190891 - RNA, 83 nt, Homo sapiens
gcgggacaccccggaagcgggaaaggccccgagccccggccccaaagacccaaaacagagacaccccccagcccccgcgcccc

SEQ ID NO: 190892 - RNA, 43 nt, Homo sapiens
cccggccggcagggggacgggggccgacccaaagacaggacca

SEQ ID NO: 190893 - RNA, 78 nt, Homo sapiens
gggcgccaggaacgcggaacagaaccaaaggcaggacagccagcaggacgggagagaagcgccggccggaaagaagac

SEQ ID NO: 190894 - RNA, 63 nt, Homo sapiens
gaggagaaggacgaaaaccgggaagggagggagcgcagaggagagccgccgggacacagaccc

SEQ ID NO: 190895 - RNA, 73 nt, Homo sapiens
aacaacagcggaggacacaggcaccagacgggacagaaaaccagagggggacaggaagcgaaaagagacacac

SEQ ID NO: 190896 - RNA, 81 nt, Homo sapiens
cggggcaagggcgagaccggagagccgcaggacggcgcggcagagccccgacgccacagaacggcgacacgaagcagcaga

SEQ ID NO: 190897 - RNA, 76 nt, Homo sapiens
cagccgggcggggaggaacaagaaaaccggcccgaggggacgggggaacccggggccagagccacaaggagggagg

SEQ ID NO: 190898 - RNA, 73 nt, Homo sapiens
cagaccgcagaacccaaaggcggcacagaacagagggcggccaggaccccacggagcaccaccaaacagagag

SEQ ID NO: 190899 - RNA, 43 nt, Homo sapiens
caccgcggacgaggagagcaacaccagccggccacgggccagg

SEQ ID NO: 190900 - RNA, 80 nt, Homo sapiens
gagacaaaggcaccaggccaccacagaaacaaaagcaacaaagaggccagagggccggggagaggcggaacagcacggag

SEQ ID NO: 190901 - RNA, 83 nt, Homo sapiens
gcaccggaccaccacaggaccggaccccgggggcccggcgccgggcgaccccaccgaggacaccgcaaccagcacagacacag

SEQ ID NO: 190902 - RNA, 78 nt, Homo sapiens
ggaggggccgagggcagggacggggacacgcgacgaggcccgccaagaggcgccgcaggaggaaagcaccggggaaga

SEQ ID NO: 190903 - RNA, 64 nt, Homo sapiens
aaaacacacggagcagagcgaaaagagcgcccaaaccagaaaagaccaaggcccaccggacgaa

SEQ ID NO: 190904 - RNA, 79 nt, Homo sapiens
caacccggagcaaccccccaggacgggcggaggcggggggaccggcgggcggccgcacaaacacgcagaggcaagaaga

SEQ ID NO: 190905 - RNA, 71 nt, Homo sapiens
accgaagagacagacaaggcaaagcgaaaggcaccgcaacaacgcccagcgaggcaaagaaaaagccagcc

SEQ ID NO: 190906 - RNA, 79 nt, Homo sapiens
gaagaggaggcggaaaaggacgcaaagcccggcgaggaaggccgccaacaaagaccgaaagaaccagccaaaacagaag

SEQ ID NO: 190907 - RNA, 73 nt, Homo sapiens
aggcagaccccgccagaccaacaagcggagagaagcacgaacacacaaacggcacaaacaggcggaggagcga

SEQ ID NO: 190908 - RNA, 82 nt, Homo sapiens
ggagacggccgggagggcccgccagccgcgcccgagcaaggcaccggcaccggaccaacacgaaggagaaccgcaggccccg

SEQ ID NO: 190909 - RNA, 77 nt, Homo sapiens
agaagcaagcaaaaccagagaaagaacacgcagcgaaacccacgacgacagaccaaaagggaaggcccacaagaaaa

SEQ ID NO: 190910 - RNA, 84 nt, Homo sapiens
ggaccccggaaggcgccgccgcgcacgcagaaggacgcccagagaccggcagcgcaaacacccggggaggaagcccacacaccc

SEQ ID NO: 190911 - RNA, 67 nt, Homo sapiens
gccagccgccaggaccacccgccgcgcaggccaggcgaagacgcggcggaaggcgaggccaaggagg

SEQ ID NO: 190912 - RNA, 76 nt, Homo sapiens
ccgccccgccgcccagaggacgcccaacaccacccacccaccacgaaacagaagcgaagcgaagaaagcaagcaag

SEQ ID NO: 190913 - RNA, 53 nt, Homo sapiens
aacacgacagaaagaaaggccaaagcagcagcccggggcaagacggcagcccg

SEQ ID NO: 190914 - RNA, 76 nt, Homo sapiens
cgcaggaagcggccgcgccccggcagcgcaaacgggcgcgacccaaccagcaggaggagccaagaaacgaagaaag

SEQ ID NO: 190915 - RNA, 83 nt, Homo sapiens
gggcgggagagcgaaccccgggacacgcaggaacggcccagcacaagaccgcgacagaaaacggggacggacccaggccagga

SEQ ID NO: 190916 - RNA, 77 nt, Homo sapiens
aaaacgcaacagaaacaacagacagaaggaaggaaagacaggaaagaacagaagaccaggccagaaggaccaaaaag

SEQ ID NO: 190917 - RNA, 78 nt, Homo sapiens
ccaccggcccccaggccacaaccggggcaggagggaccccgggcagcccggcccccaccggcagccccaccccacacc

SEQ ID NO: 190918 - RNA, 80 nt, Homo sapiens
ggccgggagagcagaccgagagagagccaaggaccaagagaacgaaccagacacacaaaggaaccagcagagacgcagac

SEQ ID NO: 190919 - RNA, 74 nt, Homo sapiens
gaaggaccaagaaccagagcgaggaagcacacagggagaaaacagccagacagaggacgaagacaaaaaagcgg

SEQ ID NO: 190920 - RNA, 81 nt, Homo sapiens
gaaacaacagaaggagcaaagcaggcgccaagccccagacaaacccgagacagaggagagaacccccgcagccccccgaag

SEQ ID NO: 190921 - RNA, 75 nt, Homo sapiens
aggccaagcaaccaccagcagcccccagagcggaacacaggagggccagacaaggggaacacaagaggagagaag

SEQ ID NO: 190922 - RNA, 84 nt, Homo sapiens
gaaaaccaacagcagcacgcaaacagaaccgaccccgaacaggcaggagggggacccaggaaagggggaagaggcagagcaaag

SEQ ID NO: 190923 - RNA, 106 nt, Homo sapiens
cggagaggcaggcgcggcccgcggggcgccaggcacgcgaggcccccaggcccgggcccgagcccccacagccaggaaaacagcccccccagcgcccaccaccccc

SEQ ID NO: 190924 - RNA, 78 nt, Homo sapiens
cggaaaggggcaaaaaccccggagcccgaccaggacccgagaacaagacacagggcaaaaaacagagccaaacagccc

SEQ ID NO: 190925 - RNA, 84 nt, Homo sapiens
agcgcccggaccggccgagaggaagacgagccgggaggaacggcccggaaacaggaggacgccgaccgccgcgccacagagcac

SEQ ID NO: 190926 - RNA, 77 nt, Homo sapiens
ggcgaccacagccaaagcgggcggaagcgagaacgcggcgacaacgggacgcccgcgaagaaagaagagaggccccc

SEQ ID NO: 190927 - RNA, 54 nt, Homo sapiens
agaggaaccaagaaacaagaccagaagagagggaacccacaggagggccagagg

SEQ ID NO: 190928 - RNA, 60 nt, Homo sapiens
aggagcggagacggcgagcgcggcgcgccgagaaaggagaagacagaggagccagaccaa

SEQ ID NO: 190929 - RNA, 79 nt, Homo sapiens
gacaagcagagccgcagcccgaacagcccacagaacgaaacgggggcgcacaggaaacagaaaaaacagcaaagggagc

SEQ ID NO: 190930 - RNA, 77 nt, Homo sapiens
gaggccacggggaaacacagcagaacacaggacaccagcaggaaaacacgggccccagaaacaaggaaagggcaggc

SEQ ID NO: 190931 - RNA, 71 nt, Homo sapiens
cgcgccgagcgcgcaagcaaaaccaaagaggcaaaggaaccacaacagcacaagccagacaagcaaaaggg

SEQ ID NO: 190932 - RNA, 83 nt, Homo sapiens
ccaaagaaaagccaaaagacaacccaagcacagaccaaacccacccaagaccaccagaggagaaggaggcaccggaaggcccg

SEQ ID NO: 190933 - RNA, 84 nt, Homo sapiens
gccggaccggcggccccagcaacacggcgcgaggcaaggccagcggacccaaagacaggaccacgcaccagcagagaaggaaag

SEQ ID NO: 190934 - RNA, 62 nt, Homo sapiens
ggcgcagacggcgagaccccgcacagagccacgcgcccaggcgcaggcaggggccacacgcg

SEQ ID NO: 190935 - RNA, 80 nt, Homo sapiens
cgcgacgggaccgagagaccgcgacacgggggccagaaggaaagcaagaacaccagcaggaaaaaagagcggcagaaggc

SEQ ID NO: 190936 - RNA, 78 nt, Homo sapiens
cggggcagcgggccggcgccggcgcgaggcgccgcgacccaaccgaggaagcaccagcagaagagggggcaagggaga

SEQ ID NO: 190937 - RNA, 79 nt, Homo sapiens
gggcccccaccacccggaggagcagcccgccccgccgggggagacgacccccgccaggaaccgggacggaagggggagg

SEQ ID NO: 190938 - RNA, 68 nt, Homo sapiens
acaccgggacccaagcccccaacacccagcccagcccagcacgaaagaggaccaaacaggagcgccga

SEQ ID NO: 190939 - RNA, 38 nt, Homo sapiens
gcaggccaacccaggccaggcccagaaggggaagaccc

SEQ ID NO: 190940 - RNA, 76 nt, Homo sapiens
cgaaaggcaccgcaacaacgcccagcgaggacaacgcgccgcaaaagggaacaagagccccgccccagaggccccc

SEQ ID NO: 190941 - RNA, 82 nt, Homo sapiens
gcacagccccgcgacaaccaggcgaacggcgggggaagaggaagaaaagcggaacaagacaaccaccaccaacaacaaaaaa

SEQ ID NO: 190942 - RNA, 88 nt, Homo sapiens
cccagggagagcaaggcgcgcggcgacccggcggaaacaggccgcgaaggacgcggaccccggggcaaagaaggcggacagaggagca

SEQ ID NO: 190943 - RNA, 59 nt, Homo sapiens
aagcccgccccagagcagacacagggcggggacccgagcccagccccagacccagcacc

SEQ ID NO: 190944 - RNA, 76 nt, Homo sapiens
gccgagagccgcccgggccagcggccgcgcacccccggccggaggcaccagcgaaccacggaaggagggggcgaca

SEQ ID NO: 190945 - RNA, 76 nt, Homo sapiens
agcaagcccacgagcggccccccgagacggaggagagggccgaaagcacaagaccccgacaaaagaccccggcgag

SEQ ID NO: 190946 - RNA, 83 nt, Homo sapiens
gagcacgagcggacgcaggagacgagagcaccgacaccgccggggggcccacccccgcagacccaaaaacacaaggaagaaaa

SEQ ID NO: 190947 - RNA, 91 nt, Homo sapiens
gagcagcgaacgaggcaagcagcgccgagcccaggcaagagcccgcgagaaggaaagccacgcaggggccaagaagcccagggccgaagag

SEQ ID NO: 190948 - RNA, 74 nt, Homo sapiens
cccccgagggcgggaacagagcacagaaaccagaaacaaagacaagaccgccaagaagcccaacgagaggagag

SEQ ID NO: 190949 - RNA, 86 nt, Homo sapiens
gaagaaagaaggaagacagacacaggggccagaagccacgaccagaccgcaaaacaaggacagcggaagaccaccaaaagcaggaa

SEQ ID NO: 190950 - RNA, 77 nt, Homo sapiens
cgaccccccaaggagaggccccggcgaggaccggcccagccaggcccggggcagcggcgaccagagcagcccccgac

SEQ ID NO: 190951 - RNA, 36 nt, Homo sapiens
agccccgaagcgggaacagcaccaaaggccggacag

SEQ ID NO: 190952 - RNA, 53 nt, Homo sapiens
agcaggcccagccaaggacgcaagagagagaaagagcgaccaggaaagaaacc

SEQ ID NO: 190953 - RNA, 73 nt, Homo sapiens
cagcgaacccaaaaccaaagaagaggcggcggccacacacggaggggaggccgcagaggcccaggacagcgca

SEQ ID NO: 190954 - RNA, 65 nt, Homo sapiens
cgggaacaggcacgcgccaccaccccaggaggacgggcagagggagaggggcaggaaggccaacc

SEQ ID NO: 190955 - RNA, 66 nt, Homo sapiens
gaccaagaaccagggagacccacacggaaagacagagaagcagaagccagccacagaagaacacga

SEQ ID NO: 190956 - RNA, 78 nt, Homo sapiens
cgcaaccggggggcccagcgcccgggcagggaagcagaggcacccacgcccacaaggggggccgcccgcccaaggcag

SEQ ID NO: 190957 - RNA, 88 nt, Homo sapiens
cgcaaagagcaaagaacacgggccacaggaggcacggaaacaggccgagaagaacgggagaagaaaagacaaaacacagaggcccaag

SEQ ID NO: 190958 - RNA, 61 nt, Homo sapiens
agcgagggaggagagagggagagccaaagaaggaggagggagacaggggcaaaaaacggca

SEQ ID NO: 190959 - RNA, 76 nt, Homo sapiens
gagagaccagcgccacgagaagggacaaggagaacagcagcccaggccggagcacacacccaagagggacagacca

SEQ ID NO: 190960 - RNA, 59 nt, Homo sapiens
cagcagaaggccccggaggaaaaagaacgcacgggaaacccaagaaggagcaccggccc

SEQ ID NO: 190961 - RNA, 78 nt, Homo sapiens
cgagacgccagaggccccaccgcaaggagcggagaacacaccggccccgggaggaggaccaccaacccagcagccgag

SEQ ID NO: 190962 - RNA, 82 nt, Homo sapiens
cccgccgccccgcaaccggcagccgccgccgggaagggaaccacccccgaagcacggcgcacaagggaagagaccaagagca

SEQ ID NO: 190963 - RNA, 76 nt, Homo sapiens
ggcgaagaggaaaaaaaacagaacaggaggggagagggcaggaaccaccgcccaaaggaacacgagggccacaagc

SEQ ID NO: 190964 - RNA, 79 nt, Homo sapiens
gggccaggggggccaacaacagccgccaggcccaaagaaccagcggaccgagccaagaaaggaaaccagacgccgccac

SEQ ID NO: 190965 - RNA, 71 nt, Homo sapiens
acgcggcagcgccggcgcccaagccaagcacgggacaaggcacgaggcgcggcgaccaccacagcagagcc

SEQ ID NO: 190966 - RNA, 86 nt, Homo sapiens
agggacgcgcccgaggagcgcaggggcagcccaggcggccgaacccgcggccggccgagccggagagagagcaggagacggagggc

SEQ ID NO: 190967 - RNA, 80 nt, Homo sapiens
ccaacacaaaaaaaaccaacagccccccagaagagacggaggagcaaagaagaagccccagagggaccgccccacacgag

SEQ ID NO: 190968 - RNA, 85 nt, Homo sapiens
accgaggcgcccgcggggcggggaccgccgcccggggacccggaggagagaagggacaacccgagagaggaaagcagagggagcc

SEQ ID NO: 190969 - RNA, 82 nt, Homo sapiens
cggccggcggcggcgcgggcgagcggcgagccgaaaagcgagcgcgaggaaaaggcggcgggaggacccaaagacaggacca

SEQ ID NO: 190970 - RNA, 54 nt, Homo sapiens
gaaacagaacgccccacgaggcggcgccgcgaaagggggagaggcaccagcaac

SEQ ID NO: 190971 - RNA, 69 nt, Homo sapiens
cagagaccaaaaaaaaaacgcgaacaccgacggagccagaagcgcgcaagacgcaacacaaacgagaaa

SEQ ID NO: 190972 - RNA, 77 nt, Homo sapiens
gggagccagggcgccccagcaggcagcccaacacaccggcacccgggagaaagcccgaaagcagcaggccaggaccc

SEQ ID NO: 190973 - RNA, 77 nt, Homo sapiens
ccaccgggcggcgggagcccgcacgcccaggaaacgaggagcagcaacagaggccgaccccccaggccacaagccca

SEQ ID NO: 190974 - RNA, 64 nt, Homo sapiens
gcaagaacagcacgacacagacagcccacacagcccggaaaggagacgagcaaagaacgggaca

SEQ ID NO: 190975 - RNA, 79 nt, Homo sapiens
agacacaagaagaccgagcaaagagaccccggaacgggccccacacgagacccacagaggccggaagccaagccccgcc

SEQ ID NO: 190976 - RNA, 63 nt, Homo sapiens
ccagaggaccaggcgaccagcaccagcccgaccaggcagacgggagcgggccgagaaaaacca

SEQ ID NO: 190977 - RNA, 78 nt, Homo sapiens
ggagccgccgagcagagcgccaggagagggcacgccacgcacagcggcagcccaccaaccggccaagaccagcaccac

SEQ ID NO: 190978 - RNA, 73 nt, Homo sapiens
cacgaaacgaccgggaaacagaagagagaaaagaaaaaacgcagacagcccagagggagcccaggcggcagga

SEQ ID NO: 190979 - RNA, 53 nt, Homo sapiens
gcggggagcagcgccgggagaaggaccacgcagggcaggggaccaaaacgaag

SEQ ID NO: 190980 - RNA, 75 nt, Homo sapiens
cggacacccccggcagacaggaccacgaaggcgccagcagaaccggcggggagccgcagaacccagcggcagcaa

SEQ ID NO: 190981 - RNA, 74 nt, Homo sapiens
accaaccgggaccccaagccaaagaacccacacaaggacaaggcgccccacaaggaaagacgccaaggaagacc

SEQ ID NO: 190982 - RNA, 51 nt, Homo sapiens
aaggaccaagaaccaggagcaaaaggagggaggacagagaaccccagacgc

SEQ ID NO: 190983 - RNA, 70 nt, Homo sapiens
aaccccggagaaaaggccaagaaggcaggaccagacagcaggaaaagacaagaaaaggcgccaacaaccc

SEQ ID NO: 190984 - RNA, 59 nt, Homo sapiens
caaggcagaagaggccaacacggagcagagaagaaagaacggaggaagccaagccacgg

SEQ ID NO: 190985 - RNA, 81 nt, Homo sapiens
cgggaggaggggcaccacggccccccgacgcgccgggcgccacaacgaaaaagcggggaaggggggcaaaaaaaagaagca

SEQ ID NO: 190986 - RNA, 60 nt, Homo sapiens
gcgcacaccaccggacaaccgacaaaagcgacaccaaagggggggcaaagacagaacaaa

SEQ ID NO: 190987 - RNA, 90 nt, Homo sapiens
ggggggacgccggcggagacgcgggcgaggagaaagaaggggcaagaggaagaagcagaagcagagagaggagcgaagaagaagaagcga

SEQ ID NO: 190988 - RNA, 65 nt, Homo sapiens
agcgggccggccacggcgggagagcggcaacccagagaggaccaggaaaaaccccagaccaccaa

SEQ ID NO: 190989 - RNA, 45 nt, Homo sapiens
cgcgaggcgggcagccggggcgccagaggcgggaggcggcagaag

SEQ ID NO: 190990 - RNA, 78 nt, Homo sapiens
gagcagggacaccccccacccccggggagcacacccgagaaggagaagacagaggagccagaccaagagacagcacag

SEQ ID NO: 190991 - RNA, 76 nt, Homo sapiens
agaagaagaaaagcacgaacacccaaagccaaaagaagaacccccagggagccggcacagacacaaggacaacggg

SEQ ID NO: 190992 - RNA, 49 nt, Homo sapiens
ccaggaacccacaaaaccccgaggcgcgccccagccagccccgccagca

SEQ ID NO: 190993 - RNA, 76 nt, Homo sapiens
ggaaacgagggagccccggggagcggccaaccacgaccgacggacaccacccgggcggaggaacgccacaaagcag

SEQ ID NO: 190994 - RNA, 65 nt, Homo sapiens
aagcgagggaagggcggacacaccgagggccagagaaaaacccaagacgacacgcgcgcagaaac

SEQ ID NO: 190995 - RNA, 78 nt, Homo sapiens
gaacaccgacggagccagagcaaggcaccggcaccggaccaacacgaaggagaaccgcaggccccgcggagaacaacc

SEQ ID NO: 190996 - RNA, 127 nt, Homo sapiens
cacccgggaccaccccaggcgggcggccacggaccggacccgcgggcccggcggcgaaccaaaacccgggcagaagaggagaggaggaagcagcagaagagaagaagaagcaggagaacgaaacgga

SEQ ID NO: 190997 - RNA, 40 nt, Homo sapiens
gcacaagagcaccaacgaggggaagaacagacacagcacc

SEQ ID NO: 190998 - RNA, 115 nt, Homo sapiens
cgggggggacgcgcccccacacggagcccagcagcccagccagcggacccgacggcgagagaaccggccaaggaggcccaggagaccgggagaggggcccccaaaacagaccagg

SEQ ID NO: 190999 - RNA, 73 nt, Homo sapiens
ggcgagccacccacaagaagcagaggacaggaggccccgagaggaaaggagaaaagcgcaaccacgagggcga

SEQ ID NO: 191000 - RNA, 44 nt, Homo sapiens
cccccgccagcggcagcacgcgagagcacggagcaccagaagca

SEQ ID NO: 191001 - RNA, 37 nt, Homo sapiens
gacaagccacgagcacgaaccccaccaaccgcccaac

SEQ ID NO: 191002 - RNA, 71 nt, Homo sapiens
caggagacccgaacaacacaggagaacaacgacggaacggcgacgaaacccggggaacagaggcaaacaga

SEQ ID NO: 191003 - RNA, 83 nt, Homo sapiens
ggacggccccggcggcgcggcggcggggacgagaccggagaccggagaggagaaggagaaacggaggacgcccccacacaagc

SEQ ID NO: 191004 - RNA, 77 nt, Homo sapiens
agaggagagcccccaggggagccggcggaaaagagagagcaggagcggagaggacgcaggcagcccccgccgccaga

SEQ ID NO: 191005 - RNA, 77 nt, Homo sapiens
ggggagcaaaaccaacgccggccggagcagcagcccgaggaggaccccccccagaaaaccaagcgaaaccccaaagg

SEQ ID NO: 191006 - RNA, 35 nt, Homo sapiens
aaaaaaacccaacgagggacagagaacaacggcgg

SEQ ID NO: 191007 - RNA, 80 nt, Homo sapiens
ccacgccagcgccgagggcgagacggcagcaagccaaggagacaccaggaaacgagaaggagccgaggcccccgcaagga

SEQ ID NO: 191008 - RNA, 78 nt, Homo sapiens
accggccacgggcgagcgcggcagaaagaccaggagggacacacagcacagaggggggaaccagaagcgagcggagag

SEQ ID NO: 191009 - RNA, 77 nt, Homo sapiens
ccacgacagaaggcgccaggcgggaaaccggcccagcggcgaaaaccagagacccagacacgcgaaggaacgaaagg

SEQ ID NO: 191010 - RNA, 61 nt, Homo sapiens
gcgaaccggcggcccccacccggacaccggaagcagcgaggccggagcgagggagagcagg

SEQ ID NO: 191011 - RNA, 81 nt, Homo sapiens
caacaagaagaggagcaggacaccaacagagcaacgagaaggacacccaaagagagggagaaaaacgacaaacagagcgaa

SEQ ID NO: 191012 - RNA, 125 nt, Homo sapiens
gaggcgcacccgcaccccgcccaggcggggcggagaagagaaggggacccggacgggcgacgcagagacgccggcccaccagccagcggggagccgcccaccccacaagggaggacccagacgag

SEQ ID NO: 191013 - RNA, 58 nt, Homo sapiens
cgcgacgccgcgacacgggcgcgcaaggcccccgccacccagccgccgcgcccaggcg

SEQ ID NO: 191014 - RNA, 39 nt, Homo sapiens
ggcggacggaccggaaaggcaggccgcaacccggccagc

SEQ ID NO: 191015 - RNA, 70 nt, Homo sapiens
aaaagccggcagagaacggccccgaaggaacccagaaccgcgggcagcaagaaccaccaaacaaggacag

SEQ ID NO: 191016 - RNA, 61 nt, Homo sapiens
acagcggccaagaagacacaaaggacggaggcacggcagccgccgcaaagggacgacgaag

SEQ ID NO: 191017 - RNA, 81 nt, Homo sapiens
aaggaccaagaaccagagcacaagacccagaaaaaaaggagaaagaagagaagaagaaaacaaccagcaggaaagacagag

SEQ ID NO: 191018 - RNA, 76 nt, Homo sapiens
ggaaaaccggccacaaaaccagagcggagacacccaggaggcagaagccaaaggaagaaaccaaacgaaacacaac

SEQ ID NO: 191019 - RNA, 66 nt, Homo sapiens
gagaggggcgcggccggagcgggcggcgagacaaaggcgacgggcggagaacggaaaagcaccagg

SEQ ID NO: 191020 - RNA, 81 nt, Homo sapiens
cgcggcggcggagagcaagggccaggggagcccagcggcgcgccggcagcaggagggaaaccccgaagcccaccagaacgg

SEQ ID NO: 191021 - RNA, 65 nt, Homo sapiens
ccccggggcaaagaagggcaaacgggaggcgacagggaacgcccccaagcccaaggaaacacgga

SEQ ID NO: 191022 - RNA, 58 nt, Homo sapiens
cgaaggacagagccacccgacacccggcagaccaaaccaaaagagcagaaggagcgag

SEQ ID NO: 191023 - RNA, 73 nt, Homo sapiens
ccggagaaaagaggcaaggcccaccaagccgagaacaccaggaaacagcccaggggaaggccacggagaagcg

SEQ ID NO: 191024 - RNA, 69 nt, Homo sapiens
aaccgagacacccagagacggaggaaacccgacagcaaaggcaggggaaaggaagggagcagcgaagcc

SEQ ID NO: 191025 - RNA, 87 nt, Homo sapiens
acaagcacagcaagcagcagacagcaccagagaaccggacgacccccgaccaggagcgggccggcgcggagcccgggggagcggccg

SEQ ID NO: 191026 - RNA, 51 nt, Homo sapiens
aggcccaggagaaagcacaggacagcggcagacagagcaagagagaggagg

SEQ ID NO: 191027 - RNA, 72 nt, Homo sapiens
gaacgcagaaacacaggaccccccccaacgaggaaggaggcagaaagggagccccaagagagagggccaagc

SEQ ID NO: 191028 - RNA, 68 nt, Homo sapiens
gggaggccacgaacagcgaagacacaaggaaccgccgcgggagaaaggggagaaaaggagagaaacag

SEQ ID NO: 191029 - RNA, 73 nt, Homo sapiens
cagagaaaaagcggagaaaaggcacggggcaagacgccaagagaaaaggcgagagcacaaagcaccaagagcc

SEQ ID NO: 191030 - RNA, 65 nt, Homo sapiens
agagacgccgggacggcagagaacccacaaagaggcggaccgccaggaagggcagcgaagaagac

SEQ ID NO: 191031 - RNA, 83 nt, Homo sapiens
accgaggggcggacgcgcggcggggcagaccgcggggacgcgggcggcgcggccgcgccagacagggcacagagcagaggaca

SEQ ID NO: 191032 - RNA, 67 nt, Homo sapiens
aggagagaggaccacccagaggagcaacgagaagccgcgggagcggaagacaggcccggagcccgac

SEQ ID NO: 191033 - RNA, 72 nt, Homo sapiens
gggaggcaagcggagcccagagacagacgacagccccagaacaagaggccagagcccaggccgaggcgaaag

SEQ ID NO: 191034 - RNA, 76 nt, Homo sapiens
gaccggacagaaagccaaaaaggagaaagaggaaggcgggggagaaggagaggaacaggaagaggccgaccacggg

SEQ ID NO: 191035 - RNA, 79 nt, Homo sapiens
caccggggcccggcgcccgggcccgccccggagggccaaagaagcaaacgacaaaagaacagaagacagagagaagaga

SEQ ID NO: 191036 - RNA, 77 nt, Homo sapiens
gaaacaaaggagagcgaccaagcggacagggcagaccgccagcagcacagcaagccacagagagggccggcagggcg

SEQ ID NO: 191037 - RNA, 58 nt, Homo sapiens
caaagaagacccagaggacacaaccaaggagccaaaaaccgaacacccggaaggggac

SEQ ID NO: 191038 - RNA, 72 nt, Homo sapiens
acccgcccagaggccccagcaaagaggacaaaagagcggaggagcggcgagggggcaagaaccgaagcaaaa

SEQ ID NO: 191039 - RNA, 42 nt, Homo sapiens
aacaagggaaccgagcgagcagaaggccggaaaaagaacccc

SEQ ID NO: 191040 - RNA, 47 nt, Homo sapiens
gaaaggcgaggcagaggggcacaaagggaagcggaggaacaccaccc

SEQ ID NO: 191041 - RNA, 75 nt, Homo sapiens
gcaaacgcccagcgggagagacgagcaggagacacgggaaaggagaggaaagagagcacagggggacgaaacgaa

SEQ ID NO: 191042 - RNA, 74 nt, Homo sapiens
gcgccaagccgcacgcaaccaccgcccggccacaccaggaacggggaacaaagagcccaaaccgccacggggag

SEQ ID NO: 191043 - RNA, 98 nt, Homo sapiens
caagcgagaggacaggcggaggccccagggaagcgcagaaagcaggcgaacccgcggcgcaaaacggaaagaacacaagccagacacaaagcagaacg

SEQ ID NO: 191044 - RNA, 75 nt, Homo sapiens
cacgcaagacggcccggagaaccagaagaaggcgaggaagagaagagaacgagcggaagaggcagaagccgaagg

SEQ ID NO: 191045 - RNA, 71 nt, Homo sapiens
gagaacggccaaggaagcagagaaaggaagcacgcgcgcggacaagaccagaaagaaaagaaccaaggagc

SEQ ID NO: 191046 - RNA, 56 nt, Homo sapiens
gccagacacgcgcccgccacccaggaggaagggcggaggaggacgacaggaggcag

SEQ ID NO: 191047 - RNA, 82 nt, Homo sapiens
cagcacacgcgaagacacacgggcaggaacccaggacgaagggacaccccaaaaggaagaaaaccgacaacccaagaaaagg

SEQ ID NO: 191048 - RNA, 61 nt, Homo sapiens
gccccgcacgagcggcaaccgaaagccagcagcggcggaaagaagagaaccaacgaacacc

SEQ ID NO: 191049 - RNA, 51 nt, Homo sapiens
cagaggacgacaggccgggaggggggcaaaccgagggacacccagcgagca

SEQ ID NO: 191050 - RNA, 55 nt, Homo sapiens
agggagagaccacaaggacgcgcgcacgagaagccaggagggaagcccagaagac

SEQ ID NO: 191051 - RNA, 84 nt, Homo sapiens
ccagaaaaccagacacaggaaacgagaagcccaaaacaacacagagcggagaagaggcgaaagaagagggaaaagacgagcagg

SEQ ID NO: 191052 - RNA, 72 nt, Homo sapiens
ggcaagaaccacaacaccgcgagagacaacagcacagacccaacccagcagaggggaaagaaaaagagccca

SEQ ID NO: 191053 - RNA, 76 nt, Homo sapiens
cgccacagcacaagcggcaggcagaagggagagcagcgcccagccacggacgaggagagcagggaggcaagcagcg

SEQ ID NO: 191054 - RNA, 53 nt, Homo sapiens
acaccaaaaacaaaacgaaccaggacggcaaggggaaagaaaaggccaaaacg

SEQ ID NO: 191055 - RNA, 54 nt, Homo sapiens
cgcgcagacagcgcgaccagggcgcccacccgccacaggaagagaccaaagagc

SEQ ID NO: 191056 - RNA, 68 nt, Homo sapiens
ccccccaaagcagcaggagcgcagcacgaaaacggaaagggaagggcaggagacagagagaaagcaac

SEQ ID NO: 191057 - RNA, 75 nt, Homo sapiens
agccccaaggagcccggccccacaccggcacacagcaagacccaggagagcagccagcggggggcaacggaacaa

SEQ ID NO: 191058 - RNA, 35 nt, Homo sapiens
gccggaccagcaaggcgcggcggcgcggcaaggac

SEQ ID NO: 191059 - RNA, 115 nt, Homo sapiens
ggaacggcggcgggacggcggccccgcgcagcccccggccgcagcgcaggcagcccagcaggccccgggggcgccgagggcacaagggcaacgacagaagggcgaagccaacgcc

SEQ ID NO: 191060 - RNA, 54 nt, Homo sapiens
gcccgcacccggccgccggggccgcccagaaagccgcgcaacaaggcaaaacca

SEQ ID NO: 191061 - RNA, 81 nt, Homo sapiens
cgggagcacggcgacgccagcggcgggagcggacaagagaaaaaggccaggagaagagaagaagcagccacaagagccaaa

SEQ ID NO: 191062 - RNA, 80 nt, Homo sapiens
gcagcgcccaaagcaaacgccaccagaaggaaagggggagaggcaccagcaacagaccaaccgcagcaagcacagagaca

SEQ ID NO: 191063 - RNA, 53 nt, Homo sapiens
aaccgaaagaccccagaggagggaggcaagcggcacgaaaagagaagaagcca

SEQ ID NO: 191064 - RNA, 68 nt, Homo sapiens
aaaaccaggcaccaggcacaagaccccgccgcacaacgcaggccaaacaagaagaggcagcgccaaca

SEQ ID NO: 191065 - RNA, 72 nt, Homo sapiens
caaaggagaaagaggacgcagcagggagcaccagacaccaaaagggcagaaaagaaggggagagaagaacac

SEQ ID NO: 191066 - RNA, 73 nt, Homo sapiens
ccagggccccgggcccgacaggggcaaggggcaggaccacaaaaacagggcaccaccagagaaggagaggcca

SEQ ID NO: 191067 - RNA, 85 nt, Homo sapiens
cacagagccaggccaccgagagaagcagagcaccgcagagaagggcgacaaaaggaacaggaggcccggacccccagcacaagcg

SEQ ID NO: 191068 - RNA, 70 nt, Homo sapiens
ggggaggccacaggcgcaagcaggcgggaaaacggcacaaggcgacgagggagggcagaccgccaggcca

SEQ ID NO: 191069 - RNA, 78 nt, Homo sapiens
ccgccagccccgcggcgcccgggcccgggcggcggcccaccgcccacggcaaccaagaagacaagccaccaggcgcgg

SEQ ID NO: 191070 - RNA, 78 nt, Homo sapiens
gagccgcgaccggggggccaggagaaggggaagaagagagggggacgccaaggagagggcacgggccagcagcagaga

SEQ ID NO: 191071 - RNA, 82 nt, Homo sapiens
agccgcccaccggaaggccaccccgcaggccagagagcacaagaagaaggacacacccaggggacacaacaacgggagagcg

SEQ ID NO: 191072 - RNA, 77 nt, Homo sapiens
gggccacgaaaccgccccacacacccggggacagaacaagcaaagagcggcaggggcccggaggcacgggcagccac

SEQ ID NO: 191073 - RNA, 70 nt, Homo sapiens
agcgcccccccaacgcccccaccaggcggacgcagaacacacggcagcagcaggagggccccgagggccc

SEQ ID NO: 191074 - RNA, 75 nt, Homo sapiens
acaaaacccaggcgcggaagcaagcacagaggacccgaaaccggagagcaccgcgaaaaggcggccgagggcagc

SEQ ID NO: 191075 - RNA, 75 nt, Homo sapiens
cgacacaagcccagaaaggacacaaaagagaggcagaaaccacagaggaaaaggcgccccggcaaaacaaaaaaa

SEQ ID NO: 191076 - RNA, 51 nt, Homo sapiens
gcaggagagcaaagggaagagcgccagcacgggcccagacgcagacaaacg

SEQ ID NO: 191077 - RNA, 65 nt, Homo sapiens
gggaaaagacggacaggagaaaaggaacccccgcgacagaagcacacccaacacccgggaggcgg

SEQ ID NO: 191078 - RNA, 65 nt, Homo sapiens
ccaagcaccacaaggaaaagccaggccccgaggacaaggcagagcagaacagaccgaccgccaca

SEQ ID NO: 191079 - RNA, 59 nt, Homo sapiens
gccaaagaagggagagagaaaagcagaccaaagccaaaaggaaagaagaaccaagccac

SEQ ID NO: 191080 - RNA, 55 nt, Homo sapiens
caacaacgacagaggcagacaacacaaaagggcgaaagagaggacacaggcagag

SEQ ID NO: 191081 - RNA, 67 nt, Homo sapiens
acaccgcgagaacaggcacaaacaaagcgaggggaaagcccaagcgcaaaaaaaaggccccaacaaa

SEQ ID NO: 191082 - RNA, 80 nt, Homo sapiens
gaccgaagccggacgagaccacaccagcgcaagcgccaaaggagccccacagagagcagaggccaggaggggcccagccc

SEQ ID NO: 191083 - RNA, 56 nt, Homo sapiens
gaccgggaccaaggaaaggacggacccaggacaccccccaggcacagccacacccc

SEQ ID NO: 191084 - RNA, 76 nt, Homo sapiens
aagaggaggggaggaggaggaggacagggaaaggagcggggagccccgcgccacaggaaagcgcaaagccgacgag

SEQ ID NO: 191085 - RNA, 80 nt, Homo sapiens
ggccgaccgagacgggcggagaggagaagaaaaccagaaggcaccgacaggaaaggaaaaggagaaccaggcacccgggg

SEQ ID NO: 191086 - RNA, 80 nt, Homo sapiens
gaaacagaacggaacccaccccacaggaacagcgagaacagaccaccaaaccaccgcgaagcccaagcgacgaggcaggg

SEQ ID NO: 191087 - RNA, 73 nt, Homo sapiens
ggagggggacacccgggcggggcagagcagcccccagccagccgcgagggccggcccagggagaacgcaaaac

SEQ ID NO: 191088 - RNA, 77 nt, Homo sapiens
gagcaccgaaggaaccaagagacacacaaaaagaaggcccaaacaggcacccggcccaggaggagagaaagaaccca

SEQ ID NO: 191089 - RNA, 89 nt, Homo sapiens
cagcacccgagcaaaccccagcaagagcggaggcgcccggcggagcagaggaaccacacgcgacaggcaacgccaccccacgaaaaagc

SEQ ID NO: 191090 - RNA, 35 nt, Homo sapiens
gcgccccaccccaggcgggggcggggccgacaaaa

SEQ ID NO: 191091 - RNA, 72 nt, Homo sapiens
ggaagggccccgaaaggaaggagcacaagccaaggacgcagaggcaggacacaaggacgggcgggcccgagg

SEQ ID NO: 191092 - RNA, 53 nt, Homo sapiens
caacgcccaccgggcgcaggcgaggagcaagagaggcagagaagagagacgcc

SEQ ID NO: 191093 - RNA, 77 nt, Homo sapiens
gcggcggcccgccccgcggcccaggacgggcccagggaacacgggagccccggaccaccggacaggggagcgcgagg

SEQ ID NO: 191094 - RNA, 52 nt, Homo sapiens
ggggcagccgccgcccccggggaagaagagagggcgaaggaggccacacaga

SEQ ID NO: 191095 - RNA, 75 nt, Homo sapiens
cacggcgacgccccaggggaaaacccccgggaccagggacgacaacccgggaggggagcgggcggaaacggaccc

SEQ ID NO: 191096 - RNA, 79 nt, Homo sapiens
cagaggaagcaccgccagcagcgacgcgccagggccagccggggaggaggaggcggcccggaccggaggaagcagaggc

SEQ ID NO: 191097 - RNA, 58 nt, Homo sapiens
gccaaacccggacagacacgaccgaaaagacgcggccccaaaggaaacacccgaagaa

SEQ ID NO: 191098 - RNA, 78 nt, Homo sapiens
gacgggccaagagagcccgggcccggaaaggagggagaagaacccagaaaaaaaaaagagaagcacccagagggaagg

SEQ ID NO: 191099 - RNA, 83 nt, Homo sapiens
ggcacggcgccgaccagcaccaggggaagcgggacaacggggacgggacagggagaaaacgaagcggagccaacccggagaac

SEQ ID NO: 191100 - RNA, 60 nt, Homo sapiens
gagagaacccccaacaaacgaggcgaaggcgaggaaggaaggaacaggagacccagaccc

SEQ ID NO: 191101 - RNA, 36 nt, Homo sapiens
gaagaggcgaggacaagaaacgcagagggaagcgag

SEQ ID NO: 191102 - RNA, 110 nt, Homo sapiens
gcgggggagagccgaaggagcagcccaggaccgagaccggagcagccggggcggagcggggggcacccgaggaggaagagggcagggcccacggaaagaagggaaacccg

SEQ ID NO: 191103 - RNA, 79 nt, Homo sapiens
ccgcaccagagcgcccggcccacgacacaggaagaagacagcagagagggggagaaacagccgcacccacagggacagg

SEQ ID NO: 191104 - RNA, 81 nt, Homo sapiens
gggggcagccccccgcccggccagccgccccgccgggaggaaaagccaaggcggaggacaacaagcgccgggcaagccgac

SEQ ID NO: 191105 - RNA, 70 nt, Homo sapiens
acggagcagcaggcagagaaagccaccaggcgggcccaggccaaaggcagaaggggcaacgagggagacc

SEQ ID NO: 191106 - RNA, 75 nt, Homo sapiens
ccgagcacccacgggccgaccacagccaaaacgacagcgagacgcgagaggagccaagcccaacgggacgggaaa

SEQ ID NO: 191107 - RNA, 81 nt, Homo sapiens
ccgagagggacacggggcaccgcgccgcagcgaccagagccacgcgcccaggcgcaggcaggggccacacgcgcacgcaac

SEQ ID NO: 191108 - RNA, 66 nt, Homo sapiens
acgggaggaaccaaggaaccacacagaaagagcgagcgggaagaacaagaaccacccacaagagag

SEQ ID NO: 191109 - RNA, 83 nt, Homo sapiens
cacagcacagacaacaaccgaacaaccccaccagcacaaaacacacacagcaaaaaagacgcagacgcaacccgagcaccagc

SEQ ID NO: 191110 - RNA, 81 nt, Homo sapiens
ggggcagcacggaaccacacagggccgccaccaacagagaagacagagcaccaacgagcccccgaaggcaaccaacagcgg

SEQ ID NO: 191111 - RNA, 85 nt, Homo sapiens
ggcgcgcgccgcgcgggagagggccaccgcccgccacccgcgcgccgccgccgaggagaaaggacagaggcagacaaggccaccc

SEQ ID NO: 191112 - RNA, 82 nt, Homo sapiens
cggaggcggcggccgggagggaaggaggaaagagcacacgggagcgcccccgagagaaccaaacgaagcacacgggccggcg

SEQ ID NO: 191113 - RNA, 89 nt, Homo sapiens
aagagagcccaaggagaaaaccagaagagcaaaggcgagagccacaaccgaaaggccgaggggcaaagaaaaggaaagcacggccgaaa

SEQ ID NO: 191114 - RNA, 73 nt, Homo sapiens
gggcggaagacaggccacccagcggggagcacggcgagcagccaggccaggagagggggcaccgccgacaccg

SEQ ID NO: 191115 - RNA, 85 nt, Homo sapiens
acagccaccacacagcaccggaaggagcagcggcccccgcgcccggccgcagccccccgggcgccggcgcccccagcacgcccca

SEQ ID NO: 191116 - RNA, 77 nt, Homo sapiens
aaaaaacaaagcaaaaaaaacaggagaaaaagacgaggcccccaagcgggggacaccgagagccggcagaaaaagaa

SEQ ID NO: 191117 - RNA, 72 nt, Homo sapiens
gcccggccccacggggaaggcaccacaacggaggagaaagccaggaagcaccgccgcgagcagggggcacaa

SEQ ID NO: 191118 - RNA, 72 nt, Homo sapiens
agcacacgccgccgccgccgcacggacagacgcaaagagacaggagggacggaagcacagccaacagggaca

SEQ ID NO: 191119 - RNA, 55 nt, Homo sapiens
ccacacacagccgacacaacaagacagacgccagggcccaccggcacagccaccc

SEQ ID NO: 191120 - RNA, 78 nt, Homo sapiens
ggaaaccaccagacgaggaagggggacaccagcagcaaagaccagacaccaaaggaagcggacggagcccaaaagaaa

SEQ ID NO: 191121 - RNA, 76 nt, Homo sapiens
ggaccgacggcggcccccccgggaggcacagcacaagggggggaaaagaacacaaggccgaaaggccgggcgggcc

SEQ ID NO: 191122 - RNA, 66 nt, Homo sapiens
aaaaaacaagaaccacggcacgaaaggaggaacaggaaggggaccaaacccacaaacaaaccaaag

SEQ ID NO: 191123 - RNA, 74 nt, Homo sapiens
cggaaaaagaagccaagaagcaaaaaagggacgcaagaagaaccaccagccagaccagacccaggggccaccga

SEQ ID NO: 191124 - RNA, 61 nt, Homo sapiens
gggggccgagcccacaaggcggaaggcaaggacgaaaaggacggcgccgggggccgaaaac

SEQ ID NO: 191125 - RNA, 80 nt, Homo sapiens
gcgggcggggcggaggcgaggagaaggaggagcgggccgggaggccgccgccaggggcaaaagaaccaacaaaagcccga

SEQ ID NO: 191126 - RNA, 72 nt, Homo sapiens
ccaccacgaaagcagcaacagagcacacgacgaaggaggacagggaacgaagacccggagacacagagcacc

SEQ ID NO: 191127 - RNA, 83 nt, Homo sapiens
ccagaagggaagaagacggcaaaagcaacagaggcccaagaacaggcacagaacgaaaggggggaacgccaagcacaacggca

SEQ ID NO: 191128 - RNA, 73 nt, Homo sapiens
cgagagaaccagcgccaggaaagggcacacggcccgaacaagggaacaccagcacagcggcagaagcaaggcc

SEQ ID NO: 191129 - RNA, 91 nt, Homo sapiens
ggcacgccaaggccagggcacagaacgggaacgacacgagcgcacgcagagcaccgcccaggcccggcagaccagaacgcgagggacgggc

SEQ ID NO: 191130 - RNA, 39 nt, Homo sapiens
agcaccagagaacagaggccggacaagacgcagagagcc

SEQ ID NO: 191131 - RNA, 71 nt, Homo sapiens
aagccggaagaaccgcagccgagcggggccggccacaggagaacacccacgaagcaccgccccacgccgag

SEQ ID NO: 191132 - RNA, 71 nt, Homo sapiens
gagcaggggaaagccaaacacaaaaaccaggaagagaggaagaaaaggggcgaagagaagaagggaacaag

SEQ ID NO: 191133 - RNA, 75 nt, Homo sapiens
gcgccggcccagcaccccgagaaccgcaggagccagagagagagccaaaggccagaccggacccgccaccacgaa

SEQ ID NO: 191134 - RNA, 74 nt, Homo sapiens
agcagcccccccgcgcccccgcccgcccgggacccgcggccccgccgcgacgacccagaagagcccggggaagc

SEQ ID NO: 191135 - RNA, 76 nt, Homo sapiens
gcgccgccgaccccccggcgccgcgccggcggcggcagccagcacgagcccccccaccaccacagccccccaccca

SEQ ID NO: 191136 - RNA, 75 nt, Homo sapiens
cccaggccgagacgaaaggcaggggagccaacagacagacagcgacccaaaaaacgcaaaacgagcaagagaaac

SEQ ID NO: 191137 - RNA, 82 nt, Homo sapiens
gaaggaccaagaaccaggccccgagccccggccccaaagacccaaaacagagacaccccccagcccccgcgccccgaaaagg

SEQ ID NO: 191138 - RNA, 60 nt, Homo sapiens
cggggaaccaaggagacgcccggcacgcagggcacccacagaggcaacgaaagcacaaaa

SEQ ID NO: 191139 - RNA, 63 nt, Homo sapiens
aaaaggaacaccccacgccaaggccagagcaggacccagccccagaggaggcccgaggacggg

SEQ ID NO: 191140 - RNA, 85 nt, Homo sapiens
ccgggggcgcccgcggaggccggggagcagccgaccaggagccccagaagggaacaggcacgccccacccgccagccgagccccc

SEQ ID NO: 191141 - RNA, 76 nt, Homo sapiens
cgccgggacacaccccaggaaaaagacagcccgcagcacgaccagcaggaacggcgccacggccggaacgcacagc

SEQ ID NO: 191142 - RNA, 67 nt, Homo sapiens
cggcaagaaacaacacaaagaacaggaaaaggaagggaaaacaagaggaaaaaaccagcaacccaac

SEQ ID NO: 191143 - RNA, 76 nt, Homo sapiens
caaccgcccaggaaacagcccaaaaccgccgcgcgcgaccaaaggcgcaaggaagaagagacgccgcgcggcagac

SEQ ID NO: 191144 - RNA, 78 nt, Homo sapiens
ggacgccggcggagacgcgggcgagggccaaaagggcggggaacggaccaccagccccaacgcacgcgccggagacag

SEQ ID NO: 191145 - RNA, 70 nt, Homo sapiens
gagagggaaggccacgaggacgagaggacagggcagaccgccagcagcacagcaagccacagagagggcc

SEQ ID NO: 191146 - RNA, 41 nt, Homo sapiens
agccagcccccaccccacagacaccccagagggccagagaa

SEQ ID NO: 191147 - RNA, 73 nt, Homo sapiens
aagaaagaaagcccaagcagggaaaccgggcgcagacagcaacgacaaaggaagaaccaagcccacgacaaga

SEQ ID NO: 191148 - RNA, 79 nt, Homo sapiens
ggcaccaaacacccagaacaacaaagagcccgacggagcagcagcgccgggaaggaaagcacacaggacagaagcagag

SEQ ID NO: 191149 - RNA, 116 nt, Homo sapiens
ggcagagcggggacaagccaccggcccagcgccacggggggaccggaaggaggaggaggaagagcagccgcaggcagcacagcccccacccgcccgggaggagaagaagaagacca

SEQ ID NO: 191150 - RNA, 69 nt, Homo sapiens
ccggaacaagaaccacgcccgcaccagccacgcaggccagacggcacccgacagaagcagcaccaaaca

SEQ ID NO: 191151 - RNA, 67 nt, Homo sapiens
aagcggacaaccagaaccgggagccaaccagaggcccacaacaccaacaggcgagaaaaccgcacaa

SEQ ID NO: 191152 - RNA, 63 nt, Homo sapiens
gagggaaccagcaacaagccaggggcgaaggagaaagaaacacccaaaacagcgccggggaaa

SEQ ID NO: 191153 - RNA, 82 nt, Homo sapiens
gggaagacccgccccaaggagacagaggccaagagcaagcgaccgacacccccaggcccacacgccggcaccccaagggacc

SEQ ID NO: 191154 - RNA, 82 nt, Homo sapiens
gcagcgccagcggccgagcgggcggcccggccgggcgcccggggcggcggagggccggaaagagggcgggcccgcacggagc

SEQ ID NO: 191155 - RNA, 81 nt, Homo sapiens
cgcgccgcagcgcccaggccggaccgggccgggcgcccgcaggcacccgccggcgccccccggcacaacccgcgggcacca

SEQ ID NO: 191156 - RNA, 72 nt, Homo sapiens
cgggcgagcaggggcgccggcccgaggccgcgcgcggcgcccgcggggacccaccgcgaggcgggggaagcc

SEQ ID NO: 191157 - RNA, 83 nt, Homo sapiens
cagcccgccgccgccccgccgcggcgcacccgccccgcgccgcagggcggaaaacaccccaaaagccaaaagggaaaggaaaa

SEQ ID NO: 191158 - RNA, 77 nt, Homo sapiens
caagaaacaccaccaacaaaccgggcaggacggaaccccaaaccccgacagggcgagcaacgggcagaacaggacag

SEQ ID NO: 191159 - RNA, 58 nt, Homo sapiens
acgcgcggaaggcagcgcccagcagcgcagaaagagccgcagacgcacagcaaccacc

SEQ ID NO: 191160 - RNA, 66 nt, Homo sapiens
cagaggagaaagaagcccagcccaccggagacacaggaacaaacgagcacgcaaaccacggcaaca

SEQ ID NO: 191161 - RNA, 107 nt, Homo sapiens
gggcacgggaaggaagaccccccagccaacagagacgaccccacaaggaagggaccacagaccagcacgccggcgccacgaaccgagcgacaggacgggccgagagg

SEQ ID NO: 191162 - RNA, 84 nt, Homo sapiens
agcacaggcccaggggcaaaagcaggaaaggcagagaacgaaccaaccgggagccccccaagagacccaggggaagacccaaag

SEQ ID NO: 191163 - RNA, 73 nt, Homo sapiens
acacccacaccagaagcacccgagggacccgaggagcccaccaagccgaccgcaggcaagggccgggggaggc

SEQ ID NO: 191164 - RNA, 40 nt, Homo sapiens
acagccccacggcagacccggaggaggagcggccgcagaa

SEQ ID NO: 191165 - RNA, 65 nt, Homo sapiens
acgacaagaccaagagaaaaaaaaggagcaagaggaaacagggccggggacacaagcaacagcca

SEQ ID NO: 191166 - RNA, 66 nt, Homo sapiens
cgcgccagggagcgccgcggcggagcgggacgcagacgaggcacggagcaccaagagaagcgccag

SEQ ID NO: 191167 - RNA, 77 nt, Homo sapiens
ggccgagacacgcagcggcggccagggaccagccgggcccaagaagcacgaagcgggggcagcccaaagcaggagcg

SEQ ID NO: 191168 - RNA, 65 nt, Homo sapiens
cgcgggcggcgcgcggccgaagcgaagggcgacgccaagccggaggagggggccggaggagaggg

SEQ ID NO: 191169 - RNA, 76 nt, Homo sapiens
ccagggacccaaacccacaggcgaaaccaagggcccaaaccgacaaagaggcacggacaaaccagggaacaccagg

SEQ ID NO: 191170 - RNA, 76 nt, Homo sapiens
cggaccccaaacgaagcgacgcacaacaacacaagacccgaaaggaggcaacccccaagggaagacaaggcacgag

SEQ ID NO: 191171 - RNA, 75 nt, Homo sapiens
gccgagagcccaacgcaaagacaacccccgaccagaggggggccaggcccgcaagcccagaaaacgagaaagccg

SEQ ID NO: 191172 - RNA, 72 nt, Homo sapiens
ggggggaagagggacgaagacaagcggggcacacgccacgcagcccaggagcgccgaacgcgggggggcggc

SEQ ID NO: 191173 - RNA, 82 nt, Homo sapiens
ggaagccgcgccgccgccgccaggcagagggcccaccccggagagaccccagggcccccaaggggaccccccggaagaggga

SEQ ID NO: 191174 - RNA, 79 nt, Homo sapiens
gggagccggcccccgaaagaggagccccgaagaacggccccccagcaggcacccagccaggagaccgccaaccaccaca

SEQ ID NO: 191175 - RNA, 57 nt, Homo sapiens
gagaaggaccaagaaccagggaaagaacgccggacaacagcggcgaagaaggcaaac

SEQ ID NO: 191176 - RNA, 70 nt, Homo sapiens
aaaaaaaggggaccacaacagaagcgccacacgcacaaagaaaccccaccacgcggcaggggccgccgag

SEQ ID NO: 191177 - RNA, 71 nt, Homo sapiens
ggaacaagaggggacagaaagaggaccacccgcacccaggggacgcacggcccaaccccgagcaaggacgc

SEQ ID NO: 191178 - RNA, 72 nt, Homo sapiens
gaaagggagcggcaagcggaccagaacaacaacggacaagccgggggaggagaagaggggaggaaccaagga

SEQ ID NO: 191179 - RNA, 75 nt, Homo sapiens
ggaagaccagaggacccacagacagaacaaccgcgggcacagagagacccagcgacgagcaaaaggccaaggaag

SEQ ID NO: 191180 - RNA, 69 nt, Homo sapiens
caaagccgacgagccccggagcaggcgacaggccggccgcccccaggggccaagccccaccgggcgccc

SEQ ID NO: 191181 - RNA, 71 nt, Homo sapiens
cccaagaagagcaaaggagaggcagccaggggaaggaggcgcgcggccacaacccaggccgcaccaaaagc

SEQ ID NO: 191182 - RNA, 73 nt, Homo sapiens
gacaacgggagagcggggcaagcacagaaaagaagcaacagaagaagaaaggaagccgccagagcggccggaa

SEQ ID NO: 191183 - RNA, 66 nt, Homo sapiens
acagcagggccgaccaagcaccgcagacccaaccccagacgaaaaagagccacgcccccacgagcg

SEQ ID NO: 191184 - RNA, 59 nt, Homo sapiens
gcacaccccaacgccgaggcgagaaaagacgcccacacaaaaccagaaggcaccgacag

SEQ ID NO: 191185 - RNA, 81 nt, Homo sapiens
agaacgcccagccaaagaaacaagccgggaaagggacaagaagggcaaagccgaaggcaaaccggggaccgcagaagaagc

SEQ ID NO: 191186 - RNA, 78 nt, Homo sapiens
cgaagccaagaggaaccccaggccaggaagggacgcaaaaaggaagccccacaaggaccaggcaaaacggaagagcac

SEQ ID NO: 191187 - RNA, 61 nt, Homo sapiens
cccacaagcccaggagcgcgaggccaccaggcaccggacagggaggaaccggccagcggga

SEQ ID NO: 191188 - RNA, 66 nt, Homo sapiens
cgacccgcgcaaacaaacagcagaagacaagaagaagccaagagaaaggaccagaagaaggggggg

SEQ ID NO: 191189 - RNA, 83 nt, Homo sapiens
cccgcagaaaagcacaaagaagcaaaaggaaacacagccgagcccccaacacacccaaaggaggcggaggcagggcgcgaccg

SEQ ID NO: 191190 - RNA, 68 nt, Homo sapiens
caacgaaggccaaacagagacccagacgagaacaagcgccgaacggccacaccaaccccagcaccccc

SEQ ID NO: 191191 - RNA, 35 nt, Homo sapiens
cgcaaccgggcacggcggaggcaagggcggccggc

SEQ ID NO: 191192 - RNA, 56 nt, Homo sapiens
aacggcgaaggcccacgggagaaaaccgggcgcaaggaacggacagagagggccaa

SEQ ID NO: 191193 - RNA, 85 nt, Homo sapiens
cccaaggccccggacgccggagaggcaccggaccggaccagcggaaaaaggaaacagacccccaccaaaccggccagaccacgac

SEQ ID NO: 191194 - RNA, 77 nt, Homo sapiens
gccccagcaccgccccccggaagaaggaagagagcaggaagcaggcggcaagcccgggagcaaggaccccacggggc

SEQ ID NO: 191195 - RNA, 80 nt, Homo sapiens
gagaagaaccgccgcgcagccgagaacgccgcgcgcgcacccaacagcgaccgagcggcggagagagcagggacgccaag

SEQ ID NO: 191196 - RNA, 70 nt, Homo sapiens
ccgcacaagacgcccgaaaaagaggccgaaacagccaaagcaggccagaagaagggcagaacagagcagc

SEQ ID NO: 191197 - RNA, 85 nt, Homo sapiens
ggggaaaaggcggacgggaaggcgggagacgagaagccgaaaagcgcagcgagcggagccgccggagagagaaaccgaagaaggc

SEQ ID NO: 191198 - RNA, 78 nt, Homo sapiens
aaagaagggggcagaagagggaagacaaagcagccacagagcggcaagcaccccccaggaaccaaccgagcagaacca

SEQ ID NO: 191199 - RNA, 78 nt, Homo sapiens
caaacccaacaacacgcaaccaggccagccagaccaaggacagccaaggaagccaagaccaggaggggacgggacggg

SEQ ID NO: 191200 - RNA, 76 nt, Homo sapiens
gaaaccgcccgcccccagacggcccgccacgggccccgcagccgcgcccgagcgcccgagcagggacagcgaccac

SEQ ID NO: 191201 - RNA, 65 nt, Homo sapiens
cagccgaggacgggaccccagggcagcgaagcagaaagccaacaggcagaccagagacagcgcca

SEQ ID NO: 191202 - RNA, 52 nt, Homo sapiens
gagagaggaggacacgaccggacgaagcaaaggagagaacccaagggacacc

SEQ ID NO: 191203 - RNA, 81 nt, Homo sapiens
cgcgagccccgggaaagagcagcgacgggagacagccgggcgcgcaaggaacccgcgcccagaagggaaggccacggacgg

SEQ ID NO: 191204 - RNA, 45 nt, Homo sapiens
agccggcagagcaaaccgcagaagcaggcccaggcccccgacaag

SEQ ID NO: 191205 - RNA, 70 nt, Homo sapiens
aggcgcgcggccaaaacgcagggacgcggccccccccgggggaggagaaggaaagagcaccggcccaggc

SEQ ID NO: 191206 - RNA, 63 nt, Homo sapiens
caagcagcagcacgcgaaaggagaggagcagagcgacagagagaggaggacgccggacccgac

SEQ ID NO: 191207 - RNA, 80 nt, Homo sapiens
cggagaggagcgacgcgagggccgagacggcgcggcaagccgggacaccacagcaagaggaacgggcacgccagaaaaga

SEQ ID NO: 191208 - RNA, 40 nt, Homo sapiens
gaggcagcaagcaccgagaagagcccggaagcaggaagag

SEQ ID NO: 191209 - RNA, 95 nt, Homo sapiens
acgggcccgggggaaagcgccgggcccggccgcccgggaagacagggcgccaggcgccggcaggccggaaggcaaagaccgggagcgcccacaga

SEQ ID NO: 191210 - RNA, 109 nt, Homo sapiens
gggcacgggcggcaggaacggcaggaccagggcgcagcagagagcgggcgggggggccggacgaacagacgaaacggaagaacgaaaagggagaggaggagaagaccag

SEQ ID NO: 191211 - RNA, 69 nt, Homo sapiens
acaggcagcaggccgggagagaaggggcagcacgccgaaggagagaccagacaacaggccagggaaggg

SEQ ID NO: 191212 - RNA, 81 nt, Homo sapiens
ggcggcaggccgcagcgcccgagcgagcaccccccaacgggcaaaccccgcccagcagggccggcaccaagggcagaagcg

SEQ ID NO: 191213 - RNA, 82 nt, Homo sapiens
cgccagccacccacgccagcagagggaggcagcgccaggagcaaaaggaagccaggaccgcacaggcagacgcgggccagcc

SEQ ID NO: 191214 - RNA, 69 nt, Homo sapiens
gcaccagaagcccaggcaggaaccaccaccacagacccagacaggcagcacaagggggcggcacacgga

SEQ ID NO: 191215 - RNA, 68 nt, Homo sapiens
cccgaaaacagcaaccagagaccggcccggggaacaaacgcccggggccgaagacaaagaaccagcca

SEQ ID NO: 191216 - RNA, 62 nt, Homo sapiens
gcaaccaaagcaagccaagaggaggaggaggcggaggccaagcggaaagaggggggagaagg

SEQ ID NO: 191217 - RNA, 52 nt, Homo sapiens
gaccaaaaacaggaggaagcccagggaacggcgccaggagggcaggaaggag

SEQ ID NO: 191218 - RNA, 76 nt, Homo sapiens
ggcacaaagggaacaagaacgaaacgaagggcaaaggcaaagggcagcgaggggcaaccaacgggacgaggcgaaa

SEQ ID NO: 191219 - RNA, 53 nt, Homo sapiens
ccgccccaacccacgagaggacagcccaggacgcaaggagcagaacggaaggc

SEQ ID NO: 191220 - RNA, 76 nt, Homo sapiens
aacacggaacaggaggaaaaaaccagggcgcaaaaaagcagaaacgaggcccagcagagagagaacagcgaggcac

SEQ ID NO: 191221 - RNA, 73 nt, Homo sapiens
gccccgcggccgggcgacaaagcaggggagggacagggggccggggggcgccggaagacaccagccgcccacc

SEQ ID NO: 191222 - RNA, 59 nt, Homo sapiens
cacagacacccgggaacccacccaccagcgggcccagggccccgcggcgcggggcccgg

SEQ ID NO: 191223 - RNA, 69 nt, Homo sapiens
cgggcgcaaaggaagcgcccaaacccgaggaaggcccgcacgcagaggaaacggcaaaccgaggcgagc

SEQ ID NO: 191224 - RNA, 62 nt, Homo sapiens
cgcgcccgaggcgaggaggagcgcggcgcccacggccgccaacccacccgcccgcgacagaa

SEQ ID NO: 191225 - RNA, 73 nt, Homo sapiens
gcgaggagcgcccgcgggacaggaagaaacgaggccagacaaggaaccgaacaagacagaaagcgggacgcgc

SEQ ID NO: 191226 - RNA, 62 nt, Homo sapiens
caggaccccccagagaagccaggagcacccggcgcccagacaaagccgccggcccaggcgga

SEQ ID NO: 191227 - RNA, 55 nt, Homo sapiens
ggggagggcaagacgaaccccgacagcagagacgacgcggcaagcagcggaagag

SEQ ID NO: 191228 - RNA, 37 nt, Homo sapiens
agaaccaaaggcaaacgagagaacagccagcaaagac

SEQ ID NO: 191229 - RNA, 84 nt, Homo sapiens
gcgggcggcgagccaacgaggccacaaccccagggaagcgggggacagcaagaccgggccggccgcacgcagcgggcagccgcg

SEQ ID NO: 191230 - RNA, 62 nt, Homo sapiens
gccgaaccccaggaacaagaaagccagcagcagacgaaaccaggacgggaaaaaccagcaag

SEQ ID NO: 191231 - RNA, 72 nt, Homo sapiens
gaagccgacccggagccgagcaaccagcccagcagaccgggacccagccgaggccagcgaaggaacccagcc

SEQ ID NO: 191232 - RNA, 79 nt, Homo sapiens
ggggccgccgcggcagcaagaacagagagagaggggacagacgagagaacgagagcgcggcgcccaggcggagacaagg

SEQ ID NO: 191233 - RNA, 81 nt, Homo sapiens
cacaagccagccccggagcaaagagaagacaccggaagaaggggaggagagagaaagaaaaagccagagaggagagcgggg

SEQ ID NO: 191234 - RNA, 64 nt, Homo sapiens
acagggcagaagcccaagggcaacgacaagaggagggcgaagaaaaaaggagaaaaggcaggag

SEQ ID NO: 191235 - RNA, 70 nt, Homo sapiens
gaacaccaaacggaggagccagacccggggaggcgcacacacaccaaaggcgacggcgccgaggcgcggg

SEQ ID NO: 191236 - RNA, 79 nt, Homo sapiens
accccagccacccgccgccagggaaggaacagcagccagagccagggacccgaagggcgaggaggagagcggccggggg

SEQ ID NO: 191237 - RNA, 72 nt, Homo sapiens
gacaaaaaacaaccaccaggaaaaaaccagggggaaagagcccgggagaggcccgcgccaccccgggggcca

SEQ ID NO: 191238 - RNA, 86 nt, Homo sapiens
cgcccagcacaccaccgcgggagacacacgcaccaccgccagcaagaggagccaggagcacggggggaacaagaccgccgggacgg

SEQ ID NO: 191239 - RNA, 39 nt, Homo sapiens
aacgggacccagaagaggagggaagcggacacacaggac

SEQ ID NO: 191240 - RNA, 64 nt, Homo sapiens
gcggaggcgcccggcggagcagaggaaccacacgcgacagcacccccgccaaggccggccggcg

SEQ ID NO: 191241 - RNA, 76 nt, Homo sapiens
gggaaaggcaccaggacaagcaaagggagagccggggagacaggagagccgcccagaacccccggaagggaccagc

SEQ ID NO: 191242 - RNA, 65 nt, Homo sapiens
accggaagacagggcacccacagaagcacggcacagagcgggccagaagaagccagagccgggac

SEQ ID NO: 191243 - RNA, 73 nt, Homo sapiens
gcgggcgaagagcggcagggcccaccgcgaccgggcccagccagcaccgcgcacccagcagcacccaaaggga

SEQ ID NO: 191244 - RNA, 82 nt, Homo sapiens
ccagcccgagggaccggacgaggagaggaccaagcagcaggaccgggaacgaaggagcaagcggcacaaacgggccgaggag

SEQ ID NO: 191245 - RNA, 54 nt, Homo sapiens
cacgcccacggccggcgccgaaaagggcccgacaagagaggcggagccaccccc

SEQ ID NO: 191246 - RNA, 75 nt, Homo sapiens
agcaagcaccaacagcgccacccaccgggcgccccgcgcgccccggcccgcaccgagcgacagaacggaacccgc

SEQ ID NO: 191247 - RNA, 77 nt, Homo sapiens
acacccgaccgggaaagacaccaaggagaccgggagagagacgaaggacgcgcaggggcagcagacacggaaacgaa

SEQ ID NO: 191248 - RNA, 71 nt, Homo sapiens
gaggcaggagcgcgggacggccagcagaagcaggcgagccccccgagaaaaagaagaaacgcgggaccaca

SEQ ID NO: 191249 - RNA, 85 nt, Homo sapiens
aaggcagcgacggccaccacgagcacggcccgcgcacgcccggagagaggcaaaagcagaccggaaaacccaccggcaagaccac

SEQ ID NO: 191250 - RNA, 70 nt, Homo sapiens
accagacagcagagagagagcggaacgggagaaagcacgggaggagagggaagaaaacgccagagaagca

SEQ ID NO: 191251 - RNA, 37 nt, Homo sapiens
gacccaccaccagcccaggaagagccgcgggcaggga

SEQ ID NO: 191252 - RNA, 72 nt, Homo sapiens
ccggaccaacgaccgcacggaaacgaagcgacacgggcgcggagcccgcagagaaggccccggcgggccggg

SEQ ID NO: 191253 - RNA, 68 nt, Homo sapiens
agagggaaggggaagaggggcccgaagacaagggaggcgaggacggacaaaaggaaacggacgggagg

SEQ ID NO: 191254 - RNA, 74 nt, Homo sapiens
cgcccagcccccaagagcgggaacagacgccgcccccggccgggacccgccacccacgcgaccccccccggcgg

SEQ ID NO: 191255 - RNA, 82 nt, Homo sapiens
ggaagaaccaacagagaaaaaaaccagaaacaacccaaacccccaaggccaacaagccgaggagaggcccacccgccaagcg

SEQ ID NO: 191256 - RNA, 74 nt, Homo sapiens
agaacacgcgccgcaaccaagccgacgagacggagaggaggcacacaccaacgagggagcggagagcgaaacca

SEQ ID NO: 191257 - RNA, 71 nt, Homo sapiens
gccaaacacaccaacgggaggccaaagccgacagaaaaggaagagacccagcgaacaagaggaagacgagg

SEQ ID NO: 191258 - RNA, 82 nt, Homo sapiens
agaaggggagaggagaagggaagaagagaagagagagaaggggaggaaggagaggagaaacgaccaagacagccccccggga

SEQ ID NO: 191259 - RNA, 59 nt, Homo sapiens
gacaacaggcaggagaaagggagcgcaccccaggggaccgacagcaagaaaaggagaaa

SEQ ID NO: 191260 - RNA, 72 nt, Homo sapiens
accgaaccggccaacaacgacaaaaaaccacagagccacaggccaaggaggcggggaccgcacacccgaggg

SEQ ID NO: 191261 - RNA, 82 nt, Homo sapiens
aagaaaagcccgggagcagaagggaggcccaagacccacaacaaaagagccccaggacgcccccggacccgcccaccccggc

SEQ ID NO: 191262 - RNA, 73 nt, Homo sapiens
aggcgcagggaacacgaaggaagccggaccccggggaaggcggagcaacaccccgcaccgggaaccgcggaac

SEQ ID NO: 191263 - RNA, 81 nt, Homo sapiens
accaccgcccagagccccaccgagccgccgacgcacgcgagaaggggagggggagaaagaagaggaagaagccacaggcaa

SEQ ID NO: 191264 - RNA, 60 nt, Homo sapiens
cgagacgcggggacggcggcgccgcaaccagcagacccgggaaccagaccgggacagagc

SEQ ID NO: 191265 - RNA, 60 nt, Homo sapiens
cagcgacccccgccaggcaaaaggaaggggaccccgaagcaggaggcccaaggaacagca

SEQ ID NO: 191266 - RNA, 80 nt, Homo sapiens
cgcgaggaggaaaggaggacgagacggagccacgggcccaggcggaggcagggcgccacggccacgcaggcgcccgcccc

SEQ ID NO: 191267 - RNA, 78 nt, Homo sapiens
caaacaagcggaaagcacgaacgcacagcccccaaggaaaagaaagcagaggggaaacagagcaaaggagacaggaag

SEQ ID NO: 191268 - RNA, 55 nt, Homo sapiens
accccaacggggcagagagaggcagccggcacccgcacaacccagggggccgaac

SEQ ID NO: 191269 - RNA, 83 nt, Homo sapiens
aggagacgggccggagaaggacagcagagaaaagcggacaccaaaacccgacgaaaacaggacaggagaagaacacccccaag

SEQ ID NO: 191270 - RNA, 67 nt, Homo sapiens
aacccaaaccaaccccagaccggagccagacagcagccaaggacaggagagacaacggaggcaagaa

SEQ ID NO: 191271 - RNA, 70 nt, Homo sapiens
ggccacaggagaacgccggcaaaaaaagaagcgagaagcacgcccgaaggccagaaaagaaaaaacggga

SEQ ID NO: 191272 - RNA, 71 nt, Homo sapiens
aaccccaggaaacggccagggggaggaagccccaccaggccgccaagccacaccggcccgacccccagggg

SEQ ID NO: 191273 - RNA, 94 nt, Homo sapiens
cccaaaaggacagcaacacgcgagagaaacaagacgggaaggaagacgagggaccaggaggcggggccccccggagcgggcgcagacagccacg

SEQ ID NO: 191274 - RNA, 80 nt, Homo sapiens
cagggagagggccacaagcgaggcggccccgcgagcccgagacacgaccggcaagagcccaccgcggagaggagaaaccg

SEQ ID NO: 191275 - RNA, 76 nt, Homo sapiens
ccccggaaaggcacagccacagacccagcacagagggggacgccccaggaagcggcgcgggaacaggacgacacga

SEQ ID NO: 191276 - RNA, 77 nt, Homo sapiens
ggacaagaagagagccagcagggcagaaaagaacagacccagaagaagcgaaaggggagaaagaagaaagcaagacg

SEQ ID NO: 191277 - RNA, 85 nt, Homo sapiens
ccggcaggcgcccggggccgcagcgccgaggcccgacccgccgggagaacacgagacccgcacaaaaccccgccccccaggccac

SEQ ID NO: 191278 - RNA, 72 nt, Homo sapiens
gggagccagccaaagagcaggaagcaggcgacaaacaagaaagaggcgacccaaccaggagccgacaaacaa

SEQ ID NO: 191279 - RNA, 78 nt, Homo sapiens
acacagccaccaaccacacaacgagacaagaagcaacagccacgggagcaagaacgaagaagcagagggaaccggagg

SEQ ID NO: 191280 - RNA, 68 nt, Homo sapiens
gacagcgggaagcgaaagaacgcagaggcccacagcaagccccagaaaagacagccaagcaacaaagg

SEQ ID NO: 191281 - RNA, 71 nt, Homo sapiens
ggagccaggggggcccggaacagagcacacccccggggagagcccccgcaccaccagcccgcaaaacgaga

SEQ ID NO: 191282 - RNA, 73 nt, Homo sapiens
aaaaggaaaaaaggggaaaaaaagagaagacaagaacacacaagacgcccccccaccccccccagaaagaacc

SEQ ID NO: 191283 - RNA, 90 nt, Homo sapiens
cacaaaagcgaaagggcacaccacagcggacacgcccgcagcaggggccaaaacggcacgccagacgggggagccaggagagacggaccc

SEQ ID NO: 191284 - RNA, 55 nt, Homo sapiens
agagacccggaaggccagaaaagcagagacaggagggcgaaaggaaccagagcag

SEQ ID NO: 191285 - RNA, 74 nt, Homo sapiens
gcagaccgccccgaggaaggacccaaagacaggaccacgcaccagcagagaaggaaagcaaaccgaagcaggcg

SEQ ID NO: 191286 - RNA, 77 nt, Homo sapiens
cagccccccgcagcacccagccggccacgcccccagaaacccacaaagccccgaggggcagggagcccagagggaac

SEQ ID NO: 191287 - RNA, 80 nt, Homo sapiens
aggccacagcagcggcaagagacaaagcagagcccacagacaaggccaaaggcaaagcgcacagaggggcccaggcagag

SEQ ID NO: 191288 - RNA, 60 nt, Homo sapiens
aaacaaggcaaacagacaacagaaaagaaggacaaaaagcgagcccgagaacacagggcg

SEQ ID NO: 191289 - RNA, 73 nt, Homo sapiens
cagccacccgaccacacacaccaggaaaaaggacgagcaggaaccggcagaagacagaccccgcggagacggc

SEQ ID NO: 191290 - RNA, 75 nt, Homo sapiens
gaaccggccaccggccccacacgaccgaaacagggaaacagccgcagcgaggacggggaagggcgagacggggaa

SEQ ID NO: 191291 - RNA, 35 nt, Homo sapiens
ggagcaaaagaggcggacggaaagacccagcagcg

SEQ ID NO: 191292 - RNA, 79 nt, Homo sapiens
ccaggcgcagcggacccagagaaggacagcgaccgagaggcacgagaaccggcccggcacaggcgaccccgaggcgcca

SEQ ID NO: 191293 - RNA, 73 nt, Homo sapiens
ggcggaggcccgccgccgcagagcacccaacggcgccggagaagaaagcgggaacccacaacgaaggaaggaa

SEQ ID NO: 191294 - RNA, 82 nt, Homo sapiens
agacccgggggcgagcacaaacggggcggggccggggaacacacaggaaacggaacgccaagcgaagaagaacgaaacggaa

SEQ ID NO: 191295 - RNA, 71 nt, Homo sapiens
cagcggcggaagaagaagagagaccacaccaggagcaagacccagggagaacccaccacgagaggcaaaag

SEQ ID NO: 191296 - RNA, 69 nt, Homo sapiens
aaacaagaacgaggaacacgaacaggaacccgcaggcccagaagcggaagaaagaagagccaagaaggg

SEQ ID NO: 191297 - RNA, 60 nt, Homo sapiens
caagaggcgcaaagaagcaaaccagccagcacgggggcccagccagccagcagcgagggg

SEQ ID NO: 191298 - RNA, 65 nt, Homo sapiens
ggaagcggcccccgcagacgccggcagggaccaaagaaaagaccacagaaaaaagcaaaaagcag

SEQ ID NO: 191299 - RNA, 74 nt, Homo sapiens
cccgagcacggagagggggaccgggcgcacaggcggcgccgacacgggccaaaagcagagaaccaaagaacacg

SEQ ID NO: 191300 - RNA, 70 nt, Homo sapiens
aggcaccgacccccacacagacacagagccccggcccaaccggccgagcaagaagaccgcccccgacaaa

SEQ ID NO: 191301 - RNA, 63 nt, Homo sapiens
ggggacggcaggcgaggcggaacaggccgggcaccaaggcgcagcaaccccgcccccaccccg

SEQ ID NO: 191302 - RNA, 76 nt, Homo sapiens
gagaggaggggaccagaacggaacaggccggcggccccaccccccaggaacagagacgcaggcaagagcgcggagg

SEQ ID NO: 191303 - RNA, 80 nt, Homo sapiens
gcggcggcggggggaaaggcggagacggccccaccggcaccgagaaagacaagccagcgcgggccgccagcggcggccac

SEQ ID NO: 191304 - RNA, 35 nt, Homo sapiens
caacacccgagccgaaggccgccggcacccccggc

SEQ ID NO: 191305 - RNA, 73 nt, Homo sapiens
gccgccggagccgcagcacggagggccagagcgaaagagcagcagaaggcggggccaggacacacagaaaccg

SEQ ID NO: 191306 - RNA, 74 nt, Homo sapiens
agagagcacccaagaagagcagaaaaaaccacacggggaaaggagagagaggcgagaggaccagccgagggaac

SEQ ID NO: 191307 - RNA, 73 nt, Homo sapiens
cagcagccacaggaaccgagacaggagagacaacggaggcaagaaagacggagaagcgagaagagaccagcag

SEQ ID NO: 191308 - RNA, 93 nt, Homo sapiens
cggcccccccccagggccaggcgccgccagaacggacccaaagacaggaccacgcaccagcagagaaggaaagcaaaccgaagcaggcgggca

SEQ ID NO: 191309 - RNA, 79 nt, Homo sapiens
ccgagcgccccaggagaacaaacgcaccagaccaagcacagaaaaagaaaaaacagaggaaaacaggaggaaaggaacc

SEQ ID NO: 191310 - RNA, 78 nt, Homo sapiens
acgcccccgccggccaccgggccaaggccgaggacgccacacacagaacgacaccacagcgacaaccggcgaaccaca

SEQ ID NO: 191311 - RNA, 69 nt, Homo sapiens
cagcgccggaaaccaacaaaaggcaagcccaggcagcgggcagggagccacagaaggggcgaaaaagca

SEQ ID NO: 191312 - RNA, 57 nt, Homo sapiens
ggacgaaccgaccgagagcgcagacccgaaagaagacgaaacaacgaagcaagccca

SEQ ID NO: 191313 - RNA, 77 nt, Homo sapiens
gaaaggccgcgggggcaacggagaaaacccggaaccgcgacggcggcagcaccccgaggaaaaacaaccaaagaaaa

SEQ ID NO: 191314 - RNA, 85 nt, Homo sapiens
ccagcagggcacgccccgaacccgcgcgcagggaacagcggggcaaacacggaacggcccagaaagcaaggaaggagagcgacac

SEQ ID NO: 191315 - RNA, 79 nt, Homo sapiens
gggagaggaagagcgaggaggaacgcgcaaggcaaagcaccgggcggagaacggaaaagcaccaggaagcagagaggac

SEQ ID NO: 191316 - RNA, 93 nt, Homo sapiens
gcaaggcacacacagcgaccgggagcacaccacaggcaaggccgaaaacgagccgaagccgaagcgaccagcagaggacaacgaccgaaagcc

SEQ ID NO: 191317 - RNA, 74 nt, Homo sapiens
cggccaggagcgcggccccaaacccccccagcccccaccccgcagcgcccgggcccacagcgccacccggacac

SEQ ID NO: 191318 - RNA, 78 nt, Homo sapiens
gcaagaacagacaaaaagaagcgggagaacgggcgcgccagagcaaagagagcgaagaccggccaagggcagaaagac

SEQ ID NO: 191319 - RNA, 80 nt, Homo sapiens
caggcaggcccgagcacgcgcgggagcagcagggcgggaggccaggcagcacgcagacaagaagcgcaggacaggcgcag

SEQ ID NO: 191320 - RNA, 71 nt, Homo sapiens
gggaaccggcgcgccggcgcgcggcgcggacaggcccaaacggacccacccaggaggcagaaacacgccgc

SEQ ID NO: 191321 - RNA, 70 nt, Homo sapiens
cgagaagcacaggcggagagcgcaggcccacccacagaacagaaaagggacagggacaaaggaaaaagag

SEQ ID NO: 191322 - RNA, 88 nt, Homo sapiens
gaccgagaccgcggccgggaccgagggcggccggcgcggggcgcaggcggcgcggccagggccgcagggcagccgggaagagcacgac

SEQ ID NO: 191323 - RNA, 81 nt, Homo sapiens
gacagccggaaaaggagcaccccaggcgagcagcaggcacaccgcagcaaggggcaagggcagcaggaaagacgagaccgg

SEQ ID NO: 191324 - RNA, 82 nt, Homo sapiens
ggaaaaaggccggggggccccccccccgcccccagggcgaagggccagcggagcgaagccacagaacaaaaacgaccgagga

SEQ ID NO: 191325 - RNA, 68 nt, Homo sapiens
gacaacacagcgagcgaaaccaggcacgggagacgaaacgcccgcccgcaaacagcaccgcggagcag

SEQ ID NO: 191326 - RNA, 72 nt, Homo sapiens
gcacccacccacgacaggacggacccggccaggggaggcgcggcccgccacgaagaagagcaacggaccacg

SEQ ID NO: 191327 - RNA, 69 nt, Homo sapiens
agggagagaccggacggggggcgcaccacgacaggccaagaggacccagccgcagcgggagacaaccac

SEQ ID NO: 191328 - RNA, 71 nt, Homo sapiens
aagaggcagccggcaagaaaacgcgcaaacacaggacaaagagaaacaaaccgcaacggggacgagagccc

SEQ ID NO: 191329 - RNA, 98 nt, Homo sapiens
cgacccagccccacacggcaagacacagagagacggcagccgcgacagacacaccacgggcgcccggacaccaacacacaaaccagggaaaagcgaac

SEQ ID NO: 191330 - RNA, 81 nt, Homo sapiens
cccccgccgccgccgccgcgcgccaaagcgcgccgccccgggcaaaagcagcgcgacggcagaccgaagcccggcccaccg

SEQ ID NO: 191331 - RNA, 73 nt, Homo sapiens
ggcaccgcggacgcgcagaaagacgacgcacagggagcgaacaagaaaagaaggcgcagcggacgaagaagga

SEQ ID NO: 191332 - RNA, 78 nt, Homo sapiens
agcgggacagccgaggagcaaagaacggacgacacaacagccaagcggagcgacaagagcgggaccgacaaagaaagg

SEQ ID NO: 191333 - RNA, 80 nt, Homo sapiens
cagaacaacccagaacggagagccccccagaaaagacgaaggcgaagacccaacaagcaacgccacccaacgggcaccac

SEQ ID NO: 191334 - RNA, 59 nt, Homo sapiens
gggcacgagggagcaacgggccagagaagaacaggcagaagaagccagaagccaacccg

SEQ ID NO: 191335 - RNA, 71 nt, Homo sapiens
cgggccgaggcgcggaagaaagcgcgaggaggcagaagagcgccaaccggagcacggacacccagacgaca

SEQ ID NO: 191336 - RNA, 69 nt, Homo sapiens
aaccagacaggagaagaagggaaaaacggagcaacgcaaggcaggcaacaagagggagagaaaggcaga

SEQ ID NO: 191337 - RNA, 72 nt, Homo sapiens
cagggaacaaacaagaaaccagagcacggaaacgaaaaggcccaagagccccaacgccccacgcaccaaccg

SEQ ID NO: 191338 - RNA, 78 nt, Homo sapiens
aaacccaaaagagcaaaccacagcagaacaagccagacaaaccggaccaccgacggaagagagagaaacaggcaaacc

SEQ ID NO: 191339 - RNA, 64 nt, Homo sapiens
agccacgaagcaaaaagacccccaagcaccaaacgcccgggcgacacagaacgccggacaccaa

SEQ ID NO: 191340 - RNA, 57 nt, Homo sapiens
gaagcggaaagcagaagcgcgcagcaacggcggagaaaccaggcggggaacaagcca

SEQ ID NO: 191341 - RNA, 79 nt, Homo sapiens
caaggaaaaacggagagccacaaaaaaggaagcgaaagaaacaggaacacgaaagaggaaaaacgcacaagaaaccgaa

SEQ ID NO: 191342 - RNA, 63 nt, Homo sapiens
ccggggggagaagaacacgaggcacggacaaaacgcagggccagcaaacccgggcccaagacg

SEQ ID NO: 191343 - RNA, 73 nt, Homo sapiens
ccccggcgccgcgccggcggcggcggccgggagcgggcccagaacaaaccggcaaacaagcaggaccagaccc

SEQ ID NO: 191344 - RNA, 75 nt, Homo sapiens
gcaggcacaaaaggcgcccacagccacgggaccggcgcagacgaggcgaggaaccaaaggccaccccgccgagcc

SEQ ID NO: 191345 - RNA, 69 nt, Homo sapiens
accgcccaagcgcccggaggcccacagcagggggcagcaccagagggccacggccaagaaccgagcagg

SEQ ID NO: 191346 - RNA, 81 nt, Homo sapiens
gagcgcccggcccgaccccggccagggggcgcacagcagcgagaacgaggaccggaccaggcggcagaagggcagagcaag

SEQ ID NO: 191347 - RNA, 80 nt, Homo sapiens
agcaaccagagggccagagggaaggacagaaagaaggaacacacggacgcccagaaagaggccacagaaggaaacacaaa

SEQ ID NO: 191348 - RNA, 65 nt, Homo sapiens
aaggacaaaagccaagaggaggacagcgcacacagcaagcacgagggaagcgggagaggccaccc

SEQ ID NO: 191349 - RNA, 60 nt, Homo sapiens
cggaggaggaggggagaggccggaggacaccaacaggcagaacagcgaacaaccaccccc

SEQ ID NO: 191350 - RNA, 101 nt, Homo sapiens
caggcggcgcgcgcggcgcgggacgcgcgcgggcacccacggagccccggggcggcacgggaccaccagcgcgcagggggaaacccacacacccaggggca

SEQ ID NO: 191351 - RNA, 83 nt, Homo sapiens
gagagagggcacggggcgccgcaggcccagcgccggcgcaaggagagaagagacgaggaggaggggagaccgcggcaggacac

SEQ ID NO: 191352 - RNA, 76 nt, Homo sapiens
cgggcaacccggcggaacggcacaccgagggcccacacacccaggcagcaccaagagcacggcagcagagagagag

SEQ ID NO: 191353 - RNA, 60 nt, Homo sapiens
gcccgcgaacgcgagcacgcgcggaaacccaaagggggcacccgaggaggaagagggcag

SEQ ID NO: 191354 - RNA, 79 nt, Homo sapiens
cggaagaaggcagacagggaccggcccggaacgccgggcccccaaccaggacgagccccccggcagcagcggccaccaa

SEQ ID NO: 191355 - RNA, 55 nt, Homo sapiens
ggagaaagaaaagcccaaggacaaggggacaccagcagcgccgccggaccaccgg

SEQ ID NO: 191356 - RNA, 75 nt, Homo sapiens
ccaccggagggcagacacacgcaggaccgacagcccccaggaaggaggcggcggccgcgagagcccagccgccgg

SEQ ID NO: 191357 - RNA, 84 nt, Homo sapiens
cacgcagaagcacgacagggcagggcagaaagcagaaaacaaagcccggaggagccacacccgaagacgggaccacgcccaaac

SEQ ID NO: 191358 - RNA, 78 nt, Homo sapiens
acccggcacagacgcggcggggcgcaaaccgagacaagcaccccgaagcgccgacaagaaccacggcgggaaacgcca

SEQ ID NO: 191359 - RNA, 82 nt, Homo sapiens
ccggacgcggggggcgggaagagccggggccgggcgacaggagcagagaagagagaccacggccagcgagaggagaagacgc

SEQ ID NO: 191360 - RNA, 72 nt, Homo sapiens
cggacccggccacaagaccagcacaaggacagccgcaaaccgagagagagagaaccaaacacaaaagcagcg

SEQ ID NO: 191361 - RNA, 80 nt, Homo sapiens
cgcgaaacgcacgagaaggagacgaaaggaagcgaagaaaccgagaagaaaagcaccgcggaaaaggcccgagacaagag

SEQ ID NO: 191362 - RNA, 70 nt, Homo sapiens
ggcagcagaacgaggccccacccagcgcacacaccaccacacacgggccggcccagggagaacgcaaaac

SEQ ID NO: 191363 - RNA, 68 nt, Homo sapiens
gggaacaaaaacaaacaggagccgcggggcccgcccagaacagaagaacaccgaccgaggacaacagg

SEQ ID NO: 191364 - RNA, 83 nt, Homo sapiens
gaccagccgcgagccccccggggcgccaaaacgcccccaacccagcgcaaaggaagaggaaggcgaccaacgacgaagagcag

SEQ ID NO: 191365 - RNA, 74 nt, Homo sapiens
ccagcaaaggcaggggaggaagccacccgagacggaaccaaagccgaccccgaaacagggagcacaacagagac

SEQ ID NO: 191366 - RNA, 87 nt, Homo sapiens
ggcagcccgcggcggcgcgcccagggcagggcccaaggaaggacccgccagccccgaagaagaggccgaccggacaggaagacagac

SEQ ID NO: 191367 - RNA, 78 nt, Homo sapiens
cgggcgggccggcgagcgcagcgcgaccgggaggcccaggcaccggagccagcccccagcccccgacagcagcaagaa

SEQ ID NO: 191368 - RNA, 68 nt, Homo sapiens
caggagggcacgcacggggaagccaaccgagaacaacaggaagcaaacaggaccagcaagccggagaa

SEQ ID NO: 191369 - RNA, 81 nt, Homo sapiens
accagcacggaccaggaggcgagcaacagacacagaagcagcaacaaagaaagacacgccagcaaccggagccggcagaag

SEQ ID NO: 191370 - RNA, 54 nt, Homo sapiens
agagcccgcaagggagagccaaacacacacaggaaggagccagccaagagacag

SEQ ID NO: 191371 - RNA, 55 nt, Homo sapiens
cgcccgcccacccggaccgagggacaagacagaaggcacaaagagcacacggaac

SEQ ID NO: 191372 - RNA, 80 nt, Homo sapiens
gaggagcacccagggcccgccaccagaagacagaccgcgaagcgagccccaaaggcccggagagcacgaggagagcgagc

SEQ ID NO: 191373 - RNA, 43 nt, Homo sapiens
aagaaaacgaggccaaaacagaggaggcgcggaggaggaggag

SEQ ID NO: 191374 - RNA, 52 nt, Homo sapiens
cgagaaacgcgaaaaggaagcggaaggggccgacgccgggcaagccaagcca

SEQ ID NO: 191375 - RNA, 77 nt, Homo sapiens
gacccgcccaacagaaaaagagaggagggagaacacagaaacccgccccggcccccaaggaaaagaaagcagagggg

SEQ ID NO: 191376 - RNA, 72 nt, Homo sapiens
cggggacgcggacgcacgaacaaggcagaccaaccaccccaccgggccacgacagccaccaaaccgggacca

SEQ ID NO: 191377 - RNA, 77 nt, Homo sapiens
caacacaaaaaaaaccaacagccccccaggaaaaagaacagaggccaacccgacaagaggaccaaggccaccagaga

SEQ ID NO: 191378 - RNA, 64 nt, Homo sapiens
cgacgcaccgcaggcagacaaaagggccaaagaagggagagaggaccacccggcggacggcggg

SEQ ID NO: 191379 - RNA, 76 nt, Homo sapiens
cggcaggacccgaagacgaggacacagaagaacgcagcccggggagcagcaccccacaggcacgccaaccccacgc

SEQ ID NO: 191380 - RNA, 71 nt, Homo sapiens
gcccaaagaaacaggaagaggcaccaaaaagcgccaaccacccccacaggcccaaaacgaagaccagcgcc

SEQ ID NO: 191381 - RNA, 82 nt, Homo sapiens
gcgcgccgcccggcgccggcccgcccccgcagcagcgccagggaaagcaggcaggagggagagcgccgaagaaccacccccc

SEQ ID NO: 191382 - RNA, 70 nt, Homo sapiens
ggaaccggacccgcacgcgagaaacccgggggagaggaaagcggggaggaacagcagaaaacagacggag

SEQ ID NO: 191383 - RNA, 83 nt, Homo sapiens
cccgcggggcgccaggcacgcgaggcccccagggcccgacccaggcaagcgagcaggcgagcaggagcccacagccgagcagc

SEQ ID NO: 191384 - RNA, 89 nt, Homo sapiens
gcgggccgcaggcggggaccagaggaaccccaggcacacgacgggccacagagcaaccaaaaaccggccgcaggcacaaaagaagacgg

SEQ ID NO: 191385 - RNA, 77 nt, Homo sapiens
cccacacccggaggcacagccagaggacaacacacacacacaagaaacagggccaggagggggcccagcacaggaag

SEQ ID NO: 191386 - RNA, 78 nt, Homo sapiens
ggagaggaaaaggagcgagcagacgacaagccgggagcgggcggccaaccagggagcgaccggagagagccgaggaaa

SEQ ID NO: 191387 - RNA, 59 nt, Homo sapiens
caacacggcaacgcaggccagcaaccccagccaagcaaggcaacaaggcaccaggagac

SEQ ID NO: 191388 - RNA, 63 nt, Homo sapiens
gacccgagcagaggagcagggagaagagaaagagacgcagagaacccacaagacagagggcac

SEQ ID NO: 191389 - RNA, 113 nt, Homo sapiens
cccagcccgccgccgccccgccgcggcgcacccgccccgcgccgcaggcccacgccagggagcgggaggacgaggaggaggccgccacgagcaagccagcagagagagacagg

SEQ ID NO: 191390 - RNA, 78 nt, Homo sapiens
gcgacggacaggcgccgcaccccaggcccccagaggccagcggcccccaacgccacgacccagggcgccggcccaagc

SEQ ID NO: 191391 - RNA, 54 nt, Homo sapiens
accagccccggccagggcccccccggggcggaaggagagaaacccacggaaacg

SEQ ID NO: 191392 - RNA, 82 nt, Homo sapiens
agaggccgcacgcggggcgcgggccccgaaggccccacgaaggcaacaggagcgaaaacgccacaacagagggggccagggc

SEQ ID NO: 191393 - RNA, 72 nt, Homo sapiens
aaaagccaaaacgcccgccaaaggacggggaacacgcagaaggacacaagggacccaaccgcacaggcacca

SEQ ID NO: 191394 - RNA, 68 nt, Homo sapiens
ccacccggaagccagagcaaccagaacaaagacaggagggcaggaaggacgaccaagagccacccgga

SEQ ID NO: 191395 - RNA, 79 nt, Homo sapiens
aaaagaacacagaagcaaggcagcaagcgcggcgagaagggggccacgggaaggccaacggggagcccacggggcgcgc

SEQ ID NO: 191396 - RNA, 55 nt, Homo sapiens
gccgccgaccccccggcgccgcgccggcggcggcggcgcccagcggccacacgcc

SEQ ID NO: 191397 - RNA, 84 nt, Homo sapiens
ggaggaggaaccggagaccccgaaaacggaagcgcagggagaaggaagaggggaaaaggaagaacgaagcgcgcagaaaacaca

SEQ ID NO: 191398 - RNA, 82 nt, Homo sapiens
gcagcgcgggacccagcccaggcggcgcggacggggcggacaaaaagccggcaccacgggaggaagaaggcaggcagcagga

SEQ ID NO: 191399 - RNA, 86 nt, Homo sapiens
ggcggccgggccgggaccgcgccaagcggccaacaacacgcaccagggcagagcagagaccaaggagccaggaaggagaagagggg

SEQ ID NO: 191400 - RNA, 80 nt, Homo sapiens
gaccgccgccgggagcggaaacagcggcagccagagaacggccgagcgaccaggagaggagcccccgcccgaagaccggg

SEQ ID NO: 191401 - RNA, 71 nt, Homo sapiens
cgcagcaccaaaacagagggccacggcaaaagagcccaaccgcggaagacagacgggaggaaaaaaccaag

SEQ ID NO: 191402 - RNA, 57 nt, Homo sapiens
cgcgggcgcgagggcagaaccggaagcacccaagccagggagcggcaaaagcaaaag

SEQ ID NO: 191403 - RNA, 54 nt, Homo sapiens
gaagaggggagagggaccacacagaaacggggacaccaaaaggagcacgcaacc

SEQ ID NO: 191404 - RNA, 79 nt, Homo sapiens
aacggacaaccaacggccaagaacaagaacaaaggccgcgacggagaggcgagggcgaaaaagagaccgaaacaaaccc

SEQ ID NO: 191405 - RNA, 66 nt, Homo sapiens
ccggacagggacggaagagaggacgcggcgagagcgccacgcagagccccgccaggaagacacgcc

SEQ ID NO: 191406 - RNA, 84 nt, Homo sapiens
ggcgagaggaagagggacaggccaaacgcaggggcgggccagaaaaacaaccaccagcgagcaaaaaggcaaagaccaagacca

SEQ ID NO: 191407 - RNA, 85 nt, Homo sapiens
caacgacgcgcccacaaccgggccggccccagagcccaccgggaggagaaggaggaggaacggcggacaacagcgagggcaaaag

SEQ ID NO: 191408 - RNA, 74 nt, Homo sapiens
cacgggccggccgccggcccacaggcggcggccaaggagaccgggagagagacgaaggacgcgcaggggcagca

SEQ ID NO: 191409 - RNA, 86 nt, Homo sapiens
acaaaccacaaaaacaacaaggccaccaaacgagagcagccaacggggaaaaagaaaagggcgaagacccgaagcagcgcaggaac

SEQ ID NO: 191410 - RNA, 83 nt, Homo sapiens
aaggaggggacaaccagccaaggagccaaggcaaagagggaccacggccaggacccacgcgccccaaggaccacccagagcac

SEQ ID NO: 191411 - RNA, 77 nt, Homo sapiens
gaagcggaagcgcagccacaaggccgcaggggagccgagagccacagggggcacgcacaaaaaacagaaagcagagg

SEQ ID NO: 191412 - RNA, 71 nt, Homo sapiens
ggcagcccgcaaaaacagaggaacaaggcaggcagcaggaggcagccgaccaaccggcacacccggccacg

SEQ ID NO: 191413 - RNA, 82 nt, Homo sapiens
gcgcacacagcaagcacgagaaaccagggggagaccgcaccaggaggaaaacagagacaaagacaacgaaagagacagcaca

SEQ ID NO: 191414 - RNA, 78 nt, Homo sapiens
cgaaacgcagacgggcgcaacggcggagcggaggcacccgaagcgcccggggaggccccaggcaggaagagcgaaggg

SEQ ID NO: 191415 - RNA, 78 nt, Homo sapiens
ccccccaccccgcacccacgcccggcccggcccggccccgacacgacgcccggaggaggccgccggaccaggaacaag

SEQ ID NO: 191416 - RNA, 78 nt, Homo sapiens
cccgaagaagaaaggacgacagccagagaggagcaggaccagccgcggccggacgggcgggaggacaacaccccacag

SEQ ID NO: 191417 - RNA, 64 nt, Homo sapiens
ccaccaaacgccaggaaacagggcgggcaccagccggaccccaaggagagagcgcaaaggcaag

SEQ ID NO: 191418 - RNA, 62 nt, Homo sapiens
ccggaggcggcgcgcccgcaagagagaagcgcgcaccggaaccgcgcagccaccccaggaag

SEQ ID NO: 191419 - RNA, 72 nt, Homo sapiens
caaaaggaaaaaaccaaacaagcaggaaaagggcaaacagcgcacagcaagggcagaggaaaaggacaccga

SEQ ID NO: 191420 - RNA, 72 nt, Homo sapiens
caccacaccaagacagcgcacgcccagacaaagaaacagccggaaaagcacgagcacaagacgaaaacgaca

SEQ ID NO: 191421 - RNA, 71 nt, Homo sapiens
gcgagggcggacagcggggcccgcggaaaacagccaggggcggcgccgagcgaggggcgcaggggacacgg

SEQ ID NO: 191422 - RNA, 96 nt, Homo sapiens
gaggacgcgaggggcggaggcgggagaggcgagccgcgagagggccggcaggcccgggaaggagacgaggacgcgcacaggaaaggacgcggaaca

SEQ ID NO: 191423 - RNA, 76 nt, Homo sapiens
cagaaaccaaaaaagcagggaaaaaaagagccagcgaaggaacaaacagcaacagcaacagggggacagaggagga

SEQ ID NO: 191424 - RNA, 76 nt, Homo sapiens
caaagccaggcagaggccccggaggagcggagaaccggagcggccaacggcaggagggcccggcccgcacaacacg

SEQ ID NO: 191425 - RNA, 83 nt, Homo sapiens
ccacgcacgggcgcacggaggacgggaaaaccagcagcagcaaaagagccacaaggaaggaggggaaaggggacaaggaaaag

SEQ ID NO: 191426 - RNA, 70 nt, Homo sapiens
aaccacaccaagaagggacacacccgacaggcacccagggcaagacagcgagcagggagagcgcacggcg

SEQ ID NO: 191427 - RNA, 81 nt, Homo sapiens
gcagcccaggcggccccaccacagcaagacacaagggcgacaccagaaagcgcgcgaccggggggagagacgaagcccgac

SEQ ID NO: 191428 - RNA, 75 nt, Homo sapiens
gagcaggccagaccagcccacgcccagagaaccaagacaaaggaaaaaaaacgcccccaaaacaagcacgaaaac

SEQ ID NO: 191429 - RNA, 73 nt, Homo sapiens
cccgaccgggagaggacaagaccacgagccaggggaggcaggaaaaagacacaagacagcaggaccgggacca

SEQ ID NO: 191430 - RNA, 59 nt, Homo sapiens
cggccagggcagaagcgggaagggggggccccagcccggccgaacgggcgcacgacaca

SEQ ID NO: 191431 - RNA, 75 nt, Homo sapiens
cacggcccgagcgggggcagccgcagaggcgcggcggcagacgcagacaaacaaaacaagaagccgaagaagacc

SEQ ID NO: 191432 - RNA, 31 nt, Homo sapiens
cgaccaaggaccaagcaagcggaccacgcaa

SEQ ID NO: 191433 - RNA, 63 nt, Homo sapiens
accaagaaccagggcaggacgaagagaggcgacgcccccggaacacaacaagaccgccaaaca

SEQ ID NO: 191434 - RNA, 78 nt, Homo sapiens
accaagcgcgaaagcgccaaaaggacagcaggggcccaggcgggcagacgacaaaaagcggggaagaaccgcaggcga

SEQ ID NO: 191435 - RNA, 44 nt, Homo sapiens
ggagccagcgacccacgagaggaggacggaacacagccaccaca

SEQ ID NO: 191436 - RNA, 57 nt, Homo sapiens
ggcgcgaaagccagggaagagaagagcaccaggccagggggccaaaacccgagccaa

SEQ ID NO: 191437 - RNA, 68 nt, Homo sapiens
cgagaacaaaggagagaggaccacccagaggagcaacgacggaaggagaagagaaggaagaaacagac

SEQ ID NO: 191438 - RNA, 65 nt, Homo sapiens
ccaaaggaagccgaaggagaagcacacaggggggaggccacaagcaggaaagaaaaggccaagca

SEQ ID NO: 191439 - RNA, 68 nt, Homo sapiens
gcaggagcgaggagcccggcgagaagaggagaggggaagagaaggagaaggcacgaggagagaaaaaa

SEQ ID NO: 191440 - RNA, 73 nt, Homo sapiens
gcaggagcgcaagcaagcacaagaaacgcaagaaggagacaagggacaggaaacgacgaggggcgcgaagcgc

SEQ ID NO: 191441 - RNA, 71 nt, Homo sapiens
aggacacagggaggaaggaggaagaaccgggaaacagcaagcaggacgccgccacacaacgcaagggaggc

SEQ ID NO: 191442 - RNA, 60 nt, Homo sapiens
cggcaaagcagggagcagagccagacagccaccacccgggggcagacccaaaggaaacgc

SEQ ID NO: 191443 - RNA, 82 nt, Homo sapiens
gggggaaacgggccgagcaccgggcgcccccaccaaagaccaacaagcggaagagaggagagaaggaaagcaaccaggggcg

SEQ ID NO: 191444 - RNA, 76 nt, Homo sapiens
gaaggagagcgcaaccgggcagcccgcaccagagcaaagggggcggaccagggacgagcgcccccggagagggccg

SEQ ID NO: 191445 - RNA, 73 nt, Homo sapiens
cggagcgcggcgccgcccgcccacgcagcgccaggcaggaagcccagagacccgggagccagggacgaaggac

SEQ ID NO: 191446 - RNA, 98 nt, Homo sapiens
gagcggcggcgacggccacaggggcggcgacggcgcaggcgaagcgaaacagcgggggagagcagcggcgccagcccgggccacaccgggacgcaccc

SEQ ID NO: 191447 - RNA, 73 nt, Homo sapiens
aaccagaaaccaaaggagagcagagaacgcacaagccagaggacggacgagcaaaggacagaccagacgaacc

SEQ ID NO: 191448 - RNA, 74 nt, Homo sapiens
ccccacgggagaagcccaggaagacggccagggaaccaaacagcagagcagggggccacacagcaagcagaaag

SEQ ID NO: 191449 - RNA, 105 nt, Homo sapiens
ccgcgccggagccggagaacggccaggcggccccgagcggaacggagaaagcgaggcccgaagcggaggacccggcccagccgggcaggccgacccccaccagcc

SEQ ID NO: 191450 - RNA, 70 nt, Homo sapiens
accccccagaacacaaagcaaggcacagaagcagcaaggaaagccaaagagaaacgaccaccaaaagaga

SEQ ID NO: 191451 - RNA, 140 nt, Homo sapiens
agggaacgaagacccggagacacagagcaccaacagccccaacccagaaagcagaggccagagcggagacagacgacccgccccgccacgagaacacacccccaggcggagaaaaaagagaagccaggaaagagagcgag

SEQ ID NO: 191452 - RNA, 97 nt, Homo sapiens
accaacaaagaaggagcggaaaaccaggaacggccagggcacaccgcagagagggacgcagcaaccaccaacaacaccgggcacacacacaggaagc

SEQ ID NO: 191453 - RNA, 56 nt, Homo sapiens
aacggaccagaccgaccaccaaaaacaccacgacagcgaggcagccagcagcagcc

SEQ ID NO: 191454 - RNA, 72 nt, Homo sapiens
gaccaaaaagggggcaaaaaaggccaagggaggaaaaacgcgccaggaaaccaggaggccaaccgagaaaaa

SEQ ID NO: 191455 - RNA, 78 nt, Homo sapiens
ccacaacagcgagggaaagaacaaaccgcacgacacaggaaaggacaaaaccagaagcagggacaagcaccagcagaa

SEQ ID NO: 191456 - RNA, 74 nt, Homo sapiens
ggcaggaagaagaaaacccgcaacccccacagccagggcgccgagacggcgcgcgggggccaccaacggcacgg

SEQ ID NO: 191457 - RNA, 77 nt, Homo sapiens
acaaacagagagaaggaaccacccacgcaggcagccggacgagcgggagaggacaccacacaaaaaacaggaaaaga

SEQ ID NO: 191458 - RNA, 86 nt, Homo sapiens
gagagggacgggcgccggccaggagcgcacagcaggcaaagagcggcccgccgcccaagaaccaagggaaaagacagaagacacag

SEQ ID NO: 191459 - RNA, 78 nt, Homo sapiens
agcaagcgaagccgaaaaagcgcccgagacgggcccgccgaaaggccgcaggaagcacaagaaaaaaaagaggaagga

SEQ ID NO: 191460 - RNA, 79 nt, Homo sapiens
ggacgaagaggcgaccgccagacggagcacacggacaggcaacgggcagaggaggaggcagcgccgggaggacagacaa

SEQ ID NO: 191461 - RNA, 80 nt, Homo sapiens
gagaccacgacgggggggaggcggcagcgcaaccacgagacggccccaagaaggacaccgggaccagcgaaaggacagcg

SEQ ID NO: 191462 - RNA, 79 nt, Homo sapiens
gggggagcacacgacgggacccacgagccccggacccccagcacaccagggagcccgccaggagccgggccgcaccagg

SEQ ID NO: 191463 - RNA, 84 nt, Homo sapiens
cggccccccccgcgcgagccggagaagccgcagcgcgaggccgccgcgcgcccggggccgggaccgggagacagggacccggag

SEQ ID NO: 191464 - RNA, 73 nt, Homo sapiens
gaaccgacccgggcgcagggccggggccaccccgacgaaaccgccccccccccggaggcagccggccccgggc

SEQ ID NO: 191465 - RNA, 66 nt, Homo sapiens
aggagcagcaaaacacacaaagagggcagcacggggagaaccccaggacacaaagccgcagaaaga

SEQ ID NO: 191466 - RNA, 76 nt, Homo sapiens
gccgacggagcaggcagcagcccaggaacagacaaggaaaccaggcaacagccgagggcgcaggacgggcgcaagc

SEQ ID NO: 191467 - RNA, 79 nt, Homo sapiens
cacacgaccaccggagggggagcagcgacggacccagagccagggcggccccggccccaacccacgaggcagcccgggc

SEQ ID NO: 191468 - RNA, 99 nt, Homo sapiens
cgcgaggcccagaagggggcgggccaccaggcgcgcgcccacgccggcagaggggcgcccgagagccgaagcacagggaaagcaacgaagggagaccaa

SEQ ID NO: 191469 - RNA, 53 nt, Homo sapiens
cacgagcgagaagaaaagccaagagaagaccaagagacagaagggacgggacg

SEQ ID NO: 191470 - RNA, 82 nt, Homo sapiens
cgcgcgggccgggaggggacggccgccggagccgcgaggccaagggcaaggccacaggccccaagaaccgacgagccccgcc

SEQ ID NO: 191471 - RNA, 63 nt, Homo sapiens
acagacggcccaaccaggagagccgagggaaaaaagaagaaacggaaaggaaggcacccggga

SEQ ID NO: 191472 - RNA, 82 nt, Homo sapiens
aggacgcgccgcgccccaaggcccaacaaggcacgcagaagaacccccgacgaagcaaggaggggggccagcgcgcgccagg

SEQ ID NO: 191473 - RNA, 105 nt, Homo sapiens
aagcgaggaggaaaacaaaacgccaaaagacggaccccacacaagaaaaggggccgcacccacacaaaggcagcccgaagccagacgcaagcacacccaccagcc

SEQ ID NO: 191474 - RNA, 81 nt, Homo sapiens
ccccaccaggcccagggccggcccccccaggacaacccagaggcaacaaaggcgaggagcaggccgggcccgccagggcac

SEQ ID NO: 191475 - RNA, 85 nt, Homo sapiens
ccaacaacccaagggagcgcacgacccacgcggaacggaagcacaaacaccagcccgaacgagacgagaaaccggagacccaaca

SEQ ID NO: 191476 - RNA, 84 nt, Homo sapiens
agccccgacgggacgggggagggggcggccgggcggagagaaccagcgaggacgaggacagcagggaagaacggaaaccagaga

SEQ ID NO: 191477 - RNA, 73 nt, Homo sapiens
acggagaacagaagcacggaagaagcgcaaaaaacgaaggcccagggcagccaggggccaagggcgacagagg

SEQ ID NO: 191478 - RNA, 51 nt, Homo sapiens
caagcaggcccaggcccggccaaaggcaaaccgacaccagcgacacaagcg

SEQ ID NO: 191479 - RNA, 62 nt, Homo sapiens
gcaggcaccaaggacagagcaggaccaaaagaagcaaagccaaagaagacgaagagaagccc

SEQ ID NO: 191480 - RNA, 79 nt, Homo sapiens
ggagaagacacgcgcaagcagggccccgaaaacgggcacagaacgaagaggagcaggaaacagagaagagacaacagca

SEQ ID NO: 191481 - RNA, 88 nt, Homo sapiens
ccccgggcaagaggcgcaaacaagccaacccaggaggaaaaacggaccgacagcccccaggaaggaggcggcggccgcgagagcccag

SEQ ID NO: 191482 - RNA, 76 nt, Homo sapiens
agccggagcgccgggacgcgccgcccgcccgcgcagccgcgcagaaggcaccacacgggccgacccgggaccccag

SEQ ID NO: 191483 - RNA, 57 nt, Homo sapiens
gccagccacccaaggccccggacgccggagaggcaccggaccgggagaaacggaagg

SEQ ID NO: 191484 - RNA, 56 nt, Homo sapiens
ggccgaacgagcccggcaccacacaccacaaaccgagggaagaaaggacaacagaa

SEQ ID NO: 191485 - RNA, 81 nt, Homo sapiens
agacagacaacagaagggaacgcgcagaagaagacagcggcggggaacagggccacgcgacaagaacaaggcgcgaccacg

SEQ ID NO: 191486 - RNA, 80 nt, Homo sapiens
acagaaagagcaacagcagggcaacagacaaggcgcccgcgaagagcccgcggccccaggcccccccccgccgccccccc

SEQ ID NO: 191487 - RNA, 82 nt, Homo sapiens
ccggagccccagagacaggcggccgggagaggagggacagcagcgggagaacaccccacggagacaggacgccacgacagaa

SEQ ID NO: 191488 - RNA, 70 nt, Homo sapiens
cggcccgggcagcaaggcgcgcggcaccccggccaccggcagacacgccgcggagccccagccggcggga

SEQ ID NO: 191489 - RNA, 81 nt, Homo sapiens
ggcgggacgcgaggaccaggcgccccgagcgccgcgcccgcgcacaagacaacagggcggagaacggaaaagcaccaggaa

SEQ ID NO: 191490 - RNA, 77 nt, Homo sapiens
aacacgggcacggcaagaccccgcccgggcgggggcccggacgagacacgggcgcccaaacccaaaagaggagagaa

SEQ ID NO: 191491 - RNA, 64 nt, Homo sapiens
ccgaaccggcaccgcacaccggaccaggaaacggaggcggccggaggccggcccgaccgccgcc

SEQ ID NO: 191492 - RNA, 67 nt, Homo sapiens
acacgacgaccaccagacgagacacgcgaaggggggcgagcccggcccggcccggaaggaaaaccac

SEQ ID NO: 191493 - RNA, 70 nt, Homo sapiens
cgaagagggcggaggagccccaagaacagaggaaaaggggaagagggaaagacagggacgacaggcaggc

SEQ ID NO: 191494 - RNA, 64 nt, Homo sapiens
cgagcggggccggccacaggccccccggacagccagagaaccaaaggcagaccacacggcacac

SEQ ID NO: 191495 - RNA, 71 nt, Homo sapiens
caagcccaggaaccagggcaggaccaggaccacagaggacgccacggcccaaaacggccacgcacccaggc

SEQ ID NO: 191496 - RNA, 54 nt, Homo sapiens
cagacgacacgggaaaccccaacccccgaagacagggggggaacagcgccagga

SEQ ID NO: 191497 - RNA, 69 nt, Homo sapiens
aagcccagagcacccaaggaccacccccacaggccccaggaaccacagaaagggacgcggcacagaacg

SEQ ID NO: 191498 - RNA, 60 nt, Homo sapiens
aggggaagggcaggaggaggaggaggggcccggcggcggggaggacgaggaaagccccag

SEQ ID NO: 191499 - RNA, 73 nt, Homo sapiens
cgcaggcagccaggacaacaagcgacggccacgccgggacaagcgcagagccaaaccccgagacccaggaagc

SEQ ID NO: 191500 - RNA, 85 nt, Homo sapiens
cgggacggcgcccccacgcgcgggggccacggcgcggacgccaggcgcaaggaagaagagacgccgcgcggcagacaaggcccgg

SEQ ID NO: 191501 - RNA, 87 nt, Homo sapiens
gaggccagagacagcgcaaccgcgaccagggcgggaagaacaagcagcgaacaaagggaaccgaggaaaaacgcaacaacgagcgac

SEQ ID NO: 191502 - RNA, 85 nt, Homo sapiens
acgaggccacacagccgcggcggccccacggcgcaccaccacaacaggggagagagagaagaagaaggaggccgcggccagaaac

SEQ ID NO: 191503 - RNA, 82 nt, Homo sapiens
cccgcaagaagaacagagacagcagccaaacccccagggaagaccacaagaggggcagcagagccccagaagaaccccagcc

SEQ ID NO: 191504 - RNA, 30 nt, Homo sapiens
gcgaccaaagaggcaggcccaccaagccga

SEQ ID NO: 191505 - RNA, 78 nt, Homo sapiens
gaaagagccggacccaaggcacacagagcggaagcaccaccagggaccagggccgaggcggcgacagacacagcacgg

SEQ ID NO: 191506 - RNA, 70 nt, Homo sapiens
acagagaagcaaagaagcaggccgaagagaacccagcgcagcgcagaacaaagacaaaagcacaaggagc

SEQ ID NO: 191507 - RNA, 80 nt, Homo sapiens
gagaagcgcagaaccaacgaggggccgaaccccaggaacaaggcgcgaggcacgggcgcggagacgggacacagaaccgg

SEQ ID NO: 191508 - RNA, 40 nt, Homo sapiens
ccaggccggagccggaccgcgagaaagcccacgccaggag

SEQ ID NO: 191509 - RNA, 78 nt, Homo sapiens
ccggaggcagagcggcgccagcacccgagggacccgaggagcccaccaagccgaccgcaggcaagggccgggggaggc

SEQ ID NO: 191510 - RNA, 78 nt, Homo sapiens
agaaaaggcgaccgaacgggaaacacccaccggcccgcaagaaacacagaagcagcccccaagagagacagaaaacac

SEQ ID NO: 191511 - RNA, 90 nt, Homo sapiens
gaaagcccggcccagagaggagagcgaggaggaagaggacgaggacgacgaggaggaggaggaggaggaaaaaggacagcaacaagcagc

SEQ ID NO: 191512 - RNA, 34 nt, Homo sapiens
cgcaggacccacagaggggacccgggagacacac

SEQ ID NO: 191513 - RNA, 86 nt, Homo sapiens
agccccgccggcacagcccacgagcccagcgccggcacgcgcgaggcccaccagagacaaggccccgagggaggagcccgaaggcg

SEQ ID NO: 191514 - RNA, 66 nt, Homo sapiens
gccgaagaccacaagggcagaagacagcagaaaagagcacgccacgcgggaaaacagagccagaaa

SEQ ID NO: 191515 - RNA, 81 nt, Homo sapiens
gaggcgaggcacaccccgggaggcgccggccagagccggcgagccggaggaagccaccaggacccaaggccagccagcccc

SEQ ID NO: 191516 - RNA, 59 nt, Homo sapiens
gccaccgggccgcaggaccaccccgcacaccacccaaggacaaccccggcaacaacccc

SEQ ID NO: 191517 - RNA, 65 nt, Homo sapiens
gaagcgaaaaccagggaagccacggaaaaaggcacggaagaagagagggcgaaggaggccacaca

SEQ ID NO: 191518 - RNA, 75 nt, Homo sapiens
cccccggcgccgcgccggcggcggagagacagccccacagacgcaggcgcagaaaagaagcacaagaaaaaaagg

SEQ ID NO: 191519 - RNA, 91 nt, Homo sapiens
gacgagccggcgcccgcggccccgcgaggggccgcaaggacgaggacgcccgggagaccccgacaccggacgagagaggagcgcgggccga

SEQ ID NO: 191520 - RNA, 78 nt, Homo sapiens
aagcaagggaaaaaggaggaccccgccaagggccccaagagggcacacagcacacaccgacaggagggagccgagcgc

SEQ ID NO: 191521 - RNA, 70 nt, Homo sapiens
gcccccccagccagccacggaacacaaaagcaagcaagaacccgaacaaggcccccgaaaaggcaggggg

SEQ ID NO: 191522 - RNA, 93 nt, Homo sapiens
gccgaagcagccgggagccggagcgggcgcggacgccgaggcaccgaggcaccagaggaggccagcggagccgcaccaccgggagacaaccgg

SEQ ID NO: 191523 - RNA, 66 nt, Homo sapiens
gcgaggggagcaccaggaccgggccggaacgagacgcacggaacaggggacccaggaggcagcggc

SEQ ID NO: 191524 - RNA, 74 nt, Homo sapiens
acaagacgcggccccgggaaaagaaccaaggagcaggaacagcagcacacagagggaagccggcacagggcgga

SEQ ID NO: 191525 - RNA, 63 nt, Homo sapiens
ccacgaccccgaccgaagagacgagggagccggaaagagacgaggacgcgcacaggaaaggac

SEQ ID NO: 191526 - RNA, 73 nt, Homo sapiens
acccaagcgcgggggacggcccaggcagaaggcggcagggagcacgcaccaggagcccacggcccacccacag

SEQ ID NO: 191527 - RNA, 82 nt, Homo sapiens
aagaagcccgaggagcacggaggaagcacacccgccagggacgcagcacgggaagaggcgggaggcggcagaagcagccaga

SEQ ID NO: 191528 - RNA, 66 nt, Homo sapiens
aagaggggaagccaccgagcaacaacagccacaggggcgaacggaaaaaagaggcagagcgaagag

SEQ ID NO: 191529 - RNA, 81 nt, Homo sapiens
aggcaagacccaccccgggaagaaagcaaacaaacccagccccgcagaagaaaagcagcaaaacaccgaagcacaaaaaag

SEQ ID NO: 191530 - RNA, 74 nt, Homo sapiens
ggaccccccccaacgagagaacccagccgggcaccagagggaggggaggaggaggaacaaaaaaccagcaaagg

SEQ ID NO: 191531 - RNA, 66 nt, Homo sapiens
acaggcccaccggaccgcagaaacgagacaggaagggaaggggcggagacgggcggaacgcaggag

SEQ ID NO: 191532 - RNA, 86 nt, Homo sapiens
gacccaggagcgcaaaccacccaagcgcaacaccagggaggccaagcgaccacccaaagaagaagcggacagcgacaccgaaagag

SEQ ID NO: 191533 - RNA, 91 nt, Homo sapiens
gagaagaaggcggggggcgggggaggcgagcgcgccgcccggagccgcgcacacggaaagaaaggagaggcaccaaagaacacgcacaagc

SEQ ID NO: 191534 - RNA, 57 nt, Homo sapiens
gggggaagccgcagcggaaagcaggagcacagcaacacaagcgagggagaagccaag

SEQ ID NO: 191535 - RNA, 98 nt, Homo sapiens
ggagcgggaagaggaagggcacgagccgccgacggagcagcacagcagagcccgagcaaggaagaacggagccagagaagccagaaaagaccaaggca

SEQ ID NO: 191536 - RNA, 85 nt, Homo sapiens
gaagagaggagggagcacagcggaacaaccacagccacccaggacccagggcggcgacggcggcgcgaggaccgaccgggcccgc

SEQ ID NO: 191537 - RNA, 78 nt, Homo sapiens
ccaaagcgaacgaagagcaccgggagcggcgaagaggcaccggaggagggaaagcaggcaggagggagagcgccgaag

SEQ ID NO: 191538 - RNA, 109 nt, Homo sapiens
ggccccgccccgccccggggaacccgcagaggacagaagaggccaccaaacccgaggggaagaccacaagaggggcagcagagccccagaagaaccccagccaaaacgc

SEQ ID NO: 191539 - RNA, 78 nt, Homo sapiens
ggaaacaaggcaacagaaagagcaacagcagggcaacaggagaaaagagccggaagcaaaccccaggaccaaagcaaa

SEQ ID NO: 191540 - RNA, 79 nt, Homo sapiens
gcagacgcagccgagacaccagcccgaaacaccaccaagccgacaaccccggaacgcgggcaaaaggccccaggggacc

SEQ ID NO: 191541 - RNA, 83 nt, Homo sapiens
aggaagcgcacgaaggaggacgccggccagcagaagggggcgacccggaccaggggggaaaagccaccccgcggaaggcgcgc

SEQ ID NO: 191542 - RNA, 70 nt, Homo sapiens
cgggaaccgaccgcggcgcgccacccggccgcagcaaagcgaaccaggccaccagaacaaaggacccccg

SEQ ID NO: 191543 - RNA, 58 nt, Homo sapiens
cccagagcgacagcccgggacaccaagaaagaacaaaccaagcgcaacacgaagaggg

SEQ ID NO: 191544 - RNA, 69 nt, Homo sapiens
gacggcggggccccccgggcagcaaggaaaaacagaggccgcaagacgaaacgagggcagcacaagaag

SEQ ID NO: 191545 - RNA, 85 nt, Homo sapiens
caggacccccaacccccgcagggccgaggcagccaggcgcccagccggaaggcaggcgaagccccacccacaaggacggcagcgg

SEQ ID NO: 191546 - RNA, 84 nt, Homo sapiens
ggggacgaggacgaggagcggaggagccgcgggcggcgcggcccagccgccaggcgggagcagcggaagacaccaaggccaggg

SEQ ID NO: 191547 - RNA, 82 nt, Homo sapiens
cgagggaggggggggaccccaggacaacccccaagaaagggagcccagaacgaaacaacccagcagagacccacaaaccacc

SEQ ID NO: 191548 - RNA, 84 nt, Homo sapiens
aaaaaaaccccccaaaggaaaccacagaggacgcccccacaggcccaaaaaacagcagacccggccggcgagcaagggcccccc

SEQ ID NO: 191549 - RNA, 67 nt, Homo sapiens
ccagcggggcggagcgaccccgcggggcgcggggaccgggaggagggcgccaggagcaccaacccgg

SEQ ID NO: 191550 - RNA, 41 nt, Homo sapiens
ggccggaggagcccccaggccaacggagcggagcccagaag

SEQ ID NO: 191551 - RNA, 64 nt, Homo sapiens
gccgagcaggaggcgccacaggggaccagcggggagaagaacgcgcagaacacacccgaggaga

SEQ ID NO: 191552 - RNA, 39 nt, Homo sapiens
aagaagaaaaaccggaccaagagagagacggggcgccag

SEQ ID NO: 191553 - RNA, 83 nt, Homo sapiens
ggagaccaagggcggcgacacgacggcggaacggggaacgacggcccagcaggcggggaagagaaaggaccccagccagaccg

SEQ ID NO: 191554 - RNA, 73 nt, Homo sapiens
ggagaggaacagacagaagaagaccgaaaccagcagggagacgcgcacggaccggaaccagaacaagacgaaa

SEQ ID NO: 191555 - RNA, 54 nt, Homo sapiens
cggaccaaccgagagcaccagagaagccaacaaagaccagaaaaaaccaaggac

SEQ ID NO: 191556 - RNA, 92 nt, Homo sapiens
ccgggagcgccgagcgcgccgccgccgccgccagaacaaccgggcgccgacgagacggggccgacaagaccggggggaccgggcggcgagac

SEQ ID NO: 191557 - RNA, 60 nt, Homo sapiens
aaacgccggagagagcggaagcccggggacgcccccagacgccagaagcagcgaaaaaga

SEQ ID NO: 191558 - RNA, 69 nt, Homo sapiens
acagaaaacgggcagggcagccacaaagaggagcacgaggcaagacagccgccacccaacgcaagggag

SEQ ID NO: 191559 - RNA, 70 nt, Homo sapiens
gacacacagggaaaaagaacgcaagaaccacccggcaccaccacccccagccggacaagcagcgccaacc

SEQ ID NO: 191560 - RNA, 82 nt, Homo sapiens
gcgacccccccgggcccaaagcggcggccggggcagcgccgcgagccagcaacgggggaaggccacaacaccacggagagag

SEQ ID NO: 191561 - RNA, 77 nt, Homo sapiens
agagcgcagacccgaaagaagacggaacgcaagcacaggaccagaaacgaaaggcagcagaagaggaaagccagaaa

SEQ ID NO: 191562 - RNA, 72 nt, Homo sapiens
cccaaacgcggcacgggaggcgccggcgaaagcaacgaagggacgccagaacaagagaaggagagcagaaag

SEQ ID NO: 191563 - RNA, 56 nt, Homo sapiens
acaccccagccggcgacacagaacagccagcaaagacaagagcagaccagcagccg

SEQ ID NO: 191564 - RNA, 97 nt, Homo sapiens
gcacaaggcggccgaagagggcgcgcgcagcgaaccaccaggcaaaagcagaccggaaaacccaccggcaagaccacacccgaggggagcccaggac

SEQ ID NO: 191565 - RNA, 54 nt, Homo sapiens
cagggcagccgccaagaccgcgaggccagagcacagagaccaaaacgacaccag

SEQ ID NO: 191566 - RNA, 88 nt, Homo sapiens
ggccccccagggcgccccccgccagggacgaacagcggggacgccccagcagaccgcccaggagaggaaagcaggaggaaagaccacc

SEQ ID NO: 191567 - RNA, 50 nt, Homo sapiens
gaacgacaaaggcaggacaccaagcggggggccagagagcacgccccggc

SEQ ID NO: 191568 - RNA, 78 nt, Homo sapiens
ccacaagcaacgcgggaagagaaggccacccccaacccgccgcgggagaggacgaccgagaaaggaaagaccggcccc

SEQ ID NO: 191569 - RNA, 78 nt, Homo sapiens
cagcaccccgcaccacagccagagacgcaaaaggacacaagaaaaaggcaccggaggagagagcagaagaaacccaga

SEQ ID NO: 191570 - RNA, 70 nt, Homo sapiens
gcagcaccgcaagccacgcagcgaggggacccagagaaaggaccaggacccggcaggcaccgcccggagc

SEQ ID NO: 191571 - RNA, 42 nt, Homo sapiens
gcaagagccaggggagagaaaacccccaaaaggagaaccgac

SEQ ID NO: 191572 - RNA, 84 nt, Homo sapiens
aggccacggagagccgccggagagcccaggagcaggggagacagggcagccggaaggagaaccaccggcaacccaagccaggag

SEQ ID NO: 191573 - RNA, 76 nt, Homo sapiens
accccgcgcaaccggcacaacaggcagagccaccaggagagaacgccgcgccgcgcgacaacggcccggcaggcaa

SEQ ID NO: 191574 - RNA, 75 nt, Homo sapiens
cggcggcggcgacggcaaacaaggcgggggacccagcaggcaggagggcaagggcgcagcacgcagacccgcaag

SEQ ID NO: 191575 - RNA, 60 nt, Homo sapiens
gccacaacaccggcaggaaccaccaggacagaggaccacagagaagcgccccaaagacag

SEQ ID NO: 191576 - RNA, 83 nt, Homo sapiens
ccggggcccgcgcaggggggcaaggaccaacagcccccacaccccgggagacccccgaaggcggaacaaggccacaggcaaaa

SEQ ID NO: 191577 - RNA, 63 nt, Homo sapiens
cgccggcccgcgcgcgcaccccgcggacgccacagcgcggcagcgggggcagagacggggaac

SEQ ID NO: 191578 - RNA, 70 nt, Homo sapiens
caaccacgaagagacaaaagccgaaaggcagggcccgaaccgcccgcccgcgagaggccacagcagaaag

SEQ ID NO: 191579 - RNA, 82 nt, Homo sapiens
ggccacaccggacacgaggacgcacagaaggagacgggcagacaacgaacaagcgaagaaccagcagcaagacaacggagag

SEQ ID NO: 191580 - RNA, 99 nt, Homo sapiens
gcggggacgagaaaacaaaagaaacaaaacaacaggggaaagaaaacagcgcccaaggaaaggcccaggcacagcagacgcacggaggcggggacagac

SEQ ID NO: 191581 - RNA, 75 nt, Homo sapiens
gagagggaaggaggaagggacaggacacacaacccaggaggagggaaaccggagagcaacccagcacagcagaac

SEQ ID NO: 191582 - RNA, 58 nt, Homo sapiens
ggagccggccggcggcaaagagcacgaacccaggagccgggcagccgcgacacagcag

SEQ ID NO: 191583 - RNA, 67 nt, Homo sapiens
cagaaaacagcgaaaaacgaggaaagacagacccaccaaaccagccgaaaggagaacggcgccgaga

SEQ ID NO: 191584 - RNA, 74 nt, Homo sapiens
gacggccacgaacccgagggagagaacggacgagaccaacgcggaaaccagcaagaaaaccagcggcgcaaaaa

SEQ ID NO: 191585 - RNA, 52 nt, Homo sapiens
cccgccagccgacacaaccagaaagggcccgaagacaccccgccaaaaggac

SEQ ID NO: 191586 - RNA, 66 nt, Homo sapiens
ggaggcacacccgaagcaagcacgcaggaagaaaacggccaagccaggcccggagaggagaggggg

SEQ ID NO: 191587 - RNA, 68 nt, Homo sapiens
gaagacaacaaaagccccgaaggaaaagacaggagccgcaaaacagagggaagccaagaccacgacca

SEQ ID NO: 191588 - RNA, 76 nt, Homo sapiens
caacgaacgcacacccaacagccgcccaacagcacaagaagcgccaccacgccggcccgggggaaaggacccgaag

SEQ ID NO: 191589 - RNA, 83 nt, Homo sapiens
gccaccagcagggacggcgcaggggccgcagccgacgccacacaccccagaacagggcgaaaaagagacagggcaccggagcc

SEQ ID NO: 191590 - RNA, 58 nt, Homo sapiens
acaccaaaggggagacaaagccagggcacccccgagaggacaacaggcacggaaggcc

SEQ ID NO: 191591 - RNA, 35 nt, Homo sapiens
ggggcaccgacaaacgaaggggaagaacgaaaaga

SEQ ID NO: 191592 - RNA, 75 nt, Homo sapiens
gcagaccggggccgaacgcaccggacgaaggacggaaaaaggcacaaacccagcacagagaagacggcgacaagc

SEQ ID NO: 191593 - RNA, 41 nt, Homo sapiens
ggacagagggagccaggcagagaaacagaccacccccaaac

SEQ ID NO: 191594 - RNA, 81 nt, Homo sapiens
ccaagcccggcccggcccgacaccgcgggccgccagacgggaaggggcgaaaccaagaggagggaagcaggcagacgcgag

SEQ ID NO: 191595 - RNA, 81 nt, Homo sapiens
gccggggggggcacggaagcccgaccacgcaggcgcaccggagcagggccaccacggccacaccacgccccgagccacaca

SEQ ID NO: 191596 - RNA, 81 nt, Homo sapiens
gaggagcaagcagcggccggaggacgccaaagaaggcacaggccagaagcacaagaaggcaggagagaccaaacgggaaca

SEQ ID NO: 191597 - RNA, 80 nt, Homo sapiens
cagaaaccaggcagaccacagagggaaggcgcagaccaccacccgcgccagcaaagggaacagaacaccagggacacaga

SEQ ID NO: 191598 - RNA, 77 nt, Homo sapiens
gccccggaccaccagccagcgcggaccagaccggaacgcccaagccccaccgcgagccacgggagaaggcacgccag

SEQ ID NO: 191599 - RNA, 69 nt, Homo sapiens
ggaggcgcccggagcggccgccccagcgccccgccagaggaacaaagcaaaagcggaagagccagaaac

SEQ ID NO: 191600 - RNA, 72 nt, Homo sapiens
acaacgcaccaagcacgaacgccaagcacagccggcggaacaacccgacacgagaaaaccaaaggagaaagg

SEQ ID NO: 191601 - RNA, 63 nt, Homo sapiens
gccggaaaggaccagaccgcccaggaaacggaccgaaaagacgcggccccaaaggaaacaccc

SEQ ID NO: 191602 - RNA, 59 nt, Homo sapiens
gcagcaccaaggaccagcaacaaagaccacaccgcgccagaccccccaggagagccgcc

SEQ ID NO: 191603 - RNA, 61 nt, Homo sapiens
gacaagcccaacaccgccacgagggcgcagagggaagccccgcccacggcccccaccacca

SEQ ID NO: 191604 - RNA, 66 nt, Homo sapiens
acagcccggccaccccccggcccgaagccccacgccagagaaggagggggcagagcacggcaggca

SEQ ID NO: 191605 - RNA, 73 nt, Homo sapiens
cgcgagcccggccgcggccgcggcaggggggacggaaaaacaaaggaacagccaggacaaccggggcggacac

SEQ ID NO: 191606 - RNA, 84 nt, Homo sapiens
gaaccagggccaggcgaggaccaacccaccccgggaacccggaggcaagacacgaggagaggcgcccagccggacgcgagagac

SEQ ID NO: 191607 - RNA, 79 nt, Homo sapiens
cggcgagccgcggcacaccaaggcggcccgcagacggccccaagaccggagcgggaagccgcggccacaggccaacaga

SEQ ID NO: 191608 - RNA, 52 nt, Homo sapiens
aggaaagaacggaaaaaagggagccacggccgcggggaaacaggaccggaag

SEQ ID NO: 191609 - RNA, 78 nt, Homo sapiens
gacagagggcacaacggcaaagaaccggggaccgaggagggccgagagcccgaacgggacccaccccagaggagaaga

SEQ ID NO: 191610 - RNA, 71 nt, Homo sapiens
gccccccggagacgcaaccaagcacagccgaccaaccaaacaacgaaacagcggaagggcagaccacccaa

SEQ ID NO: 191611 - RNA, 45 nt, Homo sapiens
gacaagaacccggagagggcgagaaggacagacaagcagacgggg

SEQ ID NO: 191612 - RNA, 90 nt, Homo sapiens
ggagcgcaccacaaccagcggacacggccgccgggccgcgcccacgggcagcgaggcagaagacgaggaaaagagggagacagcacgcca

SEQ ID NO: 191613 - RNA, 71 nt, Homo sapiens
gccgggaaaggagccggccggcggcaaaggaaacccagcggcggcagaaccagccggcacaaagccgaacc

SEQ ID NO: 191614 - RNA, 69 nt, Homo sapiens
ccccaccgaggagggaaacacccgaaacagcgcggaaaggaaacccgcaggccacacccaagaccaggc

SEQ ID NO: 191615 - RNA, 80 nt, Homo sapiens
ggaccggcaacagggcggcggggaaaaggacacaggaacgccacaagaaacaacagcaaggcgagggccacgaaacagag

SEQ ID NO: 191616 - RNA, 104 nt, Homo sapiens
gcagacaaggaaaaacccaaaaagaggggggacagcagcagcagacgcgagaacaagccaaagacagaccgccagcgcagcccacaaaggacaacgaacggagc

SEQ ID NO: 191617 - RNA, 82 nt, Homo sapiens
cccccagccaggggacggacacccagaaccggaggccaggcagacacagagcaacaaaaccagggagacggaaagcccagag

SEQ ID NO: 191618 - RNA, 85 nt, Homo sapiens
ggagaagcccaccacaggaacgaaaccggaagggacgggcaagaagagaagcgaaggacgacagccaggggaggacaccacggca

SEQ ID NO: 191619 - RNA, 64 nt, Homo sapiens
aagaaagcgcgaaagacgagagaaaggaagggccgaagacaacagaccacaacaaaagagccag

SEQ ID NO: 191620 - RNA, 75 nt, Homo sapiens
aacacccgccgcgcaaaagcaaagaagggaaggacacaaccgaggcccagcaagagccaacacagcagccaccac

SEQ ID NO: 191621 - RNA, 72 nt, Homo sapiens
cgcccaagacacagaccaggcccagcagggcggaagggcgggaccccgggcagaaagcggagcgccaacgcg

SEQ ID NO: 191622 - RNA, 80 nt, Homo sapiens
gaaaacagaaagacaagacggagaccggaaacacaaagaccaaacgacaaagaggcggagaaaaaggcagaaggaagaag

SEQ ID NO: 191623 - RNA, 68 nt, Homo sapiens
cgcccggcaagccccgccagagaacaagcggaaagcaccaggaaggcaagagagccgacaaggacggg

SEQ ID NO: 191624 - RNA, 76 nt, Homo sapiens
gcgcggaggaggggagcagcgcgcaaggcagcagaccggaagccacaaagagggcgacaccgcaagccggacggcc

SEQ ID NO: 191625 - RNA, 79 nt, Homo sapiens
gggccccgcggcgcacggcggcgaggccggcacaaaccaagaagaagcaagacaagaacggacacaaagggggacccag

SEQ ID NO: 191626 - RNA, 73 nt, Homo sapiens
ggggacaccaacaggacccggaagggcaggagggaacaacagcaaagcagcaccgaagcggcgagaggaagac

SEQ ID NO: 191627 - RNA, 50 nt, Homo sapiens
acacggaacacaaggaagcaaaagcccagaagaccgcgacacagagagag

SEQ ID NO: 191628 - RNA, 81 nt, Homo sapiens
gcggcgcgccgggagaccgcggaggccgacaggacgggcgccgccccgcgcggcagggcaccaggacacacgaccgaaagc

SEQ ID NO: 191629 - RNA, 80 nt, Homo sapiens
gggagcaccgggcagcgcaaagccaaaagagcagggaagacacggaacgagaaggaacaaggcagaagggaagagccaga

SEQ ID NO: 191630 - RNA, 72 nt, Homo sapiens
ggaagaggaaagcaaaggcgcaggaaggccccagagcccaaaaggcagagcgaggagagaagaaggagggaa

SEQ ID NO: 191631 - RNA, 77 nt, Homo sapiens
gagcccccgagaggaggcagacccccacaagacgacacccgacgagcacgcagggagaagcacaccgccagagacaa

SEQ ID NO: 191632 - RNA, 57 nt, Homo sapiens
ccccaagcaaccccaagcaaaagggcaaacaaggcgacagcgaccgaagaacagagc

SEQ ID NO: 191633 - RNA, 75 nt, Homo sapiens
ggagcacaaggaagaggacacaccaaggagagaacggacgagaccaacgcggaaaccagcaagaaaaccagcggc

SEQ ID NO: 191634 - RNA, 80 nt, Homo sapiens
gaaggaacgggccgaaccgggagcgaggaaccagaacgaaaagcgccagaaagaacaagcggccccgccccgcaagccac

SEQ ID NO: 191635 - RNA, 65 nt, Homo sapiens
gaaagagaggccccgcaggcccccagaaaaccagagcgccaagagccacccaggaaggccgcagg

SEQ ID NO: 191636 - RNA, 75 nt, Homo sapiens
gaaaacagaagaacaaacagagacgcgaaacgaccccaacaaaaaaggaagaagaccgaagggccccaaaggaag

SEQ ID NO: 191637 - RNA, 75 nt, Homo sapiens
aggaagaagaggagaagagggacggcccaggacggccacccccgcaggaacaccgcccccggagccggcagaggc

SEQ ID NO: 191638 - RNA, 32 nt, Homo sapiens
ccacaggacacccagcccaccgcgagacaagc

SEQ ID NO: 191639 - RNA, 82 nt, Homo sapiens
cgcaggcgccgcacggaggcgcccggggacggggccgcagggaggagcagggccgccccgaggagagcgacgcccgggcgcg

SEQ ID NO: 191640 - RNA, 94 nt, Homo sapiens
cccgggcccgagcgacgcaccgaggggcgaccaagcacgccaagccaacccagagacaaacccgagagcaaaacaaccagccggaaccggacag

SEQ ID NO: 191641 - RNA, 75 nt, Homo sapiens
accccggggcccaggaagggcggcccagggggaaaagcaagcgaaacgccgcggacaagcaggcaggccacaaaa

SEQ ID NO: 191642 - RNA, 74 nt, Homo sapiens
ccgcggagagaagagaagccgaagacggagaaaaaggaacagggaggggaggcacaggcggagaacaaaggggg

SEQ ID NO: 191643 - RNA, 69 nt, Homo sapiens
ggaaaccaggaagggcacgcgaagcgaagcacaggccaccaacagggaacgacgccagagcacggagac

SEQ ID NO: 191644 - RNA, 70 nt, Homo sapiens
agcaagaacacgcgggcccaccgccaaggaacgccaggaccccacgcaagccgcccacggagagaagagc

SEQ ID NO: 191645 - RNA, 78 nt, Homo sapiens
ccggaggaaccgagaagagcagagcggagggagccccagacacggcgagaacgcggacaagcaaacaaagaggaaaaa

SEQ ID NO: 191646 - RNA, 63 nt, Homo sapiens
aacagccagcgggaagggaggaagcacgcagaggagcaggaaggagagaagggaaggacccag

SEQ ID NO: 191647 - RNA, 83 nt, Homo sapiens
ggaggagaaggccgccaagcgacggggacgaccagcgggagccggcgcgcgcgacgggcacgcagcgagcaggagagcccaag

SEQ ID NO: 191648 - RNA, 73 nt, Homo sapiens
cggcgccgcgggaggagcgccagcccgcggcgccccacggggaaccacggggagacacccgcccagcgaagga

SEQ ID NO: 191649 - RNA, 74 nt, Homo sapiens
gaacggccagcggcagaccggggaccccgcaaggcgaacgcaagcagacggaagaagacgaagaaaacccgaag

SEQ ID NO: 191650 - RNA, 72 nt, Homo sapiens
gcacaaggacgggaccagcagaggcaagaagcccaggaacccaccagaggaagaggacaccagcccgggaga

SEQ ID NO: 191651 - RNA, 71 nt, Homo sapiens
gcgaaacggagaaccccgacagaagccaaagggcagcggcccgacacaagaagcaacccccaaaaagaaac

SEQ ID NO: 191652 - RNA, 44 nt, Homo sapiens
gagacaacccccgaaggaggacaggaaagggccacgggagccgc

SEQ ID NO: 191653 - RNA, 63 nt, Homo sapiens
gagagaacagaagccaaggaagggacacaccagaaaagggcgggcccaaaagaagaccgggcc

SEQ ID NO: 191654 - RNA, 58 nt, Homo sapiens
ggcgaaggaggcagaggcacagcgcagggcggagaacggaaaagcaccaggaagcaga

SEQ ID NO: 191655 - RNA, 75 nt, Homo sapiens
agaaaacagcaagcaacagccacagaaggaagccaggaaaggcaacacggcacacaccggaacagccaagagccc

SEQ ID NO: 191656 - RNA, 61 nt, Homo sapiens
ggggagaagcaaagaagccacgaacagacgcacgagggaagagaggccgagaaacaagcag

SEQ ID NO: 191657 - RNA, 75 nt, Homo sapiens
ggccgacccaagcacaccagaaaggaagaagcaagcaaagaacaaaacaggagcaaagccaggagaaacagacga

SEQ ID NO: 191658 - RNA, 82 nt, Homo sapiens
gagccagggcggagagaaaacccgcgaggaaagggaaggagcaagccggcagcccaccaacaaacgcacggaggcaaacccg

SEQ ID NO: 191659 - RNA, 77 nt, Homo sapiens
ccgaggcgggccccggaaccggaacagcgcaaccgaaggcacggggcaggaaacagaagagaacaggagagagcagc

SEQ ID NO: 191660 - RNA, 74 nt, Homo sapiens
ggcccacgcgcagcgacagggagagacagcgaacccacccaacacggcaaaacaaagacaccacacccaaaagc

SEQ ID NO: 191661 - RNA, 77 nt, Homo sapiens
ccagccccaagagcgggacacagacagccagcccggacacgagaaacagggggcggggcaccggggccaaggccaag

SEQ ID NO: 191662 - RNA, 55 nt, Homo sapiens
cggcaagagggaagagagccaacggcacgaaaagacggcggcagaaaaccaccac

SEQ ID NO: 191663 - RNA, 64 nt, Homo sapiens
acacaccgccaccgaagacgggccccaacacccagagacgaaaggacgcaggacgagcggcaag

SEQ ID NO: 191664 - RNA, 92 nt, Homo sapiens
gcagcgggcccagacgcgagacgccgccgccaccagacgccggaccacccaccaccgaggacccacagaagaggaaagggaaacccgaaaaa

SEQ ID NO: 191665 - RNA, 75 nt, Homo sapiens
cccaacggcgccggagaaggaagggggagcaacagacaagcccgaaaggaacagcagcaggaacgaaaccccagg

SEQ ID NO: 191666 - RNA, 82 nt, Homo sapiens
ggagaaggaaggaggaggagaacacaggggcgggccgaacgccgagcggggcgggcgccccacacgcccacccgcaccgcca

SEQ ID NO: 191667 - RNA, 79 nt, Homo sapiens
cggaagaccaaagaggagagaaggacgacaagcccaccgagggcaggcgaggcaaaggacacagaagaaaggacaggcg

SEQ ID NO: 191668 - RNA, 62 nt, Homo sapiens
cgaaccggagagagccaaagaccaaggccaaggaaaaggaacagagagagcagaaccgaaac

SEQ ID NO: 191669 - RNA, 83 nt, Homo sapiens
ggccccgggcaggccggagcacccggggcgagggccgccacacacaggacgccccgggagcagggacccagagcgcagccggg

SEQ ID NO: 191670 - RNA, 79 nt, Homo sapiens
ccggaccaaagggcaggagcacaggaggaccgacgaagccggacccaggcacagcgaagacccggaggggacaacgcca

SEQ ID NO: 191671 - RNA, 73 nt, Homo sapiens
ggaagaaggcaagcgcgcagcaaaccaggacacaagacgaggaggagaggcacgccgcccccagcccacccgc

SEQ ID NO: 191672 - RNA, 102 nt, Homo sapiens
aagaaacagccccccgacagcccgggaagaagcagacacaagcaaaagaggcggcaaggcagcccaggcaaagaagaaaggcgagggccagcagaggaaaaa

SEQ ID NO: 191673 - RNA, 50 nt, Homo sapiens
cagcagcggcagccaaggccgagggaggaccgggaacagcacaccggacg

SEQ ID NO: 191674 - RNA, 44 nt, Homo sapiens
ccagaaggccgagagccgccccaggcaagaagaaacacacgcgc

SEQ ID NO: 191675 - RNA, 36 nt, Homo sapiens
acccaggcccaagaagacggggcgggcgagagcaca

SEQ ID NO: 191676 - RNA, 80 nt, Homo sapiens
gcagacgagagcgccagaggggaaaaaagcagaggccagggcgccgggaacccagaaccgcggaccacagcaaaccaagc

SEQ ID NO: 191677 - RNA, 81 nt, Homo sapiens
caccacacgacgccaccaaggcggcaaccgcgcgccacaaccacagcgcaacaggaccgaaaaacggcccacccgaggcgc

SEQ ID NO: 191678 - RNA, 86 nt, Homo sapiens
aaagcgagcgcgaggaaaaggcggcgggagaaaaaaggcagcggaaagaagaaaagaaacggcccacaagacccagccccacacga

SEQ ID NO: 191679 - RNA, 85 nt, Homo sapiens
ccgcggccgagcagccgggcggccgcgcgagccggcggcccggagggggcggcggggcgggaaaccagaccgcaagggcagaacc

SEQ ID NO: 191680 - RNA, 84 nt, Homo sapiens
gaagggacggggggcggccacggcagacaaagaggggccgaagccccggcccgaagcacagggcagaacacacggcagcacaag

SEQ ID NO: 191681 - RNA, 70 nt, Homo sapiens
acgccaggaaagaaggaccgccgcaaccgaagcgcccaacagccaaacggaacgcgacgcggccaggccg

SEQ ID NO: 191682 - RNA, 71 nt, Homo sapiens
gccccggacgaccaggagaagcgccccaccgggcagaaagagagacccgaaagaaacgggcacaccgcacc

SEQ ID NO: 191683 - RNA, 78 nt, Homo sapiens
ccacaggagaagccagggagcagggggaagcggaggagcccacgcagcaaggacgcgggaagccccgcgagaggcaga

SEQ ID NO: 191684 - RNA, 78 nt, Homo sapiens
cagccagaagaaaaggcacgccacggagggaggacacaccgggccagacaggccgagcgcaggaggagggaagaacgc

SEQ ID NO: 191685 - RNA, 78 nt, Homo sapiens
ggggcccgaaagacccacagagacccgaagccacagacacacccagccagaaaccaccaggcagggggcaaggacacc

SEQ ID NO: 191686 - RNA, 73 nt, Homo sapiens
gcggggcagaagagaggaaagggaggcaccacacacaaaaagaacaaacggagccaagaaaaaggagccccag

SEQ ID NO: 191687 - RNA, 70 nt, Homo sapiens
ggagggccggcaggagcaccggcccaagacaaacgagagaaaaggcacggcacgaagacagggaaaacaa

SEQ ID NO: 191688 - RNA, 54 nt, Homo sapiens
ccgacagccgcagaaccgcacacgccagcccgcgaagaggcgaaaccccgcccg

SEQ ID NO: 191689 - RNA, 66 nt, Homo sapiens
cggcacccaagagcagccagggcaggggagcaaaagggcagaaaagcagggcaagcagggaaaaga

SEQ ID NO: 191690 - RNA, 87 nt, Homo sapiens
gcagcacccagacagcaccacgcccggggggacgcccccaccacaccgggaggcaaacaccagcaacacccgggacaaaaacggggg

SEQ ID NO: 191691 - RNA, 61 nt, Homo sapiens
caggcgggaaacaggggacagaaagcagcccggagcaccagcaaggaaacgaagaccgaga

SEQ ID NO: 191692 - RNA, 81 nt, Homo sapiens
cgagcggccgcgagcagagccgcccagcccgccagcgcgccgggacggggcacccggccgccgccagggcaaggaccgcgc

SEQ ID NO: 191693 - RNA, 73 nt, Homo sapiens
aggggcaagccgcaaggaagaggccaggcaggaaccagcaaggaaagacggcagagaacgccggagcacgaag

SEQ ID NO: 191694 - RNA, 58 nt, Homo sapiens
cagcgaaggcgcgagggacaagagcagagcccagaaggggaagacccccagcgaacag

SEQ ID NO: 191695 - RNA, 79 nt, Homo sapiens
ccgggcaacccgaccgaaccaaacgcggaaaggaagggcgaaaacacacgccaggcaaaccaaaaagacaagacaggac

SEQ ID NO: 191696 - RNA, 75 nt, Homo sapiens
caaaagcaggcaaccggaggcagcaacagaacacgggaccaagagaagcaaagggagaaacaacgcaaaaacaca

SEQ ID NO: 191697 - RNA, 85 nt, Homo sapiens
ccgggccgggcggccccggggcgccagagcagcaggaacaccagcaggaaaaaagagcggcagaaggccaaacggccgagcaggc

SEQ ID NO: 191698 - RNA, 54 nt, Homo sapiens
caagagggcggaggccacgaacacgccggagccgccagggaagaaaacgccaga

SEQ ID NO: 191699 - RNA, 55 nt, Homo sapiens
cgacccgaaggaaacagagagacgcacaggccccccccaacggcacaacaccagc

SEQ ID NO: 191700 - RNA, 79 nt, Homo sapiens
aagagacaggaggcagcagacggacaccaggaaagcaacccaccacaagacaaagaccaccaggacacgaaagcaagac

SEQ ID NO: 191701 - RNA, 63 nt, Homo sapiens
gccgcggaaaacaagacgcgaagccggaggaaaccacagagcagccagcagaagggagaacca

SEQ ID NO: 191702 - RNA, 82 nt, Homo sapiens
gagaccccaagagggagcagcccacggcaaagaaggggggagcaggaaagagagaagcggcccgccggcaggcccacccaac

SEQ ID NO: 191703 - RNA, 66 nt, Homo sapiens
cggaagacacaaacagcagggagaagagacaacaagacaggggaggagcagagccacaaggaccag

SEQ ID NO: 191704 - RNA, 79 nt, Homo sapiens
gggagcccaaagaccccggagacaggcaacgcggaaaaaagccggggggacgcggacagcgcccaagggcgcgaacggg

SEQ ID NO: 191705 - RNA, 78 nt, Homo sapiens
gcccgcgccggcgccccgggggccggagacggcagggcacgggccccaggccgggggccccgaaggcaaagacacgca

SEQ ID NO: 191706 - RNA, 80 nt, Homo sapiens
accgagaggccagcgggacccaggccaggaagaacaccacacccggagaagcccaagcagaggacacacgaacgagaacc

SEQ ID NO: 191707 - RNA, 70 nt, Homo sapiens
ccgagaaaaggagggaaagcggacacagggcacgggcgcaggacaccagaaaaaagacggcaggcggcag

SEQ ID NO: 191708 - RNA, 85 nt, Homo sapiens
aacgagagaccgaaaaagaaggacgagccacaagggccggggggccccgcgggcagaagcgcccacgcagagagccaacagaacg

SEQ ID NO: 191709 - RNA, 78 nt, Homo sapiens
caccaggcgcgccagacccccaccaccggggcccaggagaaggcagaaaaggaggcacgcggaagcaaacagacgcac

SEQ ID NO: 191710 - RNA, 73 nt, Homo sapiens
ggcccgacagcaaacgggcacaagcaggagagcagaaaagcaacaggcccagcaacgcacacggcgccacacg

SEQ ID NO: 191711 - RNA, 69 nt, Homo sapiens
cagcagaaaacacggaagagggaaaccgcaggaggaccaacggacccagacggaaaggcaagaacgaga

SEQ ID NO: 191712 - RNA, 60 nt, Homo sapiens
agcgggacgcaacacgcgggaaaaacggggggccacacgcggacccggagggaccagacg

SEQ ID NO: 191713 - RNA, 71 nt, Homo sapiens
aaaacgcccacaccagaggccgcaccaagagcaaaaggaaaaccacaccacacaggccgagaaaaacacca

SEQ ID NO: 191714 - RNA, 89 nt, Homo sapiens
cggcgcgcagcggcaggcggagagacccgccgccagggcacgggcacccggaccacgcagcagagcgacgggagaaggccaccggccac

SEQ ID NO: 191715 - RNA, 75 nt, Homo sapiens
acaccgagccccgggccaacaagggagacagacgacaggcgggagcaggaaaccgaccgagacaggggcccggca

SEQ ID NO: 191716 - RNA, 69 nt, Homo sapiens
agaagcaaagagggcagcaggcccagaaacgcacacaagaagacagacgcccaaaggacggcacacgag

SEQ ID NO: 191717 - RNA, 71 nt, Homo sapiens
gccaacaagaagagaacgaaaaccaagccgaaagggaccagggcggccggagcgcaacaggagacgaaccc

SEQ ID NO: 191718 - RNA, 51 nt, Homo sapiens
gcgggacagaaagaaaacggaagacaaaacacagcaacaggccaacccaag

SEQ ID NO: 191719 - RNA, 61 nt, Homo sapiens
cagcccccagaaagaaccgcccacgggccgcgccagggaagaaaacaccggagcccaagac

SEQ ID NO: 191720 - RNA, 73 nt, Homo sapiens
cgacagccagcccagacgcaaaagcacgaagcaaaaccagccaaacggacgggccaacgcacggcccggcaga

SEQ ID NO: 191721 - RNA, 79 nt, Homo sapiens
gaaagcgggagagggaccggaacggcggcgacaaggggcccgaacagagggaaagggccaccgggccaggagcggggcc

SEQ ID NO: 191722 - RNA, 70 nt, Homo sapiens
cgggaaagcaaaggaagcggagaaccacaaacgcaaaccgacaccagcgacacaagcgcgagggaaccac

SEQ ID NO: 191723 - RNA, 117 nt, Homo sapiens
ggcccgccagagaacccacagcaggcagcgaaggcagcaggagagcccaaggacgaaaaccaacggcccggaggaccacagcccaggggccccaggcgaaacccagccggagcgcag

SEQ ID NO: 191724 - RNA, 76 nt, Homo sapiens
cggccaaacccagagaaacccccgagcagaggcccagcgacacaccgaacagaagagaagccagccgaggcgcgcc

SEQ ID NO: 191725 - RNA, 80 nt, Homo sapiens
gaagaggcgggagagcccgccgacagcgcgaggacagcacaaagcaccacagcccaaagacaacgaaacccccacccagg

SEQ ID NO: 191726 - RNA, 51 nt, Homo sapiens
cacgccgcccagacaaccaacagccaggccgccgcggcagcgagaaagacc

SEQ ID NO: 191727 - RNA, 82 nt, Homo sapiens
ggcgcgagaggcggcggcacgacgacggccccagcccagccaccagagcaccaagcagacacgcaggaagaagaagcgcaca

SEQ ID NO: 191728 - RNA, 76 nt, Homo sapiens
aggacgggcaccaccaggaggcggcacacaacaacgccagaacacaacacacacagccgggccgcaaccagccccc

SEQ ID NO: 191729 - RNA, 83 nt, Homo sapiens
ggaccacgaaaggagcaagagcaagacaccggacaccgagggcccccaaaagggacccaacacccagaagagccagaagacag

SEQ ID NO: 191730 - RNA, 82 nt, Homo sapiens
cacgacggcgcccgccgaaccgagagaagacaaggacccaaagacaggaccacgcaccagcagagaaggaaagcaaaccgaa

SEQ ID NO: 191731 - RNA, 57 nt, Homo sapiens
cccgagagcgggacgcagggccacacggcccaggcgaaggccacggccacgcagcaa

SEQ ID NO: 191732 - RNA, 73 nt, Homo sapiens
ggagggaggggcaggaagaacacgcggggaagaagcaagacaacagagcaccaacaaaaagcaagccggggaa

SEQ ID NO: 191733 - RNA, 81 nt, Homo sapiens
cccacgccacacagggaaggcacacagcagccagccgaaacaaaaaaacgagcaaaggcagaaaaaggaacggaacagcgg

SEQ ID NO: 191734 - RNA, 73 nt, Homo sapiens
ggaacaggcaggcacagaaaggcggaccaggcaggggacagagaacaacggcggaaggaagagaaaaagcagg

SEQ ID NO: 191735 - RNA, 78 nt, Homo sapiens
agcagcacgggacccagcccaggccgcacggacggggggggaccaagacacccaggagaaagacagcggggaaaagaa

SEQ ID NO: 191736 - RNA, 79 nt, Homo sapiens
agaacagagcagaaacaaagaagagagcaggaagaaggaagaaaaggaccgcagcgcgacacaaaaacggggacggggc

SEQ ID NO: 191737 - RNA, 86 nt, Homo sapiens
gagccgggaggaacggcccggaaacaggaggacggaagaagcccagcggaggcgaacggcccccgccaacacgaggaccccacgga

SEQ ID NO: 191738 - RNA, 75 nt, Homo sapiens
gcgagggcgccgcacccacaccgcgcgcgcaggcgcccagcgcgaagggaccagaacgaggcaccggacacaggg

SEQ ID NO: 191739 - RNA, 67 nt, Homo sapiens
agcaaaaagcaaggccaccaacaagagcaacccaggcagagagaagaggacagcgaaaaccccagca

SEQ ID NO: 191740 - RNA, 82 nt, Homo sapiens
aggacacccgccaggacccggacagaacaaaacaaaaagcccgagcccaaaccccgccaccacaaggccagccaggaaagcg

SEQ ID NO: 191741 - RNA, 55 nt, Homo sapiens
gagacgagagagaagaggagagagaagaggaaccaggagggaagcagaggaacca

SEQ ID NO: 191742 - RNA, 58 nt, Homo sapiens
cgcagcggaaccaagggagccagaagagaaagagcaaggggacggcacccaggacaac

SEQ ID NO: 191743 - RNA, 72 nt, Homo sapiens
gggggcagacacccggaaaacaggggagaagcagaccgcaccaggcgggaccccgaaaaagcccaaacagac

SEQ ID NO: 191744 - RNA, 78 nt, Homo sapiens
cccgggacgccgccgaagaagcacgaaagccccacccgccgcagcaagcagagagccggacaaggggaacgcacggag

SEQ ID NO: 191745 - RNA, 96 nt, Homo sapiens
cgcagagagccccagcaggaaggccaccgagggaacccgaccggacccagccccagaaggcagaaccagagaccacagaagaaggaagggccaccc

SEQ ID NO: 191746 - RNA, 65 nt, Homo sapiens
cggccggagccaaaccgaagagcggaagagaaacgaaccaaaacgccacggaggaggcaagcaaa

SEQ ID NO: 191747 - RNA, 84 nt, Homo sapiens
caggaggagaagaagggaggcagagaaggagaccgcgcccagcccacaccagacaccccggggcaagcggacaacagccgggac

SEQ ID NO: 191748 - RNA, 58 nt, Homo sapiens
ggaccccgacccccagcaacacacagggcggagcccggcacgggcaaacagagcaggc

SEQ ID NO: 191749 - RNA, 69 nt, Homo sapiens
agggacggaaaaggcgcacacgacccggagaaccccacgaaaaggcaaagcaaagaagagggaggaagg

SEQ ID NO: 191750 - RNA, 88 nt, Homo sapiens
cccccccgcgcagccgcgccgccgcgcagcgccccagccacacgccggcgggcagaagccgcccgccccgggggcaccaccccaaaac

SEQ ID NO: 191751 - RNA, 71 nt, Homo sapiens
aacagggacacccaccccccagacacacagaagaaccagcaggacaggcacacccgggcagccccagcccg

SEQ ID NO: 191752 - RNA, 84 nt, Homo sapiens
gcgagccggccgcgggcgcgaccggaggcagaggacgcgagaaaccgcagccagcaggagcgccagaaaagaacgccaagagcc

SEQ ID NO: 191753 - RNA, 75 nt, Homo sapiens
caccagcaaccagagggccagagggaaggacagggcagagacacccacggcaccaccgccagccaagaaggccgg

SEQ ID NO: 191754 - RNA, 77 nt, Homo sapiens
caggaacggcaaacagccccacagcagagaaaagagaccgcggccaggagccaagaagaccagaccgcgggaggagc

SEQ ID NO: 191755 - RNA, 80 nt, Homo sapiens
cagaccagacggaggaggagccggacgggccaggggagccgccaccaaaagcagacggaaaacccacggggaagaccaca

SEQ ID NO: 191756 - RNA, 80 nt, Homo sapiens
accccaccaccacaagcgcagccacaaccaacaagaaagacccccggaaagccagccccaacagaggggaacgagaagcc

SEQ ID NO: 191757 - RNA, 83 nt, Homo sapiens
agcaaagcagaacagcccagcaggaagggaaccaagccccaacaacagagacaggcaaagggggaggagaaaggaagagccac

SEQ ID NO: 191758 - RNA, 79 nt, Homo sapiens
gcccaccggcccgaggaccccaggcggacgcccggcacgggccgcgcacggcaaggaagcgggaccaacgaagacagcg

SEQ ID NO: 191759 - RNA, 67 nt, Homo sapiens
gcagaccgcaggcacggggacaacagggcaggacaggggaacccaccagccggacccagggaaaaaa

SEQ ID NO: 191760 - RNA, 79 nt, Homo sapiens
ggagcagaggcaaagagcgacgcacagggaccagggacacaacgcaacagaagcggacagcgacaccgaaagagaggag

SEQ ID NO: 191761 - RNA, 68 nt, Homo sapiens
ccaagggccccagcccgggcccccaacgaggggagagggcacggaaagaccaaggaggcgcccaggaa

SEQ ID NO: 191762 - RNA, 75 nt, Homo sapiens
aggacggcccgccccggcacaccccagccccggccacagaaggggaggagcgcacacgaccagggaagcgcaggg

SEQ ID NO: 191763 - RNA, 73 nt, Homo sapiens
gaagggcacccgacccccccagaagccgagagcagggggaggcaagcaggggggcaaaggaaagaaggcagaa

SEQ ID NO: 191764 - RNA, 71 nt, Homo sapiens
accgccccgcgagcaccggaaacagggcccacacaggaacaggcaagggggaagagaaacgacaaacacca

SEQ ID NO: 191765 - RNA, 72 nt, Homo sapiens
cacgcgcgaacaagacaaagggcgcgcgggggcacagcccaggcgcagcagcggacccccccggccccggag

SEQ ID NO: 191766 - RNA, 47 nt, Homo sapiens
cggccgccgcccggcgcgcgcaaaacgcagacccccaaaggagacag

SEQ ID NO: 191767 - RNA, 85 nt, Homo sapiens
gaaaaacaaaacgcacacaaaaaccacgagggcgggcgagcaccaggaaaagccccaaagcgcacagcaaaggacgaagccaccc

SEQ ID NO: 191768 - RNA, 82 nt, Homo sapiens
agcacaagacaagggccaaaacaggacagaaagaaggaaaaagcagaaagccagaggaaggagaagacagacgcgcggaccg

SEQ ID NO: 191769 - RNA, 74 nt, Homo sapiens
cgaaccccggaggggaggcacaaaaagaccggagaagagagaggaagcccgccacaaacagagaaggcagccca

SEQ ID NO: 191770 - RNA, 84 nt, Homo sapiens
ccacagggagaaaccccacccccaagaaccaacccccaaaggcgggacagacaacgaagagaggaaagaagcggaaaggaggga

SEQ ID NO: 191771 - RNA, 76 nt, Homo sapiens
cacaaaaaaggaagcgaaaggccagagcagaggcggagaggggcagacccagggaccgaaacgagaaagcccgcac

SEQ ID NO: 191772 - RNA, 67 nt, Homo sapiens
agccccaagagcgggaacaggagccaggcaaaagaagccacggcacaaggagaccagccccaacaga

SEQ ID NO: 191773 - RNA, 55 nt, Homo sapiens
ccgacagccgcagaaccgcggaggagggaagggcacgagcacgaaaagcacgccc

SEQ ID NO: 191774 - RNA, 59 nt, Homo sapiens
gaccgacagagagaagacaggcaacacagagcgaccgaaagaacaaggggaacaacagc

SEQ ID NO: 191775 - RNA, 76 nt, Homo sapiens
gaagaccaaacgcagaccagcccaggaagaagaagaagcgaagccggaaaaaacgaggaaaaagacaggcaggagg

SEQ ID NO: 191776 - RNA, 72 nt, Homo sapiens
agcaccccgcaccacagccagggaccagccggccggagcgccgccggccaggccacgcagcccagggagaca

SEQ ID NO: 191777 - RNA, 86 nt, Homo sapiens
gcgagggcgggggagagccccgccggagaggcgggcggcgccgggacagcacaaaacacacacagcaaaaaagacgcagacgcaac

SEQ ID NO: 191778 - RNA, 80 nt, Homo sapiens
agcccaaaccacagacaacaacaggacgaagggggacacaccaccgggaacaagccgccgggccagggaagagccaagga

SEQ ID NO: 191779 - RNA, 72 nt, Homo sapiens
caagcacaaaaggggccaaagcacaccgacccccaacgggccccaggggaagcagggagaccacagggccgg

SEQ ID NO: 191780 - RNA, 78 nt, Homo sapiens
ccagcagcccccagagcggaacacagggcggaaacagcagaagagcgcggcaagcggccacgacgaaggggcaagccg

SEQ ID NO: 191781 - RNA, 64 nt, Homo sapiens
cagaagggggcagccaggggggaaagggacaggggccgcagccaggagagcgacgcaggggagg

SEQ ID NO: 191782 - RNA, 82 nt, Homo sapiens
gcggaccaccgcccccgcgccccgcaccgcggcaaagagaggacgcagcgagaaagacgccagcagcccggacgccaccaag

SEQ ID NO: 191783 - RNA, 83 nt, Homo sapiens
aagaggccgcagcggcaaggagagacgcgcgaggggcgccgaagcgaggggcaaagcgcaaaacggccagagacacagagaaa

SEQ ID NO: 191784 - RNA, 70 nt, Homo sapiens
gcacacaacccgaaggcgaacacagaggaaaccgcaccgcccggaggaaacgggcccccgcccaacaggc

SEQ ID NO: 191785 - RNA, 86 nt, Homo sapiens
aaagagaagcagaagccccggggcaagagcgaagggcaagaaggaacagacaaaaacggccggaaggaaacacaggacaccaggga

SEQ ID NO: 191786 - RNA, 68 nt, Homo sapiens
ccagaggaaagccagaaggcaccagagagaggccgaacggagcagacaaagggacaccgaaagggagc

SEQ ID NO: 191787 - RNA, 91 nt, Homo sapiens
accgcaagaaccagggagaccacaaaagagcagaggaggaacaccaggcacaaggcccggaaacggcccgacaccccagggggaacggcaa

SEQ ID NO: 191788 - RNA, 82 nt, Homo sapiens
ccgacggcggagggggggcaccaggcaccgccagggaggagagcggggcacgcgcccaacgcgcaagaagcccaccacggag

SEQ ID NO: 191789 - RNA, 70 nt, Homo sapiens
gccaaacggaaacacccacagacgccaaggggacaaccggcgaaaggcccccaggccccccacccggcgc

SEQ ID NO: 191790 - RNA, 82 nt, Homo sapiens
cgagaggacgccagcggcgcgcagaccagaggcccggggaagaccagcaggagcagcggcccaggagcgcaaggacggccca

SEQ ID NO: 191791 - RNA, 60 nt, Homo sapiens
cacaagacgaccaaaggaggaaggcccagaggcagagcacacaaccaggaaccaaaaacc

SEQ ID NO: 191792 - RNA, 57 nt, Homo sapiens
aacccaaaagccgacaaccccagaaacagaaacaagggggaaaaccaaggaggccag

SEQ ID NO: 191793 - RNA, 86 nt, Homo sapiens
cccacacacagggaaaaaggagcagcccgggcaccacagaaaaggcgggggaagcaccgcaaacaacaaagcggaaaacaaaaaac

SEQ ID NO: 191794 - RNA, 95 nt, Homo sapiens
caaagcccggcccaaccgggagcagcggccgggccgaacaccgaaacgcaagaggcaagggaccaagaaaggcccagggaccaaagcccggacaa

SEQ ID NO: 191795 - RNA, 54 nt, Homo sapiens
aggcaggaccgccccagcccagcccaagcccaggaagaggaaaaaccccgcgcc

SEQ ID NO: 191796 - RNA, 72 nt, Homo sapiens
aacccacagccaagcgcaccagaacaaagccaggccggggccagggcaagggcccacggcacagcagcagcg

SEQ ID NO: 191797 - RNA, 74 nt, Homo sapiens
gggcccgaccacaccagaccgcgcgaagccacagaggacgagaaccagcggcagccaaagcccgacaaaagaaa

SEQ ID NO: 191798 - RNA, 74 nt, Homo sapiens
ggaacggacaccggcccgcccgcccacccccccgacaagaccccgcggacgaagccgagggaagacccaaacca

SEQ ID NO: 191799 - RNA, 84 nt, Homo sapiens
gcgcgagggcacgagcgcccgaagagcaaaaccagcgggcggccgcgcccccaggacacaaggcccccgcaggagagaagcccc

SEQ ID NO: 191800 - RNA, 69 nt, Homo sapiens
aaaagacccggccgaggggaacaacgagagcgccccaagggagccagcgcagccacacaagcacaccac

SEQ ID NO: 191801 - RNA, 75 nt, Homo sapiens
acagccacccgggagagcccggaaaggcccgcggcgaggagcgagcagaggaaccagaaagagacaagaagggac

SEQ ID NO: 191802 - RNA, 78 nt, Homo sapiens
gcgcggcacggccaacggggccgcccgacgacgcaccgacgagagggcgcaccgcgccggagcccgaccgcggggacc

SEQ ID NO: 191803 - RNA, 68 nt, Homo sapiens
cagagacaaccaagcccaggccaagcaccgaccgacaggcgggaaccaaccacccgagcagcaccacg

SEQ ID NO: 191804 - RNA, 59 nt, Homo sapiens
acaagccagccgggagcgcacccggcaaaccgccgccaaggaaacagaacgacagcccg

SEQ ID NO: 191805 - RNA, 75 nt, Homo sapiens
agaagcagaagcgcccgcgaggcccgcgccaagggcacaagacccgagaagcaaacggccgcggcggagaacgcc

SEQ ID NO: 191806 - RNA, 78 nt, Homo sapiens
cggcgccggccagccgcgccccgccgcaccgccgaaagcacaccacgagcgacccgggcgcaaggaagaagagacgcc

SEQ ID NO: 191807 - RNA, 77 nt, Homo sapiens
ggagcgcgcccaaagaaggaaacaaagccgccacgcccccccaaacggacagaggcggaggggagggggggccagcg

SEQ ID NO: 191808 - RNA, 76 nt, Homo sapiens
ccaccacaccacgggcggccccagaaggagaaccggggcaagagacggcagacaaacacagccgagagaaggcagg

SEQ ID NO: 191809 - RNA, 70 nt, Homo sapiens
aaaccgaacggaggaagcaggcaaaccccgccagaggcagcagggccaaccaggcaagaacaagaagaga

SEQ ID NO: 191810 - RNA, 57 nt, Homo sapiens
gaaagaagaaaaccaagaaagccccacgagaccaagcgaccaagcaagcagcgccga

SEQ ID NO: 191811 - RNA, 80 nt, Homo sapiens
cgcaccccacccgggccgcccgaagaagaaagacaaggcgaccgaaccaaggagcaggccagaaaagaccaggcagcaac

SEQ ID NO: 191812 - RNA, 76 nt, Homo sapiens
gcggagcgaaggaagggggcccaggggggccaggcgacgaagagacagacccagcacggaccccccccccagccgg

SEQ ID NO: 191813 - RNA, 62 nt, Homo sapiens
cgcaaaagcaaaccgagaaccggcgcggaagacacgggaagccacgaggggcagaacgcacc

SEQ ID NO: 191814 - RNA, 90 nt, Homo sapiens
cccaccgggcagggcggcggcggcagcgggggcggcagagaccacacgggaggaggcagcgcggcggggccgagcgggccaacagacggg

SEQ ID NO: 191815 - RNA, 38 nt, Homo sapiens
caagaccgaccaggaaaagcgcaggacaagcgagcaca

SEQ ID NO: 191816 - RNA, 70 nt, Homo sapiens
acaggcagaagaacgaagaacacacaacgggaggagaacaccgaaagcaccgggaggaaagagagccaca

SEQ ID NO: 191817 - RNA, 60 nt, Homo sapiens
cgcgcccaaagcgaccacaacgagaaaggaaagccaggccagaagaaggaaggccgggga

SEQ ID NO: 191818 - RNA, 39 nt, Homo sapiens
ccgccgcgcggcccagcaccagcacccagccaccaggca

SEQ ID NO: 191819 - RNA, 74 nt, Homo sapiens
gagaaccccaaccggggaggaaaaccgacgaaggagccaaaaaccgaacacccggaaggggacaagggacggcg

SEQ ID NO: 191820 - RNA, 82 nt, Homo sapiens
agaaccgaccagaacgcagcaacaaagacgggagagaagcgccggccggaaagaagacggggaggagcaggacgagcccaag

SEQ ID NO: 191821 - RNA, 89 nt, Homo sapiens
cgggcgcccgcccgcccccgccgccgcccggacaccgcccgcgggagcagagccgggcaggccacgcagaacaagacagggaagaggcc

SEQ ID NO: 191822 - RNA, 61 nt, Homo sapiens
ggacaaggcagacgggagcgcaaggcgccccaaggccagacaaaacacggggcccggagag

SEQ ID NO: 191823 - RNA, 69 nt, Homo sapiens
gagcgccaccacggaagggaccgcaggcccgagcaccaagcagagggcggagaacggaaaagcaccagg

SEQ ID NO: 191824 - RNA, 60 nt, Homo sapiens
cacgggcgccggcaagacaagaggcagccagcggacgggcggggcggagcaccgaggagc

SEQ ID NO: 191825 - RNA, 75 nt, Homo sapiens
cggggcaaaagggacaaggccacgagcgcagacaaagccggcgaaaaccagccgcaagacacggagggcccacca

SEQ ID NO: 191826 - RNA, 75 nt, Homo sapiens
acccaagagaagaagaaaagagggacacaacagcagccacaggaaccgaggacacgacacagggacgggccaaga

SEQ ID NO: 191827 - RNA, 62 nt, Homo sapiens
cccgcccggcgaggaggagggagggaggccccggagcccagccccacgcagacgggccgacc

SEQ ID NO: 191828 - RNA, 78 nt, Homo sapiens
accagagaccaaaaaaaaaacgcgaacaccgacggagccagcccaacagaggaagagagggagagcccgcgcagagga

SEQ ID NO: 191829 - RNA, 40 nt, Homo sapiens
ggcgagaacagagacacagcagaacagagaccagggcgaa

SEQ ID NO: 191830 - RNA, 80 nt, Homo sapiens
caagaggacaaccggaaaggagcgccgcaggagaggaacggaaaaggacagaaccagagcgaaaacgcaagaagacgaag

SEQ ID NO: 191831 - RNA, 76 nt, Homo sapiens
cccgcggcccgcgcggagcggacgcgcgggcgcgcccgggggcagcggcaagcaggggagccagccacacagagac

SEQ ID NO: 191832 - RNA, 86 nt, Homo sapiens
gccgggacccccaggacgacggaccggacacaccggcggggagaccgcggggggagcccgcggccggggaccggacaaccccccaa

SEQ ID NO: 191833 - RNA, 52 nt, Homo sapiens
ggcggcagcccgagaccgcagcaggaaccggcagcgccgcagcgaaccacaa

SEQ ID NO: 191834 - RNA, 78 nt, Homo sapiens
ggggcccccagaaggacgccagcggagaacgcggcaaagcgagaaggaggggaaagccagcgcagcgcgagaagcgac

SEQ ID NO: 191835 - RNA, 78 nt, Homo sapiens
ggaggccaggcccaagacgccgcgcgaggacaagaaaccacagagccgagaacagaaagggagccagacagaccagcg

SEQ ID NO: 191836 - RNA, 79 nt, Homo sapiens
acacccgccaggacccggacagaacaaaacaaaaagcccgagcccaaaccccgccaccacaaggagcagagcgaggcag

SEQ ID NO: 191837 - RNA, 52 nt, Homo sapiens
ccggcgcggccgcggcgggcggcccagagcagaaaaccaaggagcaggcccc

SEQ ID NO: 191838 - RNA, 72 nt, Homo sapiens
aaggaacccaagcagggcgaagggaacgcaaggcccccgaccacacgcccgcgcgagccggagagggggaag

SEQ ID NO: 191839 - RNA, 74 nt, Homo sapiens
gaccaaacagagaggcacggacaagaagagccccgcagcccagggaggcgggacaccaggacacaggaagggca

SEQ ID NO: 191840 - RNA, 75 nt, Homo sapiens
gacaaaaagcggaaccaggaagaaggaggaaggggagagcagaacgaaagaggggggcgccggaacccgccagcg

SEQ ID NO: 191841 - RNA, 75 nt, Homo sapiens
aaacggcgacgacagagggccagaaaagcgcaagccccggggcagagacacaggacacccacccgccggggacag

SEQ ID NO: 191842 - RNA, 68 nt, Homo sapiens
gcagcgacaaccggaaccagcgccagcccaccggaaggacaaagcggcgcacgcacggagacgacggg

SEQ ID NO: 191843 - RNA, 73 nt, Homo sapiens
acagcgccggccacccaaagcacgggggcaacagagagacgcggacagggggccagagcaaggaaagcggaag

SEQ ID NO: 191844 - RNA, 74 nt, Homo sapiens
caaccaccgcgaaccggcgcgagggcggcccgcagaagagcacagaaggagaaggccagcaaagcggaagacca

SEQ ID NO: 191845 - RNA, 83 nt, Homo sapiens
cccgggccgcaccagagcgcccggcccacgacacaggaagaagacaggaaggaagacccacaagagaccacgcagagacagca

SEQ ID NO: 191846 - RNA, 77 nt, Homo sapiens
gcggaaaaggacgcaaagcccggcgagggagcagaccggcaaccaccacacgaaagggaccccaaaagggaaaccgg

SEQ ID NO: 191847 - RNA, 103 nt, Homo sapiens
agggggcggcaacgaaaagagcccgcgaggccgacaagagccacccggagcagggggcgggacagaacccacggggcacgggcgcaccaccagcccaaggcac

SEQ ID NO: 191848 - RNA, 75 nt, Homo sapiens
ccggcacgccacggcgccccgcaagacaggacaaaccccccccccgggcggaccccccacagcaggagccaaggc

SEQ ID NO: 191849 - RNA, 72 nt, Homo sapiens
gaagacggcccaaaacacagcgcaccacacacagagggaaacggaaagccgacaggaaaggacaagaagcaa

SEQ ID NO: 191850 - RNA, 76 nt, Homo sapiens
gaagagaaaggaccgagagaagggcaaggaggagaggggcggaagaagccaaggagcccgacggcggacacacggc

SEQ ID NO: 191851 - RNA, 75 nt, Homo sapiens
cgccgccgaagaagcacgaaagccccacccgccgcagcaagcagaggcagggcagcggaagccccccgccccagc

SEQ ID NO: 191852 - RNA, 74 nt, Homo sapiens
gcaacgccaagcccgaacagagccacacgaccccgcggccaagcacagggaacaccagaggcgggaccacgggc

SEQ ID NO: 191853 - RNA, 37 nt, Homo sapiens
cagcggagagccaaacaagaaacgagcacacccagga

SEQ ID NO: 191854 - RNA, 79 nt, Homo sapiens
cccaggaccgcagcggcgcaccgcagcccacgcagcaccgcggggggcggggccgcgacaaggccgagcccagaggccc

SEQ ID NO: 191855 - RNA, 67 nt, Homo sapiens
cggccaaacaacaagcaggagaccggaaacgagagaaacgaagacgaagaaacagccgcacacagaa

SEQ ID NO: 191856 - RNA, 82 nt, Homo sapiens
gacacagcccagagcacaccgcaggaggcagcaaaccagcggacggcagcagcagaagggccgacccagagcccgacagccc

SEQ ID NO: 191857 - RNA, 83 nt, Homo sapiens
cggaaggccccaacacccggagcagcgccacaagggacaggcaaaggccgcaagaaccgcgaagcagccagcccggaacgggc

SEQ ID NO: 191858 - RNA, 70 nt, Homo sapiens
cgcaacggcacagacgcagcacaggaacagagccagaaggagaagaaaaggccggaaagcagcgggaaac

SEQ ID NO: 191859 - RNA, 78 nt, Homo sapiens
cgaaccaaccgaaaacagaaacaaacacaccaggcgcacgggaccgccgccccagcggggggggcccaaacgcccgga

SEQ ID NO: 191860 - RNA, 73 nt, Homo sapiens
gggagaagaccaccacaacaagagacaacaccgcgcggaccacaaaccgcgccagaaaagggacaaggggggc

SEQ ID NO: 191861 - RNA, 34 nt, Homo sapiens
aggagacgcaacaccaggagggaggaaccgaaag

SEQ ID NO: 191862 - RNA, 65 nt, Homo sapiens
gaaaggcggcaggcgggaaggacccaggccaggagcccgaggcacggagggcgccaagagaacaa

SEQ ID NO: 191863 - RNA, 69 nt, Homo sapiens
ggccgcccaccacgccagaggccgaaacacaagcaaggaacacaaagaagaaagaaaggaacggaagga

SEQ ID NO: 191864 - RNA, 62 nt, Homo sapiens
cacaagacacacaaggacgaccaggccaagcaagaaggggacccccaaaagacaagggcaaa

SEQ ID NO: 191865 - RNA, 77 nt, Homo sapiens
gagcgcagcacacagagaccccacagagaaccaccagcaaacacaaagggagagagcagaacagaaagaggaaggag

SEQ ID NO: 191866 - RNA, 67 nt, Homo sapiens
cagggggaaccagagaagagacaacagcccaagacacaggccacacaccgcaccgacacccaccccc

SEQ ID NO: 191867 - RNA, 76 nt, Homo sapiens
gaccaaaaggggaaaagagccgggcacaaagccagcgagcgaaaaagccagcaagaggaagaaaaagaccaccaaa

SEQ ID NO: 191868 - RNA, 77 nt, Homo sapiens
aagcggagcaagggaccacaaaaagcccccaaaggaaagccgaccaagacggcaccccaacacacagagacagggga

SEQ ID NO: 191869 - RNA, 74 nt, Homo sapiens
gaacacgacagaaagaaaggccaaagcagcagcagcagccgcccaaaacacaaaccaaagaagaaacccgaagg

SEQ ID NO: 191870 - RNA, 78 nt, Homo sapiens
ggagaaaaagggaggagagaaggccgaaacacaagcaaggaacacaaagaagaaagaaaggaacggaaggaagaaaag

SEQ ID NO: 191871 - RNA, 67 nt, Homo sapiens
gcggcccgcacagcggcgcgcgccacgccgcgccacccgccaggcacaaccaccacgaacggggccc

SEQ ID NO: 191872 - RNA, 76 nt, Homo sapiens
aaagaaaagggaggcgccaaggaagccggagacacagggaccccaccaaacccgcggcccacgaccagcgacgcca

SEQ ID NO: 191873 - RNA, 74 nt, Homo sapiens
aaggaccaagaaccagaccccaacaggaaccccccggcggcagagagcagaagggccagcgcgaacaggacacc

SEQ ID NO: 191874 - RNA, 75 nt, Homo sapiens
gaaacccggagaccaaaccgaaaccagagaaggaacagccagaagaagacaggcgggaagagcgccacaagaggg

SEQ ID NO: 191875 - RNA, 52 nt, Homo sapiens
cgccggagccgcgaggccaagcaaacggaggaccgaagcaagagcagaggcc

SEQ ID NO: 191876 - RNA, 78 nt, Homo sapiens
gaagaagcgagacagagggccaaggcaacacccgacggcacgagaagagaagcccagagcaaaacaccccaaaccaga

SEQ ID NO: 191877 - RNA, 77 nt, Homo sapiens
aacaagaaaaccggcccgaggggacgggggaacccggggccagagcagaaaagccacgaggcgccgaggggagccgg

SEQ ID NO: 191878 - RNA, 65 nt, Homo sapiens
aggaggcagccagagacacaagaagacaaagggaaaggaaacaggagccgccgggccaagcggag

SEQ ID NO: 191879 - RNA, 69 nt, Homo sapiens
agggggagagagacgcgggaaccgccagcaaaccacacaggggacgcacgacgagcgcgaagggggaaa

SEQ ID NO: 191880 - RNA, 79 nt, Homo sapiens
caggcccagcacgagcccagaaaccagcagccggggcccggagcaaaacgcggcaaacgccccggaaaaggaaggaaaa

SEQ ID NO: 191881 - RNA, 74 nt, Homo sapiens
agcagggccaagcggccacgcagcacgcgccaaggaccaccaccgccgagcggccagaagagacaaggccagaa

SEQ ID NO: 191882 - RNA, 74 nt, Homo sapiens
gcaggaccagaacccgcgaaagagggaagcggcaaaccaaaagagcaacggcacgaaaagaacggcaaaaggca

SEQ ID NO: 191883 - RNA, 74 nt, Homo sapiens
aaaaaaagggaagaggagacaccccgggggccccgagcaaaccaggggccccggggcggcggccgcgggcggag

SEQ ID NO: 191884 - RNA, 73 nt, Homo sapiens
gagcggcgcccaagacagcaagggacagacgggaaaaaagagcaccaaaagagcacgaggcgagcggggagac

SEQ ID NO: 191885 - RNA, 70 nt, Homo sapiens
acgccagaagagaaccacaaggagacgggcccgcgcgcacggcgcgggacacagggcgccacaaaagaaa

SEQ ID NO: 191886 - RNA, 73 nt, Homo sapiens
gccggcccccccacggaagggacccagcagccacaacgagcgaccggaggaacagaggaaaaaagaacaaaga

SEQ ID NO: 191887 - RNA, 34 nt, Homo sapiens
ccccgcaggacccgccagcaggaaacgaccagag

SEQ ID NO: 191888 - RNA, 80 nt, Homo sapiens
gcaacagcagccgcagaggcacaaggggcggcaagagaagaccccgcgggagggccagcgcccaaggaggacaaaccaac

SEQ ID NO: 191889 - RNA, 72 nt, Homo sapiens
aaaagcgcaaaccggagccagaaacaaccgcaaccacccaacaagcgagaagaagaaaagaagagagcgagg

SEQ ID NO: 191890 - RNA, 70 nt, Homo sapiens
cgccacccccagacccccagcccaggggccaagggcccccagcggccgacagcgccagaagcgccagcgc

SEQ ID NO: 191891 - RNA, 99 nt, Homo sapiens
ggagaagaaacgaggccggaagaaaccacaaggacccaggaggaacagagacaaaagcaaagaagaggcccaaccaggccccgggagagcagaggcggg

SEQ ID NO: 191892 - RNA, 81 nt, Homo sapiens
accggcaacacggacacccacagcggggcggcggcggcggcggcgcggcccaaaagaaggcccgggggaagaggaaaaggg

SEQ ID NO: 191893 - RNA, 73 nt, Homo sapiens
aaccaacaacgcagaaaccgacggccaggacgcacgagccccggaaaggagaggagaaaaccaggggcggaag

SEQ ID NO: 191894 - RNA, 74 nt, Homo sapiens
agagacgaaggggcagaggccaagagcccaacaccacccgagagccccaaggcaaggaagacaccggccaacca

SEQ ID NO: 191895 - RNA, 77 nt, Homo sapiens
gcgaacccccgggccaaaacccagaagaagcacaaaacagaggcaccgaggcaaaacacccacccaagaaaagggaa

SEQ ID NO: 191896 - RNA, 76 nt, Homo sapiens
aaacggcaggcaggaccaggacgagaggagaagaagaggaagaggaggaagagagaaggggagagaccacggaaaa

SEQ ID NO: 191897 - RNA, 80 nt, Homo sapiens
gaccgagggaggacaccggaccccggacgcgggaaagggggcccgaaggcaccgcagaacggggcgggacgacaggagcc

SEQ ID NO: 191898 - RNA, 96 nt, Homo sapiens
cagcaaacacacggagcgaacgccgcagcagaaagccaagaaccagcggaccagggacaggagccagcggcccaggggcgggggaggaaacagaga

SEQ ID NO: 191899 - RNA, 79 nt, Homo sapiens
aagcgcggacggcgcacgacgagacggcagcgcacgggacaagggagggacagcgggccccagaccggggagggggaga

SEQ ID NO: 191900 - RNA, 76 nt, Homo sapiens
acccagccaccacagagaacgcagccggagaaacagagaacccccagaggcaagcaaccccggggaagaggccagg

SEQ ID NO: 191901 - RNA, 65 nt, Homo sapiens
cagagcaggagggaaggaacccggcaaagcacaggccaagacaacgaaacggcaggacaaggagc

SEQ ID NO: 191902 - RNA, 77 nt, Homo sapiens
ccgagaagaagggacgccccacaggacacccaggacccacggaacggaaaacagccccaaagcagcagaccgaagaa

SEQ ID NO: 191903 - RNA, 74 nt, Homo sapiens
agaccaaggaagcaacaagaccaagaggagaggagaaaaccaggggcggaaggaccgagccagagcaaagaaca

SEQ ID NO: 191904 - RNA, 78 nt, Homo sapiens
acacccgcagcagaccgccagcgagcaacggcagagggacagagcccggccaggacaaaaaggcgcaaaaccccacca

SEQ ID NO: 191905 - RNA, 61 nt, Homo sapiens
gccagacccgaaggccaggagacccgaccccaagggaaagggagcagcaccggccacaccc

SEQ ID NO: 191906 - RNA, 69 nt, Homo sapiens
cgggagccggaacgggccaggaaagacaggcagaggcgagccggaggaaggagaggagggcagggcagc

SEQ ID NO: 191907 - RNA, 37 nt, Homo sapiens
cagaagaaagcaaggcgccccccgcgcccagccggag

SEQ ID NO: 191908 - RNA, 83 nt, Homo sapiens
ggccgcgcaccaacggcgaggccaccacgacgacaaagggcggaaccgcggacaaagcgcccaggccgggcccgaagaagcgg

SEQ ID NO: 191909 - RNA, 77 nt, Homo sapiens
ggagggaacggagcgcccccacgcggggggacgcccacccgggccacaaaacccgccaggccaagcaacccccaaga

SEQ ID NO: 191910 - RNA, 73 nt, Homo sapiens
ccagggaccaaggaagaggagggagaggcacagagcacagaccccaccacacccaggaccaacccgcccgaac

SEQ ID NO: 191911 - RNA, 75 nt, Homo sapiens
ggcacggcaccaagaccgcgggagcaccaagagacaggccgccaacaccgcaagaagagccacgaacccccgaac

SEQ ID NO: 191912 - RNA, 71 nt, Homo sapiens
aacaagaacagaccaccccaggaacaacgaagggggggagcccagcagcgacagcggcggggagacggagg

SEQ ID NO: 191913 - RNA, 78 nt, Homo sapiens
ggcgcggggccaccgcggcggagcccgagagccaaggagcaccaggaagaggcaacgagacagcccgccccgcacccg

SEQ ID NO: 191914 - RNA, 83 nt, Homo sapiens
ccgggagccgccggcaccgccggaaccggcgcagggcggggccccgagcagacagcaggaaagaagaagccccggacacccag

SEQ ID NO: 191915 - RNA, 66 nt, Homo sapiens
acccgggcgcgcggcggaaaggcacagacccggagcagcagccaacaagccaaaggaagagccacg

SEQ ID NO: 191916 - RNA, 75 nt, Homo sapiens
acaagaaggacacaggagaagaaaggagaaacagagggagaacaagccagaccaagagaggacacagcaccgggc

SEQ ID NO: 191917 - RNA, 63 nt, Homo sapiens
cgagcgccgcgcacagcccggacagggccacacagcgacaaaagaaaacgcgggagagggcag

SEQ ID NO: 191918 - RNA, 60 nt, Homo sapiens
cacggcacaacacacccgcaagaaccgagggcaccggagggaagcgggccaccgcccggc

SEQ ID NO: 191919 - RNA, 86 nt, Homo sapiens
ccgcggaggccgcggagcgccagccaagaaggaggcccgcaccccccggccgccgcacagccagagagggccagcagcaggcaagc

SEQ ID NO: 191920 - RNA, 68 nt, Homo sapiens
agaaaccaaagagacagaaaaaagggccagaagacgcaccaccggaaaaaggggaagagcgcaggggg

SEQ ID NO: 191921 - RNA, 65 nt, Homo sapiens
gagggcggacagcggggcccgcggaaaacagggagggacacaggagagaaccagagaaggccggg

SEQ ID NO: 191922 - RNA, 69 nt, Homo sapiens
aggccaaccccggggcacgcgcccacaggcaccccagcggagggaggcgacgcccaggaaccacagacc

SEQ ID NO: 191923 - RNA, 84 nt, Homo sapiens
gcgggacaagcgcgacgcccggcgcgagccaagcgcgcgccggaagggccgggccggggcacgggcccacggccccccaccggg

SEQ ID NO: 191924 - RNA, 86 nt, Homo sapiens
accgcagaaggccggagacaccagcagggcaaacgaagaaaacgacccagccagaggacaaaggaccgaggacagggaagaaacac

SEQ ID NO: 191925 - RNA, 80 nt, Homo sapiens
ggagcaagcccaggcacagccgacgccgcgggcaaggacggggaaccaccaaccggcaagaaagcgcacagccgaaaacc

SEQ ID NO: 191926 - RNA, 41 nt, Homo sapiens
agcacacagggaacaaaacgaggaggagaacaccaaacaga

SEQ ID NO: 191927 - RNA, 75 nt, Homo sapiens
aggacacgagacggccgcaagcgccaacacaccgcaggcaccaagccaacggagcccgagggcgacaaccggagc

SEQ ID NO: 191928 - RNA, 77 nt, Homo sapiens
ccgacgggccagcacaacggccgcgagcagccaacgaggacgaggggggacaagagcaaggaccaaggggaaggcaa

SEQ ID NO: 191929 - RNA, 77 nt, Homo sapiens
cgccgccgccccgcgccgccgagccagcgccagcagacagccagagacagagagcacaaagccacgcgccgcgggag

SEQ ID NO: 191930 - RNA, 78 nt, Homo sapiens
aggacccacccaaccgcgccacaccacagaacgcacaaggaccgccaaggggagaaagccaggccagaacggacgagg

SEQ ID NO: 191931 - RNA, 79 nt, Homo sapiens
cagaagcacaggccagggcagaggaccaacagggcagagagcaaggggaacaaagcgacgagggcgagaagaacaggac

SEQ ID NO: 191932 - RNA, 73 nt, Homo sapiens
cgagagccgcccgggccagcggccgcgcacccccggccggaggcaccagcgacacgaggaggggacggcccgc

SEQ ID NO: 191933 - RNA, 69 nt, Homo sapiens
ggaagacgcgaccaacccaggcacagcggagccggcgcggggccacaaaggcaagccagaccgggaggg

SEQ ID NO: 191934 - RNA, 78 nt, Homo sapiens
agggaggggaccgccgcgccggcaggcgcccgagcacgccaaccccaaccccacggacagcgcccccaccgaacacgc

SEQ ID NO: 191935 - RNA, 122 nt, Homo sapiens
gaccgcggcacggggacaggggacacgaagggaggcaaggaggcggacgagcgccccaaggggcgcagacggggaagcggagccaacagccagggcccggagcggggcgcaaaacaggaccc

SEQ ID NO: 191936 - RNA, 71 nt, Homo sapiens
cccagggacccagacggaccggggaagggcaggcgcccagccaaagagaacagagagcggaaaccaacgcc

SEQ ID NO: 191937 - RNA, 66 nt, Homo sapiens
aggaggggcgagagggagccgcagcgagcaggcaaggacggggacacaagaccagccagcccagcc

SEQ ID NO: 191938 - RNA, 63 nt, Homo sapiens
agcaaaacaagagagcgcgcaccgaaggcgacaaaaagccaacagaaacgcggagcacagaga

SEQ ID NO: 191939 - RNA, 105 nt, Homo sapiens
ccgaagagccaagcacggacaggaggccacggagcccccggacggaggcagcaggcgggagcggaggccgagcgggcccagcgcagagcagcgcagcggagcagg

SEQ ID NO: 191940 - RNA, 82 nt, Homo sapiens
cggcgcggcaaccggggagcccgccaggccggccagccgacccagccaggcccagcaccagcacggccaagcagggcccagc

SEQ ID NO: 191941 - RNA, 74 nt, Homo sapiens
gcagaagagcgggcgggccagaagcagcgcaccccccacgggcagcagggggagaagcagagaacgggggccag

SEQ ID NO: 191942 - RNA, 80 nt, Homo sapiens
gggaccagcgacccccgccagcccagagagccgagaccacagacagcgcacaggcccgcgcggcaagggccaccagaccc

SEQ ID NO: 191943 - RNA, 71 nt, Homo sapiens
cgcacaagcgggcaccagggccgaccgccgcaggaacaggaggcccggacccccagcacaagcgcaggcca

SEQ ID NO: 191944 - RNA, 59 nt, Homo sapiens
acccagggcgccaaaaacagggaaaagccaacaaggaccgggaaggcgcgacggaggcg

SEQ ID NO: 191945 - RNA, 75 nt, Homo sapiens
cgacgacggcggacgcagcggcgggggcagacagaaaaacggcccggaggcaaggaaacaaaaccacccaaggac

SEQ ID NO: 191946 - RNA, 74 nt, Homo sapiens
gagcaagaagaggaccggcagggcagagcaggaggccccccgaggcggcagcccggggagaaaggaacaccaca

SEQ ID NO: 191947 - RNA, 74 nt, Homo sapiens
gagaccgacacaacccccggcacccaacggcagcaacgagcccaaggaaacaacccacgggcccaggacgggga

SEQ ID NO: 191948 - RNA, 77 nt, Homo sapiens
ggcacagcacgggcagagccaggaagccagcccggagggagagaagggaacgagaaagaaaagacaaccaaggcaag

SEQ ID NO: 191949 - RNA, 83 nt, Homo sapiens
ggaccccgagaacaacgcgcgcgagggaaaacccgaagacagaccaggacaacaaggaaaaggggggagagacaaccacagga

SEQ ID NO: 191950 - RNA, 82 nt, Homo sapiens
agcggagcgacgcagaagacggggacgcaccacgagggcacaagacaagaaagacccagcggagaagaaaacgaagaagacc

SEQ ID NO: 191951 - RNA, 62 nt, Homo sapiens
gccggccgcagcacccgccaccgcgccggccgcccgcacgccgccggcgaacaagaggcgcc

SEQ ID NO: 191952 - RNA, 76 nt, Homo sapiens
cccggaccgagccgacgccgcggggcagcgggccggcgccggcgcggacccagaccacaagacaggaggaccgccc

SEQ ID NO: 191953 - RNA, 72 nt, Homo sapiens
ggcgagaaacgggaccgcaaagaacaggagcccacagaaggcagaggcagaaccacagaaaggcaaggaccg

SEQ ID NO: 191954 - RNA, 84 nt, Homo sapiens
aggcccagaacacgcaaacgcagaagacaaggaaagaccacagcaagaccacgcccccagccgggggaccaggccgaacgaccc

SEQ ID NO: 191955 - RNA, 77 nt, Homo sapiens
ccggcccggcccgacaccgcgggccgccagacgggaagggggcgggaagaagcccgccgccaccaccccaccaccag

SEQ ID NO: 191956 - RNA, 40 nt, Homo sapiens
gccccccagagcgggaacagggacaggagaagcggaaacc

SEQ ID NO: 191957 - RNA, 64 nt, Homo sapiens
cgcgcggcgcggggaccgcggcccggagacaggcacaaaagacccgaagccccacccgaaccca

SEQ ID NO: 191958 - RNA, 69 nt, Homo sapiens
gacgcaaaccaaggacggggaccgcacacccaaggggaaccagaagaggccaaccagcacgaacgccag

SEQ ID NO: 191959 - RNA, 39 nt, Homo sapiens
cacgagacaaccgggagccggcacaaacacacgaagaac

SEQ ID NO: 191960 - RNA, 75 nt, Homo sapiens
cccggcgcaccgcgccccaccggcggcccgcgcccccacccggagcgcagccgccagcagcccgccgggggaagc

SEQ ID NO: 191961 - RNA, 73 nt, Homo sapiens
agaaggaacgcagccccagagcggcggggaaacgggaggcaacaccaaaagagacagggaccagaaaagaaac

SEQ ID NO: 191962 - RNA, 73 nt, Homo sapiens
ggggaaagaggaacaagggggacaaagccaacaaggaaccacaggccaagggccgcaaggccaggcgcgcaga

SEQ ID NO: 191963 - RNA, 61 nt, Homo sapiens
cccgacccgagcggcgcgagagaggcaggccaaagaggggccagagcaaaaaagggcgaga

SEQ ID NO: 191964 - RNA, 83 nt, Homo sapiens
gaaggcgcaacgcggcgccgccgcccaagagagagaagagaggcgcgagggcagggaagaggcggacaagcgcaaacccaagg

SEQ ID NO: 191965 - RNA, 42 nt, Homo sapiens
ccggagcacccgaccccgaggcaagaaggaacagacaaaaac

SEQ ID NO: 191966 - RNA, 78 nt, Homo sapiens
cgcgcacaacggggcaccgagccgcagacaccagacagcaaccagccgcagaccggcaaagcacagggaagagccagc

SEQ ID NO: 191967 - RNA, 76 nt, Homo sapiens
acaccgccccgaagcaaagaggaggaaggagggaccggcccccagcaagccccagaagagagaagaagcaaaccgg

SEQ ID NO: 191968 - RNA, 83 nt, Homo sapiens
cgggggacccacgagcacaacagcggagcgccggccgcaccaccacacgcggcaaggcccccacccggaccggccagaaggcc

SEQ ID NO: 191969 - RNA, 82 nt, Homo sapiens
ggaccgaaaggacagaacaggaccggaaagacaaggcgagaccaccagaaggaggccggggagaaccacgggacagcaccag

SEQ ID NO: 191970 - RNA, 52 nt, Homo sapiens
gcccgggaccgaaaaaacgggcaaggaggaaggcccacaagcgcagcagcgc

SEQ ID NO: 191971 - RNA, 81 nt, Homo sapiens
acggacacccacagcggggcggcggcggcggcggcgcggcccaaaagacaagagagggcggcagaaggaacaccgagaaac

SEQ ID NO: 191972 - RNA, 78 nt, Homo sapiens
gaacgcagagcgacaccgaacgaggagaaagacagcaaagaaaaggagaagaaaggaaaaaaacaaccccgggcaccc

SEQ ID NO: 191973 - RNA, 73 nt, Homo sapiens
gggccagaggcaacaccgaaggacgacccagaaggacaaagaaagacagaacccaagcacaaggacccaagag

SEQ ID NO: 191974 - RNA, 53 nt, Homo sapiens
cggcccaggaccccacccccagacaagccgagaccaccaggagcagagcggag

SEQ ID NO: 191975 - RNA, 45 nt, Homo sapiens
cagggagaagaaccccaaacaagcgaaaagagggccgcggcagaa

SEQ ID NO: 191976 - RNA, 77 nt, Homo sapiens
aagcccagagcacccaaggaccacccccacaggccccaggaaccacaggcagaaggagaagacagccgaagaagagc

SEQ ID NO: 191977 - RNA, 80 nt, Homo sapiens
gcaaaacgcgacgacaaaacccggcgaagccaggcgagccaccacagcacaggaagcagaagaaagaaggcaagccacca

SEQ ID NO: 191978 - RNA, 70 nt, Homo sapiens
cgagcgcagggaccggaaccgagaagacgaccacaccagacacacaggaggggggagccaaggcggaaag

SEQ ID NO: 191979 - RNA, 79 nt, Homo sapiens
ggcggaggcgaaagcggaacgaggacacgcccaccaagaaagaaccggaaaggggaccgggccaggaaagcagaaaagc

SEQ ID NO: 191980 - RNA, 79 nt, Homo sapiens
caagaccacagaacgaccaaccacagacaccacgcagagacacccaggccggcccagggggaggcggcgcaacgcgggg

SEQ ID NO: 191981 - RNA, 74 nt, Homo sapiens
acccccggcgggcccgaggcggcgagagaggcaggcggagccgaccgggccagcaagggagaacagagcaacca

SEQ ID NO: 191982 - RNA, 78 nt, Homo sapiens
aggcgcaacaacgggcccccaggggccggagacaacgccccaggagcggcaagaagcaaaccgcaggaaaagccaacc

SEQ ID NO: 191983 - RNA, 83 nt, Homo sapiens
gggagaggcgagccgcgagagggccggcaggcccgggaagggacaaagcagccagaccaaagcacagcgccagagacccccgg

SEQ ID NO: 191984 - RNA, 76 nt, Homo sapiens
cacgaaggccacacccggggaccggccaagggaggcacaacacaagagcggaagaccccagcaacgcaagagccaa

SEQ ID NO: 191985 - RNA, 76 nt, Homo sapiens
cagcgagaagagagaggagacgcgcgagaagaagcagcacgaacacgaaggcagacgggcaagaagaccggaagga

SEQ ID NO: 191986 - RNA, 81 nt, Homo sapiens
gaccaaggccgagagccggaacaaacgagggcccgggaggaccgacgcagccaggaggaccgcggccgccagaagggagga

SEQ ID NO: 191987 - RNA, 67 nt, Homo sapiens
cgccgacgcgggaaaccccccccaccccaccaggggccaaaccggggagacacgggaccagcgaacg

SEQ ID NO: 191988 - RNA, 78 nt, Homo sapiens
ggggccgcacccgcggggcccccaggccggccacagcgggcccccaggccccaccagcccaccagcagcccccgggga

SEQ ID NO: 191989 - RNA, 73 nt, Homo sapiens
ggggagacgacacgccaggaggagccaaaggaagagggccaggggggaggaaaaaaacaacacagccccaacc

SEQ ID NO: 191990 - RNA, 70 nt, Homo sapiens
gagaccccaccagaagaccggcaacgcagccagccggccccgcgagacagggccgcgcgcaccaaaaccg

SEQ ID NO: 191991 - RNA, 59 nt, Homo sapiens
cggcgcggaggagcgaggcagcgacaggacgggaacggacagaggcacaaaaggagaaa

SEQ ID NO: 191992 - RNA, 46 nt, Homo sapiens
aaggagagaggaccacccagaggagcaaccgccagcccgaggagcc

SEQ ID NO: 191993 - RNA, 74 nt, Homo sapiens
gaaccccgaagacgggagaaaggagaacgggcgacggagccgggaaaggacaagggaaaagaaggacaccaccc

SEQ ID NO: 191994 - RNA, 36 nt, Homo sapiens
ccaacgcccgcgccgcgggacccgcaccgcgccggc

SEQ ID NO: 191995 - RNA, 61 nt, Homo sapiens
ccaacaagaacgagccccccccacgagacaacggcacgcagcacgggggcaggggccgacc

SEQ ID NO: 191996 - RNA, 77 nt, Homo sapiens
gccccccagccagggaacgcaagaacgccccggcaaggacggaggcaggcaccaccaacagcggggaaaacccagga

SEQ ID NO: 191997 - RNA, 48 nt, Homo sapiens
gggcacgacgccccacgcccaaggacaccaagacgcagagaaagagcg

SEQ ID NO: 191998 - RNA, 85 nt, Homo sapiens
gacgcagcaacgcagaggagaaggagaggcgcggcgaaacagcaagaacgccggcagggaggccacagcggaggcgggaagccaa

SEQ ID NO: 191999 - RNA, 73 nt, Homo sapiens
cagccccgagaggggaacagacggaaaagcaaaggcagcagggaggagcgaggaggccaaaaaggcgaaacaa

SEQ ID NO: 192000 - RNA, 78 nt, Homo sapiens
cccccggaccaggccgacgacgacggcgcgaggaggacgagcggcgagggacggaaagaggagagaccagcagcaaac

SEQ ID NO: 192001 - RNA, 62 nt, Homo sapiens
caccggcggcagagggaggaaagaccagggagcaggaaaggagcgagagccaaagcagaccc

SEQ ID NO: 192002 - RNA, 75 nt, Homo sapiens
aagggaacaaaccagagaaacggaacagacggggaacaaaccacacaggaggcgcgcaagaaaacacggaggcca

SEQ ID NO: 192003 - RNA, 82 nt, Homo sapiens
ggccaaccccggggcagggcaagcacgggaagaagcagcggacccgccaccacacggcaccgggagcaggccgggcccgcca

SEQ ID NO: 192004 - RNA, 69 nt, Homo sapiens
agacaccccagggccgaaaaagaggaaccaccagggccccggcaagcagaggccaccagccgcgcccac

SEQ ID NO: 192005 - RNA, 68 nt, Homo sapiens
ggcaaagagaagcaacgggacggaggcacaccaaaaacagagaccggcccggggaacaaacgcccggg

SEQ ID NO: 192006 - RNA, 77 nt, Homo sapiens
gaaggacgccagagacaaaggcagggacacaagggccgcggaggacaggaaaagacgaaggagcgcagggagccaaa

SEQ ID NO: 192007 - RNA, 55 nt, Homo sapiens
cgagcagggacagaagaccaagaagcaaaacggaggagggacacacgacaggccc

SEQ ID NO: 192008 - RNA, 69 nt, Homo sapiens
ccgaaaaaagcagggaagaaggggagggcacaggcacgaacagacagagaaaccaaacaacagggaaca

SEQ ID NO: 192009 - RNA, 83 nt, Homo sapiens
ccggaggcccgggcccgacacggagaacaggcgggccggaacaggacaggcaggggcccgaagaaaggagaacagagcgaggc

SEQ ID NO: 192010 - RNA, 38 nt, Homo sapiens
cagacagggaagacagaaagcggccagggagcaggagc

SEQ ID NO: 192011 - RNA, 76 nt, Homo sapiens
ccacccggccccgacgcaaccaggcgaagaacaaccgcaggcgaagcggaaggggcaaagaaaaaggagagaaaaa

SEQ ID NO: 192012 - RNA, 78 nt, Homo sapiens
aggagagaaagggggagcccacgcagaccaaagaggcaggcaccacaaggccacaaaggaggggaggcccggagggaa

SEQ ID NO: 192013 - RNA, 74 nt, Homo sapiens
cgaaggaggaggacaaagagcccccacgagcccgcaagagcccaaaaggcagagcgaggagagaagaaggaggg

SEQ ID NO: 192014 - RNA, 71 nt, Homo sapiens
cggcgacccgcacagccgcaccccaacccccagaaccgcacggccaagcccacacagaggaaaccgggaga

SEQ ID NO: 192015 - RNA, 41 nt, Homo sapiens
cacagccccccaaagccgagaacggcccccaggcaacaggc

SEQ ID NO: 192016 - RNA, 63 nt, Homo sapiens
agccgagcacgggccgagaccaccgaggagagccggaacgaaaacaaacggaagagagggcag

SEQ ID NO: 192017 - RNA, 66 nt, Homo sapiens
cgagaagccgaaaagcgcagcgagcggagccgccggagaaaaacaagagcggaccagaggagacca

SEQ ID NO: 192018 - RNA, 67 nt, Homo sapiens
gaagaaaacaggaaggaagaaacacagcgagggagcgcgagcggaccagcaggcaggccccccgacg

SEQ ID NO: 192019 - RNA, 79 nt, Homo sapiens
gcacccaccagcaaagaaagggaagcagcgggagaggaggaagaggacaccagcccgggagaagaggcaacacccgagc

SEQ ID NO: 192020 - RNA, 71 nt, Homo sapiens
aagcgcaacagcgcggggaaacagccacccaacaacccgggggcagcaggcgggaccaccgacaagcgagc

SEQ ID NO: 192021 - RNA, 71 nt, Homo sapiens
ccacgcgcacagcagccgcaccggccaacgacgccaggaagccggacgcgcagggaaaacgagaggaccca

SEQ ID NO: 192022 - RNA, 35 nt, Homo sapiens
cgaaccaggacggcaacacagagagaccaaaacaa

SEQ ID NO: 192023 - RNA, 70 nt, Homo sapiens
aggaggccgcgcggcgagagaggagaaagcacacccaaagaccagaacacacaagaaccgggagaacgaa

SEQ ID NO: 192024 - RNA, 88 nt, Homo sapiens
ccagcgagcggcgcggagcggacgccgcgacgggggcccgcgaggcgggcagccggggcgccagacccacggcagggcaaccccaccg

SEQ ID NO: 192025 - RNA, 78 nt, Homo sapiens
gaaaaagacagccgaagggcgaaggacagacgggagcaaaggaggaaaacagggaagggaggcacaggagacgaggaa

SEQ ID NO: 192026 - RNA, 54 nt, Homo sapiens
acgaacaggaacccgcaggcccacggcacagccagggaccagacacagaggggg

SEQ ID NO: 192027 - RNA, 80 nt, Homo sapiens
accccaagaagaccacagagggacccggacaaccagaggcagccagcagggggaggacaagagcgcccaagcggacagcc

SEQ ID NO: 192028 - RNA, 73 nt, Homo sapiens
ggagcgccaaacccacaacagaaagccaccgaccaccgcgaacccgaacaacgcacaacacaccaagagaagc

SEQ ID NO: 192029 - RNA, 72 nt, Homo sapiens
agccacaaacccgccaaaagcgacaggagcaaaaggagcagacagcagcgaagaagagaaaccaacaaacca

SEQ ID NO: 192030 - RNA, 82 nt, Homo sapiens
cagcagggggcagaacccagaggcgggaggggccgggaggcagaggggcaggggaaccaaccgggagccccccaagagaccc

SEQ ID NO: 192031 - RNA, 115 nt, Homo sapiens
ggacaccaaagaagaagaacccggaagaaggcggagaaaaagccaacgcagggaagcaagggcagcgaacacggcacgggcaccaaagccaagggagcgcacagcgagagaagcg

SEQ ID NO: 192032 - RNA, 78 nt, Homo sapiens
agaaaacggacgcccacagaaggaagcacaaaaagggacagcgggaaaggggccacacgggaagcaagcgccgccgaa

SEQ ID NO: 192033 - RNA, 87 nt, Homo sapiens
gcgagggagcgagcgggcagcgcggagcagggccgccccgaggagagcgacgcccgggcgcgccccggcagagcgagccaaaagccc

SEQ ID NO: 192034 - RNA, 70 nt, Homo sapiens
accccgcagacaccggcgacaccccggcagccagcgaggggggccggggcaaagaccggcaagacggaag

SEQ ID NO: 192035 - RNA, 70 nt, Homo sapiens
ccggaccccccgcggccgaaagaaacggcgaggcagcacgggagcgccagacaaagccacccggagaaac

SEQ ID NO: 192036 - RNA, 73 nt, Homo sapiens
agacccagcggaaaggagcgcgcccggcggggagcgcagcgcgaggcccacgcggaccggcagcgccaccgga

SEQ ID NO: 192037 - RNA, 72 nt, Homo sapiens
acgccaggcagcgcccccaaacggaccgggcgaggccaccccgaggcaaggccccagaggaggaccaagagc

SEQ ID NO: 192038 - RNA, 77 nt, Homo sapiens
ggcacagaggaggcaggacagcagaaaaccaccagaagacaccaccggaaagacggaaaacagaagcgaaaccacag

SEQ ID NO: 192039 - RNA, 67 nt, Homo sapiens
gaccagccgccaaaggcaaggccccagcccaagcgggccgacgagaggaaagcacaaagggagcaaa

SEQ ID NO: 192040 - RNA, 72 nt, Homo sapiens
caagagggcgcccagagacaacgagagaacgggaaaagggaggaggaggcaggcccagaaaccgaggcgccc

SEQ ID NO: 192041 - RNA, 85 nt, Homo sapiens
ggcgcgcgaccgacacgaaggaggccccgggggccgcggcccggccccaccaggagccagcgaggacgacacagcaccgacgcag

SEQ ID NO: 192042 - RNA, 67 nt, Homo sapiens
gaaggaccaagaaccaggacggacagcgcaggagaagagggccacaagcgaaggcaaaaccaaacac

SEQ ID NO: 192043 - RNA, 62 nt, Homo sapiens
ggacggcaaaacagaagcgcagcgaacgaggcaccacacacagcgacaagagaacgcacaga

SEQ ID NO: 192044 - RNA, 54 nt, Homo sapiens
gcgggaaacgggagggaaccagcaacaagccgccacgcaaacaaccacagggaa

SEQ ID NO: 192045 - RNA, 101 nt, Homo sapiens
gggcgccacgagcaggggggagcggcgcggaaacgcaagacgggccgagaagcagcgcgagggcgggaaaccagaccgcaagggcagaaccgcaagggaag

SEQ ID NO: 192046 - RNA, 124 nt, Homo sapiens
aagaagaacggccaaccgacagagacccggggaccgcggagaccgccaccaggcccggacccacggcagggcaaccccaccgcggaaggcaggcacacagacgagaacagagaggacccgagac

SEQ ID NO: 192047 - RNA, 77 nt, Homo sapiens
ggaggacccagccaaagagagaacgaaaggaaaccggaaacacagaaaaacaggacaggagaagaacacccccaaga

SEQ ID NO: 192048 - RNA, 81 nt, Homo sapiens
aagaaacaaaggaaagaggaccagacaagcgcggaaaaggaacagaagaggaaccgaaacccaagaaaaaccacccagcaa

SEQ ID NO: 192049 - RNA, 67 nt, Homo sapiens
ccgaaaacgacacggaggcaacgaggcacgggaagcaaagagcacacagaaaacaggcgcaccaaag

SEQ ID NO: 192050 - RNA, 79 nt, Homo sapiens
acaagagagcagggaggaggcacaggagggcagaccaaaagcacaaaaagaacggcccgaagaccccaagccagacaga

SEQ ID NO: 192051 - RNA, 83 nt, Homo sapiens
cgccgggacccccggggcccaggggaagccaaagcagaaccaagacaaacgaccccggaacacggaggcaaggggcaccaagc

SEQ ID NO: 192052 - RNA, 73 nt, Homo sapiens
ccagggggggaggaggcaacacagaaacagaacggacacaaaagcgagcaaaagaggaaaaccagcaaagcca

SEQ ID NO: 192053 - RNA, 81 nt, Homo sapiens
cgcgggcccagcggcgggcgggagcggaggagcgcgccggagaacgacaccaagcagcgagccagaggaagaggcggggca

SEQ ID NO: 192054 - RNA, 54 nt, Homo sapiens
gacaccgccccaacccacgagaggacagcccaggagcacccacgcaacgcccgc

SEQ ID NO: 192055 - RNA, 79 nt, Homo sapiens
ggcggcacagccaagccagccgggaaccagaggcaccgcaagcgggacagggcaccggcacagacagaagcgcggcccc

SEQ ID NO: 192056 - RNA, 77 nt, Homo sapiens
gcaagagcaccggcgaccgcaccacaagggacgagaccaaacggaagagggggagccagacgaccagggaaggcggc

SEQ ID NO: 192057 - RNA, 80 nt, Homo sapiens
aaacaaacaggaaagaagagaaggcaaaagcagaccggaaaacccaccggcaagaccacacccgaggggagcccaggaca

SEQ ID NO: 192058 - RNA, 77 nt, Homo sapiens
ccaagaaccggccaccggccccacacgaccggcagcacaagggggcggcacacggagcccagcaggcggccaggcaa

SEQ ID NO: 192059 - RNA, 70 nt, Homo sapiens
cgaggacacccagaacccccaaagcgaacagaagacgagagcagcagaaacccacgcaggccgaggaaac

SEQ ID NO: 192060 - RNA, 79 nt, Homo sapiens
gcggccaggaccggcggaccggccgcccggcccagccaacaccgacgaggcgaggggacggcggggagcgcaggacaga

SEQ ID NO: 192061 - RNA, 48 nt, Homo sapiens
gggagaagagcggggcagagaggggccgcagcaccgggcccaaccaag

SEQ ID NO: 192062 - RNA, 45 nt, Homo sapiens
aggagccggccggcggcaaagaccagacaaaacaagaggcaccac

SEQ ID NO: 192063 - RNA, 47 nt, Homo sapiens
aaggaccaagaaccagggcccagacccacaaccagcaacccccaggc

SEQ ID NO: 192064 - RNA, 77 nt, Homo sapiens
gccacgccgcccaggagacccccgcgcaccaccaggacgaacgacaccgggccccccccggcgaggacccacgcgca

SEQ ID NO: 192065 - RNA, 71 nt, Homo sapiens
ccccgaggagcgggaacaggagggcccgacccggccacagcccaaccgccacgcgacacggggagacacca

SEQ ID NO: 192066 - RNA, 59 nt, Homo sapiens
gccgccgcacgacagaagccgccagcgagccccacacaggccacaacagagcagacgag

SEQ ID NO: 192067 - RNA, 37 nt, Homo sapiens
cccgagagcgggacacagagagacggggcacggagcc

SEQ ID NO: 192068 - RNA, 66 nt, Homo sapiens
agcacaacaacaaaagaaaacaccaccggaccacgaccaggcagcaggagaaacgagaagaaacag

SEQ ID NO: 192069 - RNA, 34 nt, Homo sapiens
cccacgccacaccaggcaccaggcggaaccgcga

SEQ ID NO: 192070 - RNA, 58 nt, Homo sapiens
cccccgaagcccccgccgccgcgagaagagccaggaccccaggagcgggccagcccgc

SEQ ID NO: 192071 - RNA, 81 nt, Homo sapiens
acacgcgccacgcaggccgagccgagagcccgacccggccagggggcgacgaggcccgaggggcgggacaccagggacccg

SEQ ID NO: 192072 - RNA, 77 nt, Homo sapiens
cccggcgaggagcgccaggcgaggcgccggggaaggaaccagaacggcaccccccccccggcccggacgcgccccac

SEQ ID NO: 192073 - RNA, 52 nt, Homo sapiens
caagggagaacaagaagggaaaagaaacccaggccagcccgccagggagccc

SEQ ID NO: 192074 - RNA, 34 nt, Homo sapiens
acggacacagcaaaagggagcagacagaaagcag

SEQ ID NO: 192075 - RNA, 74 nt, Homo sapiens
cacagaaaacacaagaagggccagggaaaggaggggaaggagaaacgaaaaaggcagaagaacgcagacagaag

SEQ ID NO: 192076 - RNA, 46 nt, Homo sapiens
gcgacggcccaagcgaaaagggccaagagggggaaggacacaccga

SEQ ID NO: 192077 - RNA, 57 nt, Homo sapiens
ccgaggcggggcaccgccaggggaagggccgaacgcccccggcggacaggggggaca

SEQ ID NO: 192078 - RNA, 79 nt, Homo sapiens
agagggcaagaagaagaaaaagcagaagaggccgagcagacccagaaggaggaaccgggaccaggaagaaaacgccaga

SEQ ID NO: 192079 - RNA, 77 nt, Homo sapiens
cggcggagaccccggaaggacgggcggggggagaaccgcccagacacgacggcagagccggcagccagaagagaagg

SEQ ID NO: 192080 - RNA, 54 nt, Homo sapiens
ggaggaagacagaagcgcaccagagggggcagaaggccaagacccgagaacagg

SEQ ID NO: 192081 - RNA, 32 nt, Homo sapiens
ccccagcccgccccaaaagaaggaggaagcac

SEQ ID NO: 192082 - RNA, 70 nt, Homo sapiens
agggcagcacgggggccaccagacacccaacgagcggacaagagccaggcacagcagggaccagaaacgg

SEQ ID NO: 192083 - RNA, 81 nt, Homo sapiens
gggcgcaccaccacgggaggggcccgcaggaaggacggaccaggggcagggcccaccccgccgaggaggacccgcggcagc

SEQ ID NO: 192084 - RNA, 87 nt, Homo sapiens
gccgacagaagaaagacggcggaccgcgggggagaacaagcccaccagaggcgaggggaggaggaagcgagcgaaaagaggcgggaa

SEQ ID NO: 192085 - RNA, 105 nt, Homo sapiens
acagccaacccagagagcgaaggagaacgggaggcgggaacacaagagaccaaacgacaaagaggcggagaaaaaggcagaaggaagaagaggacccaaaacaag

SEQ ID NO: 192086 - RNA, 63 nt, Homo sapiens
gccgaccggagggggccggggagcccgaccggaccgcggagaagagcaaagacccaggcagga

SEQ ID NO: 192087 - RNA, 74 nt, Homo sapiens
aagacaagcaaaaagacgggaaacggcaaaggcgaccggaacgcacaccaccgagggaacagagagcagacaga

SEQ ID NO: 192088 - RNA, 70 nt, Homo sapiens
caccgacgagcgaagagcaagaacagccagcaaagacaagagcagaccagcagccgcagcgcgacagcca

SEQ ID NO: 192089 - RNA, 53 nt, Homo sapiens
ccggaaagcggccagagcagaggccgcgagacagaaaagggagaacagaagaa

SEQ ID NO: 192090 - RNA, 83 nt, Homo sapiens
aacggccaaggccacaccaggaggaaaaagggaagggccgagcaaaaccccagaaaaagcgcaggaaaagagcaggaaacaca

SEQ ID NO: 192091 - RNA, 84 nt, Homo sapiens
gggcgcccggcgaaggagccgcggcggggggaaaaggagccccaccaagacaagcagaccggaagaccgacggaagaccacacc

SEQ ID NO: 192092 - RNA, 80 nt, Homo sapiens
aaaccaagaaagccccacggaggcaggggggccggcccccacccgacccgacaaggaccaggaccggagccgggcagaga

SEQ ID NO: 192093 - RNA, 40 nt, Homo sapiens
ccacagcaccccagcacccaggaacgcaagcacaggacca

SEQ ID NO: 192094 - RNA, 81 nt, Homo sapiens
cgagagccaaaggagacagacccagagaaggagacagacgaagaaggcgaccgcgaaaaggaagccaacaaggacacgaaa

SEQ ID NO: 192095 - RNA, 79 nt, Homo sapiens
cagaggagaccaaaaaaaacaacagcagagcaaggaaagccagacaccggacgcaccaaagaagacagacacgcagaaa

SEQ ID NO: 192096 - RNA, 82 nt, Homo sapiens
caggccaacccgggcccaacagcaacaggccaagagcagaccgggccgccgccagagacggggcaagcggacgggaccgcag

SEQ ID NO: 192097 - RNA, 71 nt, Homo sapiens
gaacaagagcaagaacaagggacacaacgcgccacgaaggccaggccagggaggaagccgagccacggagc

SEQ ID NO: 192098 - RNA, 79 nt, Homo sapiens
cacccaagcacacccaaggacagcagcccaccaagcacagacaagcagaaaaagaagagcacaagaccagcagacgacc

SEQ ID NO: 192099 - RNA, 83 nt, Homo sapiens
ggggaaggagcgaaagagagagagaagagacgaggaggaggggagaccgcggcaggacacgaggacagcaacggcgcacaaca

SEQ ID NO: 192100 - RNA, 82 nt, Homo sapiens
ggagaacacacaccgccgcaggcgcccccgggagagaccggaagaagggaaggaaggaccccaggacaggaagggaggcccg

SEQ ID NO: 192101 - RNA, 77 nt, Homo sapiens
caccacggaccaaaaagacccgaccaggggggacaggaacagaaagcgaagaaagaccacaacaacccacccgacag

SEQ ID NO: 192102 - RNA, 52 nt, Homo sapiens
aagcacgggggcaacagaggaagaacccgcagcgcacaggcacccccacagc

SEQ ID NO: 192103 - RNA, 80 nt, Homo sapiens
gaggaacagcaaaaaggaacagccacacggccccgggaaaacccgccagaaaaagccgaaagccagccaggcagaaaaag

SEQ ID NO: 192104 - RNA, 66 nt, Homo sapiens
aaaggagccggccggcggcaaagggggacacagccagggcgcaggcagcgcccaacaacacgggaa

SEQ ID NO: 192105 - RNA, 77 nt, Homo sapiens
cagccggacggcggggccgggcccccggccgcaagcaggggacgccaggggaccgcggaccggacccacgaagaggc

SEQ ID NO: 192106 - RNA, 74 nt, Homo sapiens
gagcccccgcggacccacccccgaacccccaagggcggagaacggaaaagcaccaggaagcagagaggaccgca

SEQ ID NO: 192107 - RNA, 84 nt, Homo sapiens
gagcaacgcccccccacacacagaagggccgagacacagcccaccgcaggcggggaagacgcccggcaggaggagcgcacgccc

SEQ ID NO: 192108 - RNA, 78 nt, Homo sapiens
gcgcgggcaaccggggaccccggccacggagcaggcaccgacaagaccggccggacagaaacggaacacaaccgcagg

SEQ ID NO: 192109 - RNA, 79 nt, Homo sapiens
gcgggcgaggcacgcgggcggagaccaggacaggaggggcaaaaaagagcgccccgcgcaagagccggaggaggacgag

SEQ ID NO: 192110 - RNA, 75 nt, Homo sapiens
cccacccgcccccgcgggcgccgggccaggacgggaccaagaacgcccagcccgcgggcaccggcagaaaggagg

SEQ ID NO: 192111 - RNA, 58 nt, Homo sapiens
gccagcgcccggcgccgcgcgccacccccgagcgcgaccgcccagggagacggaaccc

SEQ ID NO: 192112 - RNA, 79 nt, Homo sapiens
ccaccacgacacgggaggacggccaccaggaaacccccccgaagaagggagaacaacacgcgggcccagcccccccaag

SEQ ID NO: 192113 - RNA, 67 nt, Homo sapiens
caggccaagccaaccagccagcaggccgggcggggagggaacagaggcacagaaaagaagggagacg

SEQ ID NO: 192114 - RNA, 78 nt, Homo sapiens
gagcccaaaccccaggccaagcagccaccagcagcccccagagcgggaccacagagcgaggaaaacgccacgacagac

SEQ ID NO: 192115 - RNA, 76 nt, Homo sapiens
cacggggaagcgcaaaaacaagacggggcgccccacagaggggcgacggcaaaaggcagaccgaaaaaacagacgg

SEQ ID NO: 192116 - RNA, 86 nt, Homo sapiens
ccagaaacagccagagaagacacaacagccaagcggagcgacaagagcgggaccgacaaagaaaggaggacggggaagagaaggag

SEQ ID NO: 192117 - RNA, 36 nt, Homo sapiens
ggccggagcagcagcccgagcggcacagccagggac

SEQ ID NO: 192118 - RNA, 61 nt, Homo sapiens
gaggaagcgggacacccgggagcaggaaaggcacaccggaaaaagacgagaaggaaaacgc

SEQ ID NO: 192119 - RNA, 86 nt, Homo sapiens
acggggccgggcgaccgggcaccagcaggacccgaggccaggagccaggggcccagaagaagccgggcggaagcccacgcacaggc

SEQ ID NO: 192120 - RNA, 80 nt, Homo sapiens
gcgcgccgcacccggacggaccgccacgcgcccgggagacgcccgcgccgccgggggacacgccagcggcgcagccgacg

SEQ ID NO: 192121 - RNA, 73 nt, Homo sapiens
cagacgcagggcagggccccgcccggcggggaaggcgccggcgaaagcaacgaagggacgccagaacaagaga

SEQ ID NO: 192122 - RNA, 81 nt, Homo sapiens
ccgccagcagaccaggagcggccaccacaccgaaggcgcacacaagaaccaggacgcgagaaaggcgaggaaaagaagagc

SEQ ID NO: 192123 - RNA, 69 nt, Homo sapiens
ggaccaaacagcaagggaaggcggaggaagcagaacaagcaccgagccaagagggagcgaagagagaga

SEQ ID NO: 192124 - RNA, 79 nt, Homo sapiens
gggggagcggacgcaggagcccccccggcagcaacccccacacccagcaccagggaagacggcaggaggacgggcggca

SEQ ID NO: 192125 - RNA, 70 nt, Homo sapiens
acacaagccgggaagggagcaccgagaggcagacaagacacccgcaggagcaaaaacaccacggcagcca

SEQ ID NO: 192126 - RNA, 54 nt, Homo sapiens
gacgaagggacacaccgcagcagccagagcgcccagagacggacaaaaaccaaa

SEQ ID NO: 192127 - RNA, 85 nt, Homo sapiens
ggccagagccggcgagccggaggaagccaccagcgagagccgcggcagcccaagcgaacaccgaagggagagcaagccggcccgg

SEQ ID NO: 192128 - RNA, 73 nt, Homo sapiens
aaaccaagcacccaaaaggccacccaaacaacagacacggaagccggcccaagggggagcacaaagagcccgg

SEQ ID NO: 192129 - RNA, 84 nt, Homo sapiens
ccccacggagggagccgggcacagaaacacagcagcgggagcagcaacaccagcacgccaacagaccgaaacaaggaccccccg

SEQ ID NO: 192130 - RNA, 72 nt, Homo sapiens
aagacaggaagccagaagagagacacaggcagccaaaaggagaccgagaagcaaagcgccgggcaccagcaa

SEQ ID NO: 192131 - RNA, 87 nt, Homo sapiens
aagcaagacccaggacaccccgaagccgagaaaggacagaagagcccaagaccagaaaaagcgcgcccaagcgcaaaccgaacggaa

SEQ ID NO: 192132 - RNA, 70 nt, Homo sapiens
cacgacccagcggccccggaaaagacagaggcgcagcgacagagagagaaacacgaaacagaccaccgcc

SEQ ID NO: 192133 - RNA, 73 nt, Homo sapiens
gcgcccgccgacgaggagaaggcgcgcagcagaagaccagaaaccggaggaggcaaggccggaggcaccaagc

SEQ ID NO: 192134 - RNA, 58 nt, Homo sapiens
gagacagagacagagcaaaaccaggagggcccggcccgacagccagccgccggacgcc

SEQ ID NO: 192135 - RNA, 70 nt, Homo sapiens
aaaagaacccccaaaagggagaggagccaagcccaacgggacgggaaaacggccacagccaacgacgcag

SEQ ID NO: 192136 - RNA, 63 nt, Homo sapiens
gaagaagaaagcaaaaacaaacagcgagacaaggagaagcgccacacagcaccgagagccggg

SEQ ID NO: 192137 - RNA, 57 nt, Homo sapiens
caggaggacaagagacagcggaaacgaccgagaagaagaaacggcgaggaaagagag

SEQ ID NO: 192138 - RNA, 80 nt, Homo sapiens
ggacacccgggcggggcagagcagcccccagccagccgcgagggcggagaacggaaaagcaccaggaagcagagaggacc

SEQ ID NO: 192139 - RNA, 76 nt, Homo sapiens
caagaacgggcaccggcgggccagaagagacaaggccagaagcccgcggcggaagacacaagcgggccggccggcg

SEQ ID NO: 192140 - RNA, 78 nt, Homo sapiens
acgaagcccaaaccacaagccacaaaagccaaaacagagggagacgagaaaagggccgagcacaagccaagaaggcgc

SEQ ID NO: 192141 - RNA, 100 nt, Homo sapiens
caggaacccaacggggcccgagacagcaagggcgcccgagacacgcgcaacaacgcccaggaggaaagacccgaccccaggaaaaaccccccgaccccag

SEQ ID NO: 192142 - RNA, 79 nt, Homo sapiens
acccaacaagacaccggacaaggcaagcgggacaagaagagaaggcgcacagcacacacaaaaggcacaaagcaggaac

SEQ ID NO: 192143 - RNA, 73 nt, Homo sapiens
gacaggcaaacacccaggggaaggcgcggccgaacccagcgagaaaccaggaaccaccccgggagccgagccc

SEQ ID NO: 192144 - RNA, 80 nt, Homo sapiens
cagaaacggaacaccaagggggaaaaggaggcgccaccccagcgggagcaggacaagaggacacgagccaggcgacacac

SEQ ID NO: 192145 - RNA, 76 nt, Homo sapiens
aacaaaagaaaaaaagaacacaagaaaccaccaaaagggagacgagcgccaaagacagaagcaagcagaaaagagc

SEQ ID NO: 192146 - RNA, 78 nt, Homo sapiens
ggccaggcccaagagccagaccggaagagaagcccggccgggaaaacaagacggccggggggggaccaaacgagaggc

SEQ ID NO: 192147 - RNA, 78 nt, Homo sapiens
agagaaccggagagcacccaacaacggggagcaggccggggagggagaccaagagcaaaaggagacaggagcacacag

SEQ ID NO: 192148 - RNA, 86 nt, Homo sapiens
cccacgcagcgccggacaaaggaccgaaaaacggcccacccgaggcgcgggagccacagaagcagagaccccacacccaaaaggcc

SEQ ID NO: 192149 - RNA, 76 nt, Homo sapiens
agcgagggggggcgcgccggaaaccggagcgcgcagcagagcggccacggagacggcggccccagaccggcaccag

SEQ ID NO: 192150 - RNA, 74 nt, Homo sapiens
gaaagcgaagccaagcccgaagccaaggggccaagaggagaagaagacggaagcccccaaagcagaaacacaag

SEQ ID NO: 192151 - RNA, 81 nt, Homo sapiens
gagagcgagcggcaacccggaggacaaaaccggagagaaccaagaaaaacacagaagaaaggaagagaacaaaacgcaaac

SEQ ID NO: 192152 - RNA, 62 nt, Homo sapiens
ccacagaaccaaacggaccgaaaccagacagggaaacgggagcggcgaaagaaaaacaggac

SEQ ID NO: 192153 - RNA, 74 nt, Homo sapiens
gccagcgcccggcaccaaggaaccccggcagccaaggccagccccagagggaagccccagggagccaggcacca

SEQ ID NO: 192154 - RNA, 66 nt, Homo sapiens
aggaggaggagcaacaggaagggcggcgcagagcgcaccagaggaggaagccagcccgagcaggcc

SEQ ID NO: 192155 - RNA, 70 nt, Homo sapiens
gaacagaggcccaggaaagccaagcaaacaagacaggaacagaaaaggccacaaggaggcggcggacagg

SEQ ID NO: 192156 - RNA, 77 nt, Homo sapiens
ccgaccccgaagcccggagaaccgcgcagcaggaaaccccgggaaggggaaaccacccagaaaggaaacgccagagg

SEQ ID NO: 192157 - RNA, 75 nt, Homo sapiens
caacagaaagagcaacagcagggcaacaggggaaaggcgcgacacgaaccagcggggcgacgcaaaggagaccca

SEQ ID NO: 192158 - RNA, 68 nt, Homo sapiens
cccgagaggaaacacccccagaagagagaaaggacagggacaggaaagaaagaaaaagaaaagaaaaa

SEQ ID NO: 192159 - RNA, 38 nt, Homo sapiens
cagcggcccccgcagcggccccaaaggcagaagaaaca

SEQ ID NO: 192160 - RNA, 94 nt, Homo sapiens
accgggcggcacgcacgcgggcagggaacaggcggagcggaagagcagagagcgcaggacagacccaaaaaggacaacgacccgcaaggaggcg

SEQ ID NO: 192161 - RNA, 88 nt, Homo sapiens
agaagcaggcccccagccgcagccacaacaccggcaggaaccaccaggacagaccaacaggcccaagaaagagacgaaccaggcgcac

SEQ ID NO: 192162 - RNA, 73 nt, Homo sapiens
ggggaggggcccaggaaagcgaccccggggccaccgagccaaaaggacgggaggagcgcggcaagacaaccac

SEQ ID NO: 192163 - RNA, 77 nt, Homo sapiens
acgggcagggcagccacaaagaggagcacgagaagcccaccagaggcgaggggaggaggaagcgagcgaaaagaggc

SEQ ID NO: 192164 - RNA, 73 nt, Homo sapiens
ccgaagacccgggagagagaaaaaccggacgagcgagcaaggagcgaaaacgccacaacagagggggccaggg

SEQ ID NO: 192165 - RNA, 74 nt, Homo sapiens
gaaccccagcccaagccgcgcccgccgcagaaggacgccccgaagcgcacaccccccagagagcggcccacgca

SEQ ID NO: 192166 - RNA, 73 nt, Homo sapiens
ccccgagagaccgccgagggcgggcggagagggggagcgggagccccgaggccgaggcgaagaaccaggacgc

SEQ ID NO: 192167 - RNA, 70 nt, Homo sapiens
aggacacgcgcagccaggaagccacagcagccaagggcgggcacaaaccgaagaggacaaggagagaagc

SEQ ID NO: 192168 - RNA, 83 nt, Homo sapiens
cggccgagacggcggcagcagcggcacagaacaccgcccagccaagggggagggcagcgccaaacagcgcaaaggcagcaagg

SEQ ID NO: 192169 - RNA, 81 nt, Homo sapiens
ggccgcgaccgcggcgcgggaccggccgggcagagcgagagcaccacgccgaggccacgaggccccagcccacccaaggaa

SEQ ID NO: 192170 - RNA, 64 nt, Homo sapiens
caaaacgagggagaacacaccgagccagcagcagaaacagaagagggggcagcaccaaaacagg

SEQ ID NO: 192171 - RNA, 71 nt, Homo sapiens
gagcagcaaaaaagggcaggccaggaagaagcaaaggaagacagaaaagacgccaccccagcccgacacca

SEQ ID NO: 192172 - RNA, 86 nt, Homo sapiens
gaggagaagacaccaaaaagcaaacggaccagaccgaccaccaaaaacgaagaacggaagcgccccagaggagagggcggagagac

SEQ ID NO: 192173 - RNA, 72 nt, Homo sapiens
gagggcagccggaagcacccacacaccagacggacggccggcccgggcagaccagaccagacacacagggcc

SEQ ID NO: 192174 - RNA, 86 nt, Homo sapiens
acgaccgccccgacagacccaccacccacacagccaccgcaggggacaggcagagcacggcgaggggacgacaccggagaaggcag

SEQ ID NO: 192175 - RNA, 71 nt, Homo sapiens
ggggccccagaaaggcagaaaggaggggaacacccagagggaaggcaccagaccaacgcagcaacccgaac

SEQ ID NO: 192176 - RNA, 78 nt, Homo sapiens
gagagcggaaacacgcaaaacccaaggaagggacagagcgaagaaccccccaagaagacgaaacccccgggccacaag

SEQ ID NO: 192177 - RNA, 58 nt, Homo sapiens
caagacaccgaagaggcaacaggccaagaggccaggagcgcccggaggaagcgcaaac

SEQ ID NO: 192178 - RNA, 67 nt, Homo sapiens
gagagcgaagccgccacccaaaccagcaaaccaggagaccgggcgcaaagcagaacgcgaagaagga

SEQ ID NO: 192179 - RNA, 69 nt, Homo sapiens
acgaaagaaaacacacacacacaaaccccgaggcgcgccccagccagccccgccagcaggggaacagga

SEQ ID NO: 192180 - RNA, 70 nt, Homo sapiens
cggcgaagccgggccaaaggacgaagaacccacagagaccacaaggaaaccaccacacagaagcaggaaa

SEQ ID NO: 192181 - RNA, 76 nt, Homo sapiens
agaggaagaccaccaggcagaggcaacagaggagcaacaaggaggaaacgacgcgggcgcaggccccagcaggaag

SEQ ID NO: 192182 - RNA, 81 nt, Homo sapiens
gaggacgaggaagaggggcgaggcagaccgccccgggccgcggccgccgaggaagccgacggccacgcggacggaggacgc

SEQ ID NO: 192183 - RNA, 67 nt, Homo sapiens
agcggccagaggccagcaggccacgcaagccccggcaaccacaacgccacaggagccacggacacag

SEQ ID NO: 192184 - RNA, 65 nt, Homo sapiens
aaagcaggcacacccaccgggaaagacccaggacccagaacacaacacgagagggaaaagcacag

SEQ ID NO: 192185 - RNA, 75 nt, Homo sapiens
cgggaaaaggccggagaagggaaacgggccccccggcgagagacgcagccccgcacagaacgaaagcaccgggga

SEQ ID NO: 192186 - RNA, 78 nt, Homo sapiens
caccaccaggaaccggaaggcacaagggacaagcaacgagagcccggagccccggggagaaggggcaagcaaacccca

SEQ ID NO: 192187 - RNA, 78 nt, Homo sapiens
cccgccgacccacaggccgacaagaaccccgcagccacccacagagggcgccagcagcgggagggcccggggggaccg

SEQ ID NO: 192188 - RNA, 81 nt, Homo sapiens
gaagaccccgaaggaccaagacccacggcagggcaaccccaccgcggaaggcaggcacacagacgagaacagagaggaccc

SEQ ID NO: 192189 - RNA, 58 nt, Homo sapiens
agggcaggacaagaagaaggcagccgaacccacaggagggccagaggacaaagcacgg

SEQ ID NO: 192190 - RNA, 69 nt, Homo sapiens
aagccaagaccgaaagaggaggaaaaacgagccaaaccggaaagagggccccgcagaggcggaaaggac

SEQ ID NO: 192191 - RNA, 77 nt, Homo sapiens
agacgaagagcccgggcggcgccgaccggccacgggcgagcgcggcagaagggccagagaggggaagaggaaaccgg

SEQ ID NO: 192192 - RNA, 66 nt, Homo sapiens
cccggaccccgcgcacccggccaggacagcaagcaagacgggagagaaacagcagcagacaggcca

SEQ ID NO: 192193 - RNA, 76 nt, Homo sapiens
aaagagagcaaggggaaggacgggagacacagacacaccgagcacacagggagcagccaggccaggggcagaacac

SEQ ID NO: 192194 - RNA, 57 nt, Homo sapiens
gccggccaaaaaacaacaaggaagccaggaaacagccacaggaagaggggcaaaaag

SEQ ID NO: 192195 - RNA, 40 nt, Homo sapiens
aggggaggacagcagagagaaagggccacgcacccaggcg

SEQ ID NO: 192196 - RNA, 80 nt, Homo sapiens
ccagaggcagagccgccccagcagcaggggcgccaggcaagcaaagacagaagcccgggggcaaaacacgggagaaaagg

SEQ ID NO: 192197 - RNA, 77 nt, Homo sapiens
ccaaggacacaacccggccgcagagcccagccgcagcccaccaagccacgccaccaccccagggagcgaagcacacc

SEQ ID NO: 192198 - RNA, 83 nt, Homo sapiens
ccaggcccgcgaccgccgccagcgcccgaggccgaccccgggacacacccagcccgggacccagacaccgggaggggagaccg

SEQ ID NO: 192199 - RNA, 73 nt, Homo sapiens
gaagacgggccccaacacccagagacgaaaggagaaggcccgcagcaccaaaaaagacaaaacacaaaaaaac

SEQ ID NO: 192200 - RNA, 65 nt, Homo sapiens
gaagccaaggcacaggggcccgacccagcaggacagaaagggcaaggccagagaaggcgggagaa

SEQ ID NO: 192201 - RNA, 82 nt, Homo sapiens
gcagggaaggaggccgagccgggaccaggcccgggggcggcggccacgccaaggacgggacagacccgagaaaccggacagc

SEQ ID NO: 192202 - RNA, 80 nt, Homo sapiens
ggcaccagggacgcaggacacaaggagacaaaggacaggcagaaaccagaacaggcaaagggcccccagaccggcaacag

SEQ ID NO: 192203 - RNA, 72 nt, Homo sapiens
agaccacccggacaccacggaccaaaaagacccgaccaggaggacggcgagcccagggcccacggaagacgg

SEQ ID NO: 192204 - RNA, 70 nt, Homo sapiens
gccccaaaggcagcgcggcagggaccagggaacgggacacacagacggaggaaacgaaaagggacaccac

SEQ ID NO: 192205 - RNA, 84 nt, Homo sapiens
ggaaacaggcgaggcggcggcgcccggagggcagcgaggggaaggaacaaagcagagaaaccaaaaggccagacgaacacgaga

SEQ ID NO: 192206 - RNA, 76 nt, Homo sapiens
aaacggagaagagagacacgaagcaaagaagaacaggggaaggaagggccccacaccaaagaaacccaaaaagaac

SEQ ID NO: 192207 - RNA, 76 nt, Homo sapiens
ggcgggcgcgggggccggggcgcgcgcaggaccggagggagagccaccgaccgcccacacagaagcaccgagcccc

SEQ ID NO: 192208 - RNA, 70 nt, Homo sapiens
gaaaaagagaagagaagaaacccagcgaaggaacgaggaaccccagagaggacagaagccaaccaggcag

SEQ ID NO: 192209 - RNA, 69 nt, Homo sapiens
ccagcacaacggcaggccagaagagccaagcaagcacggccaagcacccggaaacaagccacgaaggag

SEQ ID NO: 192210 - RNA, 121 nt, Homo sapiens
agccacacgagggacccagacaaggcggagacaaacccaagcagacagaaggaccaaaacgcggccccagccggggcccaaacccagccgaagcaccggaacacgggggggagggggcgga

SEQ ID NO: 192211 - RNA, 42 nt, Homo sapiens
cagcccccagagcgggaccacagcagcacggaacaagagacc

SEQ ID NO: 192212 - RNA, 69 nt, Homo sapiens
aaaaaaagacagacccaacaaaggccacgcgagaacaaaaagacgagcaagaagacaaacaagggaagg

SEQ ID NO: 192213 - RNA, 53 nt, Homo sapiens
gcggacgggaacagacaaaagggcgggggcggagggcaagacgacgacaggag

SEQ ID NO: 192214 - RNA, 81 nt, Homo sapiens
caccggcgggcaaccagcgggcccggccgccacccgggaaagacaggccgacagcgggacaaaaaggaccagaagaaaggc

SEQ ID NO: 192215 - RNA, 57 nt, Homo sapiens
acaccccccagcacacgaaacgccgggaagaccagcgccggagacaaccacgcagaa

SEQ ID NO: 192216 - RNA, 69 nt, Homo sapiens
ggcgcgccccacgggccaggaggcagaaaacacagagaaaacacggagaaacagcaacaggagaaaagg

SEQ ID NO: 192217 - RNA, 51 nt, Homo sapiens
acgagcgaggcggagggagaaggacccccccagcggagccacgaacccagc

SEQ ID NO: 192218 - RNA, 93 nt, Homo sapiens
cagggcccggggccgggcccaaaggggaccgggaagcgaaggaagaagcgcccccaggagccaggaagaggcgggccaggccagcgggccggg

SEQ ID NO: 192219 - RNA, 65 nt, Homo sapiens
aaaaacaacagacccaggccaagaggccaaccagacaacgaagagaggaaagaagcggaaaggag

SEQ ID NO: 192220 - RNA, 72 nt, Homo sapiens
gcgcgccgcagcgccgccgcccgcggaagggagcccaagcgcagagggcagggaacacacacaaaaggaggg

SEQ ID NO: 192221 - RNA, 86 nt, Homo sapiens
ggaggaggaagggcaggacgagggcggcgcgggagcagcacccacagccaaggcgggagccacggacagcccaaggcggaaaagcg

SEQ ID NO: 192222 - RNA, 70 nt, Homo sapiens
ggagaacaagcaacggcgggaagagagacagagagcccagcgagaaagggcaaaagaaaggcagccaacg

SEQ ID NO: 192223 - RNA, 82 nt, Homo sapiens
cggacgacccagccggggggcacagccgggaaggaacggccaggagaacaaccagcaccgggacccaaacagcccgaaaaag

SEQ ID NO: 192224 - RNA, 67 nt, Homo sapiens
gaaaggagggacgaagacaccgacgggcgcgcgcagaaccaacaaaagcgaaggaaaagggagcgac

SEQ ID NO: 192225 - RNA, 87 nt, Homo sapiens
cgccgggccgggcggagcaagacaagagacaccgaaaggcacggcgccgaggaccccaagaagcccggcacggaaaaaggagggaag

SEQ ID NO: 192226 - RNA, 81 nt, Homo sapiens
ggacagcgcgagcccaaaccaagcgcgacaagaaagaggacagcagcggacggccggaccaagaggcgccgccccccagca

SEQ ID NO: 192227 - RNA, 33 nt, Homo sapiens
gcgcaccaggaagaaacggggccacacagccac

SEQ ID NO: 192228 - RNA, 55 nt, Homo sapiens
cccgcagaaaaagaggcccccccccccgcgacgaaaaacacggagagcaacaaag

SEQ ID NO: 192229 - RNA, 86 nt, Homo sapiens
aggacacagcccgcggaggcagcgggcccggccgccccgcaccgagcgccccgcccccccgcggcacagcccgcaggacagaagcc

SEQ ID NO: 192230 - RNA, 78 nt, Homo sapiens
ccaagaggaggaggaggcggaggccaagcggaaagacgcggcgaggagcgacagccgcggcggcacgggggggcgcgc

SEQ ID NO: 192231 - RNA, 77 nt, Homo sapiens
ccaacaagaaacaggagaacgggaagccccgccgagaaaagccaccacgcgaaacagggcaaggagcggagcggggg

SEQ ID NO: 192232 - RNA, 72 nt, Homo sapiens
acagaagcaggcggcagagacagcccacccgaggaaaaaaaggcgcacagaaaaggaccacacagacaaagc

SEQ ID NO: 192233 - RNA, 67 nt, Homo sapiens
ggggcacgacaagagaggggcccggcaacgaaaagacagcaagggagccgccaccaaaagcagacgg

SEQ ID NO: 192234 - RNA, 76 nt, Homo sapiens
aaaccagaacaggacggacagaggagcacgccaacccaaccgggaacaggcaggaaaacgacccaaaacagccacc

SEQ ID NO: 192235 - RNA, 74 nt, Homo sapiens
cgccacaaagaggacgcccgcgccccccagaggaggccccccagccacgggaacgagccaaaaaccgaacaccc

SEQ ID NO: 192236 - RNA, 86 nt, Homo sapiens
ggcagccacccagcagcagcagcaggaacgacacaaaggaagaaaacgaggcccagggaagcagagaaccgccagagcaacagcca

SEQ ID NO: 192237 - RNA, 80 nt, Homo sapiens
agacgggacaagacagggcaaaggacagaccaggaacccaaggaccgcaaagaaaacccagagaacaccacccgaagaga

SEQ ID NO: 192238 - RNA, 65 nt, Homo sapiens
ccacccccacccagagagagcgcccggagcagacagcggaacgcaggcagcggagggcgccgcag

SEQ ID NO: 192239 - RNA, 77 nt, Homo sapiens
gaggaagaggagaaaggaaacggaagaaaaaagaaaagaaacgacaaaaacacgaggaacaggagacagcggagaaa

SEQ ID NO: 192240 - RNA, 56 nt, Homo sapiens
ccaccacaccaaggccccagggccccaaagcaggaacggccagcaggggcagccga

SEQ ID NO: 192241 - RNA, 75 nt, Homo sapiens
ggcggccaaggggacgagcaaaggaagcgcgaacagcagcgcagagacggccgccacagcccagacggcgaaagc

SEQ ID NO: 192242 - RNA, 72 nt, Homo sapiens
aagcgcggcagggagcgcgggggcccgcgcagcagcgaccacgggacacaggacaaggagccaccggagagg

SEQ ID NO: 192243 - RNA, 61 nt, Homo sapiens
gacagcaaggaaagagcgcccaagacagcccagcgcaagggaacgaggggccagccccggg

SEQ ID NO: 192244 - RNA, 78 nt, Homo sapiens
aaaaacacaaaacggcgaccaaaaacagggaagagagggacaccagggggaaaacaggaaacgaagcccgagcgacaa

SEQ ID NO: 192245 - RNA, 66 nt, Homo sapiens
accagaagcccaggaacgcacgcgcaaggacgggcccaagacaaaagcaggagagagccaaaacga

SEQ ID NO: 192246 - RNA, 77 nt, Homo sapiens
gaccccggagaagcagaggaaaagaaaaagcggggaaggggggcaaaaaaaagaagcaagcgaagcaccgagcaccc

SEQ ID NO: 192247 - RNA, 56 nt, Homo sapiens
agacacggagcaaggaggaaaacacacgcacgcaaagaaggaagagggccgaaggg

SEQ ID NO: 192248 - RNA, 77 nt, Homo sapiens
cacacacagccgacacaacaagacagacgccagggccaccggggaccgcaaggccgcggggcccaacaaggcaagac

SEQ ID NO: 192249 - RNA, 75 nt, Homo sapiens
gccgagacacgcagcggcggccagggaccagaaggcgggaagcgaaaagaaagcaccccccaaaacggaagaagc

SEQ ID NO: 192250 - RNA, 76 nt, Homo sapiens
accaaccgcgcgcaccgccgacccggaagaccgccgccgccaaacagaggaaagagcggagcccgccagaaacaga

SEQ ID NO: 192251 - RNA, 59 nt, Homo sapiens
aaaagaggaagaagaaggggagagggagccagaaaaccgaccacaggagaacagaaacg

SEQ ID NO: 192252 - RNA, 64 nt, Homo sapiens
ccggcgcgggaaacgggcgaagcgacgagccgcgaggagcccacagaagaggccgcggcacccc

SEQ ID NO: 192253 - RNA, 74 nt, Homo sapiens
ggaacccccaggggccgaaccccccccccaagcgagagcagccacacagaaagcgaaaccggaccaagaaaaaa

SEQ ID NO: 192254 - RNA, 113 nt, Homo sapiens
cgaaggccgggacccggccccggcccacaggggggggcaaacccgagagaacgggcaaaagcagaccggaaaacccaccggcaagaccacacccgaggggagcccaggacacc

SEQ ID NO: 192255 - RNA, 65 nt, Homo sapiens
cccccaggaacccggacagaagccagaggcccgccagggagcccaccaaaccaccgggaacaccg

SEQ ID NO: 192256 - RNA, 74 nt, Homo sapiens
cccccgaggaggagagacagcgcagaagaaacaggaagaaacagcccaagaccgaggaggagaagagcggagga

SEQ ID NO: 192257 - RNA, 76 nt, Homo sapiens
ggccgagacaaaggcaccaggccaccacagaaacaaaagcaacaaagaggccgaagcaggacacaaagaaaagacg

SEQ ID NO: 192258 - RNA, 72 nt, Homo sapiens
agccagcagaggaaaaaagaacacagggagcgagaacgggccaggcaggaagaacagccagcaaagacaaga

SEQ ID NO: 192259 - RNA, 84 nt, Homo sapiens
agaggagcgcagaacaaacagccggaagcagcgaaaaggacagcagggaagaacggaaaccagagaaagaaacgcccccacaca

SEQ ID NO: 192260 - RNA, 97 nt, Homo sapiens
accaccgcagcggaggaagggccacgccggcgaggaggcggcggcggcggacggcgggaagaaccgccaaagcgacggacaaaaaagaagaaacaag

SEQ ID NO: 192261 - RNA, 61 nt, Homo sapiens
gcgggaggcggcgacgggcccgggaagagaccggcgcaccagcgcgcccagccgccgacgc

SEQ ID NO: 192262 - RNA, 76 nt, Homo sapiens
aagagacgcccaggagacgagcggacacgaaacgaaaaaggcagaagaacgcagacagaagaaggaaacaagaggc

SEQ ID NO: 192263 - RNA, 74 nt, Homo sapiens
cagggccagagcgggcgggaagacaccaggaaggaagagcaaagccaggggaaaaggcgaagcacacaagagcg

SEQ ID NO: 192264 - RNA, 74 nt, Homo sapiens
agcgccaggccagagggacccaccccgagcagaggggagcccaaaagcacgaagcgccagaggacaccgcggcc

SEQ ID NO: 192265 - RNA, 74 nt, Homo sapiens
agcgggacgaggaccgagaccgcggccgggaccgaggggcggagcacgccccggcccagcaggacggcagcccc

SEQ ID NO: 192266 - RNA, 77 nt, Homo sapiens
cagcccagacggcggaccgaaggaggccgggaccacccagccagcggaagaagaccaagacacccaggagaaagaca

SEQ ID NO: 192267 - RNA, 82 nt, Homo sapiens
agccgcccggccgggaggccccccccgcggaccccggccccaccccggacgcccaggaccacaccgcagcgaacgcaggccc

SEQ ID NO: 192268 - RNA, 76 nt, Homo sapiens
ggcagcggccagaagagaccccagaggacaacagcagcagcagagaccagcaggacagccggcagcagaacaaccg

SEQ ID NO: 192269 - RNA, 66 nt, Homo sapiens
acggcacaggcagcgaaaaaagaaccggaacagaagacagggaaggacccaagagcggagaacccg

SEQ ID NO: 192270 - RNA, 75 nt, Homo sapiens
accagaagacgaacaaacagcaagaaagaccacaagaccaacggaaccaaagccgaccccgaaacagggagcaca

SEQ ID NO: 192271 - RNA, 74 nt, Homo sapiens
ccccagcgagccagcggagcgcggaagggggagcaacagacaagcccgaaaggaacagcagcaggaacgaaacc

SEQ ID NO: 192272 - RNA, 52 nt, Homo sapiens
ggaccaccccgaagaaagcacagcaagccccagccaagacccaccaggcagg

SEQ ID NO: 192273 - RNA, 65 nt, Homo sapiens
aagccagagaacagcccccacgcagcccagaaggggaacaaggggacaaaaaagcccccggcacc

SEQ ID NO: 192274 - RNA, 52 nt, Homo sapiens
ccggcaggccgcccccggcaaggggccagaggggcaagcgagcaagacaaga

SEQ ID NO: 192275 - RNA, 74 nt, Homo sapiens
cggcgcggaagcaacacaacaggaggcggaggcgaaagcggaacgaggaagagcccaggaaggagccaacccgg

SEQ ID NO: 192276 - RNA, 75 nt, Homo sapiens
cagaggggccaccgccgcacgccgagccgacggacgcacaggccgcgccccagggggacgacaccggagaaggca

SEQ ID NO: 192277 - RNA, 78 nt, Homo sapiens
ggaagacagcgcccgcccaacacccagcagccagggaaccccagaacaaagaaccaggaggcagcaaggacgagccca

SEQ ID NO: 192278 - RNA, 64 nt, Homo sapiens
acaaggcgagcacggcacccggggggcagcgaaagcgagaaaaagccagccacgaggcgcaaaa

SEQ ID NO: 192279 - RNA, 56 nt, Homo sapiens
acaaaagaaaacgacggaccagaggcccacgaaagggagagccagcgagaggacac

SEQ ID NO: 192280 - RNA, 85 nt, Homo sapiens
ggaggcagacgggcggaggagaaagcggcggggagcggagcgcggggggaccacaggcccagagcacagaccgacaacgggcaaa

SEQ ID NO: 192281 - RNA, 76 nt, Homo sapiens
cccacccccacccacccccccccagggagcaccgcggacgccccagggcacaccgcgcaccagcgagaggaggaga

SEQ ID NO: 192282 - RNA, 78 nt, Homo sapiens
gacccgaacccaaaggaggaaacagcggcaagccacagacgggaggcggaaccaacccccggccagggaggggccggg

SEQ ID NO: 192283 - RNA, 74 nt, Homo sapiens
agcagggcggaagcacaggcgcaaaaaacaaaaaggaagccccggcaccaggacaaaggccacagcggagagca

SEQ ID NO: 192284 - RNA, 67 nt, Homo sapiens
agggcagaaacaggacgaaaaaagggcaagaagccagaaggaccagagaaggcagaagcgcacaagc

SEQ ID NO: 192285 - RNA, 79 nt, Homo sapiens
gccaaagcccagccccaggcacagaccccagcgaggcggcagcagagaccccggggggcaacaagccccaacagcaggg

SEQ ID NO: 192286 - RNA, 54 nt, Homo sapiens
ggcccagagcacagaagagaaagagcgcgcacgaaagcacacgaaaaggaagga

SEQ ID NO: 192287 - RNA, 58 nt, Homo sapiens
ccgccaggagcccgaccgggagaggacaagaccacgagccaggcggccgaggacccag

SEQ ID NO: 192288 - RNA, 76 nt, Homo sapiens
aaacagcagggcaagaacacacaccagcagccgagggaacggcagaagagaagagcacggcaagaccacaagcaaa

SEQ ID NO: 192289 - RNA, 56 nt, Homo sapiens
acaccaccaacaaaccgagccccacagccgacaacccagggcgcccaggaggacgg

SEQ ID NO: 192290 - RNA, 76 nt, Homo sapiens
aaaaccaacgccggccggagcagcagcccgagaaaacaacaggggcaggaagcccagcccaaagcaagcgagacaa

SEQ ID NO: 192291 - RNA, 73 nt, Homo sapiens
cgagaaggaccgccgacccgcccaccacgccagcagcgcgacggcaggcgggaaaacggcacaaggcgacgag

SEQ ID NO: 192292 - RNA, 72 nt, Homo sapiens
gggcggaaggacaacagcccgacaaccaggcaaaccgacaccagcgacacaagcgcgagggaaccacagagg

SEQ ID NO: 192293 - RNA, 61 nt, Homo sapiens
agcgagacggaaggagcaggcagcggccaacagggcaagaacgaagcagagcccaacaggg

SEQ ID NO: 192294 - RNA, 80 nt, Homo sapiens
ccacacccccagcaccaagggagagaccgcagaagcgcagggaaacggagcccgagcaggagcggagaaaccaccgcagg

SEQ ID NO: 192295 - RNA, 77 nt, Homo sapiens
gaggagcaggcgagaagagaagagcaccaagcggaaaacgagacgaaggacaagggaccaaaaggcggacccgcagg

SEQ ID NO: 192296 - RNA, 76 nt, Homo sapiens
aacggccagccaaaccgcaccaaccgggcaggagccagggacgaaccagcagcgaccaaaaccggagcaggcacca

SEQ ID NO: 192297 - RNA, 78 nt, Homo sapiens
ggcgcggcgcgggcggcggggcccacggaccccaaaagagacagacaggcgagcaaaaaaaacaagcccggaagcgca

SEQ ID NO: 192298 - RNA, 76 nt, Homo sapiens
aaagaggggcaaacaagaaaaccgggcagcagggacaacagaccgacaagaagagcagaaaaaacaccgcgaacca

SEQ ID NO: 192299 - RNA, 84 nt, Homo sapiens
acacccacagagaacccagacaacaggacgccgccaagagagaaaacgccggcacagagcaagaaagaaagccaacaacaggga

SEQ ID NO: 192300 - RNA, 82 nt, Homo sapiens
agaaccgcaaaaagcccaccacccgaagacgaagggcggcgacggcggcgcgaggaccgaccgggcccgcggacgaagaagg

SEQ ID NO: 192301 - RNA, 65 nt, Homo sapiens
gaaaaaccaaccacgcagcggcgagagagacgcgaaagcagacagcgccacaacaaggcagaaga

SEQ ID NO: 192302 - RNA, 77 nt, Homo sapiens
cgcacccgggccgacccccgcggggaacggccgcggagcaacaacggaggaagggacgccaacacagccacacagac

SEQ ID NO: 192303 - RNA, 76 nt, Homo sapiens
ggagaaaggaagacaggggaaccagaaaacgaaacacacacggaagaggggaaagggaacagaacgaaggcccgga

SEQ ID NO: 192304 - RNA, 73 nt, Homo sapiens
caagcaagcagaccacgaaagacggaaagacgaagaggagcagaaccagaagggacacacaggacggcaggaa

SEQ ID NO: 192305 - RNA, 51 nt, Homo sapiens
cacgaaagccccacccgccgcagcaagcagagacccgcgaacaaagggaaa

SEQ ID NO: 192306 - RNA, 59 nt, Homo sapiens
cgccaaaccccacagacaagccaagcccaagaacacacaagggccaaagccagggagcg

SEQ ID NO: 192307 - RNA, 85 nt, Homo sapiens
cgcagcccaaccccggaccagaaaaacaaccaccagcgagcaaaaaggcaaagaccaagaccaccaagaagcgccccagcggcaa

SEQ ID NO: 192308 - RNA, 69 nt, Homo sapiens
ccccaacaggagcacgccacgcagggaccccggagggcaccggccccaggcaaagaaaggcagaagaga

SEQ ID NO: 192309 - RNA, 84 nt, Homo sapiens
gaggcggaggccgaggacccggggccgaggagcgggaagaggcggggaccgaccagcgggcagcacgcacaaggaggagcagcg

SEQ ID NO: 192310 - RNA, 79 nt, Homo sapiens
aaagcaggggaagcagcgcacgccagcgcgccggggcgcgagacggagagcaagacaccgcgggaaggaggagaagcgc

SEQ ID NO: 192311 - RNA, 78 nt, Homo sapiens
cagccacagcccagagcacgggagaggcgccagcaacaccagcggccaccgccagaaccaagaaggagcgagggagga

SEQ ID NO: 192312 - RNA, 109 nt, Homo sapiens
ggggaggcaagaccgccccgccgcccagaggacgcccaacaccacccacccaccacggacccaaagacaggaccacgcaccagcagagaaggaaagcaaaccgaagcag

SEQ ID NO: 192313 - RNA, 73 nt, Homo sapiens
agcaacgcgggaagagaaggggcaagccgggagaggaagacacagagaaaccaaagccacaaagacagacaac

SEQ ID NO: 192314 - RNA, 83 nt, Homo sapiens
gcagccgccgccgcagcgcgaacaggacgccgcaacgcccaaccaggagcccgaggcaggaaaacgggaccggagcacagccc

SEQ ID NO: 192315 - RNA, 60 nt, Homo sapiens
cgcagcggggacgcggacgcacgggcacgcaaaaaaaccaagggaaaagagacaagaccg

SEQ ID NO: 192316 - RNA, 78 nt, Homo sapiens
gacaagcacacacaggcgcgaaacggaaaaagaacggccgagcgaccaggagaggagcccccgcccgaagaccgggga

SEQ ID NO: 192317 - RNA, 85 nt, Homo sapiens
ccggcccggcccgcccggcggcccagccggggggccgccagacaagccaggagcccggaagacagccgcagggcagacaccacac

SEQ ID NO: 192318 - RNA, 66 nt, Homo sapiens
ggaaaagagcacagaggaagaaacgaggaccggcagcgaagagcaggacacgaggccccaggagca

SEQ ID NO: 192319 - RNA, 67 nt, Homo sapiens
acacacggccaagcccaaacaaggcagccagacagcaagagcggcaagaccacaggaagggcgagaa

SEQ ID NO: 192320 - RNA, 84 nt, Homo sapiens
acaagcacccaagagacaagccccaaaacagagggagagagacggcagagggaggggcggacaaccaggagggaaacaggacgc

SEQ ID NO: 192321 - RNA, 71 nt, Homo sapiens
agccaaccacacaaaggggggcaggggcagccacgccccagacggggcacagccccccaagccgcgcgaca

SEQ ID NO: 192322 - RNA, 74 nt, Homo sapiens
gcacccggggggcagcgaaaggacacaaggcacgaggacgaagaggaaaggggccacgaggaagacgggaggga

SEQ ID NO: 192323 - RNA, 77 nt, Homo sapiens
accagccggacggcggggccgggcccccggccgcaagcaggcaccggcccgaccagccacgacacccacgaaaggac

SEQ ID NO: 192324 - RNA, 75 nt, Homo sapiens
ggccaggaaaaccagcacagaaaaaaggcacccacgcgccaaccaaaacccggaagaagacggcacgggaccccc

SEQ ID NO: 192325 - RNA, 68 nt, Homo sapiens
cccgggaccggcgcccccccggcccagggggaggcggcgcaacgcggggaaagcaaccagggggcacg

SEQ ID NO: 192326 - RNA, 102 nt, Homo sapiens
ggacccgcggaagccggcagcggagaagcggagcgaggacgaaggaccgcaggccaggacacgcaagaccgaaggcagaaagaaaggcgagcgaaggaagga

SEQ ID NO: 192327 - RNA, 74 nt, Homo sapiens
gacaggaccgcaagcccgcagggacgaggccccaaggacgggcacggagccgcagccaaaacagcagcaaacag

SEQ ID NO: 192328 - RNA, 74 nt, Homo sapiens
cagagggacccaagagaggagcggagaaacgggaaggccacggcccgccgcagcaagagagagcaaggagcagg

SEQ ID NO: 192329 - RNA, 83 nt, Homo sapiens
ggaaagccaaggaaaaacggagagccacaaaaaaggaagcgaaagaccccggaggaaaagcggaagcggcagcggcgaacgcc

SEQ ID NO: 192330 - RNA, 61 nt, Homo sapiens
gggcggacgacccagccggggggcacagccggaagaccagaagagcagccagggggggcaa

SEQ ID NO: 192331 - RNA, 82 nt, Homo sapiens
gcccggccacccaccaccagagccagcggaccggagcgcaccgagcggagcagagggggccgagggaagcacgaggggcgac

SEQ ID NO: 192332 - RNA, 81 nt, Homo sapiens
ccagcaccaccccacggccagggccaccaaccccaacccggagagcggcgagggagaagggagagccagcagaaagccaca

SEQ ID NO: 192333 - RNA, 72 nt, Homo sapiens
cagaaggggagaaggcaggcaccacaaaaaggacagggaggagcaagaagacacagcaacaagacagaaacc

SEQ ID NO: 192334 - RNA, 75 nt, Homo sapiens
gaccgagagcggaccgagagcgcgaaacgcacgagaagggagaagaaaaagcagaaaggaacagaaaacaaaaga

SEQ ID NO: 192335 - RNA, 57 nt, Homo sapiens
gccccaacgaccacgcaagccaccggacggggagaaggaacaaaagcgggcacagcc

SEQ ID NO: 192336 - RNA, 70 nt, Homo sapiens
gcagcgcaccagacacagagcacaaagagacggccggcaacaagcgaggggggaggccaggcgcccagaa

SEQ ID NO: 192337 - RNA, 59 nt, Homo sapiens
cagcgggccccgccaccggcacaccgaaggaccaggagaagacgaaccgaggggacggc

SEQ ID NO: 192338 - RNA, 75 nt, Homo sapiens
aacaaagcgggaccagagccgcaagggaacgcaggaagaagcccaggacaagcagggagcgccggacacaagggc

SEQ ID NO: 192339 - RNA, 56 nt, Homo sapiens
agaggcgcggcaagacacacgacgacaagcagaccggaagaccgacggaagaccac

SEQ ID NO: 192340 - RNA, 76 nt, Homo sapiens
agcccagggaagcagccgaccagccgcggagccgggggcagcagccagagcggagccacacaccgagggagagaag

SEQ ID NO: 192341 - RNA, 67 nt, Homo sapiens
cccgacaggaggccggccgcgggaggcagcgcaccaagaaggaccgccgggagagccgcccaccccc

SEQ ID NO: 192342 - RNA, 72 nt, Homo sapiens
aaggaccaagaaccagccaccacaaggacccaacaccgcacccccacggagcgcccccggcgccggccagag

SEQ ID NO: 192343 - RNA, 59 nt, Homo sapiens
agccccccgcccggggagggcaccagaacaaagaagccacagacaaagagggaggaaca

SEQ ID NO: 192344 - RNA, 61 nt, Homo sapiens
accccacgccaccaccaccccgaaccccccagacccaacagaggaagccgcaagaaacggg

SEQ ID NO: 192345 - RNA, 75 nt, Homo sapiens
gccggggcggccggccaggaaccacccgaagggaacggagggaaagcgacaaacaaccaacccacagagacccag

SEQ ID NO: 192346 - RNA, 38 nt, Homo sapiens
gacacgggcggagccagcccacaagagagggaaggaga

SEQ ID NO: 192347 - RNA, 88 nt, Homo sapiens
agcaacaacagagagcacggcgggcagaggggcaggagccgccgacccagccgacccacgggcagcgcgcgaccaacggggaccccca

SEQ ID NO: 192348 - RNA, 86 nt, Homo sapiens
gacccagcccaccaggcagcagaaaggaagagagaagggcacagaccaagacaacgaaccccggccaggacaggcccccacggaac

SEQ ID NO: 192349 - RNA, 73 nt, Homo sapiens
ccaaccgggcggcaagcaccagcagggaaggagaagagagcaaggagcgagccaaccaaagaccccgagcgac

SEQ ID NO: 192350 - RNA, 81 nt, Homo sapiens
ggagcccaagaaaacaagcaaagccaccaaaacgcaaggcaggcgaggaaagcggccccgccccagaggaacgaagaaaga

SEQ ID NO: 192351 - RNA, 62 nt, Homo sapiens
cacggcccgcacaacacacagaacagcccgggcccccacagcccagcccaaagccccacccc

SEQ ID NO: 192352 - RNA, 76 nt, Homo sapiens
accgccccgggccacaacggggccggcaagaccaccaccccccggccccgggcccgcacggcccaccaccgagcgg

SEQ ID NO: 192353 - RNA, 75 nt, Homo sapiens
gaaggcccagccgcgcccggagaagccgggcagagcgacaacaacggacgcaccccagagaccacccagggaaca

SEQ ID NO: 192354 - RNA, 57 nt, Homo sapiens
gaaggaagcaagccgggaagcccaaagcaagaagccggagagaggaaaaaagagacg

SEQ ID NO: 192355 - RNA, 81 nt, Homo sapiens
caccacagagaccggccaaaccacccagcaggggacggggcggggcaccaccccgaacagcccaagaagagcagccacaag

SEQ ID NO: 192356 - RNA, 114 nt, Homo sapiens
ggaaacagcaggaggaaaaggagaagcacggaaaagcagcacaccccggccaaaagaaacggccacgcagaacaaaagacgcacagagacggaccaaagagcgacgaggagaag

SEQ ID NO: 192357 - RNA, 48 nt, Homo sapiens
ggaggcacacaccaacgacagggagcgaggaggacacaggaccaggaa

SEQ ID NO: 192358 - RNA, 56 nt, Homo sapiens
agcaacagacggccaacacaacaaaaccaagaaggggaagagggaaaggaagggag

SEQ ID NO: 192359 - RNA, 36 nt, Homo sapiens
ggccggcgggggacgagcagaacaccagaagcagcc

SEQ ID NO: 192360 - RNA, 79 nt, Homo sapiens
gaaggaaaaaaaagaagagaagcgacacgagaaacgacacaaaggccagacagaagggggggcacgggaacccagagaa

SEQ ID NO: 192361 - RNA, 74 nt, Homo sapiens
agcaacccgaaaagaaaccacaagccgccgggaaccaaaggaagaaggcggcgcacggagaggcccgcggaacg

SEQ ID NO: 192362 - RNA, 81 nt, Homo sapiens
gagcggcgcgggacgcgaggccgggaccgaccagcgggcagcacgcacaaggaggagcagcggcccccggcggaggcagcc

SEQ ID NO: 192363 - RNA, 78 nt, Homo sapiens
cgcccgggaccgagcacccgccccgggcaccaacgccccagggaaaggaccgaggcaggaaagaggccagacgcaggg

SEQ ID NO: 192364 - RNA, 79 nt, Homo sapiens
aaggcgccgaagaggacgaagcggaagaaacccgaagaacgagaagcccaaagaggccacaggcagaaaggacaaggac

SEQ ID NO: 192365 - RNA, 83 nt, Homo sapiens
gcgccgcgggaagaccgaggggcacaccgaccagccgcacgccgaccggcgccgggagaccgggagacgagcgccaaagacag

SEQ ID NO: 192366 - RNA, 85 nt, Homo sapiens
gggaggaacaagaaaaccggcccgaggggacgggggaacccggggccagaggggacagagcacaggaaagggacccccacagcac

SEQ ID NO: 192367 - RNA, 84 nt, Homo sapiens
gggcacgccacggggaacgggcacacgacaggcccggccagagcggcaagcaagaccacacccagaagggacacagcaggacag

SEQ ID NO: 192368 - RNA, 81 nt, Homo sapiens
ccccaccgcccgggcccgaggaggcagccaagccgagccgccacccggcgagcaccacggggcccggcgacaggcaaacaa

SEQ ID NO: 192369 - RNA, 69 nt, Homo sapiens
gcaagcaacgaagacaggggccaggccaggggcaggggaagcacccaaccaacgagcgggccacacagc

SEQ ID NO: 192370 - RNA, 81 nt, Homo sapiens
agggaacgaagggccgaccaggagacgaggacacggcccccgacgacgaccaacacaagggggggacagaggccgggcggg

SEQ ID NO: 192371 - RNA, 75 nt, Homo sapiens
caaagagaaaccaaggagagcaaacaggaaacggacagaggaaaaccagcaggaaaaagacacaccagagccaga

SEQ ID NO: 192372 - RNA, 96 nt, Homo sapiens
agaaaggcggggcaccgcgcagaagagacaacacccgcagcccggaccgacaggaaagaaggagcccacaaagaaaagaacaccgccagcagccag

SEQ ID NO: 192373 - RNA, 54 nt, Homo sapiens
cccccagcggggcggagcgaccccgcggggcgcggacaaaaacgcggaggggac

SEQ ID NO: 192374 - RNA, 81 nt, Homo sapiens
agggacgaacggggcggggacaggcacgggggacggcagcgcgcaggagacaagaaagagcgaagacacgggaaaggaaaa

SEQ ID NO: 192375 - RNA, 70 nt, Homo sapiens
cacgccggaaaaggccgaagggcacgaaagaggcaagagagccagccagcaggcaacaggcccagaccag

SEQ ID NO: 192376 - RNA, 58 nt, Homo sapiens
caccaaagcaaggacagggcaaacacgcagacacaggaaccggcccgaagccgaaagc

SEQ ID NO: 192377 - RNA, 75 nt, Homo sapiens
gaacgcacgccgcggcccaaaagcaagcggaaggcgaaacaaacaaacggcggacaaaagggagcggcgggcagg

SEQ ID NO: 192378 - RNA, 66 nt, Homo sapiens
acagaagcccacacgggcacaggggccccgccagcaaggaggagaacagaagcggagaacacaaag

SEQ ID NO: 192379 - RNA, 82 nt, Homo sapiens
agcgagcgagaagaggaggacaacagcacaaccggggacacacaccagagggagcaccgacggcaacacggaggggccgcgc

SEQ ID NO: 192380 - RNA, 67 nt, Homo sapiens
aagaaaaacggaacagagccaaagagcaggaacaggacggggcgcggacaaaccaggaagcagggac

SEQ ID NO: 192381 - RNA, 71 nt, Homo sapiens
cagaagggacagcaaacccccaaagaagcagggagaccgcacaccaggggagggaaccagaggggccaaag

SEQ ID NO: 192382 - RNA, 67 nt, Homo sapiens
accccaagcagcagcagccggcagcaggcaaaaaggaggggaagcacggaaacgacggacaaagaca

SEQ ID NO: 192383 - RNA, 57 nt, Homo sapiens
gcagggcagaggaccaggacgcggaacagagacaaaggacccagaaggaaagaaacc

SEQ ID NO: 192384 - RNA, 82 nt, Homo sapiens
cccagcgcgcgcaggaccccggcggcgcgcggaccagggggcggcgccaggacaggaaggaaaagcgagcgagcccaggccg

SEQ ID NO: 192385 - RNA, 77 nt, Homo sapiens
ggaagaagagcaagaaccagagcaaccaggaaaagccgggccacagaagcaccaccacaagccacaccaacaaacga

SEQ ID NO: 192386 - RNA, 37 nt, Homo sapiens
agaggcccgaagcacaaagcaggagcgccggcccagg

SEQ ID NO: 192387 - RNA, 35 nt, Homo sapiens
acacaacccgacccgacgaccgagaagaaaccgca

SEQ ID NO: 192388 - RNA, 79 nt, Homo sapiens
gacaccggaagccggaaaaggcagaggccaaagagggacaaggaagccaggcagggaccacagaagggcacccgcggac

SEQ ID NO: 192389 - RNA, 70 nt, Homo sapiens
gaagcgaaaaaagagcacggaggaagcggcaggcccgacaggggaaacacaccaaggcggagcggaacgc

SEQ ID NO: 192390 - RNA, 62 nt, Homo sapiens
aaagaagcccggaccggggcacaaaaggacagaaaagcccaggaacacagaccaccaggagc

SEQ ID NO: 192391 - RNA, 72 nt, Homo sapiens
gaggcgcccccgggggcccgacgcacacgggggcggacaccacaagaagggcgccaggacccgagacagaag

SEQ ID NO: 192392 - RNA, 86 nt, Homo sapiens
gggacggaagaggcagaggaggcagaaaagaccagaaaagacggagccaccaccaccccgagagacggaccggaccacccccaggc

SEQ ID NO: 192393 - RNA, 85 nt, Homo sapiens
cacccagcggacccggccaggccaggcccggagccgccccagccacaggacaccggaacacgggggcaacggcccggagggacga

SEQ ID NO: 192394 - RNA, 33 nt, Homo sapiens
gccaggggaccggacagagggcaaaacacagaa

SEQ ID NO: 192395 - RNA, 71 nt, Homo sapiens
agagcacgggccagagcccccagcacaagaaggaaggcacaacggcaagcaccggcagaccgagcaggaga

SEQ ID NO: 192396 - RNA, 64 nt, Homo sapiens
ggcggcggacaggcgacagcgaccgcggcaggggcaccccaagagaccaacgcccagacaggcc

SEQ ID NO: 192397 - RNA, 74 nt, Homo sapiens
gccgagcaacaggagggcgaccacaagcaaacagggggaccagcaggcggcggccgacgcgcagcaccggaggc

SEQ ID NO: 192398 - RNA, 73 nt, Homo sapiens
cagcagagcgaagcccagagacagacgagaagacagaagacccccgccagacaaggcaaccaaggccgaccga

SEQ ID NO: 192399 - RNA, 72 nt, Homo sapiens
accccagccgggcaagaggcggaggacacggacgggcaagccacagaggagcggagcgaagacgcacaaagg

SEQ ID NO: 192400 - RNA, 79 nt, Homo sapiens
caaacccccgacagcgccaggcccagacgccaacgcaggagcacccagacaagcagaccggaagaccgacggaagacca

SEQ ID NO: 192401 - RNA, 82 nt, Homo sapiens
cgcggaaggggaccacggaccaagcgaggaaaaggccgggccggcagggacgcgggcgcgcacggcgacgcacacagagcgg

SEQ ID NO: 192402 - RNA, 63 nt, Homo sapiens
accagacccccagcacgccagggaaaccgaaacccccacagcgcagaaaacacagagaaaaca

SEQ ID NO: 192403 - RNA, 70 nt, Homo sapiens
agaggacaacaaaggcacccgaggcacgaaaggacagccagacaagaccccaacgaagggccagaaaagg

SEQ ID NO: 192404 - RNA, 73 nt, Homo sapiens
cccgggaagggaacagagcagacccggacggaacaggcaaaagaaagacggcagcgaacgagaagagcaaggc

SEQ ID NO: 192405 - RNA, 79 nt, Homo sapiens
ggccagagggggccgccgcggcagcaagaacagagagagaggggacagacgagagaacgaggcagggccgccaagaccg

SEQ ID NO: 192406 - RNA, 51 nt, Homo sapiens
gacgggcagggcccagggggaaagcccaccgacacccagaacgggaagcgg

SEQ ID NO: 192407 - RNA, 77 nt, Homo sapiens
aaggcagcggccacagaacaggcccaggaggaaagaggggccaccacaaaagcaaaccaaccaggcggcaaacccag

SEQ ID NO: 192408 - RNA, 78 nt, Homo sapiens
ggacaacacaccgccccgccgagacaccgcccgcccgagaacaccaggagacacaaggaagcaaagaaacacgaaagc

SEQ ID NO: 192409 - RNA, 102 nt, Homo sapiens
ggaacaccccgggaagcgccggggaagcagaagcacagggcacgccaacccaggaagggaaaaggccgaggcacagcgggaagaccgcaaagacgacccgag

SEQ ID NO: 192410 - RNA, 77 nt, Homo sapiens
ggggagcaagggcaagagccacaaagggaccgagaagcgaagacaaggacagcagaccacagcccggcaggcccaaa

SEQ ID NO: 192411 - RNA, 81 nt, Homo sapiens
gaccaagcgcccaagggagcgcgggggcaggagaggagaacgccagaaacgggaggcaagcaggggggcaaaggaaagaag

SEQ ID NO: 192412 - RNA, 73 nt, Homo sapiens
gagcagacacaacacaggggaagaccgggaggcaacgaggcaccagggaacccagaaaccgaacagcggcgcg

SEQ ID NO: 192413 - RNA, 48 nt, Homo sapiens
cgagcaagcacaccgaccacaacgccggcacgagagagcgggaaagag

SEQ ID NO: 192414 - RNA, 82 nt, Homo sapiens
cgaagaggcgaccgccagacggagcacacggacaagccacgaggagggagaaccgaggagcagccacaagggacgagggcag

SEQ ID NO: 192415 - RNA, 84 nt, Homo sapiens
gggaagaaggcgcggggcaggagcgacagaggagggaaacgcggagccaggccgagagcaccagccagcccgaggaagacggca

SEQ ID NO: 192416 - RNA, 75 nt, Homo sapiens
aggagccaacacaccagcagagggaaagggccccaagagccgggcggaaaacgaaagcgagcggaacgggacacc

SEQ ID NO: 192417 - RNA, 39 nt, Homo sapiens
gagggacccgcagggagccaccgaagagccaacggacca

SEQ ID NO: 192418 - RNA, 74 nt, Homo sapiens
gcgaagccaaggcaagcaagagccggcggcccgccgcgccacccgggaacgaagggaaaacggcgacagcgggg

SEQ ID NO: 192419 - RNA, 76 nt, Homo sapiens
gcccaccgaccggcccgagcgccccggcgggagggagggcgaagaaccgaagaacacccagggccacacaaaaaaa

SEQ ID NO: 192420 - RNA, 81 nt, Homo sapiens
aagacccaaggagggccaagccagggaaaagagaaccaaggcggcagggagaaaggagcaaggggcccaaacgacccacgg

SEQ ID NO: 192421 - RNA, 67 nt, Homo sapiens
gggcggccacggccaacgccgcgcccgcggagggaaaaggcccggaagcacagcagggaaagcacag

SEQ ID NO: 192422 - RNA, 74 nt, Homo sapiens
gaagccaccgggacgggcacggggaaccacaggagaaggggaggcaagcaggggggcaaaggaaagaaggcaga

SEQ ID NO: 192423 - RNA, 72 nt, Homo sapiens
ggcgagggaggcagcagaccgcacaaccccagaagcgcgcccgggagacaaggccgacgcgcacgaacacgg

SEQ ID NO: 192424 - RNA, 85 nt, Homo sapiens
gggagggcgccaccggcgccggaggccgaagggccagaagagcaacgacacaacacagaacagccgcaaaacgagacaaaaacga

SEQ ID NO: 192425 - RNA, 88 nt, Homo sapiens
cgcgcccggccgcgccggacgacggaaggagaaacgacaggcaacaagacaagcggcggggccccgggcaccgacgagagggcgcacc

SEQ ID NO: 192426 - RNA, 77 nt, Homo sapiens
gagaaccgacccagaagaggggagcgacgaaggccaggaggcccaggaggccgggggacccagggcgcagggaggcc

SEQ ID NO: 192427 - RNA, 55 nt, Homo sapiens
ccacacacacagcagagcaaaccagccggcgggcgccacaacggacgacgaaaac

SEQ ID NO: 192428 - RNA, 69 nt, Homo sapiens
gcccacgaacccgaagcccccaaagagagaaccggagagcacccaacaaacgaaaacaaacggaagaga

SEQ ID NO: 192429 - RNA, 60 nt, Homo sapiens
cacccggcggccccacgcagccacccaaaaacaggcgaacagaagacaagacgaaaacgc

SEQ ID NO: 192430 - RNA, 78 nt, Homo sapiens
aagaagggaaaaaaggaagagggcgaaagacgcaccggcacccaaccaggagggacgaaagccagggccccgaggacc

SEQ ID NO: 192431 - RNA, 71 nt, Homo sapiens
ccccgaaaccagaagggggaaaggcccgggcgcacgaccgcggcccggcagcacccgaggaggagcgaaac

SEQ ID NO: 192432 - RNA, 77 nt, Homo sapiens
cgcaggccgccgcgcgggcggcacccccgcagaaggagcgggcaaaaccaaaggaagccgaaggagaagcacacagg

SEQ ID NO: 192433 - RNA, 77 nt, Homo sapiens
gcagcaggaggacgagcaccaggacacgggcggagccagaaggggaggggccagaaccagcaccagaaagaggaaac

SEQ ID NO: 192434 - RNA, 44 nt, Homo sapiens
cgagacccagcacacgccgaccagaacacagcacggaaggccaa

SEQ ID NO: 192435 - RNA, 73 nt, Homo sapiens
acgccaaggaccacccgcccagagcagcagaacagcacagggcggagaacggaaaagcaccaggaagcagaga

SEQ ID NO: 192436 - RNA, 69 nt, Homo sapiens
gggcaaacaagccgaccggaaaaaggacaaaccggcgaccacacacggggacgacggggaagccggaca

SEQ ID NO: 192437 - RNA, 73 nt, Homo sapiens
gcggaagaccgccaaaaaggacacggagccagccaagcaagcgcaagcaggaggaagaacaaagaccaaggaa

SEQ ID NO: 192438 - RNA, 65 nt, Homo sapiens
ccgccggaccccacagcaacaaggacagcccaggccaagacagcagccacgaggaaaaagaaggg

SEQ ID NO: 192439 - RNA, 62 nt, Homo sapiens
cacagaaacaaaagcaacaaagaggaaacccacagacaaagggaagaacaaacccagaaccc

SEQ ID NO: 192440 - RNA, 86 nt, Homo sapiens
cccggagagcggcgcgcaggcaggccggaaggaccaggcagggagcaggacaggaagcagaaggccaggaaacccaccagaggaac

SEQ ID NO: 192441 - RNA, 74 nt, Homo sapiens
caacaggggcagaagccaagagggaagcgagaaccaggaacgaagaacaaaggggaaaggcaacaagacagcgg

SEQ ID NO: 192442 - RNA, 74 nt, Homo sapiens
gggaagccaaaacaaggccagcaacagaagaaagcaagcaccggggaaagcggcccgaaacaagcagaagggag

SEQ ID NO: 192443 - RNA, 37 nt, Homo sapiens
acgagggcgggaaagcagggaaaagccaagaaagacc

SEQ ID NO: 192444 - RNA, 76 nt, Homo sapiens
cggagacaaccgcagccccggcaccaaagaagacaaaggggagcaggacagaaccaagaccgaaggaagcaagccc

SEQ ID NO: 192445 - RNA, 61 nt, Homo sapiens
gaggcaggcggagccgaccgggccagggaaaaggcacaccgaccagcaaaagcaggaccac

SEQ ID NO: 192446 - RNA, 75 nt, Homo sapiens
caggagccaccagagggagaagaaacagaacgccccacgaggcggcgccgcgaaagcggcagacaaggcccaaag

SEQ ID NO: 192447 - RNA, 67 nt, Homo sapiens
gggggacaaaaaagaccagaagaggaggggacccaaccaggaagcggagcacgggagaagaacagaa

SEQ ID NO: 192448 - RNA, 78 nt, Homo sapiens
aggaccaggagaaagaggaagagagacgggaaccgaggacacagggcccccccagggaggcccagcgaagagaaagaa

SEQ ID NO: 192449 - RNA, 47 nt, Homo sapiens
ccagcccaaacgggcagcgaagggaagagagaaggccacgcccgacc

SEQ ID NO: 192450 - RNA, 73 nt, Homo sapiens
acaagaagagacgcagaccagccaggaacagacaaagcagaccagcccaccgcacccagggaaaaaacagcag

SEQ ID NO: 192451 - RNA, 76 nt, Homo sapiens
ccaacgcagaccgaggcgaagcgcgcagcgccggacagaccccaacaccaacaagacgaaaaacggaagaaggggg

SEQ ID NO: 192452 - RNA, 86 nt, Homo sapiens
gccgaggggagggggagaagaggaggaggacgaagcgagagagaaaagaaccacaggggcacaacgaaacagccaggcagaaacag

SEQ ID NO: 192453 - RNA, 58 nt, Homo sapiens
cgaggagcaacccagaacgcccaaaacccgccggaccgaagaaggggcaagcaccaac

SEQ ID NO: 192454 - RNA, 79 nt, Homo sapiens
cgcgggccagccaccgggccggccaggaacggggaagggagaccgcgagacacggccggccccacacacagcccccgcg

SEQ ID NO: 192455 - RNA, 84 nt, Homo sapiens
caggcggaggcccccgggcaagaggcgcaaacaagccaacccaggaggaaaaacgggaggaaaaaggaacaagagcaagaaaaa

SEQ ID NO: 192456 - RNA, 90 nt, Homo sapiens
gcgagaccggagagccgcaggacggcgcggcagagccccgacgccacagaacgcaggaggcaaagggaccccaagaaaccaaagggcaag

SEQ ID NO: 192457 - RNA, 63 nt, Homo sapiens
aggaccggggacaacacaggacaggcccagcgaaggcccgggcggcaggacacgagacggcga

SEQ ID NO: 192458 - RNA, 74 nt, Homo sapiens
gccggacacggggacggccccccgccaaacggagcggaaagaagcggagcgggccgcggagacgcaggggggag

SEQ ID NO: 192459 - RNA, 78 nt, Homo sapiens
agccggcaggacggaaggggaagaggcccacccggagaaccccacggagaaccagaggcgcggcgcagcagcagcggg

SEQ ID NO: 192460 - RNA, 84 nt, Homo sapiens
aggagaccgaggggcaggaggcaaaagggaggaagaaacggcgacgaacaagaaaaagaaacaccgaaaagcaagagccccaac

SEQ ID NO: 192461 - RNA, 70 nt, Homo sapiens
gacaaacagaagcacagaggaagacagaaaacccgaaagaaggaaaggaagccagaaccgaaaacccacc

SEQ ID NO: 192462 - RNA, 78 nt, Homo sapiens
gaggggaacaagcaacgagcacaagcccgggggaaaggcagcgcgcagcagcggcacacaagccaaacagagagaagg

SEQ ID NO: 192463 - RNA, 77 nt, Homo sapiens
cccgggacccccccggaccgagccgacgccgcggggcagcgggccggcgccggcgcggcgagaacaggggacccaaa

SEQ ID NO: 192464 - RNA, 75 nt, Homo sapiens
aggggcgggagcacccgagaacggccgcaaaagaggacagaaggggcccggacgaccccagaagaagcacaagcc

SEQ ID NO: 192465 - RNA, 75 nt, Homo sapiens
ccgggaaccaccggcacgccaagacaggaacagagacgcaggcaagagcgcggaggagagagccaaaagaagggg

SEQ ID NO: 192466 - RNA, 65 nt, Homo sapiens
ccagcgccggaaaccaacaagaaaaaacccagaaacaacaaaaaaccccgggccgagagacggaa

SEQ ID NO: 192467 - RNA, 76 nt, Homo sapiens
caaaagacgaaggaccccaaccaagaacaggccgagaaccaagcggaaaaggaaaccagaaaaacggagccgaacc

SEQ ID NO: 192468 - RNA, 75 nt, Homo sapiens
aaagcgaaagcacaccaagcgaagcaaaccaacaccccccgggaacaagaaggcagcacaccccccacaacaaag

SEQ ID NO: 192469 - RNA, 69 nt, Homo sapiens
gacgccacaaacacccaccacagcagagagcggagaacagccgggagcacgccagcagcccccgcacga

SEQ ID NO: 192470 - RNA, 76 nt, Homo sapiens
aaaggcacgaagaaaagagaaggaaaaacagaacggcaaaccggaaaaaaacgggggcagccaccagggaccaacc

SEQ ID NO: 192471 - RNA, 66 nt, Homo sapiens
aacccgcgcgacaaaaggaccagacaaacaaaaggggaccgcacccagaccaacacagcagcaacg

SEQ ID NO: 192472 - RNA, 41 nt, Homo sapiens
gaaaaagggccaggccccagcccagccccccaacccgagga

SEQ ID NO: 192473 - RNA, 70 nt, Homo sapiens
gggaccggaaagcaccccggccacagcggggcagcaaagcacacaccccagacaccccaaaaggagagaa

SEQ ID NO: 192474 - RNA, 79 nt, Homo sapiens
gaagagagagaagagggcagagccggcaggggcgcccccaggaccgagcaggaaccggagcagcggagcaacaccccgc

SEQ ID NO: 192475 - RNA, 79 nt, Homo sapiens
gggcggggcggaggcgaggagaaggaggagcgggccgggaggccgccgccagagcccaaaaggcagagcgaggagagaa

SEQ ID NO: 192476 - RNA, 75 nt, Homo sapiens
gacaacagacccggcgcggcgccccgggcccagcacgcggggcaggcggcgagcagaacaaggagaaagaccaag

SEQ ID NO: 192477 - RNA, 71 nt, Homo sapiens
gaaccagacaggagaagaagggaaaaacggagcaacgcaaggcaggcaacaagaaacagcagacaaggagc

SEQ ID NO: 192478 - RNA, 89 nt, Homo sapiens
cgcgccagccggccgcgaccgccgccgcgccgccgcgccccaacgccagcgccgccccgccgccgagcccagccgaaggagaagggggg

SEQ ID NO: 192479 - RNA, 68 nt, Homo sapiens
aacaaagcaacagcaagccacaaagccaacaagccccggcgcaggaacacaggacggccgaacacgac

SEQ ID NO: 192480 - RNA, 74 nt, Homo sapiens
agacaacccaaggcggcaccacacaggcgggacagggagaaagaaacccgaagacaacacacagagacacccgc

SEQ ID NO: 192481 - RNA, 79 nt, Homo sapiens
cggagggggagccaaccagaaaagggcggggcggaacaagaggacggggaaggaggagacgcgaaggaaagacccgcag

SEQ ID NO: 192482 - RNA, 84 nt, Homo sapiens
cagcacaggcacagaaggccaaaaaggcaaccacagagagagagagggagggacacacccgaagcagcccaccacggggcagaa

SEQ ID NO: 192483 - RNA, 76 nt, Homo sapiens
agagcagcacccagcaccagcacgaaaaaagagaggaagccccgccgcagggcacgaccaggaggacgcacgcgca

SEQ ID NO: 192484 - RNA, 78 nt, Homo sapiens
ggggaagaagggaacccagccccgcccgggagaggaggccagcagaagcagcggccccgcgaagcggagaacacccac

SEQ ID NO: 192485 - RNA, 69 nt, Homo sapiens
gaccggccgcgacagcgaacagcgcggccgcaggagaagacagaggagccagaccaagagacagcacag

SEQ ID NO: 192486 - RNA, 77 nt, Homo sapiens
ggcggcgcaccagcacccgcccacacccagagagcccagggacgaggagaacgccaccaggccaccccaggaaagcc

SEQ ID NO: 192487 - RNA, 70 nt, Homo sapiens
caccagaaacacagccagacacggcccgcacaccggcacagagacccagaccaggcacaagggacagaca

SEQ ID NO: 192488 - RNA, 72 nt, Homo sapiens
ggaggcgcccccggagccgccccggaggagaagaaacagccaacccgcaacaacggcagaagaaaagcccgg

SEQ ID NO: 192489 - RNA, 36 nt, Homo sapiens
gcagagcacaagcagagcccaagggacaagaaagga

SEQ ID NO: 192490 - RNA, 77 nt, Homo sapiens
ccacggcccagccgaagcccagccgccaaacagacccgagacccagcagccccacggagccgagacgcagcggcgcc

SEQ ID NO: 192491 - RNA, 55 nt, Homo sapiens
gggaagccaccccagaacaaaaacccgcaaaggggacagaggagccaaaggccaa

SEQ ID NO: 192492 - RNA, 80 nt, Homo sapiens
ccgagcacccaggcgacgcccaccaagaaacgggagagaccaaagacggccccaggaagcagaggaacgacgggagaggg

SEQ ID NO: 192493 - RNA, 78 nt, Homo sapiens
ccggagggacgcaaaagcccagggagcggcggcagcaggggagaagaaccaaacaaggaaaacgaacaaaaacagggg

SEQ ID NO: 192494 - RNA, 80 nt, Homo sapiens
ccgcaaggccggcgcggaggaggggagcagcgcgcaaggccccaagggaggcggcagaggacaccggggacccggagcca

SEQ ID NO: 192495 - RNA, 79 nt, Homo sapiens
gaaacgagagagaagaaggcaacaaggcaacagagaaccacacagaaggagcggaagcacaaagccgagcagggagagg

SEQ ID NO: 192496 - RNA, 52 nt, Homo sapiens
agcgagacgggaacagaccccgcaaagaggaccggacacagacaaaaaaagg

SEQ ID NO: 192497 - RNA, 59 nt, Homo sapiens
aacccgaccaggcagagccaggaaggccaaagaaagacaagagcgagcacacccccccc

SEQ ID NO: 192498 - RNA, 66 nt, Homo sapiens
ggcagagggaacaggcagcaggaagcacggcgggcgaaacagaaaggaacaggaagcagaagcaag

SEQ ID NO: 192499 - RNA, 69 nt, Homo sapiens
gggccgcacccccagagaaggcagaaacaaaaaagggagagaaaaagcccggcggggagggcacagaag

SEQ ID NO: 192500 - RNA, 83 nt, Homo sapiens
ggaaaaggagaaaggagagcgaaggccaacagaagaaaccggaaggcgaaacagcgcgccgaagagcggaaacaccgcggaag

SEQ ID NO: 192501 - RNA, 79 nt, Homo sapiens
cgcaccaccgggcccaaggagcccgcacccgcggacaagacgagagccaggcggagaacgggcgcggaccgaccaccgc

SEQ ID NO: 192502 - RNA, 53 nt, Homo sapiens
ggggcaggaggcgcggacacgcaaaccacacaagggccgccacagcgagagac

SEQ ID NO: 192503 - RNA, 79 nt, Homo sapiens
gcccagcggggccgacccgcaccgcccacccaccgggccgcagaaggacgccaaacaaggagaaagcgccacaagaacc

SEQ ID NO: 192504 - RNA, 65 nt, Homo sapiens
gaaaacaagaagaaacaagcacccgccgggccgaaccggaagggcaagggcccccggcccaggcg

SEQ ID NO: 192505 - RNA, 38 nt, Homo sapiens
aaagacacaacagaaagagaaccaggaaccgagaggag

SEQ ID NO: 192506 - RNA, 76 nt, Homo sapiens
ggcaggaagaccgacaccagccaacacgcgacaccagagacaaacagaagggaagggcaaaaagaagacccagcag

SEQ ID NO: 192507 - RNA, 82 nt, Homo sapiens
ccaaacccaaaccgcggcggcgacccaccacgccagccagagcaaggcaccggcaccggaccaacacgaaggagaaccgcag

SEQ ID NO: 192508 - RNA, 77 nt, Homo sapiens
gaacacagcgggaacgagaaaccacacagcacgaggaccgcgggcacgagcgaccagcaaggcgggcggcccaacag

SEQ ID NO: 192509 - RNA, 76 nt, Homo sapiens
cagaagagaaaacgccggaagccccaacaccagagcgcacaccggggcaaaagggacaagggaccccagaagggcc

SEQ ID NO: 192510 - RNA, 84 nt, Homo sapiens
gaggaaagacacaccaccaagaagccagcaagcggccagacacgcggcacaggagaaggaagcagagccaaagccgcaacgcgc

SEQ ID NO: 192511 - RNA, 76 nt, Homo sapiens
cgggccgcgcgcccgcgcccgcgccggcgggcccgccgcgcgccgcgcggcagccccacggcaccaacacggccca

SEQ ID NO: 192512 - RNA, 76 nt, Homo sapiens
acgggcagggcagccacaaagaggagcacgaggaaaccccccaggcaagaggcgcaggaccgggaagaccaacaaa

SEQ ID NO: 192513 - RNA, 62 nt, Homo sapiens
cgggccaaaggacgaagaacccacagaggcacggggccaaaaaggcacgagggaacgggaaa

SEQ ID NO: 192514 - RNA, 76 nt, Homo sapiens
gagacgaagagacaaaaggaaggccaggaacgggaccagaaccccgagggccggcgcagcccccgcgaggggcagg

SEQ ID NO: 192515 - RNA, 80 nt, Homo sapiens
ccacggccagagcccggagcaggaaaaacacagagacagacggcggcagggaccacacgcgaggccagcggaaagggcgc

SEQ ID NO: 192516 - RNA, 51 nt, Homo sapiens
ccgcgcgccacgagcgcaaaagccaggaaccagacgggaacggagcccccc

SEQ ID NO: 192517 - RNA, 70 nt, Homo sapiens
ccgggcacccagagcagggagggagggcgcccacgggccgcgggcccgccaccagccaaggacccagaag

SEQ ID NO: 192518 - RNA, 73 nt, Homo sapiens
ggccaagccgaacaccggccccagcccacccgaggggccaaccagggacaaacagcaggggccaagaaagaag

SEQ ID NO: 192519 - RNA, 59 nt, Homo sapiens
cggacgccggccgccgcaggaggaaacaggaacacgaaagaggaaaaacgcacaagaaa

SEQ ID NO: 192520 - RNA, 79 nt, Homo sapiens
ccgccgcgccgccacaggacaccagccgggcagccacaagcggccagggaagaaagggcaggcgagagagggggaacag

SEQ ID NO: 192521 - RNA, 75 nt, Homo sapiens
cgcccccacaggagccccacggaaacccccagcggaccaaacccaacaggggggaaaccggccgaaccccggcca

SEQ ID NO: 192522 - RNA, 72 nt, Homo sapiens
gcgggagaaaagaaccgacccacaccaagcccgccgggacccaccaagggcccccacgacgcaggcggacga

SEQ ID NO: 192523 - RNA, 57 nt, Homo sapiens
gcgaccaggacggaccgggggagccaaacaacagggaccaaaccacagcaaaaacac

SEQ ID NO: 192524 - RNA, 44 nt, Homo sapiens
cggaacgcccgccccgcagagagacaagggaggcgaggacggac

SEQ ID NO: 192525 - RNA, 78 nt, Homo sapiens
gcccgaagcggggaaggggacaagaggacaccgaacggaaggaccccgcaagccgagggagaaagaagcgccagagac

SEQ ID NO: 192526 - RNA, 67 nt, Homo sapiens
gcaagaccgggcccacgagacaacgaagagaggaaagaagcggaaaggagggagcacacaacaagga

SEQ ID NO: 192527 - RNA, 50 nt, Homo sapiens
aaacgaaaagaggcaagaacagccgaacagggcacgcccggagaagacac

SEQ ID NO: 192528 - RNA, 78 nt, Homo sapiens
cccggagaagagaaacaccggcaaagggccaaagcaggacgcgggcaggagaacggccggcaagaagagacacacccc

SEQ ID NO: 192529 - RNA, 80 nt, Homo sapiens
cacaaggagcgccaagagcagagcagaccagaagagccaccagggagcgaaaccaacaggcccgcgcgggagcgacacga

SEQ ID NO: 192530 - RNA, 77 nt, Homo sapiens
gcaaaccccaaaaacagaaggggaaaagcaccaaggggggaggggaacagcagcggagaacacggcagagacaaaac

SEQ ID NO: 192531 - RNA, 80 nt, Homo sapiens
cgagcgccgcggacgcgcacgagggacggggaaaggcagcgacacacaagagcaggaccaaacgcacaaagacggagaca

SEQ ID NO: 192532 - RNA, 84 nt, Homo sapiens
gacagcggccaacccccacccagcccagcaacgaccaaagaggaccaaggccaggagagaagaaagacgaagcccgaagcgaga

SEQ ID NO: 192533 - RNA, 72 nt, Homo sapiens
gagggccgagccagcccggcgcagaaagaggagcgagggggcaggcgcccgcaggacccacgacggcgaacc

SEQ ID NO: 192534 - RNA, 82 nt, Homo sapiens
gaagacggaccggccgggaagagggacagacagccagagggaaacgagagccagaagggaaagacagagcgagagcagggag

SEQ ID NO: 192535 - RNA, 67 nt, Homo sapiens
gcgcaaccagggagaagcggaaccacaaaaccaaacaggccagaagcgaccggaggggcagcggacg

SEQ ID NO: 192536 - RNA, 86 nt, Homo sapiens
cggcgagccaccggggagccaccgcccagcccaaaccaggagagcgagggagcgagcgggcagcgcgaggccgcggaacaccaccg

SEQ ID NO: 192537 - RNA, 85 nt, Homo sapiens
gcccgcggcccaggagggcgcaggagcgggacgagagcgccggaggccgagcggaggaaggacagaaaacgggccccagacacaa

SEQ ID NO: 192538 - RNA, 90 nt, Homo sapiens
gccacgggacggcggcgcggagaaggcaggcggccggggccgggccggggcacggcagaggcgccaagaagagccgcgcccgaggacccc

SEQ ID NO: 192539 - RNA, 59 nt, Homo sapiens
acgcacccgggcccacagggacaagaaaccacagagccgagaacagaaagggagccaga

SEQ ID NO: 192540 - RNA, 58 nt, Homo sapiens
aagaccaagaaggagaccaccagcagaggaacagaacaagggaaacagcaaaaggaca

SEQ ID NO: 192541 - RNA, 70 nt, Homo sapiens
gagcacggggcgagaggaaaccacggaggcacaaggaaggaagggaacacggacgacgagacacgaccaa

SEQ ID NO: 192542 - RNA, 68 nt, Homo sapiens
aagcaccccagagcaagagaggccagacccaaggccggacaaagcaaaccaaaggacaccccgagaac

SEQ ID NO: 192543 - RNA, 57 nt, Homo sapiens
ccgcgccgacagcacgcagagcggagaagccccagaccagaccccaacaggaacccc

SEQ ID NO: 192544 - RNA, 76 nt, Homo sapiens
cacacaacgagagccaagccacagagggacgagacacaggagacagggcggaaggagagcacccggcaaggccgcc

SEQ ID NO: 192545 - RNA, 55 nt, Homo sapiens
gaagaaggaacgaccgaagaaggacagaagaagagagggcgaaggaggccacaca

SEQ ID NO: 192546 - RNA, 78 nt, Homo sapiens
ggacacgggcggcgcggaagggagcgccagcaggccgggcgcagagaggaggcagagagccccgcgacgagagagaca

SEQ ID NO: 192547 - RNA, 79 nt, Homo sapiens
gccccccagggacaagggagacagaccggcccgacccccgcaggcccgggccccccgagaggaaggagagaaggccccg

SEQ ID NO: 192548 - RNA, 73 nt, Homo sapiens
ggaggccggggagccgacgccgggcggagaacggaaaagcaccaggaagcagagaggaccgcagaagggaagg

SEQ ID NO: 192549 - RNA, 54 nt, Homo sapiens
cgcgccccagaaggcagaggaacacaacaggaggagggagaggaaaacgggaaa

SEQ ID NO: 192550 - RNA, 56 nt, Homo sapiens
gccccggcccacaggggggggcaaacccgagagaacggaagccgaggccgccagcg

SEQ ID NO: 192551 - RNA, 76 nt, Homo sapiens
aagccaggggccccaccaggagccagggaggacgaagaaaggcagggagaccccaaggcaaaaccaccacacgaca

SEQ ID NO: 192552 - RNA, 75 nt, Homo sapiens
agagagcagcccggcagacgcagaaccaggcgacaagagaaaaagaaagaaaccccaaaaacaaaccgccaagag

SEQ ID NO: 192553 - RNA, 79 nt, Homo sapiens
ccggcagcacgaggaccccaaacagaccacccccggcgggccacccccaaccaggaccaaagacgaccaccaaagccag

SEQ ID NO: 192554 - RNA, 73 nt, Homo sapiens
gccaagccaagggagaccagccgagcgggccgacaaggggccaaaggaggaggagaacgacggagcaggaccc

SEQ ID NO: 192555 - RNA, 82 nt, Homo sapiens
cgcaaagcggagagcgcgaagcccaccgaaagggcgggacgaccccacaacccgagcgcccaagccccccgcgcagagggag

SEQ ID NO: 192556 - RNA, 57 nt, Homo sapiens
gccccgacggagcgccaggacgccacaacacagcagcccccaggagagcaggaaaag

SEQ ID NO: 192557 - RNA, 119 nt, Homo sapiens
cagcacgcagaggaaagccagacaaggacggagaaaggccacaggccccccgagaagggcccacggccgagcacccgccccagcgagccccggaaagagccgcaccccacgcacgccca

SEQ ID NO: 192558 - RNA, 40 nt, Homo sapiens
ggagaaccccacggagaaccagagaacgagaaggaaaagc

SEQ ID NO: 192559 - RNA, 57 nt, Homo sapiens
ggaaacgggagccaagacgaccaaagcaaaaaaaaggccagaggacaggccgagagg

SEQ ID NO: 192560 - RNA, 86 nt, Homo sapiens
cgggcgcgcaccgccgcccccccagacaagaggacaccgcggaggaagagccagccccgggcaacaaagggaaaggagaggagcag

SEQ ID NO: 192561 - RNA, 124 nt, Homo sapiens
ggaagcgcgaagaaccacgagagccccgaggagccagaaggggagagagaggacccaccccagaaccagacagcagccggggcaggcgggcagagggcagaggacacgcgaagacccggccggc

SEQ ID NO: 192562 - RNA, 81 nt, Homo sapiens
gccgcacgccggcggcaccaggccacccacccgacacagcggcacagcccagaagaaagaggagagacgcgaagacggagg

SEQ ID NO: 192563 - RNA, 54 nt, Homo sapiens
gagggccggcaggcccgggaaggggaagggacgcaaaaaggaagccccacaagg

SEQ ID NO: 192564 - RNA, 67 nt, Homo sapiens
cagggcaggaaaggagaacggaaaggcagcggacgaccgggaaccccggacaaaacgcgcaaaagga

SEQ ID NO: 192565 - RNA, 78 nt, Homo sapiens
ggaagagggagcaccacggaccccaaggaagccacggcagacacacaacccgacccgacgagcccaccaagccgagaa

SEQ ID NO: 192566 - RNA, 71 nt, Homo sapiens
cggagcaaagcgccgggggggggggccacgcaggggaggcgccgaggggcgagaaccagcgacggagcacg

SEQ ID NO: 192567 - RNA, 97 nt, Homo sapiens
ggccccgagcgaggacacagcccgcggaggcagcgacaagcagaccggaagaccgacggaagaccacaccccgagggagcccaggacaccacgagaa

SEQ ID NO: 192568 - RNA, 111 nt, Homo sapiens
ggccccggccacgaagcagcacgccaaagccaagaggagaagccacggcagcccaggggaaggggaggagacagcccggccagggaggagaccacgagggacgccaacccc

SEQ ID NO: 192569 - RNA, 37 nt, Homo sapiens
aaagaagccaaagggacacgaaccccacgaaacaggc

SEQ ID NO: 192570 - RNA, 77 nt, Homo sapiens
ggcgcgagacccgccggaggaacccggagggcagaaggagaggaaaccagcaggacccagcgcggggagcgggccac

SEQ ID NO: 192571 - RNA, 52 nt, Homo sapiens
cgcaccacacaacggcacgaagaggcaagaaggacaaggacacacgaaggac

SEQ ID NO: 192572 - RNA, 84 nt, Homo sapiens
gccgaagaagcaacaagccgagggacccaagggaccccccgaggcaggcggggagcgggaggaggagcaggagcgggaggagga

SEQ ID NO: 192573 - RNA, 83 nt, Homo sapiens
cccaccgcggcaccccccaacggcgggcacaccccagcgggcacgaccggccgcacgaggaagagagggccgacgagaggagg

SEQ ID NO: 192574 - RNA, 71 nt, Homo sapiens
ggcggagaggaccggagcggaaaacccgaaccgcgacagggcgggagaacgccgcccgacacaccgccccc

SEQ ID NO: 192575 - RNA, 73 nt, Homo sapiens
acaggaggcggcgggccccgcccgccgaagggaagaagcagcagcaacagccagagacggaggcccaaacaga

SEQ ID NO: 192576 - RNA, 89 nt, Homo sapiens
ccgaaccgggaggcccgccagaccagcaagaggaggggcccggagagggggaagggcccaaagccagaagagaggccaagagacgaacc

SEQ ID NO: 192577 - RNA, 36 nt, Homo sapiens
gagaacaagcaaccacacgaaagggggagccgccag

SEQ ID NO: 192578 - RNA, 78 nt, Homo sapiens
ccgcgggagccgaggcgccgaaggaccgacgcccggcaggacggggagcaacacagcaacaaagccaacccaaccgag

SEQ ID NO: 192579 - RNA, 82 nt, Homo sapiens
aacagaccgcccggggccccaggacggggacagggccgaagggcgcaaccaaccgggaggggaccagagccccagcagagca

SEQ ID NO: 192580 - RNA, 81 nt, Homo sapiens
acaaggaaacaaacaacaaaaacaaaagccagaaaaccccaaagcaaacggccaccaccaccacagacagagggaagagcg

SEQ ID NO: 192581 - RNA, 63 nt, Homo sapiens
aggaacgccggcccgagaaagcccgccagcagcgggaacgcggcccgcaagcgaagaacggcc

SEQ ID NO: 192582 - RNA, 49 nt, Homo sapiens
accaccacacaacaaggcggagggagcgacggaaaaccggcagcaggag

SEQ ID NO: 192583 - RNA, 52 nt, Homo sapiens
cgggaggaacgggggagcccacaggagccagaacgggaaaagaacggcaaac

SEQ ID NO: 192584 - RNA, 80 nt, Homo sapiens
gacagcgcaagcggcagcacaaagaggcaggagagcaagcccccaacaccagcaaccccgggggagacaagccggacggg

SEQ ID NO: 192585 - RNA, 79 nt, Homo sapiens
accgagccgacgcgggccgcgcggagggaacaggcacgccccacccgccagccgagcccccgacgcagcacaaagcccc

SEQ ID NO: 192586 - RNA, 40 nt, Homo sapiens
gcccggaggaagaaagccaaggagggaccacggccgagcc

SEQ ID NO: 192587 - RNA, 79 nt, Homo sapiens
cacggaagaccagcaaggaggaagagagcggcccaagaggcagcgagaaagaaggaacaggaaaagaaaagacaagacg

SEQ ID NO: 192588 - RNA, 56 nt, Homo sapiens
aaaagagagggggggaccgaccgcaacagaacggacccggccggggggggcacaga

SEQ ID NO: 192589 - RNA, 52 nt, Homo sapiens
aggacacgcacgcaaacgaccccggccgggaggagcagggaaaggaggcagc

SEQ ID NO: 192590 - RNA, 73 nt, Homo sapiens
cggcaggacggaaagacagacagaagcgaaggggacagggggagaaccgccagggaaacccgggggacagaca

SEQ ID NO: 192591 - RNA, 77 nt, Homo sapiens
ccgcgcgccgcccggagaccaacgaaacccccgcaccggggggccgccgggcgcggcaagaacagcggcagcgaaac

SEQ ID NO: 192592 - RNA, 59 nt, Homo sapiens
cggcggcgaagccccgcaggcacagccagggcgaaagaagaccccgccaccggccccca

SEQ ID NO: 192593 - RNA, 78 nt, Homo sapiens
acgagcccccccagcgagcacggagggcccggcaccgcggcccagaacacgacacgaaccaagccgccacagggagaa

SEQ ID NO: 192594 - RNA, 75 nt, Homo sapiens
caccccggccgcccccacggccccggcggccaaacaccgaaagaccggggaagaggaggcgaggaggcggagggc

SEQ ID NO: 192595 - RNA, 77 nt, Homo sapiens
ggcgcggcgggcgggcggcggcggcgcgggccacaagggaggcgaggacggacaaaaggaaacggacgggaggccag

SEQ ID NO: 192596 - RNA, 49 nt, Homo sapiens
ggggcgaaggaaagacccaccagaaagccaagaacggagccaccggccc

SEQ ID NO: 192597 - RNA, 74 nt, Homo sapiens
acccaaaaaacagagcacgcgaccagcgaggagcaacacaggagccggagacgaaagcgaaaagaaacagaaag

SEQ ID NO: 192598 - RNA, 80 nt, Homo sapiens
cacacacggggacacgcgggggcggcacccggcaaaggaaggagagcccacccagcacggaacaccccaacagggaaggc

SEQ ID NO: 192599 - RNA, 60 nt, Homo sapiens
cacccgcaccaagagaagacccgccgcggagaaccgaaccaacagccagccaaagccagg

SEQ ID NO: 192600 - RNA, 67 nt, Homo sapiens
ccccccccccccacccccacccacccccccccagacacggccgagacgccacaagccccaagaaccg

SEQ ID NO: 192601 - RNA, 82 nt, Homo sapiens
gagcagaagaaggaccgggccacagaagggcgagaaagaaccaagagggagacaagggaaaaggaagacaaaaaacacaagg

SEQ ID NO: 192602 - RNA, 54 nt, Homo sapiens
accgccccaacccacgagaggacagcccaggggaaaggcagggccccgaagaga

SEQ ID NO: 192603 - RNA, 76 nt, Homo sapiens
cggcgccgcaaccgcaggaggagaagcgcgcgggcacgccgcggccacgcgccgagacgcaccccgaagagggacc

SEQ ID NO: 192604 - RNA, 80 nt, Homo sapiens
gcacgggccgcagaagacagggcggcgggccggacgacaaaagcgaaggaagccaggagacagaaccacccccaaaaagg

SEQ ID NO: 192605 - RNA, 78 nt, Homo sapiens
agcaacaaggaaagagacaagccaacagagggagaagaccagaaaccaccaagaagaagacgagaagagggccaggag

SEQ ID NO: 192606 - RNA, 74 nt, Homo sapiens
cgcaaagagccgagcacgcgggcgcacagcgcgacgggcggacggaggaggacaccccccaggcacagccacac

SEQ ID NO: 192607 - RNA, 60 nt, Homo sapiens
cacaccaagagccaaacagagaggggaaggggagccgccaccaaaagcagacggaaaacc

SEQ ID NO: 192608 - RNA, 86 nt, Homo sapiens
cggcgccgcgccgagccacccgcccgcccaaggcccgcgggcgggagaacggaaaaccccaacccggaaggacagaagcccccagc

SEQ ID NO: 192609 - RNA, 74 nt, Homo sapiens
gacgggaacccccacccagccgggcaagcacgaagccaaaggaccgacccaaaagcagagacaggaacggccga

SEQ ID NO: 192610 - RNA, 79 nt, Homo sapiens
gggcgaaggagccggcccaagacacgagaggcgagggacgacagagcaagcggcagagggcaagcgggaaaaagaccag

SEQ ID NO: 192611 - RNA, 77 nt, Homo sapiens
gaccccccccgggagagcaagccgggcggccgccccgccggagcagcacacaaggagccgcagaagccgccgcggga

SEQ ID NO: 192612 - RNA, 57 nt, Homo sapiens
cccaggacgaacaaagccagccaggggaaccacagagaacacaacccgaggagaaga

SEQ ID NO: 192613 - RNA, 64 nt, Homo sapiens
agcggagcccggagcccgccgccccaggcccacaggcccaagacccccggaccgaggacacacc

SEQ ID NO: 192614 - RNA, 35 nt, Homo sapiens
cagaagagagcaaacaacacggagaaggaccaaga

SEQ ID NO: 192615 - RNA, 51 nt, Homo sapiens
cagagagccaggaagcccagaagcgaggaagagccaaacaccggagcagaa

SEQ ID NO: 192616 - RNA, 47 nt, Homo sapiens
cccgcgcggcgccgccaacgcgcccccgaggagcacccacgggagac

SEQ ID NO: 192617 - RNA, 80 nt, Homo sapiens
cacagggagaacagggcagaacgaggggaggaaagcaggccagggcaggacagcagcccgcaacaggccggccagccccc

SEQ ID NO: 192618 - RNA, 59 nt, Homo sapiens
gccagggagcgcgaaccgcccgcggaaccacagcccagcacggaacagagagaagggcg

SEQ ID NO: 192619 - RNA, 78 nt, Homo sapiens
cgacagcgaagcgagcgaaagcccccaaaacacaagaggacggagaagcgacgaaagaagccgggacaaggaccagac

SEQ ID NO: 192620 - RNA, 78 nt, Homo sapiens
gagaccacagcggagacccgaacacacggacacgcggcgccacgggccagacaggacaccaggcgcaggagcgcccag

SEQ ID NO: 192621 - RNA, 85 nt, Homo sapiens
ccggacggcgcgggcgccggcgaggagagcccgcggcgcaggagggaccagaggcgccccggcgggggggcccggcgaaggagcc

SEQ ID NO: 192622 - RNA, 77 nt, Homo sapiens
ccagggaaaagagcaaacgaggccaaacacacggaaggagccgcacgcggggcgcacagccagcccggggcgcacga

SEQ ID NO: 192623 - RNA, 76 nt, Homo sapiens
gagcgagcgagggggggcgcgccggaaaccggagcgcgcagcagaacggccgagcgaccaggagaggagcccccgc

SEQ ID NO: 192624 - RNA, 44 nt, Homo sapiens
cggcggggcacgggaaggccggccgagcaccccgcgccgcgcca

SEQ ID NO: 192625 - RNA, 69 nt, Homo sapiens
gcaggggaaagaacgagagccaggccgcagcgccgcaggcgccaaaaggaaacacggaagaccacaaca

SEQ ID NO: 192626 - RNA, 69 nt, Homo sapiens
agaaggcgcgaaagagaaagagacccgacgacagaggggaagagcgacaggcagccacaaagcgacacg

SEQ ID NO: 192627 - RNA, 45 nt, Homo sapiens
gaagcaagcacacaacaaacagaacgcaaagcccggaacgaccag

SEQ ID NO: 192628 - RNA, 77 nt, Homo sapiens
gccacgcgcagaccagaccgccgaccggcgcccgccgcaggaggccacgcgcagccccggaagagccacccagaccc

SEQ ID NO: 192629 - RNA, 84 nt, Homo sapiens
gaggcccacagcaggggccacgcggagaagcccgaggagcaggagcccagaccggaccacgccacaagcgaaggcacccgaggc

SEQ ID NO: 192630 - RNA, 81 nt, Homo sapiens
ggcgcggcgcagcccacggcgcaggcccacggagcgcagccgccgaggccacagagcgaaaaaaaccaacacgcaaccaga

SEQ ID NO: 192631 - RNA, 77 nt, Homo sapiens
aagcccgccagccagaaccggagaagggacccgcccaagccagcccgagaagcaggagagaaagaagccaagcgaaa

SEQ ID NO: 192632 - RNA, 79 nt, Homo sapiens
ggccagcaccaccccacggccagggccaccaaccccaacccggagagcggcgaggcagagaaagcgaggagcaaccgcc

SEQ ID NO: 192633 - RNA, 88 nt, Homo sapiens
caaccccacaaggcggaaggccaaccaggagagcacgcagcaggaagagccagcgcggagggaaaaaccaaaaaccagaccggcgggg

SEQ ID NO: 192634 - RNA, 71 nt, Homo sapiens
gccccgccagaagagaaaaagcccaggcaaaaacacccaaccaggcacagagaaaggccggggcagcagaa

SEQ ID NO: 192635 - RNA, 81 nt, Homo sapiens
cagaaaagcgagacccccaggaaccgggagacgaggacgcgcacaggaaaggacgcggaacaagcaggcagccaggcagca

SEQ ID NO: 192636 - RNA, 80 nt, Homo sapiens
gacggccacgacagagacaaggagcccccaccccaccagggggcaggcaaaccgggaaagcaagccaaaacagcccggaa

SEQ ID NO: 192637 - RNA, 38 nt, Homo sapiens
acacggcgcgaaagccagggaaggaacaagcagaaagc

SEQ ID NO: 192638 - RNA, 51 nt, Homo sapiens
aggcaccaaggaaagcagaagacaacagaacaacagaggcagcaggcacga

SEQ ID NO: 192639 - RNA, 75 nt, Homo sapiens
ggcagagaccaaagaggaaggagggaaacaccacaccagagacccccggagacagaaaaaaccgccgcaccagag

SEQ ID NO: 192640 - RNA, 63 nt, Homo sapiens
gaaggcgccccgacgagcagaagggacgaacagcggggacgccccagcagaccgcccaggaga

SEQ ID NO: 192641 - RNA, 76 nt, Homo sapiens
gaggccagcgcggccagcagaaggaaacacgagccccaccaaagcaaaggccggaccaggagagagcacccacaga

SEQ ID NO: 192642 - RNA, 52 nt, Homo sapiens
acaggccaagaggggaacggaacaaggcgaaacagggacggcagcaggggac

SEQ ID NO: 192643 - RNA, 82 nt, Homo sapiens
agcgcccccgccgccccccagagacacaccggaggagacaaagacgcggcccagaccgacagaccccaggggcagccaccac

SEQ ID NO: 192644 - RNA, 74 nt, Homo sapiens
caccaggccaccgccacgggccgagacacgcagcggcggccagggaccagagaagagagcggacccacaccagg

SEQ ID NO: 192645 - RNA, 81 nt, Homo sapiens
ggacccagaggggacggcgccgcaggagaagccggaggacccaaccgcggcacacagaaaacccggacccaccccgcccag

SEQ ID NO: 192646 - RNA, 65 nt, Homo sapiens
ccaagagggagcggggagacccccacccagaagaccagcgggacagcagaccccagaaaggaaac

SEQ ID NO: 192647 - RNA, 71 nt, Homo sapiens
caagaggcagaagccacagaggaagacggaccagaacccgcggagccacccaaggacgaaaaggaaaggag

SEQ ID NO: 192648 - RNA, 49 nt, Homo sapiens
agcccagaagacagagggcgaggaccaaaaaagcggaaaagaagagcag

SEQ ID NO: 192649 - RNA, 71 nt, Homo sapiens
gccagcgaggggggacagacaaaggggggcagaaagaagaggaggacaacaagccaacagagagagacgaa

SEQ ID NO: 192650 - RNA, 65 nt, Homo sapiens
ccaaggagaaggcagaccgggccggcgccagcgccagcgaggaaccgaacccagccaaaaggccc

SEQ ID NO: 192651 - RNA, 79 nt, Homo sapiens
cggcaaaggaggaaaaaccaaacaccaagagaaggacacggacaaggaagggcgagggcgggaccgggcccccaacccg

SEQ ID NO: 192652 - RNA, 74 nt, Homo sapiens
cgggagcagcgaggccaggcgcggcggcaagcggggcgggagccgcaggcccgaaaagaaagcgaacacacaaa

SEQ ID NO: 192653 - RNA, 71 nt, Homo sapiens
ccccggaggagggacaaaaacccagccggaggccacagcggcgaccgggacgagcccaaaagcaaagcagg

SEQ ID NO: 192654 - RNA, 54 nt, Homo sapiens
cagagccacagacgcaggagggccacaagggcgaccagcaacagccagggagag

SEQ ID NO: 192655 - RNA, 75 nt, Homo sapiens
gggaaggggccggagggcagggggcagggcggcagaggacaagaaaccacagagccgagaacagaaagggagcca

SEQ ID NO: 192656 - RNA, 86 nt, Homo sapiens
gcccgcgaccgcgccccggcccgacaggcgccggagcgaccccggaggaggagcagcaaacgccaggggcagagcggccccaaaaa

SEQ ID NO: 192657 - RNA, 85 nt, Homo sapiens
gacccggggacgcggcgagacaggagagcaagcccacccgcgagaagcggaagagaagaacagccgagacccagcgggcagaaag

SEQ ID NO: 192658 - RNA, 53 nt, Homo sapiens
gggaccgggcgccacgcgggggcaagacgaagacccagcgggaggaagaagag

SEQ ID NO: 192659 - RNA, 73 nt, Homo sapiens
acaaagccaccgaaaaagccggacaagacgcagagagccgacagaccccgaagggacagggaaagagcgaaaa

SEQ ID NO: 192660 - RNA, 70 nt, Homo sapiens
agagcaggagggcagcagagaacacgggcacacaggccaagggaggaaaaacgcgccaggaaaccaggag

SEQ ID NO: 192661 - RNA, 73 nt, Homo sapiens
agaacaacgcaagagccaggcacaaaggaggcgaagagaggccaggggaagggaaccgcgaaaacccggcagg

SEQ ID NO: 192662 - RNA, 56 nt, Homo sapiens
cggaccgggagacaccccgcacacacacccaagaaagaccccagcaggccccaagg

SEQ ID NO: 192663 - RNA, 74 nt, Homo sapiens
acccggagggcagagcgacacccaggccggaaaggaaaaacaccagaacggaaacagaaggacacaccagaggg

SEQ ID NO: 192664 - RNA, 57 nt, Homo sapiens
gcgggaggaaaagccccccccaacggccgcacaaggcagaggggcgggcaaaggaga

SEQ ID NO: 192665 - RNA, 55 nt, Homo sapiens
caagcccgccaggccgacaggacggggggcccacgcggaggacgcagaacacggc

SEQ ID NO: 192666 - RNA, 80 nt, Homo sapiens
aagcagcccgaaaaagacgcgagaagccacacggccgaagggcaagagggcacagaagacggcgccccacacacggccca

SEQ ID NO: 192667 - RNA, 57 nt, Homo sapiens
gggccgcccagcgcaagagaaagggagagaaccgaaggcaccaaaagcaagaaacac

SEQ ID NO: 192668 - RNA, 76 nt, Homo sapiens
ggcaaagaggggggaacccaaaagacaaaacgggaagcagcaaaacagggaagggggcccccaaagggaagccaaa

SEQ ID NO: 192669 - RNA, 71 nt, Homo sapiens
gcaccacagggaaaggacgaacgagaaaggaagcccacacacaggcaagagaagagaaacgggccggggga

SEQ ID NO: 192670 - RNA, 78 nt, Homo sapiens
gaacgcagcacccggggccccaggacgccggacccggccgcgggcaccaggacaggggggagaaacagcccagccccc

SEQ ID NO: 192671 - RNA, 119 nt, Homo sapiens
cgacgggcggggaagacggccacacacggggacacgcgggggcggcacccggcaaaggaaggaaggcccgggggaagaggaaaagggagaaggccaaaggcaccccagcaggaagcgaa

SEQ ID NO: 192672 - RNA, 73 nt, Homo sapiens
aacggagggcgcacgggcgaaggcagaggaacaaagacagaacccagagacgaaaaggaggggcaaagggaaa

SEQ ID NO: 192673 - RNA, 67 nt, Homo sapiens
agacaacgacccggggaccgaaccccggcgaacagcaaggcacaaggcccgccgggaagaaagaagc

SEQ ID NO: 192674 - RNA, 78 nt, Homo sapiens
caaacacaccaaccaagcaaaacccaagcaaaaccagagcagaccgcccccaaaggaagaaaaagacaaccagggaca

SEQ ID NO: 192675 - RNA, 87 nt, Homo sapiens
caggaaccgcccgcaagagcgagccgccgccccgggcgcagacagagcaccagcaccagcagagacccacccagggaacccccccac

SEQ ID NO: 192676 - RNA, 62 nt, Homo sapiens
ccggagccaggaaagggcgcccgcggacagcggccgcgagaaccgggcagagcagcccggcg

SEQ ID NO: 192677 - RNA, 77 nt, Homo sapiens
caaagacaccggcagagaaccaaaacaccaagcggaggccaggcaagaaggaggcacagcaggccccaacaaaagcc

SEQ ID NO: 192678 - RNA, 59 nt, Homo sapiens
aggccgggaaccagcgagggaaacaaggagagaaccacagggggggagagagagaccca

SEQ ID NO: 192679 - RNA, 59 nt, Homo sapiens
cccggcccgacaccgcgggccgccagacgggaaggagacaccaggcgccgagaaggcca

SEQ ID NO: 192680 - RNA, 63 nt, Homo sapiens
gccccaggaacccagcaagaaccccagaagaggcagaccaggccaacgcacggcccaaggccg

SEQ ID NO: 192681 - RNA, 84 nt, Homo sapiens
caaagaaccaccccaaacaggaggggcccgccacgggagagcgaaggcacgagcgcccagaagaggaacccagacccacccaga

SEQ ID NO: 192682 - RNA, 70 nt, Homo sapiens
cccgaccgccacccagcggaaccaccccccacagcgcacgaggacgccagaggggaagccgcacgaggga

SEQ ID NO: 192683 - RNA, 87 nt, Homo sapiens
agcgccgaggcgagaacgcacaggccgcgcagagcgggaccacccgggcacagcaggcacggaggcccacggagcacagacaagaag

SEQ ID NO: 192684 - RNA, 79 nt, Homo sapiens
ccaccgcgccggcgccccgcacgcccgggaagcgcgcaccgccaagcagacagagagaaaaccaaacggcgcaacagga

SEQ ID NO: 192685 - RNA, 85 nt, Homo sapiens
gcccgccaaaaagccgaaggacgcgaaagggcagagggaccaagaaaggcccagggaccaaagcccggacaaggcccgagcacca

SEQ ID NO: 192686 - RNA, 56 nt, Homo sapiens
ccccaagacccggccggcgccgcggccgcgggccgcagccaagccggaacaggagc

SEQ ID NO: 192687 - RNA, 75 nt, Homo sapiens
gacggacgggggccgggggcggggcgaggggcccaaacacgcgcagacccaaaaccaggggacccaccggaaccg

SEQ ID NO: 192688 - RNA, 58 nt, Homo sapiens
agaaaaacaccggcgaaccacggcagagggccaacaccaaggaacccccaccaaaagg

SEQ ID NO: 192689 - RNA, 74 nt, Homo sapiens
aagaggccggcagagcccgcagagaaaaaaaaagcacaacccagccagaggggccaccaaaagaaggaggcagc

SEQ ID NO: 192690 - RNA, 81 nt, Homo sapiens
ggcgagcacaggcccgccagggcggcgccccgggacccgcaggaacccccggcgaaggaaagccgcacagcagcacaaaga

SEQ ID NO: 192691 - RNA, 71 nt, Homo sapiens
aaaggcaaaccaagcggaccccaagaagcaggcagacacaggcccaccaggacgagagagcgacgagggca

SEQ ID NO: 192692 - RNA, 73 nt, Homo sapiens
aaccgacaggaaccagacacgcaaacaggaaagagaagggagggcgacgagagccgaagcagaggccaagacc

SEQ ID NO: 192693 - RNA, 65 nt, Homo sapiens
caagaggaaccgcgccccagaaggcagaggaacacaacagacgaagagagaaaggcagggcaccc

SEQ ID NO: 192694 - RNA, 81 nt, Homo sapiens
gacaaggagcgcagcagcagaaagcaggacagccccaagggagcacagcgcggaagccccgaggcagccccgcggaggagc

SEQ ID NO: 192695 - RNA, 73 nt, Homo sapiens
ccgccggagcgagaacacgggaggaagaagacagaagagcccgcgaacggaagcggagcggacccagcagaga

SEQ ID NO: 192696 - RNA, 90 nt, Homo sapiens
gggaaggacaacagcaaggacagcaccaagaagaagaagaggacaggcccaggaaagggaagaacaaaggaagagagcaggaaggccaca

SEQ ID NO: 192697 - RNA, 82 nt, Homo sapiens
ccaacgcacagccagggagccaagcgccgcccggccggggacacgccagcggcgcagccgacggaagaccgggagacaaaac

SEQ ID NO: 192698 - RNA, 73 nt, Homo sapiens
gagaaagggagccgagcgagaccacgcaccacgggcggcaacgagggccaaccgccgcagcagccaggcgaac

SEQ ID NO: 192699 - RNA, 72 nt, Homo sapiens
cgcagcgcccccaggccggggcgaaaggcaggagccaaaggaacaacagaccaaaacgggaaacagccagag

SEQ ID NO: 192700 - RNA, 75 nt, Homo sapiens
aaaagcaaagaagacacacagggggacacaacgaaagcagacccacgagcgagagaaagagcaaaaggaaaacag

SEQ ID NO: 192701 - RNA, 81 nt, Homo sapiens
agcggggccagcagcgcccagggcgggaacgggcaccccgggcggaaaagagggaaggcgacaccccagaaccacccaaga

SEQ ID NO: 192702 - RNA, 97 nt, Homo sapiens
cggagagccaagccacgaccggcggggcgcgccaaggacacggcacaccgaccgacgaccacgggccggaccaccagcccccagacgaggcaacacc

SEQ ID NO: 192703 - RNA, 100 nt, Homo sapiens
cacccccgggggccacggacccggcgacaacacccggccccgagacagaagccgacgggagagaagcgccggccggaaagaagacggggaggagcaggac

SEQ ID NO: 192704 - RNA, 59 nt, Homo sapiens
ggagcaagcaaagcgccaaaccaagggccgaaagacaaaccgcggagaggagagagggg

SEQ ID NO: 192705 - RNA, 78 nt, Homo sapiens
gacaccagggccgcagagccgcccaacagcacaagaagcgccaccacgccggcccgggggaaaggacccgaaggagcc

SEQ ID NO: 192706 - RNA, 75 nt, Homo sapiens
aaaacaggaccgaagcggacacaagccaggagacaggcagaagcgccgaccgccaaggcagcccagaacacagag

SEQ ID NO: 192707 - RNA, 72 nt, Homo sapiens
gcccagacacgcaaccgacaaaccccaccgcgccagaagagcgaccaaccccggagccccccgagggcgcgg

SEQ ID NO: 192708 - RNA, 79 nt, Homo sapiens
cagcgggaaagaaggcaaaacacgggccaccaccaacgaggggagagagcgggcccacagggggagggaagggagcccc

SEQ ID NO: 192709 - RNA, 53 nt, Homo sapiens
caggcaggaggagagggacacgcaggagacgacccggagacgcggaggcaggc

SEQ ID NO: 192710 - RNA, 77 nt, Homo sapiens
caacgcgacaaagaggaacagggcgacgaggccccgaagaccggcccaaaaacgagggcgccaggcaaggaaggacg

SEQ ID NO: 192711 - RNA, 79 nt, Homo sapiens
ggacggggcggaaacggcgcgaggccccagagaacacgagcggggagcgggcgcgacggccccgcgggagacaacacca

SEQ ID NO: 192712 - RNA, 79 nt, Homo sapiens
ggcagccgggaccgccccaggcacaccgggccagcacaccacgcagagcaaacccagcccggagcgagagcgagagaag

SEQ ID NO: 192713 - RNA, 69 nt, Homo sapiens
aagacagaaccagaagaaaacccggaacaaagaagagaaacaaggcagacccggaaaccagacgacaga

SEQ ID NO: 192714 - RNA, 70 nt, Homo sapiens
gcagggaaaacaggaaggaaccagccaaaaagcaaggaagcgaacgaacaggccaaaggacccagaaaaa

SEQ ID NO: 192715 - RNA, 63 nt, Homo sapiens
aggcagaagaaaaagggcgaaagccgcgcgacccaacaagcagcacaacacagacaggaggga

SEQ ID NO: 192716 - RNA, 79 nt, Homo sapiens
aagagccacaaagggaccgagaagcgaagacaagggggcaaggcggcccggcacgcacacgggcagaagagcccgaggc

SEQ ID NO: 192717 - RNA, 81 nt, Homo sapiens
ggggggcacgcagcgaagccacagaccccagaaacgggcaagcgcgcaaacccagaagggcccgcacggcgccggcccgca

SEQ ID NO: 192718 - RNA, 54 nt, Homo sapiens
ggcacgagggccggcccgcgggcagggaaggcaccaccccagaggccagagccc

SEQ ID NO: 192719 - RNA, 76 nt, Homo sapiens
aaacgagaaggcagagaggggaagaccaagagcacaggccccaaaccagaagacgcagccgccacaccaagcacaa

SEQ ID NO: 192720 - RNA, 83 nt, Homo sapiens
cgcagaacccaggcacccccccacagcccaggcccaggcccaaggccaaggagagagcccaggccacaggacagcgccacgcc

SEQ ID NO: 192721 - RNA, 72 nt, Homo sapiens
ccgcggcagaagccgagcaacaccccggccaccgacccacaaggggaaccagaagaggccaaccagcacgaa

SEQ ID NO: 192722 - RNA, 67 nt, Homo sapiens
gagacaacaagggcaggggccgggcgggacccgccgaagacagaaccgaggaaaagaccagcagcag

SEQ ID NO: 192723 - RNA, 59 nt, Homo sapiens
gccccggccgcaggccagcaaaacagagcggacaccccaacacgcagcggaaagaggaa

SEQ ID NO: 192724 - RNA, 79 nt, Homo sapiens
gagaccaccggcaacacgacgccaccccgccccaccgaggccggcgggccacagcaggcgccccgccggagaacccccc

SEQ ID NO: 192725 - RNA, 88 nt, Homo sapiens
cacacgacccagcaagaggaagacgggcacagaagaagggcggcgacggcggcgcgaggaccgaccgggcccgcggacgaagaaggca

SEQ ID NO: 192726 - RNA, 72 nt, Homo sapiens
gagagaagaagacacacaaggggacaggcagaagggccaccaagggccgcagccaagccggaacaggagcgg

SEQ ID NO: 192727 - RNA, 65 nt, Homo sapiens
aaaacggcaacggaacagaaggcacagaagaggaaggaagagggaaacagggcaagacagaggaa

SEQ ID NO: 192728 - RNA, 80 nt, Homo sapiens
gaggacacgcgggggcaccggccaagacacgccagcacggggcacagacccagggaccccggcccagcacggccacaaga

SEQ ID NO: 192729 - RNA, 87 nt, Homo sapiens
gagaagagacacagcagcgcaaaggagaaccgcgggacggcgggcagaacaaaacaggacaaaacgccgaaacaggcaacaggcaaa

SEQ ID NO: 192730 - RNA, 80 nt, Homo sapiens
cgagccccagccggccgggaggcaccacggccgagcccgagagccgaaaccagcgaaacaaaacaaagagcagcgcaaag

SEQ ID NO: 192731 - RNA, 78 nt, Homo sapiens
ggcgcccgaggcgcagggggcaggaccgagcacaagaagggcagacaagacagcagaggccgcaaacgaaacacgaga

SEQ ID NO: 192732 - RNA, 76 nt, Homo sapiens
aaggacaccaccagggagccaggagaggcccacgcggagcggcgccacgaccgagcgacggaaagcagcggcccaa

SEQ ID NO: 192733 - RNA, 71 nt, Homo sapiens
gagccggccggcggcaaagagacgaggagaccgcgggaaggaagaagcaacaaccgcgccagcgagaccca

SEQ ID NO: 192734 - RNA, 76 nt, Homo sapiens
cggaaacaaccgcaaaaaggaaagcgcccacaagccgggagcccacacaccacaccggcgcaacaacaaggacccg

SEQ ID NO: 192735 - RNA, 62 nt, Homo sapiens
caaacacgaacccggcgaagggacagaggaagaagagcaaacgaaaccggcagcagccggag

SEQ ID NO: 192736 - RNA, 78 nt, Homo sapiens
gaagaacagccgaagaagggcccccggaagaaccgaaggacacacaggagggccaaaaccaggcgagaaccaggagaa

SEQ ID NO: 192737 - RNA, 72 nt, Homo sapiens
cgcaggcgcggccccagcacaagagccggggaagacagggaagccagacaggggaaaaagaaaagggcgaag

SEQ ID NO: 192738 - RNA, 73 nt, Homo sapiens
aacaccggagcaccgaccgggccagaggaaccagacgcccaaacgcggacccccgcgaaccccaacggccccg

SEQ ID NO: 192739 - RNA, 78 nt, Homo sapiens
caccagaccaagcgacaagcgccacaacacagggcacagacagcagagggggagcgacccggaaagacggcaaaacca

SEQ ID NO: 192740 - RNA, 69 nt, Homo sapiens
gccacagggaaacaaccacagacacagagagcaaacacaaagaggaaacccggcacccgagcggagaga

SEQ ID NO: 192741 - RNA, 68 nt, Homo sapiens
agacaaaggggcaagaccaggagagcgcaaccaacccacgaccgcaacgcaagcagaaaggaggaaaa

SEQ ID NO: 192742 - RNA, 82 nt, Homo sapiens
gcggcacagagagggccgggagcgcgcagccagcccccggcagggccaaggcccccccacggcgcgccgacggacagcgggc

SEQ ID NO: 192743 - RNA, 67 nt, Homo sapiens
gggcagggagggagcagaaacggaggccgccacccaggagccggagagacagagagcgaccaaaccc

SEQ ID NO: 192744 - RNA, 76 nt, Homo sapiens
ccgccggcgcgccgccaggaccaggcaagaacggaagcacgggcggaggaaagcacaagcagagcccccgcagagg

SEQ ID NO: 192745 - RNA, 48 nt, Homo sapiens
gcccggagagcgaccaaacacaaggggggcagggcccagaggccggag

SEQ ID NO: 192746 - RNA, 59 nt, Homo sapiens
aacacagcaccacacgcccccaagacaacgaaggggcccgaggcagccgggagacagcc

SEQ ID NO: 192747 - RNA, 73 nt, Homo sapiens
aaaacgaagaaacagaaaaacaaaagaaaggcaagagaaacacagaaaggacccagaccagaaaaagagcagc

SEQ ID NO: 192748 - RNA, 39 nt, Homo sapiens
acccgagaaaggggacggaaagagaaaggagaccacaag

SEQ ID NO: 192749 - RNA, 87 nt, Homo sapiens
ccaccaccacgccagccgcaccagccgcccaagccgcacagccgcggcggcagcagcaggagaggccccgagcgaggacacagcccg

SEQ ID NO: 192750 - RNA, 62 nt, Homo sapiens
cgagcggcggcggcaagcggcgcgagcggcgagcacaagccagcccccccgccggagagaga

SEQ ID NO: 192751 - RNA, 66 nt, Homo sapiens
gcaccagaccccaccagcaacgagccggaagagcgcagaagccggaagagagccaagccaggccca

SEQ ID NO: 192752 - RNA, 86 nt, Homo sapiens
ccgccgagcggacccggaccggggagccaggccccggggccccagcggcaccagcggagaccacgggagccgcgccggagccagcg

SEQ ID NO: 192753 - RNA, 70 nt, Homo sapiens
cgaccggaacccgaaacaaaaagccaacggaaaaagaaacggcagagcacaggaccgaagaaggggacgg

SEQ ID NO: 192754 - RNA, 75 nt, Homo sapiens
ggggagcccacaggagccagacgagacgccccccggagccccaggccggaagcgcgggcccgcaccgggcaacaa

SEQ ID NO: 192755 - RNA, 58 nt, Homo sapiens
ggccgccggggagcggcggcgggagccggcgccgcaggaaggagggccccggagcagc

SEQ ID NO: 192756 - RNA, 79 nt, Homo sapiens
agaacgaaccaaccccacaacaccgccggagacagccaaggagccagaggacgaacaaaagggagaagaaccagaagag

SEQ ID NO: 192757 - RNA, 62 nt, Homo sapiens
cagaagggaccgccaggccccggacacccaggaaaccccagcggagcagaccaccgcccagc

SEQ ID NO: 192758 - RNA, 80 nt, Homo sapiens
agaagacccagggcgcgaaagaagacagagcccagaagcgaggcgaagcagcggcgagaaacgagagcacgagaaagaag

SEQ ID NO: 192759 - RNA, 65 nt, Homo sapiens
gcagaggggcgcgagccgcgccgcgccaagggggcagcacgccgaaggagagaccagacaacagg

SEQ ID NO: 192760 - RNA, 64 nt, Homo sapiens
aggacaccggaccccggacgcgggaaaggggacagaccagagcaggaccaaaggcgcacagagc

SEQ ID NO: 192761 - RNA, 71 nt, Homo sapiens
cgcaacccagcgagagaaagcgaccaacgaggacaggcgccaaaacaaaacagagagacacgaaaggccag

SEQ ID NO: 192762 - RNA, 74 nt, Homo sapiens
aacacacaggccaagccccaccgacacgaaggccaaagaaggcagagacagaccagaagacggcacggcacggg

SEQ ID NO: 192763 - RNA, 81 nt, Homo sapiens
ccccgagccaccgggccgcccccggaggggaaccgccggcacccgaccgcagaagcaccaccagccacaggaagccaaacg

SEQ ID NO: 192764 - RNA, 68 nt, Homo sapiens
agcaagaaccaggagagacaggaaccgcaggccacacaaaaaagcccgccaaagaggcacaccgaacc

SEQ ID NO: 192765 - RNA, 95 nt, Homo sapiens
acgaagaagcagaagagcacagcacgaacagacagaaagcaccacagaaaggggcggcccaaaggcgaaacacagaaggagacaaccacagggcc

SEQ ID NO: 192766 - RNA, 77 nt, Homo sapiens
cagcgccgcggcgacgaacccagggagagacgagagccgaggcgccggaaacaacagccaacaaaaccaagccggga

SEQ ID NO: 192767 - RNA, 81 nt, Homo sapiens
aagggccaggcaaaggcaaaaaggcaggggagcagacggagagaaaaaaccgggggacccaacaagccccaggacagaagg

SEQ ID NO: 192768 - RNA, 81 nt, Homo sapiens
ggcggggaccggcgaggagcgaagaacaaacacccgagcgcgagggggcaaaaaacaccccccgcacaaaagacagaaagc

SEQ ID NO: 192769 - RNA, 84 nt, Homo sapiens
gagaaaaggcccggggcccgggacgagggaaggaggaggaagccaagaacgggagcgaagccacgcagcggcaccaacgaccgg

SEQ ID NO: 192770 - RNA, 73 nt, Homo sapiens
acgcaaggagccaccagcacggaccaggaggcgagcaacaggaagccgcgagcagaacgcgccagcaacacgg

SEQ ID NO: 192771 - RNA, 84 nt, Homo sapiens
aagacgcagacgccggccagggccaccggccaccaaacgcaccacggagaaagccaacccagcgaaggaacaagcaaaccccaa

SEQ ID NO: 192772 - RNA, 75 nt, Homo sapiens
gcaggcggagggggacacccgggcggggcagagcagcccccagccagccgcgagaccaagggggaaaagaacgaa

SEQ ID NO: 192773 - RNA, 69 nt, Homo sapiens
gcacaaggacacgaccaccaaaacaccaggacagccaaacaagggagaccacccaccacacaggggaac

SEQ ID NO: 192774 - RNA, 47 nt, Homo sapiens
gcggacccagagcagggaagcagcccggccgacaaccaaggggacaa

SEQ ID NO: 192775 - RNA, 68 nt, Homo sapiens
cacaggcggagaagagggaacacagacgcgcgcgcagagaacgcgggaagcggaacaggaaaacaaac

SEQ ID NO: 192776 - RNA, 81 nt, Homo sapiens
gacggcccgcacgcgccgcgccaccggcgcgcccgacggcggagaaaccaccacaaacacgaggccagcaacgaccaacaa

SEQ ID NO: 192777 - RNA, 54 nt, Homo sapiens
cggggagagccaccggccccagcaggacagcagaccacagcccggcaggcccaa

SEQ ID NO: 192778 - RNA, 91 nt, Homo sapiens
aggaagcaagggccaccgcccagccaaccacagggcagccaaggaccagaaaggagggcagagaaggagaagggcccggcccagacacgcc

SEQ ID NO: 192779 - RNA, 73 nt, Homo sapiens
caacccggcccaccaaaccccggaaccaagaccaggacaaagaagacccggagagacaagccggaggacgcaa

SEQ ID NO: 192780 - RNA, 62 nt, Homo sapiens
ggcgaaccccgggcagcccgggaaacccaagcagaaagaaggaccccagcccaggccggggc

SEQ ID NO: 192781 - RNA, 75 nt, Homo sapiens
gaggcagagccaaacacccagccacggggaaaaggaaggccggaggaggcaacagcggacagcaggaagagggcc

SEQ ID NO: 192782 - RNA, 91 nt, Homo sapiens
agaggaagaggaggaagaggaagaggaagaggaggggaagagaagagccggagcagagggcaggaagggggaacccgagaagcaccaccaa

SEQ ID NO: 192783 - RNA, 77 nt, Homo sapiens
gccgcggcgggggcccgcagagggaaaagaacgggagaaacagggagaggcgaagcgccacaggagccgcagaagca

SEQ ID NO: 192784 - RNA, 53 nt, Homo sapiens
cgggccaaaggagccgaggagagaacgaggcacacccagaagccacaggagaa

SEQ ID NO: 192785 - RNA, 75 nt, Homo sapiens
caaaaagagacacaccaaggaagaccaaggcacgccaaccgagaagcgacaaaacaacaagggacacgaagccag

SEQ ID NO: 192786 - RNA, 57 nt, Homo sapiens
accgcacccaaagggacaccgcgacccacaccaagaaaagcaccgcgggcaagccac

SEQ ID NO: 192787 - RNA, 57 nt, Homo sapiens
ggagcagcccgggcaccacagaaaagggaacaacagaaaaaacaagagaggaagccc

SEQ ID NO: 192788 - RNA, 60 nt, Homo sapiens
ggccgccccaccccacaggcgcaaggaagaagagacgccgcgcggcagacaaggcccggc

SEQ ID NO: 192789 - RNA, 67 nt, Homo sapiens
agaaacaaaagagaaacagcagggggggaagaggaagaagcaaagaggcagggcaccgcgcgcccaa

SEQ ID NO: 192790 - RNA, 76 nt, Homo sapiens
ggcaagagggagacaaagagagagcaggagaaaaggacgacggaaccaccacgaaaaaaagcacacccaagacaca

SEQ ID NO: 192791 - RNA, 80 nt, Homo sapiens
cagaaccaccccgcggagagcgcaagccgggcagcagcccagcggcagcagaaagagcacgcagacccaggggagcccac

SEQ ID NO: 192792 - RNA, 75 nt, Homo sapiens
gcaacgaagcggccccagcccgaaagcaaccgggcgcaggccacagaaagcaccgggaggaaagagagccacacg

SEQ ID NO: 192793 - RNA, 83 nt, Homo sapiens
gccgccgccagggcgcagggccgggccgccgcgcaccgcagcgccggggcacgacacaaaaacagcggccgcgagagaagccc

SEQ ID NO: 192794 - RNA, 78 nt, Homo sapiens
cggcacccccacgcaccaaacgggggcggaccggcacaagggggcccaaaagaacggagagaccgcacccggacacca

SEQ ID NO: 192795 - RNA, 75 nt, Homo sapiens
cagcaggggcccgcggagacaagcagaccggaagaccgacggaagaccacaccccgagggagcccaggacaccac

SEQ ID NO: 192796 - RNA, 91 nt, Homo sapiens
ccgcccgccccagccacccaggccccgccgcccgggggcgccgcccaccgcgcccgccgcgcagacgggacacggccggccaggagcggcc

SEQ ID NO: 192797 - RNA, 78 nt, Homo sapiens
cggcacgagaacagcgagcggagccccgcacgagagcagacgccaaacgaggcagcaacacaacgcagaaacagagag

SEQ ID NO: 192798 - RNA, 79 nt, Homo sapiens
gagcggggcaggccccaccggaacgcccaaaacccgccggaccgaagaaggggcaagcaccaaccccaaaaggacacag

SEQ ID NO: 192799 - RNA, 75 nt, Homo sapiens
gagccccagcgccaccgccgaccgaagccgcaaaagaaacacgagccccaccaaagcaaaggccggaccaggaga

SEQ ID NO: 192800 - RNA, 80 nt, Homo sapiens
caaccccacacacaggagcaagcagggggcacccaagcaggagggccccgggcgcgggagccagccgaagaaaggaaaag

SEQ ID NO: 192801 - RNA, 71 nt, Homo sapiens
cagagcccggaacgcgcgcaggagacagccaccggggacgcggacaaggagccgcaacgggggaaacgggc

SEQ ID NO: 192802 - RNA, 69 nt, Homo sapiens
gaacggaagaaagggccacgcaacaggcaggacgccgccacacaacgcaagggaggcagaaagcccagc

SEQ ID NO: 192803 - RNA, 74 nt, Homo sapiens
cagagaggcacccagcggccacacccgccacccacaggaccagggaccaagaaaggcccagggaccaaagcccg

SEQ ID NO: 192804 - RNA, 76 nt, Homo sapiens
aggaggaggaagagggcccgcgccgcccaagaaccaagggaaaagacagaagacacagcgccagcgggagcccgac

SEQ ID NO: 192805 - RNA, 71 nt, Homo sapiens
ccaagcccagaagccaaaagccaagggcccaagacccagcggaacggcaggccggggcagccaaccaccag

SEQ ID NO: 192806 - RNA, 87 nt, Homo sapiens
caggaggggggagcggccaacccaagggccccagcccgggcccccaacgagacaagggaggcgaggacggacaaaaggaaacggacg

SEQ ID NO: 192807 - RNA, 78 nt, Homo sapiens
gggacgccgccgaagaagcacgaaagccccacccgccgcagcaagcagagaacacagaagcgggagaagggccggcgg

SEQ ID NO: 192808 - RNA, 69 nt, Homo sapiens
aaacaaaagcaacaaagaggaaaggaaacgacacaggaagaaagcggagaagcaaggggggacaaccaa

SEQ ID NO: 192809 - RNA, 43 nt, Homo sapiens
gaaggaccaagaaccaggaagaacccgcagcgcacaggcaccc

SEQ ID NO: 192810 - RNA, 77 nt, Homo sapiens
gaaaaacggagagccacaaaaaaggaagcgaaagccccagggaaaggaccgaggcaggaaagaggccagacgcaggg

SEQ ID NO: 192811 - RNA, 40 nt, Homo sapiens
cccgagagcgagaacaggcaggagaagcgaacccaggagg

SEQ ID NO: 192812 - RNA, 79 nt, Homo sapiens
cagaaggacgaaggggacagaaaagggagacaaccaccagcccagagcacaacccaaaggaacccgaaggaaccagcga

SEQ ID NO: 192813 - RNA, 86 nt, Homo sapiens
ggaaaaaggaaacaggaacaggacgacccaggagacgcaggccaaggagaaagcagccagaaagcgagcgacggaacacaaacagg

SEQ ID NO: 192814 - RNA, 86 nt, Homo sapiens
cgcgcggccgcggcggcggagaagcagccgccagccagcagcccgccagccgccgggagccgcaagcaggaagaaaagagcggggc

SEQ ID NO: 192815 - RNA, 68 nt, Homo sapiens
aggggaagaggcgccgggacagggcaggcaccccccaggaggagacgcccaggccacacaaagacccc

SEQ ID NO: 192816 - RNA, 85 nt, Homo sapiens
caagcagaccagcaagcgccggagacggcgagcagcgaaaccgagcgagcagaccgggcgagcaggagcgccccccgcagccccg

SEQ ID NO: 192817 - RNA, 76 nt, Homo sapiens
gaagacggaccaggcaaaagggggcccccaaagggaagccaaacacaaaggaagaagcccggagacgaccaagagg

SEQ ID NO: 192818 - RNA, 81 nt, Homo sapiens
cccggccgcgaccagcgcggcccaagggagagacccagaggagccaaggcaaaggcggggagaaaccaagaagaaggccag

SEQ ID NO: 192819 - RNA, 103 nt, Homo sapiens
ccggcccccacgacgacccgccagacgaggcgacgccgcaaggacggccacggcagaaagggccgaccacccaggcggacaggcgcggaagggacacacccgc

SEQ ID NO: 192820 - RNA, 78 nt, Homo sapiens
ccggcggacaggccgcacaaaaagagacacaggacagcggaagcagagcgcggcccggcgcgcgccgacaggacgccc

SEQ ID NO: 192821 - RNA, 77 nt, Homo sapiens
agagccagaagaagcaggaaagcgaccaccacgaaaccccacagcccaggacccagcccggaagagacacgccccac

SEQ ID NO: 192822 - RNA, 52 nt, Homo sapiens
gccgccggccgcgcgccaaccgcgcgcgcccgagcggcgccgacacgggaag

SEQ ID NO: 192823 - RNA, 85 nt, Homo sapiens
gcggcgaccgaagccagcgggggccccagcaccgcaaccaccgccaccagccacggagggcagaggcgacagggggaccgcggcg

SEQ ID NO: 192824 - RNA, 79 nt, Homo sapiens
caaaaacaaaacgaaccaggacggcaagccggacccaagccagaagcccgcaaagcccccagaccgcagaaacagacaa

SEQ ID NO: 192825 - RNA, 71 nt, Homo sapiens
acacacacacccaacccaaaccaagaccagcaccagacagcgaaaaagaggacccaaaaaagagagaaaag

SEQ ID NO: 192826 - RNA, 61 nt, Homo sapiens
gcgcaagccccagacgagggaagagccgcaggaggagaaccaaacgcgcgcaaagaagcaa

SEQ ID NO: 192827 - RNA, 87 nt, Homo sapiens
cacgaggagcaaagcaaggaaggcacagacgcacgggacaggagagccgggcaagacggagagcacagggaacaccagaggcgggac

SEQ ID NO: 192828 - RNA, 80 nt, Homo sapiens
gcggggggcgggccggagcggcccgcgccgggcgccggcaccgcggcaggaaggaagcagccaccccgccaggccccccg

SEQ ID NO: 192829 - RNA, 79 nt, Homo sapiens
gagcagcgccaaacgccgggccgaccggcgccgcgggagccggccgcgggccacgcccagaccccgagggccagcccgg

SEQ ID NO: 192830 - RNA, 64 nt, Homo sapiens
ggggacagcgcacccaggggacagaaggcagaagacccgcaaaaccacagagaacacagacgac

SEQ ID NO: 192831 - RNA, 76 nt, Homo sapiens
ccgggacccggccggaccgccacgccccgcagggaacgggaaccagggaacaagcagcagccgagagccgaaaggg

SEQ ID NO: 192832 - RNA, 75 nt, Homo sapiens
ccaggcagcgccagcccggcagaccgaacaagaggaaggagacccaacaccccggccagacgggccaccaggccg

SEQ ID NO: 192833 - RNA, 60 nt, Homo sapiens
cagacaggacaccaaacaccgccgccgccccacgacggcaggcgcacggaacagcgaggc

SEQ ID NO: 192834 - RNA, 73 nt, Homo sapiens
cgcgggagagcaagggaaagggagccggcccaggaggacagaccggaacacccagaagaaagcgcgcccccaa

SEQ ID NO: 192835 - RNA, 84 nt, Homo sapiens
ccggaagagacgaggcggaacaccgcacagagcagccggacgccccgaccaagagggaccgcaaaggaaaacggcaggacggac

SEQ ID NO: 192836 - RNA, 79 nt, Homo sapiens
agaccagcgaccaccggcacagccgcagagaaacaagcacgggcggcagccgcagggacgccagacgggacacgcacag

SEQ ID NO: 192837 - RNA, 81 nt, Homo sapiens
acgaagcccccgggcgcccgcgagccgggcggccaaggcggcgcagaggaagaaaagcgaccggaaaacacgcaaaaaaaa

SEQ ID NO: 192838 - RNA, 71 nt, Homo sapiens
ggaaaagggcagggacagcgcaggcagcagaaacgagaccgcgcacagaaggaagaggagaggcagaaaga

SEQ ID NO: 192839 - RNA, 81 nt, Homo sapiens
ggggagcgcgccagaggccagcccgcggcccgaagggacgagaacccccgcgaaccagaggaacccagcgagcgagagcgg

SEQ ID NO: 192840 - RNA, 63 nt, Homo sapiens
acgcacggaccaaaaacccgcaacagcccccgcccaagaaaggcagcaacaggggaagcggag

SEQ ID NO: 192841 - RNA, 70 nt, Homo sapiens
aaggagccgacgcaacgacgaaacccaacacgacagcgaacacggccgccaggaggaagaaagcgggcaa

SEQ ID NO: 192842 - RNA, 76 nt, Homo sapiens
cccaggcgcggaccacgggggcgacggaccacaagacgcacccacaaccagacccgaacgacaacacgaagaggaa

SEQ ID NO: 192843 - RNA, 61 nt, Homo sapiens
ggacgagggaaggcaagagcgaaccgcgcgcacaaagagcacaacgccccacccgaccccg

SEQ ID NO: 192844 - RNA, 77 nt, Homo sapiens
accaacgggaacaaaacacacacccgcagacaagaacggagaggcccaggaacagcaggcccagcaaaggagacccc

SEQ ID NO: 192845 - RNA, 81 nt, Homo sapiens
gcgccgaggagccgaggaagagggcggcgacgggggggacgagcggagcccgggacaggagaggagcccccgcgcccaggc

SEQ ID NO: 192846 - RNA, 81 nt, Homo sapiens
ccacagcagccagccggcccgaggacaccgacaccagcagcggagaggagcgaagagcgaagccagccagccgccgaacag

SEQ ID NO: 192847 - RNA, 98 nt, Homo sapiens
cgggcgcacgcaagaggaggggacacagcgccacggggacagcgccacccgagggcgaagcagccaagaaaccaaaaacaggcgggagagcaggagag

SEQ ID NO: 192848 - RNA, 77 nt, Homo sapiens
agagggagaaaaggccgggaaacggcaaaggccggcaaccgccagacaggaggaacgaagccgcggaggaccccaga

SEQ ID NO: 192849 - RNA, 59 nt, Homo sapiens
ggcgaacgaagcgggcgggagaccaggacgagcccccgcccacagcagggcaagcgggc

SEQ ID NO: 192850 - RNA, 72 nt, Homo sapiens
gaacccccggccggggggaaggggggagcggcagaaccagaggagaggggcacgccccggcccaggcggcgg

SEQ ID NO: 192851 - RNA, 70 nt, Homo sapiens
caccacagaaggggaacaaacagaggcaaagagcagagcggcggaggccgaacggagacccagcaaaaaa

SEQ ID NO: 192852 - RNA, 80 nt, Homo sapiens
acaacccaccaacagggaggaagaaggagcggggacagacacagagcgcaaggcgaaagggcccccaccaccggagccag

SEQ ID NO: 192853 - RNA, 75 nt, Homo sapiens
aaaggagcggaagaggccacgaggcgcacaccgccagcccaagaaaaagggaaacccagacgacaaggaaggcca

SEQ ID NO: 192854 - RNA, 75 nt, Homo sapiens
gcccccgggaccgcaggcccacacggcccgggcaagcggagagcacaaccacacaggcgcggcgagaagaaaacg

SEQ ID NO: 192855 - RNA, 68 nt, Homo sapiens
gaaacaccagagagcacgcccagcccagcggcaggcgggcaggcacagcagaagaagcacacaaccac

SEQ ID NO: 192856 - RNA, 90 nt, Homo sapiens
ggaagcgggccaaaacgaaacccagcaagacacgggcaccagggaccggagaagggcgggaaacaggcggaggcagaggacgccggaccc

SEQ ID NO: 192857 - RNA, 71 nt, Homo sapiens
agagacaacaccgagagagaaacgagacagaacaccacccggggaaccgaaccagagaacccccggcccgg

SEQ ID NO: 192858 - RNA, 76 nt, Homo sapiens
gccacgaagggggagagaagcgccagaggggcccacccaaccagaaacacagccaaaggaaagaaaaggaccagag

SEQ ID NO: 192859 - RNA, 80 nt, Homo sapiens
gggaagcaaaaaaagcccagggaggaaagagcagggcagacacaaggaacagccagccaggagaaaaacgaacccaacag

SEQ ID NO: 192860 - RNA, 57 nt, Homo sapiens
cagcgagacaagaagggcgcaaaggacgggcggacacagcaaggcacaggagagaaa

SEQ ID NO: 192861 - RNA, 75 nt, Homo sapiens
gggcccggagaggacccgacagagaggagcggagaacacagccacccgccagggggacacagagccacaaaagag

SEQ ID NO: 192862 - RNA, 56 nt, Homo sapiens
gagcggaccgagagcgcgaaacgcacgagaagaagaaaaacagagcccgacgaaac

SEQ ID NO: 192863 - RNA, 77 nt, Homo sapiens
gacccagcgccggaccccaccgaccacagaccaggagcgcggccagagagacggggcaccggagccaggaggccgac

SEQ ID NO: 192864 - RNA, 59 nt, Homo sapiens
gaagccaaacggaagcgggccgcggaaggaagaccgccccaaggaggacacgcgaccga

SEQ ID NO: 192865 - RNA, 75 nt, Homo sapiens
gagagagcaccgcagagggacccaaagaacaagccacacgcccacaaggaagaaggaaacaggaaaggcgaaaaa

SEQ ID NO: 192866 - RNA, 75 nt, Homo sapiens
ggacacaaccagcaccacccaacacagaccgaacaaccgcaggggagcggagcaagaaaccaagacaaacaaaag

SEQ ID NO: 192867 - RNA, 68 nt, Homo sapiens
cggaggaacaagagcccgccagcaccagccagggggaagaaaaccccagagagacccggcgccgacac

SEQ ID NO: 192868 - RNA, 83 nt, Homo sapiens
cggggcacggggaccggcgccagcccggcgggacacacaagcaccccaaaacccaagaagcccccgagcgcccacagcagaag

SEQ ID NO: 192869 - RNA, 78 nt, Homo sapiens
ggaacggggagcgcccgcaccccgccagggcaccaggagagacgaagggcacacacccagggacgccccaacaacccg

SEQ ID NO: 192870 - RNA, 80 nt, Homo sapiens
cggaccaccagccagcgcggaccagaccggaacgcccaagccccaccgcgagaaagccagacgggacgaaagccacagag

SEQ ID NO: 192871 - RNA, 73 nt, Homo sapiens
ccaaaggggggggaccaacaggagccacacaaagcaaacaaaggggagggcgggcccgacaacaacaaccgaa

SEQ ID NO: 192872 - RNA, 75 nt, Homo sapiens
gacaacggaccaaccggaaaccaaagaaccccagaggagaccgaaagcgcacaagagcaggaccaggagagccgc

SEQ ID NO: 192873 - RNA, 90 nt, Homo sapiens
cgagagacacgcccgcccgaggacacgggagcgggcagcggaagcgaggcgccgaaccgggccaaggacccaccgccggccccaaaggcg

SEQ ID NO: 192874 - RNA, 50 nt, Homo sapiens
ggacaagccgagaacgcaccaggacaaaagaagggcagcacaaaggaaag

SEQ ID NO: 192875 - RNA, 90 nt, Homo sapiens
ccagcccaacaccggaaacccaaacaccagccacgcaccccaggagaaccaggggaagggggagcccggggcggaggaggaaagacccgc

SEQ ID NO: 192876 - RNA, 69 nt, Homo sapiens
agaaacacccagagcccgcaacccggcagcagaagacaagaagaggaggcacgggaccccaaccaggac

SEQ ID NO: 192877 - RNA, 75 nt, Homo sapiens
ccaacccaagaagcagaggacagcgaccgaagaagcacgaccaaaaaaccaaggacgacgggaaaccggacccgc

SEQ ID NO: 192878 - RNA, 86 nt, Homo sapiens
cgcaaagcgcgagacccgggcgggggcaccgagggcaccacgcgcggcggacacacacgaccacgggagggaacggaagaagccag

SEQ ID NO: 192879 - RNA, 80 nt, Homo sapiens
gaggagaaacgcggccgggccggcaccccgcaacccgcagagaggacccggcccgacggcagaagaaaacccaagcagca

SEQ ID NO: 192880 - RNA, 59 nt, Homo sapiens
ggaaagacccaaaaaggaggcacccacagaagccggaagagaagaccggcgaaagagaa

SEQ ID NO: 192881 - RNA, 82 nt, Homo sapiens
ggaaagggagagacccagccccacaggggccacgcccgggaccggccagggaacaaggccggggaagaaggggaggccgaaa

SEQ ID NO: 192882 - RNA, 67 nt, Homo sapiens
caaggccacggcggcgaccagcggcggggagccaagagccaagagcgggagagcgcaaggacaccgc

SEQ ID NO: 192883 - RNA, 79 nt, Homo sapiens
caagggacagccgccccgggcacacaccccgacccgcccccccaggggcggcacagagagaagaccgaccaggacagga

SEQ ID NO: 192884 - RNA, 66 nt, Homo sapiens
cccagcagcccccgaaggcccacaggacaggagagaaagacgcgcaccacgacaaagaagagaaaa

SEQ ID NO: 192885 - RNA, 67 nt, Homo sapiens
gggaaagcacaagcggagcccaacgaaaccgaacagcccagagccaggagaagcagaacgggacacc

SEQ ID NO: 192886 - RNA, 89 nt, Homo sapiens
cccccaacccaccgaacgaacacacgggacaaccagcgacgccggagcagcccaacccagaccccaagaagaagcggaagaggagccgc

SEQ ID NO: 192887 - RNA, 85 nt, Homo sapiens
gacaccaaacaccgccgccggagggggaagacagagaagaccacacaaccgaaggggccgggcaggacggcccggggcagcaaga

SEQ ID NO: 192888 - RNA, 71 nt, Homo sapiens
ccggaaggcaagaaaccagaaagagaacgggacaacaaaagagccacccaaggcaaggacggggacacaag

SEQ ID NO: 192889 - RNA, 42 nt, Homo sapiens
aggcgccaccagcccggaggacaaccggcgaaacaccacagg

SEQ ID NO: 192890 - RNA, 74 nt, Homo sapiens
ggacggccggcggcacccgcacccggggacaagcgcgggaacggcgcggaaggccaggcaagaaacacagaagg

SEQ ID NO: 192891 - RNA, 74 nt, Homo sapiens
gcccgccacggcaacggcggacccccggaaagggagagccagaacagaagcggaaagagaggaacagagggcac

SEQ ID NO: 192892 - RNA, 64 nt, Homo sapiens
gcagaaagacgaaggcgaacaggaacaaagagagagaagagaaccaggagcggcagaccgccgc

SEQ ID NO: 192893 - RNA, 71 nt, Homo sapiens
cggcaggaccgggcaggagacaggccggacaggcgaacaagaggcgccagcgggcgcgccggaagaacagc

SEQ ID NO: 192894 - RNA, 74 nt, Homo sapiens
cgagcagcaccagaaccgcgggagcgcggcgccggcgcaaaaaccagacaccccacaccaccacccagacgacc

SEQ ID NO: 192895 - RNA, 78 nt, Homo sapiens
ggagccagggaccagccagagaacgccccaacgggggacccaccgacgagcaagacaacgacgaaagacccacagaag

SEQ ID NO: 192896 - RNA, 79 nt, Homo sapiens
caggcggcccagggcggggccaggagaacgcgcgagagggaaccaagaccaggacaaagaagacccggagagacaagcc

SEQ ID NO: 192897 - RNA, 80 nt, Homo sapiens
gaggagagccgcagagcgcgcagaccccggcaaaagcagaccggaaaacccaccggcaagaccacacccgaggggagccc

SEQ ID NO: 192898 - RNA, 57 nt, Homo sapiens
gaagaggggagaagacgaggagccagagggaaggccaaaggacaggggaaacagaga

SEQ ID NO: 192899 - RNA, 70 nt, Homo sapiens
agcccaccccagagcgcaaggagaaagccagacacgcaacgaaagagcaagccagacagcagacaccccg

SEQ ID NO: 192900 - RNA, 74 nt, Homo sapiens
gggggggagcagacgggacagggaggagaaggccggcgcggaagaggccggcggcgggacggccccacgggacc

SEQ ID NO: 192901 - RNA, 72 nt, Homo sapiens
ggaccagacaagaccaaagaaaacaaagccgccagagcaggaagcgcggaaaagggcagaaggagcccccac

SEQ ID NO: 192902 - RNA, 70 nt, Homo sapiens
gcagacgccgccggagcgacaaggcccacaaccgcgaaaacgaaacagaagaagaaggcccgaaagaaca

SEQ ID NO: 192903 - RNA, 56 nt, Homo sapiens
ggacaaaaggcgaagacgccaagaccacgaaggcagcgggcggaggacggggcacc

SEQ ID NO: 192904 - RNA, 40 nt, Homo sapiens
ggccgcgagcgcacgcaagaggagacaggccgagaccgag

SEQ ID NO: 192905 - RNA, 52 nt, Homo sapiens
aaccggagagaggagaacgaacaccggaccgccagcgaggggcgggagcagc

SEQ ID NO: 192906 - RNA, 71 nt, Homo sapiens
gagaaggaccaagaaccagaaagagacggcgccgaggaagcacaggcaacaccacccgcgccgcgcccggc

SEQ ID NO: 192907 - RNA, 82 nt, Homo sapiens
gcccacgcccgcgggccaccgcagagccccaagagagaacgagggccaaagccaacgaagaaaagaggagcgccagagcgaa

SEQ ID NO: 192908 - RNA, 75 nt, Homo sapiens
gagacccacacgccccagcccccgcagagagggggcaaaccgacaccaccagagccaggcgccgcaccgcccccc

SEQ ID NO: 192909 - RNA, 78 nt, Homo sapiens
acccgggagcccaagacaacgaccccacagaaacaagccaccaggagaagcaaaagagcgcgccaggaggggggggca

SEQ ID NO: 192910 - RNA, 75 nt, Homo sapiens
ggaggaggaaaaaggaccaaacagcaagggaagcggagcaaggaaacaaagccgaaagcaaaccgagcaccaaac

SEQ ID NO: 192911 - RNA, 72 nt, Homo sapiens
caggcaggccccccggagcggccccgccgcggagccagcagcagcgcagagcgcgggagcgagcggcccaga

SEQ ID NO: 192912 - RNA, 78 nt, Homo sapiens
ggcaggccaggaccgcccgggcacccagagcaggcgcaccaccacaccaaggggccgcggagcagcggaagggaacgc

SEQ ID NO: 192913 - RNA, 120 nt, Homo sapiens
acaacaggaaagagaccacccgggagaagaaggagaagggggccacagcgaaaaacccaagcccagggccgaaaagaaaacaggagaaccacccgccaacagcaagcgacccaaggcggg

SEQ ID NO: 192914 - RNA, 86 nt, Homo sapiens
ggcacgggacagcagcggacaggagcaagccacaggagagggcagacaccagcccccggacaacccaagggaaaggagcgcgggca

SEQ ID NO: 192915 - RNA, 91 nt, Homo sapiens
ggccccccgcgaaacagggggaacgaaacggccccggggggccaggagaggaagacgaggaagcagaagaacaccaagcccaccaacaagg

SEQ ID NO: 192916 - RNA, 66 nt, Homo sapiens
gaaaggggggccgacaggcgcccacacccaagcaggggagaagcagaccgcaccaggcgggacccc

SEQ ID NO: 192917 - RNA, 68 nt, Homo sapiens
acagcgaggagccaccacacgaccccgagcccggcgagcacggggagggagaagaaaaagcagaaagg

SEQ ID NO: 192918 - RNA, 81 nt, Homo sapiens
ccagggacccccgggcggccacaccgcgaccgcccgccacggacgcaagacgccaacaagccacccacgccgggaacgcaa

SEQ ID NO: 192919 - RNA, 83 nt, Homo sapiens
cagcccagggggaaaggaccgggcggaccggggaccgcccagaggaggaaaagggacggaacggagaagagacaagcgacgaa

SEQ ID NO: 192920 - RNA, 77 nt, Homo sapiens
ccaccagccgcaccaaggagacaggacgaagcccaaaccacaagccacaaaagaaaacccacgcccacagccgcggg

SEQ ID NO: 192921 - RNA, 77 nt, Homo sapiens
cagccccggccgggccgaccggcagcagggggaaaagaaacaaacaacaagaagaaggacaaggaacgaaggcaagg

SEQ ID NO: 192922 - RNA, 67 nt, Homo sapiens
gcaagccgccgggacagccacgacgaagagagaagaagcaaaccgggaccggaagcaccaaggagaa

SEQ ID NO: 192923 - RNA, 74 nt, Homo sapiens
gaaaaaaggaagagaggccaaaacaccaacaagagagaggggaaaaaccgaagaaacgaggccgaagagcgaag

SEQ ID NO: 192924 - RNA, 68 nt, Homo sapiens
cacacgggaacccaagaaacaaacccagacgggcagaagagagagaaaggaaagaagaggacaaaggc

SEQ ID NO: 192925 - RNA, 56 nt, Homo sapiens
aaccccccgaagcgagggaagggcggacacaccgccggggggggcacagagccccg

SEQ ID NO: 192926 - RNA, 67 nt, Homo sapiens
gaaacgaagcgcacgaaacaccaagcgagggggaggggacggaaaaacgacccggaaacgcagacgg

SEQ ID NO: 192927 - RNA, 64 nt, Homo sapiens
cagaaccgaagccggaccggggcccagcaaagccaaaggaaggaccagggagcccacaggacag

SEQ ID NO: 192928 - RNA, 65 nt, Homo sapiens
gagggcgaaccgaagaggaaagagcaagaccccgccggagccccaaacagaagggccagagaggg

SEQ ID NO: 192929 - RNA, 81 nt, Homo sapiens
cacccccacggaggaaggaacgggcacagcaggcggcacagggagaacacagggccccaccgcgccccacagaaaacgagc

SEQ ID NO: 192930 - RNA, 76 nt, Homo sapiens
gaggcccagacggccaaaggaggaagggacgacggaccgaaaagcacccacggagcgagagagacccgcgaaaccg

SEQ ID NO: 192931 - RNA, 104 nt, Homo sapiens
aaagaggccaaagacccaaaaccacgcaagacgaagagcagagcggaccaaaccagggcgaccaacggcggacaggaggagcaagaaaaaaaacgggccagaca

SEQ ID NO: 192932 - RNA, 67 nt, Homo sapiens
cccagccaagccccgccgacgcgggcaccggagccagccccgcagcgggcggcggccggggcagcgc

SEQ ID NO: 192933 - RNA, 77 nt, Homo sapiens
ggggagggaagagacaggaagagggcccaggcgagagaggagaaaaacaacaccaggacacagaaggcgaaacagaa

SEQ ID NO: 192934 - RNA, 74 nt, Homo sapiens
ccgccaggcccgcgggagcaccgggagccgagggcggaggcgacacccagagggacccccagagggggccccca

SEQ ID NO: 192935 - RNA, 68 nt, Homo sapiens
cccgaagcgccacccgaggaagggccaaggaaaagcgcaaaaaagggacccacgcaccggacgacacc

SEQ ID NO: 192936 - RNA, 70 nt, Homo sapiens
aagagccgccaccagagcaaggaagaaaaaaggccaaggcacgggaaacaaaggggacacaggcaaaacg

SEQ ID NO: 192937 - RNA, 86 nt, Homo sapiens
cccaccggcggccccccgcgccgcagccgcccagaacccgaccaacaccagaacccagcgcccccagagaggaggcagagagcccc

SEQ ID NO: 192938 - RNA, 68 nt, Homo sapiens
ggggcagacagagaagaacagacgccgcacccccgcgacacagggggacaaaggggaggacccgagaa

SEQ ID NO: 192939 - RNA, 85 nt, Homo sapiens
cccccgggggagggggcccccacgccgcagggccccccgccccaccccgaggcccaggaagaaaagcgccagcgagaccggacgg

SEQ ID NO: 192940 - RNA, 93 nt, Homo sapiens
agggaggacgcggcggcacccacgcgggggacggagaggaaccaggcacggcgccgaaacccacacagaggagggcacgcggccagaggcggg

SEQ ID NO: 192941 - RNA, 74 nt, Homo sapiens
agaggccagaagaggaaagagagaagagagacgaccaggaaagccggcgcggaacggcgggagaagaagagcgc

SEQ ID NO: 192942 - RNA, 67 nt, Homo sapiens
aacagaagacagcgaaggccgcggacccccccccccccaccccacaggagaagagacgaaagaagac

SEQ ID NO: 192943 - RNA, 36 nt, Homo sapiens
gccccccagcgggaaacgcggaagccaggaggacga

SEQ ID NO: 192944 - RNA, 72 nt, Homo sapiens
agccggccaacagcacggaagcgagaacggggcagagacaagccgacaagaaaaaagggaagaccacagaaa

SEQ ID NO: 192945 - RNA, 62 nt, Homo sapiens
ggccccggcccacaggggggggcaaacccgagagaacggaaaccacagaaagaaccaagaag

SEQ ID NO: 192946 - RNA, 73 nt, Homo sapiens
cgagaggagccggagagaaaaagagaaggaaaaaccagacaagccagagccacggagaccccggaggccccag

SEQ ID NO: 192947 - RNA, 67 nt, Homo sapiens
cggccagggggaggcccgacggcgcggggagagagccaagcaaccaagccaggcaagcggcccacgc

SEQ ID NO: 192948 - RNA, 81 nt, Homo sapiens
acaggagacccgaaagacacgggagaacaacgacagaacggggacaccaaaagcacacaagccggagccaccccaacaacc

SEQ ID NO: 192949 - RNA, 68 nt, Homo sapiens
accacacaacggaacagggagggaagaaaacaccgcccaacacggggaaagccgccgcgacgacgcca

SEQ ID NO: 192950 - RNA, 57 nt, Homo sapiens
gggcaccacagccagcaggcgacaaggggcgacaggcggccgaaaacaggacggacc

SEQ ID NO: 192951 - RNA, 73 nt, Homo sapiens
agcccccccaaccaggggacccccaacccaccggcacgacaggcaggcgccagagggacccacgacccagacg

SEQ ID NO: 192952 - RNA, 55 nt, Homo sapiens
aaggggggacagggagaaaaacaagcgggagaacagagacccaccaagaaaccag

SEQ ID NO: 192953 - RNA, 65 nt, Homo sapiens
caccagcaggacaggaaaaaaagagaggccaagaagaccaagggaagaacgcacacgcgcaaaag

SEQ ID NO: 192954 - RNA, 85 nt, Homo sapiens
gaaccggagaccccgaaaacggaagcgcagggagaaggaagaggggaaaagcggagcccagggagaaagcggacggccacaccga

SEQ ID NO: 192955 - RNA, 51 nt, Homo sapiens
gcagggcaacacgacaaaggcaccacagaacagccgaagcaggccaccagc

SEQ ID NO: 192956 - RNA, 66 nt, Homo sapiens
gcggggcaggggcgacgagagcgcgcggaggcagacagggggaggaagaagccggcacagcccagg

SEQ ID NO: 192957 - RNA, 84 nt, Homo sapiens
cgacgagcaagaagcagcccaaagcgaagacagacgcaagagcagcagaaaacaggcagaaaagcagagagccaggcccgaaac

SEQ ID NO: 192958 - RNA, 83 nt, Homo sapiens
cgaggagccggcgcggcgcagcccacggcgcaggcccacggagcgcagccgccgagggaaaggaagacaggacgcgccaacga

SEQ ID NO: 192959 - RNA, 79 nt, Homo sapiens
ggacccggccgaggcgggcgcaagagaaggcaccaagaggggccggagagccacgggagcccacgcccaggaggcccgc

SEQ ID NO: 192960 - RNA, 82 nt, Homo sapiens
cggagaggggcggcgccgcgcggccgagagcgcaggagaacaccaaccaccagggaagagcgggaaagaaagagaaaggaaa

SEQ ID NO: 192961 - RNA, 36 nt, Homo sapiens
acgccccacgaccgccaggccaagcagagcccccgg

SEQ ID NO: 192962 - RNA, 82 nt, Homo sapiens
ggacaggaggcaggccgccggccgaaggcccgagcgcccgaggcgcgggaggggggaccgggacaaaccggcgaccacacac

SEQ ID NO: 192963 - RNA, 69 nt, Homo sapiens
aaagaaagggagaccagaagagaaccgggaccaagcgccagaacgaccaacgaccacaacgacgggaga

SEQ ID NO: 192964 - RNA, 74 nt, Homo sapiens
aacgaccacgagagaaaagagccaaacaaggaaacagaagacggaaagagagaaccccagagggcgcggaagcc

SEQ ID NO: 192965 - RNA, 77 nt, Homo sapiens
acggaccgagaccggaccgagagcggaccgagagcgcgaaacgcacgagaagcccagagagagacccagcaaacaaa

SEQ ID NO: 192966 - RNA, 60 nt, Homo sapiens
gcgcgccccgcggggcgaaaacgcaaggagccggaacaggggaggccacaagcgaggccg

SEQ ID NO: 192967 - RNA, 67 nt, Homo sapiens
aggagcccccagcggggcggagcgaccccgcggggcgcgcccagcggcagagccgaggacccgagcg

SEQ ID NO: 192968 - RNA, 71 nt, Homo sapiens
gcgaagcgggcacggggcgggccacgggaaacaggcacagaggcgggaagaggccacaagggagaagcggg

SEQ ID NO: 192969 - RNA, 81 nt, Homo sapiens
aacaaggagaagagccaggaaacaggaggaagaacccaagccaaagcccagaggccgcgacagccaccaaagcagcgcgga

SEQ ID NO: 192970 - RNA, 75 nt, Homo sapiens
ggaccaggaggcgagcaacaggcagaaggaacgagggagcacggagggaaaagaagccgccgacccccgccccag

SEQ ID NO: 192971 - RNA, 73 nt, Homo sapiens
caggaacaccaaggaagcaaaagccccagaacgaacaccaaacgggcaacccgaccacccgcaagacgaagaa

SEQ ID NO: 192972 - RNA, 82 nt, Homo sapiens
cgagcccccgccgcgccagggccagaacgaccgagggcacggccgaggaccgccgaccagggccgggccggggagcgccgcc

SEQ ID NO: 192973 - RNA, 64 nt, Homo sapiens
gggacggaaagggggcaggaaagaccaaaccagacggcggaaaacggggacaccggaccggacc

SEQ ID NO: 192974 - RNA, 62 nt, Homo sapiens
acccccgcgaaaaagggacaaacggaagcaaggaaaacaaggaccgaaacagcaacaaccgc

SEQ ID NO: 192975 - RNA, 63 nt, Homo sapiens
caggacgccccacggagaagcagggcaagggggacgccagagcgaagcgaccaacccgcagag

SEQ ID NO: 192976 - RNA, 74 nt, Homo sapiens
aggaacccagccaacgagaaaacaaacaagcggccacccgaaagagccggaggagccaccaacagaagcaggag

SEQ ID NO: 192977 - RNA, 71 nt, Homo sapiens
gacggcaggcaagccgacccaccacgaacacaggagaagacaacaggaaaagaaacccccgaacccggcag

SEQ ID NO: 192978 - RNA, 55 nt, Homo sapiens
cacgccccgcgacgcgcgcaggagaaaaggacgacggaaccaccacgaaaaaaag

SEQ ID NO: 192979 - RNA, 73 nt, Homo sapiens
cccggagcacacgcgcgcagaacaccgcccaccggagccccaccccacagccagggaccgacccagcccccca

SEQ ID NO: 192980 - RNA, 97 nt, Homo sapiens
cgggaagggaagcggccaaggcacggaggccgcgagcccacgcaggagacgggaggagcgacaacggagcacacccaccccgcgcaagggcagcgca

SEQ ID NO: 192981 - RNA, 74 nt, Homo sapiens
cgaccccgaaaaaaagaggagcccgcaagaggccagcgaaaaccgaaggagggcacagaaggaaggaaaccacc

SEQ ID NO: 192982 - RNA, 69 nt, Homo sapiens
caagcggaggccaggaacaaaggaaagcacccacccggcgcccagccggcaacgcggaaaagaggccgg

SEQ ID NO: 192983 - RNA, 59 nt, Homo sapiens
gagcgaccagggacaaaagaaggccgccagaagacagccaaaacacccaaacagaccac

SEQ ID NO: 192984 - RNA, 48 nt, Homo sapiens
gcgagcagaggacgacaggccgggagaggacccaagaagaccagccga

SEQ ID NO: 192985 - RNA, 86 nt, Homo sapiens
agcaaaaacacaagaagccgaaagggaggaagaccggaagggggagaccccaagaagaagcggaagaggagccgcggaaccaagac

SEQ ID NO: 192986 - RNA, 68 nt, Homo sapiens
accagaagaggcacacgccagacagacaggaacgagggccgacacgaggagaacagaagccgccaggg

SEQ ID NO: 192987 - RNA, 79 nt, Homo sapiens
gcgccgccccgagccgaccgcgccgcacgggagccagcggggacccccaggccaaggaaagcggccagaagggggccac

SEQ ID NO: 192988 - RNA, 81 nt, Homo sapiens
cgaaacagcggaccggaggagggccagacaaggggaacacaagaggagagaaggggaccgcagggagaaaaggccagagag

SEQ ID NO: 192989 - RNA, 68 nt, Homo sapiens
ggcaacaggacacaaggcagcgcgcagcgagacaaaagacgcacccaccaacgaccagaccccaaacc

SEQ ID NO: 192990 - RNA, 78 nt, Homo sapiens
gaaaaagccagccagaagaggcgcgcgcgcggcacaccgggaaagacaaggagccgggccgagaaaccgaaccagaga

SEQ ID NO: 192991 - RNA, 71 nt, Homo sapiens
cccacgcaaacccaaagaccccgccggagacgagaggcggcggccggggcagcgccgcgagccagcaacgg

SEQ ID NO: 192992 - RNA, 78 nt, Homo sapiens
caagagcggaggcgcccggcggagcagaggaaccacacgcgacagccaaagaacacggcagaagcccccaagggaaaa

SEQ ID NO: 192993 - RNA, 79 nt, Homo sapiens
ccacaccaagccaccgagagcaaccacagcggagacagagcgcacggggcggacgcagagacgagaaaaccaagcagcg

SEQ ID NO: 192994 - RNA, 84 nt, Homo sapiens
cgcaggcggcgcggagagggggcgcgagcggggaaaaggacccaagggggcaaaggcggaaacagcagaggacaccaggagagg

SEQ ID NO: 192995 - RNA, 80 nt, Homo sapiens
gcggcaagacggggcgggggccggaccaaggcaaagccaaagcaagagccaccgacagaaaagcacgccagaagaagacc

SEQ ID NO: 192996 - RNA, 80 nt, Homo sapiens
ccgccacgccagccagcacccggaggcccggagagcacgcagccccgaaggcggcccggccccccaaaaggcagcacacc

SEQ ID NO: 192997 - RNA, 58 nt, Homo sapiens
ggggggccaggaaacgccaaaacaccagaaccaaccgaaccgagcgaagcgccaggaa

SEQ ID NO: 192998 - RNA, 80 nt, Homo sapiens
acaagccaccacacccaaacaagaaggaggagaagcgaagcaacaaacagagagccaacccaacaagacacacagaaccg

SEQ ID NO: 192999 - RNA, 84 nt, Homo sapiens
gggcccagccggcagagcaaaccgcagaaggcacacaagaaggggcagagaggagagaggccaaggccgcacggaagcagcccg

SEQ ID NO: 193000 - RNA, 76 nt, Homo sapiens
ccggagcaggggaaaaaggaccaaccggcaagggacaacggccaaagaaaaggaagcggcaaacaagaccagagcg

SEQ ID NO: 193001 - RNA, 66 nt, Homo sapiens
ggggaccaaacacacaagaacacccaaagaggggaaccagcccgggagcaaacacccgggaaggag

SEQ ID NO: 193002 - RNA, 72 nt, Homo sapiens
aaagaggaagcccaccacaaaaacgaaggcggcggggggagaagagggagacccgaacgaagacgcagccca

SEQ ID NO: 193003 - RNA, 55 nt, Homo sapiens
ccaccaaagaacgaggaacccagagcaaagcaggccccccggaggccagcccccc

SEQ ID NO: 193004 - RNA, 78 nt, Homo sapiens
aacggaagcgcagggagaaggaagaggggaaaaggagacagggaaagagaaggcacagggcagagcaacagagacaca

SEQ ID NO: 193005 - RNA, 81 nt, Homo sapiens
ccgcacagcaggcggccaggccacgggccccaaggcgagcggagacagaaagacgcccggagccaggacagagggggcgcg

SEQ ID NO: 193006 - RNA, 76 nt, Homo sapiens
ggcgcggcaaaagcgacgggagcaggaccgcagacacgcgccgacaccggcaagagaggccgaagagaggcaaagc

SEQ ID NO: 193007 - RNA, 70 nt, Homo sapiens
aaaacaaccaacccacagccgggccgcccgcggcagagcagcagagcgccgcccacaagagacaaagaaa

SEQ ID NO: 193008 - RNA, 82 nt, Homo sapiens
agcacaaccacgagccaaacaaccagcccaaccacacgcaacaaccagcagcacagaggggccaaagcacggaggcaacggg

SEQ ID NO: 193009 - RNA, 85 nt, Homo sapiens
ggagagcagcaggagggcaggcgaggggcagagccggagagcagccccggcccccgagcaggggaacggcacagggaggggacag

SEQ ID NO: 193010 - RNA, 75 nt, Homo sapiens
cggaccccgaccccgaggcgagacggaaagacgacgacacgcggaggcgccggaagcccccacccaacaagaccc

SEQ ID NO: 193011 - RNA, 69 nt, Homo sapiens
aaagcacgggaggagagcggagaagcggaggagaccaaggaggccaccaccacagaaggagcggcacgg

SEQ ID NO: 193012 - RNA, 85 nt, Homo sapiens
cgaaaggaagcaagcagcagaagagccaaggaaaaacagcaagaacccaaaagggcgcaaaagaccaaccccggaagggaaggca

SEQ ID NO: 193013 - RNA, 54 nt, Homo sapiens
ggcaaacgaaggaagagcagcaaaggaagagagggaaaaccaacggcccggagg

SEQ ID NO: 193014 - RNA, 75 nt, Homo sapiens
cggagaagccggcccagccacacaggcagaaggcggcccccccgcccacacgagaccacgagaagggcggcccga

SEQ ID NO: 193015 - RNA, 56 nt, Homo sapiens
gaaaggggaaagcaagaaaaagagccaaacggagaaggacagacaagggagggcca

SEQ ID NO: 193016 - RNA, 80 nt, Homo sapiens
gaagcacacaaacaagcagcgaacaccagaccagagcacgggcagcagcgccaagacaaggcagcgggccaagcaccagg

SEQ ID NO: 193017 - RNA, 78 nt, Homo sapiens
cggggccgccgcgccgacgcgcccgagaacagggaacacaggccgagacaaagccagaaaacagcggcaccggaggcc

SEQ ID NO: 193018 - RNA, 84 nt, Homo sapiens
agccacgagacagacgccaggggcacccagccaggcagcaaggccggaggacgccggcagcacggcgaagccgacgagcccgaa

SEQ ID NO: 193019 - RNA, 67 nt, Homo sapiens
gcgagcggcggccagccggcaggaccacaccacggagccaggaggaagccaggacacggaaggagag

SEQ ID NO: 193020 - RNA, 77 nt, Homo sapiens
gaaaccgccagcaggccgggcacacggacaacagaacccaaaagcgagcggaagacgggaacggagccccccgcaca

SEQ ID NO: 193021 - RNA, 76 nt, Homo sapiens
gcacggagaaagccgacggggagggaccagcagagcaggacgaacccgacacagccagcccccacccccgccggcc

SEQ ID NO: 193022 - RNA, 77 nt, Homo sapiens
ccccaaggccccggcgggccccgcgaaagaccggcagcccacggggcccgcgaagcgggacaagggcgcaccggggc

SEQ ID NO: 193023 - RNA, 77 nt, Homo sapiens
gaacaaacaaacacccagaaacaagagcagagaccgggaggcagcaacccagaggccaccgccaagcaaaacaaaac

SEQ ID NO: 193024 - RNA, 73 nt, Homo sapiens
cagacaaaaacaagggaaaccacaaggaccaaacaccaaaacagagacaagaaagagcgaagacacgggaaag

SEQ ID NO: 193025 - RNA, 72 nt, Homo sapiens
ccaccacggccaaaacacaaacaagaccgcaggcagagcgaaggacgcgcgcacaacagaacaacagaaagc

SEQ ID NO: 193026 - RNA, 82 nt, Homo sapiens
caaagccaacaagaccaagcccgcggacgccaggggccagacccacacacagagagacggaaggccacaggccgaggagaag

SEQ ID NO: 193027 - RNA, 79 nt, Homo sapiens
cggagcggaggagacgggccgcacccgccccccgcgcccgccaccggccgccgcccggaaaaagaacagaggccaaccc

SEQ ID NO: 193028 - RNA, 68 nt, Homo sapiens
cagccaagaagacaagaggggggcaaagagccgaggacaccaacagacaacagcggcccagaggccac

SEQ ID NO: 193029 - RNA, 81 nt, Homo sapiens
caggaaggcaagaagcagaaagagacgccaggcgagcggaggaggcggggaagccaagaaaccagagcagaagcacgaagc

SEQ ID NO: 193030 - RNA, 82 nt, Homo sapiens
caagccagcagagcacagggagccaagcacggggcaaggccccaccgggccaagccagagaaaggacagggacaggaaagaa

SEQ ID NO: 193031 - RNA, 70 nt, Homo sapiens
cccaaggagaaaacaaaggagcaagaaacacagaagaagagagaagaagcaaaccgggaccggaagcacc

SEQ ID NO: 193032 - RNA, 66 nt, Homo sapiens
gcagggcgcccccggccagcgagcccgcccaccagccgaaccccccagaaaccggcggggccacca

SEQ ID NO: 193033 - RNA, 84 nt, Homo sapiens
cggccaggcggaggacagggcggggcagggccagccacaccgcagcgggcgggcgcggcggggagcccgccagcgcccaggccg

SEQ ID NO: 193034 - RNA, 80 nt, Homo sapiens
ggcaggaccccgacgacacgaagcaagcaggaggggcacgcccggaagaccagacccgcagcccagccagaccaagacca

SEQ ID NO: 193035 - RNA, 80 nt, Homo sapiens
ggcggccggccggagccgggcacgcggggacccgggaaagagcagaacgcccaagggagcaggagggaacccgacaggac

SEQ ID NO: 193036 - RNA, 37 nt, Homo sapiens
accagaacgcagcaacaaagaagccccgacacagaag

SEQ ID NO: 193037 - RNA, 83 nt, Homo sapiens
ggcaagagggcagaagaaagaaaggaaagagagggacaggcaaaaagggcgcagaaccggccgaaaagcacaaacagcaagaa

SEQ ID NO: 193038 - RNA, 83 nt, Homo sapiens
caaccgagggcgccgagaagccagcacgccgggagcggacacagcccagacaacaggcacaaagagagaaggaacacccacag

SEQ ID NO: 193039 - RNA, 87 nt, Homo sapiens
agaagaggcgcgacggaccagagcagacagagaccaggggccacaacggaaaccaggaaaccgcagaagaaaaggacgaaccccaga

SEQ ID NO: 193040 - RNA, 73 nt, Homo sapiens
aggaggcacggaggggcgccggagccaggcggccaaggcagacaagaccgacgccccggcgcagcaggaaggg

SEQ ID NO: 193041 - RNA, 59 nt, Homo sapiens
gcgggccgcgggaggacaccacccacagacaagcaaagggacagcaaaggcgcagcacc

SEQ ID NO: 193042 - RNA, 80 nt, Homo sapiens
cagagcgagccagcccagggccagggagcaggagccagggccgagcacgggaaacgcaaacagcagacggaagaccccac

SEQ ID NO: 193043 - RNA, 60 nt, Homo sapiens
ccccaccgccgcagacccccaagcagcagggcaagaggagcagcagcggcggggccaagc

SEQ ID NO: 193044 - RNA, 75 nt, Homo sapiens
acaagaagcaacaaagcgaagaaccacaggggcacacgagcagaaacaggacacagggaggaaggaggaagaacc

SEQ ID NO: 193045 - RNA, 79 nt, Homo sapiens
ggccagaccagaggaagacgggcacccacagcgaagcccacgagcgacagggaaaagaacccgcgaccggcagcagagc

SEQ ID NO: 193046 - RNA, 64 nt, Homo sapiens
gacccggccccggcccacaggggggggcaaacccgagagaacggcaacaaggagaccgcgaagg

SEQ ID NO: 193047 - RNA, 76 nt, Homo sapiens
agggccgggagcccgcaccgggccggcaggcgcagccaagcacggagagagacaacgaaccaggggaccggcaggc

SEQ ID NO: 193048 - RNA, 72 nt, Homo sapiens
acaggggggaccaacggagaaacgccagcacacacgacagggagcccagaagcgacaaccacggagaacaac

SEQ ID NO: 193049 - RNA, 74 nt, Homo sapiens
cagagaggagggagaacaagcaacggcgggaagaggacgcaacagagggacggcaaagcaaagcaggaaagaac

SEQ ID NO: 193050 - RNA, 82 nt, Homo sapiens
aggcccgccgcccccgccaagcggccaaccagagaggaaagccgaggacagccacacacgccccgggcaccagcaggagaag

SEQ ID NO: 193051 - RNA, 81 nt, Homo sapiens
gggacgccggcacgcgaagggccgcaccgcaagcggacccacaaaccgggagaccaagaacggcacacggacggagagaga

SEQ ID NO: 193052 - RNA, 79 nt, Homo sapiens
acccagaggcgggaggggccgggaggcagaggggcaggggaacacggccaaagccccagaggacaagccagaagagaca

SEQ ID NO: 193053 - RNA, 77 nt, Homo sapiens
cgccgcgagcccaccgccagcgccagagcgagcgccccgcccaggaagaagagagggcgaaggaggccacacagaag

SEQ ID NO: 193054 - RNA, 80 nt, Homo sapiens
aaggagggcgaagagcgaggagcggcggagaaaccaccacaaacacgaggccagcaacgaccaacaagacagacccgccc

SEQ ID NO: 193055 - RNA, 77 nt, Homo sapiens
gggaagcccgggaccgaaaaaacgggcagagcggcgggaaaccaccaacaacacccccaaaccaaaacagccggaag

SEQ ID NO: 193056 - RNA, 84 nt, Homo sapiens
acacaccaggcgcacggaaacggagcagcaaggaaaaggaaaccgcccgcccccagccagcccccggcccccccagcacacagg

SEQ ID NO: 193057 - RNA, 51 nt, Homo sapiens
ggaagagaggacggaaaggaaggagggagaacacccagccacccaccagcg

SEQ ID NO: 193058 - RNA, 81 nt, Homo sapiens
cagcacgcacgggcccacagcggaaagaagaaagccacagcaagacgcgagaaagggcagggaccccaagagccggccaca

SEQ ID NO: 193059 - RNA, 70 nt, Homo sapiens
gaacccacgccaaagaggaagcccaccacaaaaacgaaggcggcgggggagagagaaaagaacccccgga

SEQ ID NO: 193060 - RNA, 41 nt, Homo sapiens
aacaccagaacaaaaggcaggcaaaagcagaccggaaaacc

SEQ ID NO: 193061 - RNA, 61 nt, Homo sapiens
gccaagaggagaaggcagccaagccaggaaccagacgccccacgccccccgcagcccagcc

SEQ ID NO: 193062 - RNA, 88 nt, Homo sapiens
ccagacagcacgagaggccccagagagacacgggacgggaggacgaagacgaaaaggggaagagaccaaaccggcgaaccaagaagca

SEQ ID NO: 193063 - RNA, 64 nt, Homo sapiens
agggcaaacaccaagccagcagaggcgcccaaggcagagagagagaacccgagcgccgcagcgg

SEQ ID NO: 193064 - RNA, 82 nt, Homo sapiens
agggcgacagaggcaaaagggcaccgggcccggccccagggcccccggcccccggaaccggagcaaacggccacgggccaag

SEQ ID NO: 193065 - RNA, 55 nt, Homo sapiens
ccacagcaagaacggccagggaagacagaaggaagcaaagacagagcaaaaggag

SEQ ID NO: 193066 - RNA, 78 nt, Homo sapiens
cggccagccacgggagaagcaggaggaggccggagacgcagcagagcaggagcgaccgcccacacgccggcccgagca

SEQ ID NO: 193067 - RNA, 81 nt, Homo sapiens
agccggaccgcccgccagggagacaacaggccaggggagagagaaagcccagaaagaaagcacccagggccaggaacagag

SEQ ID NO: 193068 - RNA, 80 nt, Homo sapiens
ggccacccgggaacggaggagggacgcgcagcgagcagaggacggaggggagaagacaggaccacgcaggcaacccccag

SEQ ID NO: 193069 - RNA, 95 nt, Homo sapiens
acaaaccaaagaggcgacacggcaagagagcccaaggccgcaacaagcagagaagagcaagaaagagggaacggggaggccccgacacgaccccg

SEQ ID NO: 193070 - RNA, 73 nt, Homo sapiens
ggcgcagccggacaagccgccaccgaaccagacccaaaagagcaaacaaccgacggagaaggaaaaaagccga

SEQ ID NO: 193071 - RNA, 75 nt, Homo sapiens
gacaagcagagacgaaccaggcaaaggacaggcaacagccgcaaacggaccagggcagaggagaagcagaggagc

SEQ ID NO: 193072 - RNA, 73 nt, Homo sapiens
cgacagggcaggcaccgaggaagcgggcccccagcagaaggcagaacagaaccgagccagaagcggggggagg

SEQ ID NO: 193073 - RNA, 76 nt, Homo sapiens
acagcaagcagagcagagacacagaggacccgaaaccggagagcaccgcgaaaaggcggccgagggcagcgaacac

SEQ ID NO: 193074 - RNA, 55 nt, Homo sapiens
cggacggacccagcacgaggaggcgcgaggagagggggaaacccgcccagggcgg

SEQ ID NO: 193075 - RNA, 75 nt, Homo sapiens
gaccaagcgaggcgcaccacagcagcacagcgagaaagggaacaaacacccaaagcagccaggagccagcaaaaa

SEQ ID NO: 193076 - RNA, 63 nt, Homo sapiens
gcaagcacaaggcccacgggcggcaggaacaagcgaaagcggaaccaagcagggagccgaggc

SEQ ID NO: 193077 - RNA, 74 nt, Homo sapiens
caggagaagaaggcaagcagacaggggcaaggccgaggggaacagcacacagagaggaggcggaagcacgccag

SEQ ID NO: 193078 - RNA, 72 nt, Homo sapiens
gcgagacccaaggaaccaaggcggcccggcgggggaaccacagacaagcaccacagccccaccaccccgaac

SEQ ID NO: 193079 - RNA, 77 nt, Homo sapiens
gcaggaagaaccgaaaacggaaggggcccacgcagggggcaggagaacccccacaggcaagacaagacccgacccgg

SEQ ID NO: 193080 - RNA, 78 nt, Homo sapiens
caaagaagggagacagaaggaaaaaggggagaaggaaccagacagcccaagcgccggaccgaaggcgcgaccacgacg

SEQ ID NO: 193081 - RNA, 73 nt, Homo sapiens
agcgaacgaaggaaccaaagaccgccgcacaacgccagcgagcagcgaaaagccaggaaccaggagaacagca

SEQ ID NO: 193082 - RNA, 83 nt, Homo sapiens
cggaagcggcaggccacaaagccacagagaaggcaccggccaaagggggcgaccgggacaggacgacgacagcgcccgaagcc

SEQ ID NO: 193083 - RNA, 56 nt, Homo sapiens
gaacacgggcccaaaaaacaaagcccgcagacacaaaacgcacacgacagcccacc

SEQ ID NO: 193084 - RNA, 37 nt, Homo sapiens
caccggcgggaggaacaaaaggccccaagggccaaga

SEQ ID NO: 193085 - RNA, 68 nt, Homo sapiens
aaaccaaaaacaggcaaagcgagacgacgggaccgaaggaccccgccagagacaaccgagcgccagga

SEQ ID NO: 193086 - RNA, 50 nt, Homo sapiens
gaaacgggaccacaaaggagacacgaggaaggcgaagaccaaccacccgc

SEQ ID NO: 193087 - RNA, 58 nt, Homo sapiens
aaaggagccacgggcaccggggagaaaaagaccgagggcaacccgcccggaccggcag

SEQ ID NO: 193088 - RNA, 75 nt, Homo sapiens
gggcgaaagccgaccacccggcgaagaccccaacaggaaccccccggcggcagagagcagaagggccagcgcgaa

SEQ ID NO: 193089 - RNA, 79 nt, Homo sapiens
cgcaacaggagcaaaggagcccacggcgggcgcaaagagcagcaaaaaggaaacacagagcaaaggcagcagcagaaag

SEQ ID NO: 193090 - RNA, 58 nt, Homo sapiens
gcgcgggagggcgccgcggggcagccgccgcccccgggggggagaggcaccagcaaca

SEQ ID NO: 193091 - RNA, 57 nt, Homo sapiens
gcagggacacggggggccaagggaccacacgaggccgaaagaagaaaacccgagcag

SEQ ID NO: 193092 - RNA, 73 nt, Homo sapiens
ggggccgccgaccaacacccgaggcggacgcagagacagaaggaccacagccaggaaaacaagccagaacgcc

SEQ ID NO: 193093 - RNA, 73 nt, Homo sapiens
gaagccaccccacgacccgaagaaccccaagccacgagcacacccgcaggcagcaaccaccggagggcgcaga

SEQ ID NO: 193094 - RNA, 55 nt, Homo sapiens
cggggcgggcgagggagaaaagcgaccacgcaaaaccccgcgcaacaacaccaaa

SEQ ID NO: 193095 - RNA, 71 nt, Homo sapiens
agaaaagaaagcagggaaaaaagcagcaaacacgggacaaaaaccagaccaggacaggagagacaacggag

SEQ ID NO: 193096 - RNA, 86 nt, Homo sapiens
ccagaacacgaaggccagaaaccccaggccagccagcagagagaggagaagcagcggacaggagacagaggacaagagagaaggag

SEQ ID NO: 193097 - RNA, 72 nt, Homo sapiens
ggagcggacgggaggagagaaacaggaacgagacacacaacggacacgccaaccgcgccgaaacaaagaaaa

SEQ ID NO: 193098 - RNA, 42 nt, Homo sapiens
gaagaggagggcaagaagggcaagaagggcaggccggagagc

SEQ ID NO: 193099 - RNA, 39 nt, Homo sapiens
acgccgacggggccagcaccaggagagccacccgcacga

SEQ ID NO: 193100 - RNA, 85 nt, Homo sapiens
acaaccagccccgagacacggacgcagggagcacgcccgagagcgcaacccaccacacagcaaaccgacacgcagacccacacga

SEQ ID NO: 193101 - RNA, 41 nt, Homo sapiens
gaagaaaccagcgcaaggaacgcagaagcagacacagcgac

SEQ ID NO: 193102 - RNA, 76 nt, Homo sapiens
ccgccacgggccgagacacgcagcggcggccagggaccaggccaagccgcccgccaaccggcagcgccgacgacaa

SEQ ID NO: 193103 - RNA, 90 nt, Homo sapiens
gaaccacacagaaaggggaaaaaaagaacaacaaaagaaagggcggcagaaccggcacaaagcggcccccggcgaagaagccccaagaca

SEQ ID NO: 193104 - RNA, 68 nt, Homo sapiens
gcaagcggcccgaacacagaacccaagaaggagggaaggaaagcgcaagagagaaacggcccagacag

SEQ ID NO: 193105 - RNA, 74 nt, Homo sapiens
aagaacaaacgagcagaccgcagccaaggcacgaaaagacagcagggggagcagcaaagaaaggagcgaagcag

SEQ ID NO: 193106 - RNA, 86 nt, Homo sapiens
aaacaggcacaaaccagcagggaggccagagaaaaagaaaagacaccgcacgaaagcagaagaggaaccacccagaaagaaaccac

SEQ ID NO: 193107 - RNA, 69 nt, Homo sapiens
aggagccacagacgaccggcacacagcagagagaaaacaacggcaaggggaaaagggagaggaggggga

SEQ ID NO: 193108 - RNA, 75 nt, Homo sapiens
cgcccagccccgagagcgggaacagaaggaccaacaagagccgaagaagaacaacccaggaagccacgcaacaca

SEQ ID NO: 193109 - RNA, 74 nt, Homo sapiens
gcaaagagcgagaggaacaggcaaaaagagaagaccaaacagacaaacaggcggaagaaagaggaaaccggaag

SEQ ID NO: 193110 - RNA, 40 nt, Homo sapiens
gcgagccgccgggcgcccagacgcagagacggggagcccc

SEQ ID NO: 193111 - RNA, 74 nt, Homo sapiens
gagagagaagcagccggaaagcccagaacagcacgagccccggagagcgcgcgccgcgcgcccgcacaaacgcc

SEQ ID NO: 193112 - RNA, 36 nt, Homo sapiens
gcacccaacagcgaccgagcggagcagccgcaacag

SEQ ID NO: 193113 - RNA, 42 nt, Homo sapiens
cccaggccgccggccccacaggccagagcccgggcgcgggaa

SEQ ID NO: 193114 - RNA, 76 nt, Homo sapiens
cgggagggacaaaacaaggaaagcccaacaagacaacccccaagaaagggagcccagaacgaaacaacccagcaga

SEQ ID NO: 193115 - RNA, 80 nt, Homo sapiens
gcggccgcgggggcggaacaaacaggcagagccaaggcgccggaggccccccggcgaaggggcgggacgagcaggccccg

SEQ ID NO: 193116 - RNA, 73 nt, Homo sapiens
cccagaccacacccgagccgagcccgacaaccgagaccgacagaaccccgggaagcgacccgcgggcccgagc

SEQ ID NO: 193117 - RNA, 70 nt, Homo sapiens
ggcgcgggcagccacgcccgcgaggcagaagcacggagccacacaaagcggaagagaaagacccagagac

SEQ ID NO: 193118 - RNA, 40 nt, Homo sapiens
gcagaggcgcacaggggcaaacagaacccggccggaaacg

SEQ ID NO: 193119 - RNA, 51 nt, Homo sapiens
cgaacgccacacaggaacgagggccacagagagaccgcccacaggacaaac

SEQ ID NO: 193120 - RNA, 80 nt, Homo sapiens
cccagcagacagggaaggccagcccggaaccagccaccaaagaacaaggaccacggcaagaccgcaggcgggacaagaaa

SEQ ID NO: 193121 - RNA, 32 nt, Homo sapiens
ccaaggaccagccgaaagaacagccaaaggga

SEQ ID NO: 193122 - RNA, 81 nt, Homo sapiens
cacgccggaaaaggccgaagggcacgaaagaggcaagagaggaccaagaacgcccagcccgcgggcaccggcagaaaggag

SEQ ID NO: 193123 - RNA, 75 nt, Homo sapiens
gaaggcaggccgggcggccaccgggaggcaaggaggcgcggagagcgcaaacgaacaaccgccagggaacagcaa

SEQ ID NO: 193124 - RNA, 88 nt, Homo sapiens
cgcagcgaccggaagacgaggcggcgggggacaagcggcgccccagagcggacgaggccgcaacccaggagcccccggcagcagcgaa

SEQ ID NO: 193125 - RNA, 65 nt, Homo sapiens
gagggagcgcaggggaaggcggcaggagggaaagcaaggaaacgcccccccagaggcccagacgg

SEQ ID NO: 193126 - RNA, 69 nt, Homo sapiens
aggaaccggaaggcggggggaggacagcgcagccaccgagacacaccgcaggcgcggccagcgaagaag

SEQ ID NO: 193127 - RNA, 77 nt, Homo sapiens
cccaggccccgccgaggcggccaggacgcagaaggacccacagaagcccaagggaaccacaaacagacaggaaaacc

SEQ ID NO: 193128 - RNA, 75 nt, Homo sapiens
ggggggccacagaagaaaccacaggaaaagcaaccccaggcaacaacaacccggcaagagaaaaggcggggccag

SEQ ID NO: 193129 - RNA, 81 nt, Homo sapiens
gcccccgacagcagaccaggccggagcccagacgcgggacagggcggagaacggaaaagcaccaggaagcagagaggaccg

SEQ ID NO: 193130 - RNA, 28 nt, Homo sapiens
agcagaagcccggaagccgcgcaagacc

SEQ ID NO: 193131 - RNA, 73 nt, Homo sapiens
accgggaggccccgggcgcggggagaacgcgccgccggccggggcgcagggacacggggggccaagggaccac

SEQ ID NO: 193132 - RNA, 75 nt, Homo sapiens
caaaagcggaagagcagagagaaggcagggcaaaccagaaagacggggacagaaacgaggaggcagagccggggc

SEQ ID NO: 193133 - RNA, 74 nt, Homo sapiens
gagcacaaacggggcggggccggggaacacacaggccggcagcgcgacagccacccgggggagggcagaaacca

SEQ ID NO: 193134 - RNA, 92 nt, Homo sapiens
gcagcgcggcgcgaccaggccgggcaccccgagcgcaaggacagcgcgaggccgcgcagcccagcgcagccagagcaggccgggcccgccag

SEQ ID NO: 193135 - RNA, 65 nt, Homo sapiens
ggcgcgggggccgcgcggcacacggggcagccaggccgagccaacaaaagagacaggcagaagag

SEQ ID NO: 193136 - RNA, 83 nt, Homo sapiens
gcggccggagcagcgagggcccggcgaggagaaccaacggcccgaaagaggcagacaacagagcaaagaacgagcggaaaaca

SEQ ID NO: 193137 - RNA, 74 nt, Homo sapiens
agacgaccccacccgcgccgcgacccgcccacaccgggggcacgggccacagcgggcgccacccagggacgggc

SEQ ID NO: 193138 - RNA, 74 nt, Homo sapiens
gccccggcccggcggcgcgccccgcggcgcccgcgccagggggcagcacgccgaaggagagaccagacaacagg

SEQ ID NO: 193139 - RNA, 75 nt, Homo sapiens
gaagccaagggccacaagcacacccccccagcacggaggggagaagggggagaaagccaccacacaacccaaaca

SEQ ID NO: 193140 - RNA, 54 nt, Homo sapiens
ggaaaacgaagaaggcaaaaccaagaggaaaagagaacaaaccaggggagggaa

SEQ ID NO: 193141 - RNA, 64 nt, Homo sapiens
cccacggggaccagcagccgggccagggccagagcaaaggagccgggaaaccgaagaaggcaga

SEQ ID NO: 193142 - RNA, 85 nt, Homo sapiens
cagcccaacggcggcgagcccccaaggcgcagcgggggaacagcagcggcaagggggacagaggagccaaaggccaaaccaccag

SEQ ID NO: 193143 - RNA, 38 nt, Homo sapiens
acccaggcgcagacgcagagcaccggagggaagacaag

SEQ ID NO: 193144 - RNA, 72 nt, Homo sapiens
gcgaaacgcgcccccaggggccaggcgaccgccccgcggaaggcggaggacacagaaaacaaccgggcgcgg

SEQ ID NO: 193145 - RNA, 80 nt, Homo sapiens
cggcgcgaccgaagggggcggcggcccgccggggggcagggccacgcgcagagcccgacccaagacaaaagcggggaagg

SEQ ID NO: 193146 - RNA, 83 nt, Homo sapiens
gcagcccgagacccaccagagggcgccacaaacggcaagccagcgccagaaaaaaaccgccagaagggaagaaacaagcccca

SEQ ID NO: 193147 - RNA, 73 nt, Homo sapiens
cccgggagcaccagcaagcaccccaaggacgcaggcggaagccacacccagcggccggaccaaggccaccgcc

SEQ ID NO: 193148 - RNA, 64 nt, Homo sapiens
gacaacacacaacagaagacaaggaaacaagcagccacaaggccgaagcagaaaaggaggagga

SEQ ID NO: 193149 - RNA, 72 nt, Homo sapiens
aaggcaacggaggacaccagaccgcgagacggcagcagaaaagaacgagagggagaagacagggggaccagc

SEQ ID NO: 193150 - RNA, 38 nt, Homo sapiens
gaggcccggagcgaccaggccccgggaccaaggacacg

SEQ ID NO: 193151 - RNA, 85 nt, Homo sapiens
ccgccagggcgcagggccgggccgccgcgcaccgcagcgccggggcacgacacaaaaacagggaacaaggaagggagcacacaaa

SEQ ID NO: 193152 - RNA, 74 nt, Homo sapiens
gccacgagcaaaggcacaaggaaccacgcccgcgggacacaagacgggcaaggccagagggaaccggaagacaa

SEQ ID NO: 193153 - RNA, 72 nt, Homo sapiens
aggaggggagaggggagaggcgcgcgaggaaaaggagagaagaagagcgaaagccagggggcgaaacaaaac

SEQ ID NO: 193154 - RNA, 70 nt, Homo sapiens
accaacgcagccccagcacggcgacagacacggggaacccgaccaacagagggccacgaaggaggcccaa

SEQ ID NO: 193155 - RNA, 79 nt, Homo sapiens
cgacagcacgcacgggaccagagcgccgcgcaccgcagccgcgcccgggggacacgcaagagacgcaccgagagaagcg

SEQ ID NO: 193156 - RNA, 66 nt, Homo sapiens
caccccggggacaagccgcaccacgccaaggaaagacaggggcaaggccgaggggaacagcacaca

SEQ ID NO: 193157 - RNA, 65 nt, Homo sapiens
accaccccaacacccagggagcagccggccacaccgcaggagaaagaagagcacaaggggagagc

SEQ ID NO: 193158 - RNA, 70 nt, Homo sapiens
aacaggaagagaaagacacggccgccacaacagccagaaccggaacgggaaaagaacggcaaacccaacc

SEQ ID NO: 193159 - RNA, 58 nt, Homo sapiens
gggaccaagaggcgacggcgagggccccgggcgcgggagccagccgaagaaaggaaaa

SEQ ID NO: 193160 - RNA, 82 nt, Homo sapiens
agaaggggggggcgggcaagccggacaaggaccggggaccgagagcagacaccgccaggggacagaaccacgagggacggca

SEQ ID NO: 193161 - RNA, 66 nt, Homo sapiens
gaacaagccagggcagacgcagaaggagcacagcgagagagggacggggagaggagccgccgaacc

SEQ ID NO: 193162 - RNA, 81 nt, Homo sapiens
gggggggcccaagaacacgcggcaagaccccaaaaaagaagaggaggagagccaaccagcaaagaaaacaacacggaaaca

SEQ ID NO: 193163 - RNA, 87 nt, Homo sapiens
ccagacgcgcccgcgggcccggccacggcggagccaagggagggcacaaggcgcgacgagcggagcggccgagcccggagagccgga

SEQ ID NO: 193164 - RNA, 77 nt, Homo sapiens
aaacggaagcgcagggagaaggaagaggggaaaagcgcgagaccgaggcacgggcaggcacagcagaccagaagcag

SEQ ID NO: 193165 - RNA, 83 nt, Homo sapiens
ccacagaagccgcccgacccaagcacgcgccacgcacacacaggccgaggggaagcaggcggccgacggggccggagcacacc

SEQ ID NO: 193166 - RNA, 76 nt, Homo sapiens
accaggaggccagggggcgccaggagagagaggcggcaaaacaggaaaacaaggacggaaacagcagaaacagcag

SEQ ID NO: 193167 - RNA, 80 nt, Homo sapiens
agggaaagaaaaagcccgcgcagaaagagcaccagcaagagaggacacagaggaaggaaacagaggaggaaggaaggaag

SEQ ID NO: 193168 - RNA, 68 nt, Homo sapiens
caagcccacaggcgagagcgaaaagcgagaacccagggcagaacagacagacggagggccaaagagaa

SEQ ID NO: 193169 - RNA, 71 nt, Homo sapiens
caagacaacagagaaggaaagagagcagcaaggcccccggaaagagccgcccgagagacaaacccccaccc

SEQ ID NO: 193170 - RNA, 74 nt, Homo sapiens
gccaacaacgacaaacaagaggaccccccccagaaaaccaagcgaaaccccaaagggaagagacgcgaaagcac

SEQ ID NO: 193171 - RNA, 74 nt, Homo sapiens
gcgaaaagaagaacaaacgacgcagagaagggcaaggccagagaaggcgggagaaagacacgaaccacagaacg

SEQ ID NO: 193172 - RNA, 75 nt, Homo sapiens
aacaagacggggcgccccacagaggggcgacggccacggaggaaaaacagaaggcaaaagacagcgaaagagcag

SEQ ID NO: 193173 - RNA, 82 nt, Homo sapiens
cgaggaggccaaggaccaccccgccggcgggcagggcgggcagcggccgagccagcggacgccacccggaggagcggagggc

SEQ ID NO: 193174 - RNA, 90 nt, Homo sapiens
gaggaggccccccagccagggaacagcgacccaggacccgaggggaagacagaaagggagaggcgaggaagcgagcagggaacgacaccg

SEQ ID NO: 193175 - RNA, 89 nt, Homo sapiens
gcacagccccagaaacgcccagagccagaaggcaaaagggacccacaaagcggccgggggagccccccccagccccggccacaaccggc

SEQ ID NO: 193176 - RNA, 68 nt, Homo sapiens
ggagacaaccagaaccacggagcagaccgaaaaaggaagaagagccgggcaagggcacccaaaaaccg

SEQ ID NO: 193177 - RNA, 76 nt, Homo sapiens
cgggcgaacgagcaccaacgcacccaccagacggaagagaaggaccggaacagacaacaccgaaacgaagaaagcg

SEQ ID NO: 193178 - RNA, 62 nt, Homo sapiens
gaacccggcgaagggacagaggaagaagaggaaaacgcccagcgagccagccccaaaaacag

SEQ ID NO: 193179 - RNA, 77 nt, Homo sapiens
agccgggcgcggaaacgaggagcccacagcaccagagaaaaaaaaagaaggcaaaagagccccccaccagcaagcca

SEQ ID NO: 193180 - RNA, 77 nt, Homo sapiens
ggcgccccagcagaacaggaggcaggacagagggccgcccagcagggcacaaggaggagaaggggccagggggaaaa

SEQ ID NO: 193181 - RNA, 76 nt, Homo sapiens
cggaaaggaggcgcgcccggcgccccaggacaggacggggggcggagaacggaaaagcaccaggaagcagagagga

SEQ ID NO: 193182 - RNA, 74 nt, Homo sapiens
gagaaggaaaaggaagagcacgacagaacgaacgaaacaccaaagcaggaaggaaaagcaaacacaaggaaccg

SEQ ID NO: 193183 - RNA, 51 nt, Homo sapiens
cccccgcccgcgcgccccggagcgcgaaggagcgcggagagaagaaaccag

SEQ ID NO: 193184 - RNA, 79 nt, Homo sapiens
ggccggggggcccccgccagcccagggcagaccagaggacaagacaaagggagcaagacaagccaaagaggaaaagcaa

SEQ ID NO: 193185 - RNA, 73 nt, Homo sapiens
cggaaggagccgcacgcggggcgcacagccagcccggggcgcacgagcaggacgacccagccaacggcaagca

SEQ ID NO: 193186 - RNA, 63 nt, Homo sapiens
gccgagaccagccgggcaacaggcagcccgacaaaggcagcagccccgaggacacagcggccc

SEQ ID NO: 193187 - RNA, 64 nt, Homo sapiens
aaaagaccgcaccccgggccaggaaacaagacccggaaaccccagagaaaaagcgggacaaacc

SEQ ID NO: 193188 - RNA, 81 nt, Homo sapiens
cgaagacgacccgacaagcgcaccgagcagcccgccagcaaggcacccaggaccgaaagcgacgcgacgcccggagacgcc

SEQ ID NO: 193189 - RNA, 110 nt, Homo sapiens
gcgcgcagcccgcgcacagcgcccccgcccgcccccacccgcggcagcgcagcagccgcccaaaacacaaaccaaagaagaaacccgaaggaccacagagaaccaaaaca

SEQ ID NO: 193190 - RNA, 73 nt, Homo sapiens
agcccccaagagcgggaaaggcaagaaacaacagcgaccagagccgaagagaacgcgaagaagggccaacccc

SEQ ID NO: 193191 - RNA, 74 nt, Homo sapiens
cgggccgcggcgcccggggaaagccgggccccgagggcggaccgagggcgcacaaaagagcacaaaagcaccaa

SEQ ID NO: 193192 - RNA, 78 nt, Homo sapiens
cgagcgcgaacagaagagaggaagaaaggacagggagagaagccaagaaagacagaaaaacaaccaccagcgagcaaa

SEQ ID NO: 193193 - RNA, 76 nt, Homo sapiens
agcaaaaaccggaaaacaaagaaacagccggaaaagcacgagcacaagacgaaaacgacacgccagaagacggagc

SEQ ID NO: 193194 - RNA, 39 nt, Homo sapiens
cccgagagcgggacgcaggccggcaaagcaccaggcaca

SEQ ID NO: 193195 - RNA, 75 nt, Homo sapiens
ggcaaaagagggaggagagcgaccgaagcagaaagggaaacccagacgacaaggaaggccaagggacccacgacc

SEQ ID NO: 193196 - RNA, 66 nt, Homo sapiens
cagaggaagacacacaaacggcgcggcagaaaaaccagcccggcgcagggaaaggaagacaggacg

SEQ ID NO: 193197 - RNA, 86 nt, Homo sapiens
gagcccccagcccgcggcgccgcgcccgccaggccccgggggcggcggccaagagccggccgccagggagaccagggggcagggga

SEQ ID NO: 193198 - RNA, 66 nt, Homo sapiens
gagagaagggcacagagagcagaggaacccaagacacggcccgggaaaacaagcagggcggaacgc

SEQ ID NO: 193199 - RNA, 116 nt, Homo sapiens
aaaccgaaggcggcgagaaaagaaacagcgaaggagaaggagccagggcgaaaaaaaagggcaaacagaagacgggcaaaagagcggaagaaccaacgacagaagacggagccgag

SEQ ID NO: 193200 - RNA, 77 nt, Homo sapiens
accgcacgcggaggcggcgcccgccaaacgaaaccggcagcagccggaggggaaggggaaaacacgacccccaccaa

SEQ ID NO: 193201 - RNA, 60 nt, Homo sapiens
gacagagaggagggagaacaagcaacggcggaaaagagggaaagcgaccaagagacggac

SEQ ID NO: 193202 - RNA, 112 nt, Homo sapiens
gccacagagggggaaagccaaggaaaaacggagagccacaaaaaaggaagcgaaagggaaaaagaaaagggcgaagacccgaagcagcgcaggaacagaagagaagaccaga

SEQ ID NO: 193203 - RNA, 77 nt, Homo sapiens
cgagcgagggggggcgcgccggaaaccggagcgcgcagcagccggcacagccacaccgagaagaccggcccaagaac

SEQ ID NO: 193204 - RNA, 89 nt, Homo sapiens
ccggcgccccgaagcgggaaaaaggcggggccgccgcccccagcgcgcaacccaggaacccgggaagggcaaggacacccccacaacac

SEQ ID NO: 193205 - RNA, 68 nt, Homo sapiens
ccaagggaccaaacccagcagaaaggaaggaaaccagaaacaggaagagccagggccgcaaggccagg

SEQ ID NO: 193206 - RNA, 66 nt, Homo sapiens
ggacacccagggcagcggcacccagacccacaaccccccgaaagggaaagcggggcagcaaggcaa

SEQ ID NO: 193207 - RNA, 58 nt, Homo sapiens
aacacccggcccaggagcgacgccagaaacagccaccagaaggaacgcccccaagccc

SEQ ID NO: 193208 - RNA, 81 nt, Homo sapiens
aggcggcccaccccagagcaccggcaaaccaagaaggagcgagggaggagcagcgagacagcaagagacgaccacagagcc

SEQ ID NO: 193209 - RNA, 82 nt, Homo sapiens
agccgcgccggagcggagcgcgggcgccggggagccaggagacacgagcccacccgagaccacgccggacccgccccgccac

SEQ ID NO: 193210 - RNA, 83 nt, Homo sapiens
gcaagcagccagaagaacccccccacacaaccacaagggcagaaggccaacacccaagcaccccagcccagaagaggagagac

SEQ ID NO: 193211 - RNA, 85 nt, Homo sapiens
caccccgggcccgcggcggcgggcacccggaggcgcccgagcggacacccggaccagaaacacacagaagagaaacagagaccgc

SEQ ID NO: 193212 - RNA, 61 nt, Homo sapiens
cgagaaccgcaggagccagagacagaagcgaaggggacagggggagaaccgccagggaaac

SEQ ID NO: 193213 - RNA, 62 nt, Homo sapiens
cgcggagaggaaggagcagagagaaggaagaagacaccagcaacagacgcgacaccagaaaa

SEQ ID NO: 193214 - RNA, 79 nt, Homo sapiens
cggcccaacgagccaagcaggaagaaggccaggaggagcaccagaccgcaacaggagcagacggagaaagagaccacga

SEQ ID NO: 193215 - RNA, 80 nt, Homo sapiens
caaagccgcgcgagaggagccgggacacgccagcgcgggcccaggaaaagaggacacccagagacccacagaccaagaga

SEQ ID NO: 193216 - RNA, 80 nt, Homo sapiens
gacaggccacaccacaaacagagggccaagaaaaccgcaacagaacccggcgagagacaggccgggcggacccaagaacg

SEQ ID NO: 193217 - RNA, 77 nt, Homo sapiens
cacaccgccccggccgccccccagaccgggacagaaggcaaggacgcacggccacgaccgagccggaccaggcacga

SEQ ID NO: 193218 - RNA, 97 nt, Homo sapiens
ggagccaccaaccgcccggacccgcggcaccgcgccccacgccggaaagaccacagcaagaccacgcccccagccgggggaccaggccgaacgaccc

SEQ ID NO: 193219 - RNA, 93 nt, Homo sapiens
agcccggaacccgcaccaagccgcccacacgccaaccggccagaggacgagggggcggcccacgagaggccccggcaggcgaggggcaagaca

SEQ ID NO: 193220 - RNA, 41 nt, Homo sapiens
caggaagggacggcgcgcgggagcgaggcggccagggcccc

SEQ ID NO: 193221 - RNA, 59 nt, Homo sapiens
ccacacaaccggcgccgggaaccgccgagccaccagacagacggggaagagggagaaca

SEQ ID NO: 193222 - RNA, 73 nt, Homo sapiens
cgcccgagaggccgcaaaggccggcaggaggacccccaagggcgacgaccccccgggccccacggacacccca

SEQ ID NO: 193223 - RNA, 67 nt, Homo sapiens
ggccagagaacaccaaggcgcccaggaggaaaagcccacacggaccaccccgccggaagggggccac

SEQ ID NO: 193224 - RNA, 61 nt, Homo sapiens
gagagaggaggcgcgcgcgcgccgagccgcgggcccgcagcagcaggcgagaggcagaacc

SEQ ID NO: 193225 - RNA, 65 nt, Homo sapiens
gaaacccagggcagagcaaccaaaacgaaggaaagaacgcaacgccgacgccaaaagggcgcaca

SEQ ID NO: 193226 - RNA, 75 nt, Homo sapiens
ggaaagcccgaacccgcagggggggcaggccacagcagcagcccgggagcaggccgaaaggggcgcccgagccgc

SEQ ID NO: 193227 - RNA, 80 nt, Homo sapiens
ggccccggcccacaggggggggcaaacccgagagaacgggcacgcagaagccagcggacgcccgcaacggggaccggcca

SEQ ID NO: 193228 - RNA, 76 nt, Homo sapiens
cagagaagaaaaaagggagggggcaggaagaagagagaagggcacagaccaagacaacgaaccccggccaggacag

SEQ ID NO: 193229 - RNA, 77 nt, Homo sapiens
aggagaaccgcgaccgggaggcaaagagggcgcaaggggacaaacagaaccggcggcacagcccaagccaccgcccg

SEQ ID NO: 193230 - RNA, 81 nt, Homo sapiens
ggggccggaggagcagcgggccagaacggccaggagacgcaacggacccaaagacaggaccacgcaccagcagagaaggaa

SEQ ID NO: 193231 - RNA, 59 nt, Homo sapiens
accaaaaaaaaaacgcgaacaccgacggagccaggcggagcaggagcaaaggagcaaga

SEQ ID NO: 193232 - RNA, 72 nt, Homo sapiens
gaccagaaaagggaccaaccggccacccaggaaaggaggaccccgcggagcgacaaaggccacaaagcgcga

SEQ ID NO: 193233 - RNA, 83 nt, Homo sapiens
gggaccggacagggcggagcagcgcagaggaaaggcggcagccaggcgccagggcagaaccgcggcagcgagaggggaagccg

SEQ ID NO: 193234 - RNA, 73 nt, Homo sapiens
caaccccagccaccgaaagggaccaagcgaacagcccaaagagcaaaaaggaaccccacagggaacgcaaacc

SEQ ID NO: 193235 - RNA, 65 nt, Homo sapiens
aggaccaagaaccagagaaagccgcacaccccaccagagaaagggaaccaacggcgccacaaagc

SEQ ID NO: 193236 - RNA, 75 nt, Homo sapiens
aggacaggagagaaagacgaaacgccggaaaaaagaggaacaggcaggaggaggccaaagaagaaagagcggccg

SEQ ID NO: 193237 - RNA, 72 nt, Homo sapiens
acgcgggccgaggagagcggaggagggggcgaggacggaccgcgagaaaacccccgcgggagaacagccgga

SEQ ID NO: 193238 - RNA, 73 nt, Homo sapiens
cgcacggacccggagaagaccagaaaagacgaggaaacaacccagacagaagagggagaacccggccagcaga

SEQ ID NO: 193239 - RNA, 55 nt, Homo sapiens
ggagggcgagagagcgaggagacgaaggagccggcacccaccggggcgggccacc

SEQ ID NO: 193240 - RNA, 55 nt, Homo sapiens
acgcgcccagaagcaaaaggagcaggcggagaaaagagggaaaaacaacaggaaa

SEQ ID NO: 193241 - RNA, 75 nt, Homo sapiens
agcaaggcgggaaccacgaacccggggaagaaaacgaggagaaaggggaaagcgaacagaaaaccggagaagagc

SEQ ID NO: 193242 - RNA, 67 nt, Homo sapiens
acaccaaaaagcaaacggaccagaccgaccaccaaaaagcaagcccccaacaccagcaaccccgggg

SEQ ID NO: 193243 - RNA, 91 nt, Homo sapiens
gaggggcgacccgccgcgagggacccggccgggcccacgcaccgggagcggcaagaacgagcgccgcaaggcacagccagcccgccaggga

SEQ ID NO: 193244 - RNA, 83 nt, Homo sapiens
gacggcgaacagacagaaggagaaaggaggaaaaacagccagacgaagggaacgcacgggaaagcgcgcaaaagacgcacacg

SEQ ID NO: 193245 - RNA, 71 nt, Homo sapiens
ggacccacagcaccgaaaggcaggggacaagcacacagcacccgacaaaacggggacgcgggaacacgaac

SEQ ID NO: 193246 - RNA, 86 nt, Homo sapiens
cgcagcggcgccgcgggcacggcgaggggggcggccgcccaccggcagcaccgggaccggaggcccagagcgacggacggagaacc

SEQ ID NO: 193247 - RNA, 110 nt, Homo sapiens
aggcccacccgcccacagcaggacagccgaacggaacggagagcagccaagcaggggcgcagagcagcaccgaggaaacgaggaaccccgcaggaagaagcgggaagcag

SEQ ID NO: 193248 - RNA, 78 nt, Homo sapiens
agcggaggagcaaaaccacagacaccaccgagagcgccacccaaaaccacaggacaggaaacagaacgacagcccgca

SEQ ID NO: 193249 - RNA, 79 nt, Homo sapiens
ccgcggggcggagcaacagcggcggggcggcagcaccacgcgcgagaggcaaccaagagccaccgaaaggcaacgaagc

SEQ ID NO: 193250 - RNA, 80 nt, Homo sapiens
cggaagcgcggaggcccgggcggcaggagccaggcacagcagggaccagaaacgggaaaccgcgggggcaggagaaggag

SEQ ID NO: 193251 - RNA, 85 nt, Homo sapiens
ccagaggacgcgggccgaggagagcggaggagggggggcaggaccgcccccgcaggaagaggagcccccccgccacccccaccgc

SEQ ID NO: 193252 - RNA, 71 nt, Homo sapiens
ccccgcagcaccggcaagaggggcgggcgcacaggggacaggacaagaggaggagcggggagagacgagag

SEQ ID NO: 193253 - RNA, 59 nt, Homo sapiens
acagccgcccggccaagcacccgcagcaggacccaggagcgacaccgaacccacgaccc

SEQ ID NO: 193254 - RNA, 59 nt, Homo sapiens
ccagcacgagacgacaggaaaggccagcggaccccagggaagcacacccgggccgggac

SEQ ID NO: 193255 - RNA, 66 nt, Homo sapiens
agaggcagcggaaggagacaagcggaggccaggaacaaaccggacacaagagggcaagaaaggcgc

SEQ ID NO: 193256 - RNA, 55 nt, Homo sapiens
cgccggcaaccccgggcggccgcaccgccagccaggacccgaaaagccagcaagc

SEQ ID NO: 193257 - RNA, 80 nt, Homo sapiens
cgggagagcgcgccagccggccgcgaggggaccacacaacgagggaagagcgcaccacgcgaaccgcccccccaccggga

SEQ ID NO: 193258 - RNA, 66 nt, Homo sapiens
cggagggggacccgcccccggacacaacacccacgcaggccagagagccgggcagacgcccgaacc

SEQ ID NO: 193259 - RNA, 65 nt, Homo sapiens
cgcagaaccagaccgggagcacgcacccacgaggccgaaaagacgaggcgaggaggcgagacacc

SEQ ID NO: 193260 - RNA, 78 nt, Homo sapiens
acaggaacccaacgagccaaagagcacaagaagagcacagaggaagaaaaaaagaacccaagcaggccccgagcccaa

SEQ ID NO: 193261 - RNA, 31 nt, Homo sapiens
caaaaccccgaaaaaggcgggacgaaaagag

SEQ ID NO: 193262 - RNA, 70 nt, Homo sapiens
aaaaccaggaccagaggccagcccacagcagaaggcgagaaaggcgcacaccaagcggcgcacaggaacc

SEQ ID NO: 193263 - RNA, 84 nt, Homo sapiens
gcccggcgccggcccgcccccgcagcagcgccagggacccagacaggagcgcgggaagaagccggcccggggccgcggacgagg

SEQ ID NO: 193264 - RNA, 80 nt, Homo sapiens
ccccagcgcccggccgagggccgggaccacggccgggagaacgcaggccgcgcgagcgaggacaccccccaggcacagcc

SEQ ID NO: 193265 - RNA, 84 nt, Homo sapiens
acaggagcaaggccacggcaagccgacgccagagccacagacccaacagcacaagccacaggcaagacacacccgaagcagccc

SEQ ID NO: 193266 - RNA, 83 nt, Homo sapiens
cggcggaggcccgccggagggagcccccggcgggggcaagaagcaacacagccacagcacaacagcaccaaccgcacccagca

SEQ ID NO: 193267 - RNA, 77 nt, Homo sapiens
acagaaagagagcaggagaagacagcgacagcgggcgcacgcaaacgcggcaaggccacaagggaacgggcggcccc

SEQ ID NO: 193268 - RNA, 82 nt, Homo sapiens
gggcaagaacaccagagcgcaaggccaccgagggcaccggaaaacaacccagccggagaacaccgcagccacccaaagcccg

SEQ ID NO: 193269 - RNA, 65 nt, Homo sapiens
ggaacaagaggggacagaaaggagcgcgaaccaccgcggcagaacggcggggccgaggaccagga

SEQ ID NO: 193270 - RNA, 73 nt, Homo sapiens
cagcgagggggaggagacgcgcggggcgggccgccagcggggacaggcagcgaggagaaccaggaccaaagca

SEQ ID NO: 193271 - RNA, 69 nt, Homo sapiens
gccaaaaacggggaacccaagcgcggacacgcgaagaggaagaaacgagaacggcaaaaggaagacgac

SEQ ID NO: 193272 - RNA, 65 nt, Homo sapiens
ggggcacaccgaccagccgcacgccgaccggcgccgggagaccggggccggagcgagggagagca

SEQ ID NO: 193273 - RNA, 72 nt, Homo sapiens
gagcgcccgcccgagccagcccgccagcagccccagccaaagaccacagagaagcaggcgaccaggcgcgcg

SEQ ID NO: 193274 - RNA, 107 nt, Homo sapiens
accggcaccaccgcgcgaccggcgggcccccgcccgggcccccgaagaggcggcgccagacagggccacggacagagcgaaggggagaggaggaggcgacccacgcg

SEQ ID NO: 193275 - RNA, 71 nt, Homo sapiens
aaggagaaaaggcagccaaacggaagagaccgggagccggcaagagccgacggaaacacgcgcgcaagagc

SEQ ID NO: 193276 - RNA, 34 nt, Homo sapiens
gccacagcgggaacagagaggacacaaacagcac

SEQ ID NO: 193277 - RNA, 40 nt, Homo sapiens
aagagaagagacgccgagagaggccgcgacagccaccaaa

SEQ ID NO: 193278 - RNA, 68 nt, Homo sapiens
ggcgggagacacggacggcaggaagccgcacgagaacagagacaccgcaggcagccagggaccgagca

SEQ ID NO: 193279 - RNA, 74 nt, Homo sapiens
gaaaagggaggaaaaaacaggacacagaaggaggcaacaaaaggaggaccagaagacaaagaggaagaccaaga

SEQ ID NO: 193280 - RNA, 53 nt, Homo sapiens
cgaaaccacaagcggaacggaccgggcaaccacaaggggcccgggaccgacgg

SEQ ID NO: 193281 - RNA, 72 nt, Homo sapiens
accgcacgggagaaaacaagccaaggagaacccagcccgacggagccgcgagaaggggccagcaaagacgga

SEQ ID NO: 193282 - RNA, 75 nt, Homo sapiens
cggcccgcagaacgccagcagaaggaacgacaaggagaacggaaccccccaccacggccacgaacagggacgaac

SEQ ID NO: 193283 - RNA, 77 nt, Homo sapiens
accgcgaggacgagaagcaaccaaggcaccgagacaaaccgccgagggagcagggaagggacgcaaaaaggaagccc

SEQ ID NO: 193284 - RNA, 83 nt, Homo sapiens
caggacaagagaagcacaaaacagcagacccaagagcagcggaaaagaccagcacaggagagacgagcacggcagccaccgac

SEQ ID NO: 193285 - RNA, 76 nt, Homo sapiens
ggggccgaccgagcacgaacgcccgccacgacaggaggggacccaagggagagagggaacggcgaaagggcagccc

SEQ ID NO: 193286 - RNA, 100 nt, Homo sapiens
gagaaggccgggagcggcgaaaaaacccgagaggaaaaggcccggcaggaagaccgcaggaaagcaggaaggcaagaaagccaaggacgaaacccacacg

SEQ ID NO: 193287 - RNA, 93 nt, Homo sapiens
cagcgggagcacaggcccgggagggagagaaacccagggggggccgaagaagccagggggaggaaagcagacagacccaccaagagggcggga

SEQ ID NO: 193288 - RNA, 77 nt, Homo sapiens
cagcaagggaaaaagaaaaaagcgcggaagaggagaaagcccaaggagacaggcaagaggggaaacagaggggccgc

SEQ ID NO: 193289 - RNA, 55 nt, Homo sapiens
aaaagaggagaaaaccgggcgcagccgagaaccggacaagcgaccaggccggaac

SEQ ID NO: 193290 - RNA, 72 nt, Homo sapiens
ggggggacgagcggagcccgggacaggagccggagcagggccaaagcagcacaaccgcaaaccggagggagc

SEQ ID NO: 193291 - RNA, 76 nt, Homo sapiens
caagccagcaaaggcgcaaacgggccacggagccgaagacagaagcgagacagcagggcaccaccacccgaacaca

SEQ ID NO: 193292 - RNA, 71 nt, Homo sapiens
cccaggccgcccgacccaaagggaaaacagaaacaggacacagcaggggccagacaaccagacccgggagg

SEQ ID NO: 193293 - RNA, 70 nt, Homo sapiens
gcggaaacaggaacagcccaaggagacagggacaagcgcacagcggagaaagcagcgcggccaggaggcg

SEQ ID NO: 193294 - RNA, 75 nt, Homo sapiens
aaaaaaagccagaagaaggacaacgacaaaaagggaggccaagaggccagggagagccgagacgcagggggaacc

SEQ ID NO: 193295 - RNA, 73 nt, Homo sapiens
gcacccaacaccaggaggccccgcggggcaaacggcaacagcaagagaaaagcccacagaagaggggccgagg

SEQ ID NO: 193296 - RNA, 75 nt, Homo sapiens
gcacaccacaaagccagacgggacagggagaaaacgaagcggagccaacccggagaacgcgccaacgacagggca

SEQ ID NO: 193297 - RNA, 79 nt, Homo sapiens
ggcgcaaccgaaacagcacagggcaggaagaagcaaaggcagaacggaaaacgaacacacggcagagagccccccaggc

SEQ ID NO: 193298 - RNA, 89 nt, Homo sapiens
gcgaaccacggaaaggaggaagaagacaccggggacagacaggaacccaaggaaagaccggaaagaaggaagaaaagacacagcaagag

SEQ ID NO: 193299 - RNA, 55 nt, Homo sapiens
gaggacgcacgagccaggagaaggacagccggccacacacggcacaagggaagag

SEQ ID NO: 193300 - RNA, 74 nt, Homo sapiens
ggcagaagaaagcaagacccaggacaccccgaagccgagaaagcaccaggacaaaagaagggcagcacaaagga

SEQ ID NO: 193301 - RNA, 74 nt, Homo sapiens
aacaaacagcaagaaagaccacaagaccagcacagggggacgaaacgaacgacagaaacccaagcagagaaagg

SEQ ID NO: 193302 - RNA, 80 nt, Homo sapiens
ccccgagccccgagcccggcgccggcgagagccccgagccccggccccaaagacccaaaacagagacaccccccagcccc

SEQ ID NO: 193303 - RNA, 73 nt, Homo sapiens
cacggaccaggaggcgagcaacagccacgggaggacgcacgccgcaccgaggccgggacccgcgacgggaaag

SEQ ID NO: 193304 - RNA, 76 nt, Homo sapiens
aaagaaggaagaagccgggaccgaaggcgaagaagaacaggacaccaggccgagcacgaaccgaccaacaggcgag

SEQ ID NO: 193305 - RNA, 81 nt, Homo sapiens
ggagcgagagcgaggccgagcaacaccgcgagccgcgcggcgcggggccccgcggcggaggggacggaaagagagccgcag

SEQ ID NO: 193306 - RNA, 75 nt, Homo sapiens
gcccaagcggacccccggacagaggcgagggccgccgccgccgacagaagaagaggggagaacaaccacggaaga

SEQ ID NO: 193307 - RNA, 69 nt, Homo sapiens
cagggggccaggaaccaggacacagccagcaccagagccggagagacggagcacaaaggacccgagacc

SEQ ID NO: 193308 - RNA, 84 nt, Homo sapiens
cgcggcggcgccgcgcgcgcagggccgccggcccgcagccgccaccacccaggaccagaagggagaagagcaaccggacacaga

SEQ ID NO: 193309 - RNA, 54 nt, Homo sapiens
agacgcagggcgcccccgggcagacccccaagggacccgccagggacgggacgg

SEQ ID NO: 193310 - RNA, 81 nt, Homo sapiens
gcaaggaacaaaccgaagaacagcgggaaagaaggcaaaacacggccaagacggggaagggggagaaagcccagccggacg

SEQ ID NO: 193311 - RNA, 47 nt, Homo sapiens
acacaccgaggaacggggaaaaggaaaccagaagagggacgaagaaa

SEQ ID NO: 193312 - RNA, 105 nt, Homo sapiens
ccaaccagcgcccccaccacgggaggggccaggccacggacgaagcccagagggcgaagaagagcagagcagccgaagcggggacgacacgaggccacgagcccg

SEQ ID NO: 193313 - RNA, 80 nt, Homo sapiens
cagccgcaagagcaggagaagccgcgggagacaggacgcggcggaagacagagcgagcccccgcaggaacccagcggacc

SEQ ID NO: 193314 - RNA, 81 nt, Homo sapiens
cccggccagccggcgccggagcgaaacacgacggaagaaagcggcagcccagaaccggaagcgaccacggacacaaacgcc

SEQ ID NO: 193315 - RNA, 52 nt, Homo sapiens
cagccccagacaacgagggagaggcagcagcacaccgcgcccacaggacgaa

SEQ ID NO: 193316 - RNA, 67 nt, Homo sapiens
cggcgcgacccgaccacccaggaaaagcagacaagagaacagggggacgccaggagcgcgaagcacc

SEQ ID NO: 193317 - RNA, 72 nt, Homo sapiens
gaggagcaagaccccgaaaccagaagggggaaagaaccccagcacccagccaaggggcagagcagacccacg

SEQ ID NO: 193318 - RNA, 86 nt, Homo sapiens
ggccgacccccgcgcgacggcgacgcgggaggccaggaacggcagccgcggagcggccaagcgccaggcccagcaggagcgggaga

SEQ ID NO: 193319 - RNA, 76 nt, Homo sapiens
gccaaggaaaccccaacacagagccaagcgccaaagcacaagaagagcacagaggaagaaaaaaagaacccaagca

SEQ ID NO: 193320 - RNA, 77 nt, Homo sapiens
caaggcaagccaaagcagggggagcagaacaggaaaagagcgcgccagaagaaggccccggggcaacacaccccaac

SEQ ID NO: 193321 - RNA, 75 nt, Homo sapiens
ggaaaaaggaccacaagccacgaagaagagccggaacaagcaacggcagaaaaggaaagaagagacaaaggagca

SEQ ID NO: 193322 - RNA, 74 nt, Homo sapiens
gacacaggaggaggcggaaagagcccacccgggaacgccagaggcggcaaaccaggaaacagcagggccagagg

SEQ ID NO: 193323 - RNA, 80 nt, Homo sapiens
ggagcaccgcggagccgccgaaaccgcagacagaaggacagagaagaacccagaaaaaagcaaggccgaaaaacgagaga

SEQ ID NO: 193324 - RNA, 75 nt, Homo sapiens
gaaggcaagaaaccagaaagagaacgggacaacaaaagagccacccaaggagaaagacagcaaagaaaaggagaa

SEQ ID NO: 193325 - RNA, 75 nt, Homo sapiens
gaagacagggcggcgggccggacgacaagaacaagcagaaagcacgaacaacgagaacaagacacgagcaaaccc

SEQ ID NO: 193326 - RNA, 72 nt, Homo sapiens
cgccgcgcggcagcccgccccacacaggaaaccaaaccaaaggaacccacaagaagaaacggggacagcgcg

SEQ ID NO: 193327 - RNA, 63 nt, Homo sapiens
ccccacagaggggcgacggacaaccaccaccagcgagcaaaagaacaaagaccaagaccaaga

SEQ ID NO: 193328 - RNA, 72 nt, Homo sapiens
aaggggcggacacaccaggacacaaggccggacagggcgggagggccgggcaaaggaaaaaaaagaacacag

SEQ ID NO: 193329 - RNA, 73 nt, Homo sapiens
cacgggagaacaacgacagaacggggggacaggaggagagacacaacaacgaggacagcgacaacgaagccgg

SEQ ID NO: 193330 - RNA, 73 nt, Homo sapiens
gcggccaaggagccgaaaagaggaaggggcaggccacacgggcaggggcacaagccgccccaccacggcggga

SEQ ID NO: 193331 - RNA, 79 nt, Homo sapiens
cgggcgggagagacaacagcagcaagccagaaaaggcccagggccgcccggggacagagccaggcaccaggacagcggc

SEQ ID NO: 193332 - RNA, 128 nt, Homo sapiens
cagccagggccgcgagaggggggggcgggagcagcgcagccccggaggaggaggcggaggccgagaagcaaaagcccaaaggggacagccaaacgaaaaagaagaaggaagagaagaaaggcaaaggc

SEQ ID NO: 193333 - RNA, 74 nt, Homo sapiens
aggaggccccccagccacggaaacgggacgcgccacagacgggggaacccagaaagagaaccgacgggaacaca

SEQ ID NO: 193334 - RNA, 73 nt, Homo sapiens
cggcggagagaccccgcggcgggcgcacaccacgccggagaagccgcgggagcggaagacaggcccggagccc

SEQ ID NO: 193335 - RNA, 71 nt, Homo sapiens
aaaaaggacacggagccagggccaacggccacccaagcaacaaaggaacaagcagaagagacaccggacga

SEQ ID NO: 193336 - RNA, 78 nt, Homo sapiens
gagaggaccaacggagcgcgaggcgggcgcggagaagcgcggagggacccggcagcaaccccaacaaacgccagaggc

SEQ ID NO: 193337 - RNA, 76 nt, Homo sapiens
accccgaaggagcaggagcgagaccaacgggagccccaaggcaccaccagcccacagagcagacagcgggacaccg

SEQ ID NO: 193338 - RNA, 78 nt, Homo sapiens
gggaaaggcgcgagacccagaggccgcggccgcgcccggaccaagagacgaggaaaaccccacccacaaaggcgagcc

SEQ ID NO: 193339 - RNA, 82 nt, Homo sapiens
ggcgcggcgcgcggaccccgccgagccagcgccggccgcgcgccgcgcccgcgccacagcaccagaccagcgaagcaaagaa

SEQ ID NO: 193340 - RNA, 65 nt, Homo sapiens
ggccaacaccagggcgcgcccagagcgaagcaccgaaccccagggcaagggcaaacgcagaaccg

SEQ ID NO: 193341 - RNA, 68 nt, Homo sapiens
cagcacccggcacgccacggcgccccgcaagcccaggaccaaagagggcgccaaaagggaagcaccca

SEQ ID NO: 193342 - RNA, 51 nt, Homo sapiens
aagggccaccccacagacggagcaaaagaagagcagagcacaggaagaccc

SEQ ID NO: 193343 - RNA, 52 nt, Homo sapiens
gcgcccagaacacaagaaaggccacagccaggacgccgccagccaccggcgc

SEQ ID NO: 193344 - RNA, 80 nt, Homo sapiens
ggagaggccgcccaacacgccaccacggcaaggaaagaaagccaggggcaacagaggaaggagaagaaaggccccagaag

SEQ ID NO: 193345 - RNA, 79 nt, Homo sapiens
gcgcagagggcgaggaggagaacccaccaagccccgcaggagccaccagacggagcagagcaggacaggagagacaacg

SEQ ID NO: 193346 - RNA, 55 nt, Homo sapiens
gccagccggcccgaggacaccgacaccagcaggaccgggcgaggcagggcacgga

SEQ ID NO: 193347 - RNA, 65 nt, Homo sapiens
ggggaagaccgcgcccgcggagagcccaaacaccaccaccaagcaccaggacaaaagaagggcag

SEQ ID NO: 193348 - RNA, 60 nt, Homo sapiens
cccaaaggcaccagaagacccaaaacggaaggcgcgcaagaggccgccaggggccggaca

SEQ ID NO: 193349 - RNA, 69 nt, Homo sapiens
cgcaagaacgccgaaccaggaacaacaagaaccaagccacagacaacaggcacaaagagagaaggaaca

SEQ ID NO: 193350 - RNA, 76 nt, Homo sapiens
ccccacagcaaggacaaccagaaagcccccaaccaggacccagcgcacgcagaagagggagagcagaagcagaaag

SEQ ID NO: 193351 - RNA, 86 nt, Homo sapiens
aacacccaagggaagcagaagaaaaggagaaggaaagcgaaggggaaggcgccgaagaggacgaaggaacgcaaggcggggaaaaa

SEQ ID NO: 193352 - RNA, 77 nt, Homo sapiens
acagccgaaaggcggggacgggccggcccgcggaaggccagaaagacacacaggagagcggcgcagaaaaacaaaag

SEQ ID NO: 193353 - RNA, 73 nt, Homo sapiens
ccccacgcccaagaggagcaacaacgaggccaaaggaacggagcccacacggccagcgagaagagggcggaaa

SEQ ID NO: 193354 - RNA, 60 nt, Homo sapiens
cacagccccccacagcagaaccccagccacccacgcacccagcaccgccaggaaacaacg

SEQ ID NO: 193355 - RNA, 73 nt, Homo sapiens
accacggggaaaacaaaggaggccaccagacagaacgaacagacccggaggcaggcgggaagaagacaagaag

SEQ ID NO: 193356 - RNA, 86 nt, Homo sapiens
agagccgggagaaacacaaagaggcaccacaccaaccccggggcacgagggcggggaagaggaccagccgaaagacgaaggaagcc

SEQ ID NO: 193357 - RNA, 69 nt, Homo sapiens
caacacgcacccccccgagaggggagacgagcaggccgggccaagaacgggaaggagggagcgggcggc

SEQ ID NO: 193358 - RNA, 78 nt, Homo sapiens
gggaccgggccacccaagcaccggcagacaagagcagaagccaggggaccagaacgcagccagccgcgggcgccgcca

SEQ ID NO: 193359 - RNA, 78 nt, Homo sapiens
ccgaccaagcgggaccccggagcgacccggacaccgacgcgccacgcggagcccggccgaaggcggccgcagaccccg

SEQ ID NO: 193360 - RNA, 84 nt, Homo sapiens
agcaggccgaccgcccgccacgggaggagagagcgaggccacccagaaggccagccccagcggcccccagccccggaaggggac

SEQ ID NO: 193361 - RNA, 79 nt, Homo sapiens
cggccgcgagccggcgcagacgggaagacagaggaagaggaagacaaaccggcacgaaagaccagagaaacaaaaagca

SEQ ID NO: 193362 - RNA, 76 nt, Homo sapiens
ggaacccagaacggagggcacgagcgggccgagaccagaaaccaggcgagcggaagaagcaacgaccaagaggagg

SEQ ID NO: 193363 - RNA, 56 nt, Homo sapiens
ggccgaaacagaaaacaagagaccacagaagccaaccccagagagcaccggccaga

SEQ ID NO: 193364 - RNA, 74 nt, Homo sapiens
gggaacagcacccacgagaggcacggaggccggaaacgggccaccgaggcccaaggagcccccgagacgaaccc

SEQ ID NO: 193365 - RNA, 74 nt, Homo sapiens
aaggaaagggcgggcggaacgacccagaaccggcgagggggggaccaagcagggacgggggagaaagcgcaggg

SEQ ID NO: 193366 - RNA, 81 nt, Homo sapiens
gcgcgaggagaggagcgcaacagcagcaccaggggggagggcgcagcccagagccgaccccagaccggagacccaagaagc

SEQ ID NO: 193367 - RNA, 79 nt, Homo sapiens
ggaaaaacggaggcacaagggaagggacgcaaaaaggaagccccacaaggaccaggcaaaacggaagagcacaagaccc

SEQ ID NO: 193368 - RNA, 76 nt, Homo sapiens
aacggagaggcacaggaacacgaggaaacccacgggccacgcacaccgagggaaacggaaacagcgagcaaccacc

SEQ ID NO: 193369 - RNA, 80 nt, Homo sapiens
gggcacagaggggcccagaaaacaagccagcagggaggagaacaccaaacagaggaacaggcggacagccaaggagacaa

SEQ ID NO: 193370 - RNA, 66 nt, Homo sapiens
ccccaggcggccggacaacggcgcggcgacaaggcccgacgggccaggagggggccgaggggaccc

SEQ ID NO: 193371 - RNA, 79 nt, Homo sapiens
cccggagcagcagcccgccggcacgcgagccccagcaaggggaggggaccaggagagaagaaggccacacgaaaagaga

SEQ ID NO: 193372 - RNA, 77 nt, Homo sapiens
aagccccacccagccacacgccacacccggaccaggccgcaccacaccaaagaagggggccaccaagcaagcgagaa

SEQ ID NO: 193373 - RNA, 44 nt, Homo sapiens
gacggaacgaggaaggcccggcccgcgagccccagcccgggaga

SEQ ID NO: 193374 - RNA, 74 nt, Homo sapiens
aaaaccagcaagacgggagacaaacacaggaaccaagggcaacaggaaggcgcaagacgaagaggaagaaacgc

SEQ ID NO: 193375 - RNA, 121 nt, Homo sapiens
ccggagcggccggacggaaagcgacaagggaggcgccgccagcggccgggaccgaacaggcgggcagacagaagagccggcaacgcccagaggccacgcggcagacaccaggacgccaaga

SEQ ID NO: 193376 - RNA, 84 nt, Homo sapiens
gaggagggagaacacagaaaccggccccagaggagaggagacgccggagcgggacgaccagagaccgagagcggcgcgcaccgc

SEQ ID NO: 193377 - RNA, 74 nt, Homo sapiens
ccagggggacggcaaacggagccaggcacaagaaaagaaacagacgcggagcaccccaggcggaaacaagaacg

SEQ ID NO: 193378 - RNA, 72 nt, Homo sapiens
gcgagaagcagccacagaaaaggcgggacaaggagaacaaacagcagaagagcaaaagaagcccaaccaacc

SEQ ID NO: 193379 - RNA, 59 nt, Homo sapiens
ccccccagccggaagggcagagggaaagcaacggcgcaagcggcggcggcgggcagagg

SEQ ID NO: 193380 - RNA, 48 nt, Homo sapiens
gagccagagcgggaggacgacgagagaggaacgggcgcaccacgccac

SEQ ID NO: 193381 - RNA, 65 nt, Homo sapiens
cgagggagcgaagcaacaagggccagacagccaccgaaggggcccagggaccgggaccgcgcacc

SEQ ID NO: 193382 - RNA, 70 nt, Homo sapiens
agggcccagggaagaagcggccgggaacgccgcagaaagcaacaaagcgagagcacaagaaaacagcccc

SEQ ID NO: 193383 - RNA, 85 nt, Homo sapiens
gaccagcgagaggagcgcgccgaggccagacccggccggggccgaaccgaccagaccaggcaagaacaccagggaaagggcaaag

SEQ ID NO: 193384 - RNA, 54 nt, Homo sapiens
acggaccccaccaccaggcagagaagcggaccaagaaaggcccagggaccaaag

SEQ ID NO: 193385 - RNA, 34 nt, Homo sapiens
acccaagacgcggcaacaggaaccaccggacaaa

SEQ ID NO: 193386 - RNA, 77 nt, Homo sapiens
cagagggggaaagccaaggaaaaacggagagccacaaaaaaggaagcgaaaaaaacaggggcacagacgacagaagc

SEQ ID NO: 193387 - RNA, 74 nt, Homo sapiens
ccggcggggagcgccggagccgggccgacggcaccaaggacaaggcacgaggcgcggcgaccaccacagcagag

SEQ ID NO: 193388 - RNA, 72 nt, Homo sapiens
aaaccagggaaaaagcaaaaccgaacacgaccagcccaggcacccaaagaaaggggagcaagaagaaagagc

SEQ ID NO: 193389 - RNA, 89 nt, Homo sapiens
cgggagcggcggccacggaggcaccagaagaagcaccaggggacggcaaaacagaacagaaaggcggagaaaaaagagggggaaaagac

SEQ ID NO: 193390 - RNA, 53 nt, Homo sapiens
ccgcagcacgaccagcaggaacggccccccaggccacccaggaccagcggcac

SEQ ID NO: 193391 - RNA, 82 nt, Homo sapiens
acagaaccaccgggcacaagacgcggccgcgggcccacagcaggcgagcggcccggaccagggagagcagggaagcgagccc

SEQ ID NO: 193392 - RNA, 72 nt, Homo sapiens
ggcacaggaccgacacccagcccacacaccccagggacagcaacagagcgaacaggacggaaaagaaccaac

SEQ ID NO: 193393 - RNA, 88 nt, Homo sapiens
caagaccacacaccagccggacggcggggccgggcccccggccgcaagcaggacgggcgcacaacaccaacacgccaggaccaagaag

SEQ ID NO: 193394 - RNA, 58 nt, Homo sapiens
gaaagcgacaccagcgccccagaagcgaggagcaccacgaagaggcggaagaaccacg

SEQ ID NO: 193395 - RNA, 76 nt, Homo sapiens
gcaggcaaaagagaccacggcccaggggaagagacacagagcagacaagggccgaacaccaacagaggaagaaagg

SEQ ID NO: 193396 - RNA, 75 nt, Homo sapiens
aagggcacaccacacgcaagaggaaaaagaaaggggaagaacaggcaaggaagacccacaggaccgcgaacaagg

SEQ ID NO: 193397 - RNA, 69 nt, Homo sapiens
gaacgaagaagaaaacaaaggcgagcagggaaacccagcacagacgcggaacagagacgggggcaccag

SEQ ID NO: 193398 - RNA, 68 nt, Homo sapiens
gagcgccgcgccagggcgcggggcggggaggcggaagacagcacaaaggcggaagagaaaaagagaaa

SEQ ID NO: 193399 - RNA, 69 nt, Homo sapiens
acaagaaaagaagacaggacaccagcaaggaaaagagcggcaaaaggacagcaccaccagacaggcaga

SEQ ID NO: 193400 - RNA, 78 nt, Homo sapiens
ggaaaagagggggagacagacaccggacacaacaagacacaaggaagaaggggagcaccggggaaccagggcggcagc

SEQ ID NO: 193401 - RNA, 62 nt, Homo sapiens
caaaccgaaggcgacagagacagggaccaagaaaggcccagggaccaaagcccggacaaggc

SEQ ID NO: 193402 - RNA, 74 nt, Homo sapiens
gcgaaaaaaacacaagaccggcagagcccagccggggccaaagcgaccaaccccccaccgcacgcagggggccc

SEQ ID NO: 193403 - RNA, 82 nt, Homo sapiens
gcgagagccgcgggagagggcagccgagcacacgccgccgccgccgcacgaggagcggaaacgcaggaggagagagacggac

SEQ ID NO: 193404 - RNA, 95 nt, Homo sapiens
gacagaggacgacgaagagacaaaggcaccggaaagccaggaaaaacacacgagcgcgccccccagaaccgcccacagcccacgggagagaggac

SEQ ID NO: 193405 - RNA, 62 nt, Homo sapiens
agaccacggaccgcagcgcaagacacgccaagaagaaggaggcgcggaggaggaggaggaag

SEQ ID NO: 193406 - RNA, 77 nt, Homo sapiens
gagggagggccgagccagccgcggccggaggagcccccaggccgaacagaacccccacagcagcacgcaggcgcccc

SEQ ID NO: 193407 - RNA, 76 nt, Homo sapiens
cggcggggggggacggccggcgccgaccccccagaggacggagaggcccccagaggagaaggcaacaagcggaacc

SEQ ID NO: 193408 - RNA, 49 nt, Homo sapiens
gacagaacacacgaaccagcccaagaaaacgggagcgggaaggaaaaaa

SEQ ID NO: 193409 - RNA, 74 nt, Homo sapiens
cgaaggaggaggcaagaggcggaagaaaggaaacccagcccgcaaccacagcgaaagaacccagcccagggaag

SEQ ID NO: 193410 - RNA, 120 nt, Homo sapiens
aagaggccccggccagccacgggaaagaagaacccaagacggacaccaggacaaaccagggcccacgagacgcgaacaaacgccgcgccgccagaagaacagaccgggagaccagccacg

SEQ ID NO: 193411 - RNA, 86 nt, Homo sapiens
gaagcagcaacgcagcgccagcggccaaccagacgggggcagcggaaggccaaagacagacgggcccagcacacagggacaacgcc

SEQ ID NO: 193412 - RNA, 49 nt, Homo sapiens
acgcagggcgcccccgaggagcaagaggggggggcccccccgaagaaag

SEQ ID NO: 193413 - RNA, 69 nt, Homo sapiens
aacccaccagaggagcaagaacgagggccaggagaagaaggaacaagaggaaagcagccaagagaacaa

SEQ ID NO: 193414 - RNA, 60 nt, Homo sapiens
acaagaacagggccaaacgggcccaagccggaaaaaaggaggagagaaagaacccacgca

SEQ ID NO: 193415 - RNA, 75 nt, Homo sapiens
agcaggggggccaggaggggagaggaggcaggcccgcgaggaagacggcaccggagcaccccagaccgacagggc

SEQ ID NO: 193416 - RNA, 60 nt, Homo sapiens
cgacagagccaaaacagagcggaaccgaggagagagaagccccagcggccagagcacgac

SEQ ID NO: 193417 - RNA, 88 nt, Homo sapiens
cgcggagcccggccccgcaccaggaggaggacgacagcacgcaggagcagggaaaaggcccacgagacaagaagggccacacaagcag

SEQ ID NO: 193418 - RNA, 57 nt, Homo sapiens
gaacacagagggaagagaaagcaaacgagcagggcaaggccacaggccaacgacaac

SEQ ID NO: 193419 - RNA, 80 nt, Homo sapiens
cagccccgacgggacgggggagggggcggccgggcggagagaaccagcgaggacgagggaacccgagcgcagaggggaag

SEQ ID NO: 193420 - RNA, 99 nt, Homo sapiens
cgggcaaggagacaacaagggaaaccgcaagggcagaagcggaagccagcgggcacagccacccagaggcccaagccggaaaagaagacgcccgagagc

SEQ ID NO: 193421 - RNA, 78 nt, Homo sapiens
aggaagaccgagggcccggcgaaccaccggccggccgagcgaacccgagggccccaccaggacagaggccaggcccgc

SEQ ID NO: 193422 - RNA, 80 nt, Homo sapiens
cggggagcggcggacggcaggcggggcggaggcggggcgcgggcgggaccgggcgggacaccgccacaaaaggaaaagac

SEQ ID NO: 193423 - RNA, 95 nt, Homo sapiens
aaaaaccagagaggaaaacacaaaaaacaggaaaaacagaagaggcagggcaaaacgagggggcaaagaaaaaggagagaaaaagaggcaaaaca

SEQ ID NO: 193424 - RNA, 76 nt, Homo sapiens
gaggccacaggggccgaaacacagagcaaggacaggcaaggagccaggccaaggagcagaagagacaaagcaagaa

SEQ ID NO: 193425 - RNA, 82 nt, Homo sapiens
gcagaggacgccggaacacccggaagccgagaaaggaccagaagaacccaggagaagcgagcaccaaggagaaggcgcgcca

SEQ ID NO: 193426 - RNA, 80 nt, Homo sapiens
ccggccgggccgcggcccgggacgccgggaggggccaaggacccggccaggaccgcaggggaaccgcacgcccgggcacc

SEQ ID NO: 193427 - RNA, 76 nt, Homo sapiens
caacacgacggagaccggaaaaagaggccacagaaggccagcagacaaagagcccaggacaccacagacagacaag

SEQ ID NO: 193428 - RNA, 33 nt, Homo sapiens
gcggagacaagagccccgccccgccgagcgcag

SEQ ID NO: 193429 - RNA, 71 nt, Homo sapiens
gaaggcaggcaccacaaaaaggacagcacacaaacagcgaacgcagacgaaacggagccaaacggcgacaa

SEQ ID NO: 193430 - RNA, 78 nt, Homo sapiens
cgggcacagcaaagcgaggaccagaccagccgcaagagagaaaacccccgaaacagagaaaccagccagagggaccag

SEQ ID NO: 193431 - RNA, 60 nt, Homo sapiens
gagcgccgagggcccaccgccagagaccccagccgacgggcacggagaaccacggggacc

SEQ ID NO: 193432 - RNA, 80 nt, Homo sapiens
gcccaggacccggcgcacggaagaaacagcccagcggcgagccggccaggggcacacagccccaccgcgccgcagccagc

SEQ ID NO: 193433 - RNA, 68 nt, Homo sapiens
aaggaccaagaaccaggcgcaaaaaccagacaccccacaccaccacccagacgaccaaaagggcaccc

SEQ ID NO: 193434 - RNA, 76 nt, Homo sapiens
gcccacagggcacagagaacgaagaggcagagagcaaagaacccccaagcaggaagggggcccacgagaagagcag

SEQ ID NO: 193435 - RNA, 58 nt, Homo sapiens
gcccgcgcggcgcggggaccgcggcccgcgggacgagccggagggaaggaggagaagc

SEQ ID NO: 193436 - RNA, 61 nt, Homo sapiens
gccgcgcacgccagggagccggacgacgggaacagacaaggaacccacccacgcaccacca

SEQ ID NO: 193437 - RNA, 83 nt, Homo sapiens
cggaggaaagacaacaaagagccgcacagccgagacaggggccaggccaggggcaggggaagcacccaaccaacgagcgggcc

SEQ ID NO: 193438 - RNA, 70 nt, Homo sapiens
acacagagcggcagacccgccccaagcgaacagagcaaggaaaggggcaggacaagaaccgccccagccc

SEQ ID NO: 193439 - RNA, 58 nt, Homo sapiens
cgggagcagaggaagccgaggaccaccacagaaggaagaagacgccccgccgaagagc

SEQ ID NO: 193440 - RNA, 76 nt, Homo sapiens
aaaccacgccagaaccgcaaagaagaacaccaagaaccagcaccccggagacggaccccaaggaaccccgggaacc

SEQ ID NO: 193441 - RNA, 72 nt, Homo sapiens
gcgaggagaacccgcagggccagacaggcacaaccccagaaggccgccaccagaacacgcacacagaagagg

SEQ ID NO: 193442 - RNA, 65 nt, Homo sapiens
agccgacaccagcgaccaaggcgagggcgaggaagcagccaaaacaaagccgaggcgcaccagga

SEQ ID NO: 193443 - RNA, 68 nt, Homo sapiens
cgcggagggacggcgcgagagccaacggaccacaacagagaaccaaggacgggaagcagaaaaaagaa

SEQ ID NO: 193444 - RNA, 86 nt, Homo sapiens
gcccgcacgcggcagccccggccggccccggccccccgcccaggcggggccgagcgacacgcagggaaaaaaccccaaacagaaac

SEQ ID NO: 193445 - RNA, 38 nt, Homo sapiens
gcagcaagaaagggaaggacagaaccgcaaggccacaa

SEQ ID NO: 193446 - RNA, 86 nt, Homo sapiens
ggggggccgcgcccggccccgcgcgggcggacggcggaggcgcccccagggcgaagcggccaggcccgggcggacgcagagccaga

SEQ ID NO: 193447 - RNA, 116 nt, Homo sapiens
gacaggcgcgccaggggaaagccggacgaggcgcgcggagagggcgcggccagcccccccccaaccccaaacccccggcgcggagagaggccccggagcgccaggcggggagagca

SEQ ID NO: 193448 - RNA, 50 nt, Homo sapiens
gaaggagggagaaaggcgggcccgggaacagacaccgaaaacgagaaacg

SEQ ID NO: 193449 - RNA, 84 nt, Homo sapiens
gggagagagaggaagaggagagaagccggaaaaccaggaacccgcagacccaggaccagcaagccaggcgcgaagcccaagcgc

SEQ ID NO: 193450 - RNA, 79 nt, Homo sapiens
agaaccgccgagcggcgcccgagaaagggccaacaaggaaaacacaccagacccaacacaggagggcaccccaaaccga

SEQ ID NO: 193451 - RNA, 69 nt, Homo sapiens
aggagagagagaagagacagacagggcccagcaccaggaccggaaagggaggaaaaagcggccaacagg

SEQ ID NO: 193452 - RNA, 75 nt, Homo sapiens
acagggaagcggcaagcagagaaaaccgccaacaagagagagggccaggaggggaggagggagggccacggcaag

SEQ ID NO: 193453 - RNA, 63 nt, Homo sapiens
gaacaggacagaccaaacacgaggcgcccaggagacgagcagcaaacagccaggcgccacagc

SEQ ID NO: 193454 - RNA, 39 nt, Homo sapiens
gaagaccagagaagaggggagaggaccgaaaacacggag

SEQ ID NO: 193455 - RNA, 77 nt, Homo sapiens
cgcacggcgacgccccaggggaaaacccccgggaccagagaggggaagccgagagcacaagcgggaagagaggaggc

SEQ ID NO: 193456 - RNA, 72 nt, Homo sapiens
ggcaccacaaacccacagaccaagccagaggagcaacagcgaccaacgaggacaggcgccaaaacaaaacag

SEQ ID NO: 193457 - RNA, 84 nt, Homo sapiens
cccggggaggccggccacgccccgcacgaagacgaccccgacgcaggccaggagccgcggacagaagccgagcacggccgagac

SEQ ID NO: 193458 - RNA, 69 nt, Homo sapiens
agggcaccagaccgagcacccgaaggacagcaggaagaagagcagcaaccaaaagaggccaaacagccc

SEQ ID NO: 193459 - RNA, 79 nt, Homo sapiens
accgagccgagaggagacacggcagaagcaggcacggcagacccacaacagcacggagacgcaaagagaggaaagcccc

SEQ ID NO: 193460 - RNA, 79 nt, Homo sapiens
gccaaagaccaggagagacgagcagcccagggagcgggagacaggacggggcgaggacgcaaccaccaccgacccgagc

SEQ ID NO: 193461 - RNA, 74 nt, Homo sapiens
cgcggccgcacccccgccccagcaacggggcggcacacaaggagcgaagggcagggagaacgccaggcacagca

SEQ ID NO: 193462 - RNA, 54 nt, Homo sapiens
gaccaggacaaaagaacaccgaaaacaacaggaccgggggacacccgacagccc

SEQ ID NO: 193463 - RNA, 81 nt, Homo sapiens
cggagcacaccacaaagccagagagaaccgagccaccgcaacggaggcgaaccggcaggagaaaggagcagccagaaagcg

SEQ ID NO: 193464 - RNA, 69 nt, Homo sapiens
agaccggacagaggcgcccggccaggaaccagcaggcgaagacgcaggagagcacagacggacccgcac

SEQ ID NO: 193465 - RNA, 82 nt, Homo sapiens
aggaccaggaggaggaggcagaggccggggggggcacagagccccggaagacagcccccagcgaccagacccagggccagag

SEQ ID NO: 193466 - RNA, 66 nt, Homo sapiens
gacgggggccacacacgcaaaaaggcccgagggcaggacagcaggcaccggcgaagcacagagagg

SEQ ID NO: 193467 - RNA, 76 nt, Homo sapiens
gggggacgggaaaacgcaccgcagccagcgacaacggaagaaaccacaaccccacaaacggccagcagggaaacgg

SEQ ID NO: 193468 - RNA, 71 nt, Homo sapiens
cgggcacaggagggaagagcaagcacagcgcagaaacgcaccgggagacgcaacaaacccaaagcccacac

SEQ ID NO: 193469 - RNA, 72 nt, Homo sapiens
agagacaccgggagaagcccggacggaaaacggcacgaaggaggacaggaagcacaagaagaaaagacacag

SEQ ID NO: 193470 - RNA, 76 nt, Homo sapiens
acaaagagacagaagggaacgaggaacacagcacccagacagggccacgacaagccgagaccaccaggagcagagc

SEQ ID NO: 193471 - RNA, 80 nt, Homo sapiens
gccgggcgcggagggaggagggagggagagcacggcgcaccaacggcagagaagcacagcacaagcgaggagccaccaag

SEQ ID NO: 193472 - RNA, 60 nt, Homo sapiens
aggagcagcgggccagaacggccaggagacgcaacgaagccccccagggaaagcccaacc

SEQ ID NO: 193473 - RNA, 81 nt, Homo sapiens
ccagagaccaaccccaagccgaagcccaggggaccccccagcagaacaccagacaggaaaccaggagagaagggggaccag

SEQ ID NO: 193474 - RNA, 77 nt, Homo sapiens
ccaacaggaccaagagagcgagcacgcagccccgaaggcggcccggccccccaaaaggcagcacacccaccgggacc

SEQ ID NO: 193475 - RNA, 70 nt, Homo sapiens
gaagccaggcaccccccacagaaagggcgcgcggaaaaggaacagaagaggaaccgaaacccaagaaaaa

SEQ ID NO: 193476 - RNA, 58 nt, Homo sapiens
agggaggcccaagacccacaacaaaaggaaggaaaacacaggaggaggccgaggggac

SEQ ID NO: 193477 - RNA, 87 nt, Homo sapiens
gaacagacacgcgggcggacggccacacagccggcagcccgggcgggcccgggggcgagcagcgcacccgagccagccagcagggca

SEQ ID NO: 193478 - RNA, 45 nt, Homo sapiens
ggaaaggacgcgacgagcccggcaaggagagccggaagagcgcag

SEQ ID NO: 193479 - RNA, 82 nt, Homo sapiens
cgagggcgcgccgagacgcccgaggggcgaaggcagacagacacggccccgcgaaccgcggcggccaggcggcagccaccgg

SEQ ID NO: 193480 - RNA, 75 nt, Homo sapiens
cgaacaaggcaaaagggcggaagaagagcaccaaaaagaacagaaaagaaacccacagccacggagaaaaagaag

SEQ ID NO: 193481 - RNA, 69 nt, Homo sapiens
cgccgaagagggaacacaacaaggaagggacaacacgaccacccaaaacaggcaaaccgacaccagcga

SEQ ID NO: 193482 - RNA, 45 nt, Homo sapiens
ggcggaggcggaggcggccggcccggggccggccggacaaaggag

SEQ ID NO: 193483 - RNA, 73 nt, Homo sapiens
gcacccccagcgggcaggccccgagccccggccccaaagacccaaaacagagacaccccccagcccccgcgcc

SEQ ID NO: 193484 - RNA, 83 nt, Homo sapiens
cggcggcgcggagccagcgcgcagaccagcggacagggagcagagaaacagaaggcacaggcagcccgggacacgacaagaga

SEQ ID NO: 193485 - RNA, 65 nt, Homo sapiens
cccgggaggcaccgagaggaaaggcgagggaagcgccgggcggcccacgaacccaaagggacaag

SEQ ID NO: 193486 - RNA, 77 nt, Homo sapiens
aaagagggggcggaagagacagccaggcacagaaggcaagagcgaacacaaaaaaggcaaacagcgaggcgcgccgg

SEQ ID NO: 193487 - RNA, 81 nt, Homo sapiens
ggacccggggcagagaggaagccaggaccacgaaaagagcaggaaccaagggggagcccaccagaaacccccagggaagga

SEQ ID NO: 193488 - RNA, 70 nt, Homo sapiens
ccagccaaaaagcacaacaccgggcaaccacggggcggcgccggccccaaggacagcaaggcggcaaggc

SEQ ID NO: 193489 - RNA, 72 nt, Homo sapiens
ggcggacagcggggcccgcggaaaacagccagaacaagccgggagaggaacagcgcgccgggcgcacgaaca

SEQ ID NO: 193490 - RNA, 84 nt, Homo sapiens
cccaccgggaagccggggggcccggaaagagagagcaggcgaagaggaacgaaccgagccgggaagggaggaccagagcacccc

SEQ ID NO: 193491 - RNA, 81 nt, Homo sapiens
aaggccgcgccgggcgggacgggggggcggcccggccccgcagggggcagcggcgacgcggaggggggaagaacggaagcg

SEQ ID NO: 193492 - RNA, 76 nt, Homo sapiens
aacggggaagaaaggagcgaggagcagaaaccagccacgggccggaggcaaaaaaacaaggcccccagagagcccg

SEQ ID NO: 193493 - RNA, 73 nt, Homo sapiens
ccaggaccacaacccagaaggacgacgggcggcaaccaggggcccggagaccggacccgaaaaaacacaaaaa

SEQ ID NO: 193494 - RNA, 71 nt, Homo sapiens
cggaaccaaagccagccggcaacgaagacgcagggccccaacagccacagccacacacagcccacaggaac

SEQ ID NO: 193495 - RNA, 75 nt, Homo sapiens
caagagggagagaggagccaaaacggcgagcaagagaggaaaaaccagaagagaaaaaacaaaggggagaggcac

SEQ ID NO: 193496 - RNA, 37 nt, Homo sapiens
aaaccaagacggcagagaacccagcggccagcgccag

SEQ ID NO: 193497 - RNA, 56 nt, Homo sapiens
cgaaccgcacagcaagcccaggccaacaggacagacccgagaaaccggacagcaga

SEQ ID NO: 193498 - RNA, 80 nt, Homo sapiens
aggcaaggagcaaagcagcggcgcagcccgggaaggaagaaagagcagggccaggggccagaaggggaacaggaagcaac

SEQ ID NO: 193499 - RNA, 72 nt, Homo sapiens
cgcccccacccagagcaaagagacgcccgggacaggacacaaggagggccaagaacccaggaggagggacag

SEQ ID NO: 193500 - RNA, 68 nt, Homo sapiens
ccggcccgaggaaggcaagacccgacaccgaaaacgagaaacgaaagagacacgggggcacaaccgag

SEQ ID NO: 193501 - RNA, 79 nt, Homo sapiens
cgacggcaggaagaaaacgagccaggaacaaagagcaagaggaacagagacaaaagcaaagaagaggcccaaccaggcc

SEQ ID NO: 193502 - RNA, 75 nt, Homo sapiens
agcgaggggccaaggcagaagaaacggagaagggcaaagagcacgcagccccgaaggcggcccggccccccaaaa

SEQ ID NO: 193503 - RNA, 89 nt, Homo sapiens
gacacaagcgagaggacaggcggaggccccagggaagcgcagaaagcaggcgaacccgcggcgcaaaacggagaacgcgccgccggccg

SEQ ID NO: 193504 - RNA, 75 nt, Homo sapiens
ggccgcgccgcgccgcgcgcgggagcgccagcaagcccaggggcacgggcacagcccagaagaccagcgagaggc

SEQ ID NO: 193505 - RNA, 84 nt, Homo sapiens
agcagcagcgaaaagaagacggcccaccccaggagacggcccacggcccgccaccaccagccccaccggccccacggggcccca

SEQ ID NO: 193506 - RNA, 88 nt, Homo sapiens
gacacgacgccgccggcaggcccgcgcaccaggagggacaggcaagaaggaagaaggcagaggcgcagccagggggaccgcggaggag

SEQ ID NO: 193507 - RNA, 81 nt, Homo sapiens
gaccggagccgagcagaccaccgcgcgaacccgcagccgcaggccgcgccgggaccaggggacgagggaccacagcggcgg

SEQ ID NO: 193508 - RNA, 60 nt, Homo sapiens
cacagcgaccgggagcacaccacaggcaagaaccagccaagaagagaaaacacagagaag

SEQ ID NO: 193509 - RNA, 80 nt, Homo sapiens
cacgcggaaggcgcggcggacccggggccccacgagaggcggcagcggcgggggcaggcggaggcaaggcacgaccggcc

SEQ ID NO: 193510 - RNA, 77 nt, Homo sapiens
cagggaacccggcaccgccccaggccagccccccggggccgcgggcgccgccccaccaggcaggcaaccaccaagcc

SEQ ID NO: 193511 - RNA, 53 nt, Homo sapiens
agaagaagagacacaaaagagagggaaagaaaacaagccacccagacaagagg

SEQ ID NO: 193512 - RNA, 66 nt, Homo sapiens
cacgacaacgcagaagagcgcaggagcaaccaccagggacacaggccaaggggggcgcaaagcccc

SEQ ID NO: 193513 - RNA, 75 nt, Homo sapiens
gggagcacagagcgagaccaggaaagaagggggcagaagaggggaacagagacgcaggcaagagcgcggaggaga

SEQ ID NO: 193514 - RNA, 72 nt, Homo sapiens
agcagaccagaccagagaaaacgggaggacgcacccggggaaccagcaaacaaggcacccggacacgaccaa

SEQ ID NO: 193515 - RNA, 73 nt, Homo sapiens
cagaaaggacccggccccccacgacagaaacaacgaacgagcaaggaagggccaaggcagaccccacaccgga

SEQ ID NO: 193516 - RNA, 113 nt, Homo sapiens
ccgcgccgccaccagccagccccaccaaggcggccaggagcccacccgccgagcagcaggggaaacaacaagccagacgcggagacacccgcagggggaggcccaccaggagg

SEQ ID NO: 193517 - RNA, 61 nt, Homo sapiens
cggagaggaccacgccggcaggaaccagaccaggaagacaacgcaccaagaaccaccaccg

SEQ ID NO: 193518 - RNA, 66 nt, Homo sapiens
cccgcagggcgaagggacaagacggcggggaaaaacgcaggaccaaaagaaggcaaaagggagcaa

SEQ ID NO: 193519 - RNA, 68 nt, Homo sapiens
aaagggcaaagagcggccacacaacggagagcgcaagcccagcgggacagggaagagccgcaggagga

SEQ ID NO: 193520 - RNA, 75 nt, Homo sapiens
aacgaagaggagaagacaccaaaaagcaaacggaccagaccgaccaccaaaagaccagaacagagaagaaagcag

SEQ ID NO: 193521 - RNA, 53 nt, Homo sapiens
cggccacaaggcccgagggaggaccgcagagagagaggcagcgaaaaaagagc

SEQ ID NO: 193522 - RNA, 74 nt, Homo sapiens
ggacacccacagcggggcggcggcggcggcggcgcggcccaaaaggggccgcaaggccaggcgcgcagaggcac

SEQ ID NO: 193523 - RNA, 78 nt, Homo sapiens
agcccgagcgccgccgcgcccggcgccgggggccgggccgcaccggccaaggagcgggaggagacgaggagggacccg

SEQ ID NO: 193524 - RNA, 43 nt, Homo sapiens
gagagcgcaagcccagcgggacaggacagcagaccacagcccg

SEQ ID NO: 193525 - RNA, 65 nt, Homo sapiens
cgccaaaagccgaacgaccacgcaagagacaagcaggacagccaaaccaacggagccaccaccac

SEQ ID NO: 193526 - RNA, 69 nt, Homo sapiens
cgggaaccgaaaaaagcagggaagaagagccaccgagcgaagacccgagaacaagacgccgggcaggcc

SEQ ID NO: 193527 - RNA, 84 nt, Homo sapiens
cgcaccagcggggcgagagggggcaggggcagccgccagcccaaacaggcggcacagagagagcacaaggagagaacagggggg

SEQ ID NO: 193528 - RNA, 77 nt, Homo sapiens
ggcaagaccagagcgaagacgccaaaaaaaagcccgacgaggagacgaaagaggcggacgaacccaaggaggcagga

SEQ ID NO: 193529 - RNA, 75 nt, Homo sapiens
agcacaggcgcgcaaacggaggaaagggcacagaggggcccagaaaacaagccagcagacagcaggggaccggga

SEQ ID NO: 193530 - RNA, 67 nt, Homo sapiens
accaccgcaagacagccgaaacgggcacaaggagcgagcaacaacggccaaaaccgaggaacaacag

SEQ ID NO: 193531 - RNA, 40 nt, Homo sapiens
aaccagacacccagaaaggggccgaacaagccgagacggg

SEQ ID NO: 193532 - RNA, 86 nt, Homo sapiens
cgcccgcggccagccgcaagacccgccacaagcaacgcgggaagagaagaaacggcgaggaaagagaggagccccggaaagaaaag

SEQ ID NO: 193533 - RNA, 83 nt, Homo sapiens
gcggcgcagaggccgacggagccggagcgcggacgccgcggggcccgggacaggcacgggaccaccagcgcgcagggggaaac

SEQ ID NO: 193534 - RNA, 63 nt, Homo sapiens
caaggagccaagcgcgagaagaggaacgagacagcgcgggagcaaagcgcagaccccagcccc

SEQ ID NO: 193535 - RNA, 79 nt, Homo sapiens
cgaaagaacaacgccgaaccaggcagggaccaagaaaggcccagggaccaaagcccggacaaggcccgagcaccaggac

SEQ ID NO: 193536 - RNA, 58 nt, Homo sapiens
agaacccagagccagagaaagaagacaaagagacccgaagagggggacaggggagcac

SEQ ID NO: 193537 - RNA, 63 nt, Homo sapiens
caggagcaggccagcagcgggggacccgaccccgcgaggcaagacaagaccaggcacacgacc

SEQ ID NO: 193538 - RNA, 67 nt, Homo sapiens
aagagcaaaaaaacgaaacaaagacaaggcccgagggcaggacagcaggcaccggcgaagcacagag

SEQ ID NO: 193539 - RNA, 75 nt, Homo sapiens
cccaaacgccaggagcacgccagaccgggccagacacagaaacgagaccagcaacgaggaagaccaaaaagagaa

SEQ ID NO: 193540 - RNA, 52 nt, Homo sapiens
gcccggagcacagcccaagaacaaggaagggagcaccggccgcgagaggaga

SEQ ID NO: 193541 - RNA, 72 nt, Homo sapiens
cacaccgcagcacgaccgcaaaacggccacgggccaacacacggcagaggcaacaggcagccaccacacgcg

SEQ ID NO: 193542 - RNA, 83 nt, Homo sapiens
ggccgccccgagcggagccggaggacgaccgaaaacccagccagacaaaagagaagcagaggagcgaagaaagagagaggaac

SEQ ID NO: 193543 - RNA, 83 nt, Homo sapiens
gaggacagggagggcgcgcagcggcgcggaagaggcagagagacgaagagagaagcagggcagaaagagcggaaacgagaaga

SEQ ID NO: 193544 - RNA, 74 nt, Homo sapiens
ccaagcaggaccacccaccagccaccagggacgcggacgcccaaagcggcccgaccgaggacagacagcagcac

SEQ ID NO: 193545 - RNA, 66 nt, Homo sapiens
ccacagaccacgccacggaaccacggcacccaacggcgagacgacgcgccaggacccacaacccca

SEQ ID NO: 193546 - RNA, 71 nt, Homo sapiens
aggcggcggcgcccggagggcagcgagacagccccagaagggccggaccgcggaggaggggcgccacacac

SEQ ID NO: 193547 - RNA, 70 nt, Homo sapiens
cacaccaaaccaacaccccgccggcacggcccgcccgccggccccgggcaaggggagcagacaacaaaac

SEQ ID NO: 193548 - RNA, 64 nt, Homo sapiens
ggcaaccagcggggcaccgggacgggccgagccgaacggcaacgaaaagagacacgacgcaaac

SEQ ID NO: 193549 - RNA, 65 nt, Homo sapiens
acccgccccggcgccgccggcccgcgggaccgacagccgggcagagcaaaggagcgcccccaggc

SEQ ID NO: 193550 - RNA, 70 nt, Homo sapiens
ccaccaacgaggaccaaaagcaccaaagagggaaggagagaaggagagagacccagcccaccaaaggaag

SEQ ID NO: 193551 - RNA, 67 nt, Homo sapiens
gaaggaccaagaaccaggccacgccggacagcgccgccggacagcgaacaccgaacaaggcgaagca

SEQ ID NO: 193552 - RNA, 60 nt, Homo sapiens
gcagcagagggaaggagcacacgggaaggagccaagacaaccacacacaaaaggaaaggg

SEQ ID NO: 193553 - RNA, 77 nt, Homo sapiens
gccaggcaccaggacagcggcggcgggccgggcagcccggccgacaaccacgcagcaccaaggggggccagcggaaa

SEQ ID NO: 193554 - RNA, 81 nt, Homo sapiens
gggaaagccaaaggagccagaaagcgaggacccggggacaacggcaagcggagaagagcaaggccgaaccgagaggaaggg

SEQ ID NO: 193555 - RNA, 79 nt, Homo sapiens
gagccaacagagagcagccagaacaacaagaaggagaaagacacaacgacagaagaaaaaacacaagaaaagacaagca

SEQ ID NO: 193556 - RNA, 58 nt, Homo sapiens
acaacgcaccaggcgcagacagacaaggccaagccgcccgccaaccggcagcgccgac

SEQ ID NO: 193557 - RNA, 78 nt, Homo sapiens
ggcgccggaccccgagaaacaggaaaaccacccagcaagaacgcagcagaagaaaacagaaggaaccacaggagggaa

SEQ ID NO: 193558 - RNA, 84 nt, Homo sapiens
ccccggcccccgccccaggagcgcgagcccacaacacccccagcggccgccggccccccacgaggggaaaagaggagcaggaga

SEQ ID NO: 193559 - RNA, 62 nt, Homo sapiens
cgccgcgagccgcgcggagccgcgcagccccggagcacggcgccgggccagccagggcccca

SEQ ID NO: 193560 - RNA, 72 nt, Homo sapiens
ccggcgggaacacaggcagagaaaggagaagcagggcccaacaagagagggaagcaggaaaagagcgcaaaa

SEQ ID NO: 193561 - RNA, 76 nt, Homo sapiens
ccgagcacagagacgaagaggaccaggagcaaacagaaaaaaagaaggaccaggacaaaggaaaagaaccgggacg

SEQ ID NO: 193562 - RNA, 80 nt, Homo sapiens
caaagaaaaccaaaacgcaacagaaacaacaggggggcacaagccacggagcgagcccggggagccaggcaggaggggga

SEQ ID NO: 193563 - RNA, 58 nt, Homo sapiens
gaagagcgcccaccggaggccacccagagggacagagcccacacagaaaagaacagga

SEQ ID NO: 193564 - RNA, 80 nt, Homo sapiens
ggcagagcggaaccggacaccagagccggaagggaaccgcccaggcccccgagccaagcaagggcgagagcccagcaagc

SEQ ID NO: 193565 - RNA, 79 nt, Homo sapiens
gagccggagaacggccaggcggccccgagcggaacggagaaagcgagggaaaccccgaggcggcagaccaacccggaca

SEQ ID NO: 193566 - RNA, 82 nt, Homo sapiens
agagacagaacaaggccaggccggcccagggagaacgcaaaaccaccacccccacaaaaaacgcagggagaaaaggacgcaa

SEQ ID NO: 193567 - RNA, 71 nt, Homo sapiens
ggagcgccacacagcacgcggccaggcagagccggcgggaggacaagagcccagcggcagagccgaggacc

SEQ ID NO: 193568 - RNA, 73 nt, Homo sapiens
gagagggacggggaaggccggggcgcccggcgccggccgagaaggcagaggcgggacagaagggaaccgggga

SEQ ID NO: 193569 - RNA, 78 nt, Homo sapiens
gccgaggcagccggcccccgacaaagacacgggacaaggagcgggagagccaacaaggagggaaacccgaaagcaggc

SEQ ID NO: 193570 - RNA, 77 nt, Homo sapiens
gagaggaagccaacgacccagccgaggagcgaacaagaagggccaacaaggaccaagagagaagaaccagcaacaac

SEQ ID NO: 193571 - RNA, 72 nt, Homo sapiens
aaaaagagagcccaaacacaccgccggcgaggagggcgaggcagggcaaggcaacgaacagaaaggcacgac

SEQ ID NO: 193572 - RNA, 67 nt, Homo sapiens
cgggacgcgccgcggagaagaaggggcaccagcgggcacaccaagaagcgccccgcaagacccaccg

SEQ ID NO: 193573 - RNA, 108 nt, Homo sapiens
ggcgaaggagccgacgagaaaaacaaggagcggacacgagccgagggaggggaaaggcgcagggcagccgcgcaacggcccgcggcgcgggaggagacggccgaccga

SEQ ID NO: 193574 - RNA, 62 nt, Homo sapiens
gaagccgaacacgacagaaagaaaggccaaagcagcaggacgccgccagccaccggcgcgaa

SEQ ID NO: 193575 - RNA, 65 nt, Homo sapiens
agcggcagcaccacacccaggaaagcccagcggaagcccgcgggccccgcagaagcagccggagg

SEQ ID NO: 193576 - RNA, 76 nt, Homo sapiens
aagaagcaggaggcaagaaaggggaaccccggagaaaaggccaagaaggcagggaaagaaaggcaaagcgagcaag

SEQ ID NO: 193577 - RNA, 77 nt, Homo sapiens
agcaccccaccaccaaaccacggagagacagcgcggagaccacccagccggcgaaacacaaagccgacagcgcacac

SEQ ID NO: 193578 - RNA, 69 nt, Homo sapiens
aaagcaccgcaacagaaacaggcaacaccaacagcggcagagaagaaaccgaaacacaaagaaggaaaa

SEQ ID NO: 193579 - RNA, 72 nt, Homo sapiens
cggggaaggggagagcgcgaagaggagaaaaggcgaaagagccagcagaggccaaggcagcagcgaagaaga

SEQ ID NO: 193580 - RNA, 35 nt, Homo sapiens
caggaccagggcaggggagcggcccgcacagcgcc

SEQ ID NO: 193581 - RNA, 75 nt, Homo sapiens
acacccagaagccccacgccggcagacccaagccggccgcaacggccaaagaagagacgagggagcaacaacaag

SEQ ID NO: 193582 - RNA, 93 nt, Homo sapiens
gccgcgccccgcgcgcgggaagcagcaccaagcacggccaacgccggcacagggggcgggaggaacagagcgacaggcaaacacccaggggaa

SEQ ID NO: 193583 - RNA, 75 nt, Homo sapiens
cgcccccaacgccccggagccgccggccgcagcgcagcgccagccagaacagggcaggaaagggaacaacgaccg

SEQ ID NO: 193584 - RNA, 89 nt, Homo sapiens
gggggacggccggcggcacccgcacccggggacaagcgcgggaacggcgcggaaggagggagcaacaacaaggagcaagcacagcgcga

SEQ ID NO: 193585 - RNA, 50 nt, Homo sapiens
gacagaaggggacaagaagcgcgacggagcgaccaggcgggcacaaaacg

SEQ ID NO: 193586 - RNA, 80 nt, Homo sapiens
gcgcggggccggaggcgggcgaggaaggggccggcacgaggcacacagacaaccaaaacccaaggcaaaggagagcaagg

SEQ ID NO: 193587 - RNA, 74 nt, Homo sapiens
cagacgaagaagaagcaagcgaggcccacaagaaggccccgggggcgccgagggcacaagggcaacgacagaag

SEQ ID NO: 193588 - RNA, 59 nt, Homo sapiens
gggcccagccggagcggccagccgacagggccaccccgaagaggccaagcaacggaaga

SEQ ID NO: 193589 - RNA, 75 nt, Homo sapiens
caagcgcgccacgagccagaagagggagcgcaggaccacgaggagggggcggcagggggcagggcgccagggagc

SEQ ID NO: 193590 - RNA, 80 nt, Homo sapiens
cagcccaggcggcgcggacggggcgggaaggcacggcgcaaacggcgccgggccaggaggaggaggaagcccgcgccggg

SEQ ID NO: 193591 - RNA, 83 nt, Homo sapiens
cggaccgcggcccgacgaggaagcacgaaagcaccaacgagacccgccacacgaggcgaccagacgaggggagacggacgggg

SEQ ID NO: 193592 - RNA, 53 nt, Homo sapiens
caccgacgcgccacgcggagcccgcaagaggaaaggccgccccggaggaagaa

SEQ ID NO: 193593 - RNA, 74 nt, Homo sapiens
agccccagcaccacgaacaggcaccggacaagagcagagaaagagacgaggaggggaccccaaagcagccgaca

SEQ ID NO: 193594 - RNA, 56 nt, Homo sapiens
caaggcgcggggggccacgcgaggccgaggagggacggccgagaacaaacacacga

SEQ ID NO: 193595 - RNA, 73 nt, Homo sapiens
accggcacaccgcggggccgaaaacaacgacaacgagcacaggccaggcgcgggccaccccacggggcaacaa

SEQ ID NO: 193596 - RNA, 76 nt, Homo sapiens
agaaggaccaaaacagcagacccacggcgccccagggacgagacgggcagggcaccgcgccgaacaaagacggaag

SEQ ID NO: 193597 - RNA, 73 nt, Homo sapiens
ggagccgcagcggagaaggaaaccccccgcgacccagacgcagcgagcgcgccgcccaagccggccgacagcc

SEQ ID NO: 193598 - RNA, 47 nt, Homo sapiens
aaacccaagcagacagaaggaccaaaaggaccagcgcccacacacag

SEQ ID NO: 193599 - RNA, 76 nt, Homo sapiens
gccaagacaggaaaccaacaagacgaggaccgagacagaagagggcgggaacagccaggggaggggggcagcgaac

SEQ ID NO: 193600 - RNA, 85 nt, Homo sapiens
cgcgcacagaacaggcggggcaccccgcccggccgagcccggaccagacagacaggagaacccagcgacgacagaagcagccgaa

SEQ ID NO: 193601 - RNA, 82 nt, Homo sapiens
ccgacagcaagaacagggccagggccagcccgccagaggcccacccacagagcgcggaggagaaggaccggagaaggagagg

SEQ ID NO: 193602 - RNA, 57 nt, Homo sapiens
ccgcagcggaaagcaggagcacagggaacaacggagagaagcaaaagccccaccaca

SEQ ID NO: 193603 - RNA, 67 nt, Homo sapiens
caaacaggcccccagaagagcggagagacgaaagagaccaggagagaagacgaaaaagaagaagcag

SEQ ID NO: 193604 - RNA, 83 nt, Homo sapiens
agaaacgaagaagaaacaacaagagaaagacccaggaagcagaagaagcgaggagaagaagagagcagagagacccagcacga

SEQ ID NO: 193605 - RNA, 66 nt, Homo sapiens
ggaaaaccccgcaccagacaaggcggcaccaggacgccgaaaagcgaccggacgcaggcacaggga

SEQ ID NO: 193606 - RNA, 78 nt, Homo sapiens
gggcgacgaaggcaaagggaaggggggaccgcggcgcaggacgccgacacgggccgcgccagagcccaaaaggcagag

SEQ ID NO: 193607 - RNA, 71 nt, Homo sapiens
aagcgaggggaccgagagagccagccaccggagcagacggccaggagacagggcacgagaccgagggaggc

SEQ ID NO: 193608 - RNA, 75 nt, Homo sapiens
cagaaagaacagccgcgacacaaaggaaagggaagggaggcaaaccggaacgcaagccgaagggcacagcgaaaa

SEQ ID NO: 193609 - RNA, 82 nt, Homo sapiens
ccgcggacgcgcacgagggacggggaaaggacgccacgacgggagcagcaagggaaccgcgggcccccacccccccgccggg

SEQ ID NO: 193610 - RNA, 77 nt, Homo sapiens
caaaacccaaggagcagacagccggcaacaagggaaacccaagaagaaacagacaaggaccagaagcgggagcggaa

SEQ ID NO: 193611 - RNA, 84 nt, Homo sapiens
ccggaaggcaagacaaacaaggcaaacaggggccacagcacaaaaccagaaccaagacggaccaagacacccaggagaaagaca

SEQ ID NO: 193612 - RNA, 74 nt, Homo sapiens
aaggacccggaagccacaaagcaaaacggcacgggagagcccccaaaacacaagaggacggagaagcgacgaaa

SEQ ID NO: 193613 - RNA, 62 nt, Homo sapiens
cgggaccccggaagccaaaaaggcagaccaagaagcaagagagaccacgacggaagaaagga

SEQ ID NO: 193614 - RNA, 55 nt, Homo sapiens
acacacaccccccaagcgagcccaaaggggccgcaaggccaggcgcgcagaggca

SEQ ID NO: 193615 - RNA, 77 nt, Homo sapiens
acacagaaacagaggccaggaaacggcaagcagaagaaagcaaaaggaaaaaggaccaggcacagagcgcaaagaca

SEQ ID NO: 193616 - RNA, 61 nt, Homo sapiens
gaccccggggccaccgagccaaaaggacggacaagaaaaccccaggacacagagcggggag

SEQ ID NO: 193617 - RNA, 71 nt, Homo sapiens
agggacgggccacgcgagcccgcccaaggccaaggcgcaagggacggcacaccacacacaggacaccggga

SEQ ID NO: 193618 - RNA, 86 nt, Homo sapiens
ggagagccccagcgaggaagcacaccaccaaggaacgggcgcagcgagaggggagcgagaacggaggaagcgaagagggaggccag

SEQ ID NO: 193619 - RNA, 78 nt, Homo sapiens
agcgacaacagccaagagggcgcccagagacaacgagagaacggggaaagcagcaggggccagaagacaaaaccgaac

SEQ ID NO: 193620 - RNA, 72 nt, Homo sapiens
ccagaaggacggcgcccacccgccggagcagcccgaggccccagccagcgaacgcacagacgggggccccag

SEQ ID NO: 193621 - RNA, 81 nt, Homo sapiens
ccgcgcggcgccaccacccggcccgcgccgccacccgcccccgggcaggcccgacggcaaacagaagggcgcaggaaaagg

SEQ ID NO: 193622 - RNA, 72 nt, Homo sapiens
ggacgggacgcaggcgcagcagccgcccaaaacacaaaccaaagaagaaacccgaaggaccacagagaacca

SEQ ID NO: 193623 - RNA, 70 nt, Homo sapiens
ccccagccagggaacaccacgaaaacccggaagagcgagaggccaaggaaaggcgcccacgcgccaggag

SEQ ID NO: 193624 - RNA, 41 nt, Homo sapiens
cggagaggcgccccccgcagcaggccccgggggcgccgagg

SEQ ID NO: 193625 - RNA, 80 nt, Homo sapiens
aggccagccggcagacggaaccaccccccgggaaggaacccaagccagacagaaaagaaacggaacaccgggcagagaga

SEQ ID NO: 193626 - RNA, 78 nt, Homo sapiens
gggggacaagaacggcggacccgggggaaaccgcaaaaggggacccaagggagagagggaacggcgaaagggcagccc

SEQ ID NO: 193627 - RNA, 76 nt, Homo sapiens
gcaccgcaaaccaacgcgggccgggcaacacgcagccgagcggggcgaaagacggaaaggcccagaggacgaccgc

SEQ ID NO: 193628 - RNA, 81 nt, Homo sapiens
cggcccccgggaccggggaggcacagagacaggcgccacacaagaagcgcagagacgcccagaaaggcagacgcacacagg

SEQ ID NO: 193629 - RNA, 69 nt, Homo sapiens
ggaagagagaggagaagaccagagaccaccacaaaaaggcgggagccaggagggcagcgcacacaccca

SEQ ID NO: 193630 - RNA, 81 nt, Homo sapiens
gaaaagacaagccacaaaacgcccagaagcaaaaggggcagagagaagagcacacagaaggccaggagcgacagagcgggg

SEQ ID NO: 193631 - RNA, 45 nt, Homo sapiens
ccccacacggacacccccaagccccgcccaggccgagagaggagc

SEQ ID NO: 193632 - RNA, 69 nt, Homo sapiens
agagagggagagccaaagaaggccaaaacagaagaggcaaagcccagccacagcagcagcccagcagca

SEQ ID NO: 193633 - RNA, 79 nt, Homo sapiens
gaggaacagggaagggcgcgagcggggacaaagcgccggggggggcacagagccccggaagacagcccccagcgaccag

SEQ ID NO: 193634 - RNA, 69 nt, Homo sapiens
cgggagcgagaccagagcgccacggccacggcccccccgggcgggaacggaaaagacaaggaagcagag

SEQ ID NO: 193635 - RNA, 62 nt, Homo sapiens
gggaagcaaaccggcggaaccccaaaggacccagaagaaccacgcgcaggccagagcagccc

SEQ ID NO: 193636 - RNA, 73 nt, Homo sapiens
ggggaggagaggacacgggagagccgaaccagaagagaaagcgcacacagacccgggcccaacggaccgaaaa

SEQ ID NO: 193637 - RNA, 83 nt, Homo sapiens
gggagacagcggccacaggagacaacggaggacagacaggcacgcgaaaccaagagaaagaagacgacacacagcaagagaag

SEQ ID NO: 193638 - RNA, 71 nt, Homo sapiens
agccgccaaacaggcggaggagcccagaggaacgcgcccaggccgcaagaaccaacacagagcacggaccc

SEQ ID NO: 193639 - RNA, 74 nt, Homo sapiens
cgaagcgggaggggcgaaacgaggaggagaaacgcggccgggccgacaggaagggaaggggcggagacgggcgg

SEQ ID NO: 193640 - RNA, 67 nt, Homo sapiens
ggaaaggaggaagaagacaccggggacagacaggggcagggcaaagacgggcagaggacagcaggaa

SEQ ID NO: 193641 - RNA, 74 nt, Homo sapiens
gcaacccacccaaaagcagcaaaaacacagaccaggcaagccaaccgagagagagacccggcgcgaggaaaaga

SEQ ID NO: 193642 - RNA, 65 nt, Homo sapiens
cggggacagcggggacggcacggcgcgcgcagggccccaaccaaaccaaaaggaccccggcagca

SEQ ID NO: 193643 - RNA, 37 nt, Homo sapiens
gaacccagcccgacggccgcacaaggaagccacaagg

SEQ ID NO: 193644 - RNA, 59 nt, Homo sapiens
cgggggcaagcggaagggagcccaagaggaccaggagaaagaagaaacaaagagggacc

SEQ ID NO: 193645 - RNA, 86 nt, Homo sapiens
cgagaagcgccgccgaacgacaggacgggggcggccggcccccaggccaccccagagaagaggacgagagacaagacaaccaaaag

SEQ ID NO: 193646 - RNA, 62 nt, Homo sapiens
cagcccaccagcaccgacgcgggaagaacgccagcggacaccagaggaccagaacccacgag

SEQ ID NO: 193647 - RNA, 71 nt, Homo sapiens
cggaaggccaggagcaagcagcagaaaccgcaagaaccggccaccacacccgggcagccccagacgcgagc

SEQ ID NO: 193648 - RNA, 68 nt, Homo sapiens
agcaacaacacaaccgggagaacgcaaacagaggaacagcccacccaggaagaacaccccagagcgcg

SEQ ID NO: 193649 - RNA, 74 nt, Homo sapiens
caagcggcgacggaccccaaggcaaaggcaggacaaagcggaggcgccagcacacggggcgcacaagaaaaaag

SEQ ID NO: 193650 - RNA, 67 nt, Homo sapiens
cgaccacccgccaccagacaccaggcagaagaagaacccagccggaaaacggaaaggaggccgcagg

SEQ ID NO: 193651 - RNA, 63 nt, Homo sapiens
agaaaccgcccgaaaacggagaagcagggcggagaacggaaaagcaccaggaagcagagagga

SEQ ID NO: 193652 - RNA, 52 nt, Homo sapiens
cgaggagagcggaggagggggggaacacccagaggaacgcgagaaagaagcg

SEQ ID NO: 193653 - RNA, 85 nt, Homo sapiens
gcaccagacgcacgcacagcgagcacggaggggaaggcacggacgcaacacggaacagacgcaggaaggcacaacaaccccccac

SEQ ID NO: 193654 - RNA, 69 nt, Homo sapiens
aaaagggccaaagaagggagagaggcaacgagcaccagagaggaccaccccaacaacacagcacccaaa

SEQ ID NO: 193655 - RNA, 78 nt, Homo sapiens
gccaacgacgaggaccgacgcagcacagcaacagccgaaaaaggaaaaacagacaccgaaagccccaaaaaacaacca

SEQ ID NO: 193656 - RNA, 76 nt, Homo sapiens
gaccacaaaacgaaaagaaccaaaacaagagaaaaccagaaggcaccgacaggaaaggaaaaggagaaccaggcac

SEQ ID NO: 193657 - RNA, 58 nt, Homo sapiens
caaaaacaccaagaagagaaccaaccccaacagggccagcccgccagaggcccaccca

SEQ ID NO: 193658 - RNA, 84 nt, Homo sapiens
agccccggccccggcgcaggcgcccgacgcccgggcagagggagccggaagagcgagcccggaacccaaggaccgcaaagaaaa

SEQ ID NO: 193659 - RNA, 36 nt, Homo sapiens
agcagaaccaggcacgggaacaaaaaccggaagcaa

SEQ ID NO: 193660 - RNA, 77 nt, Homo sapiens
caagcacgagccacagagagagaagaggcagggagcagcaagacaacacgcagagaaccagcggaggaaaagagagg

SEQ ID NO: 193661 - RNA, 74 nt, Homo sapiens
cagcagccgggccggcgaaaaaccggacagagggcagccaggacaccaaaacgacaccacccacaaaagaggca

SEQ ID NO: 193662 - RNA, 55 nt, Homo sapiens
aaacacaccgaaccagagagaagaaagggggcccaggacgaacgacaccgggccc

SEQ ID NO: 193663 - RNA, 82 nt, Homo sapiens
ccgcaccggaaggccacgccaaggagaggccccccacccgaaggagggggccgcaggaagaggaggaaacgaggagccagga

SEQ ID NO: 193664 - RNA, 64 nt, Homo sapiens
ccaacccagcacaaccaaaaggcccccccaccacaaaggagaaagacagcaaagaaaaggagaa

SEQ ID NO: 193665 - RNA, 76 nt, Homo sapiens
gccaagagaccgcagagcgggcagaaaaacccacaggccaggagggggccacaccgaacccagccgggaggccaag

SEQ ID NO: 193666 - RNA, 96 nt, Homo sapiens
caacacggcgcgaggcaaggccagcgggaccaaggcggagacagcgagacaaggcggacgaccccaacgaggaagccaaggagagagcccagggag

SEQ ID NO: 193667 - RNA, 71 nt, Homo sapiens
aggagcggggaaccaacgaggcacgaacagagaggaggagccgcagacgaaaccggccccccccccagaag

SEQ ID NO: 193668 - RNA, 80 nt, Homo sapiens
agaaaggaaacaaaccgaaaaggaaagggcggcagggcaggccacacgcgggacacagacgacaccaccgggcacgccac

SEQ ID NO: 193669 - RNA, 69 nt, Homo sapiens
gaagagaagcagaaaaccagaagcacaaggacagagcacccaccacaggagggaaacccagacgacaag

SEQ ID NO: 193670 - RNA, 79 nt, Homo sapiens
agccgcaccaagaccaggccggcgacagcaccaagaacccacgcaggccccacaccccccgagacgccagcaaccgaga

SEQ ID NO: 193671 - RNA, 55 nt, Homo sapiens
gggaaggggccggagggcagggggcagggcggcagagaggaaaacacgcaaaaga

SEQ ID NO: 193672 - RNA, 71 nt, Homo sapiens
gaggagacccccaccgaagccagcccgcaccgccgggccaccacaaggcacagccagggcagaccagacca

SEQ ID NO: 193673 - RNA, 77 nt, Homo sapiens
gcaccgcagcggcgcccgcaggggggcggagaacggaaaagcaccaggaagcagagaggaccgcagaagggaaggag

SEQ ID NO: 193674 - RNA, 82 nt, Homo sapiens
cggcaggccacgaccaccgcacacccgacacagcggagcgcccagaggcgagcccggggaggaagagccgggcccagcaacc

SEQ ID NO: 193675 - RNA, 79 nt, Homo sapiens
agaggaagccgaaaacacccgcaaccagacaggggcggcaagagcagggagcagaccggcacgagaaaccaaagaagac

SEQ ID NO: 193676 - RNA, 82 nt, Homo sapiens
gccgcgcagccgggacacgccaaagcgcagggccacgcaagcaaaagaacacgccaggaggacggcacagaaaagaacacac

SEQ ID NO: 193677 - RNA, 49 nt, Homo sapiens
agaccgcacagggcagaccgacagcgacaggaccgaacgaaagagaaca

SEQ ID NO: 193678 - RNA, 78 nt, Homo sapiens
cgcccaaaggagagcaagaccaaagagcccgccaaaggcccaaaaggaaagagaagggagggcgacgagagccgaagc

SEQ ID NO: 193679 - RNA, 87 nt, Homo sapiens
ccgccgcaccgggaccggagaggaagcggagggcagcgggggcagagacggggaacagggccacccacacggacgccaacgcggggg

SEQ ID NO: 193680 - RNA, 86 nt, Homo sapiens
gagcggccgacgcccgcccggcgcgcacacccgcggggcccggccgggggaagaaggaggccgaccaggccgacaaagcagacgcc

SEQ ID NO: 193681 - RNA, 78 nt, Homo sapiens
cgggcgggcccggcccgggggccgccccggcgagccgcgacggcgccgcccacggcgaggggacggaccccggcaccc

SEQ ID NO: 193682 - RNA, 74 nt, Homo sapiens
caccccccgcccggaggggagaggacagcccaaggcggaaaagcgaaggaagccacaagcacagcccacacaaa

SEQ ID NO: 193683 - RNA, 80 nt, Homo sapiens
gccacgcgggaaggcgcaagagcgccgccccgcgccagaagaaggcccaccgaggagaccagggaacggaggcacgggcc

SEQ ID NO: 193684 - RNA, 74 nt, Homo sapiens
cacaaggggggggggagagggagggccccaaggcggcagccccgaccgacggggcaacgcgaagaaacaccgga

SEQ ID NO: 193685 - RNA, 78 nt, Homo sapiens
ggacgaggcagacggggcggagaagggcagggcgagcgcccccgccagggccgaccagacccgaccgagcagcgcaca

SEQ ID NO: 193686 - RNA, 65 nt, Homo sapiens
gaagcccagagacagacgagaagacagaagacccccgccagaaacagacgcacgccgaaaaaaaa

SEQ ID NO: 193687 - RNA, 47 nt, Homo sapiens
aaggaacgaaggcgggggggccagaaacagagaggcagaccacagcg

SEQ ID NO: 193688 - RNA, 77 nt, Homo sapiens
acccgacccggggcaacgaagcacgcagaaagaaggggaaccagggcagagcgaaccaaaacaccaccggcaaagga

SEQ ID NO: 193689 - RNA, 91 nt, Homo sapiens
ggcgccgccaaaaccacggagccggcagcggcgcgggaggccggcggccgccaagcgagccaccaaagaaggaggcgccaccacggggccg

SEQ ID NO: 193690 - RNA, 71 nt, Homo sapiens
agagaagaagaccgcggaggaaaggacgcagagagacaggaaagacaaaggagaaacggggggcccgaaag

SEQ ID NO: 193691 - RNA, 64 nt, Homo sapiens
gcggaacagccacagcagcccccaaggagcgcaaggaggccccacagacaaaaccgccggcgga

SEQ ID NO: 193692 - RNA, 58 nt, Homo sapiens
ggaaaggagaggacccggagccggcggcccaaccgggggaggaaacaaaacccacgaa

SEQ ID NO: 193693 - RNA, 76 nt, Homo sapiens
gaaagggacccgacacgagagccccaagcgggccggggaagaaacaggggcagcgcggaccggagcgccgagaaca

SEQ ID NO: 193694 - RNA, 58 nt, Homo sapiens
aaagccaagaggaggacagcgcacacagcaagcacgagggcggagccgagcgaggccc

SEQ ID NO: 193695 - RNA, 76 nt, Homo sapiens
cagacacaaacaaaaaccacgggcagcagaaagccaccacaacccacgccacaaaacgcagcgaggcaagaaacaa

SEQ ID NO: 193696 - RNA, 60 nt, Homo sapiens
agaaggaagagaggaaaggagaaggagccagagaagaggaggaaagacaagccccaaaag

SEQ ID NO: 193697 - RNA, 81 nt, Homo sapiens
agccagcgggggcagcgcgcgggaggcgcgggccgggccggcgggcgcgcggcaacgggacacacagcaacgaagcagggg

SEQ ID NO: 193698 - RNA, 121 nt, Homo sapiens
cagcaggccaaaaggagccacaaggaagagagagcacaagccagcgcaagaaaggggacgagccgagcggagaccaacccccaggaggcccagagcagaggagggcccaggaccgggacca

SEQ ID NO: 193699 - RNA, 37 nt, Homo sapiens
cgccgccggaaaccgacagcgccggggaggcagaagg

SEQ ID NO: 193700 - RNA, 60 nt, Homo sapiens
gcagaggcagcggaccgagcgcggcgcgggagccagaagacaccaggggcggcacggccc

SEQ ID NO: 193701 - RNA, 79 nt, Homo sapiens
ggacaacccccacagaagggagacagggagaccaccaaaaagaaccaaggagcaggaacagcagcacacagagggaagc

SEQ ID NO: 193702 - RNA, 83 nt, Homo sapiens
gacaaggacgggccaccagaagaccgcggcacaccgagaccggcccccgaggagcgaaggaccggcagcacagggaaggaggc

SEQ ID NO: 193703 - RNA, 44 nt, Homo sapiens
gccgccggagaggagggcccgcccgcgggccgccgcacccaggc

SEQ ID NO: 193704 - RNA, 78 nt, Homo sapiens
gccagggccaccccggcgagggagaagggcggagaggaaaggaaacacccgaccaaagcggaaccgcgaggaaggaag

SEQ ID NO: 193705 - RNA, 78 nt, Homo sapiens
agaggaggcgcgagagcgggaagaggcggcagacagcggggaaccccaaagaggcccggaggaaacaggaacacccaa

SEQ ID NO: 193706 - RNA, 71 nt, Homo sapiens
ggacgccgcggccgagagagaaaaggaggaggacggcacaaaaaaaggcagagaagaggagcaacaagggg

SEQ ID NO: 193707 - RNA, 70 nt, Homo sapiens
cgcaggaaaccaaggcagggggaaagagcacgggcccagacgcagacaaacgagaagagagaagagggac

SEQ ID NO: 193708 - RNA, 71 nt, Homo sapiens
ggcgccccccgcaccgaacacaaggcaggagcgagaagagagagcagagacagccgcgcgaggaggaaaac

SEQ ID NO: 193709 - RNA, 76 nt, Homo sapiens
agccagacggcgccgccgcccgcggcgccccggggggcggcgcccacccgggaggacagggcccagccgagagaga

SEQ ID NO: 193710 - RNA, 79 nt, Homo sapiens
cccgccgagggcccggaccccgaaagacgaggaacaagaccaaggacaaagccgaaccagacccacagccacagaacag

SEQ ID NO: 193711 - RNA, 75 nt, Homo sapiens
gagagggccggcaggcccgggaaggaccgacccccaaaccggaccaagagcagagacccacagacccgacgcaaa

SEQ ID NO: 193712 - RNA, 70 nt, Homo sapiens
ccgccccccccccgcgggcaccgaggacccgcccgcccagacgggcaacacacggaacgagcaaccagcc

SEQ ID NO: 193713 - RNA, 75 nt, Homo sapiens
gagcgccaggagggaacccgaagcgggcgcgcgcacggcaggacggaggcccggaggccggggacgcccagaagg

SEQ ID NO: 193714 - RNA, 69 nt, Homo sapiens
cagagcgcacaaagggaaagggggcagggacgcccgcaccagacacgagaacgagcagccgccagcaga

SEQ ID NO: 193715 - RNA, 64 nt, Homo sapiens
cccaggggcagcgccccccaagacaggacagagcgggagccaccagcgccaaagggaagccagg

SEQ ID NO: 193716 - RNA, 74 nt, Homo sapiens
gagcacagggagacacccaaaacccccagaaacaagggagaagaaggggacaagccgccaccgacacaggaaga

SEQ ID NO: 193717 - RNA, 78 nt, Homo sapiens
aaagggaaggacaggcagagcaaacaaggccccgacggcagcccaccccgagcgcggaaccgcaggggggagggcccc

SEQ ID NO: 193718 - RNA, 74 nt, Homo sapiens
agaaagaagagaggagccccaaagaaaagaaacaagccgcgaaggagagcgggccccgggagacagacacagcg

SEQ ID NO: 193719 - RNA, 104 nt, Homo sapiens
gaacacccaagccagcggaggcggcagaaaaagaaggaaaacccaagcgagcccagccccgcggaaccaaggccccccaagagggagaaagaacaacagagcaa

SEQ ID NO: 193720 - RNA, 85 nt, Homo sapiens
ccacggcagacacacaacccgacccgacgaaccagggccgccagagcaaccgggccccccgggagcggccaaccccgagaaccag

SEQ ID NO: 193721 - RNA, 55 nt, Homo sapiens
cacaaagaggagcacgagcccagccacaggcaacgaaaacaacgagccacaagga

SEQ ID NO: 193722 - RNA, 76 nt, Homo sapiens
cagaaaaacgggggagagccacggaagccgacagacaaccaggagacaccaggggagaagcgacgggccggcggcc

SEQ ID NO: 193723 - RNA, 58 nt, Homo sapiens
gaggcgcagaaaccccggacaaggcacgccagacggaccaagaacgcccagcccgcgg

SEQ ID NO: 193724 - RNA, 67 nt, Homo sapiens
aaccgcagccgagcggggccggccacaggcagggaaaaaccaggacaaaaagcaaaggacggcgcaa

SEQ ID NO: 193725 - RNA, 75 nt, Homo sapiens
gggaagagccggccaaaaaacaacaaggaagccagcagaacggagaggagagaaacacggaacgaagaaaccaga

SEQ ID NO: 193726 - RNA, 69 nt, Homo sapiens
caccagaaagcaaacgagggcacacggcggggggaaacccgcccagggcgggagaccgccaagaaacac

SEQ ID NO: 193727 - RNA, 76 nt, Homo sapiens
agagcgaaccgaacccacgaccacccagaggggccaagagggcccaccaggcacgggccagaggagggggccagcg

SEQ ID NO: 193728 - RNA, 86 nt, Homo sapiens
agcgccgggccagaaggcaccaaggagagggacacgcgccgccccgggggaagggcggaggacgcagacagcgggcccgagagccg

SEQ ID NO: 193729 - RNA, 76 nt, Homo sapiens
acaggcggagagcaaggaccaacacagaagaagcgcagccaggaggcagccgaagaagcaggaaggccggagggga

SEQ ID NO: 193730 - RNA, 78 nt, Homo sapiens
ggccgggaagcggccaccgacacgcagcagcggccagaaaacaaaccggcgaggagaagaaaggaagcccccagcgaa

SEQ ID NO: 193731 - RNA, 78 nt, Homo sapiens
gccggcagggcccaagcccgggagcccgccggccgcagcagacaccgaaagaccccgccgggcacccagggcccgagg

SEQ ID NO: 193732 - RNA, 60 nt, Homo sapiens
gggaaaaaagagaggagcgaacgagacagaacaggaaaaaggagacagaagagcagcaca

SEQ ID NO: 193733 - RNA, 77 nt, Homo sapiens
cagcgccaggcccagacgccaacgcaggagcacccagccacaggggcagagagaacccaacacagggagaagaagga

SEQ ID NO: 193734 - RNA, 70 nt, Homo sapiens
gacggcaaagcacccagccgcagcgccagcagcggacaggcacagacaaccagaaggagagagcacgacc

SEQ ID NO: 193735 - RNA, 59 nt, Homo sapiens
accgcagaaggccggagacaccagcaggggcaaccaaaagccagaccaaaaggaaggac

SEQ ID NO: 193736 - RNA, 85 nt, Homo sapiens
aaagggaaagagacggagaaaagaagaacacgcccaaaacgaagccgcacccgaaggaccaccccagagcgaggcagccggggga

SEQ ID NO: 193737 - RNA, 81 nt, Homo sapiens
ggaccccaccgcccggaagcggcagggcaccgccacggaccaccggacgcagagaaagccaacccagcgaaggaacaagca

SEQ ID NO: 193738 - RNA, 82 nt, Homo sapiens
acgggcggcccagcgcgcccgcccagcagacgcgagggacgcacagccaggccaaaagaggagcccagcccgcaccaaacca

SEQ ID NO: 193739 - RNA, 72 nt, Homo sapiens
cgaacgcccaccccccgaacccagccgcaccgccagagacgcgcacgaaacgacgaagaggcccgaggacag

SEQ ID NO: 193740 - RNA, 80 nt, Homo sapiens
cacaaggagacaaaaacgggagcaccacagaggggccacgaaagaacgaacagcaaacacagcgacaaacagcgagcccc

SEQ ID NO: 193741 - RNA, 42 nt, Homo sapiens
aaaagacaaggcccccaaggacgaacgagaaaaggggagcgg

SEQ ID NO: 193742 - RNA, 94 nt, Homo sapiens
ggaacgccaccaagccagaagaccacaacagacaagcgaccacagaagcaaagagaggagagagaaacaccccggagggcaagaagcagcggag

SEQ ID NO: 193743 - RNA, 69 nt, Homo sapiens
aaagccaagaggcggccaaggggacgagcaaaggaagcgcgaacagcagcgcagagaaagggacaaagc

SEQ ID NO: 193744 - RNA, 51 nt, Homo sapiens
cagacgcagggcgcccccgagaacagcgagcccccacggaccggcgggaaa

SEQ ID NO: 193745 - RNA, 54 nt, Homo sapiens
aaccgcgggccgcagccgccggcaagccgcgaaggaagacaccgaaaacgagaa

SEQ ID NO: 193746 - RNA, 74 nt, Homo sapiens
gggagcggggccccacacccccccgggggggggcacccgcacagcaccaagcaccgggacacagaagaaaaaaa

SEQ ID NO: 193747 - RNA, 75 nt, Homo sapiens
agagcgccggcgcggcgcggccgggccgcgccccccggcgggccggacgggccacccccaaccaggaccaaagac

SEQ ID NO: 193748 - RNA, 75 nt, Homo sapiens
ccgggcaaggacccgcccagcccccaagagcgggaacaggcccgcggcggaagccggcaggacacgaaagcccaa

SEQ ID NO: 193749 - RNA, 55 nt, Homo sapiens
cagacacacaacccgacccgacgagagaagccagaggcaacagggagagcgggcg

SEQ ID NO: 193750 - RNA, 79 nt, Homo sapiens
ccccagagccagaggagcagggacccagccacgccgggcaaggagggagcgcagaaccgaagggcccacaccccacggg

SEQ ID NO: 193751 - RNA, 72 nt, Homo sapiens
gcccgccagcccgagagcgggacaacaggcgccggcgaaagcaacgaagggacgccagaacaagagaaggag

SEQ ID NO: 193752 - RNA, 74 nt, Homo sapiens
cagacacgagccccgaaacaggaagaagagacacgaagagcacggagcggaagaggagacgacaaagaccaaga

SEQ ID NO: 193753 - RNA, 40 nt, Homo sapiens
gccgagcaggcgagcgaacgacgaacgccaggagccagaa

SEQ ID NO: 193754 - RNA, 54 nt, Homo sapiens
gcccgaggccccgaccagagaaaccgcaagaagcacagaagcagggaggagggg

SEQ ID NO: 193755 - RNA, 75 nt, Homo sapiens
aggaccagggcggaacgcacccagcacgacagggcgaaaccaaaaaaccgggacgccgaaacagaccagccggga

SEQ ID NO: 193756 - RNA, 53 nt, Homo sapiens
gaccaggaaacccgaacccccggaaggccacaggaagaaaaacgggccacaga

SEQ ID NO: 193757 - RNA, 61 nt, Homo sapiens
gaggagcagcagaggggcgagcaggagcgaccgcgccaaacagaggagaacagaagcggag

SEQ ID NO: 193758 - RNA, 71 nt, Homo sapiens
caggcagaccagcaacccccacggggggaagcagaccaagaagacagaaggggcccgccaccgcaaagcag

SEQ ID NO: 193759 - RNA, 52 nt, Homo sapiens
aggaacccaaacagaaaagcagcagcaacgggaacgaagagagaaagcaaac

SEQ ID NO: 193760 - RNA, 51 nt, Homo sapiens
gcgagcgagagaaagagaagcaacggggcaacagaggggcacaaacgggaa

SEQ ID NO: 193761 - RNA, 76 nt, Homo sapiens
aaaccggcggcgccagccaccggagcaaccacaacccgcagcccacaccgaagccgcccagcgcagcaggagaacc

SEQ ID NO: 193762 - RNA, 65 nt, Homo sapiens
gccacgcgcgacgccgcgcgaggggcgggaaaggacagcaggaaaccagagcacagagcagcacg

SEQ ID NO: 193763 - RNA, 84 nt, Homo sapiens
gcgcggagggagccgcgggaggaccgcaggccgggacccccgggagaggggcggaacacagcccacagcaaaggagccgcccca

SEQ ID NO: 193764 - RNA, 73 nt, Homo sapiens
ccacaagagcgggaacagcggccgcgcggggcgcaggcgccccgcggagcgccccaggacggcagccccagca

SEQ ID NO: 193765 - RNA, 80 nt, Homo sapiens
ggacgacggcaggaacggaccgcacgacgggacacgccagcaagacaagaccaaacaagggaagaggcggggcgagaggg

SEQ ID NO: 193766 - RNA, 72 nt, Homo sapiens
ggcccagcagcacgacccgaacccaggaggaaagaccagcggacccaaaaacaaggaacacccggcagcgag

SEQ ID NO: 193767 - RNA, 73 nt, Homo sapiens
ccagggcaagaaacaggaaaagccggcagagaacggccccgaagagaggaacgccccaaaggaggagcaaaaa

SEQ ID NO: 193768 - RNA, 76 nt, Homo sapiens
gacggaagaccacacccgaagggagccccgggcgaaggcagcccgcacgcagaccgccagcgccgcccacaccgcg

SEQ ID NO: 193769 - RNA, 41 nt, Homo sapiens
cagagggggacagcgaaacggaggcgaggaggagaaagaga

SEQ ID NO: 193770 - RNA, 74 nt, Homo sapiens
cacgaaccacagcgaaacaggacaaaaccgggaagaaaagaaaggagcaaagcaacagaagacaaggcgcacac

SEQ ID NO: 193771 - RNA, 81 nt, Homo sapiens
gggccccgaggccccgaccgcggcggagcccgacccacccaagggaaagggagcagcaccggccacacccacagcacgacc

SEQ ID NO: 193772 - RNA, 63 nt, Homo sapiens
ggcccgggaacggcccaggccccgcccgcaggcccgggcaggacaaaccggcgaccacacacg

SEQ ID NO: 193773 - RNA, 86 nt, Homo sapiens
cggaaccgaacggaagagaaaggcgcgaggagggagacggggagacggccaagacaaggggcgcagagcggggggacaggcgcaag

SEQ ID NO: 193774 - RNA, 107 nt, Homo sapiens
agcagcgacgcaggcgaaaaggaacaggggcgagaagcaggagaaggcagagagggcagcgcccgagggcggagcgcgcgcccacggcgcggagcccaacgcgccga

SEQ ID NO: 193775 - RNA, 81 nt, Homo sapiens
cacccccggcgggcccgaggcggcgagagaggcaggcggagccgaccgggccagaacgaaaacaaacggaagagagggcag

SEQ ID NO: 193776 - RNA, 31 nt, Homo sapiens
ggggggccgcacagcggagcggaggcagaca

SEQ ID NO: 193777 - RNA, 82 nt, Homo sapiens
agacaggcgggcccgcccaacggaaccagacgggagggcaccaggaccgcccccaggacgccggacagacccgggcacaggg

SEQ ID NO: 193778 - RNA, 49 nt, Homo sapiens
acaggaacaccaaggaagcaaaagccccagaacgaagacgagcgacagg

SEQ ID NO: 193779 - RNA, 43 nt, Homo sapiens
agaaaagggcaaggcccgagaaggagacgcaggcagaaggaaa

SEQ ID NO: 193780 - RNA, 72 nt, Homo sapiens
accagcaggggcaaccaccccaggcccccaacagacagccagaaggagagccgaacaggaaccgagaccgga

SEQ ID NO: 193781 - RNA, 63 nt, Homo sapiens
gacggcgacgcgggaggccagccaggagccaagaggccaggaacggcaacagcaagcgcacca

SEQ ID NO: 193782 - RNA, 79 nt, Homo sapiens
cgaaggcagcgcccgggagaagaagccagccaaaggagaggcggcgaggaggagaacaagagagaacaacaggggggag

SEQ ID NO: 193783 - RNA, 55 nt, Homo sapiens
gccaagacaacgaaacaggacagaggaccaaggaggcgagacagacacaacaaca

SEQ ID NO: 193784 - RNA, 74 nt, Homo sapiens
gggaaacggaacccaaaagcgggcccccagagaagacacagggaaagcgccacagagccgggacagcagaaaga

SEQ ID NO: 193785 - RNA, 68 nt, Homo sapiens
agagcaaaaaaggggcacagcacacaagaaaagaggaacaaccaaacacacaaaggaaaaaggaacga

SEQ ID NO: 193786 - RNA, 58 nt, Homo sapiens
cgcacaccaagggcgcccccccggaacggcaccacaagggagcagaaacgggagaaag

SEQ ID NO: 193787 - RNA, 66 nt, Homo sapiens
ggcacgcagaccaggccacagccagaagccagacgccgggaaggccaaacccagacacaggaaaac

SEQ ID NO: 193788 - RNA, 75 nt, Homo sapiens
gagacggaggcgaggcaaacggggggcgcggagggaccagcgagcgggaggcaggggaagcacaaaagcgcaccc

SEQ ID NO: 193789 - RNA, 74 nt, Homo sapiens
agcgaaaagggaaaaaggcgaacccggggaagaaaacgaggagaaaggggaaagcgaacagaaaaccggagaag

SEQ ID NO: 193790 - RNA, 60 nt, Homo sapiens
caacgacgcggacaggcagagcggaaccggcaggaacgaagcaggaagggaacgagcggc

SEQ ID NO: 193791 - RNA, 95 nt, Homo sapiens
cgcacacgggccgcggcacccagcaggccaacccgggcccaacagcaacaggccaacgaggagccagaggaaagcgggggcacacagaaaccagc

SEQ ID NO: 193792 - RNA, 68 nt, Homo sapiens
cacaacaggcaaccccaagacgagacgcggacagggggccagagcaaggaaagcggaagaaggcgaca

SEQ ID NO: 193793 - RNA, 84 nt, Homo sapiens
gcagaaaaaaaaggaagcagcaggacacgcccggaagcccgaccacagagacgcgccagaggagagcaggccacaggaaaccga

SEQ ID NO: 193794 - RNA, 72 nt, Homo sapiens
gacaaaagggccaaagaagggagagagagaaaccaggcggggaacaagccagcagcccaaggagaagcccca

SEQ ID NO: 193795 - RNA, 105 nt, Homo sapiens
cgggaccagggaggacgcggcggcacccacgcgggggacggagaggaaccagaaaaagcggggaaggggggcaaaaaaaagaagcaagcgaagcaccgagcaccc

SEQ ID NO: 193796 - RNA, 77 nt, Homo sapiens
aaaaaaagagaaaccggggaaccacggacaacccagaggacaacgaaggcggaccaaaggcgaccaggagagaaaac

SEQ ID NO: 193797 - RNA, 74 nt, Homo sapiens
agcaaagagaggagagagaaacaccccggagggcaagaagcagcggagaacagggcgagcgccgcccaaggacc

SEQ ID NO: 193798 - RNA, 78 nt, Homo sapiens
gcccgacccgggagaccgcaggagcgcgagacaggggcgacaagagacacgagaaccccagaacagagaacagaggaa

SEQ ID NO: 193799 - RNA, 75 nt, Homo sapiens
cgccgagcagccagcccaaggggaggaaggcaggaagaagccaccaaccacgaaggaagaagggcccggaaggag

SEQ ID NO: 193800 - RNA, 79 nt, Homo sapiens
ggggggcaaacccgagagaacgggggaagggcaggcgcccagccaaagagaacagagagcggaaaccaacgcccaagaa

SEQ ID NO: 193801 - RNA, 56 nt, Homo sapiens
ccggaaggggacgccaggaccaccaggacgcaaggaaaaagaagagcacaagacca

SEQ ID NO: 193802 - RNA, 88 nt, Homo sapiens
cgagcggcggggagcggcgaagccgcgggcgaggccaagacaaggggcgcagagcggggggacaggcgcaagaccggagaagcaggag

SEQ ID NO: 193803 - RNA, 108 nt, Homo sapiens
ccaccgccagcaacgggaccccggccgccggagccaccgggcgcccagacaccgaacgcgaacacgcagcaaagaaaaaaagcccaggaaagaaccaggaaacacaga

SEQ ID NO: 193804 - RNA, 81 nt, Homo sapiens
ggcgcgcggagcacggggcgaggaccgacacgcccgccgcagagaccaggccaccagggcgcggccaccgcggagcggaga

SEQ ID NO: 193805 - RNA, 78 nt, Homo sapiens
ccggcgagagccccggcacccccggaccgaccagggcagacccaggcaaacagagcacgggaccgggaaagcagaaga

SEQ ID NO: 193806 - RNA, 70 nt, Homo sapiens
gcagaagaacgaagaacacacaacgggaggagaacaccggaaaaaccggacaaccagccacccgcacaaa

SEQ ID NO: 193807 - RNA, 74 nt, Homo sapiens
cagacaagccccagggaagccacagcaccccagcacccagagggaagaggaaagcacaaagacacccaacccca

SEQ ID NO: 193808 - RNA, 76 nt, Homo sapiens
gcgccccccacacaaggacaggaccgcaagcccgcagggacgaggccccaagagacagaaggaagcagaagggacc

SEQ ID NO: 193809 - RNA, 71 nt, Homo sapiens
ccgacggggcgccaaaacaccgaccccgcgggggagccgccgcgcccaggcggaggcggggcgcgaccggc

SEQ ID NO: 193810 - RNA, 35 nt, Homo sapiens
gaaaacagaggggccgaccaaaaagagccaagcga

SEQ ID NO: 193811 - RNA, 72 nt, Homo sapiens
cacagagggaagaccccaagggccagcgcaacgaaaaggaaaagagagaaaaggacaaaaagggggagcgag

SEQ ID NO: 193812 - RNA, 78 nt, Homo sapiens
caacaccaacaggacagccagagaccgaacagagagaacaagagacgcagccgcacagaggacagggacaagcgcaca

SEQ ID NO: 193813 - RNA, 72 nt, Homo sapiens
gaaagacagcccgaacggagaaagagacagaagccggggaagaaaagcaaagagaaacagaaggccaaacaa

SEQ ID NO: 193814 - RNA, 59 nt, Homo sapiens
acgcgggaggcgggcgcgaggcgggaccaaagcggaggaaggagggaagagccgcagga

SEQ ID NO: 193815 - RNA, 75 nt, Homo sapiens
ccaacaaaaccggcggacgacccggacacgcagagccaacaccggcagagcgaaggaaagaccacagcaagacca

SEQ ID NO: 193816 - RNA, 82 nt, Homo sapiens
cacagggaccaaaaccgcagaaccaaggaaggcaccgcagagccaagaaggcagaggagagagaccaggaagggggaggagg

SEQ ID NO: 193817 - RNA, 70 nt, Homo sapiens
cgacaaggcggaaacaacacaggaaggacccgagaaacaaagaacacgcacagggcgcccgaggcaagac

SEQ ID NO: 193818 - RNA, 70 nt, Homo sapiens
cggcagagacgggaggaagcgaagaccaacgcagcagcgaggagaggggcccacagaagcaaaggacacg

SEQ ID NO: 193819 - RNA, 70 nt, Homo sapiens
caggacccgccaccgcggcgacaaaagagggcccgagaggaaaggaccaaggggcgaggcggccacgagg

SEQ ID NO: 193820 - RNA, 75 nt, Homo sapiens
ccgcgcgccgcgagagccaagaaagaacaggcgacgcaacgaaaggaagaaggagaaagacaaagccccgagaaa

SEQ ID NO: 193821 - RNA, 78 nt, Homo sapiens
ccgccggggaggaggaggaggaggaagaggaggagaaggaaggacaacccgggggacgccgccacgaagaagagacgc

SEQ ID NO: 193822 - RNA, 73 nt, Homo sapiens
gagcccggagcggggcgacgaggcgagcgggggccgggcagagcccaaaaggcagagcgaggagagaagaagg

SEQ ID NO: 193823 - RNA, 84 nt, Homo sapiens
caggcgaccagcaccagcccgaccaggccccgagccccggccccaaagacccaaaacagagacaccccccagcccccgcgcccc

SEQ ID NO: 193824 - RNA, 81 nt, Homo sapiens
gcgacagcaccaagaacccacgcaggagacgacagaagagcaggcgaggacgccgggcacagccaaggaacagcgacaaac

SEQ ID NO: 193825 - RNA, 79 nt, Homo sapiens
aggaagccgccagacaaaagggacgggaccggagagccccagacgccagcgccaagagggaagcgggaaccgaccaagg

SEQ ID NO: 193826 - RNA, 50 nt, Homo sapiens
gcggccaaaaaaaaaaaaggaagcacaccaagccacaagcgaaaagcaga

SEQ ID NO: 193827 - RNA, 75 nt, Homo sapiens
ccagcagggcgggcaggcccacacaggaccggagcccgacagcaggggaggccaggaagccaccacagccgagcc

SEQ ID NO: 193828 - RNA, 80 nt, Homo sapiens
cggggacggggccgcagggagggggcacccgaggaggaagagggcagggcccacggaaagaagggaaacccggggagaaa

SEQ ID NO: 193829 - RNA, 72 nt, Homo sapiens
ggagagggagcccgcagacgccgccggagcgacaaggcccacaaccggaggggcaggagaagccaagagggg

SEQ ID NO: 193830 - RNA, 67 nt, Homo sapiens
ggacagcccacgggaacaagaggggacagaaaggcagcaagcagaggggaaaccacaaacaaaacag

SEQ ID NO: 193831 - RNA, 79 nt, Homo sapiens
gagacgaaaggcgagaggacaagaaagagcaaccaaaacaggacaagaaacaccaaacaagcaacagccaagaaaaaac

SEQ ID NO: 193832 - RNA, 82 nt, Homo sapiens
gacaggcgccaacaagaacaccggagggcggcggaggacgcaaaacaccgagaggaggcaacgcacgggccacaggcagccg

SEQ ID NO: 193833 - RNA, 54 nt, Homo sapiens
ccagccgcgcccgggagagcaagcaaaccagccggcgggcgccacaacggacga

SEQ ID NO: 193834 - RNA, 70 nt, Homo sapiens
acgcaccagagccgagaaacgcgaaaaggaagcggaaggggacaccgaaaagcaaagggagaggacacac

SEQ ID NO: 193835 - RNA, 59 nt, Homo sapiens
gcgggaaacgggcgaagcgacgagccgcgaggaggaaaaccgccgccggggccagcaag

SEQ ID NO: 193836 - RNA, 74 nt, Homo sapiens
cacgcgaccccaaggagcccggagccggcggggccaggagcaacgacaaggacagaacaccaggccccgaaggc

SEQ ID NO: 193837 - RNA, 61 nt, Homo sapiens
caaacgaccaacagggaaacagggacccagcagggcgggaaacagggacccgagggagaaa

SEQ ID NO: 193838 - RNA, 70 nt, Homo sapiens
gccgccgcccgcgcccgcggccgggggccagacagagacggcgaaaaggagcacgcagaaagccaaacac

SEQ ID NO: 193839 - RNA, 68 nt, Homo sapiens
gggaaaaaccgaccccggaaaacaacaccagaagaaagccaacccgcaggggccacagagaaagggac

SEQ ID NO: 193840 - RNA, 84 nt, Homo sapiens
ccccgccccgccggcgcagcgcgagcggggccgggcgaagaagcagccacaaagccagccagggccacgggaaacaggcacaga

SEQ ID NO: 193841 - RNA, 79 nt, Homo sapiens
gccgccacgcgcaaccgccagcggaaggagagacaggaagggcacagaaacggcgcgagggcagggaagccagaaaccg

SEQ ID NO: 193842 - RNA, 84 nt, Homo sapiens
gccagagggcagccacaaggaggggcgagacgcggaaaggagcgcgggacgagacgcccagagcccagaacaccagagccgccg

SEQ ID NO: 193843 - RNA, 68 nt, Homo sapiens
gacgaaggaccagcaaggaagcacaaaggcaacgggaccaaaaaggccgggacagcagaaaacagcca

SEQ ID NO: 193844 - RNA, 86 nt, Homo sapiens
agcccagaccacccgggcgaagcgggcgagcggggggacgccggcggagacgcgggcgaggaccagcccaggagaggaaccgagaa

SEQ ID NO: 193845 - RNA, 68 nt, Homo sapiens
gacgcgccggcccacgcgcggccaaggccgccaggcacagagaaggcaaacgggagggcgaggacacc

SEQ ID NO: 193846 - RNA, 54 nt, Homo sapiens
gaaaggcggcaggaaagcagaacgggaccagaccccacaagaaaacacacaacc

SEQ ID NO: 193847 - RNA, 73 nt, Homo sapiens
gaagaacaggcaaggaagaaccagagaaccccaaagacaaaagagcgaaaacaggcaagacggagcgggacgg

SEQ ID NO: 193848 - RNA, 92 nt, Homo sapiens
aagggcgcgccaccgcaaaggcccgcgcaccgccagggaagaaacgggagaagaagcaggcacagaccccaagaagacccagcggacgggga

SEQ ID NO: 193849 - RNA, 70 nt, Homo sapiens
accagcacgccgggccggcagcagcccagccaaagccggaaaaggacccagagccacgggggcagcgccg

SEQ ID NO: 193850 - RNA, 78 nt, Homo sapiens
ccccggcacccgggagcaccaaagcccgaagcccccggccacgcagggcggcacaaacaaggaaacagcaagagcacg

SEQ ID NO: 193851 - RNA, 63 nt, Homo sapiens
ggacagcaggaccaagccagcagaaacagccgagcccaccgcagacggaggaagacggccagg

SEQ ID NO: 193852 - RNA, 75 nt, Homo sapiens
ggcccaggagaacaagcgcgcaaaacaacaccaaaagggaaggacaaaccggcgaccacacacggggacgacggg

SEQ ID NO: 193853 - RNA, 80 nt, Homo sapiens
gggcgggaccagaagcggacccggggaagaggaggcggcggaggcggagaggacaggggccgggggggaccggcccaggg

SEQ ID NO: 193854 - RNA, 118 nt, Homo sapiens
aaaacagaaacagcccgggagccaagaagaaacaccacacaacaagacaaagcaccaagagaaaagaaggagacccaacaccccggccagacgggccaccaggccggcgccccacgcc

SEQ ID NO: 193855 - RNA, 68 nt, Homo sapiens
cgagaagcgggagcccggaaaagcgcgacacagcgaaacaaggcaaagaccaccacaaagagaagaac

SEQ ID NO: 193856 - RNA, 74 nt, Homo sapiens
ccccaccagaaccagccacgcggagcaaacagcaagagggaaacagaaaaaggacaaggagcaagaccacacag

SEQ ID NO: 193857 - RNA, 87 nt, Homo sapiens
ggggggggccaagagacagggcacaccaaacccacgcccgggaccgggagcccgggaccgggagccggggggccaccccgaccggag

SEQ ID NO: 193858 - RNA, 59 nt, Homo sapiens
ccccccgcgccgaccgcgccaggacagacgcacagacaccgcagcaaccagcaagagga

SEQ ID NO: 193859 - RNA, 59 nt, Homo sapiens
gaagacccgacggaccccagcgccgggcagcgaacacgaagcagaggagccagacccaa

SEQ ID NO: 193860 - RNA, 81 nt, Homo sapiens
cagagagagagcgcgagagaggagagggcagacggacaagagcgcggaacaggacgccccgagggaaccagaagaggccaa

SEQ ID NO: 193861 - RNA, 72 nt, Homo sapiens
agaagcgcggcagggagcgcgggggcccgcgcagcagcgaccacggaggcagcacggcaggagacgaggaga

SEQ ID NO: 193862 - RNA, 72 nt, Homo sapiens
ggccaccaacagggaaagccaagggaaaaaagcaaagcaaaagggggccagacggaagaacagccgggaagc

SEQ ID NO: 193863 - RNA, 75 nt, Homo sapiens
gcagagcgcgggcgcaggcacagcccgcaggacagcacacccaagagcccagaaggagggacaaggcccagggag

SEQ ID NO: 193864 - RNA, 56 nt, Homo sapiens
gagccaaaccccacccacagcggagacccagcaccagggcagcgcagccccaggac

SEQ ID NO: 193865 - RNA, 67 nt, Homo sapiens
aagaagggcaacgaacaagggcaagacacccagacagacaggaaaaaggaagacgcagccaaagaac

SEQ ID NO: 193866 - RNA, 79 nt, Homo sapiens
ccggaagcacagggcagaacgacaaacgccaagaaaaaggacaaggacaaaggacaaaagagcacaaacagcccgagaa

SEQ ID NO: 193867 - RNA, 72 nt, Homo sapiens
gagacccccgggcaggcgaaagaggcggcggcgcgccgcggccggccacgcggagccaaaaaccgaacaccc

SEQ ID NO: 193868 - RNA, 78 nt, Homo sapiens
acgccagcgcccagcagcaggcacaagacacgggagaggaagagcaagcggggggcaaacacaaggaaaccggaaaac

SEQ ID NO: 193869 - RNA, 77 nt, Homo sapiens
caggagaccacaccagaccaggagagccgaggaccaagggggagaggcaccagcaacagaccaaccgcagcaagcac

SEQ ID NO: 193870 - RNA, 77 nt, Homo sapiens
gaacccacgcgcccgggagcacgagagccaacggcacgggaccagaggacaagacaaagggagcaagacaagccaaa

SEQ ID NO: 193871 - RNA, 77 nt, Homo sapiens
cccagacagccggcgcggcgggcgggcggcggcggcgcgggccgcgccggaccgaaggcgcgaccacgacgagaagc

SEQ ID NO: 193872 - RNA, 62 nt, Homo sapiens
cgcaggggacagaacggcgcaacacgagcccgcacgacgcccaaggaggagagaacgggccc

SEQ ID NO: 193873 - RNA, 79 nt, Homo sapiens
gacagccacaaagacccccagacacacacacccaacccaaaccaagccccgaggacgaagaggagccgaggggagaagg

SEQ ID NO: 193874 - RNA, 83 nt, Homo sapiens
gacgagaaaagaccgcaaccgccagcaccgggaagagaaagaaaagccgaaggcaccagacaggacagacaaagggagaggcg

SEQ ID NO: 193875 - RNA, 74 nt, Homo sapiens
cagagagcgaaccagacggacccacaaagagcccagccacaacagcccgagcaacacgagcgcaccccaagaca

SEQ ID NO: 193876 - RNA, 55 nt, Homo sapiens
gaaccaccacacgaagcgaacacgaagcaaaggggaacaaaagagaagaaggaaa

SEQ ID NO: 193877 - RNA, 57 nt, Homo sapiens
cgcaccagcagccaccaggagcccgagagagaagggacaggaaaagccagagagcgg

SEQ ID NO: 193878 - RNA, 83 nt, Homo sapiens
caccgcaccgaccaggaccacagcggcaaggcccaagcccagccaagaccacacgaaggggcagaagagcacaagacggaaga

SEQ ID NO: 193879 - RNA, 69 nt, Homo sapiens
ccgcgggccaaaaggagggcaggagaaaggagaaaaagaggcagggagaagaaacggcagagacaaaga

SEQ ID NO: 193880 - RNA, 58 nt, Homo sapiens
gggccagagaccaaggcgcgcccggcgggccggaccaagggaaggcgcggcgggcagc

SEQ ID NO: 193881 - RNA, 62 nt, Homo sapiens
ggagggcgagaacgaccccgagacggccgagagcagccagaagacaaagaggggaagacaca

SEQ ID NO: 193882 - RNA, 75 nt, Homo sapiens
ggaagcaccagggagaagacgcgcgcggaaagagaaaacgagccgaaggcaagagcaacgaaccaaagcaaagga

SEQ ID NO: 193883 - RNA, 74 nt, Homo sapiens
aggacggcagccagaacagaggcccccccagcgcccggaaacggacaaagaaaagggagaaaaaaggaaggaag

SEQ ID NO: 193884 - RNA, 67 nt, Homo sapiens
cagcacaggcaaggacaacgaccagggacacacaaaaggaaaccaggaaaaagccagcggggacaag

SEQ ID NO: 193885 - RNA, 78 nt, Homo sapiens
cgaaggagcccaggaagagcaaagccgagcgcaggaagccggaagacgggaaaggaaacgagaacgggcagcgcagac

SEQ ID NO: 193886 - RNA, 72 nt, Homo sapiens
agaaacagaagagacgggcagacacagacgggacgacgccacaagaaaagccaggcggcagcaccccgagcc

SEQ ID NO: 193887 - RNA, 98 nt, Homo sapiens
cgccgccgccccgccagcgccagacggacgaggcggcggagaacaagcggcagaaaaagagaagcgcagcgaaaagaagagcaccgaggaacggcagc

SEQ ID NO: 193888 - RNA, 86 nt, Homo sapiens
gacacccaacccccagccagcaggacccgcaaacaccacgacagcgaggcagccagcagcagccaccagagcccaagagcacagcc

SEQ ID NO: 193889 - RNA, 72 nt, Homo sapiens
cgccgagaggccccccccccaacccagaacggacaacggcggccaaaaggcaacaggcgacaggaggaaaca

SEQ ID NO: 193890 - RNA, 88 nt, Homo sapiens
aaccgacgggcaccaacggcagcaacagcacagcagcggggagacaacggcacagacacaggaccagcccagcagaagacaggccccg

SEQ ID NO: 193891 - RNA, 85 nt, Homo sapiens
agagggcgggcaggccggagagagggaaagcgccgccgccaaccgacagcgcgcccagccagggccccccacgcgagaacccggg

SEQ ID NO: 193892 - RNA, 76 nt, Homo sapiens
cccccagagcgggacacagacagaccaggacacaggcaccagagcaacccaggcacccaagaccgaagaacaaggg

SEQ ID NO: 193893 - RNA, 75 nt, Homo sapiens
gccgagaggacgccagcggcgcgcagacacacgggggaacaccggacaaccgaagaagcgcggcgacgacagaac

SEQ ID NO: 193894 - RNA, 89 nt, Homo sapiens
caaaacaaaagaacagaaagcgagcagagcccgcgaacaagacaaggccaggggcaagcaccacccgagcaagagagcccagaggaaga

SEQ ID NO: 193895 - RNA, 74 nt, Homo sapiens
cccgcccagccccggagagcgggaacagggccggggccccgggagggccaccaccggacccgccagaccacaga

SEQ ID NO: 193896 - RNA, 84 nt, Homo sapiens
cagaagaccggcggaaggcgcgccaaggagaccaggaagcgagcaccagcagacgaggcgaggaaccaaaggccaccccgccga

SEQ ID NO: 193897 - RNA, 83 nt, Homo sapiens
cggagagggggcgcgagcggggggccgagaacacggggcgggccagaacacacggacgcgggggggcccccccgcaacgggga

SEQ ID NO: 193898 - RNA, 88 nt, Homo sapiens
aggggagcgaaggcgaggggcagcggcaggagagccggccgcgacaggacgacgaggagcgccaggaaagaggcagagacgaagcaga

SEQ ID NO: 193899 - RNA, 85 nt, Homo sapiens
agcggaggcgggcggacccgagccagcgaccgaagcagaagcagcccccccaccccccggggaacgaagagccggccgcgaccga

SEQ ID NO: 193900 - RNA, 73 nt, Homo sapiens
aaaaccaggggggacaagaacggcggacccgggggaaaccgcaaaagccagaacggaagaccaaccagaagac

SEQ ID NO: 193901 - RNA, 76 nt, Homo sapiens
gggccagaaccgcgccggcaacgccaccggccacgcacgggggaccagccgcacaccccgagaccgggcggcggaa

SEQ ID NO: 193902 - RNA, 42 nt, Homo sapiens
ccaggcccaaccaaggccgacagagggggaagacggggggcc

SEQ ID NO: 193903 - RNA, 83 nt, Homo sapiens
ggaagagcgcacgacgcacaaaagacgacgaagccgcgccaagaagaaaacaccggagcccaagacaccaaaacagacgcagg

SEQ ID NO: 193904 - RNA, 74 nt, Homo sapiens
agagaaagaggagcagcccagccccgaacaaaggggacccaagaacgagaagaacgggaggaggcgcgggagcc

SEQ ID NO: 193905 - RNA, 69 nt, Homo sapiens
cagcagaacgaggccccacccagcgcacacaccaccacacacggagaaaaccaggcggcgaggcaaaac

SEQ ID NO: 193906 - RNA, 49 nt, Homo sapiens
acagacagccagggagaggacccaaagggagaagccccggggaaagagg

SEQ ID NO: 193907 - RNA, 75 nt, Homo sapiens
gaggcaccgcgccgggaagcgccacgacaaccaggcacccacaggccggggggggcacagagccccggaagacag

SEQ ID NO: 193908 - RNA, 80 nt, Homo sapiens
agagaggccggagcagcgcccccggacagcgcaacaggcacaaagagaaagaagaggcgagaaacagccaccagagaggc

SEQ ID NO: 193909 - RNA, 85 nt, Homo sapiens
aaaaggccgacaacgagggagaagcacaagacagcacagagagaaccgcagccagaagcaaagcagacagacgcgaaaagacagc

SEQ ID NO: 193910 - RNA, 75 nt, Homo sapiens
cggggagccggagcaacgggcccgggaagcggcggagcggaagcgccgcgggccgcaagccacgcgcgagccgca

SEQ ID NO: 193911 - RNA, 72 nt, Homo sapiens
gagagcggcacaccgccgaaagggagaaagccgcgcccccagggcggaaccaagaaggaagcggcccaacag

SEQ ID NO: 193912 - RNA, 78 nt, Homo sapiens
gggaaaggaaaagaccaacaacagcgcaggacacgagacggagcagaaaagagacggcaaagaaagaaacacagaaca

SEQ ID NO: 193913 - RNA, 62 nt, Homo sapiens
cgaacagcccacgccaagagagaagaaagacgggacaagggcacacggcaccagacagccgc

SEQ ID NO: 193914 - RNA, 69 nt, Homo sapiens
gaacagacccagacaaacacagcagcgacgggaagagaggccaaggacacccagcggcgcaaaggagcc

SEQ ID NO: 193915 - RNA, 76 nt, Homo sapiens
caagaagaggagggcagccggccaggaaaggcggccagacaccgaagcacaggagcccccaggccaccaagccaca

SEQ ID NO: 193916 - RNA, 77 nt, Homo sapiens
cgcgccggcccgcggaaaggccaaagcccagccccaggcacagaccccagcgagcgcccgggggcggagaaggccag

SEQ ID NO: 193917 - RNA, 73 nt, Homo sapiens
aagaagaaaggccccagggagcggcagcccacaagcaggaagaccagccccaggagggaaacagagcacccac

SEQ ID NO: 193918 - RNA, 58 nt, Homo sapiens
gcgaacgcggagagcacgccagaaggcccgggcacgccggccaccgaaccgagcgaag

SEQ ID NO: 193919 - RNA, 78 nt, Homo sapiens
ccaaacccggcaagaggcagaagagagccccgagaaggcagaacggaaaggaggcccaagaggcgaaacgcaacacgg

SEQ ID NO: 193920 - RNA, 58 nt, Homo sapiens
cgccgcccgcggaagggagcccaagcgcagaggagaacaaggagcggcccagagcaaa

SEQ ID NO: 193921 - RNA, 55 nt, Homo sapiens
gacgcccccagccaccagggcccaccagccgagcagacagaagacaggggcccgc

SEQ ID NO: 193922 - RNA, 85 nt, Homo sapiens
ccgacggagccgcgcgcgacgcccagagccgcgaaccccgcccgagcccgccggaccccccgacccagaacagaacgaggagccc

SEQ ID NO: 193923 - RNA, 84 nt, Homo sapiens
gccgccgccagggcgcagggccgggccgccgcgcaccgcagcgccggggcacgacacaaaaacaggcccacccccccccagacg

SEQ ID NO: 193924 - RNA, 74 nt, Homo sapiens
cgacgaggaaggcaccaagcccccagacaaaccgaaggcgacagagacaggacgccaggaaagcaggcagagca

SEQ ID NO: 193925 - RNA, 76 nt, Homo sapiens
gcgcgcccccgcgccccccggagccccgggccagagaagccgaagaaccaagacgagggggaaaagagggccaccc

SEQ ID NO: 193926 - RNA, 81 nt, Homo sapiens
gcgccgagaggccggcgggacgcgggcgccaggaccggccgaacgcagagggacaagagaaaaaaagggcgggcgaacaaa

SEQ ID NO: 193927 - RNA, 53 nt, Homo sapiens
gcaggggccaacaacgggacccaagccagaccagacccaggggccaccgagcg

SEQ ID NO: 193928 - RNA, 40 nt, Homo sapiens
gagaaccaccagggggaggcggaggcaaggcgcaaccggc

SEQ ID NO: 193929 - RNA, 78 nt, Homo sapiens
agcggaggagcggaggcggggcgcccggcgccaggggagccgccacagcagccacccacgcacccgcggccaaaacac

SEQ ID NO: 193930 - RNA, 96 nt, Homo sapiens
cggcccccccgcgcggagccgagccggaacgcggcagcccccgccaggcccaccaaggggcggcagggggaccagccagcaacccgcccccggacc

SEQ ID NO: 193931 - RNA, 83 nt, Homo sapiens
gggccccaacccgcgcggcaagaagacggcgcggcaaccggggagcccgccaggggagaaccgccagcgacgggaaggcagga

SEQ ID NO: 193932 - RNA, 61 nt, Homo sapiens
cagcacccgggagccgcaaggcgagagcgcaaaggacgccagaaagagggcaacggccgac

SEQ ID NO: 193933 - RNA, 82 nt, Homo sapiens
ccagcccagagggaaagcacaccaccccagccagccggcgccagcgccagcgaggaaccgaacccagccaaaaggccccgcg

SEQ ID NO: 193934 - RNA, 79 nt, Homo sapiens
ccggccagggacaggaaagaaggaaaacgcagaagacaagccagggacaccggcaagagccgcgggaggcgcgcgacag

SEQ ID NO: 193935 - RNA, 54 nt, Homo sapiens
cacggcaggcagcaccccaacaacaccgcgagacgaggacccacccagacgaaa

SEQ ID NO: 193936 - RNA, 65 nt, Homo sapiens
caagcccgaccaaacacgaggcccggcccagagggacaaaggaaggcgggggagaaggagaggaa

SEQ ID NO: 193937 - RNA, 86 nt, Homo sapiens
gagggcggagcagcacaaggacaagcccagaaaccccgaaggccaccgccaccacccccagcccggccaccaccagcagacgagac

SEQ ID NO: 193938 - RNA, 73 nt, Homo sapiens
aagcccgagaccggggcaaagcgccccggcggagaccgggccccggcaaaagcagaagaaagacgcagaccca

SEQ ID NO: 193939 - RNA, 79 nt, Homo sapiens
gccgggggcggccaagcgaggggaaaccgcgccagagacacaggcagcacacaaccggacaccacagggaagacgaggc

SEQ ID NO: 193940 - RNA, 56 nt, Homo sapiens
cgggagggagaaggaaaccccacagcggagaaaaaggagaaacccccaagacaaac

SEQ ID NO: 193941 - RNA, 77 nt, Homo sapiens
cacagaccccagaaacgggcaagcgcgcaaacccagaaagcaagaacgaggccaaggaggagggacacagagacagc

SEQ ID NO: 193942 - RNA, 45 nt, Homo sapiens
aaaggaaagggacccaggagagacgcagcacaagaccggcaggga

SEQ ID NO: 193943 - RNA, 62 nt, Homo sapiens
cggcaaagcagggagcagagccagacagccaccacccgcccggaccgacaggaaagaaggag

SEQ ID NO: 193944 - RNA, 66 nt, Homo sapiens
agggggggagcgaggccaagcagagaaacgacaaggacgggccaacgcacggcccggcagagccag

SEQ ID NO: 193945 - RNA, 67 nt, Homo sapiens
ggaagagcagagagaaggcagggcaaaccagaaagacgggacacagagccacaaaagaggaaacaaa

SEQ ID NO: 193946 - RNA, 77 nt, Homo sapiens
accagaggcgcagcagcgccacagcacaagcggcaggcagaagggagagcggccccggcggccacccgcagggcccg

SEQ ID NO: 193947 - RNA, 79 nt, Homo sapiens
cggcccaaccgccggacgcagcgaaggccaagcccgccaaaagacccccagaaggaggcagagcccgcaccggacgagg

SEQ ID NO: 193948 - RNA, 77 nt, Homo sapiens
gcagcgaagagaacgcgcccaagggcggggacacgggccgcgcgaaaaagggaagaccagaggagcagcaccgacgg

SEQ ID NO: 193949 - RNA, 78 nt, Homo sapiens
accgacgggcccgagccaggggagaagggccccacccgggcagaagagacgcggaccacggagacccagagaagcaag

SEQ ID NO: 193950 - RNA, 74 nt, Homo sapiens
agaccagggcccgggcccgcggccgccaggagcaaggcagcgacccagggcacagcggggcacagcccccagac

SEQ ID NO: 193951 - RNA, 68 nt, Homo sapiens
agccaggaaacagacgagaaagaaggaaacggaaccaagaacaagcacgcagggcccagacccacaac

SEQ ID NO: 193952 - RNA, 70 nt, Homo sapiens
ccggccgcggccaggcccagggggcgcgcccgggacacagaagccaggccagccgcaggaggcaccaagg

SEQ ID NO: 193953 - RNA, 67 nt, Homo sapiens
caaaacagaagaaagcagaaaaacaaaaggagcagcagaagccgaccagacggcaaaggaacacgca

SEQ ID NO: 193954 - RNA, 78 nt, Homo sapiens
ccccagcacaggaaagcagcgggcaggaggggaaaccggcgaagcacaggagggcgcccacgggccgcgggcccgcca

SEQ ID NO: 193955 - RNA, 77 nt, Homo sapiens
gacgggacagaagcgccggagccgcggccggcgggccagcccgggcccccagcggcaaagagcgcgcaacgaccaac

SEQ ID NO: 193956 - RNA, 72 nt, Homo sapiens
aaaacgaaagagcaagagcaggggagagaagacacaagagaaccacagacacagcgaccagaacacaggcaa

SEQ ID NO: 193957 - RNA, 106 nt, Homo sapiens
cgcgcagaaggcacgccgacaaacgcagcccaagagaacagggcacacaggcccgagcacaaacacaagaaacgcacgcccgccagcgagaagagagagaagcagg

SEQ ID NO: 193958 - RNA, 75 nt, Homo sapiens
agaccagagggcaaaccggcaggcgcccggacacagaagaggacaggccgcagaaggaacggcagccacacagcc

SEQ ID NO: 193959 - RNA, 72 nt, Homo sapiens
gcgagaaagccgcagcccaggggcagagcccagagagggagccaggagcgcgggagcgaaggccagccacac

SEQ ID NO: 193960 - RNA, 42 nt, Homo sapiens
ccgcgcggccccgcggagccaggaaggcccgccgaaggagaa

SEQ ID NO: 193961 - RNA, 82 nt, Homo sapiens
gaagaggacccacaagcgcaggaggaggagagagaaaggagagacaaagccgagccacaggggaaaagaaacggcaaaaaga

SEQ ID NO: 193962 - RNA, 80 nt, Homo sapiens
agacgggccgggcgcaaccacacgaagacagcaagacggggacgggcggcaggaaagagggcggggacacgcccacccca

SEQ ID NO: 193963 - RNA, 75 nt, Homo sapiens
ccacaaccacgaccacaaaccggcggagccacagggaccagaccccacaagaaaacacacaaccacaggcccaag

SEQ ID NO: 193964 - RNA, 73 nt, Homo sapiens
ggccccgggcagacacggcaagccccgaggggaggccacgcacgggcggagacgagacccgaggcggaacgca

SEQ ID NO: 193965 - RNA, 72 nt, Homo sapiens
ggaccgcggccagcgacagaccgcgccgcgccggcgagcggaccagcaccaccacagccagccagaacagaa

SEQ ID NO: 193966 - RNA, 83 nt, Homo sapiens
aacgcagcgcccacagccgcgaccccccgcacgcccccgggaagcccaggcccgccgcagcgggcacagaaagcgagagagcc

SEQ ID NO: 193967 - RNA, 88 nt, Homo sapiens
aggcggcggggcggcagagagcggggcggcggcaggcacgggcgagagcgggaagagcacgcacaagcagagcgcacaccacggcgcc

SEQ ID NO: 193968 - RNA, 69 nt, Homo sapiens
gcgaggacccacaagaaccgagaggaccaacaccgcagacgaagaaaagcgccaggcaggcaggaaagc

SEQ ID NO: 193969 - RNA, 87 nt, Homo sapiens
ggggcggacaaacgggcggggcggccgaccgggagaacgcaaagcccaggccggcgcgccggacacacggcaggagcacacgacaag

SEQ ID NO: 193970 - RNA, 82 nt, Homo sapiens
cacggagccacggccacggccgcaaggccggcacggggggagggccgcaggacccaacaaccaagagcccagcgcaagccga

SEQ ID NO: 193971 - RNA, 82 nt, Homo sapiens
gcggcacgacgacggccccagcccagccaccagagcaccaagcagacacgcagagaacaggggccccacgcccccaccagcc

SEQ ID NO: 193972 - RNA, 82 nt, Homo sapiens
gacccgcaggcaccgggagaccagaaggaaacgccaggcccggaggccaggagagggaccgagcaccgcagaccgccgagga

SEQ ID NO: 193973 - RNA, 81 nt, Homo sapiens
gagagcgcaagccgggcagcagcccagcggcagcagaaagagcaccagaaccacaagacagacccaagagggcggggcaaa

SEQ ID NO: 193974 - RNA, 68 nt, Homo sapiens
caagggcggccccgaggaagcaaggccgcggggggagaccccaccaccgggcggacaggaccaccagg

SEQ ID NO: 193975 - RNA, 72 nt, Homo sapiens
gcgccagggcccaaggcgagcccaggaccaaagagggcgccaaaagggaagcacccaaaccccgagcgggcg

SEQ ID NO: 193976 - RNA, 63 nt, Homo sapiens
aaacacggagaagaacggacacagacagagcgcagcccaggcgaggaagacagccaagcagag

SEQ ID NO: 193977 - RNA, 72 nt, Homo sapiens
cacggaaaggaggaagaagacaccggggacagacaggggcacccggcgcgcacacaaagaaccgcagaagag

SEQ ID NO: 193978 - RNA, 80 nt, Homo sapiens
cgcaagaaaggccccggggccaggaacaagcgccaccaccccagagagaccggaccaaacaaccaggaagcgccaaaggg

SEQ ID NO: 193979 - RNA, 77 nt, Homo sapiens
gagagccagagaaaggacgagcagcaagcagggagcaaggggggaaccacaaagaacggagacacagagagagaaaa

SEQ ID NO: 193980 - RNA, 57 nt, Homo sapiens
caaagcacaggaaacgaggcagaaagaacaagcacgggaaagcccagagggaggccg

SEQ ID NO: 193981 - RNA, 74 nt, Homo sapiens
ggccaagcagagacacaaaaccggacccggaacaggccaaaagcaagagcaaaagaaaaggccaaaacgaaaaa

SEQ ID NO: 193982 - RNA, 75 nt, Homo sapiens
ggcccgggccagggcccagaaagccaagacccccaaggggcacccggacgcgcccaggagcagcggggacaaccg

SEQ ID NO: 193983 - RNA, 37 nt, Homo sapiens
cgagccaacaaaagagaccacagaaaccccgacccag

SEQ ID NO: 193984 - RNA, 73 nt, Homo sapiens
gacagcaggaccgggaacgccagagaaagcggacagacaccgcgccccgaaaaacgaagagagcagcagcggg

SEQ ID NO: 193985 - RNA, 69 nt, Homo sapiens
cggggagggaaagaaagcgccacaggagccgcagaagcaaaggcaccgccaaaccgaaaacgcgggaaa

SEQ ID NO: 193986 - RNA, 83 nt, Homo sapiens
ccggcagcgcccggccaggaaacgcaccacaggcagaaccaggcccaggccagagcccgggcagcacagccaggccgcagacc

SEQ ID NO: 193987 - RNA, 74 nt, Homo sapiens
gagccccccccccaacaccgcgacacgcagcagaagaggcggccacccacgagccgacggcaaacgccagggag

SEQ ID NO: 193988 - RNA, 79 nt, Homo sapiens
cagaagcccagcggcaaaaaccaggagaagacaagggcgaagaggcgggccccaggcaccagagcacccggagcacaca

SEQ ID NO: 193989 - RNA, 77 nt, Homo sapiens
cggcgcaggcggcgcggagagggggcgcgagcggggcggccgaagcgaggccacgcgcagggccgaccgcggaaccc

SEQ ID NO: 193990 - RNA, 78 nt, Homo sapiens
gaggacaagcaaggaccgcaggacccaggccagaccggagcagcggggacagaacgccaaaagacgaacacaaaggga

SEQ ID NO: 193991 - RNA, 55 nt, Homo sapiens
cgggagagaaggccagcgacagccgggaggcaccaaccagcggacacacggaaaa

SEQ ID NO: 193992 - RNA, 49 nt, Homo sapiens
caacacacagcgaagaacggaaaggcgaagagaagagggaaagggaaaa

SEQ ID NO: 193993 - RNA, 77 nt, Homo sapiens
aggccagagccagaaccgagccagaaccgagccgaaagaagaaaaaccgccgagccagacaccggcgaacaacccag

SEQ ID NO: 193994 - RNA, 69 nt, Homo sapiens
gcccacgaggcaacacgcaaggccgccaccagggacaagagaaaaaaagggcgggcgaacaaaaagagc

SEQ ID NO: 193995 - RNA, 36 nt, Homo sapiens
aaaggcgcaaccgaaagaggcgagagcagcaaggaa

SEQ ID NO: 193996 - RNA, 83 nt, Homo sapiens
aaggcacacagcaagggaacaagcccgggagagggccaccaggaggcggcggggaaagacacaaaaacagcccacaaacagga

SEQ ID NO: 193997 - RNA, 74 nt, Homo sapiens
ggagcccgcagaccgcagaaggccggagacaccagcagggggagcagacaacgccgccggccacggcaaccggc

SEQ ID NO: 193998 - RNA, 65 nt, Homo sapiens
ccgagaggaagacgagccgggaggaacggcccggaaacaggaggacgggcaaacgcacggcaaga

SEQ ID NO: 193999 - RNA, 81 nt, Homo sapiens
gaaggaccaagaaccaggaggaagccagcccgagcaggcccaggggaggaggggcaaccacagacccgccaggaagcgccc

SEQ ID NO: 194000 - RNA, 66 nt, Homo sapiens
aagcgagccacgccacggaacccgaaggagcggcaacaggcaagaacggaagcacgggcggaggaa

SEQ ID NO: 194001 - RNA, 53 nt, Homo sapiens
caacagacaaagcccgggaggcgcgaacagggcccacccgccacgacacaggg

SEQ ID NO: 194002 - RNA, 80 nt, Homo sapiens
cgcccagagagggccagagcgcggggaggcaagagaccaccagcggccaccacacgggacgccccacgccccccgcagcc

SEQ ID NO: 194003 - RNA, 76 nt, Homo sapiens
gacagcaagaagaagaggaagaaaggaaaagagggaagagggaaggaccccagaaaggggaccccaaccaagagcc

SEQ ID NO: 194004 - RNA, 78 nt, Homo sapiens
gaccacagagggacccggacaaccagaggcagccagcagggggaggcccgagagcaccccacccgcggccaccggagg

SEQ ID NO: 194005 - RNA, 85 nt, Homo sapiens
cgcgacggaggcggcggacaggcgacagcgaccgcggcagccaaggccagagaggaggagcggccaaccgagcacagagaaacca

SEQ ID NO: 194006 - RNA, 83 nt, Homo sapiens
ggagagccgcggggaagggggcagagagaaaaggaccggagagcaaggaaaccccagaagcacgaaacacgccaccgccacgc

SEQ ID NO: 194007 - RNA, 80 nt, Homo sapiens
ggcacaccgaggacaggaccgacagcacaacaccgcacggggagccaagccggccaccaacggcggggggcgaggagcga

SEQ ID NO: 194008 - RNA, 63 nt, Homo sapiens
cgcaccgcaggcagacaaaagggccaaagaagggagaaggcgaaagcgcacacaccagggggg

SEQ ID NO: 194009 - RNA, 72 nt, Homo sapiens
agggaaaggagcggggagccccgcgccacaggcgagccccaacagaccgggaggaacggggggcgggcacag

SEQ ID NO: 194010 - RNA, 68 nt, Homo sapiens
cccgacagcagcccaccgaggccagacaggagcgaagggcaagggcccagcccgcgccccaacaggaa

SEQ ID NO: 194011 - RNA, 88 nt, Homo sapiens
ccggccagggggacggcgccacgcaccggacgacgcccggcgccagcacacgcaggcgggcgcaaagacaccgccagaagaccagagg

SEQ ID NO: 194012 - RNA, 80 nt, Homo sapiens
cagaggaaaccagaccgaggcacccccccaagcaagggcagagccccacaacaaaaccccacaggaagagccgacggcac

SEQ ID NO: 194013 - RNA, 78 nt, Homo sapiens
ccgccggaggagaccagagcaaaaaaaggcagcacagaagaaaagcggccaggcgagaagacagaaggagccacagag

SEQ ID NO: 194014 - RNA, 80 nt, Homo sapiens
agaagccgcgccgggaaccgaaaagcagaagacagcggagaacccacgaacagcacccagggagaagaccagaaacgggg

SEQ ID NO: 194015 - RNA, 75 nt, Homo sapiens
cccagcaaaccaagagggagaagacggaagaaagcagccaagagccacacgaaagccaaagggacccaggggggc

SEQ ID NO: 194016 - RNA, 70 nt, Homo sapiens
ggccagccacacgcagaaagccacacacagacgaaaccacagggcagaaagaaagcaggaccagggggag

SEQ ID NO: 194017 - RNA, 82 nt, Homo sapiens
gaggggaaaccgcgccagagacacagaccagagccacgcacacagaaacagcgagacggaggggacacccaaggcgacacac

SEQ ID NO: 194018 - RNA, 73 nt, Homo sapiens
cgcaaccggcagccgccgccgggaaggagggcgcgcgcccagaagaggccagagcggaagccaaaggcaacga

SEQ ID NO: 194019 - RNA, 78 nt, Homo sapiens
gaggccgaggggacggacaccaagcgaggacacgagagccaaggacaggcaggagagcaaacaacccggaaagaacca

SEQ ID NO: 194020 - RNA, 71 nt, Homo sapiens
cgggcgagccaagcggaacggcgaggcgggcaggccgccgcagggcccgacaagagaggcggagccacccc

SEQ ID NO: 194021 - RNA, 62 nt, Homo sapiens
cccccgggccgcccccccacgggggcgccccaggcaccaggaccggagacccgcaagcggag

SEQ ID NO: 194022 - RNA, 74 nt, Homo sapiens
aagaaacacaggcgagcagggacagccaagaaccaaaaaggaccacgaagagagaaaaggaacagccgaagcca

SEQ ID NO: 194023 - RNA, 79 nt, Homo sapiens
ccagcgggggaaccggcgcgccggcgcgcggcgcggacaggcccaaacggcgaccccgcacacacacccaccagccacg

SEQ ID NO: 194024 - RNA, 75 nt, Homo sapiens
ggacagcgccggccacccaaagcacgggggcaacagagccagagaccaaaaaaccgaagaaggagcccaaacaac

SEQ ID NO: 194025 - RNA, 69 nt, Homo sapiens
gcacacagagcaacaggggagcagagaaacagcggacaggccaaggggaagggacgccgccagagagac

SEQ ID NO: 194026 - RNA, 82 nt, Homo sapiens
cggcgaagaggaaaaaaaacagaacaggaggggagagggcaggaaccaccgcccaaaggaccgccagcagcagccgaaaacg

SEQ ID NO: 194027 - RNA, 82 nt, Homo sapiens
gcgcgggcccaccgggaagccggggggcccggaaagagagagcagccaggagcaaagaagaccagcccagaagaagaaacaa

SEQ ID NO: 194028 - RNA, 80 nt, Homo sapiens
gcgcagcaaagagggccacggaaccaccagggaacgaagcccaaaaggcagagacggaccgagacaggagagcaggggcc

SEQ ID NO: 194029 - RNA, 70 nt, Homo sapiens
cagaggcaagaaccaggaaaaacggagccgagaccaagggggagggaagaaccggaaggccccagaacaa

SEQ ID NO: 194030 - RNA, 56 nt, Homo sapiens
cgcagccgagcggggccggccacagggaggggggaagacagggcccagcaccacag

SEQ ID NO: 194031 - RNA, 82 nt, Homo sapiens
cccggccagcggaggccgccgcgccccaaagcccagccgagcgcgccgagacccccagggcggccgagccccgcgacaagag

SEQ ID NO: 194032 - RNA, 80 nt, Homo sapiens
ggagacagagcaagaaaagcccgggagcagaagggaggcccaagacccacaacaaaaggacaaggcgaaggaaaacaaca

SEQ ID NO: 194033 - RNA, 85 nt, Homo sapiens
gggaacccaggccccgccgaggcggccagcaggcaccccccgagcccagcccacacaccgccggaccccccccaggcggagcggc

SEQ ID NO: 194034 - RNA, 84 nt, Homo sapiens
gcgccgccgaccccccggcgccgcgccggcggcggcaagaagaaacacacgcgcggccccgacgcccgcaggggggcggccccg

SEQ ID NO: 194035 - RNA, 80 nt, Homo sapiens
agaagcaggcgagaccagcagcagcacgggaacagaccgaacacccagcaccaggacaaagcaggacccaaaggaaacac

SEQ ID NO: 194036 - RNA, 74 nt, Homo sapiens
cccgcaaaacaaaaaagacaacacccgagaaggaaaaccggcaagcgagcacccaaggagagaaaaccaagaaa

SEQ ID NO: 194037 - RNA, 75 nt, Homo sapiens
acagccgaaggcccggcacagaagcccaacccgcagaaagcgcaggaaggaaagggacaaagagcgaagccgacc

SEQ ID NO: 194038 - RNA, 76 nt, Homo sapiens
cccacgaaaggcacgcccaagcaggagaacagcaggccaagagacggagcagcagagcacccagaagcacgaagga

SEQ ID NO: 194039 - RNA, 56 nt, Homo sapiens
ggagagcacccaacaagagacgacggggggaccaacaagaggaaagaaccacgcag

SEQ ID NO: 194040 - RNA, 50 nt, Homo sapiens
ggccgcgcggcgcgggagggggcagccagagggaacagaaacccagaaag

SEQ ID NO: 194041 - RNA, 80 nt, Homo sapiens
agcacgccgaagccaccagacgacaccaaaccgccaccgcgacgcaaggagaggccgcaggagggaagaggcaagaccca

SEQ ID NO: 194042 - RNA, 59 nt, Homo sapiens
ccgggaccccgcacaggaaggacccaaagaaacccacaaacacaagaaaaggaaacaaa

SEQ ID NO: 194043 - RNA, 76 nt, Homo sapiens
ccgccgcggggcgcgcggcgccggcggcgcgcggcccccgcgcaggaaaaacgcaggaggagaagaaacaggagag

SEQ ID NO: 194044 - RNA, 70 nt, Homo sapiens
gcaaacccacaccacccaccagagagcccggcccaaggcgcaccccacggacagcgagaggggcagggcc

SEQ ID NO: 194045 - RNA, 62 nt, Homo sapiens
agcagggaagaggagcgcaagcgccggggaggcgggggagcgggaggagccagagcacaccg

SEQ ID NO: 194046 - RNA, 61 nt, Homo sapiens
cagagagggcaagaggccaaaaacccaggggaggcaagcaggggggcaaaggaaagaaggc

SEQ ID NO: 194047 - RNA, 81 nt, Homo sapiens
ggagggcaagcccggggaccaagccccaggaggggcgcggccggagcgggacggaaggggacacaggcaagaccacacgga

SEQ ID NO: 194048 - RNA, 75 nt, Homo sapiens
acagacagacaggcccagggccggacgaggccaacaggaacagcagcgccagcgaagacagcaggcacacaccgc

SEQ ID NO: 194049 - RNA, 75 nt, Homo sapiens
gcccccgccgccgcccgccgcccccggcggagcagccgcagccacgacaacaggcacaaagagagaaggaacacc

SEQ ID NO: 194050 - RNA, 67 nt, Homo sapiens
gaccccccggcgccgcgccggcggcgggaggccaacagacccaacccagaaggcaccaaacggaggg

SEQ ID NO: 194051 - RNA, 43 nt, Homo sapiens
gagagaccgcaccacccggggccagaggggaggccaccaggaa

SEQ ID NO: 194052 - RNA, 68 nt, Homo sapiens
cagcgagaccgggccggaacgaaagcaggacggaggagcgaccaccgcggaacccaggcggagaagag

SEQ ID NO: 194053 - RNA, 76 nt, Homo sapiens
caccgcacggcggagcccgcacgcggcgggcagggggagggcgcagcccagagccgaccccagaccggagacccaa

SEQ ID NO: 194054 - RNA, 44 nt, Homo sapiens
gaaagaagcgaccgcggcggcggagaacacaggaaggaaaggcc

SEQ ID NO: 194055 - RNA, 77 nt, Homo sapiens
aagggaaggaaaaaccgagggaaccaccgcaagaaccacgaggccacccgacacgggagccacaccaggcccggaca

SEQ ID NO: 194056 - RNA, 77 nt, Homo sapiens
gcagcgggccccgccaccggcacaccgaaggcgggccacacccaaaaccggacaggcagggcaagaagacaccacaa

SEQ ID NO: 194057 - RNA, 80 nt, Homo sapiens
ccggaaacgacaggaaaggagacaaggggagcacaggggcgcccggagagggccgccacagggcaccagccgggaagagg

SEQ ID NO: 194058 - RNA, 81 nt, Homo sapiens
cagaaaaagcaccccgaggaggaagacgaacgaaacacaggcagagaccggccaccaaaccacaaccgaaggcagcgcgca

SEQ ID NO: 194059 - RNA, 78 nt, Homo sapiens
gagcggaggagcaacgggaggagaacccgagaagcaggaccaacaggcacccacagaaggagaacaagcagagcaccg

SEQ ID NO: 194060 - RNA, 71 nt, Homo sapiens
aaacagagaaacaagaggaacagaaaagaaccaggcgggaagaagaacaacagccgaggccaacacagaga

SEQ ID NO: 194061 - RNA, 71 nt, Homo sapiens
cgaccaaaccgaggaaaggaaagaaagcacgagacaacgaggcgagagcacagacaaaacaacaaccagaa

SEQ ID NO: 194062 - RNA, 53 nt, Homo sapiens
aagaaaaggaagaagcaacaaccccagaaaagcaggaaaccagcccacagaga

SEQ ID NO: 194063 - RNA, 71 nt, Homo sapiens
gagagagagcggaacgggagaaagcacgggaggagaggggaccaggcggagccccgaagagcggcaggaaa

SEQ ID NO: 194064 - RNA, 57 nt, Homo sapiens
cacggggacgagcggcacccagcccacgacacacccgacacgaccgaaaacggaggg

SEQ ID NO: 194065 - RNA, 63 nt, Homo sapiens
aaagcagagcagaagagaaggaagagccaggaggaggaagggccgaaaggaagaggagcgcca

SEQ ID NO: 194066 - RNA, 58 nt, Homo sapiens
accaagaaccagaaacaggaggacagagaccaaacaaggcgagccgccacaaacaaac

SEQ ID NO: 194067 - RNA, 43 nt, Homo sapiens
ccggcccgaccagaaaaagagcaaaaaagggagacgcgccccg

SEQ ID NO: 194068 - RNA, 54 nt, Homo sapiens
ccccccccaccccaccagggacccccagggccgggcccccccgcccccgccaca

SEQ ID NO: 194069 - RNA, 75 nt, Homo sapiens
agcaagggaaagaacccggcggggaaaagggaaggaaaagagacgcagaccccaaaggaaacgagagagagacca

SEQ ID NO: 194070 - RNA, 37 nt, Homo sapiens
gcgggaacggcgcggaagacaaaaccacggagcgggg

SEQ ID NO: 194071 - RNA, 52 nt, Homo sapiens
ggcccagggccccgggccgccgggaggcggcagcagaaggaaggagggccgg

SEQ ID NO: 194072 - RNA, 52 nt, Homo sapiens
gccacccaagagacaagcagcacccagccaaacccaggcccgagaagaagag

SEQ ID NO: 194073 - RNA, 83 nt, Homo sapiens
agagcggcggccgccacaacagcacagccggcgacggcgcgaggcacgacacagcagggcggccagccagcagagggggacca

SEQ ID NO: 194074 - RNA, 73 nt, Homo sapiens
gccccccagagcgggaacagggaaccaccaagggaaaaaccagcacccacagaagaagagaggcggaaaacgc

SEQ ID NO: 194075 - RNA, 38 nt, Homo sapiens
aagaaccgggaaaaccgggcggagcccagggagaaagc

SEQ ID NO: 194076 - RNA, 75 nt, Homo sapiens
gagaaagggaggaaaaggccaagacgaaaccacagcagaagagcaccagaaggcagaggaaggcggaaggagccg

SEQ ID NO: 194077 - RNA, 75 nt, Homo sapiens
cggagccaaaacaccaggggcccaaaacggggagccaagcaagaaaggcacaacccgcgcagcagcacaaaccag

SEQ ID NO: 194078 - RNA, 70 nt, Homo sapiens
acagccgaggagcggaaagccagggcagcagagcacggagggcaggagccaacacagggacgagacccgc

SEQ ID NO: 194079 - RNA, 84 nt, Homo sapiens
gacaacgaaacaaaaaggaaaaggcagcaaacccaggacaagccgaacacccaacaagaaggcaacgacaaacagccaagcaag

SEQ ID NO: 194080 - RNA, 79 nt, Homo sapiens
aggcacaccgcaaggacccaaaggggaggacagggaacaaaggcagagaaacgcaccccagagcaggacacaagacaaa

SEQ ID NO: 194081 - RNA, 74 nt, Homo sapiens
ccagccccagcagcagaagaagaggaccggagagagcaccgacagaacccgagaaaagcacagcacccgcaggc

SEQ ID NO: 194082 - RNA, 87 nt, Homo sapiens
gcgagcagagccgcccagcccgccagcgcgccgggacggcccagcccccggacacgggcggccggaaggcgaggccccgccagcccg

SEQ ID NO: 194083 - RNA, 68 nt, Homo sapiens
cacgccagacagacaggaacgagggccgacacgagggggggaagccgggggcgccaccccccacagaa

SEQ ID NO: 194084 - RNA, 82 nt, Homo sapiens
gaggggccaaccagcgaagagcgacaagccgcggcagccgcggaccaccgccgccaggacagcaaagcaagccaagagggcc

SEQ ID NO: 194085 - RNA, 80 nt, Homo sapiens
aagggaccagcaaggcggcagagcaaggggcacgcagaaggaccggccacggcaaggaaccgaaggaacaagccaaaagg

SEQ ID NO: 194086 - RNA, 83 nt, Homo sapiens
caagcgaagccgaaaaagcgcccgagacgggcccgccgaaagcggagaggagaaaaagaaacccaaaggggcacaagaggaga

SEQ ID NO: 194087 - RNA, 77 nt, Homo sapiens
aaacacacggcaggaggggagggaggaggaggacccaggagcgggacggacgaaaagccaggaacgggagcgcagcc

SEQ ID NO: 194088 - RNA, 78 nt, Homo sapiens
acccaggaagcacagagcgaccagacacggcccacggccaggcagacacccaggaaggacaaaaacgggagcagacca

SEQ ID NO: 194089 - RNA, 58 nt, Homo sapiens
ggccgaggcgggcgcaagagaaggcaccaagaggggcacaagaccgaaagagcaggca

SEQ ID NO: 194090 - RNA, 56 nt, Homo sapiens
aagaaaacgaaacacgcgaaaccaaggaaaccccacagcggagaaaaaggagaaac

SEQ ID NO: 194091 - RNA, 80 nt, Homo sapiens
acaaaagagcacaaaggaaaacgaggaaagcccaggagacacggcaagcgagagcgcagccaggagaagaccaaacagga

SEQ ID NO: 194092 - RNA, 51 nt, Homo sapiens
cccgagagccggaaacagagagaagcgcccagacccgcaaacaacagcccc

SEQ ID NO: 194093 - RNA, 69 nt, Homo sapiens
ggaggagccccaagaagaggcagcaggaagacggggcccaaagaggaagggggaaaggaccaaaaaaaa

SEQ ID NO: 194094 - RNA, 45 nt, Homo sapiens
aggcacacgcggcccgacaaacaaagcgagccaaaagcaggccgg

SEQ ID NO: 194095 - RNA, 81 nt, Homo sapiens
agcaacagaaggcaaaacgaagacgaggcaaagcacccagcccaccccggcaacagcaagagaaaagcccacagaagaggg

SEQ ID NO: 194096 - RNA, 71 nt, Homo sapiens
gggagaaagcacgggaggagaggggggccagcccacaaaacacagccagggagaccgaaaaaacagcccaa

SEQ ID NO: 194097 - RNA, 81 nt, Homo sapiens
aagggcagggcccgacacagcgagaaggcccaaagaacaaggagggggccagcaccccaaggagaggcagaccacccagga

SEQ ID NO: 194098 - RNA, 69 nt, Homo sapiens
gccccccaaccgacagccagcaagagacgggagaagggccgcggacagcccgccagaaccagcgacagc

SEQ ID NO: 194099 - RNA, 77 nt, Homo sapiens
agccagcaagaccacagcagcacgcaccagccagcgaaccggcccaaagaagcagagaaaacccggacaacagccag

SEQ ID NO: 194100 - RNA, 81 nt, Homo sapiens
agaaccaaggagcgcgcgcacagagaccaccgggcgcaccccacccgggccgcccgaaggagcgggcgcagagacagcaaa

SEQ ID NO: 194101 - RNA, 78 nt, Homo sapiens
gggcacgaccagacgcccacccacaaagccaggagaggacagaaacaaaaggaagaacaggaaaaaaacccgcaccga

SEQ ID NO: 194102 - RNA, 77 nt, Homo sapiens
ggggcggagagcgggggggggcccacaccggccgagcggggacccacacccccgcccccgccccacgccaacccgcc

SEQ ID NO: 194103 - RNA, 72 nt, Homo sapiens
gagagcgcagacaccggaaagagagggcgaaaacacagaaacaccaaagaaaagacaaagaacacaagaggg

SEQ ID NO: 194104 - RNA, 78 nt, Homo sapiens
cagaaccaggcggggagagcgaacagagaaacaggaaagaggagaccaagcaccagaagaagggaagaaccaaacgac

SEQ ID NO: 194105 - RNA, 61 nt, Homo sapiens
aggaccaggagcggaagcagacacaggagcccacgccaaaaagggaaaaaagagagccacg

SEQ ID NO: 194106 - RNA, 83 nt, Homo sapiens
ggaccccaaggcacaggcgaccaccccaaaagcaccggccccgcacagcaaaccagcgagggcggcacgccacaggacggcac

SEQ ID NO: 194107 - RNA, 76 nt, Homo sapiens
aaaggcacgacgggggcaacccaggccaacggaagcacgggaagaagaggagggggccccacccaagaagagcgag

SEQ ID NO: 194108 - RNA, 68 nt, Homo sapiens
cgccccgggcgggcgagcacaggcacacacacgaaggaacgcggccacgaaaaacgaaaaaagccgcc

SEQ ID NO: 194109 - RNA, 75 nt, Homo sapiens
gggcagcccgaggcgcaccagggaaaacaagcaggggaagagcgcaaggggcgggggccaggcgcggggcaaaac

SEQ ID NO: 194110 - RNA, 76 nt, Homo sapiens
ccagcggccaacagcaccacagcaacccggacagaccaggcaaaagaaaccaccgacgaagcccgagacagaccag

SEQ ID NO: 194111 - RNA, 78 nt, Homo sapiens
cacggaagcccacgggcaccgagcccgcccacgacggagaggagcgggcgccggacacagaagggggcgggaaggcgc

SEQ ID NO: 194112 - RNA, 76 nt, Homo sapiens
gggcccgagaagacaaagaacagccacaccagggcccacacaacgcaaggaaagagcggagcagccagcagaggcg

SEQ ID NO: 194113 - RNA, 73 nt, Homo sapiens
accccacgacccaagcaaaaggggcgcaaggcaagcaagaaggaggcccagacagccccggaaagacacaaag

SEQ ID NO: 194114 - RNA, 73 nt, Homo sapiens
cccccgcgccgccggcacgcggcggccgggcaaagggcagcacccggaagaggacgaccaaggaccccagaac

SEQ ID NO: 194115 - RNA, 63 nt, Homo sapiens
acgagaacaaagggccgggagcgagcggggccagaaggggccgaaggcagaaaaaagccaaag

SEQ ID NO: 194116 - RNA, 76 nt, Homo sapiens
cacaacaccacaccccacaccaggaaccggcaaaagagggaaagggagcagcaccggccacacccacagcacgacc

SEQ ID NO: 194117 - RNA, 79 nt, Homo sapiens
ggaggaagagggcgcaagggggaaggaagcaggcccaggcgggccggcccagggagaacgcaaaaccaccacccccaca

SEQ ID NO: 194118 - RNA, 80 nt, Homo sapiens
gcgacccagaggagagcccaaacagacgacgcaaagacgagaccaggagacgaccagcaagcggaacccgggaaaagcaa

SEQ ID NO: 194119 - RNA, 86 nt, Homo sapiens
acagcgaagccacccagcgccgagggaaggcgccgcgccaggccgggcgggcggaggacggaagaaagaccccaaaaaagaaagac

SEQ ID NO: 194120 - RNA, 79 nt, Homo sapiens
gaggccggaggaagccaggaggccgggaaccaagagagcggaggaaggacagagagcggcagcgacaccggcgcagcgc

SEQ ID NO: 194121 - RNA, 67 nt, Homo sapiens
cgcgcgacgcccagagccgcggccggggcgcgggaggccaggggagccaacaggaaagccagcggac

SEQ ID NO: 194122 - RNA, 80 nt, Homo sapiens
cggccccgagcccaggccggcgcaggcgacacccgcccacgagagcggagaaccagaagcggaaccggaagaagacgaac

SEQ ID NO: 194123 - RNA, 68 nt, Homo sapiens
cccccacaacggggagaacagcccaaaaaaggggaaaagagaagaacacgaaaagaagaacccaacag

SEQ ID NO: 194124 - RNA, 52 nt, Homo sapiens
gagagcgcaggacagggaaaacgacaaccagccgcaggcgaaagcacgaagg

SEQ ID NO: 194125 - RNA, 85 nt, Homo sapiens
ggcgcggggcgaaggcgcagccgcgaagccgagggagcagcgcccacccgacaggaggagcagcagcagcggcgcgggaggcagc

SEQ ID NO: 194126 - RNA, 107 nt, Homo sapiens
ccaacccccccacccaggccccgcaagaagggccgggggcgagccggagcgaccccggcagggcaaagccccacaagggacggcccccgaggcagcccgacgggagg

SEQ ID NO: 194127 - RNA, 64 nt, Homo sapiens
aaagggccaaagaagggagagaggacaaaccggcgaccacacacggggacgacggggaagccgg

SEQ ID NO: 194128 - RNA, 77 nt, Homo sapiens
gacgaagagagagaacagccccgcggcaagcaagggcaacccgcagccgagaaagggagcagagcaagaacgggacg

SEQ ID NO: 194129 - RNA, 65 nt, Homo sapiens
ccgaccgagacgggcggagaggagaagccccccgggacccccaggcaggccaagccgagaggggc

SEQ ID NO: 194130 - RNA, 71 nt, Homo sapiens
ccggcaaaaccacacagggacaccccaggaggcaggggaagcacaaaagcgcacccgcgccagcgaggacc

SEQ ID NO: 194131 - RNA, 78 nt, Homo sapiens
ggaccccggagcccagaagacagagggcgaggcccccgacagcgcccgggagccgcccccgacacccgagccccgccg

SEQ ID NO: 194132 - RNA, 84 nt, Homo sapiens
cgggcggacgggaagccggggcgggccaccgcccgggagccgggagcccggggaccgcgaggccagccagggcagcagcaagga

SEQ ID NO: 194133 - RNA, 51 nt, Homo sapiens
aaccggagagcacccaacagccgacagaacagaaaggcaaaaagagacaca

SEQ ID NO: 194134 - RNA, 89 nt, Homo sapiens
caagagcagcggggggcaggagcggaagcgaccggcaggggggagcgagaccgcgaggccagggccgggggcgagcggggccggggagg

SEQ ID NO: 194135 - RNA, 60 nt, Homo sapiens
ggagacacgagccggagaggaggccggagcaggggaaacgaccaccggagccaagacaga

SEQ ID NO: 194136 - RNA, 83 nt, Homo sapiens
aaaaacgaaaaagaaccaaagaaaagaaagagaaaaagcagaaagagagaagagagacagaagagcaagagacgacacggagg

SEQ ID NO: 194137 - RNA, 81 nt, Homo sapiens
aggaaggggaccgcaaggcagcgggacgcggacggaggagcccgggcgcgcggggcccgagcccggaacagacacagagcc

SEQ ID NO: 194138 - RNA, 66 nt, Homo sapiens
gcgaggggagcaccaggaccgggccggaacgagacgcacggagggacaggcaagaaggaagaaggc

SEQ ID NO: 194139 - RNA, 74 nt, Homo sapiens
ccacagaaacagaaggaggccggccgacacaaacaggcccaggaaggggcgcagcacgcagccgcgcgacggcg

SEQ ID NO: 194140 - RNA, 77 nt, Homo sapiens
ccggcagcggcacgccacggaacccgggcggagcaggaccgggcaggccacgaacgacgcacggaggccacaacacc

SEQ ID NO: 194141 - RNA, 61 nt, Homo sapiens
gaagcacacaaaaacaaaagagccgggcaaagcaccagaggcaaacaggccacacccaaga

SEQ ID NO: 194142 - RNA, 74 nt, Homo sapiens
ggggcaaggaagggaggagcaccgggaaccacaccaccccgcgcaggggcgcgaaaaggggaacgaagcgcgga

SEQ ID NO: 194143 - RNA, 98 nt, Homo sapiens
gacagcgcgggagggcgccgcggggcagccgccgcccccgggaaacgccgaagggaccaggcagacgggaagaacccagaaagaaaggagcgccccaa

SEQ ID NO: 194144 - RNA, 86 nt, Homo sapiens
gcgagaaccgcagcagcccccccccgcagcccgcccaggcaagcagcagcccaagacagagccaaaggagcaccaaaacaaaagag

SEQ ID NO: 194145 - RNA, 81 nt, Homo sapiens
gcggccggaagcgcggagggagccgcgggaggaccgcagggggaaggaagggccccacaccaaagaaacccaaaaagaacg

SEQ ID NO: 194146 - RNA, 74 nt, Homo sapiens
gggcaccacgaaggaccgaagaggaagacagaaagagcaaagaaaaaaacacagccaagagaccgagcaaaacg

SEQ ID NO: 194147 - RNA, 63 nt, Homo sapiens
cagcacccagcaacacgccaaaggcgaaccggcaaggcagagccagaaggagagccaagcgcc

SEQ ID NO: 194148 - RNA, 73 nt, Homo sapiens
gagcggcagagggaagaaaagacaagacgaaccagacgggaaaagagcagacagaaaaaaaccagccccacag

SEQ ID NO: 194149 - RNA, 78 nt, Homo sapiens
ccgccggcccccgaaggcgggaacaggaacagaggccgggggccagccagccgagcgccacccaaagcagcagcacca

SEQ ID NO: 194150 - RNA, 69 nt, Homo sapiens
cacaaaaaagcacgcccgccagaagcaaggaaggccaggaaaaaaagcccccacacggggagaaagaaa

SEQ ID NO: 194151 - RNA, 79 nt, Homo sapiens
accgcggagagcagcacgaccccagcacagacaaagggggaggaagaaaggaaaggcacccaaagcagaacggcggaga

SEQ ID NO: 194152 - RNA, 68 nt, Homo sapiens
gaggcaccagggaccaaggaccaaaacccaaagaaaacccacacagcaggccaaggaagcacgggaag

SEQ ID NO: 194153 - RNA, 83 nt, Homo sapiens
ccgccccgcagccccccgcagcacccagccggccacgccacggagaccgcccagcaggaagcggagcgccgggggcccccacg

SEQ ID NO: 194154 - RNA, 57 nt, Homo sapiens
agccaccaggaccggcagaaaccaaggcggcggcggaggcagcacaagggggcggca

SEQ ID NO: 194155 - RNA, 72 nt, Homo sapiens
gcggagcggggcccgacggcacgacgacggagagaggaagaagacggggcggcaccacgcgacagcgccccg

SEQ ID NO: 194156 - RNA, 81 nt, Homo sapiens
cccagccccaagccagcacacacgggacacaaagacgcagacggaggcgagcccaggaggcgaggggcagaggagcccgag

SEQ ID NO: 194157 - RNA, 41 nt, Homo sapiens
ggaccacaaaccgcgccagaaaagaccgacagcacgaggag

SEQ ID NO: 194158 - RNA, 81 nt, Homo sapiens
cgagcgagcgggccgagccggaggggggcgacgcgcgggcaccccgggccgcagcgcaaagaaggccaagaagacgacaca

SEQ ID NO: 194159 - RNA, 85 nt, Homo sapiens
aggagcggcggcggcggcggacccggagagccccggaggagcggagagcgagcggcaacccggagaacgcggcagaacggaggca

SEQ ID NO: 194160 - RNA, 84 nt, Homo sapiens
cccggcccgggagcccccgcccggagagacagggaaacgaaaaccaccgggcaccacgagcccacgagagaggacagccccagg

SEQ ID NO: 194161 - RNA, 83 nt, Homo sapiens
cacccaggcagcaagggcaccgcgagcaaggcgccccggcaaaacaaaaaaagaaccccggcaaggcccagacggcaaaccaa

SEQ ID NO: 194162 - RNA, 80 nt, Homo sapiens
gcggggcgagggccagcaccaccccacggccagggccaccaaccccaacccggagagcggcgagcagccagccgccagcg

SEQ ID NO: 194163 - RNA, 53 nt, Homo sapiens
aacgacaccccgagcgcgcacgggacgaaaaggcagccgccgcaaagggacga

SEQ ID NO: 194164 - RNA, 78 nt, Homo sapiens
agggcaaagggaaggccccgacagcaacaagaacccgaacagaaaggcaagacgacggaaagaaaacgcaaccgggag

SEQ ID NO: 194165 - RNA, 49 nt, Homo sapiens
cgggaccaaggaaggaaaacaggacagaaaacagggcccgccgagaggg

SEQ ID NO: 194166 - RNA, 70 nt, Homo sapiens
aaacagacccagccagaaaacaagggccacacagggcagagagaaccgccgcgaagagggagaagaggaa

SEQ ID NO: 194167 - RNA, 82 nt, Homo sapiens
gacggaggggaggcgagagcgagaggacccagcccacaccccagccgggagaagaggcacaaggacaggcacagagaacaga

SEQ ID NO: 194168 - RNA, 74 nt, Homo sapiens
agggacgcgcggcggcagcgagcgcaggagaaggggcgccacgcacccgggacggacaggcgcggaggacccaa

SEQ ID NO: 194169 - RNA, 88 nt, Homo sapiens
gcgggacccagggagaaacaggggggcgagaagagaaacaggaagccgagccacggagcacccaaagagaccacccgcagcgagcagc

SEQ ID NO: 194170 - RNA, 58 nt, Homo sapiens
caaagacaagacgcaggagaaaacgagacccaagaacacccaaggcgaagcgggagcg

SEQ ID NO: 194171 - RNA, 70 nt, Homo sapiens
caggagcgcagcacgaaaacggaaagggaagggacccgagccccaaagacagaaaagccccgagacggaa

SEQ ID NO: 194172 - RNA, 55 nt, Homo sapiens
ggcacgcacgcgaagacagcggcagggacacacaggaagacgaacacggaacggg

SEQ ID NO: 194173 - RNA, 73 nt, Homo sapiens
ccgggcggggagggggaagaggcgggggcggcccggggccggagaagggcaggagaccgcacacaccgagggg

SEQ ID NO: 194174 - RNA, 76 nt, Homo sapiens
aaaacgcggaaaaccgacacaacagaggacacgagcccagccaggcgagccagcgccaaagaaaaagaacaagagg

SEQ ID NO: 194175 - RNA, 72 nt, Homo sapiens
caggcccccacgcgaagcaccgagccagccagaaccacaagacagacccaagagggcggggcaaaacaaagg

SEQ ID NO: 194176 - RNA, 85 nt, Homo sapiens
accggacgggcacgacaccggggcaggggccgaggagaaggccgcccacacgcagccagaacccagcgccccagcaagaagaagc

SEQ ID NO: 194177 - RNA, 83 nt, Homo sapiens
cgcgcggccgggagcacgggcgccggcaagacaagaggcagccagcggacggcgcgagaccgaggcacgggcaggcacagcag

SEQ ID NO: 194178 - RNA, 80 nt, Homo sapiens
agaaaggaccacaagaagaaaagggaaagcagcagggccaggaaagacagcaaaagggagagcgcagcgaaacagaacag

SEQ ID NO: 194179 - RNA, 77 nt, Homo sapiens
cagaggggaagcggcggagcaggaggagggcggggaaacagacaagaggccgccccagaagggaccgaaaaagcgaa

SEQ ID NO: 194180 - RNA, 70 nt, Homo sapiens
agaaggaccagcgcgcgggaggacacagcagagagggcagaacagagcagcccaaggcacaagagaaaaa

SEQ ID NO: 194181 - RNA, 64 nt, Homo sapiens
acagggagacagccagcacaaacggacagaagaaaggggccccaggccggagagagaagcgccg

SEQ ID NO: 194182 - RNA, 78 nt, Homo sapiens
gggacaaaaaccaagaagacacccaacccaagcgcccagaaaggggagcgaaccacgcgaaagcacgaaccaagacac

SEQ ID NO: 194183 - RNA, 66 nt, Homo sapiens
ggacaaaaaagccaggcacaacaagaggacaggaagagcacccaagcgcaagcaaaagaaggcccc

SEQ ID NO: 194184 - RNA, 59 nt, Homo sapiens
ccagcacaagagaaggaaaagggaaagggagcagcaccggccacacccacagcacgacc

SEQ ID NO: 194185 - RNA, 56 nt, Homo sapiens
cgcgggcagcagcaggccgggacaaccaccaccagcgagcaaaagaacaaagacca

SEQ ID NO: 194186 - RNA, 76 nt, Homo sapiens
aagggcaaagaccaccagaacaggaaaacagagcagcaaggagcaacccagcgccgggaaggcaacggcaagacga

SEQ ID NO: 194187 - RNA, 97 nt, Homo sapiens
cccggggaaaccggagggacccggcccggaggaagaaagccaaggagggggacccaacaagccccaggacagaaggaaagcccgcacaaagggcgcg

SEQ ID NO: 194188 - RNA, 82 nt, Homo sapiens
gggcggcgcggccgcccgggccgggccccaccggacgggaggccaacagacccaacccagaaggcaccaaacggagggggaa

SEQ ID NO: 194189 - RNA, 55 nt, Homo sapiens
agggcaaggcgccagaccaaggggaaaagagacgcaaaccacgaggacagagaag

SEQ ID NO: 194190 - RNA, 79 nt, Homo sapiens
ggagacgcccggcgcggcggccagcggaaggcccgcgccaagccaagggcggaccccaaagagcggcagaaagcggagg

SEQ ID NO: 194191 - RNA, 61 nt, Homo sapiens
agaagaaacgcaccggaaaggccaccaggcagccggcacccgcacaacccagggggccgaa

SEQ ID NO: 194192 - RNA, 72 nt, Homo sapiens
cggcgcagagacaggcgcgaggagacaccgcagaaccccgaacaggcccaagggccggcagagagacaaccc

SEQ ID NO: 194193 - RNA, 65 nt, Homo sapiens
gaccagcgaccgggcaggcgaccccccccagcaaaaacggccggagacacgagaagagggagaaa

SEQ ID NO: 194194 - RNA, 67 nt, Homo sapiens
ggaaaagaggaagagggcgggaaggcagggaaagggcagcggaggcagagccgaagaaagcaacgca

SEQ ID NO: 194195 - RNA, 77 nt, Homo sapiens
aggaagaggagacagagggccgagaaggacaggacagaaaaaggaccaggagaacacgaaaaccagggacaaaacca

SEQ ID NO: 194196 - RNA, 48 nt, Homo sapiens
caaagacaccccagcaagcagaagggaggggagcaggaaagggccaac

SEQ ID NO: 194197 - RNA, 62 nt, Homo sapiens
gaccacccccagcacccccggacaagggggagccaggccccacggagcaggcggccggagga

SEQ ID NO: 194198 - RNA, 76 nt, Homo sapiens
gccgcccgccacacccgccgccaggacccccagaggaccccaacacccacccccgccgggaccccgcggacacggg

SEQ ID NO: 194199 - RNA, 69 nt, Homo sapiens
ggaaaaggacaacggaggcagagaccaagcaggggcgaagcacaagacacgaagagcaccccagagcgg

SEQ ID NO: 194200 - RNA, 76 nt, Homo sapiens
cacacacaaaacgcccggggggaagaggaacagccaggggcccacggaggaagagagaagacagcagcgaacaaga

SEQ ID NO: 194201 - RNA, 59 nt, Homo sapiens
gccggcacgggcgacagcaggcacagggacgagggggcggaaggagcggagaaaaaaag

SEQ ID NO: 194202 - RNA, 63 nt, Homo sapiens
ggccaaaccaccgcggccgcaccgccacgaccgggagaccaacagaaggagcggcggacacac

SEQ ID NO: 194203 - RNA, 84 nt, Homo sapiens
ggcgaaggaggaggacaaagagcccccacgagcccgcaaggagaaagacagcaaagaaaaggagaagaaaggaaaaaaacaacc

SEQ ID NO: 194204 - RNA, 73 nt, Homo sapiens
aggagagcaggagagacaaagaaccagagccggaaccagccagagaaaagcccgcagccagagagacaagcca

SEQ ID NO: 194205 - RNA, 77 nt, Homo sapiens
cgggagaggacaagaccacgagccaggagcccacagcaccagagaaaaaaaaagaaggcaaaagagccccccaccag

SEQ ID NO: 194206 - RNA, 88 nt, Homo sapiens
aaaacaaacagagagccagagacacagaaaaagaagaagcggaaacaacgccccgcaaaagacgccaggaaagcaggcagagcaaccc

SEQ ID NO: 194207 - RNA, 68 nt, Homo sapiens
aaaagagaggaacacacaaacgcgagaagcccagagacagcacgcggccaaagaaccgaacacaagga

SEQ ID NO: 194208 - RNA, 50 nt, Homo sapiens
cccgaagagacaacaacaaacaaacgcgcccacggacacaagcacgacgg

SEQ ID NO: 194209 - RNA, 83 nt, Homo sapiens
ggccgccgcgccccagcgccccggccggcccccgggcggccgcgggggcggcgcaggcgaaacgaagcacgagggccagccgc

SEQ ID NO: 194210 - RNA, 74 nt, Homo sapiens
gcgaaacgcacgagaaggcggacaggcagaagaacgacgagagccaagaacaaaggcgccaggaccaacaggcg

SEQ ID NO: 194211 - RNA, 72 nt, Homo sapiens
cgaaagccaaacagacaaggaacgaaaccagaagaagcggagaaaagaagaagacacgcagaagaaggaagg

SEQ ID NO: 194212 - RNA, 55 nt, Homo sapiens
cggcgggagagagagcgcccagaaagccagggcgaaagagccagacaaagagcag

SEQ ID NO: 194213 - RNA, 35 nt, Homo sapiens
aaaccgggcacgaaagagcgcgccccagaccaccg

SEQ ID NO: 194214 - RNA, 83 nt, Homo sapiens
gcagccaagcaggaccacccaccagccaccagacgagggcagaggagaagcgcccaggcggagagaccggaggccggaaccca

SEQ ID NO: 194215 - RNA, 61 nt, Homo sapiens
ccacccgggcagaagagacgcggaccacggaaagcggagggaaaggccacccaccacgagc

SEQ ID NO: 194216 - RNA, 84 nt, Homo sapiens
ggcgggaagaggggcgagggaccagcagcccaaggcccacccgcgggcgcgggagggacagcggaggaacagcagaccagagga

SEQ ID NO: 194217 - RNA, 36 nt, Homo sapiens
cagcgccccccgcccagggccacacccccagaggag

SEQ ID NO: 194218 - RNA, 72 nt, Homo sapiens
caaccaaagcccggagcacagagcagcccaggaaccacagcccccgaaagagcggaacagcgccgagaaaca

SEQ ID NO: 194219 - RNA, 75 nt, Homo sapiens
gcggccgcccgcggcgaccgacccgcgacccgaaccggaaaggaacgagcaccacaggacaacgcaaaaacccca

SEQ ID NO: 194220 - RNA, 76 nt, Homo sapiens
cagaaaagccacgagcaaaggcacaaggaaccacgcccgcgggacacaagacgggcaaggaaaccccagaagcgca

SEQ ID NO: 194221 - RNA, 65 nt, Homo sapiens
ggaccacaaacgagggccaagaggacacagcaaagcagacaaaggagagacagcacaaccagggg

SEQ ID NO: 194222 - RNA, 62 nt, Homo sapiens
aacaaacgaagccggaagaacgcggcaagagacgacagggcgaagcgaggaacaaggcccaa

SEQ ID NO: 194223 - RNA, 81 nt, Homo sapiens
acgaggcaacacgcaaggccgccaccaggccgggacggacgaggaggccaccggacaggagaccggcgggaccacacaggg

SEQ ID NO: 194224 - RNA, 78 nt, Homo sapiens
aagagccccccaaaggagaacgacgccaaaacaaaagcaacaaggggaccaagaaaggcccagggaccaaagcccgga

SEQ ID NO: 194225 - RNA, 72 nt, Homo sapiens
gggggaaggccaacagcgaggacgcagcagcacccgccacggaagcaagagcgcagccgggagaggacgaca

SEQ ID NO: 194226 - RNA, 75 nt, Homo sapiens
cccagaaagaggggcaagaaccccagaaagcggggacggccgcccggggcgccgggccaccgggggcgccgccag

SEQ ID NO: 194227 - RNA, 77 nt, Homo sapiens
cccaggacccgcgcagcagggcgggagccaggaagaccgcaggaaagcaggaaggcaagaaagccaaggacgaaacc

SEQ ID NO: 194228 - RNA, 72 nt, Homo sapiens
cccgagagaggacgaagaacaaggaaagaccacagcaagaccacgcccccagccgggggaccaggccgaacg

SEQ ID NO: 194229 - RNA, 47 nt, Homo sapiens
caaaaccacaaacggacagcggagcggaggcagacacacacgggggg

SEQ ID NO: 194230 - RNA, 77 nt, Homo sapiens
ccagagggaaagcacaccaccccagccaccccggcacaaagcagaccgccccacgggcgcgcccgcgacagcacccc

SEQ ID NO: 194231 - RNA, 63 nt, Homo sapiens
cgagcacacggaacaaagccccaggaggcaccaaggagcgggagaaccaggacccgcaaggaa

SEQ ID NO: 194232 - RNA, 74 nt, Homo sapiens
aagacgcaagcagcgaagcagcacacagaaccccggacgaggcgacagacggcggaacaccgggcgaagagcag

SEQ ID NO: 194233 - RNA, 57 nt, Homo sapiens
gagagagggcagggcggacgaccggaaagggcgggcagcagcggcgcacaaaagcag

SEQ ID NO: 194234 - RNA, 39 nt, Homo sapiens
gccaacacacaccggccagaaacagggcaaggagcggag

SEQ ID NO: 194235 - RNA, 80 nt, Homo sapiens
gacggggcggggcgggcgcgccgccggccacgaccccgccgagggcccggaccccgaaagacggcagagaagcaagcgaa

SEQ ID NO: 194236 - RNA, 78 nt, Homo sapiens
cgcggaaaggaaacccggccggcaaagcaccaggcacagcaagcgccgaaagaccagggaaaaaaccacaacaaccgc

SEQ ID NO: 194237 - RNA, 75 nt, Homo sapiens
gaaacgggcgaagcgacgagccgcgaggagccggagccgggcaggggggcacgccagccccacgccaggggagca

SEQ ID NO: 194238 - RNA, 35 nt, Homo sapiens
gggccgggggagaccgcagggagaccaaagccacc

SEQ ID NO: 194239 - RNA, 75 nt, Homo sapiens
gacacgcaggcccgagggaaccccggagccggcacagccgccaaaggcagggaacacagagaccccaccgcggcg

SEQ ID NO: 194240 - RNA, 52 nt, Homo sapiens
agaccgcgccagcgccacgacacaaagcacagcagccgggccgagcagccgg

SEQ ID NO: 194241 - RNA, 65 nt, Homo sapiens
gccgagggcaaggcgccagaccaaggaaacggaacgccaagcgaagaagaacgaaacggaagcac

SEQ ID NO: 194242 - RNA, 75 nt, Homo sapiens
ggcggaggaggaggcgagaccggaacaggcaggaagacgccgggccacacaaggaggaagacaccaccggacacc

SEQ ID NO: 194243 - RNA, 54 nt, Homo sapiens
ggccggaagcaccaggacagcgcgccgggggcccggaaagggacgcgcgcccag

SEQ ID NO: 194244 - RNA, 80 nt, Homo sapiens
aggagcaaccacccagccacccgaccacacacaccaggaaaaaggacgagcaggcaggcaccagacccccaaacagcagc

SEQ ID NO: 194245 - RNA, 76 nt, Homo sapiens
ggagcggaggaaaggcgcccgggcgggggaagaaggaggccggggaggaagagagcaggggggcgccaggcacccg

SEQ ID NO: 194246 - RNA, 77 nt, Homo sapiens
aaagaggccacggaagacgacagcgaacgaacaaaggcggaaaaacaaggaccaacaccaaggaccagccaccgaac

SEQ ID NO: 194247 - RNA, 55 nt, Homo sapiens
aaaaggacaaaccgcaaaacagaacagcagacgacaaaggaggcagccgccacag

SEQ ID NO: 194248 - RNA, 79 nt, Homo sapiens
ggagaggcagcgccagcaacccagccgccggccgcgggccccgcgccagaaaagaagagagccagcaggaacaagcagg

SEQ ID NO: 194249 - RNA, 83 nt, Homo sapiens
cgggcccgccccggccgcggccgggcccaggccaggcagagcagcccaccagggaggggagggggggaggcgcaccccgcgcc

SEQ ID NO: 194250 - RNA, 82 nt, Homo sapiens
gccaccgccccggccgcaaaccaccaggaagccggaaaggcccgcacggaccacggacgagcaggcaggcagggccgaagca

SEQ ID NO: 194251 - RNA, 79 nt, Homo sapiens
gggggaggccgcaccgcagcgaggccaggaacccggggagaccccgacgggaggccgagccccaaggcacaaaagagga

SEQ ID NO: 194252 - RNA, 58 nt, Homo sapiens
gaaggagcccaccaccagggagacagacggcaggaggggggagaagaacagccaagca

SEQ ID NO: 194253 - RNA, 80 nt, Homo sapiens
caccggcaccgagagcaggagcggcagggcgggccgcagccaccaggcagagacagagggagcacaggggaggaagaaca

SEQ ID NO: 194254 - RNA, 63 nt, Homo sapiens
cacgccagcagcgcgacggcagaccacagaaagagcggccgaccaccaggcacccacggcacg

SEQ ID NO: 194255 - RNA, 56 nt, Homo sapiens
gcgggcgcgcgagcagccgccggcaggcgcgagaggccgggaaacgcaagcaagac

SEQ ID NO: 194256 - RNA, 72 nt, Homo sapiens
gagaaaccggaggacccgccgcaagccggcaccgggccggaccaacgcccaaccaagagccaagggcacaaa

SEQ ID NO: 194257 - RNA, 76 nt, Homo sapiens
cccaacagccccgcggccacagcgcaagggacaagcaaggggccaaggagccaaggaggaaacccacaacagagga

SEQ ID NO: 194258 - RNA, 79 nt, Homo sapiens
aaggcagacacaccgaaaaggcgggcagccaaggcaggcgagaagaccaccgggccacagcacccccaccgccaacacc

SEQ ID NO: 194259 - RNA, 73 nt, Homo sapiens
ccgcccgccgccgggccacgccgaaccgagaccacgccaccaccgaaccgcccccgggaagccaagaccacga

SEQ ID NO: 194260 - RNA, 63 nt, Homo sapiens
accagaaggggagaaggcaggcaccacaaaaaggacagggacagaaaggagaaccaacaggcc

SEQ ID NO: 194261 - RNA, 50 nt, Homo sapiens
aagccgaagaaacacagaaggcgcgcagggggacgagcgggcggacacca

SEQ ID NO: 194262 - RNA, 54 nt, Homo sapiens
ggccccgccgccccagacaggcccaaaaacgcgacggcaacacaaggagcccaa

SEQ ID NO: 194263 - RNA, 75 nt, Homo sapiens
gcagcaggcccgaggcgaccacccggacggcggcggggcggaggggaggaagacacggccagccagaccgaaacc

SEQ ID NO: 194264 - RNA, 109 nt, Homo sapiens
cggaaaaggagcaccccaggcgagcagcaggcacaccgcagcaaggggccgggccgaggccacgggcaagcccgggagggaaagccagaccgccaaccggaagaggaac

SEQ ID NO: 194265 - RNA, 77 nt, Homo sapiens
ccgacagccgcagaacgaggcaaaacccaacgaggacgggggaaagaaggaagggaaaaaaaccaaagcaggacagg

SEQ ID NO: 194266 - RNA, 72 nt, Homo sapiens
acagggaagcaaagcgcaacagaaacagagagaacacaacagcaggcagcccgcccagcggcacgccacccc

SEQ ID NO: 194267 - RNA, 80 nt, Homo sapiens
ggacggaccgagaccggaccgagagcggaccgagagcgcgaaacgcacgagaagaccgggccagcgcagcgcacggcggc

SEQ ID NO: 194268 - RNA, 85 nt, Homo sapiens
gccaaccccggaagccggaggaacgggcccgcaagcgcaccgacaggcccaaagcccagccaaggacccgaaaaacgagccacac

SEQ ID NO: 194269 - RNA, 76 nt, Homo sapiens
cgacgggaaacacacggaaggggcgagagacacaaaaggagaccgaacaccaaagacccacgcagccacccagccc

SEQ ID NO: 194270 - RNA, 71 nt, Homo sapiens
gaagagaccgaacaccgaggagacccggacagacaccagggagagaagaagccagacagagcaaacaagga

SEQ ID NO: 194271 - RNA, 78 nt, Homo sapiens
aaggaccaagaaccaggacaagaacccaaccagcagcaaaacaccaaggaaagggagcagcaaccccagagcagagcc

SEQ ID NO: 194272 - RNA, 75 nt, Homo sapiens
acacgggccaagggagcgaaaagaacccccaaaaggacaagggaggcgaggacggacaaaaggaaacggacggga

SEQ ID NO: 194273 - RNA, 74 nt, Homo sapiens
gcagaaggccgggcacgagcagaagaggcccagagggaagacagcgaggcacggaaacacagacccccagaaga

SEQ ID NO: 194274 - RNA, 81 nt, Homo sapiens
gaacccaccaaaccaacacccagccaaggggcaggagagaagggagcgaacacagcgcagacgggacacggccggccagga

SEQ ID NO: 194275 - RNA, 82 nt, Homo sapiens
cgcggcagccgcggaccaccgccgccagggaacaaccaaagaggaggaaaggacgagcacgaggccgcagcgaggcaccccc

SEQ ID NO: 194276 - RNA, 65 nt, Homo sapiens
gggcggcggggagcacccggggcaggaggccccgagccgggccccagaccgccggagaagcagag

SEQ ID NO: 194277 - RNA, 64 nt, Homo sapiens
gcgaagaccaaaggaaggaggagcaccaccaaagagcagcaacagcgcgaagcggacaagcaca

SEQ ID NO: 194278 - RNA, 78 nt, Homo sapiens
agaaggaagcggcgccgaaaaaaaggggaaggcccagaggaagacaggccaccacacccgagccggcgaaggcaccga

SEQ ID NO: 194279 - RNA, 81 nt, Homo sapiens
cagcgcggccgcagcagcccggaaaagccgggccacagaagcaccaccacaagccacaccaacaaacgaccccgaccacag

SEQ ID NO: 194280 - RNA, 47 nt, Homo sapiens
cccggggccccacaccaacggaagaaacaagcccaggacgaagaaaa

SEQ ID NO: 194281 - RNA, 69 nt, Homo sapiens
agccaaaaacgagaaggggaaaaaacacaggacacgcggcagagagggacgccaaagcgggcgaaaggg

SEQ ID NO: 194282 - RNA, 75 nt, Homo sapiens
aggcgcgccgcacccggacggaccgccacgcgcccgggagacgcccgcgccgccgacagaagcgaaggggacagg

SEQ ID NO: 194283 - RNA, 81 nt, Homo sapiens
gagagaccacggaaaaggaacagagccaaaccagaagaggagggcccagaagaaaaagccacagaaagcccgccccagaca

SEQ ID NO: 194284 - RNA, 67 nt, Homo sapiens
ggggaaagacccagagaagagacgagggcgggagagacgacaaacaaaaagcgagaagggggacggc

SEQ ID NO: 194285 - RNA, 69 nt, Homo sapiens
gaagaagccacgccagagcgaaggccgcacacagcaacgaaaaggggaggggccggagagggcggaggg

SEQ ID NO: 194286 - RNA, 70 nt, Homo sapiens
gacggcccaaaaccagccgacaaagagggggcccaagaaggacccgcgggacgagcgggaggggcggcaa

SEQ ID NO: 194287 - RNA, 83 nt, Homo sapiens
caccacgccagccgcaccagccgcccaagccgcacagccgcggcggcagcagcaggagaggcggaggcagggcgagaccgacc

SEQ ID NO: 194288 - RNA, 75 nt, Homo sapiens
accaagaggagcggagaaccaggaaccgcgcagggccgcacccagaccggcccaagaaggaacccagaagaggac

SEQ ID NO: 194289 - RNA, 70 nt, Homo sapiens
agacgccagagggacaacaaggaggaggccagaaagagaaccggccgagcaggccgcggcagagccaacc

SEQ ID NO: 194290 - RNA, 124 nt, Homo sapiens
gggacaacaaccagcacggaaaacacaggagcacccggcgcggaggaggaggaggggggagaacacaaaagcacaaccagcagcaggggcgcacgggagccagaggaacccccccccaacagcg

SEQ ID NO: 194291 - RNA, 67 nt, Homo sapiens
ccgaaaaagcccaaacagacaggcacggaggaagcaggaaggaccacccaaggcaaaaaccccccac

SEQ ID NO: 194292 - RNA, 68 nt, Homo sapiens
ccccgaagggcacaccggagaaggagcgggaggacccaggggggggcagccgccccaagaagccaaga

SEQ ID NO: 194293 - RNA, 73 nt, Homo sapiens
aggaggagaagaggaggaagaaaagggaggagacaggacccaacgacaaaagggacaagagaaaaaaagggcg

SEQ ID NO: 194294 - RNA, 60 nt, Homo sapiens
ggagcccgcagcccgccggcgcgccccacgggccaggagggccccgggaccaaggacacg

SEQ ID NO: 194295 - RNA, 72 nt, Homo sapiens
gcagcgaggagagcacaggaaggccagggaagccggacgccgccgggaggggcaaggcacacaaggaacaaa

SEQ ID NO: 194296 - RNA, 65 nt, Homo sapiens
cggcccaacccaccggcacccaggaacacgcccccagcaccagacccagcaaccaaccgggcacg

SEQ ID NO: 194297 - RNA, 57 nt, Homo sapiens
ggggggggcaaacccgagagaacgggagcaaaggagcagcaaaagggggacaagcca

SEQ ID NO: 194298 - RNA, 74 nt, Homo sapiens
gggggacacccacaggccacaacgcacacgcccccgccaaggccagcgcgcaggcccggaggagcgggaggcca

SEQ ID NO: 194299 - RNA, 74 nt, Homo sapiens
gacgaacggcagacggaaaccagacaccagacagcaaccagccgcagaccggcaaagcacagggaagagccagc

SEQ ID NO: 194300 - RNA, 110 nt, Homo sapiens
gcaggagagcagcgaaggaggccaagcacacgcgaggacagaccgcaaaagaagaggggacaggagagccaggcgaaccgggcaaaaagacaggcccaagggaggaggga

SEQ ID NO: 194301 - RNA, 68 nt, Homo sapiens
caacccaggcccaaacgcaaacgaacgccagcgacgcgcacaaaacaaacagaaccccacagccgagc

SEQ ID NO: 194302 - RNA, 73 nt, Homo sapiens
cacccacagaccgcagcagagagaggaccgggcacccggagcggcacagaaccccaccccaggagccgacccc

SEQ ID NO: 194303 - RNA, 87 nt, Homo sapiens
gcacgccgcgcagcccggccgccggcccccaacagcgccggccaggcagagcagcccaccagggaggggagggggggaggcgcaccc

SEQ ID NO: 194304 - RNA, 75 nt, Homo sapiens
aacagacgagccacccaaggagcgaagaaaccgcaaaggggagaaaaacccgaacaccagggagaagcaaagacg

SEQ ID NO: 194305 - RNA, 111 nt, Homo sapiens
ggacgaggccagacaacacaacacaaggcagccacaggccaaaacagagacagagggcggcgggcggaacgccgaacaagcagaagggggcgccggcggggccgccagaag

SEQ ID NO: 194306 - RNA, 52 nt, Homo sapiens
aaaccagaaaccggccggagagagaaaggagaacagagaaagccaaaaaacc

SEQ ID NO: 194307 - RNA, 82 nt, Homo sapiens
caagcgagcgccgcacaaaaagcagagaggcccccagagcaggagcaggaaaaaaacagacgggaaaaacaagccgaaccag

SEQ ID NO: 194308 - RNA, 57 nt, Homo sapiens
acgcacagaggagagccgagccaacgcccgggagcgccccagagacgcggggagcgg

SEQ ID NO: 194309 - RNA, 73 nt, Homo sapiens
acgcagggcgcccccggcgggggaagcgggccaggaaccagcccggcagaaggccaccaggcacgacccaccg

SEQ ID NO: 194310 - RNA, 77 nt, Homo sapiens
agcaacccgaccgagcccaacaggcagcagaacgcgaacacgccaagagcaccagaggaagccaagaagaaaaagga

SEQ ID NO: 194311 - RNA, 71 nt, Homo sapiens
agaaaagaagaagaagaagaaggccagggggccggggaaaggacaagcggacaacgccagaaaacgaaaga

SEQ ID NO: 194312 - RNA, 85 nt, Homo sapiens
ggagcgggccaggcgcgcccgagcaaaaggggacaagcaaccgccagccccaaccaccacagaccaccagccgcaccccaacacc

SEQ ID NO: 194313 - RNA, 81 nt, Homo sapiens
gcacagccacgcagcagaccccgaccgccgcgcccggaggaagacgggacagacagagaagcacgggagcaggcaccagca

SEQ ID NO: 194314 - RNA, 85 nt, Homo sapiens
acgcagcacgaccccaccacaacgcccacgacgccaggggccgacagcgcccaggcgggcagaggggccagcagggagccccaac

SEQ ID NO: 194315 - RNA, 79 nt, Homo sapiens
ccggacccagcgaccggcgacccagcccggccccaaggcccccgaagagaaagaaaccggaacagcgggaagcaggacc

SEQ ID NO: 194316 - RNA, 66 nt, Homo sapiens
caacgagaaacccaaaccgaaaaccaggacgccacaggcacaaaaggaaagcggaccaaaccaaac

SEQ ID NO: 194317 - RNA, 78 nt, Homo sapiens
cagcggagaacgcggcaaagcgagaggaggcccagaggcccgccccacggggaacagcaggccaaaccgcagacacca

SEQ ID NO: 194318 - RNA, 73 nt, Homo sapiens
gggccccccacacccgcaggaagaccgcaggaaagcaggaaggcaagaaagccaaggacgaaacccacacgga

SEQ ID NO: 194319 - RNA, 34 nt, Homo sapiens
acggggccacgccgggaccagccggccacaccaa

SEQ ID NO: 194320 - RNA, 70 nt, Homo sapiens
aagacgacgaaggagcagccagaaagaagaggccacaagcaagaaccgaagcgcccaacagccaaacgga

SEQ ID NO: 194321 - RNA, 71 nt, Homo sapiens
accccagcggcccaagaaacaaaaaaaggaaacacacaaacgcagagcgcgcacccaggcggaagagggcg

SEQ ID NO: 194322 - RNA, 79 nt, Homo sapiens
aggggcacgcggcccgccggacccgaagacgagggccggaggaaacaggcgaacaagaggcgccagcgggcgcgccgga

SEQ ID NO: 194323 - RNA, 76 nt, Homo sapiens
cccccaccccagacacacaaaaggggcaaaggagcagagaacgacaagccacacgaggacagcccgcaacaccacc

SEQ ID NO: 194324 - RNA, 68 nt, Homo sapiens
ccggggaaaagggaccaagacaaggacaccaaaacaacggcaagcggagaagagcaaggccgaaccga

SEQ ID NO: 194325 - RNA, 74 nt, Homo sapiens
caaaggggggaagaacaagaaagccaacaggcagaccagagacagcgccacgcacccggggagcagaccacgcc

SEQ ID NO: 194326 - RNA, 74 nt, Homo sapiens
acaagcggggaaacggcaaagcgcagcccgcagacagaggggcgacgaccgcacaacagaaagcccaaaagcaa

SEQ ID NO: 194327 - RNA, 81 nt, Homo sapiens
acagagaaacaccaccaagaggggggaaacaaccaccgacaccaagcaaccacgagagaaggccaggagaacagacacgcg

SEQ ID NO: 194328 - RNA, 68 nt, Homo sapiens
gacagagaggggaaaccccgaaaggggggcagggagagaaggggacccacagaaagggcccagcgcca

SEQ ID NO: 194329 - RNA, 81 nt, Homo sapiens
gaaggaacgagcgccgacccagaaaggcgccaacaggaccagagcaaaggagggcagacgggccccggagcaccaagcggc

SEQ ID NO: 194330 - RNA, 40 nt, Homo sapiens
gaaggcacggaaagagagccgggagaagcaacagacacga

SEQ ID NO: 194331 - RNA, 89 nt, Homo sapiens
ccccccccagggccaggcgccgccagaacggcagaagccccagaggagcccgaaacccccaggcgggcaggaaggagagccccagcgag

SEQ ID NO: 194332 - RNA, 65 nt, Homo sapiens
ggcacagagagggccgggagcgcgcagccaggccagcgcgcaggcccggaggagcgggaggccag

SEQ ID NO: 194333 - RNA, 66 nt, Homo sapiens
cgaaggcgggcggcagaggcgacaggacaccccagcgaaggaccggggacaaccacgccagggggg

SEQ ID NO: 194334 - RNA, 60 nt, Homo sapiens
ggacaagcaaaaaaaaccgccccgccagcagaaggaggaacacagacaaccagggacaca

SEQ ID NO: 194335 - RNA, 78 nt, Homo sapiens
aggaaaaggaaaaaacaaggggaagacccaaggaaccaggcgaagacagagagaagggggaggacgcagccagaaagg

SEQ ID NO: 194336 - RNA, 68 nt, Homo sapiens
ggagaacagccggcacaccagagaaaacaacaagggcacaaagcggaagggagcagagacaaagaacc

SEQ ID NO: 194337 - RNA, 91 nt, Homo sapiens
ccgccccagggaaccgcacagaccccaagaagaagcggaagaggagccgcggaaccaagacacaaggaacagaagacaggaccaggaagcc

SEQ ID NO: 194338 - RNA, 84 nt, Homo sapiens
aaaagacaaacgaagcacaaaccaggccacgaagacggcaaggaggaaaggaagaggaagacggcaagaagcgaaaaagacgaa

SEQ ID NO: 194339 - RNA, 72 nt, Homo sapiens
gcagcaggacaacgagccacggaggcggagagaggcgccaagcccacgggcgcaccaacggagagccagagc

SEQ ID NO: 194340 - RNA, 49 nt, Homo sapiens
ggagaaagccccgggggggccgaagaagccagggggaggaaagcagaca

SEQ ID NO: 194341 - RNA, 73 nt, Homo sapiens
cgggcggaagacaggccacccagcggggagcacggcgagcagccaggccaggagagccggccaggggcaaagg

SEQ ID NO: 194342 - RNA, 76 nt, Homo sapiens
acagagccgggagcagcagaccccaacccagcggccaaggagcaggacccggagggacaacaaagagagaggaggg

SEQ ID NO: 194343 - RNA, 89 nt, Homo sapiens
ggaagcagaggaagagaaagaaccacaccaagagacccaagaggacgaaacaggggccaccacagagcccgcagggacacagcagaaca

SEQ ID NO: 194344 - RNA, 81 nt, Homo sapiens
aggcaaccccaggcaagaccccagacaaagggagccaaaggaaaaaagaccccagacccgcagaaaaccacagcagcagag

SEQ ID NO: 194345 - RNA, 75 nt, Homo sapiens
caaggaagcaggccagaggacacaaaagagggcacacccccccagggccagcacaggaaacacaagcgggaagcg

SEQ ID NO: 194346 - RNA, 81 nt, Homo sapiens
ggcccgcagcccccgccggccgcccaacaccgaacaccgagggagaagaccaaagaagagagagcaggaccaccaccgccc

SEQ ID NO: 194347 - RNA, 58 nt, Homo sapiens
ccagaccgcagaacccaaaggcggcacagaacagaggggacaggagaagcggaaacca

SEQ ID NO: 194348 - RNA, 57 nt, Homo sapiens
gagagggggggaccgaccgcaacagaacggacccgccagaggagcagccaagaagcc

SEQ ID NO: 194349 - RNA, 69 nt, Homo sapiens
ccgccggcggccgaaagagcaacaaacaccgggccaaccagcaccaagcgccaggacagcaccggcagg

SEQ ID NO: 194350 - RNA, 75 nt, Homo sapiens
cgacccaaccagccaaggacccacgggaacagaacgggggaaggacggggaaacagcgaacagccaccccagaag

SEQ ID NO: 194351 - RNA, 65 nt, Homo sapiens
aggccgagccccggcggcgcccgggcccacgcggaacgacggggcgaggaaggagggccccggag

SEQ ID NO: 194352 - RNA, 85 nt, Homo sapiens
ccgggccgcaggcagcccgcggcagcaggacacaggaaaccccccaggcaagaggcgcaggaccgggaagaccaacaaacgcacc

SEQ ID NO: 194353 - RNA, 79 nt, Homo sapiens
gggagcggggccccacacccccccggggggggccccaggggcgccacagccgaggcagcccggggggccccccgagcgg

SEQ ID NO: 194354 - RNA, 64 nt, Homo sapiens
ccggaaaaggaacaaagcaaccagaacaaagacaggagggcaggaaggacgaccaagagccacc

SEQ ID NO: 194355 - RNA, 97 nt, Homo sapiens
cgagcggaggagggaggggagaggggcaggacgcagcccgggacggccgaccccgccccccgcagcccccgcaggcgggaaagaggaaagaagacac

SEQ ID NO: 194356 - RNA, 60 nt, Homo sapiens
acagaccacagccgcgcgcgcagggggcgcgcccgcaagcagacgaccgaagacccgccc

SEQ ID NO: 194357 - RNA, 78 nt, Homo sapiens
gagcgcaggccccgaccgaggaaccgggcagcaggcggggaggggcagggccagcccgccggacggggggcaccgagg

SEQ ID NO: 194358 - RNA, 78 nt, Homo sapiens
gaccggggaccccgccgaagagggcaaacagaagacgggcaaaagagcggaagaaccaacgacagaagacggagccga

SEQ ID NO: 194359 - RNA, 75 nt, Homo sapiens
aaaaagcagccggagacaggcgagaggaagacgacgaggaagagcccgccgaaggggaacacccccgcgaacagg

SEQ ID NO: 194360 - RNA, 54 nt, Homo sapiens
gccacggcaccggcggggggcacgaggaaagcgacccgaccccaggacaagacc

SEQ ID NO: 194361 - RNA, 85 nt, Homo sapiens
gccgccgcccgacccagggcccgcgggccaggagagcgccggcggggcagcggggaagaagaaaaggaaccgaggccccccggcg

SEQ ID NO: 194362 - RNA, 61 nt, Homo sapiens
gcacccacagcagagcgcaggaaagacaagccgggagcagacaagagggcaacgcggggcg

SEQ ID NO: 194363 - RNA, 43 nt, Homo sapiens
ggagaccacagcccgccgagcagagcccgccaaggaacccgcg

SEQ ID NO: 194364 - RNA, 78 nt, Homo sapiens
cgcggcccgcgggccccgggcccgagccgcaggcgccacggccgggccacggaaccgcccagccccaagccccgccac

SEQ ID NO: 194365 - RNA, 63 nt, Homo sapiens
cggggcccggggaggccccaagaacacgacccccgaggaagagcaaccgccgcaagccgagcc

SEQ ID NO: 194366 - RNA, 75 nt, Homo sapiens
aaggccaccgcacacaccaacaggcagaaggaaggaagaacagaagggcccggccagggagaaccccccggagcc

SEQ ID NO: 194367 - RNA, 75 nt, Homo sapiens
agaccaccgccgaggccgccggagggcaacaacgcggccaccagagacaccaaagcgggaggggcccgccccgca

SEQ ID NO: 194368 - RNA, 66 nt, Homo sapiens
acacaccggagagcacgagaaggaaaagcgcacgaggagcaggaaccgaggaggaacgcccgaaaa

SEQ ID NO: 194369 - RNA, 76 nt, Homo sapiens
gcgccgcggaaccgaagccagcaggacaggcacacccgggcagccccagcccgcagaagcccagaacaagcacaga

SEQ ID NO: 194370 - RNA, 85 nt, Homo sapiens
aagcagccaccagcagcccccagagcgggaccacagcgggacgacccgggacagcccacggggcagaccagcgaccaccggcaca

SEQ ID NO: 194371 - RNA, 78 nt, Homo sapiens
gcagagcgccggaaggccagaagcagggccgagcaacacaggggcgggcccaggcccagcccgcagggcggacgggaa

SEQ ID NO: 194372 - RNA, 58 nt, Homo sapiens
aagcccacccagaaaaaggcccgggacccaggaaccagcaccaaaaagcccgggcacc

SEQ ID NO: 194373 - RNA, 77 nt, Homo sapiens
gagaaagaaaccagaggaagaggaaagaaagaagaggagggaaggccccagcaccaggacccgggaacccagaacag

SEQ ID NO: 194374 - RNA, 72 nt, Homo sapiens
cgggccgcaacgccacgacagaaggcgccaggcgggaaaccggcccagcggcgaagagaaagcggaaacgca

SEQ ID NO: 194375 - RNA, 74 nt, Homo sapiens
ggcaccgcggcacgccccccgggccgggcggacaaacacaaggcgccgcaaaaaaaaacgacaaagaagaggag

SEQ ID NO: 194376 - RNA, 77 nt, Homo sapiens
aaccaaaccagcggaggaaggaggccgaccaaggacgagaccaaccccaagacccagaacaggaagcagaacgggcc

SEQ ID NO: 194377 - RNA, 72 nt, Homo sapiens
ggagcgcgaagacccggggacaggcagcgcagcccaggaggcagcaccaaggaggaaaaacaggggccgaaa

SEQ ID NO: 194378 - RNA, 68 nt, Homo sapiens
aaagacccaaagccaaacccagcagccagcccaaggaagaccagccacacgcaaggggaaggcgaggc

SEQ ID NO: 194379 - RNA, 67 nt, Homo sapiens
aacgacagaggcagacaacacaaaaggggaaagaccaggagaaggcggggaggaagacgacaacagg

SEQ ID NO: 194380 - RNA, 77 nt, Homo sapiens
cgcgggacccggagcaccgggccggcggacaggagggcgcggggcagccagggggggcgaggaaccgcggggcggca

SEQ ID NO: 194381 - RNA, 73 nt, Homo sapiens
gaaagacccacaccaagagcccagaaccgggacaacccagcaaacaggccagacccgacaggagcgacaaaca

SEQ ID NO: 194382 - RNA, 81 nt, Homo sapiens
caaagccaccaccaaaaggcaaccaaccgggagagacccaggcaaagagaagccgcgcgagaggagccaaaggcgaggaga

SEQ ID NO: 194383 - RNA, 70 nt, Homo sapiens
cggagagaacgcggaaggagacggagaagaaaaggagaggacagccgcagacaggagccgaaagccacca

SEQ ID NO: 194384 - RNA, 73 nt, Homo sapiens
cacacagaagcggaagcgagccacgaaacacaaggaaagcgacgacggccggaggaacgaaacagcaaggaga

SEQ ID NO: 194385 - RNA, 52 nt, Homo sapiens
cagaagagaggccagccgggaggacacacaagcggagagacgggggcaccag

SEQ ID NO: 194386 - RNA, 80 nt, Homo sapiens
gcgggccgggcccgaaccacgaccccgccgcggcccccgcaaaacaaggagcgccaaggccagcgccacacacgagccag

SEQ ID NO: 194387 - RNA, 61 nt, Homo sapiens
gcgaccccagcacggcaaagcccggagacaagcgaaccccgagcccccggggcaaggccac

SEQ ID NO: 194388 - RNA, 71 nt, Homo sapiens
ccgacgccaggcagcgcccccaaacggagggccagacaaggggaacacaagaggagagaaggggaccgcag

SEQ ID NO: 194389 - RNA, 53 nt, Homo sapiens
agcccgcaacagacgacggcgcccgcaccaagagagaaagcaagccagaagcc

SEQ ID NO: 194390 - RNA, 78 nt, Homo sapiens
cgaagaagaggaagaacgaccagagcgacccgagcagcgcagaccccgaccgcgcgaagcggccaaacccccacccac

SEQ ID NO: 194391 - RNA, 62 nt, Homo sapiens
cgagagcaccgcgccagacaggacccaaagacaggaccacgcaccagcagagaaggaaagca

SEQ ID NO: 194392 - RNA, 76 nt, Homo sapiens
ggcagcgcaaccacgagacggccccaaggccgaggcagagcgagaccagccacccagcccgcccggaccacagacc

SEQ ID NO: 194393 - RNA, 71 nt, Homo sapiens
agccaggagaggcgggccagcggagccgggacggagcaccagccagcagaacccgcggagagggggcagca

SEQ ID NO: 194394 - RNA, 79 nt, Homo sapiens
gcgaggacaaagagaggccccagaaacaaacgggggaagaagagcgcaccgaaggcacaagggaaaccagaacaaaagg

SEQ ID NO: 194395 - RNA, 80 nt, Homo sapiens
acgacgccagggggacacacgacggcccccggagacaccgccagagacacggaagccggcccaagggggagcacaaagag

SEQ ID NO: 194396 - RNA, 78 nt, Homo sapiens
ggaaggacccccgccggaagcgcagcccggccgggccgccgcccccggggaacacaggaaccaggacccaaggacggg

SEQ ID NO: 194397 - RNA, 73 nt, Homo sapiens
ccaaggagaaggcagcgccgacacccgacggccacgaacccgagggggaaggagaaaccaagagccccaaaga

SEQ ID NO: 194398 - RNA, 53 nt, Homo sapiens
aaacagaaagaaacgacaaggagcaggcgaacaaggaccccggacccagcgac

SEQ ID NO: 194399 - RNA, 76 nt, Homo sapiens
cccagccgccggccgcgggccccgaacccacaacaccaacagcccaccaacgagcgacggccccaacccgggcaca

SEQ ID NO: 194400 - RNA, 74 nt, Homo sapiens
acagaggccaacccgaggaagcccggaaaaaagggaaggacacggacacagcaagaggcaaggccagagaaggc

SEQ ID NO: 194401 - RNA, 73 nt, Homo sapiens
ccccccggaaacgcacgcccaagccaccaaaaccggcaaaggccgcgaggaaccacgaagagacaaaaggagc

SEQ ID NO: 194402 - RNA, 115 nt, Homo sapiens
gggaacgagcgccgagcgagcaccacccaaaaaacaggagaagaccagccaaggggcccgcgccagcaagggggagaacggcacgacccccccgaacccaacgagggaacgccag

SEQ ID NO: 194403 - RNA, 74 nt, Homo sapiens
gccccgagagcgagacacagggagagaacagcacacagaggcgcaaggggaagagaaaagacagaagcaccaaa

SEQ ID NO: 194404 - RNA, 78 nt, Homo sapiens
agcacggagaccacaccaaggggcagccgccgaaggcgagagcagagaaccaccaacacaacacggcagagaacccaa

SEQ ID NO: 194405 - RNA, 73 nt, Homo sapiens
gagggcaaagaaagcggaggaggcaccacaaaaccacaagggaggaaagaaaagccgagaccacagcgagagg

SEQ ID NO: 194406 - RNA, 79 nt, Homo sapiens
ccgcagaaaaggagagccaaaacagaccagcagaaaggacccaggagcgaaacagaaacaaaaagaagcggggaaccca

SEQ ID NO: 194407 - RNA, 78 nt, Homo sapiens
aagaagaaaaaaagacacagccagccccaggaaagagggaacgaggaagcagaaaggcgaaggaacacacgacacaga

SEQ ID NO: 194408 - RNA, 98 nt, Homo sapiens
cacgggaagccgaaaagacagcagacgaagccaaggccagcaagccagacggacgacggggaaccccgccaagacaagaaagggggccgaagggggac

SEQ ID NO: 194409 - RNA, 53 nt, Homo sapiens
cccaccagaaccgaggcccccaagcagggaaagaagagacccagacgaagagc

SEQ ID NO: 194410 - RNA, 81 nt, Homo sapiens
gaggccccccagccacgggaacgcaaccggcggccccgcccagggaggcaccccgagcgaaagcacggacaccgagggcac

SEQ ID NO: 194411 - RNA, 65 nt, Homo sapiens
caagggaaggcgccccaacaaaggagcaacagacccaccgcgcacgagaaagagaagagcacagc

SEQ ID NO: 194412 - RNA, 64 nt, Homo sapiens
agcccgccgcccgacggcccccgacgcagcgcaccagaacggcaacgaaaagagacacgacgca

SEQ ID NO: 194413 - RNA, 70 nt, Homo sapiens
aacccccaagcaggaagcaaccagcagcaaaacgaaagcggacaggaaagaaacagcggccccccagaaa

SEQ ID NO: 194414 - RNA, 73 nt, Homo sapiens
caggagggcgccccagggacagcaacagcggccgggaacgaccgaaacaccagggcccggcaggaaccggaac

SEQ ID NO: 194415 - RNA, 75 nt, Homo sapiens
agccggcagacgcgaaggagaaaaagcaggggaagcagcgcacgccagcgaaggagccggaaggggcaccagcag

SEQ ID NO: 194416 - RNA, 78 nt, Homo sapiens
gaagcaaccggcgccaccagcaaccagagggccagagggaaggacagacccacaggaccgcgaacaaggaggccacaa

SEQ ID NO: 194417 - RNA, 80 nt, Homo sapiens
gggaaccaaacagcagagcagaacaggcaagggccaagacaagcccagagggccgaggaacggcccgcaagggagacacc

SEQ ID NO: 194418 - RNA, 77 nt, Homo sapiens
gacaccaaagaccggacccgcggccggaaaaggcaaccaccacgcccagaagagaaggacaaacccaagaagccaag

SEQ ID NO: 194419 - RNA, 77 nt, Homo sapiens
gaagagaagcacgaaagcgggagagggaccggaacggcggcgacaaggggcccgaacagagggggcaaccacagcgc

SEQ ID NO: 194420 - RNA, 77 nt, Homo sapiens
ggccgggacggaggacgcgcagaccacaagcccagccaaggacagagaagacggacagggcaggaaacaggaagaaa

SEQ ID NO: 194421 - RNA, 76 nt, Homo sapiens
ggaaggagaacaaagggagaagaggaagcccgacaacgaaggaaacggaggaaaacaacagaacaacaaaaggaaa

SEQ ID NO: 194422 - RNA, 73 nt, Homo sapiens
acggaagacgaaaagacccgccaagaagaaagagcggggaggcaagcaggggggcaaaggaaagaaggcagaa

SEQ ID NO: 194423 - RNA, 80 nt, Homo sapiens
gaagaaagaagaagaaagcggcagaagagagcagaaaacaaaaaaagggagaagaagggcgacacaacagggaagaccgg

SEQ ID NO: 194424 - RNA, 82 nt, Homo sapiens
ggcggaggcccccgggcaagaggcgcaaacaagccaacccaggaggaaaaacggcaaccagggaccaggaggaaggagcgga

SEQ ID NO: 194425 - RNA, 55 nt, Homo sapiens
cggaggaagaacgccgccaccagccaccaccaaggcggggggccagagagcacgc

SEQ ID NO: 194426 - RNA, 69 nt, Homo sapiens
agaggacgggaccaggcgaagcggccgagcaggcgagcgaacgacggagcgagaacccgagcagcgcca

SEQ ID NO: 194427 - RNA, 67 nt, Homo sapiens
gacagccagagacagcaaaaaagaaccccgccaaagccaaacgaaaggcagggacaaaccccggcca

SEQ ID NO: 194428 - RNA, 74 nt, Homo sapiens
gcggcggagacgcgcggcggagggcggggacagcgcagagcgcgccgaccgggggacacagaaaggccagaacc

SEQ ID NO: 194429 - RNA, 76 nt, Homo sapiens
cgaagagggaaaacaaagaaccaagcacacggccgaaacggaagaagcgggaaccagaggacccccccggacccaa

SEQ ID NO: 194430 - RNA, 62 nt, Homo sapiens
accgaagcaaaacagaaggccggccaagcgggagaaagcaagcaagcagcagacggacccaa

SEQ ID NO: 194431 - RNA, 80 nt, Homo sapiens
cgccaaaaccgggacggacaagacccgggaaggaggcgacagggcgaaaccaagaggagggaagcaggcagacgcgaggc

SEQ ID NO: 194432 - RNA, 65 nt, Homo sapiens
ccgaggcgcaggggcgcgggaggaccgcgccaacaggacgaggagaccgaccaggagaccccagc

SEQ ID NO: 194433 - RNA, 78 nt, Homo sapiens
agccacaccggaccagaccccaggaaaggggaggcaggaaaaagacacaagacagcaggaccgggaccagcccgaaga

SEQ ID NO: 194434 - RNA, 56 nt, Homo sapiens
ggagaccacaaaagagcagaggaggaacaccaggcacaagaagcaggagacaacga

SEQ ID NO: 194435 - RNA, 70 nt, Homo sapiens
gaggcgaaggcgcaccaagagaaggagcggcagcaacagacaagacaaaggcagaagcagggaaggccca

SEQ ID NO: 194436 - RNA, 80 nt, Homo sapiens
gacacgcgcagggcacgcgccaagacgggcacgggccaggaaggagaaagaaccagagaaggacgggcgagcacggaaaa

SEQ ID NO: 194437 - RNA, 51 nt, Homo sapiens
agccgaacccaccgagccagggaggagcggcacgggccggcccaacaaccc

SEQ ID NO: 194438 - RNA, 70 nt, Homo sapiens
cgggagaacggacacacaaaaagacgcaccaaaggaaggcaaggggggaagagacggagagaacgaacca

SEQ ID NO: 194439 - RNA, 87 nt, Homo sapiens
cgggcgggcggcgcgccccggggccgcggggagccacggcggagacccccgccccaacgagacccaacagaggaagccgcaagaaac

SEQ ID NO: 194440 - RNA, 76 nt, Homo sapiens
gagccgaccggaggacgcggagaaccggcacagcccccgggcacagccacagcccaccggcagcgggccggcagac

SEQ ID NO: 194441 - RNA, 72 nt, Homo sapiens
aacagcccaggcacgcgcacccacccacggcagggggccccaccaccggagaagcgacgcggagagagcaga

SEQ ID NO: 194442 - RNA, 78 nt, Homo sapiens
ccgggagacacggccagacgcccccagacggcaaacccggggagacggcgaagggaaaacaaagagcggccccccaga

SEQ ID NO: 194443 - RNA, 71 nt, Homo sapiens
ggaccacacaaagcacgacacaaggggggcccccggagagacagaaccaacaccagagaagcgccgcgaac

SEQ ID NO: 194444 - RNA, 65 nt, Homo sapiens
gcacaggaccggagcggagcccccaggacccaaggccagccagccccaggcaccagcggacagga

SEQ ID NO: 194445 - RNA, 73 nt, Homo sapiens
ggaaaccccaaggccaaccagggcggaggaggacgagcgaggagcgagggaggagacaggcgccaagcagaga

SEQ ID NO: 194446 - RNA, 61 nt, Homo sapiens
aagaaagccgcgaggacaaggcaagcagacagacgccacgccgccccggccagccccagga

SEQ ID NO: 194447 - RNA, 74 nt, Homo sapiens
agagaaaaagaaggaaagacaacagaaacaagacaggaacgccagaggaccaacgggaaaaagaagcaacacag

SEQ ID NO: 194448 - RNA, 67 nt, Homo sapiens
ggggaacaaacacaccgaaccagagagaagaaagggggcccaggggggcggccccacgggaaacaaa

SEQ ID NO: 194449 - RNA, 54 nt, Homo sapiens
cagaaggagccagacagcccgcaagaaggaacgcaagcacaggaccagaaacga

SEQ ID NO: 194450 - RNA, 77 nt, Homo sapiens
caaccgcgcgcaaaaaccaccgggccaggagcccgaaacagacgagacagaagaccacaagaacccgcccgaaggcc

SEQ ID NO: 194451 - RNA, 74 nt, Homo sapiens
gcgaagccaccagaccccagaaccccgaggagacggaagaagcagaccacccggacaccacggaccaaaaagac

SEQ ID NO: 194452 - RNA, 117 nt, Homo sapiens
gaaaaagcacaaaagcaacacagggaaaagccaaccggcccgaagaacacagggggaccaagaaaggcccagggaccaaagcccggacaaggcccgagcaccaggaccgcagaaggc

SEQ ID NO: 194453 - RNA, 91 nt, Homo sapiens
gaggccggagaaacaggcgccgcgggcccgcgcccggccggacccgggcccgaggaacaacaaccgaccccgcggccgacaccagacggag

SEQ ID NO: 194454 - RNA, 71 nt, Homo sapiens
gaggggggggaaccacacgagagccgcgaccaaaggacgcgacgccaggcgagcgaacaagcgcaccaccc

SEQ ID NO: 194455 - RNA, 71 nt, Homo sapiens
cacgggcggccacacgacccacccaagcccacgaggcggacagacccgagaaaccggacagcagaggaaac

SEQ ID NO: 194456 - RNA, 78 nt, Homo sapiens
gccgaccgcgaggcgagagggggcaccggagggacaacaaaacaagacgcccggacaagaggagcaccacgaagaaac

SEQ ID NO: 194457 - RNA, 73 nt, Homo sapiens
cagccggacggggggggcggacagcgcagcgcgcccaggcccacccccaacgagaggacagagacgaggcggg

SEQ ID NO: 194458 - RNA, 89 nt, Homo sapiens
aagcaccgggcgccccaacgggcgcaggaccaggaagaaacaggcccgccagcaccgacagcaacgaaaagcccacggagacaggagac

SEQ ID NO: 194459 - RNA, 82 nt, Homo sapiens
cagaaccaagggccccggggccggcgaaggggagccgccaccaaaagcagacggaaaacccacggggaagaccacaccccga

SEQ ID NO: 194460 - RNA, 75 nt, Homo sapiens
ggaggacacaccaaacagggaacccaagccgcaacacacaacaaggaccgggcgcccgaagcaacgggagcagcc

SEQ ID NO: 194461 - RNA, 80 nt, Homo sapiens
ggaggggaagagcagaagaaggcggccacccgcccaaggggggggagggacccagaccgcagaagaccacacgaagggga

SEQ ID NO: 194462 - RNA, 79 nt, Homo sapiens
gaaagcaccaacagcagcggcagccaaggggaaaacacaaagcaaagaggaagaccaggaacgggacaggcgcacgaga

SEQ ID NO: 194463 - RNA, 77 nt, Homo sapiens
agccaggcccaaggcggaggagccgccgcggaccaccagaggccgaaaacgggagaccccagacgcaaccggcgcgg

SEQ ID NO: 194464 - RNA, 82 nt, Homo sapiens
cggcgggcgcgcccccgaaggaagccgcccgccccccaccgccgcccccccggcggcagcccccgggccacgcccaccagcc

SEQ ID NO: 194465 - RNA, 122 nt, Homo sapiens
ggaaaggggcagacacgcccagccgggacggccccaaggaccggggagaccagccccaggaagcaaaccaggagccacagcggcagggaaaaaaccagcaaccgcgggaaagacccgcggga

SEQ ID NO: 194466 - RNA, 89 nt, Homo sapiens
cggggaccgagccgggaggccggccgggccagcacccggccgagacggcggcagcagcggcacaggcacaagcggcgaccagcggacca

SEQ ID NO: 194467 - RNA, 77 nt, Homo sapiens
ggccgccaccaacagagaagacagagcaccaacgagacaacagcagcgagagagaaaagaaggaaggcaggacgggc

SEQ ID NO: 194468 - RNA, 80 nt, Homo sapiens
agacggcgcgccaggggccggaagcaccgcacaccacacccgcgccgacaggaggaccagagagagaagaaaaccggacc

SEQ ID NO: 194469 - RNA, 75 nt, Homo sapiens
gaccagccaggccccaggacgaggaagaaaagaaacaaggaaaagagcccaagagggcccaggacaacaacggga

SEQ ID NO: 194470 - RNA, 90 nt, Homo sapiens
caaccgagccagggcgggggagcacgaggaggacgaggagagccggcggcgggaggccaagcacaagagggccagggaccaggggacgcc

SEQ ID NO: 194471 - RNA, 73 nt, Homo sapiens
aaaacagaagcagaagcacagaccgcgaacagcagacccaaaccaacagcagccaaagcaaggaacaggaacg

SEQ ID NO: 194472 - RNA, 72 nt, Homo sapiens
acgcgcaccagagcagggcccccgagaaacaccggggccaggaaaaaccagaagagaaaaaacaaaggggag

SEQ ID NO: 194473 - RNA, 75 nt, Homo sapiens
cagaagaaggaagggacacaggggcaagacgccaagagaaaaggcgagagcacaaagcaccaagagccgagaagc

SEQ ID NO: 194474 - RNA, 76 nt, Homo sapiens
ggagacgcgcacaagcccaggagaaacaacaagaggaacacggagacagaagaagccaagaaggaagggcagcacg

SEQ ID NO: 194475 - RNA, 72 nt, Homo sapiens
agagggaacaggcagcaggaagcacggcgggcgaaacagggggagcgggccggagagaagagaggggcgcga

SEQ ID NO: 194476 - RNA, 70 nt, Homo sapiens
agaacaagaacaagcgggaacccacacccaagaggaaggagggccccggagcagccacaccaccgaggcc

SEQ ID NO: 194477 - RNA, 89 nt, Homo sapiens
gccagagcacacacggccaagagcgggcaccaggaagcgaaggcggcgacagacacagcaccggccccggcagcgggacgcaggacggc

SEQ ID NO: 194478 - RNA, 70 nt, Homo sapiens
acacgacagcaacaagacacggagcaaggaggaaaacacacgacaccagcagggcacgacaacgaaagca

SEQ ID NO: 194479 - RNA, 85 nt, Homo sapiens
gcacccgggcagcccggcggacgcaggagcgaggcagcgaccgaaagccgccaggggagccggaccagaccgccggagcacgccg

SEQ ID NO: 194480 - RNA, 71 nt, Homo sapiens
gacacggaccgagccccgaacaccggagcaaggcaaaccaaagcagaacaccgcgcacccacgcaacggac

SEQ ID NO: 194481 - RNA, 55 nt, Homo sapiens
gggccccaagggcagacagcggacagaaggggaccagccagaacgggcccacgaa

SEQ ID NO: 194482 - RNA, 72 nt, Homo sapiens
agaacggagggcacgagcgggccgagaccagacggcaccaacgacccagcaggacccggccggaagcgaaga

SEQ ID NO: 194483 - RNA, 62 nt, Homo sapiens
gggaagaaagcacagaaacagccgcacagacacggggaaagccccaagggagacaaagcgag

SEQ ID NO: 194484 - RNA, 73 nt, Homo sapiens
cgcccggggcagaccaggcagaaggcacaagggacaagcaacgagagcccggagccccggggagaaggggcaa

SEQ ID NO: 194485 - RNA, 54 nt, Homo sapiens
agagaggagcaagagacagaaacagccgccaggcagacgcagccgccggagggc

SEQ ID NO: 194486 - RNA, 81 nt, Homo sapiens
cccgagcgggagcacgcccccccagggcccccgcaccaggagccagaagagagaagaacacgaagaaaaaaaaaaaggaaa

SEQ ID NO: 194487 - RNA, 75 nt, Homo sapiens
accccggggaagcccggcggagcgagccggcgccggagacccaggcccaaggaaaaaagagaaaacacacacagc

SEQ ID NO: 194488 - RNA, 76 nt, Homo sapiens
cacaagaagcggaacagaagagacccgcaaaagaaaagccccgggaaaccgaagccaaggaggcacacagcggcca

SEQ ID NO: 194489 - RNA, 80 nt, Homo sapiens
ggccgaaggccgggggccagccaggccgacacccaaccgggcaggcgagacgcagagggagccagcgaccaggacgggaa

SEQ ID NO: 194490 - RNA, 73 nt, Homo sapiens
gagaagcccaacaaagccccacagcagccagaaggaaaggagccgacagggacgaggggacacccgaggaccc

SEQ ID NO: 194491 - RNA, 90 nt, Homo sapiens
gcaagaccaagaccgcaggaaggacggggccacgggagcgcggaggggccaggccgagggcccgcccggccccaggagaagaaccagccg

SEQ ID NO: 194492 - RNA, 72 nt, Homo sapiens
cgggccggaaaggaagggccaggacaccagaaaggacgagaccgaagagaaggaaggacagcgagagagaag

SEQ ID NO: 194493 - RNA, 69 nt, Homo sapiens
cgaggcggacaggacggaagccgcgaacccccgaccgggagcccacgggaagcccggggcggcgacgga

SEQ ID NO: 194494 - RNA, 66 nt, Homo sapiens
gcacaggaggaggcgaagcgccacggaaggagcggaacagccgaacagggcacgcccggagaagac

SEQ ID NO: 194495 - RNA, 75 nt, Homo sapiens
gccaggacgagcagagccccccccaccagaggacgggaggagcagcaacaggaaagcacaagaggaagagaacgc

SEQ ID NO: 194496 - RNA, 81 nt, Homo sapiens
gacgagcagccggcagcagagcgagccaccccgcagaccccccggcccagcaggcccgaaagcagcagaccaccgcaggag

SEQ ID NO: 194497 - RNA, 82 nt, Homo sapiens
aacccaacccgcagccagcgcggcagccagggcccgccagggagagagacagcggacgggagaccgagccacaccacgcgca

SEQ ID NO: 194498 - RNA, 82 nt, Homo sapiens
caggagcggcggcgaagaaggaggcaggcacgggagccgaagggagagagacagcggacgggagaccgagccacaccacgcg

SEQ ID NO: 194499 - RNA, 69 nt, Homo sapiens
cccggcccggccggggcgcgaggcgcgaggcgcagggcaaggcagagccacaacggcagggacacggca

SEQ ID NO: 194500 - RNA, 37 nt, Homo sapiens
cgggcgggcaggcaagaggcacaggccagacgaaccc

SEQ ID NO: 194501 - RNA, 77 nt, Homo sapiens
agacgaagagaggcacgcgcccggacagaaagcaagcagcgcaagcgcacggagaaggccagggcagcagagcacgg

SEQ ID NO: 194502 - RNA, 52 nt, Homo sapiens
gcgggcccaagaaaaggccacggacgaaagagcagccccggcacccaggacg

SEQ ID NO: 194503 - RNA, 91 nt, Homo sapiens
agaccccgaaaacggaagcgcagggagaaggaagaggggaaaagaaagggccgaccacccaggcggacaggcgcggaagggacacacccgc

SEQ ID NO: 194504 - RNA, 71 nt, Homo sapiens
accccaagaacccggccaagggacagagcaacgcaccccacagcaagaacggccgagcgaccaggagagga

SEQ ID NO: 194505 - RNA, 77 nt, Homo sapiens
cgcacgagaccccgagccggagcggaaaaacccggggacaagcgggggggcggcccaccggcccgcccgagcccagg

SEQ ID NO: 194506 - RNA, 64 nt, Homo sapiens
aagggcaagacaagagcggaacgaaaacggaaaacccagaaggcacgggcgaaggccagaaccg

SEQ ID NO: 194507 - RNA, 78 nt, Homo sapiens
aaagcaaggagcagcagcgagccaacacaggaacacaggggaggcggagccccaggcaaggggcgcagcccaccacac

SEQ ID NO: 194508 - RNA, 58 nt, Homo sapiens
gaaaaccaggaaaccagaaaacagggaccaacagaccgagccaccacaagaaaccagc

SEQ ID NO: 194509 - RNA, 57 nt, Homo sapiens
caaaggggggaagaacaagacaaaaagcggaggagggacacaaaaaaagacacgagg

SEQ ID NO: 194510 - RNA, 78 nt, Homo sapiens
acagaaacccgccccggacaacaaacccaagaaaccccaaagagcaagacagccaaaccgaaagacgaacagcacgca

SEQ ID NO: 194511 - RNA, 77 nt, Homo sapiens
cacgccggccacccacgcccacggccaccgaagaggccgaccaccccgagagaaggaggccggggcgcggcggcccc

SEQ ID NO: 194512 - RNA, 76 nt, Homo sapiens
agccagcgcaccacacaaaacaaaagcagaacaaaaccagccacaggggacagggacaaggaacaaacacggagac

SEQ ID NO: 194513 - RNA, 79 nt, Homo sapiens
cggacagaacaccccaggaagacaagcggagaaaggcacagcagaagaagaaacagaagaagaagagcagaggaggcca

SEQ ID NO: 194514 - RNA, 115 nt, Homo sapiens
ccccccaaaaaaaaagggaagaagaaaagcaccaaaaacgaagaggacaccccggggaagggagaaaaggaaagacacccccaaccgggaagacgaaccacgcccgaggcacaaa

SEQ ID NO: 194515 - RNA, 63 nt, Homo sapiens
gcgccgacggcgccaaacacaggagccagccgccgcgccaagaaacgcgcggccgggccgacc

SEQ ID NO: 194516 - RNA, 80 nt, Homo sapiens
cagcaacacccagaaacccacagcaagcccaggacccagaaaacagcaaagaagaagcaagaggaccacccgcacccagg

SEQ ID NO: 194517 - RNA, 60 nt, Homo sapiens
aaggagggcgggaacaaagaagaccgaggaagacccggaggcccagccacgccgcagacc

SEQ ID NO: 194518 - RNA, 73 nt, Homo sapiens
gcggcgacggccgggggaggggagacaaaccgaaaaccggagggaaaaaaggaagagaaccaagaaagaaaac

SEQ ID NO: 194519 - RNA, 87 nt, Homo sapiens
cggccgcccagagagcgggggggggaccgccggcacgcgacccccccgggcccaaacgggaggccaccgccccaccagcaggcaacg

SEQ ID NO: 194520 - RNA, 70 nt, Homo sapiens
gacccaaaacacgcggaaaacgcgagacagacgaggcccagacccaaagggcccaagcccaggaagagga

SEQ ID NO: 194521 - RNA, 82 nt, Homo sapiens
gggcaagggcggggcgagagggcagaacgccgcccggacagggggagagccagcaaccggaagcaggagaagaggagggaaa

SEQ ID NO: 194522 - RNA, 58 nt, Homo sapiens
cagaagccagcccaccgccagcagaggcaccgaaggcagagggggcgagggaggaaag

SEQ ID NO: 194523 - RNA, 80 nt, Homo sapiens
agcaacagagaacaagaggagaggaagagagcaaggacaccagcagggagagaaggcgcgcaggagagcgcagagacccg

SEQ ID NO: 194524 - RNA, 74 nt, Homo sapiens
ccagccgccgcgcccgcccgacccgccaccgccaggccaggcgcgggggcaggcagggcgcgcgggccaaggcc

SEQ ID NO: 194525 - RNA, 43 nt, Homo sapiens
cgagcgccacaaacgaccgaaaacccgcagcccaaagggcaga

SEQ ID NO: 194526 - RNA, 75 nt, Homo sapiens
acgggggaggaggcaacgccgcggacgcaaaacagaacccccccaggacagcaagaagaccagaagaagagaacc

SEQ ID NO: 194527 - RNA, 65 nt, Homo sapiens
ggaaggagcccggggaggagcggaaacaggaacagaaagacaacggacaaggcaggaagaaaacc

SEQ ID NO: 194528 - RNA, 74 nt, Homo sapiens
ggggagaggggagccgcacgccacagcgaaggcgcgagggacaagagcagacgaacaacgacgggagcaggccc

SEQ ID NO: 194529 - RNA, 70 nt, Homo sapiens
caagcagcaccgacggccagcgcccaaggaggaccagaggacgcaccagaagacagggcaaccagaagcc

SEQ ID NO: 194530 - RNA, 67 nt, Homo sapiens
ggagagggcaccccagggaagcagaaaggccagggacgcggacgcagaagacgaccaaaagccgcca

SEQ ID NO: 194531 - RNA, 64 nt, Homo sapiens
ggccccgcgccgccccacgcaccaggaaacggacccagaaaaccccaaagaaggcccccgcggc

SEQ ID NO: 194532 - RNA, 56 nt, Homo sapiens
gagggcagccccggccaggaaaaacacagggacagacagcagggaaggagacgaaa

SEQ ID NO: 194533 - RNA, 72 nt, Homo sapiens
agaacgcacagaacacccggggcggagaacggaaaagcaccaggaagcagagaggaccgcagaagggaagga

SEQ ID NO: 194534 - RNA, 80 nt, Homo sapiens
cgagagagggaagcgcccggccaagacgaccccgacgcaggccaggagccgcggacagaagccgagcacggccgagacaa

SEQ ID NO: 194535 - RNA, 85 nt, Homo sapiens
agaagcacccagccacagccaaaaagggaaggaaccgggcacccgccccggaaacgccggccaggccgaccaagccaggagccgc

SEQ ID NO: 194536 - RNA, 68 nt, Homo sapiens
ggcggagagcgcaggcccacccacagaacagaaaagggacagcccgagagagacgcagcgcaaggccg

SEQ ID NO: 194537 - RNA, 62 nt, Homo sapiens
ccggcaaaaccacacagcgaaaaggaacaagcacacagagacggggacggcaacaacaacaa

SEQ ID NO: 194538 - RNA, 76 nt, Homo sapiens
accagcacggagagaggaggccgcgagaccaggggaccaggaccccaggcacagccccgcggcgcccgagccccac

SEQ ID NO: 194539 - RNA, 84 nt, Homo sapiens
gccgacagcgccacccgccaggagcgcagccaaagagcgccccacaaaaccaagcgaggccaggccgccggaccgccaagggga

SEQ ID NO: 194540 - RNA, 79 nt, Homo sapiens
ccaaaaacgcggggccaccacccaaggaggagcacgacgaagacaggggcccacgggcggaacgccgcgggcccgacac

SEQ ID NO: 194541 - RNA, 85 nt, Homo sapiens
gaagaagacgggaacggggaacgccaagaagcggaggagggcaccgaaaaagagacgaagagccaagaaaaaggcgaagaaaaag

SEQ ID NO: 194542 - RNA, 41 nt, Homo sapiens
gggaggaggggcaggcccggcggggggcagcacagcggcag

SEQ ID NO: 194543 - RNA, 73 nt, Homo sapiens
gcacaacgggaagaaagcccgccagcaccagccagggggaagaaaaccccagagagacccggcgccgacaccc

SEQ ID NO: 194544 - RNA, 74 nt, Homo sapiens
gcggcggggcacgcggccaggcggcgacacgccaaccccgaggcccacgcggaccggcagcgccaccggaccac

SEQ ID NO: 194545 - RNA, 79 nt, Homo sapiens
gggggcggagcagacacagacagcagagggagaacgcaaggagggacaggacggaaggagcggaggaagacacaagagc

SEQ ID NO: 194546 - RNA, 81 nt, Homo sapiens
gacggccccaaacaccgggcaaagcacgaagggagaccaaagaggaaggggaccaacacagagggagaaagcagaaaacgc

SEQ ID NO: 194547 - RNA, 71 nt, Homo sapiens
gaaaaaagcagcaaacacgggacaaaaaccagaccagacccccaggcaaaccgccccgcagcaccacccgg

SEQ ID NO: 194548 - RNA, 70 nt, Homo sapiens
gcggaaagcacgcgcacagagagcacaacagggagaagacagcaagaccccgaaccgagcagacgaggca

SEQ ID NO: 194549 - RNA, 77 nt, Homo sapiens
acccgggcgccgagacgcgcgcagggcggcccgggccgcggaggcgcgccgcgagacagaagagaggggagaagaag

SEQ ID NO: 194550 - RNA, 68 nt, Homo sapiens
acggcagaagagcccgggaaaggaggacaaaaggaaaaaaaaaaagggaagacagagaggcggggaaa

SEQ ID NO: 194551 - RNA, 78 nt, Homo sapiens
ccacagcacagcagcaccacagagcaaaaaaggaggacccccaaacccggggcgggacaggccggccggcccgcagag

SEQ ID NO: 194552 - RNA, 111 nt, Homo sapiens
ggaccagagacgaagaccacgccggccgcgaccaaggaagcaagcgacgagcggggcgcagaagaagcacgcacagaggcacagcggaggacacgcggcccaggacgcaag

SEQ ID NO: 194553 - RNA, 61 nt, Homo sapiens
cggacagaccccgcaggacggaaacccacaggcacacccaacagggcagaaaagaacagac

SEQ ID NO: 194554 - RNA, 59 nt, Homo sapiens
cccgccccgccgggaggaccgcgaggccccggagaccaaaggacaccaggagaaaggga

SEQ ID NO: 194555 - RNA, 68 nt, Homo sapiens
cacccgagacccgagaccaaaagaagccaaacggggacgcaagagaaagaagcaacggggaaaccacc

SEQ ID NO: 194556 - RNA, 70 nt, Homo sapiens
gcgagcgaggaaccagaccagcacacacagcaaggagaaagccggaaaagcggaccgcgaagagagacac

SEQ ID NO: 194557 - RNA, 82 nt, Homo sapiens
aagaaccggcagcgaacaaggagaaagccacaacagggcggcaacaggggcgagaaagggagaccggaaagaagggagaccg

SEQ ID NO: 194558 - RNA, 72 nt, Homo sapiens
gccaggggggagcgcccaggcgggaagaccggacgggggcgggcaacgacacaggggcaccagagaccggca

SEQ ID NO: 194559 - RNA, 84 nt, Homo sapiens
caacgagccaacgccaggcgccgcccacagaacaggacagggaggaccaacgcaaagaggagacaccacaaaaccaacccgacg

SEQ ID NO: 194560 - RNA, 38 nt, Homo sapiens
gaggacaagaccacgagccagggacgaaacgcccaccc

SEQ ID NO: 194561 - RNA, 69 nt, Homo sapiens
gccggaagcagaccccagcagcagcccaggcgggaaaaaacgagacacgcacggagaagaggaggagcc

SEQ ID NO: 194562 - RNA, 49 nt, Homo sapiens
gcagaaggagaacgcgcaccgcaaacaacaagccacacccgggaaacac

SEQ ID NO: 194563 - RNA, 67 nt, Homo sapiens
cgaaagagccacagcgacagcccgggggaagacaaccccagagggggacacagccagggcgcaggca

SEQ ID NO: 194564 - RNA, 76 nt, Homo sapiens
aggggacagcccgcgcgacaccacccgcaagaaaaggacccaagggggcaaaggcggaaacagcagaggacaccag

SEQ ID NO: 194565 - RNA, 70 nt, Homo sapiens
accagcagcccccagagcgggaccacagacccagacacgaagcgagaggcgagaagaagcaggaaaaagc

SEQ ID NO: 194566 - RNA, 82 nt, Homo sapiens
cggagccaccggaaaacgacagaagggggagggaagcagccaagcgggcagaagaggaagccccagacacgagggcggcgaa

SEQ ID NO: 194567 - RNA, 70 nt, Homo sapiens
aggcggacggacacagacaccaagggaggccacagagacaagagagagggaaccagggcgggaacaaaag

SEQ ID NO: 194568 - RNA, 80 nt, Homo sapiens
ccggccgggcaccggaagagagcaccggaccgccgcgccccccaacgaccaggccccaacaacacgcgcaggacagcagg

SEQ ID NO: 194569 - RNA, 75 nt, Homo sapiens
aggcaaagaaaccgccacagagcgcgaagggggcagccacacaaaagggaagcgggcagaaccgagaaaaacagc

SEQ ID NO: 194570 - RNA, 76 nt, Homo sapiens
ccaaaggacacagcaacacccgaaaggcacacacaacgaccaagccaaggaccagccaaagaaagcagacccgccg

SEQ ID NO: 194571 - RNA, 77 nt, Homo sapiens
ggaagaacgagggcaacaggaagcgacaaaaacaacagagcgagggacacgagggccgaggagcccaagagaagaaa

SEQ ID NO: 194572 - RNA, 79 nt, Homo sapiens
cgggcgggacggggcaccggcggcggcgaggacggaggcgcgcagggaagcgcgagaaacaccacgcaacggcccagga

SEQ ID NO: 194573 - RNA, 75 nt, Homo sapiens
ggaccgcgggaggagacgagcgagacccgcacaccccgaagggggaaagacaaagcaccgcgcccaaggcggagg

SEQ ID NO: 194574 - RNA, 83 nt, Homo sapiens
ggccgccggccaaggaaccagccggccacaaggaagcaaccagccagaacaccccaccgaacagcaacagggggcaaagccgc

SEQ ID NO: 194575 - RNA, 64 nt, Homo sapiens
cccgccacaccgggcgccccaggcgcaaaacccgagaaagggcaaccgcgaacaagaggcgcca

SEQ ID NO: 194576 - RNA, 84 nt, Homo sapiens
cggcggaggcgggaggaggccaggaagcccagggacagccaggcagaacacagaagagaacccgaacacagcaggagcaagcgg

SEQ ID NO: 194577 - RNA, 76 nt, Homo sapiens
aggaccgggacgacggagcgaggaaggaccagcaacaaggcagagcgaacccaagcagaaggggggggcccggaca

SEQ ID NO: 194578 - RNA, 67 nt, Homo sapiens
aggacgcagaaccaccaaaagccaagaaacggaagaagggacccggggcagcacaaccgccagagcc

SEQ ID NO: 194579 - RNA, 75 nt, Homo sapiens
ccgggccgccgcgcaccgcagcgccggggcacgacacaaaaacaggaacagagacagacccgggggcccccaagg

SEQ ID NO: 194580 - RNA, 79 nt, Homo sapiens
ccgagaacagaaggaccccaacgcccaccaaagaggaaagcgaggaggagcgagcgcgagaggccaagacaacaaaaaa

SEQ ID NO: 194581 - RNA, 88 nt, Homo sapiens
acccggcagcgggggcagcagagcggagccaagagcgaagggcccgacggagcagcagcgccgggaaggaaagcacacaggacagaag

SEQ ID NO: 194582 - RNA, 48 nt, Homo sapiens
caaaaccacaggcgcccaagacccagcagcagaaaggaccaggagaag

SEQ ID NO: 194583 - RNA, 112 nt, Homo sapiens
aaagaaccgacaaccaagggccccgcggaccaaggaagaacccgaagcaccgccggaaccaaaaagaagccccagagccggggccaggagccccaagcgccccagcagcaaa

SEQ ID NO: 194584 - RNA, 68 nt, Homo sapiens
gaagaggcccagccggcccgcgggggagccccgggagccgcacggggagaaggacggcagaaaacgag

SEQ ID NO: 194585 - RNA, 89 nt, Homo sapiens
ccgcccccagccacccagcaccaccggcccgcacgccggcacagcggaaagcaagcaagggagaccaagacagagccaagaaggagagg

SEQ ID NO: 194586 - RNA, 78 nt, Homo sapiens
ccccaccagagccaagagaccacacaaagcgcaaaagcaaaggggccaaaaagcagaaagaagagagccaaaaaggac

SEQ ID NO: 194587 - RNA, 66 nt, Homo sapiens
aggaccaagaaccagagcaaccggcagcacacgaaaggcagagcaagccagagacacaacgccaga

SEQ ID NO: 194588 - RNA, 75 nt, Homo sapiens
aaggggaacacccaaccggagaaagacacggacgcaggaaagcccgagcagaaagagcccagccccaagcagcac

SEQ ID NO: 194589 - RNA, 82 nt, Homo sapiens
ggcggcggagcgcaggcccggccgacggccacacggcggccgcagggcgccggagccccccaggcacagagcgagacaccga

SEQ ID NO: 194590 - RNA, 70 nt, Homo sapiens
aacgaccccacaggaaaacgagggcaacgcagaaacaaaaagccaacggaaaaagaaacggcagagcaca

SEQ ID NO: 194591 - RNA, 55 nt, Homo sapiens
cgaggcaggaccggcgcccaaggagaggccaaagagcccggaggcagaggcgcca

SEQ ID NO: 194592 - RNA, 65 nt, Homo sapiens
cgccccggggacaagaaacagagcaaaaaccggaaagccgacaggagggaagaaaccagacaaga

SEQ ID NO: 194593 - RNA, 75 nt, Homo sapiens
ccaagccgcacgcaaccaccgcccggccacaccagggggcccgggcagagggaaagcagaggacggaacaacccg

SEQ ID NO: 194594 - RNA, 52 nt, Homo sapiens
aaacgccgcaccaggcgagcagcgcccccgaagcgcacaccacaacagcaca

SEQ ID NO: 194595 - RNA, 42 nt, Homo sapiens
ggagaacaagcccacgcaccgacggcgcccagcgaggggccg

SEQ ID NO: 194596 - RNA, 75 nt, Homo sapiens
acaacagggaaccaaggggacaaaccaacagaagggcaaccaggaaaagcggaggcccccgggccagggaccaga

SEQ ID NO: 194597 - RNA, 61 nt, Homo sapiens
agcacggaacccaaaggcagcggaggaacagacagccccgggaacacccgaaggacgggaa

SEQ ID NO: 194598 - RNA, 87 nt, Homo sapiens
agcgaccccagcagcagccgccgccagagaggcccgcccaccagcgcccgcccccgccccgcacaagcacacagagaaaaaaaggga

SEQ ID NO: 194599 - RNA, 72 nt, Homo sapiens
ggaagcaaagcaccagacacaaggaaacacgaaagcaagacccaccaggggaggaccggggaagggacccga

SEQ ID NO: 194600 - RNA, 82 nt, Homo sapiens
agagccagccccaaccgaacccagacgcagaacgagaaggagcggccgggaacggccaaaaaagcaaagcgacggaagaccg

SEQ ID NO: 194601 - RNA, 85 nt, Homo sapiens
cggcgcggcggccccgggaccaaggagcgcgccgggggcccggaaagggacgcgcgcccagggagcgagaagcagccagggcccc

SEQ ID NO: 194602 - RNA, 87 nt, Homo sapiens
cacgcgacgcgccaaaacccgcccggaaaggggacaccggagacgacaccaagaggaaaaaccaggcaaggaagcacaagcgacaag

SEQ ID NO: 194603 - RNA, 60 nt, Homo sapiens
aagccgagccgccacccggcgggaggagacgaggccaggagaaggaaagcaggaacagaa

SEQ ID NO: 194604 - RNA, 77 nt, Homo sapiens
gcagagcgacagcggcgagcagaacacggcgagcgggccgacagaacagaaaggcaaaaagagacacacagggaagg

SEQ ID NO: 194605 - RNA, 78 nt, Homo sapiens
aaaacccaccgagcccgccaaagccaacacccaagaaaggcgggcgggaagcagcaggcggccggagcaagcggcacg

SEQ ID NO: 194606 - RNA, 96 nt, Homo sapiens
gagggcaagggacccggccagcgacgcaccgagaaaggaaggaaaaccgacgagcggcccaaccgggggaggaaacaaaacccacgaagcaagcga

SEQ ID NO: 194607 - RNA, 63 nt, Homo sapiens
gacgcccagacccggcaggcaagacggcagccacagggcagcagagagagaaagagcggcgag

SEQ ID NO: 194608 - RNA, 87 nt, Homo sapiens
ccagcgcccgagccccggccgccgccgcgagcaccgaaaagcgcgagggcgaggcccccagcaggagacggcacacccggacagccc

SEQ ID NO: 194609 - RNA, 85 nt, Homo sapiens
ggcggcagcgaggcggaggcgacgaggaggcggacccccggcgcagggcggcgccagcgcgcgccccccagagaagggcaccccg

SEQ ID NO: 194610 - RNA, 84 nt, Homo sapiens
ggaggagcaggccacacaggcacaggccgggagggaccgcccagaccggaggcgacggccacccggcggagagggccgcagcag

SEQ ID NO: 194611 - RNA, 56 nt, Homo sapiens
caccaaggcaaagagaaacaggggagccagaaaaacacagcgggaccggcaagcac

SEQ ID NO: 194612 - RNA, 68 nt, Homo sapiens
gggaccgggagggaaagaaaacaacccgccgcagccgcagaaagaacagaccaaaaagcccagacaag

SEQ ID NO: 194613 - RNA, 80 nt, Homo sapiens
acagcggggcccgcggaaaacagaaacgaaggaggcccaaccacaaaaggagccgacggaacccagacggagaacaaaag

SEQ ID NO: 194614 - RNA, 86 nt, Homo sapiens
ggcggcaaaaggcggcgccgaggagcgggacaacccaggagcagacagagaagcgcgcagcaggccgaagggcaagagggcacaga

SEQ ID NO: 194615 - RNA, 80 nt, Homo sapiens
cagagccggaggggcgcgggacacacccccaggaggcccggcagagcaggaacagagacagacccgggggcccccaagga

SEQ ID NO: 194616 - RNA, 70 nt, Homo sapiens
gggggggcgaggggaaaggcaaagccgcgagccgagcacaccacaggccaaacggaggaaggcaccacgg

SEQ ID NO: 194617 - RNA, 73 nt, Homo sapiens
aaagggccccccaggggcccgcccagcagagccaaggacaagaccagggggaggagagaccccaacaccccag

SEQ ID NO: 194618 - RNA, 64 nt, Homo sapiens
cccgccaggacacacgcagcgggagggcacgaagcccccggcaaaggaagcccggggcggcgac

SEQ ID NO: 194619 - RNA, 79 nt, Homo sapiens
gggccggaccagagaaaaggggaacgagaagccacacgcagccacaggaaccagccaggaaaccaaaagcaggcgccgc

SEQ ID NO: 194620 - RNA, 87 nt, Homo sapiens
cagacaacaaacagaacggcaaaagggccagaagcccaggaagcacacacaaggccacgccagcgggggcgccaaaaaagagcacgg

SEQ ID NO: 194621 - RNA, 75 nt, Homo sapiens
gggccgcgcgaagacaggaccagggcacggagaacagccagcaaagacaagagcagaccagcagccgcagcgcga

SEQ ID NO: 194622 - RNA, 38 nt, Homo sapiens
ccggccccaggcgcccgcgggagcaccgcggacgcccc

SEQ ID NO: 194623 - RNA, 75 nt, Homo sapiens
agaacaaaaagcaggaaaacgccaggccaaggggcgccaccaccagccgacccaggcagcagcccgggggggcgg

SEQ ID NO: 194624 - RNA, 66 nt, Homo sapiens
aagaccgggggaggaaagaagggggcgagggaggaaaaagcggccaacagggggacgggaaagaca

SEQ ID NO: 194625 - RNA, 77 nt, Homo sapiens
ccacaaagaccaagaacaaccacagaacgagggagccacgacaaaccacgaaaccccaaagagcaggaagaaacaac

SEQ ID NO: 194626 - RNA, 49 nt, Homo sapiens
acggggagagccgcaggcgcccaagcaacagagcggaacgggcacaaag

SEQ ID NO: 194627 - RNA, 85 nt, Homo sapiens
ccgccgccaacgcgcagggcagcggcccccgcccgcagaaacgaaggaggcccaaccacaaaaggagccgacggaacccagacgg

SEQ ID NO: 194628 - RNA, 58 nt, Homo sapiens
gcaggaccaaagagaaggagcccccccggagcgggggcgcacagcggaggaaagcccc

SEQ ID NO: 194629 - RNA, 56 nt, Homo sapiens
ggaaagcccgacagaagcaccgagacccaagaaaggcagaccagcaggacagcacg

SEQ ID NO: 194630 - RNA, 71 nt, Homo sapiens
ccaagagacagggcacaccaaacccacggcaggggccacgcacacccaggccaacgggcacagaagcaccc

SEQ ID NO: 194631 - RNA, 57 nt, Homo sapiens
gagcggcgggaccgggcgcagacggcgagaccccgcacaggcggggggaccagccca

SEQ ID NO: 194632 - RNA, 76 nt, Homo sapiens
agagaaaggcgccaggacaccgcaagaaggcgaacacaaggagacgacggccgcaaggagccaggagaggagaaaa

SEQ ID NO: 194633 - RNA, 76 nt, Homo sapiens
accgacgagccgcagggcggagagacaccacagggcaccgaggaagagaaccaaggcagaggccacaggcaagcaa

SEQ ID NO: 194634 - RNA, 83 nt, Homo sapiens
gggcccacagcaggcgaggcaccggcagggccggcccacgccacaccgcaccagcacccacgggcaccgcacacggggagcca

SEQ ID NO: 194635 - RNA, 61 nt, Homo sapiens
acacggacaacaaacgggaccaagaaaggcccagggaccaaagcccggacaaggcccgagc

SEQ ID NO: 194636 - RNA, 71 nt, Homo sapiens
caggaaacacgacaagacaggagcaaaaacagaccacccaggcaaagaggaaagagggagaagaaaggaaa

SEQ ID NO: 194637 - RNA, 55 nt, Homo sapiens
gggacccagcacaccccagcagaaagacaaagcaccagaaggggggcagaaagaa

SEQ ID NO: 194638 - RNA, 78 nt, Homo sapiens
gggaaaacgaccccggacgccggagaaaaaaacacaaccccacagggccagcgagggccccacgggggaccacagcca

SEQ ID NO: 194639 - RNA, 62 nt, Homo sapiens
ccaaaaggagagggggcagcacaccggcagacgacaagcccgacacccagcggcaccggaca

SEQ ID NO: 194640 - RNA, 75 nt, Homo sapiens
ggaccgcggacagagacaacaccgagagagaaaggcgcagagggaccgagaggaaccgccaccccgcccgcgcca

SEQ ID NO: 194641 - RNA, 90 nt, Homo sapiens
ggaggagaagcagagagaagcacggagggagcgggccaaggaggaggcagagggcagacgaggagacgacccaggcgcgccccaagccgg

SEQ ID NO: 194642 - RNA, 66 nt, Homo sapiens
ccgggggccgggcccacgacacccacccggcaggaaaaggaccagccgaaagaaaaggccagcccg

SEQ ID NO: 194643 - RNA, 77 nt, Homo sapiens
ggagcacgggcgccggcaagacaagaggcagccagcggacggaacccaacaacagacgccaaaaccagaggaacaag

SEQ ID NO: 194644 - RNA, 54 nt, Homo sapiens
aagcagagccggcaccacaggaagccgagcagggcaccggccaggcggaggcag

SEQ ID NO: 194645 - RNA, 61 nt, Homo sapiens
agcggaaaccaagcaacccgccaggggggacccaagggagagagggaacggcgaaagggca

SEQ ID NO: 194646 - RNA, 79 nt, Homo sapiens
gccagggaagcaccacggcgcgaccaccagaagacgcggagaccaggggaaaaaacagcgggccacacaaagccgggag

SEQ ID NO: 194647 - RNA, 72 nt, Homo sapiens
cgcagggcgcccccggcaggaggaacagaagggcgcggagcagccgaacggcgaggggaggaaaacaagaag

SEQ ID NO: 194648 - RNA, 73 nt, Homo sapiens
agcaggggccggaagcaccaggacagcacgcagaggggcgggcacgcacgacagcgggcagagcgcacaaaca

SEQ ID NO: 194649 - RNA, 70 nt, Homo sapiens
gaccccgaggcgagacggaaaggcaagaagcccggcgccaaggaaaaagacgccaaaagcccggagccgc

SEQ ID NO: 194650 - RNA, 82 nt, Homo sapiens
agagacaaggagagccaggaggagcgggccccaacccaccaaaagcacaggaggccacgcgcagccccggaagagccaccca

SEQ ID NO: 194651 - RNA, 79 nt, Homo sapiens
aaaggcgccgcgaacgcacccaggccacagaggaggaaagagaggggaaagaagcagccaagccccaaggaaccacagc

SEQ ID NO: 194652 - RNA, 36 nt, Homo sapiens
ccccaagggcggaaacaggcgaaaaacaggccaaac

SEQ ID NO: 194653 - RNA, 83 nt, Homo sapiens
gaagaagacaagagacacagcaagacaagaaaaccgacccgagaaaccgcccgggagacgaaggcgacagcacacagacagaa

SEQ ID NO: 194654 - RNA, 66 nt, Homo sapiens
caccagacgccagccagggaagaacgcacgaccaaggacacccaggcagaccagacacggcaaccg

SEQ ID NO: 194655 - RNA, 79 nt, Homo sapiens
aaggcaggcgagaagaccaccgggccacagcaggagcacaaaggaacggaaaccaagccaaagaggcaagaaagcccgg

SEQ ID NO: 194656 - RNA, 74 nt, Homo sapiens
cggcgcgaagaggcggaccggacggccgaggggaccgggaccgcgccaccccggacgcccgaacaggaccagga

SEQ ID NO: 194657 - RNA, 75 nt, Homo sapiens
agccgcacggccggcgcggccgacggcgcgcgcccgcgcgcgcggcgggggggccccagcccggccgaacgggcg

SEQ ID NO: 194658 - RNA, 74 nt, Homo sapiens
agcaggcgacgcgggagaagggccagaaaggcccccgcgcggccccagcagaaccaggcagagaggcggacccc

SEQ ID NO: 194659 - RNA, 68 nt, Homo sapiens
gaaaaaccgacaagggcagcccaaggacacaaggaaagacacagggcggagaacggaaaagcaccagg

SEQ ID NO: 194660 - RNA, 104 nt, Homo sapiens
gagacgcccggaggggcacaaagggccacagggaggccgacgcccaggggcacaaggccaagacggccaagggagccacagggcccagagcacggaaccggcca

SEQ ID NO: 194661 - RNA, 76 nt, Homo sapiens
gcccaagacagcaagggacagacgggaaaaaagagcaccagcagggaggggaaccaggggccgaaggcgacacacg

SEQ ID NO: 194662 - RNA, 73 nt, Homo sapiens
acgaggagaaaccagagcgccagcaagacccacaagaacaggaacccaggaggaacgcaaaaaggaagaaaaa

SEQ ID NO: 194663 - RNA, 78 nt, Homo sapiens
ggaggcggaggacgagaggaggaaacagcgcggagaccccagacccccagcgcggcacaaagccaaggacacgcagga

SEQ ID NO: 194664 - RNA, 77 nt, Homo sapiens
gccgggcgccgccgcgccgcgcaccgcccacaacggagaaaaagaagaaaagcacagacaacgcacaaaagaaaaaa

SEQ ID NO: 194665 - RNA, 74 nt, Homo sapiens
ccgcagcagcgagaaaggagccggggaccccccaaagacaagggcggcaaacccgaggaaacagcaaaaaaagg

SEQ ID NO: 194666 - RNA, 69 nt, Homo sapiens
caggaccaccgcggcagcacgcggcgaaagcccgggaacgagagcagaaccccacacaacccaagccaa

SEQ ID NO: 194667 - RNA, 54 nt, Homo sapiens
agcagaagcgcgcagcaacggcggccaaaggcaccaaagcaagggaagcgaagg

SEQ ID NO: 194668 - RNA, 81 nt, Homo sapiens
gcacccccgcccggaagaggaggaagacgacgccccgcgagagcccagagcgcacagcccggcccgcgagccccagcccgg

SEQ ID NO: 194669 - RNA, 81 nt, Homo sapiens
ccgcgccgcaggagacgagaggacgggaccaggcgaagcggccgagcaggcgagcgaacgacgcaccacgccacgggaagg

SEQ ID NO: 194670 - RNA, 74 nt, Homo sapiens
gggaaaccaagaagaggccagaaaccgcccggagcacgaccgaggcggcggcccaaaggcgaaacacagaagga

SEQ ID NO: 194671 - RNA, 66 nt, Homo sapiens
cagaaacaacccaaacccccaagggaagcgaagggccgaagacgaaaaaagaaaagccgcccaccg

SEQ ID NO: 194672 - RNA, 103 nt, Homo sapiens
gcaaaggaggcgaaccgggcgaaggaccagcgggaccagccccgccccacaccggaccgggccagccacgcacaccgaggcgccccgcacacgccacacccac

SEQ ID NO: 194673 - RNA, 59 nt, Homo sapiens
caccgacccacaggagcgcccgcggaggagcgcccgggccgggaacggcagacgcagca

SEQ ID NO: 194674 - RNA, 77 nt, Homo sapiens
acgcaagccagcaggacggggcgggggaagaagcgcgagcgaaggagccgggcggggacccggaggaaccaaggaaa

SEQ ID NO: 194675 - RNA, 79 nt, Homo sapiens
caaaaaccgaaaccgcccacggaagccagaggacaacagagcaaccagccgggcaccaggaaccccaggcaccggagca

SEQ ID NO: 194676 - RNA, 74 nt, Homo sapiens
aacccacaaaccaaagaagagaagggaaggagaacaccacccggagggccaaaaaggggaaacgaggcccaagg

SEQ ID NO: 194677 - RNA, 84 nt, Homo sapiens
cggaccgcggccccccaggaaagggagaacccaaagcaggagaagaaaggaagagacgacagccagcaggcaggagcccgccca

SEQ ID NO: 194678 - RNA, 49 nt, Homo sapiens
cagggaagccacggaaaaaggcacgggacaggcagccaagaggaaacag

SEQ ID NO: 194679 - RNA, 78 nt, Homo sapiens
cgaccgccgccccacgccggaggaaccgagaagagcagagcggagggagccccagacacgggaaagacaaggagccgg

SEQ ID NO: 194680 - RNA, 75 nt, Homo sapiens
ggaggaccgcggacgacggccgcagaagagaacgggccgcacggcagccagcccagcaaagcgcacccgcacaac

SEQ ID NO: 194681 - RNA, 80 nt, Homo sapiens
caacacgcaaaccaagcacgaacgccggagagcacgaccgccagaagagagcgccagaaagagcaaaacacagagacgcg

SEQ ID NO: 194682 - RNA, 77 nt, Homo sapiens
gcaagacaccaagggacgcagcggaagaaaagaaaggacaagccccagagagagcccgggagcacgggagagaagca

SEQ ID NO: 194683 - RNA, 81 nt, Homo sapiens
ggagagcggacccagggcccggcgaaggacccggccgaggcgggcgcaagagaaggcaccaagagggagaccagcacgagc

SEQ ID NO: 194684 - RNA, 40 nt, Homo sapiens
gacgaagcgcccgccaccaaggcggcgcaggccagccgcg

SEQ ID NO: 194685 - RNA, 79 nt, Homo sapiens
gcaacagacaaagcccgggggaggcgggacaccaggacacaggaagggcacaagacacaagaaacccgggaccacccca

SEQ ID NO: 194686 - RNA, 66 nt, Homo sapiens
gccgcgcacccaccgcgacccgggacccgcccgcccgcgggaggccacaggagggccaagaagaag

SEQ ID NO: 194687 - RNA, 67 nt, Homo sapiens
cacacgggaagcgcgggaagggaaagaagcaagaccagagagcaaagggagaggaaaaacaaagaaa

SEQ ID NO: 194688 - RNA, 38 nt, Homo sapiens
gcaaagcgcagaaagggagaaaaaacaacgagacccac

SEQ ID NO: 194689 - RNA, 75 nt, Homo sapiens
cagagggaaacggcacgcaggccgggcaggcggcaaccaaacggcgccaaggcgaggggcagcagacgcgaaggc

SEQ ID NO: 194690 - RNA, 83 nt, Homo sapiens
gaggcagccagaggagagcaggggcgacagacaaaggcagaaaagcgagccaccccaggggaagaacacagacgcaacagcag

SEQ ID NO: 194691 - RNA, 83 nt, Homo sapiens
ggaggcgcgcggggccgaggccgccccgagcgccaggggagaccagaaggcaaggagccgggaagcagggcaaagggcaagac

SEQ ID NO: 194692 - RNA, 81 nt, Homo sapiens
ccccccaggacaacccagaggcaacaaaggcgaggcacgaccccccgcgacccagagaacagcaaggggaggcacccggca

SEQ ID NO: 194693 - RNA, 76 nt, Homo sapiens
gaaaaagagaagagcagaggaaacacagaaagaccccaaggacacagagcacaagcccgaggacggaagaaagacc

SEQ ID NO: 194694 - RNA, 51 nt, Homo sapiens
gccgacagcagagacaggaacagccaggcaagaagacgggaccaaccccag

SEQ ID NO: 194695 - RNA, 75 nt, Homo sapiens
ccccgggaacgaccccacaggaaaacgagggcaacgcaggacagagcgaagaaccccccaagaagacgaaacccc

SEQ ID NO: 194696 - RNA, 75 nt, Homo sapiens
cggagccagcaaaaacacaaacgagggagcaaggacaccaccagggagccaggagagcggcaaccaagccgggaa

SEQ ID NO: 194697 - RNA, 80 nt, Homo sapiens
cccagaggagaagaaaaagaaggaccgaaccgaccaaccggagaaaaagcacagggggacgaaacgaacgacagaaaccc

SEQ ID NO: 194698 - RNA, 70 nt, Homo sapiens
agaagcagggccgagcaacacaggggcggagccccccaaggcaaccgaaacaccagcaggggagaaagaa

SEQ ID NO: 194699 - RNA, 68 nt, Homo sapiens
aaggaaaacgcggaaaaccgacacaacagaaacaggaaacccaagaggaaacgcccccagaaaagagc

SEQ ID NO: 194700 - RNA, 83 nt, Homo sapiens
cagggacacgcggaggcaggccgggaaggcggcaggaagcggagcacgacccagggagaaagccaaagcgaaggacggaaccc

SEQ ID NO: 194701 - RNA, 67 nt, Homo sapiens
gacaagcgcgcaaagggcggcgccggccaggcggagacagggagagaggccaagcagcccaacccga

SEQ ID NO: 194702 - RNA, 72 nt, Homo sapiens
caaacagagagaaggaaccacccacgcaggcagggcccagaccaagccccaccaacagaagagccccacaca

SEQ ID NO: 194703 - RNA, 73 nt, Homo sapiens
gacagccgccaaccgcagaccggaaaccgaacgaaggaaggacccaaagacagaaaacgggccccagacacaa

SEQ ID NO: 194704 - RNA, 83 nt, Homo sapiens
gaagcaggagcaaggaggcccccaaggagcgcaaccacggaggccaggaccaccaggaaaaaagaccaagacacccaggagaa

SEQ ID NO: 194705 - RNA, 76 nt, Homo sapiens
gaagcaaagcaccaaagacgagaaagaaacagcaggcaagccaccgagaaagggaggaccacaacaacaaacaggc

SEQ ID NO: 194706 - RNA, 41 nt, Homo sapiens
agacagcagaaaaccagagacccacaggaccgcgaacaagg

SEQ ID NO: 194707 - RNA, 79 nt, Homo sapiens
ggcccgcgccgggaccaacaggggcaagacaagccagaacgagaagcgcaccacaggaaagcgaagccaacaaagaaag

SEQ ID NO: 194708 - RNA, 76 nt, Homo sapiens
agccagcaagcccccaacggaaaccgaggaaggcagggaccggaaagaacaaaggcccaccggaagagcggcgaaa

SEQ ID NO: 194709 - RNA, 84 nt, Homo sapiens
ccagggagacaccgaaaagaagagaaaccagcgcggggaagaagcccaagcccagccccagccaggcagcccccggacaggcca

SEQ ID NO: 194710 - RNA, 83 nt, Homo sapiens
gcgaggaggcgcgggagggcgagaacgaccccgagacgcccgcccgggagaaaggcacccggaagagccaacgggagagggca

SEQ ID NO: 194711 - RNA, 76 nt, Homo sapiens
cgacacacacacggcgcaccccccgagacccccggacccggccgcccagaagaagacccgccggccaacgcaacca

SEQ ID NO: 194712 - RNA, 83 nt, Homo sapiens
gcgagcacagagcccgccgccgaccgccgcccgccacacccgccgccagcacgagccagggagccgccgggaccggcccggga

SEQ ID NO: 194713 - RNA, 77 nt, Homo sapiens
ccgcaccgggggagacgcgggcccaggcggcgggaagaccgaggacccggagaagccacagagcaggggaaagccgc

SEQ ID NO: 194714 - RNA, 81 nt, Homo sapiens
agaaaaagcaacaacacaaacagcccaagggaagcaaccccacagcagcagggacgcagccagcgaggccaccagcgcccc

SEQ ID NO: 194715 - RNA, 74 nt, Homo sapiens
agcagagcccaggagaaaccggacgcgacgggccggaaacgaaacagcgcagccaggaacaggacgaagaccag

SEQ ID NO: 194716 - RNA, 37 nt, Homo sapiens
gccgcgggacgcagaggagagaaaccccaccacgcgg

SEQ ID NO: 194717 - RNA, 46 nt, Homo sapiens
gcgggaccgggcgccgagaccggaggaacaaggcaaaggcaacgca

SEQ ID NO: 194718 - RNA, 74 nt, Homo sapiens
cagagacacccggaggcgagggggaccgcgggggaccaacgagaaagcggcacagccagggaccagacacagag

SEQ ID NO: 194719 - RNA, 63 nt, Homo sapiens
cagggaaagacgcagaccgagacgcaaggccgcaggagggaagcgcacggaaaccgccccggg

SEQ ID NO: 194720 - RNA, 73 nt, Homo sapiens
acaaacaagccacggaacggcaccgcgcgccagccaaccggcacagccacaccgagaagaccggcccaagaac

SEQ ID NO: 194721 - RNA, 44 nt, Homo sapiens
caccgcaccgagggcgagcccagacgcgaccggaaaggagagag

SEQ ID NO: 194722 - RNA, 76 nt, Homo sapiens
gccggcgggcggggcggcggcgcgacagggaggcaggcgacaacagaggagaaggcgaagaaaacagccaagcacc

SEQ ID NO: 194723 - RNA, 100 nt, Homo sapiens
gggacagggaccagcgggaaggcagacagcgagggcgacgagaaccaaggagcaggaacagcagcacacagagggaagccggcacagggcggaacggaag

SEQ ID NO: 194724 - RNA, 71 nt, Homo sapiens
ggagaaaaggccaagaaggcagccacccaggcacgggaaagggagaagcaaccacaaagaggaaccagagc

SEQ ID NO: 194725 - RNA, 40 nt, Homo sapiens
acaaaggaccgcccccagagagagcagacgcagccgccgg

SEQ ID NO: 194726 - RNA, 77 nt, Homo sapiens
gacccgcccccaagacgggcagaagaaggcagaagggaacgaagacgcgaggaggaacgaggagaagaacggaggga

SEQ ID NO: 194727 - RNA, 81 nt, Homo sapiens
cacgccccacgaccgccagcacaggcaccggccgccgaccaagacagagcaaggccacgacccacgagacaggggcccaag

SEQ ID NO: 194728 - RNA, 80 nt, Homo sapiens
gccagagccgccgccagccccagccagccccacagcaaacagggccccccacgcgagaacccgggccggggcccgggggc

SEQ ID NO: 194729 - RNA, 81 nt, Homo sapiens
ggggagcgggaccggcgccagaccgacggcgaacggcgcacgaccccagagccgcccaacagggaaggagacccaccccca

SEQ ID NO: 194730 - RNA, 86 nt, Homo sapiens
cggcggccaggcccgcgaacacacgccgccaccgggaggcccagggaagggacacaggacaaggagccaccggagaggaagcggca

SEQ ID NO: 194731 - RNA, 70 nt, Homo sapiens
acgccagaagagaaccacaagacggccagcccccaggaaagagaaaacagcaggaggaagaaccagaggg

SEQ ID NO: 194732 - RNA, 45 nt, Homo sapiens
gcccccaaggcagagcggccccccccgaacacggccccagggcca

SEQ ID NO: 194733 - RNA, 78 nt, Homo sapiens
cacccgcccgccccagccacccaggccccgccgcccgggggcgccgcccaccgcgcccgccggagaagacagaggagc

SEQ ID NO: 194734 - RNA, 72 nt, Homo sapiens
ccaggcgagagaggcccgggccccggaccaggcggcgaaggcgggcaggcccagggccccccaccgcgcccc

SEQ ID NO: 194735 - RNA, 74 nt, Homo sapiens
cagagggccaccccgccgcgcaggcccaggcacacccacggcaacagcaagaaaaggccagacggccagcagcc

SEQ ID NO: 194736 - RNA, 61 nt, Homo sapiens
ccccaaacggcgggcggcagggggacaccgcggaggcgaccaacgacgaagagcagagcag

SEQ ID NO: 194737 - RNA, 48 nt, Homo sapiens
agaaggagcgaagaagagacagcgcagaagccgcacagcggcaagcag

SEQ ID NO: 194738 - RNA, 77 nt, Homo sapiens
ggagaggagggccgcgggagggggaagcaccccccgggagccgggccagggagacgacgagagcgcagccgggagag

SEQ ID NO: 194739 - RNA, 83 nt, Homo sapiens
agacggcgcccagcaacacagaagccgacaaggcgcaagcgaaaacagaccgcgagcccagagcaaacggggacagcgccgac

SEQ ID NO: 194740 - RNA, 38 nt, Homo sapiens
cacggaaccggcgaaaagagcaaccaagccgggcacgc

SEQ ID NO: 194741 - RNA, 78 nt, Homo sapiens
aggacgaggaggcggccgggccgggaccgcgccaagcggccaacaacacgcaccagaccccacaagcacagcaaagcg

SEQ ID NO: 194742 - RNA, 58 nt, Homo sapiens
agaacggaccggggccgcggaaccaacgggacgccaagaggccgaggagaggccccca

SEQ ID NO: 194743 - RNA, 71 nt, Homo sapiens
gcccacagcacccccagggccagcgccccgggaagaggaaccacaggacaggagaagaggggaagaagaaa

SEQ ID NO: 194744 - RNA, 79 nt, Homo sapiens
gaacaaaccgaagaacagcgggaaagaaggcaaaacacgggagaagagacagaccgcccaacaagaaggcgcagaacga

SEQ ID NO: 194745 - RNA, 52 nt, Homo sapiens
accgccgaaaagcaaccgagcccagcagacaaccgagcacaaaaaaggcacc

SEQ ID NO: 194746 - RNA, 72 nt, Homo sapiens
cccgcaaaacgagacgaaaaaaccaccccagggaggacggacgcgaaagcccaacgcaggggcgagcccgac

SEQ ID NO: 194747 - RNA, 57 nt, Homo sapiens
aacggacaagaaaacaggcgacaaaaggaggacaggagccgcccagcaaaacccaac

SEQ ID NO: 194748 - RNA, 62 nt, Homo sapiens
caaaggggaaagcaaggccaaagacagggagaagacgcgccaggacccacaaccccagcccg

SEQ ID NO: 194749 - RNA, 75 nt, Homo sapiens
acgcagaacgggcagagaccgcaggaagaagcgaagaggaagcagccgacacgagcggcaaaaacagcgaaagga

SEQ ID NO: 194750 - RNA, 68 nt, Homo sapiens
gaccaggcgaggcgcagaaggggacagaacaggcaggcaccgcccgagcggcaagaaggcggacggcc

SEQ ID NO: 194751 - RNA, 93 nt, Homo sapiens
agccgccggccacccaaggaaacacaaacgccgaaaggacgaggaacgggccggaaaagacgaggcgaggaaccaaaggccaccccgccgagc

SEQ ID NO: 194752 - RNA, 84 nt, Homo sapiens
ggagaaggaagggcaggcaagacccaccccgggaagaaagcaaacagcagggcaagaaggacgaccccaagcgagcaggagggc

SEQ ID NO: 194753 - RNA, 88 nt, Homo sapiens
cggagacaagcgcaaaaccaggcaaagagaagagccgccccgggggaagggcggaggacgcagacagcgggcccgagagccgcagcgg

SEQ ID NO: 194754 - RNA, 68 nt, Homo sapiens
aacggccacgacaacaaagaaacagaaacagagggagaaggaaaggagagggcaacgaacgacagcca

SEQ ID NO: 194755 - RNA, 71 nt, Homo sapiens
agagagcagaaaacaaaaaaagggagaagaaggggcccgagggcaggacagcaggcaccggcgaagcacag

SEQ ID NO: 194756 - RNA, 57 nt, Homo sapiens
ggcccgaccgcccacagacccaaacaaaggacacgggggggaaacaagcacgggcga

SEQ ID NO: 194757 - RNA, 77 nt, Homo sapiens
agaaaggcccaaagcccacagcgcaaaccccgaacagaccacagaccacagccacagccagaagagcggcgaaacca

SEQ ID NO: 194758 - RNA, 75 nt, Homo sapiens
cccccacgagagcaaccgacagcgcagcggagaagcacaagggcgagaccgggcgggggggggagcgggcggggc

SEQ ID NO: 194759 - RNA, 79 nt, Homo sapiens
acaagaccgggacacccgaagcgggaaagggcccacgagacgcgaacaaacgccgcgccgccagaagaacagaccggga

SEQ ID NO: 194760 - RNA, 71 nt, Homo sapiens
gaaaaacaacgccgcagaggaaacggagggagcggccggaacccaagccaggcgccaagacgggaagcccc

SEQ ID NO: 194761 - RNA, 49 nt, Homo sapiens
ccgaccacgaacaggaccgcaacaggaaccagaaagacagaggcacaaa

SEQ ID NO: 194762 - RNA, 78 nt, Homo sapiens
gcggccaaaggggacccggcgcagaagcaacacacacgacggcgcccaaaacgagagaggacacgcaccacagaccca

SEQ ID NO: 194763 - RNA, 64 nt, Homo sapiens
gcagacccagcggaaacccggagaacggcgagaaggaacgaaaaacagcgacgagcagacagga

SEQ ID NO: 194764 - RNA, 75 nt, Homo sapiens
gagccccgccggcgcccgcgaccccgcgagcagcaacaggaccacagaaacgggacccgcccccggccaagcaca

SEQ ID NO: 194765 - RNA, 59 nt, Homo sapiens
gaacagcgagcaccagacaggaagcggcacagcacgaggacggcaaagaagagcaccca

SEQ ID NO: 194766 - RNA, 75 nt, Homo sapiens
gccgcggggaagcccccgcccggggaagacagagggggccaccagcgcgccagcgaggcagccgcgcccccgcca

SEQ ID NO: 194767 - RNA, 85 nt, Homo sapiens
cagcccaggagccggagcggaacggccgggggcggcggcagcggcggcgcgaggccagcaccagcccccaccccaggccccccag

SEQ ID NO: 194768 - RNA, 75 nt, Homo sapiens
cgaccccggcagcacaccggcgccccagacgcgcgccggacaacgccaacacaaccaggacaagccgaggaaagg

SEQ ID NO: 194769 - RNA, 60 nt, Homo sapiens
gaggaggaggggaggcgcccccggagccgccccggaggagaaggagccacaacgaccgag

SEQ ID NO: 194770 - RNA, 73 nt, Homo sapiens
gggcaccgcagcgaccacccacacaaacccgggacgggccgagagaaacaagaagagggccaaaacgccccgg

SEQ ID NO: 194771 - RNA, 53 nt, Homo sapiens
caagcaaccaccagcagcccccagagcggaacacagacccaccaaaaggggag

SEQ ID NO: 194772 - RNA, 75 nt, Homo sapiens
gaaaaccgaggcaccaagccggccagcaagacccgagcccagccggccgaaaaaaaacgaagaagcagcacagca

SEQ ID NO: 194773 - RNA, 82 nt, Homo sapiens
gccacccaaagcggccgggagcgcgccccccaccccgagacagaaccaagccgccacagggagaaaagagcagaggccgacc

SEQ ID NO: 194774 - RNA, 72 nt, Homo sapiens
gaaaccaggagccacggacaagaccaaaagaaacaccgaagaggcccgaaggaaagaccggaaaaacccaga

SEQ ID NO: 194775 - RNA, 75 nt, Homo sapiens
agccaaagcgcaaagcacagaaaaggaagagagccgagcccacccgaccagggcccggcacccagcagaaggaca

SEQ ID NO: 194776 - RNA, 78 nt, Homo sapiens
gggaggggaaaaaccagagacccccgaagacgcagccaaaggcagggaagaaaaagaagacaccagagaaacacgaga

SEQ ID NO: 194777 - RNA, 78 nt, Homo sapiens
ccaccccaagcgcccggccgagggaccgcagcccccccacggccaggcccgggcaaaacccaggacccacagcgcacc

SEQ ID NO: 194778 - RNA, 41 nt, Homo sapiens
cacccaccacggggcacacgggacggacagcgcaggagaag

SEQ ID NO: 194779 - RNA, 70 nt, Homo sapiens
gaagaaaaagcagaagggaagagaggccggcaccgggccggaccaacgcccaaccaagagccaagggcac

SEQ ID NO: 194780 - RNA, 75 nt, Homo sapiens
cgggacggcccaaggccagcccgcaggaaaccaccaaagcacagagcagaaggggacagggagccacaagggaaa

SEQ ID NO: 194781 - RNA, 77 nt, Homo sapiens
ggcccccaggagcgaagcaggacagaaaccaccaacgacgcaacgacgcaccagacaaacacgcaaacaagagaacg

SEQ ID NO: 194782 - RNA, 78 nt, Homo sapiens
gagggcacccaccggaccgagccaggccaacgggaaccgggccgcagaggccagagccgggcccaggggccggagacc

SEQ ID NO: 194783 - RNA, 54 nt, Homo sapiens
gccgccgccggcccgggagcgcaacacgcagaacgaagggcacacgaacgaaag

SEQ ID NO: 194784 - RNA, 72 nt, Homo sapiens
gggagaggcacagagcacaggcaggccgcagaccaacaaaggggcgcaggccggccaagaaccaggacagga

SEQ ID NO: 194785 - RNA, 102 nt, Homo sapiens
agcccagagaggcccacaaccaagccacaaaagacacgccacaaccggcggcaccaggacgccgaaaagcgaccggacgcaggcacagggacacgcgagacc

SEQ ID NO: 194786 - RNA, 68 nt, Homo sapiens
gccagcggggacaggcagcgaacgcgaagagacccccaggccaaagcacccaaaaaccagcccaaacc

SEQ ID NO: 194787 - RNA, 72 nt, Homo sapiens
cccccccacaggaccccgccggccggaagacagaacacaagccagcaggaggcacaagcagaagaagcacag

SEQ ID NO: 194788 - RNA, 88 nt, Homo sapiens
cgccgcggagaccccaccgccggcgcgggaaacgggcgaagcgacgagccgcgaggagggagcagaagaggggaagaaagagacccgc

SEQ ID NO: 194789 - RNA, 56 nt, Homo sapiens
cgcagcagggcaaccagcgcccccgcccggaggcacgcggaccccagggccggccc

SEQ ID NO: 194790 - RNA, 62 nt, Homo sapiens
acagaaggggccaagcaggacaagcagagagcagcacgaggcagcacaagggcggggcgcag

SEQ ID NO: 194791 - RNA, 89 nt, Homo sapiens
ccgccgcgaccggggaggccaggccaggaaaacacggccggggggggcacagagccccggaagacagcccccagcgaccagacccaggg

SEQ ID NO: 194792 - RNA, 77 nt, Homo sapiens
cacaaagccccccggagacgcaaccaagagccacggacgggggggccggagagaaggaggaaccgcgcggggaacgc

SEQ ID NO: 194793 - RNA, 75 nt, Homo sapiens
ggaccaagaaccagccaacgggacaggaaaaccagcccacagcgcaagaagacgcagcgcgccgggagaagcccc

SEQ ID NO: 194794 - RNA, 72 nt, Homo sapiens
ccagagcgagcgccccgcccagaacaccagaagcagccgaaacgaaccaagaaccgaaggaaccaagaggaa

SEQ ID NO: 194795 - RNA, 84 nt, Homo sapiens
cacacaaagggaaaacacagccaccacacacaaggcaaggccacaaccggggcgaggccaagccagggagacccagagaagacc

SEQ ID NO: 194796 - RNA, 78 nt, Homo sapiens
caggacaacccagaggcaacaaaggcgagcacccgccaggagagaaacaccgaggaggacgcagcacacggccaggac

SEQ ID NO: 194797 - RNA, 78 nt, Homo sapiens
gcagaagggacccaggggcagaagagagggggaagaggagagcgccgaacaacgaagaagggcgaagggaggagggca

SEQ ID NO: 194798 - RNA, 65 nt, Homo sapiens
gcgcaggaaacaggcggcggcggggggagcgggaaggggcccgaggcagccgggagacagccccc

SEQ ID NO: 194799 - RNA, 76 nt, Homo sapiens
ccgccaccgcaggcggccgccgagcgacgggaggagaagacagaggagccagaccaagagacagcacaggcgagcg

SEQ ID NO: 194800 - RNA, 54 nt, Homo sapiens
cacagccagcaacaccaaagcagaaacaggcccggagagcggaccgaagggaca

SEQ ID NO: 194801 - RNA, 68 nt, Homo sapiens
caaaccccacgggagggacagggggagaaacacccgaacgaaggagggcagagccggagagccccaag

SEQ ID NO: 194802 - RNA, 83 nt, Homo sapiens
cccccccggccggcagggggacgggggccggacgcggcgcacggcgcggaggggccgagggcaggggggccgccacggcggcc

SEQ ID NO: 194803 - RNA, 71 nt, Homo sapiens
gagccacgccccacgaccgccaggacaggcaggagacagcaacaaggaccacagagacacaaaaggacaag

SEQ ID NO: 194804 - RNA, 84 nt, Homo sapiens
cccaacgcggacagcgggggaccggacgcaggaagacgcagccggccgcgcccccaggaaacagcgaggaacgggcagagaaga

SEQ ID NO: 194805 - RNA, 55 nt, Homo sapiens
gcaccaccagagcaaggggaggagcgcacagcacagccaaaaacagaaaccacgc

SEQ ID NO: 194806 - RNA, 125 nt, Homo sapiens
agggaccgggagccgagcagcggcggcggcaagacccccccccggaggcggcgggcggaggcggcggccggacagacaccccgcaccgggaagggggacaacagcagggagccacagcggagaga

SEQ ID NO: 194807 - RNA, 76 nt, Homo sapiens
gcccagaaacaacacggaaagcggagaggagcgggagggagaccccaggaaacagcagagagaggagcaccagggc

SEQ ID NO: 194808 - RNA, 80 nt, Homo sapiens
ggcgcaccaggacacgcagagcaccaggccaacggcagcggcgaaggagaccgcccaaaccacccccccaggaagccccg

SEQ ID NO: 194809 - RNA, 82 nt, Homo sapiens
agaaagcgcgcaaagaaacgaacaacgcgcaaaaaaagcagagagcgaagacgaacaagaaccaagaccaggaaacccgaac

SEQ ID NO: 194810 - RNA, 82 nt, Homo sapiens
caggaccaggagcacagcacgggcccccagagccgacggcccccaccccccacaagacgcggcccacgggggagcagggcaa

SEQ ID NO: 194811 - RNA, 71 nt, Homo sapiens
cggcaaagacgaagaggaaaacccaccgcgcaagggaagacagcaagaaaaaacgagaagacccccgcgcc

SEQ ID NO: 194812 - RNA, 76 nt, Homo sapiens
gaaccagaccgcaggcacaggacagagagaaacaggaaaaacgacagcagcggagcggagagagcgaagagggaaa

SEQ ID NO: 194813 - RNA, 71 nt, Homo sapiens
ccgccgccggacaacaccgcccccagccgggcgggacaagagaaaaaaagggcgggcgaacaaaaagagca

SEQ ID NO: 194814 - RNA, 76 nt, Homo sapiens
aaacaccacaagaggacaaccggaaaggagcgccgcagcggcccccacaaaaaaaacaacggccaaagcacagccg

SEQ ID NO: 194815 - RNA, 71 nt, Homo sapiens
gacagaggcacgaagacacagagaaagcggcaccaggagacaaagccacaaaaacaccagaaaaaccaagc

SEQ ID NO: 194816 - RNA, 79 nt, Homo sapiens
aggaacagccaagacccacaagaaggggaccgcagcgccgcaagggcccaccacggccagcccacgcgagaccaaccca

SEQ ID NO: 194817 - RNA, 80 nt, Homo sapiens
acggaaggagaaacgacaggcaacaagacaagcggcggggccccgggagcaggccgggcccgccagggcacgcgcccgcc

SEQ ID NO: 194818 - RNA, 73 nt, Homo sapiens
acacgaccagacggcacccccaagacaaccaaagggcagaaagcaccgacaaaacggccagacggagggagag

SEQ ID NO: 194819 - RNA, 62 nt, Homo sapiens
gccaaccggcggaccgcgagacagccagccgaccgagaggcagcgagaagaaaaagaagaga

SEQ ID NO: 194820 - RNA, 53 nt, Homo sapiens
caggaagacaggggaacacccccagagagaggccgccaaggccaacacaaccc

SEQ ID NO: 194821 - RNA, 79 nt, Homo sapiens
ggaacggcagcacgccaggacgagcagagccccccccaccagaggacgggaggagcagcaacagcgggaccccacacca

SEQ ID NO: 194822 - RNA, 80 nt, Homo sapiens
agccgaagaaccccccacaacaccaagagcaggcaggaagccaccagggcgcacagcgcccagagccaccagaagaaagg

SEQ ID NO: 194823 - RNA, 82 nt, Homo sapiens
ccgggacggaccgagaccggaccgagagcggaccgagagcgcgaaacgcacgagaaggcccgagccggcaaacgagagcaaa

SEQ ID NO: 194824 - RNA, 73 nt, Homo sapiens
gaggcagagaaagaagccggaccacggcagcgcgcgccggcagaaggggcagggcaagaccccggcagccgga

SEQ ID NO: 194825 - RNA, 75 nt, Homo sapiens
ccgaggaggcagaaggaccgagccgacgcgggccgcgcggggaggggaacggcagcccaagccagcaagaccaca

SEQ ID NO: 194826 - RNA, 83 nt, Homo sapiens
gccggggagcaaagaccgcccccgcgcccgagccaggccagcgccgaccggaggcgggggcaaacggaggccggcagccaagg

SEQ ID NO: 194827 - RNA, 79 nt, Homo sapiens
cagaaggcagaggaggcgcaagacgcgaccaaagccgacggggcaagggagaagagaagaccagagaaagaacaacccc

SEQ ID NO: 194828 - RNA, 75 nt, Homo sapiens
ggcgcgcccgccgacggagcagggaacgagaagacccgagaaaaaacgcaccccggcaacggccagcaaaaaaag

SEQ ID NO: 194829 - RNA, 83 nt, Homo sapiens
ccgagccgccgcccccgggaggccggcgccgcagcccgggcccaggccccggcagcgccgggacaaggggaagaacacggaaa

SEQ ID NO: 194830 - RNA, 78 nt, Homo sapiens
ggcggccagcgccacgccaaacccgaaacagcgcgaaggcaggaaaaaaaggggcaccaagaaagaggagggagagac

SEQ ID NO: 194831 - RNA, 84 nt, Homo sapiens
ccaccccggacggagaaacaggcggaccaaaccgccgcgcaacggggcggcacacaaggagcgaagggcagggagaacgccagg

SEQ ID NO: 194832 - RNA, 74 nt, Homo sapiens
aaagggccaaagaagggagagagcagagcaccaaacaggggggaaggaagacaaacagagccaagcagacagaa

SEQ ID NO: 194833 - RNA, 63 nt, Homo sapiens
ccagccaccgcccaggaagccaggcgggcaccaggcccgacaccagagccaaagaaaacagaa

SEQ ID NO: 194834 - RNA, 73 nt, Homo sapiens
cggcgcaaccccggcccccacggccgagaagaagacaagcagaaagaacaagggaccccagagaaagcagcag

SEQ ID NO: 194835 - RNA, 74 nt, Homo sapiens
agacaccagaacaggagagaggagagacaacacgggagccaacacccgaagggaggcagccgccacaggcgagg

SEQ ID NO: 194836 - RNA, 78 nt, Homo sapiens
cccgccggagaaccccgacgggaccggagagaacggagagccagggcgggcacggcccggagaacggggaacggagaa

SEQ ID NO: 194837 - RNA, 76 nt, Homo sapiens
agccgcagccacgcagcagcgagagaacaaaaagcacccgacaagagcaaaaacagccagcaagaggaaaagcaac

SEQ ID NO: 194838 - RNA, 75 nt, Homo sapiens
ccagagccggagcggacccccccacgagcgcgacccgaagaccaaaagaaagccacagggcagaagacccgagaa

SEQ ID NO: 194839 - RNA, 80 nt, Homo sapiens
gaggaccaagagcaaggagaaaaagaagcacagcccccagcaccaagcagaagacgggcaccccacgaggacggcagacg

SEQ ID NO: 194840 - RNA, 70 nt, Homo sapiens
cggagaaaaggaaccggccccggagaacggcgccgagagagccacgggaagaaacaccggaaagcacacg

SEQ ID NO: 194841 - RNA, 71 nt, Homo sapiens
agggacaacagaacaaaggaagggacagcggaaagacccaggggagcagagcacgcagcagcgcagcaagc

SEQ ID NO: 194842 - RNA, 80 nt, Homo sapiens
ccaggagcacggggggaacaagaccgccgggacggaagacgggagcgggcccggagaacaccgggcagcgcaccgcaaag

SEQ ID NO: 194843 - RNA, 77 nt, Homo sapiens
cggcggggggcccgcggccacgcccccggcgacggaaaaccggcagcaggagaggccacgccagggaaggggccacc

SEQ ID NO: 194844 - RNA, 37 nt, Homo sapiens
ggcgccggagacgagccggcaacagacgacaaaaaaa

SEQ ID NO: 194845 - RNA, 72 nt, Homo sapiens
ccgagcgagagaggccagcccggcccggacagagccacacgaaagccaaagggacccaggggggccgccccc

SEQ ID NO: 194846 - RNA, 68 nt, Homo sapiens
gccccgcaggaccgcacccgcggagacggacgcccggacgccccacgccccccgcagcccagcccaga

SEQ ID NO: 194847 - RNA, 122 nt, Homo sapiens
aggaacaggcggcgcgcgcggcgcgggacgcgcgcgggcacccacggagccccggggcgcccaccgggggacggcacggcaggcggacgcccggggccccccggaccacgaggagcaccgag

SEQ ID NO: 194848 - RNA, 80 nt, Homo sapiens
acaaccgaacgcaccgaggagaagaccaggaggcgggccaaggcgggggcgggagcaaacgggggaagaccagagagggg

SEQ ID NO: 194849 - RNA, 61 nt, Homo sapiens
cacagaaaagcagcccaacgaaaaccgcgcagcgagagcccagagaagggaagaaagcgga

SEQ ID NO: 194850 - RNA, 117 nt, Homo sapiens
ggcaggccaacgagagacgcagaggcgggccagagcccaggagcgcgacaacgacaagcaccggacagccagaggagagcgcgggagaccaggagcaggcacagccggagaaaccca

SEQ ID NO: 194851 - RNA, 78 nt, Homo sapiens
gagacccgcaaaacaacgagaaggcggaaacagcccgcaaagaaaaacaaccaccagcgagcaaaaaggcaaagacca

SEQ ID NO: 194852 - RNA, 77 nt, Homo sapiens
gaaaagaagaagaagagaagaaagagaaaccgagccccgaaaacaagccgcggcagaaacagccgagaccggaaaga

SEQ ID NO: 194853 - RNA, 57 nt, Homo sapiens
cgcagccggagggaggcggaaccgagagcaggaacgcaacggaaagggaaggaccga

SEQ ID NO: 194854 - RNA, 68 nt, Homo sapiens
ggcaggccagcacccgagccgagccccagcgcagggaggacagggagcaggggagaagagaaaaaaga

SEQ ID NO: 194855 - RNA, 61 nt, Homo sapiens
caaacgcagaaaagagagccgggcgcggaaacgagcagcacaaggaaaacgagagaaacga

SEQ ID NO: 194856 - RNA, 73 nt, Homo sapiens
cccccagccagggaacgccaggaggggaggagggagggccacggcaagggaagcacaaaaagagccgcagagg

SEQ ID NO: 194857 - RNA, 69 nt, Homo sapiens
cgaccaaccgagcagggacagaagaccaagaagcaaaacacaccacaccgagcagagagcagaaggaaa

SEQ ID NO: 194858 - RNA, 75 nt, Homo sapiens
cacggccacacaacacaacgccaggggcaaaggagcagagaacgacaagccacacgaggacagcccgcaacacca

SEQ ID NO: 194859 - RNA, 78 nt, Homo sapiens
cgagcgcccggaccaggccaccgccaccaggcccagaccagaagggacaagagaaccgcaccccagaaccaccggccc

SEQ ID NO: 194860 - RNA, 30 nt, Homo sapiens
acccggcccgcgccggacggggaaggaagc

SEQ ID NO: 194861 - RNA, 90 nt, Homo sapiens
acgacagcgggccgggaaaagggcacgaggccggaaccgcccagccccggcgaggagcaaaaaaaaagcaacgagcaggagcaaccaacc

SEQ ID NO: 194862 - RNA, 67 nt, Homo sapiens
gaagcagcccgccgcgccgccccgagcagcccgccaggaccagaggagcgagagcagcaagaaccac

SEQ ID NO: 194863 - RNA, 39 nt, Homo sapiens
aacaaaggcaggaagagaaaaggaaaccgaagaagaacc

SEQ ID NO: 194864 - RNA, 64 nt, Homo sapiens
agccgcccccacagcgagcaggggaagcgacaaggcccaggaggcgcacaaacgaggacgggaa

SEQ ID NO: 194865 - RNA, 62 nt, Homo sapiens
aaaggcacagaagaagagcgaccccagaggccacaaaaaaggaagccgcagacgaaacgacg

SEQ ID NO: 194866 - RNA, 70 nt, Homo sapiens
cggcccccaagggcagccggggccccaccccaccgaggcaacacaccgaaaaaagggaagcggagaggag

SEQ ID NO: 194867 - RNA, 79 nt, Homo sapiens
caaggcggcaagaaagaaaagaagggcgcccggaaaggcgccgaagagagagaagcagagacgcggggcaacaaggaga

SEQ ID NO: 194868 - RNA, 79 nt, Homo sapiens
cggggcggggccggggaacacacagacccacagcggggccgggccccgaccacccagagaaaggaaaggagccagagaa

SEQ ID NO: 194869 - RNA, 71 nt, Homo sapiens
caacacaaccagaagcggaaacaagcggaaaggacacagggcggagaagccgaagggccagaaccaccccc

SEQ ID NO: 194870 - RNA, 79 nt, Homo sapiens
cagggcgccggcggagggaaggcgcgggagggccaacagggcaaacaggaacccgaggcaccacggagggaacaagagg

SEQ ID NO: 194871 - RNA, 73 nt, Homo sapiens
cgcaaggccacagcacggggaccaaaacagggaaggaagaaccaggagggaaaaccccagcgggcagaccaaa

SEQ ID NO: 194872 - RNA, 78 nt, Homo sapiens
cggacgcgagcgaggcggagaagggacacggcaggcgccagagcaagcagggaggggcccagggggaagccgcaggca

SEQ ID NO: 194873 - RNA, 76 nt, Homo sapiens
cggagaaagccaagggccgagcaacgggagcgcagggagaaagcgaaacaggcaagagagcgccaggccagacagg

SEQ ID NO: 194874 - RNA, 75 nt, Homo sapiens
aggagagcagagagggaagccaaagaaggggacccaagggagagagggaacggcgaaagggcagcccggaaggag

SEQ ID NO: 194875 - RNA, 82 nt, Homo sapiens
agggcggaccccggggccaggccggaagcagaccccagcagcagcgccccacacccacgcggggcaccgggacgaggcggag

SEQ ID NO: 194876 - RNA, 80 nt, Homo sapiens
caacgaggaaccaaagggagaggaaaagggaacaggcacgccccacccgccagccgagcccccgacgcagcacaaagccc

SEQ ID NO: 194877 - RNA, 74 nt, Homo sapiens
gaccagaaaccaggagccacggacaagaccaaaaggaacgaaaacgacgggggaggagaacgggacgacagacg

SEQ ID NO: 194878 - RNA, 59 nt, Homo sapiens
ggggacaagaacggcggacccgggggaaaccgcaaaagggaccgacacaagaagcagcc

SEQ ID NO: 194879 - RNA, 81 nt, Homo sapiens
gaaccaggcgccagcagaggacacccgcgaagcaacaaaggcacagaagcacggcaaaaggaaagcagaaccacagaagca

SEQ ID NO: 194880 - RNA, 69 nt, Homo sapiens
cagacggggacagaaagaaggacccagagcaaaaagagggaaagacaaggagccgggccgagaaaccga

SEQ ID NO: 194881 - RNA, 53 nt, Homo sapiens
gaaaagacagagcgacgaagggaaccaggaaaaaaaggggaaccagaagaggc

SEQ ID NO: 194882 - RNA, 89 nt, Homo sapiens
agccgcagagcggggaggaggcggggcccgcggaggagccggacccacggcagggcaaccccaccgcggaaggcaggcacacagacgag

SEQ ID NO: 194883 - RNA, 79 nt, Homo sapiens
cgacagccgccgggacagacgagggcagcccacgagaccgcagagacccggccaggcagggaccaaaaccgcagcgagg

SEQ ID NO: 194884 - RNA, 78 nt, Homo sapiens
ccccgcgggaaggccggggcgccaccccgcccccgaggggccgcagggaagcacagcacagcagaagcacacgacaga

SEQ ID NO: 194885 - RNA, 80 nt, Homo sapiens
cccccaaaggcggaacagacgggagacacgagagagacagcagaaagaccacccaggcaaggagcagcaaagggcaagaa

SEQ ID NO: 194886 - RNA, 74 nt, Homo sapiens
gacgcgggcgcgagggcagaaccggcgaccacggcacagaacgagacgaggaagggcgccccaagaccgccacc

SEQ ID NO: 194887 - RNA, 86 nt, Homo sapiens
caagcacgcaccaccagcccggcacaccccaaagaaccacagcgagggcaccgacacagagcccgggcagagcacgcccacagagg

SEQ ID NO: 194888 - RNA, 57 nt, Homo sapiens
cgcccggcgaccgcaccccccaggaaggcacagcgagcacccaaaccaacccagaag

SEQ ID NO: 194889 - RNA, 73 nt, Homo sapiens
cgccgcggggcgcgcggcgccggcggcgcgcgacccccgcgcaggaggcagcacggcaggagacgaggagagg

SEQ ID NO: 194890 - RNA, 76 nt, Homo sapiens
gccgggagcgccggggccaggagagcgcgccggcgagaagcggccgagccagcagcagggcacccgcacagcacca

SEQ ID NO: 194891 - RNA, 68 nt, Homo sapiens
gaagcacgaaccaaccgaaaacagaaacaaacacaccagggccgccgggaaacgagacaggaaaccaa

SEQ ID NO: 194892 - RNA, 55 nt, Homo sapiens
gagaaggagacaccggaggacgaagagggggaggcgaaccacgggaacaaaggcg

SEQ ID NO: 194893 - RNA, 65 nt, Homo sapiens
ggagaagcagccgccagccagcagcccgccagccgccgggaggaccggacgccacacaggggggg

SEQ ID NO: 194894 - RNA, 82 nt, Homo sapiens
cgggacaggagggcaggaagagcgcagcggggacaagggccagacggacacgcacggcgccaacagcaacaaggcacacccc

SEQ ID NO: 194895 - RNA, 69 nt, Homo sapiens
gggcagcgaaggagaccacgagcagacaggagacaaccagcacggaggagggagagaaggagaacagcg

SEQ ID NO: 194896 - RNA, 69 nt, Homo sapiens
aaaccaaaaccccaagagcacacgcagacacggaggcacacgagcagacccgggacagaggcaccgaag

SEQ ID NO: 194897 - RNA, 76 nt, Homo sapiens
ccgaagaagccacaaacaagcagcaccgacggccagcgcccaaggagggaagcgggagaggccacccgcccacgag

SEQ ID NO: 194898 - RNA, 53 nt, Homo sapiens
ccgagacaggggcgaacaccgccacggaacccagaacaggccaagccccacag

SEQ ID NO: 194899 - RNA, 60 nt, Homo sapiens
cagacagaacagaacccaaaagccgacaaccccagaaacaggagcgggaaggcagaaaca

SEQ ID NO: 194900 - RNA, 72 nt, Homo sapiens
ggcagcgacacaagcggacagaacagacgggacccccagccaaaggcaaagcccagccggaccagagggagc

SEQ ID NO: 194901 - RNA, 80 nt, Homo sapiens
cccccccccgacagagacggcggagaccccgaaggcgcaaacgacaccacccgaccggaaagagaagaagggcaagaaaa

SEQ ID NO: 194902 - RNA, 62 nt, Homo sapiens
gcgcccgggcccgccccggaggggagggcaagagccaggggagaccaccagacacaaccaca

SEQ ID NO: 194903 - RNA, 76 nt, Homo sapiens
ggagacgcggacgggggccggaggggaggggaagaaggcaggcccacgggagccgagacccccgaggggaccagac

SEQ ID NO: 194904 - RNA, 77 nt, Homo sapiens
gcagaagagcgcccccgggacacagcaggcaggagagacaacagcaacccagcaacagaaggccaaggggacaaaga

SEQ ID NO: 194905 - RNA, 74 nt, Homo sapiens
gggaccgagcacccgccccgggcaccaacggaagggaaccccccggaaaaaagaggccagaaacacccgaccac

SEQ ID NO: 194906 - RNA, 36 nt, Homo sapiens
ccccaagggcgggaacagacagcacaaggggggggc

SEQ ID NO: 194907 - RNA, 63 nt, Homo sapiens
caccggggaggagaggaaggaagagggaccaagaaaggcccagggaccaaagcccggacaagg

SEQ ID NO: 194908 - RNA, 74 nt, Homo sapiens
agcagagaggaccgcagaagggaaggagaccgcccggacaacaacagggcgacgcagagaccgccagagaaaaa

SEQ ID NO: 194909 - RNA, 74 nt, Homo sapiens
ccaaacgggcagggccaggaaacaagacgaagccgagcacccgaagaagacaagacaggggaaagacagcccag

SEQ ID NO: 194910 - RNA, 53 nt, Homo sapiens
aagacaccgcagagagcagggagcggggccaacaggggcacgacgccccacgg

SEQ ID NO: 194911 - RNA, 57 nt, Homo sapiens
caaaacagaggcaacaagggcccaaagccggcagccaacggaagagaaagaaacacc

SEQ ID NO: 194912 - RNA, 64 nt, Homo sapiens
gcgcaagaggggaacaagaacggcgacagacaagaggcgaagaggagaggaagacacccccccc

SEQ ID NO: 194913 - RNA, 56 nt, Homo sapiens
ccggggacaagaaggccccagaaccacagaggggccaccaggagagcccccaccag

SEQ ID NO: 194914 - RNA, 41 nt, Homo sapiens
caacaagccacgaccggggagcagcagcagcagaacgaaaa

SEQ ID NO: 194915 - RNA, 54 nt, Homo sapiens
agcgagcgaccccaccgagggggaggagaaacaggaccacacacaagggcggcc

SEQ ID NO: 194916 - RNA, 73 nt, Homo sapiens
cgcgccaggaggaccgcaggaggacgcagacggagacacgggggggaaacaagcacgggcgagccaggacacg

SEQ ID NO: 194917 - RNA, 100 nt, Homo sapiens
cgggccacggaagccaccgacaggcccgagggcccgagagcaccgcgccagacagagaggacggggacgggccccaggacgaggaagacaaggccagcca

SEQ ID NO: 194918 - RNA, 70 nt, Homo sapiens
gaaggaaagccccgaccacacgaggcgagacagcaacgagaaaacaaagacagacaaggacagacacagg

SEQ ID NO: 194919 - RNA, 72 nt, Homo sapiens
ccgaaacaaccacagcaccagacaagcaaaggggaagcccagccccagaacacagaacgcgcacggacaagg

SEQ ID NO: 194920 - RNA, 69 nt, Homo sapiens
ggccgagcccgggacccggaagaacgggaccccaaaggccacgaaccgcgggcaaggaagagacaagga

SEQ ID NO: 194921 - RNA, 79 nt, Homo sapiens
agagcggcagagaaccgcgaagggagcggccccgagacgcgccggcgcgggaacagggaggccaggcggcagcagccag

SEQ ID NO: 194922 - RNA, 78 nt, Homo sapiens
ggggcgaccaggacagcggagcaagccggcagcgcccgagggagcaaggagaagagcggaacccagaccgcgcccgga

SEQ ID NO: 194923 - RNA, 75 nt, Homo sapiens
ccgcggccggaggagcccccaggccagaaggagaagcggcgaggaaggaagccgacgcccagcagcgcacgcgca

SEQ ID NO: 194924 - RNA, 81 nt, Homo sapiens
cggagcccggcccccacagaagccaccgcaagggccacgcgggcagaccgacagaaggacccaaccgaaggcggaagaacg

SEQ ID NO: 194925 - RNA, 59 nt, Homo sapiens
cagacgggagaagaaagccgcagggcggagaacggaaaagcaccaggaagcagagagga

SEQ ID NO: 194926 - RNA, 75 nt, Homo sapiens
aacaagggaaagagcccggaggggagggagagaaaagaagaggaccagacggaaccaggggaccaaaaagaccca

SEQ ID NO: 194927 - RNA, 54 nt, Homo sapiens
cccgaagaggcgaggagcaacccagagcaccccccggcccagaaccaaacacgc

SEQ ID NO: 194928 - RNA, 84 nt, Homo sapiens
cggcggccgccggggggccggggcgcggcggccgccaccaggcacccggaagagcgcggccgaaggaaagcaagaccaacaggc

SEQ ID NO: 194929 - RNA, 55 nt, Homo sapiens
ccccaccgcaggcaccaccacaaggggccagaggcccagaaggagaaggcagccg

SEQ ID NO: 194930 - RNA, 78 nt, Homo sapiens
aaacgcggaggggaccagagaccaaaaaaaaaacgcgaacaccgacggagccagggcaacagcgcagcccggaaagag

SEQ ID NO: 194931 - RNA, 80 nt, Homo sapiens
caagcaagcagaaacacgacaaagagaccaccggcacagaaagggagggcgagaggacgagagaggagcgcgggccgaga

SEQ ID NO: 194932 - RNA, 55 nt, Homo sapiens
gcggaggacacccaacccggagcagcaacaggaccacagaaacgggacccgcccc

SEQ ID NO: 194933 - RNA, 76 nt, Homo sapiens
agacgaaacggcaaaccaccaccaccagaagcaccacaaccgcagagaacgaaaacaaacggaagagagggcagca

SEQ ID NO: 194934 - RNA, 55 nt, Homo sapiens
gcgccgaagggcgagcgaagcagagagcggaaccgccaacaggacacgaagaaac

SEQ ID NO: 194935 - RNA, 75 nt, Homo sapiens
cagggcggcggccagcgccacgcgcgccacggccggaacgcacagcggaaggccgccacccgggccaggagccgc

SEQ ID NO: 194936 - RNA, 74 nt, Homo sapiens
gagcacacacacaccacagccagagaaggcagccaagcccggggaaacggagagaaccagagaaaaccaccaaa

SEQ ID NO: 194937 - RNA, 66 nt, Homo sapiens
acgacagggaggagggagaacacagcaaccgaccaggcaaagcaccacaggggaaaacaagcagaa

SEQ ID NO: 194938 - RNA, 76 nt, Homo sapiens
ggacgggggaggaggcaacgccgcggagcagaagacagagggaggagggccacggacaaacacgggcccggcccag

SEQ ID NO: 194939 - RNA, 68 nt, Homo sapiens
gaacaggggccagggaaaggagcagagagagagagcagaagcgccccacaaggaaagacgccaaggaa

SEQ ID NO: 194940 - RNA, 64 nt, Homo sapiens
acaaggaaaaagagaaacccaagagggaaccacccccaacaaccagggcaaagacacaagcagc

SEQ ID NO: 194941 - RNA, 71 nt, Homo sapiens
ccggcaagcacgagagcagacccccccaccagccaggacccccagccacgagggggggaacagcgccagga

SEQ ID NO: 194942 - RNA, 58 nt, Homo sapiens
ggaggacagcggagaaaaaggggaccaggaccccaacacagcagggaacaacacaaac

SEQ ID NO: 194943 - RNA, 64 nt, Homo sapiens
cagggagacccaggacaagagagagaaaaggaaccagaaggaggaacaacccggccccgcccgc

SEQ ID NO: 194944 - RNA, 66 nt, Homo sapiens
cggagcgcagaccgaggaaaaggagagagggaaccgagcccgcaagagacggcagccccgcgacca

SEQ ID NO: 194945 - RNA, 123 nt, Homo sapiens
ccaagaggcgggcaggagcggcggccaggccagacccgaaggccaggagacccgaccccaagaagacgaccccgacgcaggccaggagccgcggacagaagccgagcacggccgagacaaaag

SEQ ID NO: 194946 - RNA, 88 nt, Homo sapiens
gacagacgaaggacagcggcaccgccagacggccagaaagccgccagagcggggcacggagcgggagaggacgacgaacacccaggca

SEQ ID NO: 194947 - RNA, 67 nt, Homo sapiens
gcggaccgagagcgcgaaacgcacgagaaggaacagaccaacaccaaggacccgcacgggggcagaa

SEQ ID NO: 194948 - RNA, 42 nt, Homo sapiens
ccccacccacccgagaacaccaaaggagccgaacccaaaaag

SEQ ID NO: 194949 - RNA, 75 nt, Homo sapiens
gggaccgggagggaaagaaaacaacccgccgcagccgcaggaaaagaaggaggccagcgggacacacaaagaaag

SEQ ID NO: 194950 - RNA, 53 nt, Homo sapiens
gccccggggccggcccgcaggaggcagccaccagcaggaggaaaaccaacgcc

SEQ ID NO: 194951 - RNA, 84 nt, Homo sapiens
gggaaccgcgggagcgcggcagcccgccccagagacccaggaggggcccagcgccccccggaacggccacaggcaccacaagca

SEQ ID NO: 194952 - RNA, 76 nt, Homo sapiens
gaagaagaacgacccgcccggggcagcaggggaggaccgcacacagcagcacagaacacacgagacgaacaagcag

SEQ ID NO: 194953 - RNA, 74 nt, Homo sapiens
gagggacccgggccccacagagagcccggcagcgacaagcccagacaacagacacaccgaagacgccccggaaa

SEQ ID NO: 194954 - RNA, 86 nt, Homo sapiens
gcacgcccaagaaaccaacacccaacagccaccaccaccaccagaggcacccgccggcgccccccggcacaacccgcgggcaccag

SEQ ID NO: 194955 - RNA, 74 nt, Homo sapiens
aggcggcacccagccccagccggcccagagaacagcggggagcgcccgcaggcccccaaggcggaaccaggccg

SEQ ID NO: 194956 - RNA, 81 nt, Homo sapiens
accgggggcgccagggaagcgggaggcaggcagccaggcacgaacgagacacgccgggcgcgacccaccggccggcgggcc

SEQ ID NO: 194957 - RNA, 73 nt, Homo sapiens
aggcgaaaacagagccacgaacggggcaaagccacagggaaggacgcaggagcacgcggccgcccgggacggg

SEQ ID NO: 194958 - RNA, 83 nt, Homo sapiens
ggggagagaaccggacccgggcagggccaggacccagcgaggggggccaggacgccgcccacaccgcgagcgccaacacacca

SEQ ID NO: 194959 - RNA, 54 nt, Homo sapiens
cgaagggaggcagacaagggagcccaggcggcaggagagcaaggggcaacgaag

SEQ ID NO: 194960 - RNA, 61 nt, Homo sapiens
caggggaacgcaagacaggaagagaggccggcccccaggggcaagaagaaagcaacacaag

SEQ ID NO: 194961 - RNA, 94 nt, Homo sapiens
gccagcacccggccgagacggcggcagcagcggcacagcagcgagagccagacaagccagacaccaagaccccacgaaagaccgggagccggag

SEQ ID NO: 194962 - RNA, 72 nt, Homo sapiens
gggaggagagagggagagccaaagaaggaaaagaccaggcacggacacggaggcgcggggggaccacgaagg

SEQ ID NO: 194963 - RNA, 56 nt, Homo sapiens
aggaaaagggaaggacaaggaaacaaacacaaacgggcgagacgacgggaccgaag

SEQ ID NO: 194964 - RNA, 50 nt, Homo sapiens
aaaaggggcggagcaccaaaagcagaggccccaaaggcagaagaaacagg

SEQ ID NO: 194965 - RNA, 84 nt, Homo sapiens
ccagaggcagagccgccccagcagcaggggcgccagagcgggagcacggcggcgaggagaaaggaaggagaggagaaaacgcac

SEQ ID NO: 194966 - RNA, 71 nt, Homo sapiens
agccgcggccgggcccgaggaaccagacgccgcaggcccacgcagcggaggcggggaaaggccccacgaac

SEQ ID NO: 194967 - RNA, 51 nt, Homo sapiens
ggacagagaaaagcaagcaaaggcgccaccaccagaaccgacgaaccagga

SEQ ID NO: 194968 - RNA, 70 nt, Homo sapiens
aagcgcgccacgcgcggcgcgccggcccgagagagaaagggaaagaaggagcggagcagaacaaggaccc

SEQ ID NO: 194969 - RNA, 79 nt, Homo sapiens
ccgccagccggcccggcggcgcgcgcgcgacgcgcgcgcccggcccgggaagaaggaaccagcaaagcgccacgaagca

SEQ ID NO: 194970 - RNA, 83 nt, Homo sapiens
cgcaacagcacgccacacaaggggagccgaaggccccaaagcgggaaagcgcaaagcagcgcaccccccacgggcagcagggg

SEQ ID NO: 194971 - RNA, 80 nt, Homo sapiens
gaaagagagcaggaagcggaaagcgcccgcccgccgggagcgggagcgacgccagggcccgcagcggcggagaaaccacc

SEQ ID NO: 194972 - RNA, 75 nt, Homo sapiens
gaacgaggggccccaagagcacagaccagcagccgccaaagaacaccaaagaaacgacgcagggcaagaaggaaa

SEQ ID NO: 194973 - RNA, 77 nt, Homo sapiens
ccaggggcaggggaacccagccggagcccaccgccaagacacagagcacaggcagaaacagagcgagccagagcaga

SEQ ID NO: 194974 - RNA, 72 nt, Homo sapiens
cgaagccggcaaacgcgaagaggaggagaagccaagacaccgcgaaaggcaagggcagcaggaaagacgaga

SEQ ID NO: 194975 - RNA, 61 nt, Homo sapiens
cgcgcagggcagcggcccccgcccgcagggcgcgaggcggggcaggacacaccaccaagca

SEQ ID NO: 194976 - RNA, 73 nt, Homo sapiens
acaaagcggccgaaacagaaaacaagagaccacagaagcgccacgcagagccccgccaggaagacacgccggg

SEQ ID NO: 194977 - RNA, 62 nt, Homo sapiens
cccaggggagcagagcagggacggcggggaacggccgaaagcacgcggcagggaggaggcaa

SEQ ID NO: 194978 - RNA, 57 nt, Homo sapiens
accacaacacagcacaaagaagcagacagggcagagcaaacaaagcaaaaaacaaaa

SEQ ID NO: 194979 - RNA, 85 nt, Homo sapiens
ggacaacccagaggcaacaaaggcgagcaaacggggacagcgccgaccggaacagggaccacggaagcccaggaccagccccgac

SEQ ID NO: 194980 - RNA, 67 nt, Homo sapiens
aaacaagaagacgggaggacaagggcccagcagaacaggagcacggaagcccgcacgcaggcccgcc

SEQ ID NO: 194981 - RNA, 81 nt, Homo sapiens
gggcgagcagaggggaagcggcggagcaggaggagggcgaggggagcacaggaaagaacaagagccaccaaaaaacggaaa

SEQ ID NO: 194982 - RNA, 57 nt, Homo sapiens
gacggacaaaggaaagggggagagaacgccgagccgcgccgcagccccgccgccgag

SEQ ID NO: 194983 - RNA, 64 nt, Homo sapiens
cggcacgcaagaacgagcgggcagccgcccaagcggccgcgagaaccgggcagagcagcccggc

SEQ ID NO: 194984 - RNA, 72 nt, Homo sapiens
cagagccggccgggaggaaaccaggacgcagagggagcagccaaggacccaccggacacaagagggcaagaa

SEQ ID NO: 194985 - RNA, 80 nt, Homo sapiens
cggaggacacaccaaacagggaacccaagccgggaggagagaagggcggcaggggcggacgacggcgggcaccgaccccc

SEQ ID NO: 194986 - RNA, 77 nt, Homo sapiens
ccgccgcgaaacccaagccgccgcgaggagcggcgcgggccccccccaccgcggcagccagcccggcgcgcgcaggc

SEQ ID NO: 194987 - RNA, 79 nt, Homo sapiens
gaggggccggacccgcaagccacccaagcagagccacgggccccccagaagacgacagcgaacacccgaaggagccagc

SEQ ID NO: 194988 - RNA, 58 nt, Homo sapiens
accacaaggggaggacaaccgcccgggaccaggcagccagaagagaaggccaagcagg

SEQ ID NO: 194989 - RNA, 31 nt, Homo sapiens
aacaaacaccggagcacccgaaccagaccca

SEQ ID NO: 194990 - RNA, 72 nt, Homo sapiens
gggcgaggaccgcgcaaaggcaaaacgagagcccgggaagcgcagagggaacacggccacgaggggaacggg

SEQ ID NO: 194991 - RNA, 75 nt, Homo sapiens
cacagacccaccagcagagcagggaagcaaagagcacccgagcccagcaggcaagcagccggcaccaagacaggc

SEQ ID NO: 194992 - RNA, 74 nt, Homo sapiens
cccaccacgccagccaccacgcggcgcacaacgcaggaacaccgcacgcgcggaggagacacaagcgggacgga

SEQ ID NO: 194993 - RNA, 71 nt, Homo sapiens
gggcggggaggaacaagaaaaccggcccgaggggacgggggaacccggggccagagagcgagggggaacgg

SEQ ID NO: 194994 - RNA, 76 nt, Homo sapiens
ggcagaggaggaccacaaagggaagagccggccaaaaaacaacaaggaagccaggcccaccaagccgagaacacca

SEQ ID NO: 194995 - RNA, 69 nt, Homo sapiens
aggaggaggccacaccccccgggcacaccacagcggcaccggcccggcggccccgccacccacgacgga

SEQ ID NO: 194996 - RNA, 84 nt, Homo sapiens
agggaaaaacgcccgaaggagaagaggaagcgacgcgaggagcgcacgaacagaaggaagaacagacgcggcacaacaagaaag

SEQ ID NO: 194997 - RNA, 77 nt, Homo sapiens
ggaccgaaggaaccaagaaagagacagcccaaaaaggagaggaacagggcgcaccacagaagagccaaagacggcaa

SEQ ID NO: 194998 - RNA, 49 nt, Homo sapiens
gacaccgacccacgccagaccagcccaggccaccagaagaccaagcgga

SEQ ID NO: 194999 - RNA, 62 nt, Homo sapiens
cagcgagaacggagcaaggggcaagcaccacagcacccagcaggaggccaaaggaggcaaac

SEQ ID NO: 195000 - RNA, 67 nt, Homo sapiens
gaagagaagaagcaacagacaaaagggccacagcgccaagcaagaaaagagacacagaaggaaaaag

SEQ ID NO: 195001 - RNA, 74 nt, Homo sapiens
gggagcaaaagcaccccgcaccaacgagaagagaggacagcagcggacggccggaccaagaggcgccgcccccc

SEQ ID NO: 195002 - RNA, 81 nt, Homo sapiens
ggggaccccaaaagcaccgaagggcacgaacaggccagaagaaacaccagcaagcagagcacccaacaaagagaacaacag

SEQ ID NO: 195003 - RNA, 37 nt, Homo sapiens
gcccgccacacagccaccagaaccaccacgaacgggg

SEQ ID NO: 195004 - RNA, 42 nt, Homo sapiens
cagcagagacgcagcagagaggcgagcggcgcagcgcaggag

SEQ ID NO: 195005 - RNA, 72 nt, Homo sapiens
agcaaaccaaaccagggaacggagcagcaagaaggagcagagcgaggcagggccccagagacacaagacaac

SEQ ID NO: 195006 - RNA, 74 nt, Homo sapiens
cgcaaaaacaagacggggcgccccacagaggggcgacggcaaagcgaaaaagaccgcagggaaggccgccacga

SEQ ID NO: 195007 - RNA, 79 nt, Homo sapiens
agcccgcagacagaggggcgacgaccgcacaacagaaggagaaaggagaccgggacaaggacccccggccaaggagaac

SEQ ID NO: 195008 - RNA, 71 nt, Homo sapiens
gcccccaggccgagaaaccgcacggccaagcccacacagaggaaaccgggagagagacagaaggcgaaaag

SEQ ID NO: 195009 - RNA, 76 nt, Homo sapiens
gacagggccaacagggccggccggccggcccccaaacgcgcccgcccccagggccagaaacgccggacgccgaaaa

SEQ ID NO: 195010 - RNA, 93 nt, Homo sapiens
aaagaaacgcaaaaccggcagaggcgccccaccggcagacacacaagagcaggagcaccggcagcaccaggggaggggagcaggcagcggcca

SEQ ID NO: 195011 - RNA, 30 nt, Homo sapiens
ccacacgcgccagggggcagcggcaagcag

SEQ ID NO: 195012 - RNA, 53 nt, Homo sapiens
cgccggccggagcagcagcccgaggaagaagagagggcgaaggaggccacaca

SEQ ID NO: 195013 - RNA, 78 nt, Homo sapiens
cgccagccggaaggagaagggccgggcgaacagccagggcggacccggagcagggccagccccgaggcccagccgccc

SEQ ID NO: 195014 - RNA, 30 nt, Homo sapiens
gaaaaccacgccaacccgccggagcggaag

SEQ ID NO: 195015 - RNA, 78 nt, Homo sapiens
ggcgaggcgagccagggcccgcagcgaggaaacaggaacacgaaagaggaaaaacgcacaagaaaccgaagccaagga

SEQ ID NO: 195016 - RNA, 84 nt, Homo sapiens
gagaaggcggcaagaggcagaagagggaggggacgcacaaccaaggaacggaaggcagaagaaggagccagaaacagaagccag

SEQ ID NO: 195017 - RNA, 58 nt, Homo sapiens
ggggccggggagggcaaggaagaaaaggcggaccggcgaacgaagagccgaagacaca

SEQ ID NO: 195018 - RNA, 85 nt, Homo sapiens
aacgcacccgagccggagcgcccagcgccgcgggaccggggccgcggggcggacgggggcgccaggaccaagaacgcccagcccg

SEQ ID NO: 195019 - RNA, 85 nt, Homo sapiens
cccgcgccccgacgcgccaacagggacccgagccagcaggggaagaagagcaccgaagagagggaaggaaggaacagcagcgcaa

SEQ ID NO: 195020 - RNA, 65 nt, Homo sapiens
acggccacggcccccacgcaacagcaaggcagcagccgaaacccagcggcaccaaaagcgaagac

SEQ ID NO: 195021 - RNA, 82 nt, Homo sapiens
ccgagcccagccgaaggagaagggggcaaaagagccaacacccaggccaggccgcccggaaggaggccgccacgccccgccg

SEQ ID NO: 195022 - RNA, 81 nt, Homo sapiens
ggcagaggggcccccgggccccaggcccacgaaagaccacagcaagaccacgcccccagccgggggaccaggccgaacgac

SEQ ID NO: 195023 - RNA, 58 nt, Homo sapiens
caagcaccgggcgccccaacgggcgcagccacccggggaaccccagcaagaccggcgg

SEQ ID NO: 195024 - RNA, 68 nt, Homo sapiens
ggacccggccgaggcgggcgcaagagaaggcaccaagagccaacaaaggaacgagcagcaacggccag

SEQ ID NO: 195025 - RNA, 78 nt, Homo sapiens
agagcacccaagaagagcagaaaaccagaaggcaccgacaggaaaggaaaaggagaaccaggcacccgggggcaagga

SEQ ID NO: 195026 - RNA, 80 nt, Homo sapiens
ccccccccaacaccgcgacacgcaggccccccagaccggccaggggacaggagacgagacgacgaaggcgcagggacaag

SEQ ID NO: 195027 - RNA, 54 nt, Homo sapiens
gagaggaagaagaacgacccgcccggggcagcaggaaggagggccccggagcag

SEQ ID NO: 195028 - RNA, 69 nt, Homo sapiens
agcacccaacaacaggcaacaaaacacaaacggcaacaaagaaccaggggagaagcacgacagcagcaa

SEQ ID NO: 195029 - RNA, 71 nt, Homo sapiens
gcagcggaaagcaggagcacagcgccagaagaacagcgcgccgaaccccagccgaaggcagagacccaaag

SEQ ID NO: 195030 - RNA, 79 nt, Homo sapiens
ccaacgggggcacgaagggggacacaggcgagaaccaggcaaaagaaaccaccgacgaagcccgagacagaccagaaaa

SEQ ID NO: 195031 - RNA, 67 nt, Homo sapiens
gcccgggacccagagcaccccggagcccacagggggggagaagcagacggcgggaaagggcaacagc

SEQ ID NO: 195032 - RNA, 78 nt, Homo sapiens
gcacgcgcagccaggcgaagacagagggccgacggcgacagaacacacaaacccgaacggcgggaggagacacagaaa

SEQ ID NO: 195033 - RNA, 82 nt, Homo sapiens
ggagcaagcgacccggccggacccaccgaccaggaccaaccaagaagcgaagaaaagagaaagaaacagacaagcgagagag

SEQ ID NO: 195034 - RNA, 67 nt, Homo sapiens
aacaaaagccggaagcagcacaggaaggaagccgcaagccaaaagaagcaagggaaagaccaggagc

SEQ ID NO: 195035 - RNA, 72 nt, Homo sapiens
ccaggaaacgccaaaacaccagaaccaaccggggccgcaaggccaggcgcgcagaggcacccaacggcacag

SEQ ID NO: 195036 - RNA, 53 nt, Homo sapiens
aaggcggaggaacgagacgcgaaccaggagggaggaagaggcgcggcaagggc

SEQ ID NO: 195037 - RNA, 87 nt, Homo sapiens
ggcagggcggagaggagcggccggagcagcgagggcccggcgaggagaaccaacggcccgaaagagaccgacagaacaagcgcaaaa

SEQ ID NO: 195038 - RNA, 78 nt, Homo sapiens
gaacccgccaaaacacagcgaggagacagagaggcgcaggaagggcaacaccaaaccagaagaaggacgagcaaagcg

SEQ ID NO: 195039 - RNA, 71 nt, Homo sapiens
caacagaacggaaggcacagggagccaagagaggggcaaagaccgcggcacggccaggcgaacacacacaa

SEQ ID NO: 195040 - RNA, 78 nt, Homo sapiens
gaccccgaggccacagaaagcgcacgggaagaccgaggcacaaagggggagaacgcagccacgaggcgcagccgagcc

SEQ ID NO: 195041 - RNA, 72 nt, Homo sapiens
accaccaaacccaggaggagacccccggaaaaccccccccgcggccccggcagcaaacagacgggacgcgag

SEQ ID NO: 195042 - RNA, 100 nt, Homo sapiens
cgagcgagggggggcgcgccggaaaccggagcgcgcagcagacaagcagaccggaagaccgacggaagaccacaccccgagggagcccaggacaccacga

SEQ ID NO: 195043 - RNA, 79 nt, Homo sapiens
gaaagaacgagagccaggccgcagacagcccaagcacaaaacaacccaaaagaagagccggccaaaggaaaggcgggcg

SEQ ID NO: 195044 - RNA, 79 nt, Homo sapiens
aggcgccgcccggcagcggacccgaacccaagcaaaccagccagcacgggggcccagccagccagcagcgaggggggac

SEQ ID NO: 195045 - RNA, 74 nt, Homo sapiens
cacacaacccgacccgacgagacaagaaaagcgaaccccagcacgccgcagcaccggagagcagaaacagaacc

SEQ ID NO: 195046 - RNA, 78 nt, Homo sapiens
ggcccaggcccggcccccccgaggggcccagaggcagcgggccccaggccggggcgagcgggcccgggagcgggaaga

SEQ ID NO: 195047 - RNA, 69 nt, Homo sapiens
ggcagcacgggcgaccccccggcgcagcagcacacaaggccgggaacccaacaagggagcaaacagaga

SEQ ID NO: 195048 - RNA, 33 nt, Homo sapiens
gaacggaaaaaacaggaagcccggggcggcgac

SEQ ID NO: 195049 - RNA, 84 nt, Homo sapiens
gacaggaacgggagacggaagacaagaagccaaagagcggaggcggcccgcggcgaggaggagaggacaaggaagagaccgagc

SEQ ID NO: 195050 - RNA, 84 nt, Homo sapiens
cgaacgagcaaaggcacgggcagccggaaggacaccaagagcggaccgggccccgagcaccaggaggaggaggagacgaggaag

SEQ ID NO: 195051 - RNA, 82 nt, Homo sapiens
cggcgccagaagaaccggaacaagaagacgacgccacaaacgacaccgaacaccgcacagaaagcagaccaaccgacaccag

SEQ ID NO: 195052 - RNA, 73 nt, Homo sapiens
gagcagcggccgggagcccagggaggcaggagagaaagagacccacagggacgaaacacggagaaggaaaaca

SEQ ID NO: 195053 - RNA, 70 nt, Homo sapiens
acgaaccaccaggcggagacaggcagccagagcggagggccccccgagccaacggcaagaacaagccaag

SEQ ID NO: 195054 - RNA, 79 nt, Homo sapiens
gagccccgggaaagagcagcgacgggagacagccgggcgcgcaagagagggcacagacccaggccagcagaacgggccc

SEQ ID NO: 195055 - RNA, 72 nt, Homo sapiens
agaccgcacaaccccagaagcgcgcccgggaggaagacccgcggaaggcacacaagacacagccaacaccga

SEQ ID NO: 195056 - RNA, 92 nt, Homo sapiens
agaccgacacgccggggcgcccgcgcgcggggaccccacgggccagacaacacagggacacaacaaacacaaccgccacagaagcacaggca

SEQ ID NO: 195057 - RNA, 75 nt, Homo sapiens
acgccaccgcggccaggcaaccacaggaggaacaaggccgcgcagcagcggaggccgagaagaacaggcgagcca

SEQ ID NO: 195058 - RNA, 74 nt, Homo sapiens
agcccccgaagacccccggaccagccccaggcccggcgaacccgggccaggcagacagaagaggggagggccag

SEQ ID NO: 195059 - RNA, 74 nt, Homo sapiens
gaacgggcgcaaccagcgacacaggaagaacagggcgaggacgaggccagaggcacggacgaccccggagagag

SEQ ID NO: 195060 - RNA, 81 nt, Homo sapiens
gcgagagccgacccaggccgccggccccacaggcacgagccagggagccgccgggaccggcccgggagacgacaacccaaa

SEQ ID NO: 195061 - RNA, 69 nt, Homo sapiens
aaagggccaaagaagggagagaggaaaaaaggggcagacagccaaggaaagcggggagacccagaaccg

SEQ ID NO: 195062 - RNA, 69 nt, Homo sapiens
ccgccaaaggcagaagcaccagaaaaagacaaaggagagaggcaccaccagaccaaagagagcgagaac

SEQ ID NO: 195063 - RNA, 61 nt, Homo sapiens
agagacagcaacgagcaaggggcgacgcacgccgaggcccagacaagccccaggcggcccg

SEQ ID NO: 195064 - RNA, 80 nt, Homo sapiens
ggggccgccgcggcagcaagaacagagagagaggggacagacgagagaacgaggaagaccgcccccgacaaagaagacgc

SEQ ID NO: 195065 - RNA, 71 nt, Homo sapiens
cgccgggagcggggcggcacggggcgggggcaagggcgcccgcgggacgggccaacgcacggcccggcaga

SEQ ID NO: 195066 - RNA, 59 nt, Homo sapiens
caccggaaagaggacgaagcagaaagcaaggaaacgagcagaagcaggaccggacgcca

SEQ ID NO: 195067 - RNA, 58 nt, Homo sapiens
caccacccgagagccccaagggcggagaacggaaaagcaccaggaagcagagaggacc

SEQ ID NO: 195068 - RNA, 79 nt, Homo sapiens
ggcggccaggccaaccgaagcgaaggaagagccaggaaagcaaaagggcacccgcccccaaccaaagccacagcgagcc

SEQ ID NO: 195069 - RNA, 54 nt, Homo sapiens
ccacgaaccaaaagggacggacaaaggaacaggaccagagcccgagcgaagaga

SEQ ID NO: 195070 - RNA, 73 nt, Homo sapiens
gaaacagaacagagagaagcccaggcaagcaggaaaggagcgggacacggaggaacaaagacacccagcagga

SEQ ID NO: 195071 - RNA, 68 nt, Homo sapiens
gggccaggccgagcccgcggccggccacagccacgcgaaccgccggcagaccgaaaagggcggaaaag

SEQ ID NO: 195072 - RNA, 41 nt, Homo sapiens
agggcagagcaaggagaagcggcgcgagcgagagcgagaag

SEQ ID NO: 195073 - RNA, 74 nt, Homo sapiens
ccgcccgggccagcggccgcgcacccccggccggaggcaccagcgacccgaacacggaagaaagacacgcagga

SEQ ID NO: 195074 - RNA, 72 nt, Homo sapiens
agaacggagaacgaaaaacccaccagcaggggccagaagagaccaagaggaccccagaccaagaaggaaacc

SEQ ID NO: 195075 - RNA, 68 nt, Homo sapiens
acaaagccgagaacggccggcacagaccccgagggacagcccaccgaggaagaccaaaggaccaacca

SEQ ID NO: 195076 - RNA, 84 nt, Homo sapiens
ggcggcggaggcgacggcagcggcccagcggcagcagcagcggcgggaggagccccgggaacggccgagcgaccaggagaggag

SEQ ID NO: 195077 - RNA, 64 nt, Homo sapiens
aggacggacagcgagaagcccaaccacaggagaaaggggaaagaagaacagaacaacggcagaa

SEQ ID NO: 195078 - RNA, 66 nt, Homo sapiens
accaccccaacaggaaacaagaccagcaagcaggcagacggcaacagaaaaaaagggagaaagagg

SEQ ID NO: 195079 - RNA, 75 nt, Homo sapiens
cagcaagacgccaggacccacggaagccagaaagaacaaagaagccacagacaaagagggaggaacaaacaacaa

SEQ ID NO: 195080 - RNA, 91 nt, Homo sapiens
aagagaaagcccaccacaagaagcggaagagagggggcgcccagcgccaacaccaaggcccagcaacagaccaccacagagccgaaggcag

SEQ ID NO: 195081 - RNA, 69 nt, Homo sapiens
gcaagaaaaccagcaagggaccaacgaaagcaccgcacaggcgcaagaaaagaagaaccccaaacgcga

SEQ ID NO: 195082 - RNA, 80 nt, Homo sapiens
ggaacaccgggggcaggccaggccgcaggaagcgcggaaaagccagagagagccccgcagccgcgagccccgcacccacc

SEQ ID NO: 195083 - RNA, 74 nt, Homo sapiens
cgcgaaaacaggcccacgcagagaaacgggcagcaagaccgcccacccgcgggccagccccacgcagcacaggg

SEQ ID NO: 195084 - RNA, 66 nt, Homo sapiens
ggcacggggccaaaaaggcacgagggaacgggaaagaacagagaagggaaccgccgcgccacccga

SEQ ID NO: 195085 - RNA, 71 nt, Homo sapiens
gccagaagaccgccggggcggaaagggacccgacacgagcaaaagcagaccggaaaacccaccggcaagac

SEQ ID NO: 195086 - RNA, 72 nt, Homo sapiens
aaaaccaggccaaggagaggaggaaagcggacgaaccccgggcgcggcaaagagaacgcccgcgcggccccg

SEQ ID NO: 195087 - RNA, 87 nt, Homo sapiens
ggaccgagccgcgaggacacgggcgcaaccgcagcacacagcgaccgggagaacaagacggggaaaagagacgcaaaccacgaggac

SEQ ID NO: 195088 - RNA, 75 nt, Homo sapiens
gggggggagacgggccccacacagcccaaggcaggggaaagcgcaggggggggacagagccgaggacacagaccc

SEQ ID NO: 195089 - RNA, 106 nt, Homo sapiens
agaacaagcgaggccgggcagagggaccacggggagccccacgagggaccaagaaaggcccagggaccaaagcccggacaaggcccgagcaccaggaccgcagaag

SEQ ID NO: 195090 - RNA, 79 nt, Homo sapiens
agcgacgcaaagaggccgacgagccagacacgccgcggagccccagccggcgggagcgcgagcggcaccaccacacggc

SEQ ID NO: 195091 - RNA, 74 nt, Homo sapiens
aggacccaggggggaacagcagagacgcaacggaaaggcgcaggcagaaaaacagggccagacgggaagaaacg

SEQ ID NO: 195092 - RNA, 54 nt, Homo sapiens
cggacagcggggcccgcggaaaacaggcaacgcggaaaaaagccggggggacgc

SEQ ID NO: 195093 - RNA, 76 nt, Homo sapiens
ccacgacaagagcacaaccccgcggaagcccgaccaggcaggagaccacaaagagacgacccgggcaacggaaggc

SEQ ID NO: 195094 - RNA, 64 nt, Homo sapiens
gaaacggaaccgggaggcgacgcacacgagcggaggcgaaggacagcccagagcaagcacacgg

SEQ ID NO: 195095 - RNA, 70 nt, Homo sapiens
aagacgccgagacgacaccagccaaggacccccgggaggggaaccggccgggcaccggaaagaaaaagac

SEQ ID NO: 195096 - RNA, 82 nt, Homo sapiens
cccgaccgcgcccgcgccggcgcacggcggccgcggcgcggcgccacggcggagcccggcacgggcaaacagagcaggcagg

SEQ ID NO: 195097 - RNA, 36 nt, Homo sapiens
gaaaaagaacaacgcgcaaagcgggccagacacgaa

SEQ ID NO: 195098 - RNA, 76 nt, Homo sapiens
aacagacaaaaaaaggcgcaaaggaaaacaagaaaaaagaagccacccaccagacgaaggaaagagaagacagcaa

SEQ ID NO: 195099 - RNA, 71 nt, Homo sapiens
aggggaggagaccgggcgagggggggaacaggccgccgggcaccagacaccgccaccccgggccccggccc

SEQ ID NO: 195100 - RNA, 69 nt, Homo sapiens
agggccaaagaagggagaaaggcggacccgggccaagacagcccacggacgaaacagccaagaaggcag

SEQ ID NO: 195101 - RNA, 61 nt, Homo sapiens
cgcggcccccacaccacacagagagcgaggggggccgaagaagccagggggaggaaagcag

SEQ ID NO: 195102 - RNA, 82 nt, Homo sapiens
cgggcagcggacacccgaaggcccgggccacggacagggcaccacaggaggcagggaggacagcacgcgcaagagggacggg

SEQ ID NO: 195103 - RNA, 54 nt, Homo sapiens
acagacacagagccccggcccaaccggccgagcaacccagcccgggacggggcc

SEQ ID NO: 195104 - RNA, 75 nt, Homo sapiens
gaaagaagccaaagaaagagaggaagaaagaacagaacagcgaaacaagagacaaaacagaggagaccagaccag

SEQ ID NO: 195105 - RNA, 69 nt, Homo sapiens
cccacgcgcacgccgggggcgaggagacaaaaaagcccaagagcaagcaagaaaaaggggcagaacagc

SEQ ID NO: 195106 - RNA, 73 nt, Homo sapiens
ggggaaggagccccacagccccagggcccaaaaaagggaaccgcacagcgagacaccccacacagagggaccg

SEQ ID NO: 195107 - RNA, 71 nt, Homo sapiens
caaaggcacagacaagggaccggggcacaagcggggccaccacggcgcgagcaccgccaccccacgccgga

SEQ ID NO: 195108 - RNA, 77 nt, Homo sapiens
caaaagaaaacgacggaccagaggcccacgaaaccacccggaggagaaggaggcaccagccccacagaagcagaaaa

SEQ ID NO: 195109 - RNA, 79 nt, Homo sapiens
cgggacacaccagagaggggcacgaggacagggagcagacagggggaaggcccacgggggaacgcgcagcacacggcaa

SEQ ID NO: 195110 - RNA, 70 nt, Homo sapiens
aggaggaggaaaaaggaccaaacagcaagggaaggacaggcgcaacagccagacccgccgaaccccacag

SEQ ID NO: 195111 - RNA, 36 nt, Homo sapiens
gcccgaggccccggccaggccaccgggagcaggaga

SEQ ID NO: 195112 - RNA, 75 nt, Homo sapiens
agacgaaaggagacaaagaccgggcgacgaggcacagcgcgcaagaagggaggggagggcacaggcacgaacaga

SEQ ID NO: 195113 - RNA, 62 nt, Homo sapiens
caccaacaggaacagaaagccaagggaagaagcagaagcaagcccagggcaaggaccgggaa

SEQ ID NO: 195114 - RNA, 78 nt, Homo sapiens
aggcaccgggacggaccgagaccggaccgagagcggaccgagagcgcgaaacgcacgagaagggaagaccaaaagcga

SEQ ID NO: 195115 - RNA, 83 nt, Homo sapiens
gcggaggcaccgacaaaccagcgaaggagcacccacccaggaacccgccaccagaagcggaaagaagaggggcaagaccgaga

SEQ ID NO: 195116 - RNA, 38 nt, Homo sapiens
ccaccgccgggcgccaggggaaagaaccagacgacagg

SEQ ID NO: 195117 - RNA, 42 nt, Homo sapiens
acggagccaaggaccgggagaggcaaaaggggcaggaaggag

SEQ ID NO: 195118 - RNA, 58 nt, Homo sapiens
ggagacagaggccccaagagcccagaccagaagaccggagacccgaaagaggaagagc

SEQ ID NO: 195119 - RNA, 54 nt, Homo sapiens
gggacggccaggaacggggcgggccaagcagagagaaaagcaaaggacacgaac

SEQ ID NO: 195120 - RNA, 77 nt, Homo sapiens
acagagacgagaagcaaaggagagggaggggggccaggggggcgcggccggccccgcgcgcgaccgcacacccaccc

SEQ ID NO: 195121 - RNA, 80 nt, Homo sapiens
caacaaggacaacaagagacgggacaagacagggcaaaggacagaccaggaacaggaggcccggacccccagcacaagcg

SEQ ID NO: 195122 - RNA, 85 nt, Homo sapiens
cccaacgccagagcgcaccagagcgaccaggcggagagcggcagagccggagcaggagcgggaccggccacgccgagggaagaag

SEQ ID NO: 195123 - RNA, 69 nt, Homo sapiens
aacacagagggagcaggagacaggcagccgcaaggaaaaacccgcagaaaacagggcacgagaccagga

SEQ ID NO: 195124 - RNA, 74 nt, Homo sapiens
gggccccaaaaacggcacagagaccgaaaagagaagcgcgggaaacgaccaccggagccaagacagagggagcc

SEQ ID NO: 195125 - RNA, 72 nt, Homo sapiens
cccagcgcaaccagcaaacggccagcaccacgaggcggaacagcacagagaagacaaagggagcaacccccg

SEQ ID NO: 195126 - RNA, 78 nt, Homo sapiens
ggaggcccagagcacgacgagcgcggaggaccgggaggccccgggcgcggggaagaccgcaggaaagcaggaaggcaa

SEQ ID NO: 195127 - RNA, 57 nt, Homo sapiens
gaacaaacacaagcgcagcccaaaaagggcaggccccccggaggccagccccccgcc

SEQ ID NO: 195128 - RNA, 74 nt, Homo sapiens
agacaagaaagaaggaccggcaaaggaagcccacacagaagagcaggccgccagacgcgaagaagagacaaaag

SEQ ID NO: 195129 - RNA, 57 nt, Homo sapiens
ggacacgacagcggcccccgggagccaagaacgccagaccccgaggccccggccccc

SEQ ID NO: 195130 - RNA, 76 nt, Homo sapiens
aggaggccagagcggggcaccacaccccagaggcgacaccggacccgacgcgcaaggaggggagcccagggggaga

SEQ ID NO: 195131 - RNA, 82 nt, Homo sapiens
gccaaccgaggagccacgcagcagagaggcgggacccaggcagacagagggaggagcagcaaaggcaggcgcagcgagcagg

SEQ ID NO: 195132 - RNA, 36 nt, Homo sapiens
acagggaaagacacacccagacccacggcaaagacg

SEQ ID NO: 195133 - RNA, 69 nt, Homo sapiens
ggagaacgcgcaacacccacccaggccagacaggccggcagaaccgaagaagccggagaaagggaaccg

SEQ ID NO: 195134 - RNA, 71 nt, Homo sapiens
gccgcgggcgacgggccgaggccgaagagcggggggagaagcagaggggaacgcgggaggagccgaggaca

SEQ ID NO: 195135 - RNA, 68 nt, Homo sapiens
gcgcacagagcagagggcagaagggagagaggcgccccgaacacccacaagggcgccggcccgggcgg

SEQ ID NO: 195136 - RNA, 77 nt, Homo sapiens
agaccacaagaaaagcagaagagccggagagagcaaacacccaaggaaggcaaagacaacccagaaaagaaaaggcc

SEQ ID NO: 195137 - RNA, 75 nt, Homo sapiens
cgccaaaggacaggcgggcggccccaagcccaagaccagccagagacgacaccccaggcccggaacaccagacaa

SEQ ID NO: 195138 - RNA, 60 nt, Homo sapiens
aagccggggaccagaaaggaacggcaagacaacaacccagcgacaccaagagcaccacag

SEQ ID NO: 195139 - RNA, 57 nt, Homo sapiens
cccagcgaaggacagaggcggagaacgcgagacgggacggaaaaggcgcacacgacc

SEQ ID NO: 195140 - RNA, 74 nt, Homo sapiens
accaccaacacccacagcaggggaaccacagcaagcaggcacggagaaggcagccacaagaggaagcaccaacc

SEQ ID NO: 195141 - RNA, 72 nt, Homo sapiens
cggagacagggagaccaagagacagacaccgccccgagacgagcggaggagagcaggaggcagaagcaaaga

SEQ ID NO: 195142 - RNA, 55 nt, Homo sapiens
ccagccccggcaagaccgaaggcgccggccaaaagaggcgggagagcagcagaaa

SEQ ID NO: 195143 - RNA, 80 nt, Homo sapiens
ggaagacagcaccaacgcaagacaccagcacaaggcccagcgaaccaggggccagcgccagacagccccaccgagccggg

SEQ ID NO: 195144 - RNA, 82 nt, Homo sapiens
gggaacggggccaaagcccccgcccccagcacccacccgggggcagggggcccgggacagaaaaccgagaaaacgggacaaa

SEQ ID NO: 195145 - RNA, 95 nt, Homo sapiens
gccgaaaccggaggcccggggggcccagccccgagggagccggggcgccgggcccgggccgggcaggacgcaaaccagaaggagaaaaaggaacg

SEQ ID NO: 195146 - RNA, 87 nt, Homo sapiens
cgcgaaacgcacgagaagggggaagcgcgcgcggacggagggaacccgcagcagagcaacaggaaaggcgagacgccgcgaaagggc

SEQ ID NO: 195147 - RNA, 79 nt, Homo sapiens
ccaagcccacagaccacgaggcgagagggcccggaacaaacggaggcggagggcaaaacccggccaagaccgcaaggcc

SEQ ID NO: 195148 - RNA, 35 nt, Homo sapiens
acaccaaggaccgcccaggaagaggaggaaagcac

SEQ ID NO: 195149 - RNA, 72 nt, Homo sapiens
ccgcggagcaaaaaaagagcccgcaagaagaacagagacagcagccaaacccccagaaaggaagcacgcgcg

SEQ ID NO: 195150 - RNA, 84 nt, Homo sapiens
cgaaggaccccgcccagagcccgaaccgacagccacaagggcgcccgaacagggacggaggaagaaggcgcggagcagagaaag

SEQ ID NO: 195151 - RNA, 77 nt, Homo sapiens
gggaaccaaaggcacggagaaaacaggggcacagacgacagaagccaagagggcgcaaagaggaaaagaagagaaaa

SEQ ID NO: 195152 - RNA, 75 nt, Homo sapiens
gccagacggcgccgccgcccgcggcgccccggggggcggcgcccacccgggaggacagaagccaggaagggaaag

SEQ ID NO: 195153 - RNA, 51 nt, Homo sapiens
ccccaaaagagccaagcccagagacacacagggacgcgagcagccagccca

SEQ ID NO: 195154 - RNA, 64 nt, Homo sapiens
cgaggcaggagaacgcgaacccaggaggcggagggcaggagccgagacggccacgcacccagcc

SEQ ID NO: 195155 - RNA, 79 nt, Homo sapiens
acagcaaaccgggccacagcgcgcgggggacaagcaaaaacggccagacacaagacaaacccccagccccccgagagaa

SEQ ID NO: 195156 - RNA, 80 nt, Homo sapiens
gagaaggaagacgaaccagaaaacacgcaaaggacaccagcagccgcaacggcacacacgcccgccaccaccccagccgg

SEQ ID NO: 195157 - RNA, 79 nt, Homo sapiens
gaacaccgacggagccaggaagccagcagaccgcagaacggccccgggacccacccaccaaaaccaacaggaagcaaaa

SEQ ID NO: 195158 - RNA, 78 nt, Homo sapiens
aaggaccaagaaccagacgcaaacagcagacggaagaccccacggcaaaaccacacccgaggcgagcccaggacacca

SEQ ID NO: 195159 - RNA, 75 nt, Homo sapiens
cccccaagagcgggaacagcaacaaacaccaacacgagaggagccccggacacaggccagccagagagcgaaagg

SEQ ID NO: 195160 - RNA, 82 nt, Homo sapiens
agggggaccgaagacgaccgacccgcccagcacgaccagccagcaggaacgagggggaaaagcaccacggagggacgcagaa

SEQ ID NO: 195161 - RNA, 78 nt, Homo sapiens
ccgggggccgacgcaggggcgaacagagcgggccaaagccagccggcacagacccagagccacagacacaaggaccag

SEQ ID NO: 195162 - RNA, 81 nt, Homo sapiens
acccagccgcagcgccagcagcggacaggcacagacaaccagaaccaaaggcagacccagaagagcacaaaacagagaaaa

SEQ ID NO: 195163 - RNA, 70 nt, Homo sapiens
cagccaccccacgacccaccccaaagaacacagaccaccaaggagagggccccaggagcacagcaacgcc

SEQ ID NO: 195164 - RNA, 83 nt, Homo sapiens
cggaccggcccgccacccgccaggagcaacagccaaaggcaggccgagcagaccacaaggccccgacaccagaccagcagaga

SEQ ID NO: 195165 - RNA, 77 nt, Homo sapiens
gccgccgcgcgccaaagcgcgccgccccgggcaaaagagcaaacggagaccgggacagaccaaaagcgccgcacagc

SEQ ID NO: 195166 - RNA, 66 nt, Homo sapiens
acgcggacaaacaagccgagaaaggcagccagccaccacccaggggaacacaccagccagcacaac

SEQ ID NO: 195167 - RNA, 74 nt, Homo sapiens
cgcgagagcaccgaagacggcaagcacggccacgccaagaggaaaggcaagggcagaaaagaggggaaaaggcc

SEQ ID NO: 195168 - RNA, 69 nt, Homo sapiens
cacccccgggaccggaggggcgcaagcagaaagcgagaaagccagcccccagaccaagaaagaaaaagc

SEQ ID NO: 195169 - RNA, 70 nt, Homo sapiens
agaacaacgagagcaaagggacgaaaaaggacagagaagcaaccaccacaagaagacgaagggccagacc

SEQ ID NO: 195170 - RNA, 83 nt, Homo sapiens
gacggggggagggcccgaccaggagacacagcaagaaggccccaccagagcgagcagagccggcaccagccgggaccccagcc

SEQ ID NO: 195171 - RNA, 74 nt, Homo sapiens
agccgggccaggggcgccccagggcccccacagagagcacacaaacaaagcgaaaccacggaagaaaagggcaa

SEQ ID NO: 195172 - RNA, 76 nt, Homo sapiens
cggggacgaaccagcgagcgcgccacccggccacgcgggggagggccggccgcagaaggaaaagaacgcgcgagaa

SEQ ID NO: 195173 - RNA, 66 nt, Homo sapiens
cccgggacccaccacccaggccccgacgccccgagccacccaggcccaggaccgagcccgacgccc

SEQ ID NO: 195174 - RNA, 56 nt, Homo sapiens
gaaccagcaacaagccagcccgacagagaaaggcacaacccagaccagagaagcga

SEQ ID NO: 195175 - RNA, 82 nt, Homo sapiens
aaccccagaggcacagaggcaaagaaacaaccaggcagccggacaagggcggcaccccaccgcccagccacagcccccccca

SEQ ID NO: 195176 - RNA, 88 nt, Homo sapiens
cccgaggcaggcccgacccgccccccggcgccgccgggccgacggagaccagcaggagaaggagggggcagagcacggcaggcagaag

SEQ ID NO: 195177 - RNA, 81 nt, Homo sapiens
aaaaacccagcgaagaccacagaaaccaaaagaaaaagacaagggcagagcagccggggaaaagggccaagaagcagaaaa

SEQ ID NO: 195178 - RNA, 82 nt, Homo sapiens
ggaaaaggcaaaaacccacaccgcaacccagcgagagaaagacaagcagaccggaagaccgacggaagaccacaccccgagg

SEQ ID NO: 195179 - RNA, 96 nt, Homo sapiens
caaaaacggagaaaacccgcgacgccaaccacgacgaagcggaaggcagaaggcaaaagggaaagcaaggggaagggcccaagaagacaccccacc

SEQ ID NO: 195180 - RNA, 78 nt, Homo sapiens
gaagacaagcaagcccggagaaggccacacaaggacggccccccagcgaggcgaaaaaccggaggccggcgccacaca

SEQ ID NO: 195181 - RNA, 69 nt, Homo sapiens
ccaggggaacgccggagggcaccccacaggggccaagcaaccgcggaacaggccaaaagcccccggaca

SEQ ID NO: 195182 - RNA, 82 nt, Homo sapiens
acgggcagccagcccaaggccccggccccaacaggcccgcgcccagagccccgcagggggacaacccacggcacccgggacc

SEQ ID NO: 195183 - RNA, 65 nt, Homo sapiens
cagggccaccggggaaacaaacacacgcaggcagagagggaaaaaggaagccagcacagggacgg

SEQ ID NO: 195184 - RNA, 79 nt, Homo sapiens
gcgaggcacggcaaggggccggagggccggcccagaacgcagggacaaacagggcaaaacaacacggcaagaagcagaa

SEQ ID NO: 195185 - RNA, 82 nt, Homo sapiens
ccggagaaaaggccaagaaggcaggggaaagggcaaagaaaacaagaacagcgagaaaaggaaagggaaaaacaaaaacaac

SEQ ID NO: 195186 - RNA, 73 nt, Homo sapiens
gcggccaagccacaacagaccccagcaccccccaaagggcacaggccacgccgggccagaaaaggggaagaaa

SEQ ID NO: 195187 - RNA, 49 nt, Homo sapiens
aaaacgacggcggcaaagcaccgacaacggacccgggacagaggacgcc

SEQ ID NO: 195188 - RNA, 88 nt, Homo sapiens
gacccagggccaaaacgccgcaacggccggcggggccaaagccgggacaggaggaaggggagaagaaaaagcagcaaaagagaagcag

SEQ ID NO: 195189 - RNA, 61 nt, Homo sapiens
gcgaaaagaaacggaaagcaagcacagagcacaccaaggaagaaggagaaagggccaaccc

SEQ ID NO: 195190 - RNA, 72 nt, Homo sapiens
ggcaccacaaaaaggacaggaaaacggagaccaggcaggaagagagaagaaggcgagcaccgaagcaagggc

SEQ ID NO: 195191 - RNA, 73 nt, Homo sapiens
cagggcggcacaacaacaaaccggcaggcaagagaaaccacacagacacacccgagcccacagcaaacaccgc

SEQ ID NO: 195192 - RNA, 58 nt, Homo sapiens
cccaccgaagcagcggccccggggagcccgagggacgcgagagcccacgaagagcgac

SEQ ID NO: 195193 - RNA, 65 nt, Homo sapiens
ccaggagcagcagcccgggcaacaggaaaacaacccagagaacccaaacccccagacaagacacc

SEQ ID NO: 195194 - RNA, 84 nt, Homo sapiens
gacggggaagcccaggcgcccagacgcaggacgcccaaggccgccacaggagggaagcaaacaggaggaggcgcaccaggaagg

SEQ ID NO: 195195 - RNA, 33 nt, Homo sapiens
gacccagagcccggcccgggcacgccacacacc

SEQ ID NO: 195196 - RNA, 78 nt, Homo sapiens
cccagagaccggcaaagggacacccaccgcagagcagcgggcgaaggcgccaccagcaaaaccagagaaacaggcaga

SEQ ID NO: 195197 - RNA, 82 nt, Homo sapiens
acgcgaagcgcagaagaaggcgcgcaaaggggccggacaacacgaaaaagcggggcagaaacaagccagcaagcaagggaca

SEQ ID NO: 195198 - RNA, 78 nt, Homo sapiens
cgcgcacccccggccggaggcaccagcacacaagaggaccagggcacgcgcgacgcccccggccgcaggaccaggccc

SEQ ID NO: 195199 - RNA, 70 nt, Homo sapiens
gggaaccggcaaaggcagacaggccggcagagaaaagagacagggaaagacaaaccaaggaacaggacca

SEQ ID NO: 195200 - RNA, 109 nt, Homo sapiens
cccgccgacgaggaacggcggagcagggagcccaaagaccccggagacaggacgagcacggaaggcacaccgggcagcgggaacaagcgagaggagagcgcagagacag

SEQ ID NO: 195201 - RNA, 109 nt, Homo sapiens
agacagaggaaagcggcacgaagccccagcaagggagaaaaagggcaggcgccccaacccaagccagaggaggcacccaggacgcgggcaagggagccgggcaagccca

SEQ ID NO: 195202 - RNA, 70 nt, Homo sapiens
gccgaggaaacagggagcggaacggaaaacacaccaacaaagccgggaaaggagaaagacagcaaagaaa

SEQ ID NO: 195203 - RNA, 82 nt, Homo sapiens
cagagcccggagcaggaaaaacacagagacagacggcggcagggcggagaacggaaaagcaccaggaagcagagaggaccgc

SEQ ID NO: 195204 - RNA, 75 nt, Homo sapiens
agcaaagaggaggaaggagggaccggcccccagcaagccccagacgaggcgacggcaaaacaaagcaggaagggg

SEQ ID NO: 195205 - RNA, 50 nt, Homo sapiens
agaagggaacacccaacaagaacaacccgaagaaccccacccagcccccg

SEQ ID NO: 195206 - RNA, 72 nt, Homo sapiens
gaaagagcccgaggaagggcggaccaaccacggcaaaccaacaaggcaggaaccccccacaccacaaggcgc

SEQ ID NO: 195207 - RNA, 108 nt, Homo sapiens
ggaccaccgcccccgcgccccgcaccgcggcaaagagaggacgcagcgagaaagggggagaggcaccagcaacagaccaaccgcagcaagcacagagacaggaagccc

SEQ ID NO: 195208 - RNA, 76 nt, Homo sapiens
acaacggagagccaccgagccggaagaaagcgagaccagagagcggccagccggagaaagaggaggggacaagcgc

SEQ ID NO: 195209 - RNA, 82 nt, Homo sapiens
cggggcacggcgcggcgcggcccaagaagaccgggaagacagagggacgaaggcaccgcagaagaaccaccacgcaagcgac

SEQ ID NO: 195210 - RNA, 86 nt, Homo sapiens
gccggcgccgcggcgcgccgcagggccgggccagcggcaggaagagagaaggccgccagcccgcagcagagaagaacaagcaccag

SEQ ID NO: 195211 - RNA, 60 nt, Homo sapiens
cgccgcgccgcccaccacaggacccagaagaccccagacggggagcgcagcagagggagc

SEQ ID NO: 195212 - RNA, 41 nt, Homo sapiens
agaaacacccgaacagcgagaaggcgggaaggcgagggcca

SEQ ID NO: 195213 - RNA, 75 nt, Homo sapiens
cccaggaagcaaagcgaagcaccacacagcaaagcgacaggcacaacaaaaaggaccccagggaaaaaagcgacc

SEQ ID NO: 195214 - RNA, 65 nt, Homo sapiens
ggaggcgggaccaaacacaagccaggggcacagaagggaccacaaacgagggccaagaggacaca

SEQ ID NO: 195215 - RNA, 78 nt, Homo sapiens
cgagcggacgcaggagacgagagcaccgacaccgccggggggcccacccccgacgaacaaaagcggccccgggacgga

SEQ ID NO: 195216 - RNA, 57 nt, Homo sapiens
gggagccgggggcacgaaggagccggaaaggccgcaggagggaagcgcacggaaacc

SEQ ID NO: 195217 - RNA, 88 nt, Homo sapiens
caacggcccagccgaggagcggcgggcggcggcgcgcggacccaggcgcggaggcgaggccagcagcggagaagacaaccagacacaa

SEQ ID NO: 195218 - RNA, 71 nt, Homo sapiens
ggagaccacccaaaccccccaagaaggcgccaccagcaaaaccagagaaacaggcagagaaagacacccgg

SEQ ID NO: 195219 - RNA, 92 nt, Homo sapiens
aggccggagaaacaggcgccgcgggcccgcgcccggccggacccgggcccgaggacagagggccgcccagcagggcacaaggaggagaaggg

SEQ ID NO: 195220 - RNA, 84 nt, Homo sapiens
ccacaacgcacgcaggcgccaggaggacccgccgggcaggaggagggaagccgggcgaggccggcggggagcccccagggggag

SEQ ID NO: 195221 - RNA, 75 nt, Homo sapiens
accccgccccagagaagcgagcagccgcagcagaacacccccgacagcagcacacccaagacggacagagaaaag

SEQ ID NO: 195222 - RNA, 58 nt, Homo sapiens
cgcagacagcggccaagaagacacaaaggacggaggcacgagcacagaaaccagcgcc

SEQ ID NO: 195223 - RNA, 68 nt, Homo sapiens
ggcgaaaccccacaagggaaaggaaaggacccccccaggcagagacacaagcaaaagccccagccaac

SEQ ID NO: 195224 - RNA, 58 nt, Homo sapiens
acgcaggcaggaaaacaagccagggccccacggacacaagccccgacaagggaccggg

SEQ ID NO: 195225 - RNA, 57 nt, Homo sapiens
gcaggagccggccggcaaccgagggacccgcgccaggacaaaccggcgaccacacac

SEQ ID NO: 195226 - RNA, 72 nt, Homo sapiens
aggcacacaccaaagaaaccagacagcagcacggaagaagcacggcaccggccaaagagaaagcccaaagcc

SEQ ID NO: 195227 - RNA, 43 nt, Homo sapiens
gaacgcagggcgccgaggccaggaccaagaacgcccagcccgc

SEQ ID NO: 195228 - RNA, 77 nt, Homo sapiens
gagccgcgagcgcgggaagacgccgcgaaagcagcgggagggacaaaagggcccaaccagcacagcacagaagcaag

SEQ ID NO: 195229 - RNA, 80 nt, Homo sapiens
accccgcagacaccggcgacaccccggcagccccaaaccaaggccaggccaccccccccacaccggcacaggccgccccc

SEQ ID NO: 195230 - RNA, 73 nt, Homo sapiens
cccgagcccaaaaagaccaaaggccaagcagaccagcgcccaggaagccaaagaaaaaaaaacggagggaccc

SEQ ID NO: 195231 - RNA, 60 nt, Homo sapiens
caccaaagagcagagccaaacggcaaagaccagcaaggcaccaacagaaaaacaacgccg

SEQ ID NO: 195232 - RNA, 80 nt, Homo sapiens
ccgccagacaaccggagccacgccccacgaccgccagaccgcgaccgcacaagcagccgccagcggaaccaagcggcgcg

SEQ ID NO: 195233 - RNA, 52 nt, Homo sapiens
cagcgggccggacggggcggggggaacgcggcagcggagagccgcccgacca

SEQ ID NO: 195234 - RNA, 77 nt, Homo sapiens
ccggcacccggccggcggcggcgcccggggagcagggcggaaaccccacaagcggccaccaccaaccggaagaacaa

SEQ ID NO: 195235 - RNA, 75 nt, Homo sapiens
gccggcaggcccgggaaggggcgaagacgcagacccgaaaacaccaaggggacagggaagcgccaggcaccggca

SEQ ID NO: 195236 - RNA, 68 nt, Homo sapiens
gcgggggccggcgaaggccgcggccacgcggaaggcgcgaacagggcccacccgccacgacacagggg

SEQ ID NO: 195237 - RNA, 76 nt, Homo sapiens
gcgcccgcagcagaggccacaccacgccgccagggccacccccaaccaggaccaaagacgaccaccaaagccagcc

SEQ ID NO: 195238 - RNA, 70 nt, Homo sapiens
caacaaaagagccacccaagaggccgccagacagcgcagacaagaaggagagcaagcacacaaacgaagc

SEQ ID NO: 195239 - RNA, 82 nt, Homo sapiens
ccggacgggggcgcacgagaccccgagccggagcggaaaaacccgggcaaagcgaaaaagaccgcagggaaggccgccacga

SEQ ID NO: 195240 - RNA, 54 nt, Homo sapiens
agaagcccggaaagcgcgccgggcccaacacgagaagggcccacggagacaacc

SEQ ID NO: 195241 - RNA, 40 nt, Homo sapiens
aggggggccggccgcgcagccgggggagaagggcgcagag

SEQ ID NO: 195242 - RNA, 51 nt, Homo sapiens
acaacccgaacaggaggaagaacccacgaaacacaggcgagagagacagcc

SEQ ID NO: 195243 - RNA, 71 nt, Homo sapiens
ccagggcacccgggcgcggccaggggcccggagacagagaagacggaagaggcaaaccaccagagagcgaa

SEQ ID NO: 195244 - RNA, 83 nt, Homo sapiens
cccggcagcggaccccccagccaggcaccgcagcgcagccaccccccacccacgcaggggaaaacacaaagcaaagaggaaga

SEQ ID NO: 195245 - RNA, 83 nt, Homo sapiens
gacccccaagccgccgcggacgcaggagccgcccggcaaagcgaaagcgcaggaccgaggagaaggagccgccggagcagccg

SEQ ID NO: 195246 - RNA, 85 nt, Homo sapiens
agcgaggagcgagggacccggggccgacgacgagccccgcgaggagcgcagcggagaggccagaacgcccgccagcccagccgcc

SEQ ID NO: 195247 - RNA, 63 nt, Homo sapiens
gacggaagcggccaagaccaggcaagaacggcgcacgacaagggcgcccgcgccggcagagga

SEQ ID NO: 195248 - RNA, 84 nt, Homo sapiens
cgaggcaacccaacaaaacccaggccccaagagcacaagagagaggggcaaagaggcagacaccagcccggccaggccgcccac

SEQ ID NO: 195249 - RNA, 66 nt, Homo sapiens
gaggggaagcaaacgggccaaaggacagagaagacagaggaaaccgacagccacaacgcacaaagc

SEQ ID NO: 195250 - RNA, 81 nt, Homo sapiens
caacaaggcaacaaacgccagcgagcgccgacacccaacaagaccagcccccagcagagagcggccccacaacaaaagagg

SEQ ID NO: 195251 - RNA, 84 nt, Homo sapiens
cgcaggggagcgggcgagggcgccaggaggggcagcagcaggacagggaacccgggagacagcaacagacggaggaacggggga

SEQ ID NO: 195252 - RNA, 70 nt, Homo sapiens
accacaccgcaagccaaacagagaaggggaggcaagcaggggggcaaaggaaagaaggcagaaagggagg

SEQ ID NO: 195253 - RNA, 87 nt, Homo sapiens
ggcggggaggagacggcggaaaacggagagacggggagaagggcccgggaaacagagaaacaccgaaaacagaggcgaaaacaggcc

SEQ ID NO: 195254 - RNA, 119 nt, Homo sapiens
cgccgacccgccggaagcgccaggacaaggggacccgggacgacgagacgacaccacaaagacagaaccacagcaaagcacaagcagggaccagggacaggggaacaaaagaggcacga

SEQ ID NO: 195255 - RNA, 76 nt, Homo sapiens
cgccgcagccaggagaggcgggccagcggagccgggacggagggccaaaaacaaacaaaaaagaacccacccagga

SEQ ID NO: 195256 - RNA, 72 nt, Homo sapiens
cgaacagaaggaacgacgcggaccagaagccagagcgaggacgccggcagcaacggggcggcacacaaggag

SEQ ID NO: 195257 - RNA, 74 nt, Homo sapiens
aagcgacaagggaggcgccgccagcggccgggaccgaacaggcgggcgagccagacccgggcagaccagccaag

SEQ ID NO: 195258 - RNA, 70 nt, Homo sapiens
caagaaggcaggccacgaagaaagcagggcagaccgggagaagagccagagcccgaggcgagcgcggcgg

SEQ ID NO: 195259 - RNA, 78 nt, Homo sapiens
gaaaacgggagaacacgacaccggcgaggaacggcagacagcgaacgggcacgacggccagcgaaacagagaacaaac

SEQ ID NO: 195260 - RNA, 80 nt, Homo sapiens
caaaagaaggaggcgggaaggcggcgcgggcgacccccacaggaaacaggaacacgaaagaggaaaaacgcacaagaaac

SEQ ID NO: 195261 - RNA, 77 nt, Homo sapiens
cgcccaggccagcgccccaggccaagagggacccacccggcgaggcggagaagaacccaaccaaaaccaggcggcaa

SEQ ID NO: 195262 - RNA, 81 nt, Homo sapiens
acgacggacggcgggcaccggccgacgggccacccccaaccaggaccaaagacgaccaccaaagccagcccccagaacacg

SEQ ID NO: 195263 - RNA, 84 nt, Homo sapiens
gcggacacgagccgagggaggggaaaggcgcaggagcggggcccggcgcacccaccaccgccgcccacggcagcccagggaccc

SEQ ID NO: 195264 - RNA, 76 nt, Homo sapiens
agaggaacccgcgacccgggcacccagagcagggagggaaggaggcagaaagggagccccaagagagagggccaag

SEQ ID NO: 195265 - RNA, 74 nt, Homo sapiens
caggccgcagccgacccaacaggcgggcgccaggcaccagggccaaggaaaggacgcagacccgaaagcaaacg

SEQ ID NO: 195266 - RNA, 70 nt, Homo sapiens
cggggagacccggggacccccgacgccaggcagcgcccccaaacgacggagaaaagaaacgggagaccca

SEQ ID NO: 195267 - RNA, 80 nt, Homo sapiens
cggagcgggcagccgccgccaccccgcggccgcacccccgccccaggcgccgaccccgacagaacgggccccgcacccgc

SEQ ID NO: 195268 - RNA, 81 nt, Homo sapiens
cggcacccagaaaccagagaaacccaaagcggagcgacaggaacagagagagaggggcacaacccccacagaaaaacccca

SEQ ID NO: 195269 - RNA, 82 nt, Homo sapiens
gaagaggaaaagaacagagccacacaagaaggccagcacggagaaccacggggaccaagaagcgagcagcccaaacggaccc

SEQ ID NO: 195270 - RNA, 79 nt, Homo sapiens
ccgagcgcaccagacaaccaggaccgagagcccgccccgaggggacgagggcagcaggcgggcgaggagagcgcagcag

SEQ ID NO: 195271 - RNA, 69 nt, Homo sapiens
agcgcgaagaggagaaaaggcgaaagggaaacccagacgacaaggaaggccaagggacccacgaccaac

SEQ ID NO: 195272 - RNA, 72 nt, Homo sapiens
cgggccacagcaggaaaaaggaaaaagcgcaaaccaggaaagagcacaacagcggccccacaagccagccgc

SEQ ID NO: 195273 - RNA, 77 nt, Homo sapiens
cgcgaccgggcaccggcgggacagaaccccaccaaacaccagaaaacagagagacgcagaaaaggaacaaacgacca

SEQ ID NO: 195274 - RNA, 75 nt, Homo sapiens
ggccggcgcacagcgaagggaggaagacacaggccgcgggaaaaagaccgagaagcgcagacccaccagggaaag

SEQ ID NO: 195275 - RNA, 81 nt, Homo sapiens
aaggcggcccagcagcgagacacaggcaccgacacgcggggccacgagaggggacccgcggcccaggcgccggcgaacaac

SEQ ID NO: 195276 - RNA, 72 nt, Homo sapiens
accagagccaagacgaggacaaacacgggcgacggggcccccaagccggcaggggaacgaggagggagcgcg

SEQ ID NO: 195277 - RNA, 73 nt, Homo sapiens
ccacgaagaaagcagggcagaccagcggcgggaagccgcaaaaagggaacaagacccaaacagaggcagacaa

SEQ ID NO: 195278 - RNA, 72 nt, Homo sapiens
acaacagccaccgcagcgaacagacccagggggacgcggaagagacagcagaacaagagccaggaccggaca

SEQ ID NO: 195279 - RNA, 79 nt, Homo sapiens
gacagcaggagggggccacggccaaggaacacagacggcagagcagaccagacagcgccagccccaccccaacgaaggc

SEQ ID NO: 195280 - RNA, 75 nt, Homo sapiens
cagccccgcaacccggaccagcagaaaccagaggggcgagaaaacaaaaaagcagaaaagggccagaaaaagaaa

SEQ ID NO: 195281 - RNA, 88 nt, Homo sapiens
cgaggacgaggcaccccaggcgaccggcccgcagcaagaggcggacgagaaggacagggaagggcgcccgcgccggcagaggaggcga

SEQ ID NO: 195282 - RNA, 81 nt, Homo sapiens
gccgcgcgaggaaaggccgaggagccggagccgcagggccccagcaaggagaccaaacacagggggcagccgcccacgcag

SEQ ID NO: 195283 - RNA, 54 nt, Homo sapiens
caggagcaaggcacaacgagccagaccggagagaacagaaaaaaagcggcccgg

SEQ ID NO: 195284 - RNA, 66 nt, Homo sapiens
aaacggaaccgcacaaagcagacaacaaaaagcagccaccagcagaaagagcggaggacccggacc

SEQ ID NO: 195285 - RNA, 73 nt, Homo sapiens
acggccaaccggcaagaccagacgggaacgggagacaagcgcagcgagccagaaagcgagcgacggaacacaa

SEQ ID NO: 195286 - RNA, 70 nt, Homo sapiens
gcgagcccaccgccaagacggaaaccagagaccacacacaaaaccacccgggaaccacacgggaaccccc

SEQ ID NO: 195287 - RNA, 75 nt, Homo sapiens
cgagccaacgccaggcgccgcccacaggaagggaaagaaagaaacaaccacgaagaagccaggcgaaacaaagac

SEQ ID NO: 195288 - RNA, 86 nt, Homo sapiens
agcaaccacccgagcagacggagacacggagcagcggccccggccccgccaacgcgccgccgggggacaacaggagaagcggaagg

SEQ ID NO: 195289 - RNA, 39 nt, Homo sapiens
gggcccccccacccagagggacgaacagcggggacgccc

SEQ ID NO: 195290 - RNA, 56 nt, Homo sapiens
ggagagggcaccccagggaagcagaaagggacccacaaagcggccgggggagcccc

SEQ ID NO: 195291 - RNA, 83 nt, Homo sapiens
acaccccggagcccagcgcaacgccagaaaagacgaggacgcgcacaggaaaggacgcggaacaagcaggcagccaggcagca

SEQ ID NO: 195292 - RNA, 73 nt, Homo sapiens
ggagaaggaccaagaaccaggagcgaagaagaagcgcaaacgccggcgggggaacgggagcggcgcgaggcac

SEQ ID NO: 195293 - RNA, 82 nt, Homo sapiens
ggacccggccccggcccacaggggggggcaaacccgagagaacggagaagaccccaacgacaaaagccgcagaccacagaga

SEQ ID NO: 195294 - RNA, 68 nt, Homo sapiens
cggaacagacgcaggaaggagagcgcaaccaacccacgaccgcaacgcaagcagaaaggaggaaaacg

SEQ ID NO: 195295 - RNA, 43 nt, Homo sapiens
agaagaagagccaccgagaagccaagagcaggcacccccagac

SEQ ID NO: 195296 - RNA, 87 nt, Homo sapiens
ccaggacaacccagaggcaacaaaggcgagagagacaagagagacaccccaaccgacaaagagcaccagacagccgggaacgacccc

SEQ ID NO: 195297 - RNA, 73 nt, Homo sapiens
cagaagaaggaccggaagcacacaacaggaaaacaaaagaggagaaaggccgaagcacgaaaaagcaaccaag

SEQ ID NO: 195298 - RNA, 81 nt, Homo sapiens
cgggccccgggcgagcggggaacaagcgcaggaggaaagagagcccagagaaaaaaaaagaaaggaccgagaaacaaaccc

SEQ ID NO: 195299 - RNA, 76 nt, Homo sapiens
gggacaacagaggcagaaaaggggacacggcgggcaggaggaaaaagacacaaaggcaacgacaaaaacacaaaca

SEQ ID NO: 195300 - RNA, 82 nt, Homo sapiens
accggaccgagagcggaccgagagcgcgaaacgcacgagaaggagccagggaacagacgaggaggacagggcaaggccacaa

SEQ ID NO: 195301 - RNA, 83 nt, Homo sapiens
accaacaggaacagggcagacgagcggaggacacccaacccgggcagaaagcaacagaagcagaagaaaggcggaccacaagg

SEQ ID NO: 195302 - RNA, 82 nt, Homo sapiens
ccgacgagacccgcaaccggagaacgccaagcgccgccacgacaagggggccccccggcccccgagaacccgccagcccagg

SEQ ID NO: 195303 - RNA, 73 nt, Homo sapiens
aggcagcggaggggggggaggggaggccgggaacggcagacgcagcagagagaccaccagcgagcgcaggccg

SEQ ID NO: 195304 - RNA, 71 nt, Homo sapiens
gaacccagggcagaaaggagagcccgggggcgcaccaggcacaggcccgagaggccacacacagagcagaa

SEQ ID NO: 195305 - RNA, 75 nt, Homo sapiens
gaacggaacagaaccggcagcaagagaacaacggagagagacgaggagcgggaagaagaggacacaagcggaaac

SEQ ID NO: 195306 - RNA, 53 nt, Homo sapiens
agagacaacgacagccaacagccagagaacgagaacaagaaaagaggccacaa

SEQ ID NO: 195307 - RNA, 75 nt, Homo sapiens
cgcgcgccccaccccccacgggccgcgaagaccggggcgagaggacagccgacggaccagagcgagcgccagagc

SEQ ID NO: 195308 - RNA, 60 nt, Homo sapiens
aaagcccaaggagaccaaggggcagaacgggaagccagagagcgcgcgaggccgcgccag

SEQ ID NO: 195309 - RNA, 58 nt, Homo sapiens
gcagaagccaggggacaccgccagcccaaacaacggcccaggaggccaggcgagcaac

SEQ ID NO: 195310 - RNA, 85 nt, Homo sapiens
agaaaggggaaccccagaaagcgaagaggaagaaacgaacagacgaacaaacggaaaaaccacaaggccaccaacacgaacccag

SEQ ID NO: 195311 - RNA, 77 nt, Homo sapiens
cgccggacccgggggagagcgggcgaggcacgcgggcggagaccagggaaccgagagcggcccaaagaacaagacag

SEQ ID NO: 195312 - RNA, 84 nt, Homo sapiens
gcagagacacgcccgggcggggagggcagccgggcccgcccaggccgacggcgccccagaggagcccggaacacgaacgaggag

SEQ ID NO: 195313 - RNA, 59 nt, Homo sapiens
gaggacgcaaccgcgggcaccgaacggagcggagcccagaaggggaacggcggaccaca

SEQ ID NO: 195314 - RNA, 72 nt, Homo sapiens
cacaccgcgccccaccggcccccgcaaaaggggacgaagagccagcgaggcgcacaacggggaagcagccaa

SEQ ID NO: 195315 - RNA, 71 nt, Homo sapiens
gcgcaccgccagggaagaaacgggaggcagcacggcaggagacgaggagaggacagcaggacacccggacc

SEQ ID NO: 195316 - RNA, 69 nt, Homo sapiens
gaacagaaggagcagcgaaaaacccgaccccccaagcagggggaaaagccagccagaacacagaacaga

SEQ ID NO: 195317 - RNA, 114 nt, Homo sapiens
ggagaccagcccgcagaggccaagagaaagcccgaagcagaagggcacaccggaagcagaagaggggaggggaccccaagccacggaggacggggcggggggccccgggcccgg

SEQ ID NO: 195318 - RNA, 84 nt, Homo sapiens
gggagcgagccgcacccacccgccaccccagaagacagaaggaggcacgagggaagaccggaaggacccccaagagacggccaa

SEQ ID NO: 195319 - RNA, 75 nt, Homo sapiens
cggaggggcggaccggcgcccagaagccccgggagaaaaaccgggagaagcggacagcaagaagcacccaagggc

SEQ ID NO: 195320 - RNA, 81 nt, Homo sapiens
cgaccccagagcccacaagcccacgcccagcacaagccagcaaccaggagggagacgagacaacaacagcagcaacgaaca

SEQ ID NO: 195321 - RNA, 68 nt, Homo sapiens
gcagagaaaacacccgagagcaccgccgagcggaccccaagggggccggcccagagacccacagaacc

SEQ ID NO: 195322 - RNA, 71 nt, Homo sapiens
agcaacagggacaggaaagggcacaaggaagaaaaaaccgggaagaccgacggagccccagcagaagacca

SEQ ID NO: 195323 - RNA, 67 nt, Homo sapiens
aagccaaaggggcccaggaacagagccaccagaggcgagcgaaaaaaggcagaggcggaagggagga

SEQ ID NO: 195324 - RNA, 71 nt, Homo sapiens
ccgaaaagaccgaaacacgcacccgcaagccgccaagacaccaccccagagagaaaggcaggcaggcgcac

SEQ ID NO: 195325 - RNA, 78 nt, Homo sapiens
agagggggggaccgaccgcaacagaacggacccgacgccggaggcgcgggcaagaccccgggacccaggccagagggg

SEQ ID NO: 195326 - RNA, 74 nt, Homo sapiens
cacgacccacgcgcgcaggcccgccgccaccgacgccagggcgccgggaggcagcacggcaggagacgaggaga

SEQ ID NO: 195327 - RNA, 57 nt, Homo sapiens
ccgcgaaggccagaagcgaaagaacaggcccgggacagcacaggccagcggggaaga

SEQ ID NO: 195328 - RNA, 87 nt, Homo sapiens
aaacgcgcccagggggcgaaccgcccgggcacgcccccacacggaccaagcaggagcaccacgacacggaacccaacccgcaaccgg

SEQ ID NO: 195329 - RNA, 68 nt, Homo sapiens
gaaggaggcagcggcggggcccgggacgaggcggacggggaggagacagcaaggaagaagaaaagaga

SEQ ID NO: 195330 - RNA, 107 nt, Homo sapiens
agggaagagaacagagaccggcaaggacccagcagcggacacagcccacgcagagggaggcgacaagagcagccggccccggcagcgaagcgaaccgaaggcggaac

SEQ ID NO: 195331 - RNA, 81 nt, Homo sapiens
gggaacagaaagaaaagccgaaagagcgccaggagagagagaaagggaacgggacaagcagaacgcaggaggccaacgcca

SEQ ID NO: 195332 - RNA, 79 nt, Homo sapiens
accgagcagcgggaccaccggaggaggggaaaggggcgaggcggcgcacaaggggacacccagggccacggggccaggg

SEQ ID NO: 195333 - RNA, 52 nt, Homo sapiens
ggaagaaagcagcccaggagggggggcgagagaaaaaaagaacagaagaaaa

SEQ ID NO: 195334 - RNA, 71 nt, Homo sapiens
ggaacagcagagcggcgaccaccagaagacaagagagacagcacacgcggagccaggagagaaaaggaaca

SEQ ID NO: 195335 - RNA, 76 nt, Homo sapiens
ggcgagaggccaagaagcgagagcagagagcgcgcgaggaggacacaggaacgccacaagaaacaacagcaaggcg

SEQ ID NO: 195336 - RNA, 77 nt, Homo sapiens
gaggcagccagcagggggagcgcaaaacacagcaaagacaaagacgaacagagacagcgaagagaaaaggagagaag

SEQ ID NO: 195337 - RNA, 76 nt, Homo sapiens
agggcaaaccacagcgagaaaggcccccacacccggaacgacaccaggaacccaaggaacaggaaaacggaagccg

SEQ ID NO: 195338 - RNA, 84 nt, Homo sapiens
ggcaccgaggagcgggccagccgcgcggcgggaagcggcggcggcggcccagcgccaagaggcccggagcacacaaggcgaaag

SEQ ID NO: 195339 - RNA, 73 nt, Homo sapiens
gccaacaaaaggggcggaagccaaggggccgaagagaacaagagcgggcaccccccccggcagacagcccaag

SEQ ID NO: 195340 - RNA, 74 nt, Homo sapiens
ccaacgccgcgcccgcggagggaaaaggaaacgagaagaacgaaagagaaacccaaaaaaaggagcaaaagagc

SEQ ID NO: 195341 - RNA, 70 nt, Homo sapiens
caggcccagaagaaagagaagagcgacaggcaagcggaacagccaggcgcccgagccaggggccccggca

SEQ ID NO: 195342 - RNA, 75 nt, Homo sapiens
ggggggcggcagacacagagaaagaagaggaaaaccagagacgggagaggaagaacacaggcaagagccagacga

SEQ ID NO: 195343 - RNA, 75 nt, Homo sapiens
aaaacagcccacggcagagagaggaacagaggaagcacaaagagaaggacacacagcaacgaagcaggggaggag

SEQ ID NO: 195344 - RNA, 66 nt, Homo sapiens
accccaggcgcccccgcagccgcccgggcccgccgggccgggaaaacacaaacaagcgcggaccga

SEQ ID NO: 195345 - RNA, 104 nt, Homo sapiens
cgaagacgccccaccacgaggccagcacgggaacgcgaagcgccaaagccagacaagacgagcgggggaaaaaagacacagaaccagccaagcaggagcaaaac

SEQ ID NO: 195346 - RNA, 60 nt, Homo sapiens
cgccacgccagggaggccccacaccggacaaaaacgcggaggggaccagagaccaaaaaa

SEQ ID NO: 195347 - RNA, 83 nt, Homo sapiens
gcgcggaagccccgaggcagccccgcggaggagcagaaggaaagaaggaccaggaagggggggaagcaaaaggacgacgaagg

SEQ ID NO: 195348 - RNA, 56 nt, Homo sapiens
cccaagcccgcgagcaggagaggcccgccggagcggaagagagcgcgcccagcggg

SEQ ID NO: 195349 - RNA, 74 nt, Homo sapiens
caccggggaccgcggaagggaaggaaaaaccgagggaaccaccgaaagaccacagcaagaccacgcccccagcc

SEQ ID NO: 195350 - RNA, 100 nt, Homo sapiens
cgcggagcaaagaaaagagcccacaaggaagaacaaagacgagccagacccccaggcgaccaggcaggcccacaacccaccagaaaacacgggggccaaa

SEQ ID NO: 195351 - RNA, 73 nt, Homo sapiens
gggaccgaccgcaacagaacggacccgcaccagcagcgcgcacccagggcacaggagacagagaggaggagcc

SEQ ID NO: 195352 - RNA, 88 nt, Homo sapiens
ccgaggggagcgcggggcccggcagaaagacgcacccccccccccggcggagccccgaaggagcgcaggcagcaggaggccgccgggg

SEQ ID NO: 195353 - RNA, 53 nt, Homo sapiens
caccccaagccacaggcaaggcggaggcaggaccacccaaaaccagagcaccc

SEQ ID NO: 195354 - RNA, 74 nt, Homo sapiens
caggagcaacacggaggcacacagggaaaacaaagagggaaaacggagaaaagcccccccaggccagcgcagga

SEQ ID NO: 195355 - RNA, 74 nt, Homo sapiens
gcgacccacacagcagcacagaggaagaacacagaagagaacccgaacacagcaggagcaagcgggggcaggag

SEQ ID NO: 195356 - RNA, 69 nt, Homo sapiens
ccgcccgggccagcggccgcgcacccccggccggaggcaccagcggcagcgcaagccacaggaacgagc

SEQ ID NO: 195357 - RNA, 58 nt, Homo sapiens
cccaggccaagagggacccacccggcgagcggggcccggcgcacccaccaccgccgcc

SEQ ID NO: 195358 - RNA, 71 nt, Homo sapiens
cgccggccgcaggaaaccaaggcagggggaaagagaaaacgcagaacaaagcgggacagacccgcaaggaa

SEQ ID NO: 195359 - RNA, 76 nt, Homo sapiens
acaaggcggccacagcacagagccccccaccacccagggacagagaagaggacggagcgaggaggggagcggagcc

SEQ ID NO: 195360 - RNA, 90 nt, Homo sapiens
cgaacggacaaagagaaaaagaaaacagccgaaacacacaagaaggaaaagaaccaggcaacacaaaaggccgccacagaagaccgaaca

SEQ ID NO: 195361 - RNA, 73 nt, Homo sapiens
acggggccgcacaaaagccccaggcaacagcagaggaacaaaaaaaaacaacaaggaaccccacagggccagc

SEQ ID NO: 195362 - RNA, 64 nt, Homo sapiens
cccaacggggaggccaacggaagaaagcacggaacggaggacccgccgggcgggggaccaagca

SEQ ID NO: 195363 - RNA, 81 nt, Homo sapiens
cgcccccaccgccagcccggccgcgagcgcggccgcaggaggaaacaagccacacccggggaaacccagcaacaggagagc

SEQ ID NO: 195364 - RNA, 65 nt, Homo sapiens
ccggcccacaggggggggcaaacccgagagaacggggccacccaggcccgcagaagacgcaggaa

SEQ ID NO: 195365 - RNA, 71 nt, Homo sapiens
acggaggaccgaagcaagagcagaggccggaaccaaagaagaccaaccaaaaagaaccgaaggaggaagaa

SEQ ID NO: 195366 - RNA, 75 nt, Homo sapiens
cacggggcggacgagagcacccaggagaaaggagcgccaaaaaagagggggcgaagggaaaagccccgcaggagg

SEQ ID NO: 195367 - RNA, 85 nt, Homo sapiens
caggaaggagcaccgggaccagcacgaccgaccagggccgcaccacgcgggcccgaagcacccaaaaggggcgccagagaaggag

SEQ ID NO: 195368 - RNA, 70 nt, Homo sapiens
gagagaacaaccagcggaaggaaggggcggcagggggaccagccagcaacccgcccccggaccaagcaac

SEQ ID NO: 195369 - RNA, 65 nt, Homo sapiens
caccgccaccgaagacgggccccaacacccagagacgaaaggccgccagcgggagccgacaagac

SEQ ID NO: 195370 - RNA, 72 nt, Homo sapiens
ggcgcacggaaacagccacagcaggaacacagcacccacccacacccacacccgcgacgggagggaggagcc

SEQ ID NO: 195371 - RNA, 67 nt, Homo sapiens
aagagaaaccaaagaaaaacgaagcaacccaaggcagagggccacaccccaagggcaaggaccggga

SEQ ID NO: 195372 - RNA, 69 nt, Homo sapiens
accgacgaaacagacccaggggaaccaagaccaggacaaagaagacccggagagacaagccggaggacg

SEQ ID NO: 195373 - RNA, 38 nt, Homo sapiens
cagcggagcgagagaggaaggccgagcgggcggagaag

SEQ ID NO: 195374 - RNA, 78 nt, Homo sapiens
acaaaacggcacgacaaacaacagaacccgaaacccacaggaaacgggaagaacgggaagacgcagaggcccgaagaa

SEQ ID NO: 195375 - RNA, 60 nt, Homo sapiens
aaaccggagggggaaaaaacccaaggcgcaaagggccgggccaggcggaaagcaggagaa

SEQ ID NO: 195376 - RNA, 72 nt, Homo sapiens
gcaagaggcccgccaacccgcaagccagacaggagcgaccaaccaggccagcaacagccggaggcaggggga

SEQ ID NO: 195377 - RNA, 53 nt, Homo sapiens
cgcaggcacagcgcggcccggaagccaagggccagaggcgccggaaggacggg

SEQ ID NO: 195378 - RNA, 38 nt, Homo sapiens
cccaacacgggaggccaagagcgccgcgccaggcggag

SEQ ID NO: 195379 - RNA, 71 nt, Homo sapiens
gggaacaacgggagaaacagcaacgaggcaaaacccaacgaggacgggggaaagaaggaagggaaaaaaac

SEQ ID NO: 195380 - RNA, 55 nt, Homo sapiens
caagagccagaagcccggcggaaggccggggggggcacagagccccggaagacag

SEQ ID NO: 195381 - RNA, 62 nt, Homo sapiens
cccccgcacccacgacccccggggggcaccgccgggcaccaagaacagccagcaaagacaag

SEQ ID NO: 195382 - RNA, 67 nt, Homo sapiens
agacaaaagggccaaagaagggagagaggcacgcaggaaagacagggaagacaaggaacggaggaaa

SEQ ID NO: 195383 - RNA, 86 nt, Homo sapiens
ccccacgaaggccagggccgccaggcagcaccacgaacaggggcaccggcagcgccccagcacggagaagcagcgcggggggcaac

SEQ ID NO: 195384 - RNA, 78 nt, Homo sapiens
cacgccaaggagacaccagcacaagggcgcccgcggaccaggggggacggggcccgagggaccagcacccccgggcca

SEQ ID NO: 195385 - RNA, 78 nt, Homo sapiens
gcgaggagaggagcgcaacagcagcaccagggaaccgggaagggaacagggaaccaagcagagaaagagagaacaaac

SEQ ID NO: 195386 - RNA, 71 nt, Homo sapiens
cagggccggggcacgacgacccaacagcaagaaaacgagccgaggcgagaaggagaagaagcacaaccaca

SEQ ID NO: 195387 - RNA, 83 nt, Homo sapiens
gccacgccccagacaggggaacgcggcgaccgccaagaaaggcagcgaggggagagcgaaagcgaacaccggggcaacagcaa

SEQ ID NO: 195388 - RNA, 113 nt, Homo sapiens
acgcagcgaagccacagaccccagaaacgggcaagcgcgcaaacccagaagagcggcaggccaccacgagaagcagggacgccgcccgacgagccccggaagcccagccccgc

SEQ ID NO: 195389 - RNA, 86 nt, Homo sapiens
agagacccggcaacccgccgcacaacaagcgcggaccggacacacacaagaaaaagaagcagcaaaaacaaacaggagcagcaccc

SEQ ID NO: 195390 - RNA, 95 nt, Homo sapiens
ggcaaacaaaagccagcaacccagggaccgagggaacggacccaggagaaaaaaggagccccaagggggggcaggcagcagagaggcccccaagg

SEQ ID NO: 195391 - RNA, 65 nt, Homo sapiens
ggcgcgcccggccgcgacgcccgggacccagagcgggcaggaggcagccgaagaagcaggaaggc

SEQ ID NO: 195392 - RNA, 73 nt, Homo sapiens
gggcgggggagcgcgccaccacccaagccacaggaggaaagcacaagaaacccgacaacaaaaccaagaaacg

SEQ ID NO: 195393 - RNA, 79 nt, Homo sapiens
gcggcagccggccgcaagaaacgaaggggagaccacacccaaaacgaaacgggaggcagccagaaggaagacccacagc

SEQ ID NO: 195394 - RNA, 67 nt, Homo sapiens
acccacacagaccaaccaaaggagaaaagggagaaagcaacaaaggaaacaacaaggaagaagacca

SEQ ID NO: 195395 - RNA, 73 nt, Homo sapiens
aaagaaaggagaagggccgagagaagagacagaaagaacggaaggaggacgacagacagaaaacagaaaacag

SEQ ID NO: 195396 - RNA, 78 nt, Homo sapiens
cagccaaaccgcccaaacaccagcccccacccacagaaaccccaccagccaaccagcacagggcacgaaacaccccgc

SEQ ID NO: 195397 - RNA, 70 nt, Homo sapiens
acccaggggggggagagggacgcccaccacgggaagggcaacgcagaggggagcccagcacccggggcac

SEQ ID NO: 195398 - RNA, 80 nt, Homo sapiens
gcgagcggccaagcacgccggccgagggcaccaaggcggcaccaagacaccagccgaacccgcagagcccgcccccccgg

SEQ ID NO: 195399 - RNA, 72 nt, Homo sapiens
cagcggacccgccgaagcagacagggagacaggccgccaggcccgggcggccgaacgcgaacaaggaccccc

SEQ ID NO: 195400 - RNA, 54 nt, Homo sapiens
aaacggagggacccaaccaagcagcaggcgcaaaaacgaacccacaaccgaacg

SEQ ID NO: 195401 - RNA, 51 nt, Homo sapiens
ggaagaaccgcagccgagcggggccggccacaggccagcgcgcgggaggaa

SEQ ID NO: 195402 - RNA, 82 nt, Homo sapiens
ggaggcgagcaggagaggggccgccgcacagcccaccgagccgggccagcccgacacccagccggccaggcgccgcacccac

SEQ ID NO: 195403 - RNA, 66 nt, Homo sapiens
ggggccagggaacccggcaccgccccagaaagcaggagcccggaaaggagaaggaaaagacggcag

SEQ ID NO: 195404 - RNA, 78 nt, Homo sapiens
aggaccagggaccacgccaaaggaaaaccggcagaggacaagaaggaaaacacccggcagggaaggaaggaacgcaac

SEQ ID NO: 195405 - RNA, 83 nt, Homo sapiens
aaaggaggcgcacagaacgcccaccgggccaaaacagaagaggcaaagcccagccacagcagcagcccagcagcaaacaacca

SEQ ID NO: 195406 - RNA, 68 nt, Homo sapiens
acgaggacggaggcggaccacggccagaccagaccagacaacggggaacaaaagacccgggccaccgg

SEQ ID NO: 195407 - RNA, 80 nt, Homo sapiens
gcagcagcacacggcgccccgacccaccggagcagcgcagaagcgagcggccagagcggaagccgcagaaggaccggcca

SEQ ID NO: 195408 - RNA, 77 nt, Homo sapiens
cgcgaggcagagcgggagcgcgcagccaggcggaaaccccaggcacccgcggccccagaaacagacagccgccaaga

SEQ ID NO: 195409 - RNA, 97 nt, Homo sapiens
gccccacgggccggcacggcggagccaccgcccagacgcaggagcggcgagcgagcaacagcagaaaagagaagagacccacgcaacgaagcagccc

SEQ ID NO: 195410 - RNA, 77 nt, Homo sapiens
ggagagaaaaacggaaacacgacagaagcagggcgaaccagagaaaacggcaaggaagcaaaggcccagcgacaaga

SEQ ID NO: 195411 - RNA, 60 nt, Homo sapiens
gccacgaaccaagagaggcaaaggaagaacaacagaggaccccagcccaccacaaaccaa

SEQ ID NO: 195412 - RNA, 75 nt, Homo sapiens
cgcaagaccccgaagcccagcaaccgccccaacaagcacagaggccgaaaacccggagaaaaggacacacaagaa

SEQ ID NO: 195413 - RNA, 79 nt, Homo sapiens
cccgcgggccgaaggaggcacgcgcaacccggagagcagccaaagggaagcaagccggaaacaagccaaaaacaacgga

SEQ ID NO: 195414 - RNA, 80 nt, Homo sapiens
ccaggggggacaagaacggcggacccgggggaaaccgcaaaagcccccggagcggccagaagaagcacggcaaaccgccg

SEQ ID NO: 195415 - RNA, 80 nt, Homo sapiens
gaggaggcgagaagaggaaaacagggaaaagccaccgaccacacgccacaaacccaccgcaagcgccaccaccacagagc

SEQ ID NO: 195416 - RNA, 79 nt, Homo sapiens
gagccgcagcgcgggccgggacccagccaggcagaccccgggcagcaggaagcaacccaggcacccccaacaggcaccc

SEQ ID NO: 195417 - RNA, 39 nt, Homo sapiens
ccgacggagcagcacccgagacggggcccgggcccaggc

SEQ ID NO: 195418 - RNA, 70 nt, Homo sapiens
agcaggccagcccgcagcaagggcaagccaggaccaaaggcaccgcacaacacgaaaggagaagaggacg

SEQ ID NO: 195419 - RNA, 71 nt, Homo sapiens
gcaagaaaacacgcccagacgaacacaagggcaagaagaccggaaggagagaaagccagaccggaaaagaa

SEQ ID NO: 195420 - RNA, 55 nt, Homo sapiens
cacacaagcaaaggcagagggcagacaccccacaggcaccagcagcaacgaacag

SEQ ID NO: 195421 - RNA, 79 nt, Homo sapiens
agggagagccgccggaagagacggaaagcgaaaccacagagaacacaaggaacgaaaggaagggaagaagcagaaccaa

SEQ ID NO: 195422 - RNA, 56 nt, Homo sapiens
cgcagcccggaaagccggcaagacgagaaagcagggcgaagcgagaaacaaggcag

SEQ ID NO: 195423 - RNA, 74 nt, Homo sapiens
gccggcgccggcggcgcgagacggacgaaaagcaccaggaccaggagggcgacagccaaggaccgacaacaagc

SEQ ID NO: 195424 - RNA, 81 nt, Homo sapiens
gccaccgagcccccgcccgacaggaagcccaaaagggaagaaggacaccagagacagaaacaaacccaagcagaaggcaaa

SEQ ID NO: 195425 - RNA, 57 nt, Homo sapiens
cacagcacagccgggaaggggagccaccagccccccgaagcaagaaaggacagcaaa

SEQ ID NO: 195426 - RNA, 73 nt, Homo sapiens
agggcggaagaccgcgcacaggcgagccaagcccagccccaggacgccgaggaggggacgaccggagcagcac

SEQ ID NO: 195427 - RNA, 66 nt, Homo sapiens
gagaaaccggacgcgacgggaagccgggcaaggagaacaacacaaaccgaggggaagagaggaggg

SEQ ID NO: 195428 - RNA, 80 nt, Homo sapiens
cggccgaggggaggaccagacccgagccgaaggggaggcggaggacaggcaaaccgacaccagcgacacaagcgcgaggg

SEQ ID NO: 195429 - RNA, 72 nt, Homo sapiens
ccagcacgaaacgaccccccccaccaaagagaacgggaagaccacaaccagcacaggaagaaacgccaggaa

SEQ ID NO: 195430 - RNA, 59 nt, Homo sapiens
gcgcgagaagagagacgagagagaagaggagagagaagaagcaagaaaccccccccgag

SEQ ID NO: 195431 - RNA, 42 nt, Homo sapiens
gcacggcaggccagcgcacccagccgggagcaacgcgggcac

SEQ ID NO: 195432 - RNA, 53 nt, Homo sapiens
gagggcagcgcccacggccgcgaccggccgacagcccaccgaggaagaccaaa

SEQ ID NO: 195433 - RNA, 78 nt, Homo sapiens
ccaaacggacaccagaaagcccggacacaacaaacagcccaagcacaaaacaacccaaaagaagagccggccaaagga

SEQ ID NO: 195434 - RNA, 81 nt, Homo sapiens
cgaggagcgagcgcgcgaggggcggccgaggaggcacggacaaaacgcagggccagcaaacccgggcccaagacgcagcag

SEQ ID NO: 195435 - RNA, 65 nt, Homo sapiens
acgaaggacggagaagaaacgagagagacaccaccagacacagaggaaaaagacaaaccagcccc

SEQ ID NO: 195436 - RNA, 70 nt, Homo sapiens
cccgggaaccccaaaccaaacggacccaggacacagggcggcccgcaagaagcccagcgcagcaagaccg

SEQ ID NO: 195437 - RNA, 78 nt, Homo sapiens
ccaggagcgggaccaagcagaggcgcaacacaagaaagacaccggagacagagcacggaccagccgcaaagagccaga

SEQ ID NO: 195438 - RNA, 72 nt, Homo sapiens
cccccggaccccacaagggcgcccgccggaaaccaccgggccagaaggagggagcgggggagaggaagagac

SEQ ID NO: 195439 - RNA, 79 nt, Homo sapiens
ccgccagagaggggacccacccggaccccacaccacccacacaccagcggcagcccccggcgcaggggagaaacagccg

SEQ ID NO: 195440 - RNA, 66 nt, Homo sapiens
caggagagagggggcgcggcaaccggaggcaagggagaaaagggcaaacccggaaaagagggacaa

SEQ ID NO: 195441 - RNA, 74 nt, Homo sapiens
gaagaccgccaaaaaggacacggagccaggaaccagaaggcccagacaggggccagcaaggaagagacgcgaga

SEQ ID NO: 195442 - RNA, 89 nt, Homo sapiens
ccccgcccggggggacgcgcacgagccgggaccaagaggcgacagaggaccgcccgacagagggggaggacggaagacgaccagccacg

SEQ ID NO: 195443 - RNA, 71 nt, Homo sapiens
caaccagacagaagacgaccggcggggcacgggaagggaagcgggagaggccacccgcccacgagcggaag

SEQ ID NO: 195444 - RNA, 78 nt, Homo sapiens
gacaccacacggggaagccccgagggaacaggcacgccccacccgccagccgagcccccgacgcagcacaaagccccc

SEQ ID NO: 195445 - RNA, 88 nt, Homo sapiens
gcggcgcagggcggcggcacaaacggcggcgccggggccggaggaaaaagccgacagcgcacgaaacacacaaagaaccaccaccggg

SEQ ID NO: 195446 - RNA, 75 nt, Homo sapiens
gcaaggacccacacgggagcggggggggcccggaaccgagccccgacaggcagacgaggaccagacaggcaaaac

SEQ ID NO: 195447 - RNA, 61 nt, Homo sapiens
cgggacagccaggaggaagggcagcggcagagcccagggcggagggcccagaacgcggccc

SEQ ID NO: 195448 - RNA, 59 nt, Homo sapiens
agaccagcacgaagggcgacgaaaagcgggcgccaacaagcaccaaagacaaaggaaac

SEQ ID NO: 195449 - RNA, 76 nt, Homo sapiens
caaaaacacagaacgccaaggagccgcccccccggaaacgcacgcccaggcggagaacggaaaagcaccaggaagc

SEQ ID NO: 195450 - RNA, 78 nt, Homo sapiens
ggagaagaagggcacgacggacagaagccacagacgaaaccaccagagaggacccgagacaaggcggcgggagcagga

SEQ ID NO: 195451 - RNA, 52 nt, Homo sapiens
gacgggggaggaggcaacgccgcgacgcaagaggcgccccaaggaaaggggc

SEQ ID NO: 195452 - RNA, 61 nt, Homo sapiens
ccgaagcaaaagccacagaaaagacaagagcccggagggcaaaacccaggacccacagcgc

SEQ ID NO: 195453 - RNA, 70 nt, Homo sapiens
cagagggacagccgcccgaagccaagcggccgggacaacaccgggaacgcgagcccagaaccgaaccacg

SEQ ID NO: 195454 - RNA, 82 nt, Homo sapiens
gcccccaaagacgggaacaggaagggaagcagagcaccaaccaggagaaaaggacggacacacagcccacaacgaagcccgg

SEQ ID NO: 195455 - RNA, 65 nt, Homo sapiens
aagggaggcaccaaaaagaagacaccaaaacaaggaccccagaaaggggaccccaaccaagagcc

SEQ ID NO: 195456 - RNA, 89 nt, Homo sapiens
gacggcgcaggaccggggaaccgccaaagcccgggcgcggaagaagccaagggcagccaggccacaggaaacaggaaggcggccaaaga

SEQ ID NO: 195457 - RNA, 72 nt, Homo sapiens
cggagacagcgagccagcagagaagggcaaaacgaaaggagcccaaagaacagggaaccccacaaggagcca

SEQ ID NO: 195458 - RNA, 68 nt, Homo sapiens
gagcaaccccagaaggcaacgcgccgcaaaacagaacgcgggggagacgccgcaacaaagccacaagg

SEQ ID NO: 195459 - RNA, 74 nt, Homo sapiens
agaaacaaaaaaaggaaacacacaaacgcagggaggaggaccgggaagaagaaaccgagcaacaccacgaacca

SEQ ID NO: 195460 - RNA, 74 nt, Homo sapiens
caaaaagaaagagaagcggagaacccaggagagcagaaaggaaccagcgcccacagggcaacgaaagcaaaccg

SEQ ID NO: 195461 - RNA, 78 nt, Homo sapiens
ggcgaagaccgggggagcacggaccaagaaggagggagcggcggcagcagacaccggaggaagcggcccccagaagcc

SEQ ID NO: 195462 - RNA, 56 nt, Homo sapiens
ccaggcccgaggagcgacgaggcgcagagccagaaggcaaacacaaccgcagcggc

SEQ ID NO: 195463 - RNA, 68 nt, Homo sapiens
aagccccacagggagaaccaaggaagccacaaacagacaggggagaagcagaccgcaccaggcgggac

SEQ ID NO: 195464 - RNA, 63 nt, Homo sapiens
cagagcagggagacggaggaggaggagaagaagagagcgcggggaccacgagccaggacccag

SEQ ID NO: 195465 - RNA, 70 nt, Homo sapiens
ggcgggcaccaaaaccaggcaccaggcacaagaccccgccgcacaacgcagaccaccggcccaggcggag

SEQ ID NO: 195466 - RNA, 64 nt, Homo sapiens
gcgccacggccacggcccccacaagacccaccgcgaggcgggggaagcccgcaaaccccccgaa

SEQ ID NO: 195467 - RNA, 69 nt, Homo sapiens
aaagcaagagggcaaaaacagccccaaccgcgaacggacaaaagacagcacaggaacacgcgcgcagaa

SEQ ID NO: 195468 - RNA, 73 nt, Homo sapiens
agaagaagcggggccaagcgaagagcgcggaaaggggcgaaggagagacgcgaccggaaaggagagagagaca

SEQ ID NO: 195469 - RNA, 71 nt, Homo sapiens
cggaacagccgagagccaggaggagggaacaggcggcaggacccccgaggcagaagagggcccggaaccag

SEQ ID NO: 195470 - RNA, 79 nt, Homo sapiens
agagcaggccgcggcgacccagcgagccagcgacagcccaccacaggaggagcagggccagcgcagaaaacagggaaga

SEQ ID NO: 195471 - RNA, 78 nt, Homo sapiens
cgcaaccagcagaagcccaccagagagcgcggcgggagcgaggccgccgcgcaagaaaaaggggagcaagaagaaaga

SEQ ID NO: 195472 - RNA, 39 nt, Homo sapiens
gaggaggcaacaacgaggggggggccagaagaaaagaag

SEQ ID NO: 195473 - RNA, 68 nt, Homo sapiens
aacggaccagaccgaccaccaaaagagcaaagacacagcaacgagggaagaaccaggcaggaggcaca

SEQ ID NO: 195474 - RNA, 60 nt, Homo sapiens
gcagcacaaaacaaggccggacgaaaaaccggaaacacccgagcagaagaaccaacgaaa

SEQ ID NO: 195475 - RNA, 57 nt, Homo sapiens
gcaagcgccccacagagcaagacacagggggaaaagcagagggaaacggaggacaaa

SEQ ID NO: 195476 - RNA, 64 nt, Homo sapiens
cagaacgacaggccaccagccagcgggcaccagccgggcacaggaggaaccaaggaaacaccga

SEQ ID NO: 195477 - RNA, 53 nt, Homo sapiens
accccgcgagacggaaccaaggccccacggccccgagagccacaccccagccc

SEQ ID NO: 195478 - RNA, 80 nt, Homo sapiens
acaagcacacgaccgggagcgaggagccccgagaagcaagaggaaagagaaaggagaccacaagaccccgcgccaccaaa

SEQ ID NO: 195479 - RNA, 84 nt, Homo sapiens
gagcagagccgcgggcgccggagccgaggcgagcgccgcgcgcaccacgagggccgccccccgccagaggaagccgaggccccc

SEQ ID NO: 195480 - RNA, 79 nt, Homo sapiens
gaaagcccaggcagaccccacacaaacaacagggaagcgcgaggaggaaaagagaaacgaagaaaggaccaagagagaa

SEQ ID NO: 195481 - RNA, 76 nt, Homo sapiens
caccggccagcccagcccccgccgcggaaagcccagaggccggaacagaggaaagagggaggacgccgaccaggag

SEQ ID NO: 195482 - RNA, 78 nt, Homo sapiens
ccaaaggaacggagagaaccgggaccccccgcggggacccggaacgagcgcaaacgagaacagcacgcacccaagacg

SEQ ID NO: 195483 - RNA, 69 nt, Homo sapiens
gagaagggcccagaaccagacgaggccccgaccccccagaaggaaacgaggaagcggaacgggcacaaa

SEQ ID NO: 195484 - RNA, 71 nt, Homo sapiens
aacggccacaccacagcacacccgggaacgccagcccaaccccccaacgcagaggggccgcaaggccaggc

SEQ ID NO: 195485 - RNA, 71 nt, Homo sapiens
ggacccgaaggaggggaaacccgaacggcaaaccgcccccgggccaggccagacggggcagggaacaacgg

SEQ ID NO: 195486 - RNA, 79 nt, Homo sapiens
cccaaacccgcaacaagcacacgcaaaaaggaagaaagccacaagggaaaaaagagaaaagcagacagccaccagcccg

SEQ ID NO: 195487 - RNA, 70 nt, Homo sapiens
ggggccacaggggcacgggaggcaaaccgacaccagcgacacaagcgcgagggaaccacagaggacaggc

SEQ ID NO: 195488 - RNA, 78 nt, Homo sapiens
ccgcggccgccagccgcagccgaaggcgacaagcggagaaaggcacagcagaagaagaaacagaagaagaagagcaga

SEQ ID NO: 195489 - RNA, 74 nt, Homo sapiens
gaagaaacacgggccgggggaaaagccacggcaggacaaggggcagaccacaaggagagaagagagggagccac

SEQ ID NO: 195490 - RNA, 76 nt, Homo sapiens
ggacaacccccgagcacaggggagaggacggagacaagcagagggcacggaaaaaggagagcccaggccgcaggga

SEQ ID NO: 195491 - RNA, 60 nt, Homo sapiens
cggaggcagaggggaggcgcgaaagcaacccacagagagagaggaaacgaagggagcgac

SEQ ID NO: 195492 - RNA, 69 nt, Homo sapiens
gaggaggcgggggcagccgcgagacggcacaaggcaaaggaacagagcacacagaccacaaggcagcag

SEQ ID NO: 195493 - RNA, 66 nt, Homo sapiens
aaccacaacacccaggcgaaggcggacaggaaacagaagacagccgaaccaagggcgacaaccaga

SEQ ID NO: 195494 - RNA, 79 nt, Homo sapiens
gcggcgcgggacccacgcaggcaaaagcagaccggaaaacccaccggcaagaccacacccgaggggagcccaggacacc

SEQ ID NO: 195495 - RNA, 53 nt, Homo sapiens
cccgaacccgaccacccggcggggagcacggagggaccgacccacgcccgccc

SEQ ID NO: 195496 - RNA, 80 nt, Homo sapiens
gcgacacacccaggcgccaggagagccggaccagagggggacgaggcccccaccaagacagcggagacagccggaagaaa

SEQ ID NO: 195497 - RNA, 75 nt, Homo sapiens
ccggcaaggggacccaggcgcccgcacgcgaggaacacagcacccacccacacccacacccgcgacgggagggag

SEQ ID NO: 195498 - RNA, 75 nt, Homo sapiens
accaccaccgggcggccccggccccgccgccacccccgccccgcccgccccgccccggcaaacgacccaggagcc

SEQ ID NO: 195499 - RNA, 51 nt, Homo sapiens
ccaccgagggaagccaaggcccccagaacacagcgacaaacaggggaagaa

SEQ ID NO: 195500 - RNA, 51 nt, Homo sapiens
gacccgacgggccaccgggcccggcggcaccgaggagcggcggaccccgag

SEQ ID NO: 195501 - RNA, 77 nt, Homo sapiens
ccgccgcgcgccgcgcgggagcgagaccggagcgccacggccacggcccccacaacagagcaccgaagaaaaaggag

SEQ ID NO: 195502 - RNA, 81 nt, Homo sapiens
aggccggccgcgccagagcccagcgcgcccgcgccaggccaggaggagaccccaagcgggagcacacgcaccgcgccacaa

SEQ ID NO: 195503 - RNA, 81 nt, Homo sapiens
caagaaaccacccagacaggagaagagaaagagagaaggcgagaagaaaacagaacacccagggaccgaagaagccccaaa

SEQ ID NO: 195504 - RNA, 88 nt, Homo sapiens
cggggacccgcgacccagccccccacccaacgcgcccccaggcccaggaagcccacccagccccgccacgcagagcccagaaggaaag

SEQ ID NO: 195505 - RNA, 70 nt, Homo sapiens
cagcagaggagaggaaacaaaaaaccgcaggaaggaagggcgagaagaaaagaagcagagggcggccagc

SEQ ID NO: 195506 - RNA, 74 nt, Homo sapiens
gacgagccaagaaccggcacggcccggccccgcccggcgccgaggacccccgggggaagagaccaccggaaacc

SEQ ID NO: 195507 - RNA, 73 nt, Homo sapiens
aagcccagccgcgcgaaagcggcaaaggggaaaaaaaagggagaaacagaccaagggcgacaggcgccacccg

SEQ ID NO: 195508 - RNA, 53 nt, Homo sapiens
cccgcccggggcagcaggaagacaacgaggggcacgcgcccacccaggcgcag

SEQ ID NO: 195509 - RNA, 77 nt, Homo sapiens
ggcgcaagccacaggccagcgcacgcggggccaccacacgagaccggccaaggggccggacgccccaggagcggcca

SEQ ID NO: 195510 - RNA, 79 nt, Homo sapiens
gagccgggagccgaggcccgacgcgggagcgcggacgaggggaccagcccgaggagggccggaaccacccggaggaggg

SEQ ID NO: 195511 - RNA, 77 nt, Homo sapiens
aaagcaaggaaacgagcagaagagcggcccaaagcgaacacccggcaccagcagccagacccgccgcagagagccga

SEQ ID NO: 195512 - RNA, 68 nt, Homo sapiens
ccagcgccgccgcgcgcgcaagccgccaaacaggcggaggagcccagagcaggggaacaggaaccgaa

SEQ ID NO: 195513 - RNA, 86 nt, Homo sapiens
acgcgcgcgggcacccacggagccccggggcggaaaaccaacggcccggaggaccacagcccaggggccccaggcgaaacccagcc

SEQ ID NO: 195514 - RNA, 63 nt, Homo sapiens
gcggcgcgggagggaaggcgcggggacgacccgagaggaggagggaaagggggcaaggccagc

SEQ ID NO: 195515 - RNA, 72 nt, Homo sapiens
acacacgaagccgaacgaaagaggaagaaggcgaacacagaagaaccacgcacaaggacagggaaaaaagcg

SEQ ID NO: 195516 - RNA, 84 nt, Homo sapiens
caggagagcgccccagggcaagccccgcccggccaacaagggccccagcgagagaacagccgggaccggagccgggcaaagcag

SEQ ID NO: 195517 - RNA, 67 nt, Homo sapiens
gagagcgcaaacacccccagacaaaggacagcagaccacagcccggcaggcccaaaaacccaaaggg

SEQ ID NO: 195518 - RNA, 61 nt, Homo sapiens
gccaggcggaagcagaggagcagggacgaaacgcccaccccgggaagcaggacgcgcacag

SEQ ID NO: 195519 - RNA, 92 nt, Homo sapiens
cggaggaggggaaggcggcgcgggagccacacccagaagcccccagacacgaaacagaccaggagggagagaagcaaagaaaaagaagagga

SEQ ID NO: 195520 - RNA, 81 nt, Homo sapiens
cgccaaaaaacccagcgggaggagcgggagcgcgcgggcagccgggggaccggaaagagcccgcgcgggacgcccagagcg

SEQ ID NO: 195521 - RNA, 78 nt, Homo sapiens
aagcacgggacccggaagcgcgcgccaagggccgacacaacaccgagacaacagcaaagccaggaggagacaggaggg

SEQ ID NO: 195522 - RNA, 67 nt, Homo sapiens
ggacccgcggaaccaccggcgcagcacagcgacggaggcagaagccacaggaagagccaaggaagca

SEQ ID NO: 195523 - RNA, 70 nt, Homo sapiens
caaacaggacgacggcagacacagcgcggaaaagccccagcaaggcgggaggcagcaccgggccgaggac

SEQ ID NO: 195524 - RNA, 74 nt, Homo sapiens
ccacggaaacacgcacccaacagaaagcagagaaagggaggaccagaagacaaagaggaagaccaagaaggaga

SEQ ID NO: 195525 - RNA, 82 nt, Homo sapiens
cagagcacgcgccggggaacgcaacgaggagacaggcgggggccgacaaagccagggagcaggagcaaccagccaggaggac

SEQ ID NO: 195526 - RNA, 67 nt, Homo sapiens
gccgagacggcacgagaacgggacccggccagaggaaagaacccgagcccagcgaggcagagagagc

SEQ ID NO: 195527 - RNA, 70 nt, Homo sapiens
cgccgcacaaaaacaaggcgcggcggcggagcggcggggcggcgaagccaaccacagcccggagagagac

SEQ ID NO: 195528 - RNA, 49 nt, Homo sapiens
ggaaaggacccccccagcaacccccaggaccgggcagacggcggggcaa

SEQ ID NO: 195529 - RNA, 72 nt, Homo sapiens
gcggcgcacccccgagcggcccggagggcagggacaagaaaaccccaggacacagagcggggagcccgaagc

SEQ ID NO: 195530 - RNA, 58 nt, Homo sapiens
caaacgcgcgaccccccacagcccggaccgacaggaaagaaggagcccacaaagaaaa

SEQ ID NO: 195531 - RNA, 81 nt, Homo sapiens
ccaagaggagccccggggaacccgcagcacaccagggggcaggcccgagccgacacgcgcccgagccaaggagaggggcgg

SEQ ID NO: 195532 - RNA, 68 nt, Homo sapiens
ggaacgacagaccccgggcacaggaagaccgaccaaaaaggaagaaggaccacagaaacacagcggac

SEQ ID NO: 195533 - RNA, 77 nt, Homo sapiens
caaacaacacagacccacaagcaagcacaggcaggcacagaacgaaccaaaaaggaaaggacccacaaagacagaaa

SEQ ID NO: 195534 - RNA, 77 nt, Homo sapiens
ggacgaagcccaaaccacaagccacaaaaggcccacgaggccccgggggcccggaacaggagcgaaggcccgccccc

SEQ ID NO: 195535 - RNA, 105 nt, Homo sapiens
cagcccaacccacccggcgcggccacgcgcgccgcccaaggccagcgagaaaccgggccaggagccagaggcagcgcacacaagcgggaaacccagggcccacca

SEQ ID NO: 195536 - RNA, 80 nt, Homo sapiens
gaaaagaaacaagccgcgaaggagagcgagcccccccagggaccccccacccccccgaggggcaccccccagagcagaga

SEQ ID NO: 195537 - RNA, 79 nt, Homo sapiens
cagagcggagggagccccagacacgaacggcaacgaaaagagacacgacgcaaacccccaagagaaacagcacgcgcgg

SEQ ID NO: 195538 - RNA, 71 nt, Homo sapiens
cccggccgacaaccacgcagcgcgcagacaggacaaccagcggaggcacgacgccaaaccaaaaagcaagg

SEQ ID NO: 195539 - RNA, 70 nt, Homo sapiens
ccgcaggggcaccaaaacacacaccgaaacccacggcagaacaacggggaacgcacgcggaggaagaaac

SEQ ID NO: 195540 - RNA, 87 nt, Homo sapiens
ggcggggcgcccccgccacgcagccggccaccgccgagacccagcacacgccgaccaggggcaccaccacgaggcgaggggccaacc

SEQ ID NO: 195541 - RNA, 76 nt, Homo sapiens
ggcacaagggaggcgacagagacagcagcaggccgagggacagggcaccaaccaggaaggaaagcaaagaccagac

SEQ ID NO: 195542 - RNA, 76 nt, Homo sapiens
gcaagggacccccggccccccagcgcccccggggcaaacccgagccagacacgcacgagaacccccagcaacccaa

SEQ ID NO: 195543 - RNA, 77 nt, Homo sapiens
ccgaccgcccacagacccaaacaaaggaagaagaagcgcacaaggagcacaacagggagcggaagacgacagcaagg

SEQ ID NO: 195544 - RNA, 63 nt, Homo sapiens
cggcgggccagccgccccgcacccgaggacaaagggcggaaagggaaagcgagaaccccgaac

SEQ ID NO: 195545 - RNA, 62 nt, Homo sapiens
cacacgcagcagaagcccggaagggccacgaccggcgcgcgcgaaccgacccgcaacagccg

SEQ ID NO: 195546 - RNA, 60 nt, Homo sapiens
ggaaacacggaaacgagagggacgagagcgccacacacaagcaccacgccagagccaaag

SEQ ID NO: 195547 - RNA, 79 nt, Homo sapiens
caggacaggagcgcaccaagaggcaccgcacggcgcgacagcgacccccacagagccggacccagcaggacgaccagcc

SEQ ID NO: 195548 - RNA, 68 nt, Homo sapiens
caaagcaaggcacagaagcgccgaccggcgggaaaacaccccgccacccgcagcgcggcaccgccgga

SEQ ID NO: 195549 - RNA, 70 nt, Homo sapiens
aggagagcaagacccagaccagcagaaagggagggacacaggagagaaccagagaaggccgggagagccg

SEQ ID NO: 195550 - RNA, 69 nt, Homo sapiens
gaaccaggcccggaccagcccgggcgcccgcacggacccccagcgggcgcggacggcaggggcgccggg

SEQ ID NO: 195551 - RNA, 76 nt, Homo sapiens
cccgcccgcccccgccccacgaagccagaaagaagccacccagagagaaccagagccaggacgccccaaggcccgc

SEQ ID NO: 195552 - RNA, 56 nt, Homo sapiens
accaagaaccagacaagaacaagccaggaggagagaaagagaacagaaaaaacaaa

SEQ ID NO: 195553 - RNA, 85 nt, Homo sapiens
caagcggagaaacagaaagagggacgagggcaccgcaaggagaacgcacaaccacggggacgggcagaggaccaagcagcagggc

SEQ ID NO: 195554 - RNA, 76 nt, Homo sapiens
acagcaagcgaagccgaaaaagcgcccgagacgggcccgccgaaagacgaggggacaacgaaggaggcaagcaaca

SEQ ID NO: 195555 - RNA, 71 nt, Homo sapiens
cagcaaagaagaggcaggagacagagagaaagcaacagcaggccagccccagagcccggggagcacgagaa

SEQ ID NO: 195556 - RNA, 81 nt, Homo sapiens
aaacggaagcggacgcgggaggacggcacaccgcggcgacaccgagaaacacaggcggaagcgcgccggagaaacgaacag

SEQ ID NO: 195557 - RNA, 56 nt, Homo sapiens
aaagcccagcggccaaacaaccacaagcggaggccaaaagaaagccagaggccgca

SEQ ID NO: 195558 - RNA, 80 nt, Homo sapiens
gcggcgaaggcggccgggccgggcccgcccgcgcccagaagagagccgcaacacgccaccgggaccacggcggcaggcgc

SEQ ID NO: 195559 - RNA, 59 nt, Homo sapiens
cagccaagccgagccgccacccggcgacccaaagacaggaccacgcaccagcagagaag

SEQ ID NO: 195560 - RNA, 64 nt, Homo sapiens
agccgcacggcaccagggggccgggcgggcggcccggccaagaaggcggacggcgcccgaacaa

SEQ ID NO: 195561 - RNA, 76 nt, Homo sapiens
aaaaaaaaccggagaggaagagaagagagccgaaaaccagccccgcccacacacaccaacagaacccgggggaccc

SEQ ID NO: 195562 - RNA, 73 nt, Homo sapiens
ccccaggcaaccaggcaggaagagcggccagaggccagcaggccacgcaaggagacgaagaggccaaagggac

SEQ ID NO: 195563 - RNA, 70 nt, Homo sapiens
gggaccaagaggaggcgggccgaagcaacaaggggaaagggaagggagccgaagggacaggcgcaggaag

SEQ ID NO: 195564 - RNA, 76 nt, Homo sapiens
gccgaccccccggcgccgcgccggcggcggacgagcagggggaggaacaaagcgaggaagggaagggaaggcgaca

SEQ ID NO: 195565 - RNA, 73 nt, Homo sapiens
gaggggagaggccggaggacaccaacaggaaagcgcaaagccgacgaggagagaccccgcagcggacaagaca

SEQ ID NO: 195566 - RNA, 67 nt, Homo sapiens
cggaagcacagccggggaaagggggccacccacccaggacccccccgggcaaagcagggcaggaaaa

SEQ ID NO: 195567 - RNA, 86 nt, Homo sapiens
gaaggggaaggcgccgaagaggacgaagaacgaaccagaaaaccggagagccccagagcaacacaccacgcacccagcgcccggag

SEQ ID NO: 195568 - RNA, 73 nt, Homo sapiens
cgagccacaccacgcacgagggagaagcaggcccagagcgagcacagcaggaggagccgccaggagcaaggca

SEQ ID NO: 195569 - RNA, 87 nt, Homo sapiens
cgggcggccggcgcgaggcgagagccaggacaaaaccaggcagaaccaacacgaacccaagcacaaacaagaaaacgagcaggcacg

SEQ ID NO: 195570 - RNA, 64 nt, Homo sapiens
aagcgggcaaccgaaagagacccccagaccaggaaagacagagccgccccgaggccccggcgcg

SEQ ID NO: 195571 - RNA, 67 nt, Homo sapiens
acccacagcgagggaagacagacagggacgaaaagcccaaacagacaaagccaaacaggaggcacaa

SEQ ID NO: 195572 - RNA, 78 nt, Homo sapiens
ccgagccagcaagcccccaacgggagcgaagaggaaagaaagacccccgggacagaaacaagcccaagagcaggcaag

SEQ ID NO: 195573 - RNA, 58 nt, Homo sapiens
cccccggacaaagcgagcacgcaaggcgggcacagcaagaggagagggggcaaagccc

SEQ ID NO: 195574 - RNA, 65 nt, Homo sapiens
gcacaggggccccgccagcaagggaagcaggaaaaaagaacaagaacgcaaggacaacaaggcac

SEQ ID NO: 195575 - RNA, 78 nt, Homo sapiens
ggcgcggccacgcccccccacccccgcgcgcgcccggggaggacaaggcacgaggcgcggcgaccaccacagcagagc

SEQ ID NO: 195576 - RNA, 78 nt, Homo sapiens
cccagcacgggaggcgagggggggacacaagaaggggcccggaccacggcacgggaccgaggaggcggaacaagccac

SEQ ID NO: 195577 - RNA, 77 nt, Homo sapiens
gaacgacacggcggaaacgacgcaggaggacgcggcagagcgcaagccgacacgaggcgggccacagccacgagcag

SEQ ID NO: 195578 - RNA, 89 nt, Homo sapiens
cccgaggaccggacacggaggacgagggcccacagccgaggaggagcggggcgacggccggggacgccggagagcccacaaggagaagc

SEQ ID NO: 195579 - RNA, 71 nt, Homo sapiens
cgccacggaccgcgggacaagaaaacagcggaaggaacaacaaaccaagagagacgagcccggaaaggaac

SEQ ID NO: 195580 - RNA, 84 nt, Homo sapiens
aaccagaacagagcgccaaagaaaaacgggggagggaagcagccaagcgggcagaagaggaagccccagacacgagggcggcga

SEQ ID NO: 195581 - RNA, 71 nt, Homo sapiens
ccagcagcggacaggcacagacaaccaggagcaggccacagaacaggacacggacgaagacacgcacggcc

SEQ ID NO: 195582 - RNA, 80 nt, Homo sapiens
aagccggcgcgccgggggccggccgcgccggccggccgggaccagggaagaagcccagcggaggcgaacggcccccgcca

SEQ ID NO: 195583 - RNA, 59 nt, Homo sapiens
cacaacccgacccgacgaagcgcgggcaacccgggcaggcggcgcagcggcaccaccag

SEQ ID NO: 195584 - RNA, 69 nt, Homo sapiens
acggagagggagaaggaagaacgaagcgcgcagaaaacacagaaggcaaaagcgcaaaaacaaaacaag

SEQ ID NO: 195585 - RNA, 68 nt, Homo sapiens
ggaaaacgcggaaaaccgacacaacaggaagaacgaagcgcgcagaaaacacagaaggcaaaagcgca

SEQ ID NO: 195586 - RNA, 50 nt, Homo sapiens
acggagaaaaggagaacacgagagcgaaaccaggcccaaaagaccaccag

SEQ ID NO: 195587 - RNA, 81 nt, Homo sapiens
gcagcgacagggccgggcgccggcgagagccgcaccgccaacccccgagcaagacgggggggagaaaaacagcgcgagaag

SEQ ID NO: 195588 - RNA, 69 nt, Homo sapiens
cgagcccagggcaggcagagagaagcaagccaggggggacgccccccccccggcagggcccccagggga

SEQ ID NO: 195589 - RNA, 76 nt, Homo sapiens
aggagaccaaacccccgacagcgccaggcccagacgccaacgcaggagcacccagggacccgagaggggcggggag

SEQ ID NO: 195590 - RNA, 82 nt, Homo sapiens
ggcgaagcgggcgagcggggggacgccggcggagacgcgggcgagaccgggaacagccaggagggacgcgagccgcccgacc

SEQ ID NO: 195591 - RNA, 82 nt, Homo sapiens
acccccacccagccgggcaagcacgaagccaaaggaccgacccaaaagcagaggaaacaaagagccccgggaaaagaaaaaa

SEQ ID NO: 195592 - RNA, 76 nt, Homo sapiens
gccgaagaaagcgcgaggggcgcgaggcacagaaaacgaacgagaaacgagggagaagaagcagaaaaagggggaa

SEQ ID NO: 195593 - RNA, 33 nt, Homo sapiens
aaaacgccaaggaacgcaacccgacgaagacgc

SEQ ID NO: 195594 - RNA, 75 nt, Homo sapiens
cgagcacaacagagaggaccagaagaaaaccagaagagacagacccccccagaagacacaagacaacaccacacc

SEQ ID NO: 195595 - RNA, 34 nt, Homo sapiens
ccggcagccgggaacacaaggcggcccaccaagg

SEQ ID NO: 195596 - RNA, 91 nt, Homo sapiens
aacaaagaggccgcggaggagaagccggaggaggacaacgacaccaccgcagcgacgagcagggacgggagcagcggaaggcccagaccga

SEQ ID NO: 195597 - RNA, 61 nt, Homo sapiens
caacacgaaccaggaaggcaggggcggcagaccgcaaggacaacacaccaaaggccaccag

SEQ ID NO: 195598 - RNA, 76 nt, Homo sapiens
ccaggccaagcagcaggaaagacccgcagaagaagcgcggacaacaaacaaagggacccaaaaagcgaagagcaca

SEQ ID NO: 195599 - RNA, 76 nt, Homo sapiens
ggacgccggcccgcgcgcgcaccccgcggacgccacagcgcggggggccccagcccggccgaacgggcgcacgaca

SEQ ID NO: 195600 - RNA, 60 nt, Homo sapiens
aagaagagagcggaacagcagagcgcacaaggaacaagggaaacccagcgcacgacaccc

SEQ ID NO: 195601 - RNA, 68 nt, Homo sapiens
cgggaaacgaccaaagaccagcaccggcccgaaacgccgaaaaacccaagccacaaagagaggaaacc

SEQ ID NO: 195602 - RNA, 82 nt, Homo sapiens
agggacgaagaagaaccgagaagggagaccagaaccacagcgacgcccccgcgaagaaaagcgacaacaaccagcgagaaaa

SEQ ID NO: 195603 - RNA, 87 nt, Homo sapiens
gcacaggaggaggggagaaaccccacccacacaggaccaaagggagacacacacggggaggagcaggaggagaagaaaccccaagac

SEQ ID NO: 195604 - RNA, 68 nt, Homo sapiens
ggaacagaaaacgcgaccaccagccagagcaccaccaaccgcgccggccaccacacccaaccgcggac

SEQ ID NO: 195605 - RNA, 73 nt, Homo sapiens
cgaaccaccaagacccagacccagaagggcaaaagaaagggacaaaagcagaagcaaaaccaccgaaggccca

SEQ ID NO: 195606 - RNA, 35 nt, Homo sapiens
agaagaagacgggaagagacccccggacacaagag

SEQ ID NO: 195607 - RNA, 78 nt, Homo sapiens
agacggaggaggaggagaagaagagagaggccgggaagaaggagggacacagcagcgcggagagcggcccgggacgag

SEQ ID NO: 195608 - RNA, 88 nt, Homo sapiens
gaaaagaaaaaacgaagaaaaaacgcaggcgaagaaaacaccagccccgagccccggccccaaagacccaaaacagagacacccccca

SEQ ID NO: 195609 - RNA, 59 nt, Homo sapiens
ccagccccgccacgagcacggaacccagaaccccaggcggacaaggacaccgcgaaagg

SEQ ID NO: 195610 - RNA, 71 nt, Homo sapiens
aggaccaaacccaaagcaggcaagaggcagagaaaggggacaaggcccaggaggccaccagcacggccacg

SEQ ID NO: 195611 - RNA, 83 nt, Homo sapiens
cagaaagcagcccaccagcaggcgggacccgcaccggaaggccacgccaagcgccacgggacagccaacaccagaccgagccc

SEQ ID NO: 195612 - RNA, 90 nt, Homo sapiens
cgccgcagccgcccagaacccgaccaacaccagaacccagcgcccccagaagcccccgagcgcccacagcagaaggaggaggccccccgg

SEQ ID NO: 195613 - RNA, 69 nt, Homo sapiens
ccagccggaccccagacaagccccggagcgcggccgagcaccgcaaggaccaccggagaccagagcgca

SEQ ID NO: 195614 - RNA, 75 nt, Homo sapiens
caggaccggggaaccgccaaagcccgggcgcggaagaagccaaggccaaaccagagaagcgcccggcaaccaccc

SEQ ID NO: 195615 - RNA, 76 nt, Homo sapiens
ggaccggacccaccggacacgcccagggcacacaggccccaaaggccaagacgaagaacggaagcgccccagagga

SEQ ID NO: 195616 - RNA, 85 nt, Homo sapiens
cagagcagcggaacaggccaagcgggacacgccaccacaccgacccacgacaagaacggagagacgagcggcaggaaggcgaggc

SEQ ID NO: 195617 - RNA, 77 nt, Homo sapiens
cggcggccggcgggagagccgccagggccacaaggggcgggacccagcaacccagagccaaggaacgaacagggcgg

SEQ ID NO: 195618 - RNA, 62 nt, Homo sapiens
gcaccgagaaaggaaggaaaaccgacgaaaccggggaacagaccggaggaaccgagcggaac

SEQ ID NO: 195619 - RNA, 81 nt, Homo sapiens
gggccgcggacaaccaccccggagcaacccaggcccagagccagcacgagacaccgcgcgagcggggagccgagaaccgca

SEQ ID NO: 195620 - RNA, 76 nt, Homo sapiens
agcacaaccggaggaaaggccaggaaccaggaaccaggaccaaggagcagccgcgccagaagcagccacgccgcgc

SEQ ID NO: 195621 - RNA, 75 nt, Homo sapiens
ggccagccaccggggaccggccggccccgaggaagccaagacccgccccggaggagacaggcagacacaacgcca

SEQ ID NO: 195622 - RNA, 71 nt, Homo sapiens
aaaacacagaacccccaaaagagaaggacgccacagccccgccaaggggcgaagaccaagacacacagcca

SEQ ID NO: 195623 - RNA, 70 nt, Homo sapiens
ccgcagcggccacccgcccagcggcgggccaagagagccgaacgccgaccaggacagcgcccaacccaag

SEQ ID NO: 195624 - RNA, 67 nt, Homo sapiens
gaaaggaaccccaagcgacgcaggcagaagcgagacggcaagagaccacagcagacacagagacggg

SEQ ID NO: 195625 - RNA, 37 nt, Homo sapiens
gggaggaggcaacgccgcgggcgaaccccgcacaaac

SEQ ID NO: 195626 - RNA, 74 nt, Homo sapiens
aaggacgcagaacgagagagacgcacgggagacacaagacaccaaaagacaccagcgccacgcagagccccgcc

SEQ ID NO: 195627 - RNA, 74 nt, Homo sapiens
aggccagcagggagcgcagagcacgacaaccgccaggcacacggagccagagaccaggagccccagagagcaga

SEQ ID NO: 195628 - RNA, 53 nt, Homo sapiens
aacagcagcaccaaaacgaggacagcggggacgaagggaggaggggacggggg

SEQ ID NO: 195629 - RNA, 109 nt, Homo sapiens
cggcaaccgcgagaaggcccagcgcccgcagaaggccgagaagccacccacgccccggcccgcggaacgcgaagagacccccaggccaaagcacccaaaaaccagccca

SEQ ID NO: 195630 - RNA, 73 nt, Homo sapiens
gcccagccaaagaaacaagccgggaaagggacaagaagggcaaagccgaagaaaggagaagagacgaagaggc

SEQ ID NO: 195631 - RNA, 77 nt, Homo sapiens
cagggcggcggccagcgccacgcgaaggaagcagccacagaaaagccgagacggaagcggggaaggagaaaccacgg

SEQ ID NO: 195632 - RNA, 82 nt, Homo sapiens
gcgcaacgccgggccgcgggcgcggacgccggcccgcgcgcgcaccccgcggacgccacagcgcaaaagcgacaccaagcag

SEQ ID NO: 195633 - RNA, 117 nt, Homo sapiens
ccgcaagcaggcaaagacggcaaaagcacaaggaccgcggacagagacaacaccgagagagaacgggcagaggaaaaccgagagacaaaacacggaacacagcagcggaagaaaacc

SEQ ID NO: 195634 - RNA, 75 nt, Homo sapiens
gcggagcaccaaccagaaaggcaccagacacagcgggagggacaggagaacaggcacgaccccaccggcaccacc

SEQ ID NO: 195635 - RNA, 78 nt, Homo sapiens
cccagcggccagacggccagcggcagcaagaacccggggaggcaagcaggggggcaaaggaaagaaggcagaaaggga

SEQ ID NO: 195636 - RNA, 77 nt, Homo sapiens
ggcagacggacaagagcgcggaacaggacgccccgacaaaggaccagcaggaacaaagaaagaccgaaggacacaag

SEQ ID NO: 195637 - RNA, 54 nt, Homo sapiens
ccagaccgccgaccggcgcccgccgagaggaacaccgggccaggcggcggagcc

SEQ ID NO: 195638 - RNA, 78 nt, Homo sapiens
gaccggaccacggcgcggagcgccgccagaggagaagaagacgaccccgacgcaggccaggagccgcggacagaagcc

SEQ ID NO: 195639 - RNA, 80 nt, Homo sapiens
ggagccgaccgaggcgcccgcggggcggggaccgccgcccggggccgcacagcgaccacaggggaaacggcgcggacagg

SEQ ID NO: 195640 - RNA, 82 nt, Homo sapiens
gaaagaagaaaaccagcggcgcccccgccacgaaaaggaagcgacacagaacggggaggggccacccagagcacaacaggac

SEQ ID NO: 195641 - RNA, 73 nt, Homo sapiens
aacgcgaccgcggggcaagaggcggcgcccagacaggccggagcacaagacgccaagccacgaacccgcgacc

SEQ ID NO: 195642 - RNA, 69 nt, Homo sapiens
aaggacccaacagggccaaagggcgacgcgaaacacaaacagggggaaagagcaagaagaccgcacacg

SEQ ID NO: 195643 - RNA, 82 nt, Homo sapiens
agccaagaaaaaaagacgaaagaagaagaagagcaaagggcccgcagcgcccccccgcgggcccagcgcaacgcacgcccgc

SEQ ID NO: 195644 - RNA, 57 nt, Homo sapiens
cgcccggcagaacaaaggagacgacaaacggaagagagaaacgggcgcagcgagaga

SEQ ID NO: 195645 - RNA, 81 nt, Homo sapiens
gaagaccgagaagccggcaaaccgaaaggacacacgaggccgcaagcgacaccagaccgagccaaacaggcagcaccagag

SEQ ID NO: 195646 - RNA, 67 nt, Homo sapiens
aacaagaaccagggagaagccgcccgaacaccagggccggaaagagggcgggcccgcacggagcgcg

SEQ ID NO: 195647 - RNA, 42 nt, Homo sapiens
ggcgcggcccgcgcgcagccggccggacagagcagccaggcc

SEQ ID NO: 195648 - RNA, 96 nt, Homo sapiens
gggcggccgcaccggcgccccacccgcccccgcgggcgccgggccaggacgggaaacgccaagagcgagcggacgaggagcccggaagagaccagg

SEQ ID NO: 195649 - RNA, 82 nt, Homo sapiens
ccaggccggggaggggggagcacgagaagaacgagagcggacgcgggcccggagaccagcaccaccccgcgacagcccccac

SEQ ID NO: 195650 - RNA, 55 nt, Homo sapiens
gcgacacagcggccgagagacggcccgacggccacacaggggcgcggggcgccgg

SEQ ID NO: 195651 - RNA, 84 nt, Homo sapiens
acaacacgcccgggagacgagaccgaaccggcaccgcacaccggaccaggaaacggaggcggcacggaacaagagacccaggca

SEQ ID NO: 195652 - RNA, 85 nt, Homo sapiens
ggaaacggcacgcaggccgggcaggcggcaaccaaacggcgccaaggccccccgaaaaagccgaggaggagaggagaggccgagg

SEQ ID NO: 195653 - RNA, 75 nt, Homo sapiens
gaaccaccgcaggcaaaagaacccgcccacacggccagcccccacacggggagaaagaaagaaaacaagacaaaa

SEQ ID NO: 195654 - RNA, 75 nt, Homo sapiens
cagcagcccccgaaggggacagagccaggcccagccggaggccacccgggccagcacgagggccccacaccacgc

SEQ ID NO: 195655 - RNA, 73 nt, Homo sapiens
cgggacacaccccaggaaaaagacagcccgcagcacgaccagcaggaacgggccaaaccccaggacggcggca

SEQ ID NO: 195656 - RNA, 36 nt, Homo sapiens
cagcggcccccggcgggacaagggacagaccaggca

SEQ ID NO: 195657 - RNA, 64 nt, Homo sapiens
cagacagggcagggaccccaggaggaaagagaaagaaaaacgacacagacaggcaccagaagga

SEQ ID NO: 195658 - RNA, 74 nt, Homo sapiens
gagagaaggacccacggcgcgcgaaggaagacggcaccaggcggccaggggaccgccaggcaaaggacgccacc

SEQ ID NO: 195659 - RNA, 88 nt, Homo sapiens
cagaaaccagaccaaagaagccaaagggagcagagaaaaacccagccaaaagaacaaagggcaaaggacacaccgcacaaacggccgc

SEQ ID NO: 195660 - RNA, 72 nt, Homo sapiens
ccgccaacgaaccacaggcgagaccgagacaagacgggaacggagccccccgcacaggacaaccaccagcca

SEQ ID NO: 195661 - RNA, 76 nt, Homo sapiens
aggcgcgcagcgggcgccccccgcaggccagcaccaaggagacagacgagccggcgcagaaaagaaggagcgggcg

SEQ ID NO: 195662 - RNA, 73 nt, Homo sapiens
gagaggggagaggcgcgcgaggaaaaggagagaaggagaagcaagggccaggcaggaaggagcaaagaaggca

SEQ ID NO: 195663 - RNA, 59 nt, Homo sapiens
cggggggaggagagccaaccagcaggcccggacagagaagaccacagaaacagccaacc

SEQ ID NO: 195664 - RNA, 62 nt, Homo sapiens
ccgagagcggaccgagagcgcgaaacgcacgagaaggacaacaggcccaacccaagccaggg

SEQ ID NO: 195665 - RNA, 75 nt, Homo sapiens
cgggaacccccacgcggccagcgaaaacgcccagaacaaccacacagagaagaaacagaccaggagcacggacac

SEQ ID NO: 195666 - RNA, 74 nt, Homo sapiens
aaacggcaggaaaaaccagaacaaacagcggaaacagaagaaggagccgagaagaagaagccaagcaggaagca

SEQ ID NO: 195667 - RNA, 70 nt, Homo sapiens
cagcagaagggggcccggaaagaaaagggccggggaagaacacagcaggggcaccgagagggcgcgaggg

SEQ ID NO: 195668 - RNA, 85 nt, Homo sapiens
gaagggggaaaggcaccaggacaagcaaagagagcggaagccggcagaagaagacccaccaaggggcaacccaccgcccgggccg

SEQ ID NO: 195669 - RNA, 80 nt, Homo sapiens
ggaaagccccagccacccacaaacagagagaaggaaccacccacgcaggcaggaccaaagacgaccaccaaagccagccc

SEQ ID NO: 195670 - RNA, 58 nt, Homo sapiens
aaagcacgagaggaagcagaagagagacacaacaagggaggccaagggaggacaccag

SEQ ID NO: 195671 - RNA, 75 nt, Homo sapiens
agaaggaccaagaaccaggagccaaaaaccgaacacccggaaggggacaagggacggcgaacagaccccgcgcgg

SEQ ID NO: 195672 - RNA, 68 nt, Homo sapiens
gaaggaccaagaaccagcacgaaagccaccgggccagggaagcagagcggggacgggacaagaagaaa

SEQ ID NO: 195673 - RNA, 75 nt, Homo sapiens
cagagcaacaagaaggccaaaaaaacccagcggaaagcaacaaaagcgccacagccagccccaagcaaaggaaga

SEQ ID NO: 195674 - RNA, 85 nt, Homo sapiens
ggggacacgcggccccagcgcccggccccccaccggacacccgcggcagagaggaagaggagcgaaggaaaaggcgccgggagaa

SEQ ID NO: 195675 - RNA, 48 nt, Homo sapiens
aaccgcagccgagcggggccggccacagccccaaaagcacgcacgaaa

SEQ ID NO: 195676 - RNA, 77 nt, Homo sapiens
gggacagcccaagggccagcaccgcgcccaggcagagccagaccgaagcgggggccaggaggcgcaaaaagcccgac

SEQ ID NO: 195677 - RNA, 83 nt, Homo sapiens
ggagacggacgaggagaggaggagggggacgagcagcagcggccccaacacccccgaagggcgcacaaaagagcacaaaagca

SEQ ID NO: 195678 - RNA, 78 nt, Homo sapiens
gcccggagcaggaggagaaaggaaacagaggagagaacacggacagggcagaccgccagcagcacagcaagccacaga

SEQ ID NO: 195679 - RNA, 75 nt, Homo sapiens
gccccgcgccccgccggccacgcaccgagccgcgcggccagcacgaaggaaagccaaagaaggagccagaaagga

SEQ ID NO: 195680 - RNA, 111 nt, Homo sapiens
cgggacggaccgagaccggaccgagagcggaccgagagcgcgaaacgcacgagaagggaccgacacaagaagcagccagaacagacgggaaaagaaacccaccacaaaaca

SEQ ID NO: 195681 - RNA, 84 nt, Homo sapiens
cgagggcagccggcgggaggaacgccacgcagcgccggaaacgccacccaccaggagagaacgccgcgccgcgcgacaacggcc

SEQ ID NO: 195682 - RNA, 80 nt, Homo sapiens
ggcggagggacacgggcagcacgccaggggagcagccggcagcgaggccccgccgaacgccacggcgcccggccccccgg

SEQ ID NO: 195683 - RNA, 59 nt, Homo sapiens
cagacaccccaggaacccgcgccgcgagggcccccccagcgcgggccaggcacgacacc

SEQ ID NO: 195684 - RNA, 63 nt, Homo sapiens
cgaaacaaggcgagcacggcacccggggggcagcgaaaggacggccaccaggagagcgcacca

SEQ ID NO: 195685 - RNA, 72 nt, Homo sapiens
ggcgccgcgcgcgcacaaggcggccgaagagggcgcgcgcagcgaaccaccagggaaagaacccaacgcgga

SEQ ID NO: 195686 - RNA, 66 nt, Homo sapiens
aaggcgaccaggaaaagaccaagaaggggaacggaaagggcaagcaccaagcggaagggcaaaaaa

SEQ ID NO: 195687 - RNA, 78 nt, Homo sapiens
ccccgggcggccgggacaacagaggcagaaaaggggacacggcgggcagcgcccgaagagcggaaagagagaagaaaa

SEQ ID NO: 195688 - RNA, 73 nt, Homo sapiens
aaaaacggagggaagagaagggcacaaaaaaggaagcccacagaaaggcccagaaagcaccgcagacaccggg

SEQ ID NO: 195689 - RNA, 79 nt, Homo sapiens
agccgcaagacccgccacaagcaacgcgggaagagaaggacaagcccgcaacccaggcccgccggacaggcacacccac

SEQ ID NO: 195690 - RNA, 77 nt, Homo sapiens
agccccgaccgcgccagcggcgcggcgccccgcagagcaaaagcagagaggcagcgaaaaagggagaagaagaacca

SEQ ID NO: 195691 - RNA, 78 nt, Homo sapiens
gccggcgccccccgcgggcggaaggcggcgcccaccccccccggacccgcggggcgacaggacaacggacagcaaaaa

SEQ ID NO: 195692 - RNA, 64 nt, Homo sapiens
gggaggggccgggaggcagaggggcagggcagccagacgccccgggcacgccaggaggagccgc

SEQ ID NO: 195693 - RNA, 69 nt, Homo sapiens
cgccaacccgccgcgcaccgacccgacgcgccggcccacgcgcggccaaggcagacgcagccgccggag

SEQ ID NO: 195694 - RNA, 75 nt, Homo sapiens
gaggaccaacaggcgccaagggaaagacaagcgccgcaggcgccaaaaggaaacacggaagaccacaacacacaa

SEQ ID NO: 195695 - RNA, 65 nt, Homo sapiens
ccagcccagagaacgccgcgccaaggccaaacgaccaagaaagcgggacgcggaaaacgggaccc

SEQ ID NO: 195696 - RNA, 69 nt, Homo sapiens
ccaggaaggaagaagccagcaacaccaaaagccgaggcggaaaaacggacgaagacaccagagacaaaa

SEQ ID NO: 195697 - RNA, 75 nt, Homo sapiens
aggcgagagcaaaaagaagggcggaaggacaggaaggcacacgaaaggaacagaggcgcaccagccagaacagcc

SEQ ID NO: 195698 - RNA, 52 nt, Homo sapiens
gaaacggccaggacaggaaggcccccccacagagcgagaggcgacggagagc

SEQ ID NO: 195699 - RNA, 78 nt, Homo sapiens
acagacgggaaagggcacaagcgggcacccacgcaaaccagaggagaggagacgccggagcgggacgaccagagaccg

SEQ ID NO: 195700 - RNA, 81 nt, Homo sapiens
cagcgccaggacaagccccaccagggacggacgaccagaggccgaggacggagagcagggcccgaagacgagcagaccgag

SEQ ID NO: 195701 - RNA, 41 nt, Homo sapiens
acagaaggcgagaggagcagagagagcccccacaaccacga

SEQ ID NO: 195702 - RNA, 75 nt, Homo sapiens
aaggaaaacgcggaaaaccgacacaacagcgcacaagagaaggagaggcacaaacaaaacagaccgaagaagaga

SEQ ID NO: 195703 - RNA, 36 nt, Homo sapiens
cacagacggggacagaagcgggccccggcaagcaga

SEQ ID NO: 195704 - RNA, 78 nt, Homo sapiens
agccgacggggcgaccgccggcccaggggcacggaccgccggcaccggggagacaacgggcaggcagcgagaccgcac

SEQ ID NO: 195705 - RNA, 76 nt, Homo sapiens
aaaagaacgccggccaaagcacaacagaggcaaagaggaacagggcaaagagagggaccaagaaaggcccagggac

SEQ ID NO: 195706 - RNA, 74 nt, Homo sapiens
gaagaagagccgcccccaccagacgaggccaccagccagggaacgacaccccccaggcacagccacaccccagc

SEQ ID NO: 195707 - RNA, 67 nt, Homo sapiens
gacccggaacaccccagaaccgggcccaagaagaagggccaagaacacagcacagggaaagagcaga

SEQ ID NO: 195708 - RNA, 78 nt, Homo sapiens
cacacacagccccccagccccgaacaggccaaggaccgggggacgccgggcgcccagaaagggaccagaagaagaccg

SEQ ID NO: 195709 - RNA, 81 nt, Homo sapiens
aaaagcccaggcagcggacagccgccggaaaagcgccgggagagcggaacaggacccgcgccagggccgggaccgggacag

SEQ ID NO: 195710 - RNA, 56 nt, Homo sapiens
ggcaaggggggaggagcgccgccccccgcacaagccgcagaaagcaacaaagcgag

SEQ ID NO: 195711 - RNA, 55 nt, Homo sapiens
cccgcgagcagcccagccagcagcacaaaggaggacggagacacagaccggaaac

SEQ ID NO: 195712 - RNA, 61 nt, Homo sapiens
agcagcagccaggaagcagcagcggagaaacaagaacagaacaccaaggagagaacagaag

SEQ ID NO: 195713 - RNA, 73 nt, Homo sapiens
gagcgccacccaggaggcggagcggcaaaaaccgccaaaacagaagaggcaaagcccagccacagcagcagcc

SEQ ID NO: 195714 - RNA, 76 nt, Homo sapiens
agacggggcgccccacagaggggcgacgagaaaaacggcagcagccaagcacgcaaccaagagggaaggagacagg

SEQ ID NO: 195715 - RNA, 84 nt, Homo sapiens
cagaggccaggaggacgaggagagacagaagaagcggaggccggcaaagccaagacaacaaaagccgaacggaaagaaagacag

SEQ ID NO: 195716 - RNA, 70 nt, Homo sapiens
gaacaaggcaaaagggggaccaccacacgaaaccaaggaaaaaccgggaacagcagaggccagaggaacc

SEQ ID NO: 195717 - RNA, 72 nt, Homo sapiens
gcaccggacacgaggagaaacagcagaaacgcaccaggccaaagaaagagaagagccagcaggccaagggaa

SEQ ID NO: 195718 - RNA, 119 nt, Homo sapiens
ggcagcccggggggagcggccagcaggagcgccggggccggggcgaacgcggccgacaggacacagaacagagaagaagcagacgagacagaaaaagaaccagacagagaaaacaaaag

SEQ ID NO: 195719 - RNA, 83 nt, Homo sapiens
gcagccgacggcaaagggcgggggcaaagcggagaccgcgccaaggggccaagggagagcggggccccccccaaggcaccccc

SEQ ID NO: 195720 - RNA, 51 nt, Homo sapiens
acaccaaaagacaccagcaaagaacaccgaaccaaacaccaagaagagggc

SEQ ID NO: 195721 - RNA, 77 nt, Homo sapiens
cagaggaccggaggggagcccccccacgcccggcccacccccgggcagaccggacgcagggagggccaagaaccccg

SEQ ID NO: 195722 - RNA, 67 nt, Homo sapiens
agacaggcaaaaggcaacccaggcaggagggccaggccggaagcgcaggcgcagcaacgccaaaaag

SEQ ID NO: 195723 - RNA, 69 nt, Homo sapiens
cgcaggaaaagaaagcggaagcaagcgcagcgaggggagccaaccccagaagaagagccgaacaagacc

SEQ ID NO: 195724 - RNA, 83 nt, Homo sapiens
cgcacagccgcggcggcagcagcaggagagcccccccgccggacggaagcccgggcaaaggaggcggcacccagcgccccccg

SEQ ID NO: 195725 - RNA, 71 nt, Homo sapiens
ggagcgaacccaccccagggcgcaaggaagccagcacaacagacacccggccagaccagcccaaacgacca

SEQ ID NO: 195726 - RNA, 70 nt, Homo sapiens
cacaaaagaagaaaacaagaagagcagacaaaccccagaaaagccggccagaacacacagaaaagggcca

SEQ ID NO: 195727 - RNA, 42 nt, Homo sapiens
gccccacacaccgcccagggaggacagcagaccacagcccgg

SEQ ID NO: 195728 - RNA, 71 nt, Homo sapiens
acggcaaaccccaaaaacagaaggggaaaagcaccaagcgccagaggaagaaaaaagcccaccgcccagag

SEQ ID NO: 195729 - RNA, 69 nt, Homo sapiens
aggagagaggaccacccagaggagcaacgaaaccacgagcggggagaaacagcaaggagaacaaacagc

SEQ ID NO: 195730 - RNA, 63 nt, Homo sapiens
cgacaggcgcccacacccaagcaggcgaagaggagaggaaggcaccaaagacagaacaaagaa

SEQ ID NO: 195731 - RNA, 63 nt, Homo sapiens
gagagaacgacggagaggaagaggcagaaaccaggcagaacgaacgggaaagagcagaaacca

SEQ ID NO: 195732 - RNA, 67 nt, Homo sapiens
gccaccgcgccggccgcccgcacgccgccggacaaccaccaccagcgagcaaaagaacaaagaccaa

SEQ ID NO: 195733 - RNA, 53 nt, Homo sapiens
ggccccgacacccaggaagcaaagagaggagagagaaacaccccggagggcaa

SEQ ID NO: 195734 - RNA, 83 nt, Homo sapiens
ggaaacagaacacgccggaagagacacccaagcaggagagaagcacaaagcgcgccccagaccaccggcagggaacagccgag

SEQ ID NO: 195735 - RNA, 71 nt, Homo sapiens
cccaagggcgcgccccccaccagacggagccccgaggagcaggaaaccacgagccaagaaccgaagcaagc

SEQ ID NO: 195736 - RNA, 83 nt, Homo sapiens
ggcgggggaggcgagcgcgccgcccggagccgcgcacacggaccgggcaaaccagaacaagaccgaaccgggccagcaggagc

SEQ ID NO: 195737 - RNA, 78 nt, Homo sapiens
ccccgcagagaccggcacacccagcagagccacgaggagcgaagaaggcagagcaacaaggaacagagacagacccgg

SEQ ID NO: 195738 - RNA, 75 nt, Homo sapiens
agaacgcaaagcgcagagcagaggaagacaggccccaagacccccaggacgcacagcagaacacaaggacacacc

SEQ ID NO: 195739 - RNA, 72 nt, Homo sapiens
gaagggcacgagccgccgacggagcagcacagcagagcccgagggggaaacccgcccagggcgggagaccgc

SEQ ID NO: 195740 - RNA, 71 nt, Homo sapiens
ggccaagggcaaggagacagacccacaggaccgcgaacaaggaggccacaaaacacccggacccaccagag

SEQ ID NO: 195741 - RNA, 71 nt, Homo sapiens
ggagaaaccggacgcgacgggggacaaaaaggaccagaagaaaggcgcacaaaaccagaacgacagaaaaa

SEQ ID NO: 195742 - RNA, 68 nt, Homo sapiens
aagagcgccccaagcaaggaagcgacaggcacaccccgggacaaaaaaaacaaggagaaacgagggcc

SEQ ID NO: 195743 - RNA, 73 nt, Homo sapiens
cgcggcggcgacccaagccccgcaccgacgggccgcagccaagccggaacaggagcggcgagcccaaacgcaa

SEQ ID NO: 195744 - RNA, 75 nt, Homo sapiens
ggcgggacgggggacccagcagaagcggaaagcgcgcgcccggcccaggagaggacacccgaccgccagcccccc

SEQ ID NO: 195745 - RNA, 65 nt, Homo sapiens
caaggacacaaggaaagacacagacaccaaaagagccccgcccagaggccaccaaccccaagacc

SEQ ID NO: 195746 - RNA, 79 nt, Homo sapiens
cccagcccccgagaggggaacaggcggaagcagcgcagcacagcgagcaacacgacaaacgcccgggacaggagaggca

SEQ ID NO: 195747 - RNA, 87 nt, Homo sapiens
caggaagggccgagcggcgggaaaggaagcaaacccaaggggaaaggagcagagcgaggacacagcccaggaaagagcgaagagcag

SEQ ID NO: 195748 - RNA, 62 nt, Homo sapiens
cccaacggagaagggcacacacggacgaagagcccagggaagaacagaaaagaggaaagaaa

SEQ ID NO: 195749 - RNA, 82 nt, Homo sapiens
agcagcccccggagacagcggcacagagggccgccagacgccccccaagaaaccaaccacaggacaagaccagccccgacac

SEQ ID NO: 195750 - RNA, 59 nt, Homo sapiens
ccccgggccgacgccagaagacaaagagccaagaaaccccacccaaaccccacagcacc

SEQ ID NO: 195751 - RNA, 68 nt, Homo sapiens
gggagagacagagacgagaagcaaagcacccagccaaacccaggcccgagaagaagaggaaaacccac

SEQ ID NO: 195752 - RNA, 71 nt, Homo sapiens
ggagaaggaccaagaaccagacgccggaggcgcgggcaagaccccgggacccaggccagaggggcgaagcg

SEQ ID NO: 195753 - RNA, 68 nt, Homo sapiens
caagggagaagagacccacaaaacgggaaaccagcacaggagggagcaggaaaaaggcggagaggaag

SEQ ID NO: 195754 - RNA, 70 nt, Homo sapiens
cggacaacaaaggacgcaagaccagaggcgggggcgaacccgccccaggaaccggagcgcaaacccagaa

SEQ ID NO: 195755 - RNA, 71 nt, Homo sapiens
accccgaagacgagccacgcccagaagcggcggagaaaccaccacaaacacgaggccagcaacgaccaaca

SEQ ID NO: 195756 - RNA, 69 nt, Homo sapiens
caccacaccgcacagcaagcgggcaggaaacaagaaccggggaaccagcaccccagaaggaggagagcc

SEQ ID NO: 195757 - RNA, 65 nt, Homo sapiens
ggagagaagaagaacagagagaacaaaagagcagaaaacgcacgcaaggcgcaaaagggaagaac

SEQ ID NO: 195758 - RNA, 56 nt, Homo sapiens
ggcgagccggcaccagggcccagggggagagaaaacgggaggcccaaacgccggcc

SEQ ID NO: 195759 - RNA, 76 nt, Homo sapiens
gcccgccaggccgggccgcgggagccgaggcgccgaaggaccgacgcccggaaaccccggcccgacgagaagaggc

SEQ ID NO: 195760 - RNA, 82 nt, Homo sapiens
gggcgaggagccgcgcaccgacccgcaccccccggaggcggccgagcccacgcgacgaagaacaggagagggacgaaccgcc

SEQ ID NO: 195761 - RNA, 80 nt, Homo sapiens
accccacgggaggccgggacgggacaacgaaccaccccgaagcccggcagagcccgaggcgcgccaggaacccgagcagc

SEQ ID NO: 195762 - RNA, 77 nt, Homo sapiens
ccaagaaaagacggagacagaaagcacaaaaaaaggacgggacacggagaggcgcgggaggaaacggaggcgcgggg

SEQ ID NO: 195763 - RNA, 77 nt, Homo sapiens
ggcgaggcagaggagagcaccgccagcgaggccgggagcccaggcaccaaggaggaccacgacagccacggcagggc

SEQ ID NO: 195764 - RNA, 38 nt, Homo sapiens
ccgccccagcagaagaggacacgagcaggagaccgagg

SEQ ID NO: 195765 - RNA, 71 nt, Homo sapiens
cagcaaccagcaggcagggagagaggggcggaaaggggcagaacaccagcaccagacacaccagccaaagg

SEQ ID NO: 195766 - RNA, 81 nt, Homo sapiens
ggaaacagcggagacggaacgggagaagaggcaaagaaacaccaagaagcagagaaaacccggacaacagccagacaaaca

SEQ ID NO: 195767 - RNA, 72 nt, Homo sapiens
caagcgagcgacagacgcaggcaaggaccgaagcaccacaacgcaacacgagcaacgggcaggaaaggaaga

SEQ ID NO: 195768 - RNA, 78 nt, Homo sapiens
gcacccgggcccagccgggaacccccacgcggccagcgaaaacgcccagaccgccacgagcgggaagaagagcggcac

SEQ ID NO: 195769 - RNA, 101 nt, Homo sapiens
ggagcgcgaaggccgggacccggccccggcccacaggggggggcaaacccgagagaacggccccgcaagaaaaccacccaaagacggaagcaagcagcacg

SEQ ID NO: 195770 - RNA, 81 nt, Homo sapiens
aagcaaacaagacaggaacagaaaagccgggcccagggacccgcagaagggcggagcccacccgacacacgagcagagcac

SEQ ID NO: 195771 - RNA, 86 nt, Homo sapiens
gacaacagacccgggggagacgccgccaagacgggagacacgagagagacagcagaaagaccacccaggcaaggagcagcaaaggg

SEQ ID NO: 195772 - RNA, 76 nt, Homo sapiens
gcggcgaggccggcggggcccggggcggagcagggaacgagaagacccgagaaaaaacgcaccccggcaacggcca

SEQ ID NO: 195773 - RNA, 71 nt, Homo sapiens
agggaggcagccagaaccaagcggagagagcagcccggcagacgcagaaccaggaagaacagacgggagga

SEQ ID NO: 195774 - RNA, 77 nt, Homo sapiens
gagaagggagacgacgcgcgggccgcgagcggggcgacccgaggcacggggccaaaaaggcacgagggaacgggaaa

SEQ ID NO: 195775 - RNA, 84 nt, Homo sapiens
gaaacaccacgaagcagccaagagcggaaaacgccagcggacaaaagggacgcgcggagaccgaacacgcacagacgggacgca

SEQ ID NO: 195776 - RNA, 64 nt, Homo sapiens
cacaacaaagaagaccacacacgggaaacacaaaacagccccaaggcaggcaccgacacgcaac

SEQ ID NO: 195777 - RNA, 82 nt, Homo sapiens
ggggagcgagcagagcgaaggccgagggaaggagaggaggagcagaagagcggagaccaggccaaaaggagggaaaacccac

SEQ ID NO: 195778 - RNA, 59 nt, Homo sapiens
gaagccgggccacaccaaagagcagagccaaacgcaccagacagagcagcaccccagcc

SEQ ID NO: 195779 - RNA, 86 nt, Homo sapiens
gaacgaagaagaacaagaaacacaacaaaaaagagagggaagcaaagaggcagcgaggcgccaagaaaacaaaagcagagaccgag

SEQ ID NO: 195780 - RNA, 51 nt, Homo sapiens
caggaccaaaacagggagaaacacagccagaaggacaacaacaagcaccga

SEQ ID NO: 195781 - RNA, 73 nt, Homo sapiens
caacaagaggaagcaggaaaaacaaagaagacccagggcaccagggcaggggacggaggccaaacacgcagag

SEQ ID NO: 195782 - RNA, 78 nt, Homo sapiens
aaacagaccaccaacccacaacgcccccagcacagcgccccaccccagcccccaacccccagcccccgcccgagcaga

SEQ ID NO: 195783 - RNA, 83 nt, Homo sapiens
aaccgggcggccacgcccgcgcagggcggaaaacaccccaaaagccaaaagggaaaggaaaagaccaacaacagcgcaggaca

SEQ ID NO: 195784 - RNA, 51 nt, Homo sapiens
acagccgcacggaggcgaaacacaaagggcggcggagaaaccaccacaaac

SEQ ID NO: 195785 - RNA, 68 nt, Homo sapiens
caccgcggacgagggcaagagagaccacgagaaggaaagagcgcccggcagcgcggcccagcggccga

SEQ ID NO: 195786 - RNA, 83 nt, Homo sapiens
gcgggcagcagcgcgggaagggccccaagcccagcgagcagacggaagccgcgcacgcaggcgggagcggccccggacagggc

SEQ ID NO: 195787 - RNA, 74 nt, Homo sapiens
acagaacagaccggaaagacaacagcgaaaggaagacacaccacacgaaggaaagagcggaggacccggaccgg

SEQ ID NO: 195788 - RNA, 92 nt, Homo sapiens
caagacccaaacagacccggggacagcccagaggccgcgacaaagaccagagacaggaagaaacagacagaccggggacgcagccaggcggg

SEQ ID NO: 195789 - RNA, 78 nt, Homo sapiens
aacaggaaggaaagggagagggccagaaacgaccagagaggacagacagaaaacccggcaaccaagaagcacaaagaa

SEQ ID NO: 195790 - RNA, 109 nt, Homo sapiens
gacagccgggccccaccacgccgaaacggaaacggacagaaagccgcggggaggagaacaggccaagacaaccgggaaagcagcccaaggagggcgacacacgaccaac

SEQ ID NO: 195791 - RNA, 55 nt, Homo sapiens
aggacgacagggaggcgaagacccaacagaggaagccgcaagaaacgggacgaca

SEQ ID NO: 195792 - RNA, 77 nt, Homo sapiens
aaacaagcaacggggcgacaaaaacagccagcggaaacggagggaaagaagaagaggagggacacccgagaggcagc

SEQ ID NO: 195793 - RNA, 80 nt, Homo sapiens
ggcaccagagcgcggacgcccaggcggacgaggccggagaagagcccggaacgccagagcggaaaggaagagaacgccgg

SEQ ID NO: 195794 - RNA, 63 nt, Homo sapiens
ggagaccgcaagcccacagagagccaggccaagggagaaggggcggagaagaggaccagcgag

SEQ ID NO: 195795 - RNA, 38 nt, Homo sapiens
gagggggccggccgggcaggcagccgcgaacccccaga

SEQ ID NO: 195796 - RNA, 85 nt, Homo sapiens
ggaacgcgcagcgccaggccaccagaggccgcgagccagaaacagggccgccagggcgccagcgacgagaggacggcagaaaacc

SEQ ID NO: 195797 - RNA, 75 nt, Homo sapiens
gccagggaaacggaacaacacccgcagaagcgcaaaagggaagacgagggcagggcaggcagaagggcacggacg

SEQ ID NO: 195798 - RNA, 64 nt, Homo sapiens
cccaagcaaagggccaaaggagagaaacgagccaggcacagcagggaccagaaacgggaaaccg

SEQ ID NO: 195799 - RNA, 78 nt, Homo sapiens
gcgccccggcgcccccccgagaacacgaccaggaaagacagacaggcccagaggccaccagaagccggccggaagcaa

SEQ ID NO: 195800 - RNA, 72 nt, Homo sapiens
aaccaccccgaaccgagccccagcacaaaaacggacagcgaacgggcacgacggccagcgaaacagagaaca

SEQ ID NO: 195801 - RNA, 77 nt, Homo sapiens
aggccaagaccgcgccccgagcccagaaaaagcggcggcacgaccacacagagggcaaaagcggcgggcccgaaagc

SEQ ID NO: 195802 - RNA, 42 nt, Homo sapiens
cgcagagggcggagcggcagaggaccgccaagaagaagagag

SEQ ID NO: 195803 - RNA, 62 nt, Homo sapiens
agaagacgaaaagacaacacggcgggagaagccggggcaaggaagcgagaagaggaacccgc

SEQ ID NO: 195804 - RNA, 80 nt, Homo sapiens
cccagcgcagcacgggaggacaccgccggagggagacgcgcacggaccggaaccagaacaagacgaaagacaacgagcgc

SEQ ID NO: 195805 - RNA, 77 nt, Homo sapiens
ggacaccggaagcgggaaagagaggaagaagacacggaccgacggacgggaaacccagcgaaacgggaagaaaaaca

SEQ ID NO: 195806 - RNA, 80 nt, Homo sapiens
cccgccgcggagcccgcagcccgccggcgcgccccacgggccaggagggaccagcccaacggggacccagcaggaccaag

SEQ ID NO: 195807 - RNA, 78 nt, Homo sapiens
gacccaccaagaacgaggccaggcgaggagagcgaacaaccccagaagagcaaagagcccgggaagggcgcggagcag

SEQ ID NO: 195808 - RNA, 48 nt, Homo sapiens
gcgagcgacaagagaaggaggaaagaaggggcagaccaacaccaccca

SEQ ID NO: 195809 - RNA, 80 nt, Homo sapiens
cccggaccagacgcagggagacgcacagccaggacaccggaaccgggaaagggagaacggaagaggacaagagacgacac

SEQ ID NO: 195810 - RNA, 77 nt, Homo sapiens
gcgaggccaggaaggaggaggggcccccggaccaacggaccaagacccgccggaaaaaccccagaagccagggcccc

SEQ ID NO: 195811 - RNA, 66 nt, Homo sapiens
accgcccagcccaaaccaggagagcgagggagcgagcgggcagcgcggggaaggaaggaaaagaaa

SEQ ID NO: 195812 - RNA, 56 nt, Homo sapiens
caagagaggccgcaggaaaccgggaaggaggaagagagcccaaaagcaaagcaggg

SEQ ID NO: 195813 - RNA, 65 nt, Homo sapiens
cagacgagagagagacagcacccaaccacccaacacagaagaagcgcggggaccacgagccagga

SEQ ID NO: 195814 - RNA, 105 nt, Homo sapiens
gagcccagaaaacccgcagcagaaaccgcggagcgacagaaacccgcacagaaccacccgggggcagacgggcggcgggggagcccaccgcggaccggaaaaccg

SEQ ID NO: 195815 - RNA, 77 nt, Homo sapiens
agaaccacagaaggaacacgccaaaaggggagccaaaccgagaaacaaagcgaccagggccgccaaacagcaggaag

SEQ ID NO: 195816 - RNA, 78 nt, Homo sapiens
cgccgggcccccgccccgggcccggggagaagacgcggcggcggcaccgcacgcaccggcagaacgggccgaccaggg

SEQ ID NO: 195817 - RNA, 69 nt, Homo sapiens
gcaagcaccacaaaggaacgccacacgcgaaaaacggagaagagaggcagcaaagggaccccacagcag

SEQ ID NO: 195818 - RNA, 81 nt, Homo sapiens
agacacaccgaccagaggaaggcgaacccgccacgcagcaggagcaggggacgaagcgggcgagcaagaacaagccggacc

SEQ ID NO: 195819 - RNA, 75 nt, Homo sapiens
agagccccagcgagcccagacaaaagaggagggggagccgcgggccaggacccgagacaacaccaagaagaaacc

SEQ ID NO: 195820 - RNA, 79 nt, Homo sapiens
gcgccggagccggagaacggccaggcggccccgagcggaacggagaaagcgaggggcagagcggcgggaaaccaccaac

SEQ ID NO: 195821 - RNA, 77 nt, Homo sapiens
aaaagacaccagaggggacgaagggggcaagacccgaaggaagagggaacgaaaaagaagagaaaacacgcaaagaa

SEQ ID NO: 195822 - RNA, 79 nt, Homo sapiens
caggcgagccacccacaagaagcagaggacaggaggccccgagagcggaacggagaagaaaccccaagccccagaaaaa

SEQ ID NO: 195823 - RNA, 83 nt, Homo sapiens
gggccaaggcccggcggcgggcagagcccaccagacgggcaccacgcgggacagcggaggaggaagagagaagggcacagacc

SEQ ID NO: 195824 - RNA, 77 nt, Homo sapiens
gaggccggcgccgcagcccgggcccaggccccggcagcgccgggacaaggaagaagagagggcgaaggaggccacac

SEQ ID NO: 195825 - RNA, 87 nt, Homo sapiens
cgcccagacaccagcagcccccgggccaccgccccagcgccaccaaagaccgcgacgccaggccacccagaggagaaggccaccccg

SEQ ID NO: 195826 - RNA, 70 nt, Homo sapiens
gcagcccgaacaccgacagcaacaacgcgaggagcaggaggcggcaaggaagaggcccggaaagggaaaa

SEQ ID NO: 195827 - RNA, 90 nt, Homo sapiens
cggccggcggcacccgcacccggggacaagcgcgggaacggcgcggaagacggggggggcggcaggagagagcgccgagcggaggggggg

SEQ ID NO: 195828 - RNA, 72 nt, Homo sapiens
ggacacgggagagaggccgggcgagcagcaggagcaccggcccaagaaacaggacccgaagacaaaaccacc

SEQ ID NO: 195829 - RNA, 82 nt, Homo sapiens
ccagacagagcgaggacacgcaaggaacagaggggaacagaaaagcgcaggaggccccagcccgggccggccaacgagagag

SEQ ID NO: 195830 - RNA, 83 nt, Homo sapiens
caggagaaaaccaagaagacaaggaggcacgccgaggcgccccacggcgaaccgggaaaaggcgcccacggaccccccaacgc

SEQ ID NO: 195831 - RNA, 68 nt, Homo sapiens
gaaaaccccagcgaaacaccaagaggggggcagcggcaagcaggggagccagccacacagagacagac

SEQ ID NO: 195832 - RNA, 77 nt, Homo sapiens
aaccgccaacggaccccgaggacaggaaaaacaggaacacaacagcgagcaacagcacagcaaggagagaaaaaaaa

SEQ ID NO: 195833 - RNA, 69 nt, Homo sapiens
aaaccggccaggcgagagcaaaaggaggaaggggagaagaaaaagcagcaaaagagaagcaggagggga

SEQ ID NO: 195834 - RNA, 75 nt, Homo sapiens
gccagcagaggcggagcccgcagaccgcagaaggccggagacaccagcaggcaccaggagaaaaaaaaacaaaga

SEQ ID NO: 195835 - RNA, 70 nt, Homo sapiens
cccgccgagcgcgccggaccggcgcccggacaacccgcgggaaggcagccaaagggaaaggaagacgagc

SEQ ID NO: 195836 - RNA, 72 nt, Homo sapiens
cgccccaaggagaccgcacacagaacccaggagaaacgagagggacagcaaggaagacgccagagagcggca

SEQ ID NO: 195837 - RNA, 88 nt, Homo sapiens
gccgcccaagccgcacagccgcggcggcagcagcaggagagccagagacccagagcagcagcgaagagaaggcccagcccccccgcca

SEQ ID NO: 195838 - RNA, 61 nt, Homo sapiens
ccccagaagagcggagagacgaaagagccaccagaaggagaagggagaggaaagcaaaaag

SEQ ID NO: 195839 - RNA, 82 nt, Homo sapiens
acggcccaggcacggcccccagcgcagccgcagccagagccaggacaaaaccaggcagaaccaacacgaacccaagcacaaa

SEQ ID NO: 195840 - RNA, 74 nt, Homo sapiens
accaagaaccagggaagggaaaacaacagccaaagcaacgaaagaagcagacaaacggagcccagggagagagg

SEQ ID NO: 195841 - RNA, 63 nt, Homo sapiens
caagaagggcaaggaaccgaaagagcaggagaacaccgcaccaccggggagaacaagaaagcc

SEQ ID NO: 195842 - RNA, 69 nt, Homo sapiens
caaagaaggcagggagccccccagaagcacaaaagaccggcaagcagcaccaacagggacgcagcaacg

SEQ ID NO: 195843 - RNA, 56 nt, Homo sapiens
gcgccccaggacaggacgggggggaggaggaacgcaggagcaagaccggaccgcgc

SEQ ID NO: 195844 - RNA, 79 nt, Homo sapiens
aggcagaggggccaggaccgcaccgggggggcggggaaggaaaacacccggcagggaaggaaggaacgcaaccgaagac

SEQ ID NO: 195845 - RNA, 85 nt, Homo sapiens
acgaggccaggaagagagcaaaaaaagcaacggccacgaagaagaaacgaaggaggcccaaccacaaaaggagccgacggaaccc

SEQ ID NO: 195846 - RNA, 84 nt, Homo sapiens
gcgccgccccgccgcggcggggacgcagcgcgccccagaccaccggcagggaacagccgagcagaccgaggaggcccaccagca

SEQ ID NO: 195847 - RNA, 99 nt, Homo sapiens
cagcggccgcgcacccccggccggaggcaccagcaccacagaagaccagcccgccgccagcaggccccacgggcaggagaccccgcgacacaggccacc

SEQ ID NO: 195848 - RNA, 45 nt, Homo sapiens
gcgggcggggcggcggcgcgacaggcgggcacagccagcagcagc

SEQ ID NO: 195849 - RNA, 75 nt, Homo sapiens
ccacccggaaacaaacgccaggggacccccagaccaccgacagcaccaaggacgggcagcacgagaaaggaacga

SEQ ID NO: 195850 - RNA, 78 nt, Homo sapiens
cggcgcggaggagcgaggcagcgacaggacgggaacggaacagcaggaacaggaacaccacaagaaacacagaaagcg

SEQ ID NO: 195851 - RNA, 85 nt, Homo sapiens
cggaggagccgcgggcggcgcggcccagccgccaggcacgcgagaaggggagggggagaaagaagaggaagaagccacaggcaag

SEQ ID NO: 195852 - RNA, 64 nt, Homo sapiens
cgcaacacgagcccgcacggggacgcacagaaaagacaaaacaaagacgcgccacaggaagaac

SEQ ID NO: 195853 - RNA, 55 nt, Homo sapiens
cccaggccgcccgacccaaagggaaaacagaaacaggaaaaaccagaagagaaaa

SEQ ID NO: 195854 - RNA, 82 nt, Homo sapiens
gagcgaaagcgaagcaggaagaggacggcaggagaagagaagggggacagcaggaccacacggggacacagggagccacccc

SEQ ID NO: 195855 - RNA, 76 nt, Homo sapiens
gaagcgaggcgggcccgcgggaccaaggaagcaaaaggagggaagaagccggaaccgcacaaaggaaaggagggaa

SEQ ID NO: 195856 - RNA, 55 nt, Homo sapiens
ggggaccccggagcccagaagacagagggcgagaaggggggagagaacaagcccg

SEQ ID NO: 195857 - RNA, 76 nt, Homo sapiens
gggccgaagagaacacggcaaaccccaaaaacagaaggggaaaagcaccaagcggagcggaggcagacacacacgg

SEQ ID NO: 195858 - RNA, 75 nt, Homo sapiens
cggaagcaacacaacaggaggcggaggcgaaagcggaacgagagcccccaaaccggaggaaaggccacccagaca

SEQ ID NO: 195859 - RNA, 70 nt, Homo sapiens
gcaaccaacagggcacaaaaccgacaaaccaggcagagagacaaacgccgccagaaacgggcaccgacca

SEQ ID NO: 195860 - RNA, 101 nt, Homo sapiens
ggacccccggacccagcgggcgccgcacaccacacccaaccgccacggaagggcaaaagcagaccggaaaacccaccggcaagaccacacccgaggggagc

SEQ ID NO: 195861 - RNA, 63 nt, Homo sapiens
gagacccaacagcagcaagcgaacaccagaggaccgcgagggaggcggccggagccaaaccga

SEQ ID NO: 195862 - RNA, 75 nt, Homo sapiens
gacgggcacacaaggccaagggccaaggcggcggggagacgagaagaagcacaggagggagcaggaaaaaggcgg

SEQ ID NO: 195863 - RNA, 69 nt, Homo sapiens
ccggggaaaagccaaagaacaccagcaggacagcagacccagagggacaagacaaggccaaagcgcccc

SEQ ID NO: 195864 - RNA, 76 nt, Homo sapiens
gcgagccagccaacagcagaagagaaagccagaccacggacggaagacaaaagagggaagggcaaccaagcgccgg

SEQ ID NO: 195865 - RNA, 71 nt, Homo sapiens
cgaccaaagggcgcaaggcccgagcagcaaacacaaacaaccccgaacgggaagaagaagaaggcgaagaa

SEQ ID NO: 195866 - RNA, 75 nt, Homo sapiens
ggacggggaccgcacacccaagggccaagccgcccgccaaccggcagcgccgacgacaaaccaggggccaggggg

SEQ ID NO: 195867 - RNA, 71 nt, Homo sapiens
agcgaaaaacccagaagaaacagacagaaggaaaagaagggaaaacgaaggagaagagacaggccgagcag

SEQ ID NO: 195868 - RNA, 58 nt, Homo sapiens
gggggcccgcgccgcgccgcgggagcagcggaagacaccaaggccagggagggccacc

SEQ ID NO: 195869 - RNA, 78 nt, Homo sapiens
ggagagacgccgaacgacgccccgcacaccggagcgcccagcgcgaggaggagaggaagacgaggaagcagaagaaca

SEQ ID NO: 195870 - RNA, 100 nt, Homo sapiens
ccgagccgggaccaggcccgggggcggcggccacgccaaggacgggacccaaagacaggaccacgcaccagcagagaaggaaagcaaaccgaagcaggcg

SEQ ID NO: 195871 - RNA, 53 nt, Homo sapiens
gggccaccagacggagacagcggacaccaggaaggaacggccaggagaacaac

SEQ ID NO: 195872 - RNA, 82 nt, Homo sapiens
ccaaggacacaacccggccgcagagcccagggggccgacgacgagccccgcgaggagcgcagcggagaggccagaacgcccg

SEQ ID NO: 195873 - RNA, 80 nt, Homo sapiens
acgagccccacacacgagaggaacgcgaggcacaagagggaccagacagaggcaaagagccggagcacaaacgggagcca

SEQ ID NO: 195874 - RNA, 36 nt, Homo sapiens
caaaacggggagaagaccagaggagccacgcgccca

SEQ ID NO: 195875 - RNA, 44 nt, Homo sapiens
ccaagggcaccccgagaaagccaagagcgcacaaagaaaaaggg

SEQ ID NO: 195876 - RNA, 82 nt, Homo sapiens
ccaccagcagcccccagagcggaacacaggccccccgggcagaagaaacaccaccagcgagcaccccagagagagccaacac

SEQ ID NO: 195877 - RNA, 84 nt, Homo sapiens
ggaacaaggacccccaggcacaccaggcccccggaaagcaggcggccagggaccccaggagaacgagaccgaagaacggcaaag

SEQ ID NO: 195878 - RNA, 91 nt, Homo sapiens
ggaggaaaccaagacagcccaaacgccccacgaccagaaaaacacaccgacagcagaacacacgcgaaaggaaaccaagcggaagggaagc

SEQ ID NO: 195879 - RNA, 66 nt, Homo sapiens
caaagagaagaagggggaaaaagggaccgcgggccaaaaggacaaaaaggacccgacagcacaccc

SEQ ID NO: 195880 - RNA, 77 nt, Homo sapiens
gaccaaaagcggggagaagagggaccgaggcgggcgggcgagacccgaaaggccacccaagcacgacaagagcccga

SEQ ID NO: 195881 - RNA, 95 nt, Homo sapiens
gaaccgagagcaccaacagaaagaagcagaaaggagcgcagcacacagagaccccacagaaagaacacaccggagacggagccggagcgccaacc

SEQ ID NO: 195882 - RNA, 82 nt, Homo sapiens
ccgaagcagccgggagccggagcgggcgcggacgccgaggcaccgaggcaccagaggagaagacgaccccgacgcaggccag

SEQ ID NO: 195883 - RNA, 79 nt, Homo sapiens
ggaccaaaggagcaaggagaagagccaggaacagagggagaaaccaacgacccaccaggccccagagaaggagaagaga

SEQ ID NO: 195884 - RNA, 76 nt, Homo sapiens
cggaacgccagccccggcacgcacccgacccaaagcagaggcccacgcggaccggcagcgccaccggaccaccaga

SEQ ID NO: 195885 - RNA, 75 nt, Homo sapiens
gcaaaccacccaaacacagcaaggaccgaacccaaccacaggagcaaaacccacacacgggcgcccgcacacacc

SEQ ID NO: 195886 - RNA, 73 nt, Homo sapiens
ggagaaggcgcaacgcggcgcgaggggcaggagaagccaagagggggagggcagagagagcaaaaggaagaac

SEQ ID NO: 195887 - RNA, 79 nt, Homo sapiens
gggaaaggccgcgggggcaacggagaaaacccggaaccgcgacggcggcagagccaggacaaaaccaggcagaaccaac

SEQ ID NO: 195888 - RNA, 79 nt, Homo sapiens
gaccagccgggaggcgcccacccccaccaccgaccgcgcacaaagggcaaacagaagacgggcaaaagagcggaagaac

SEQ ID NO: 195889 - RNA, 54 nt, Homo sapiens
agaagaggcagggcaaaacgagggcagaaggcggcagcggagcacgcaccagga

SEQ ID NO: 195890 - RNA, 75 nt, Homo sapiens
aagaacagagacagcagccaaacccccagagacccaacaggcaaacaaaggccggagaaggaaaaaacagagccc

SEQ ID NO: 195891 - RNA, 82 nt, Homo sapiens
ccgcccagacggccaccggcgggaggaacaaaaggagcggcccaaagcaaggaccgaggcaagaagggaagaaaacagaaaa

SEQ ID NO: 195892 - RNA, 79 nt, Homo sapiens
ccgggacggcccaaggccagcccgcagcgggaaaacaaagaaccgaacaacggaacacccaagacaccgaagaggcaac

SEQ ID NO: 195893 - RNA, 65 nt, Homo sapiens
aacacccgaggaacaaaccacaaaaggggagacagcagcccaacagcccacagcaccccagaaac

SEQ ID NO: 195894 - RNA, 39 nt, Homo sapiens
aggcagcggcgaagggacaagagagcggcggcaccaggc

SEQ ID NO: 195895 - RNA, 73 nt, Homo sapiens
cagagcacagcgagggacacgcaaaggacgcccgccaacgcccggggcggccgccaccccaacacaccaccag

SEQ ID NO: 195896 - RNA, 62 nt, Homo sapiens
caaagcccgggcgcggaagaagccaagagaggcggaggcgggacgggcagccacccagaaaa

SEQ ID NO: 195897 - RNA, 68 nt, Homo sapiens
acagcgagggagggaaaaccacgaaaagagaaacaggaagagaccgagaccaggaaccaggcagggga

SEQ ID NO: 195898 - RNA, 72 nt, Homo sapiens
cgaaggcccccgccgaggcacacagcccgaagaagggggcagcacgccgaaggagagaccagacaacaggcc

SEQ ID NO: 195899 - RNA, 91 nt, Homo sapiens
cgccgccgccgccgcgccgagcggaggaggaggaggaggcgaggaggagagaccaaccaaccagggcacccagccggaggggggacacccc

SEQ ID NO: 195900 - RNA, 58 nt, Homo sapiens
gaccgccagccagagaacgcgagaccggggcgaaacaagccaggagacgacaaggcgg

SEQ ID NO: 195901 - RNA, 79 nt, Homo sapiens
agcgagcgcggacggagaggaaagcgggggcccccaaagggaagccaaacacaaaggaagaagcccggagacgaccaag

SEQ ID NO: 195902 - RNA, 63 nt, Homo sapiens
cagcccagcccgcccccagaaaccaggcgccaacgcagaacgccagcggagccgagcagcggg

SEQ ID NO: 195903 - RNA, 70 nt, Homo sapiens
aggggccgaacaccaggagaaagacagcaaagaaaaggagaagaaaggaaaaaaacaaccccgggcaccc

SEQ ID NO: 195904 - RNA, 71 nt, Homo sapiens
ccacaaagcagaacacaagaccaacccgccaaaagggggcgagcccagggaagacaaagaggaagggcgcg

SEQ ID NO: 195905 - RNA, 42 nt, Homo sapiens
caagcccgaggcccagaggaggagacagccgcccgaccgcgg

SEQ ID NO: 195906 - RNA, 77 nt, Homo sapiens
caggaccggcaacgaaaacgcggcgggggacggcgccccgggaaggcccaggacacacaaagacaaacacagacacc

SEQ ID NO: 195907 - RNA, 95 nt, Homo sapiens
cccccccgccgaacaaacaacaaacaacagagaaaaaacaaaaggagcgcaaacagcacagaaaaggaccacacagacaaagccgaaaacacagg

SEQ ID NO: 195908 - RNA, 85 nt, Homo sapiens
cacagccaccccagcagaggccaggaagaccagggggcaccagccgaagccaggcaagcaagaaccaacaagaagaccccaagcc

SEQ ID NO: 195909 - RNA, 74 nt, Homo sapiens
agaaggagaggaacaaagcacaaaagcggaagggaacagacacagcaggaaacgcaaccggacagaagaggagg

SEQ ID NO: 195910 - RNA, 75 nt, Homo sapiens
caaggacccccaaaaccacaaacgccacgcagaacagccaccaagcggagcagcccccccccgggacagcagccg

SEQ ID NO: 195911 - RNA, 49 nt, Homo sapiens
acagccagcaacaccacacaaacgggacaaaccgcgcaggaccccaaaa

SEQ ID NO: 195912 - RNA, 71 nt, Homo sapiens
gaacccaagacgccccaaaggaagagaacacgaaagaaacccaggaagcccgcagagaggccgcccaagaa

SEQ ID NO: 195913 - RNA, 39 nt, Homo sapiens
accaggggaccaggaccccaggacccaagcccagaccgc

SEQ ID NO: 195914 - RNA, 63 nt, Homo sapiens
cccaggccccagaggagaaggagcaagggcgcggcagcagccgagaccgacccgcccgcccgc

SEQ ID NO: 195915 - RNA, 79 nt, Homo sapiens
cccacacggagaccaggcaagcagggaccggagggaagaagagcaaacacaggaaggaagaagccaaaagaaggagaac

SEQ ID NO: 195916 - RNA, 58 nt, Homo sapiens
ggccacaggggccgaaacacagagcaagaaagggcagcaagacacgaagccgagaaag

SEQ ID NO: 195917 - RNA, 64 nt, Homo sapiens
gccaccacaaaagcgaaagggcacaccacagaaacccagacagcagggaaacagccgcccaccc

SEQ ID NO: 195918 - RNA, 76 nt, Homo sapiens
cccacgagacacaccgccggcccggggcggcgccgaggggaggaggcggaaaccggagagaacagaaaaaaagcgg

SEQ ID NO: 195919 - RNA, 75 nt, Homo sapiens
ggcaaacgaaggaagagcagcaaaggaagagagggccagggcaggacagcagcccgcaacaggccggccagcccc

SEQ ID NO: 195920 - RNA, 80 nt, Homo sapiens
ggcggaggggcgcgagcaccccggcgccgaaggacaagccccgaacgagggggggccccccaggccaacgcccccgggac

SEQ ID NO: 195921 - RNA, 115 nt, Homo sapiens
agagccaaccacaggagggaaaccacgcaggcaaacgagaaaaagccgagaaggccagacggggacgacaccggagaaggcagcgacgacagcgacagcgagaagaggaggccga

SEQ ID NO: 195922 - RNA, 38 nt, Homo sapiens
ggccccgggaggccgaggcggaaagaaacagagcccaa

SEQ ID NO: 195923 - RNA, 76 nt, Homo sapiens
ccagaccgcacccaacgccagggggaaagagagaaccaagccaggaaaggaagaaacccaagacccaaagacagga

SEQ ID NO: 195924 - RNA, 73 nt, Homo sapiens
ccccaggggccccagagcccgcgcggccagacgcaccgggcgcccccacgcaaccacccccaacggccgcgga

SEQ ID NO: 195925 - RNA, 76 nt, Homo sapiens
caccaaggacagcccgcaaggggaaaaagaaaagggcgaagacccgaagcagcgcaggaacagaagagaagaccag

SEQ ID NO: 195926 - RNA, 80 nt, Homo sapiens
accaggcccagaggccggcggcagcagcccagagcgcaaagaagcaaaaagcggaaccacaagaagaaagcaacgacaag

SEQ ID NO: 195927 - RNA, 63 nt, Homo sapiens
acaggaaaaggccaaagggaaaaggaaaccagaagagggacgaagaaaacagcgcagcgccca

SEQ ID NO: 195928 - RNA, 80 nt, Homo sapiens
gccgccccgcgagcacagagcccgccgccgaccgccgcccgccacacccgccgccagaacagcaacccgccaggaccacg

SEQ ID NO: 195929 - RNA, 76 nt, Homo sapiens
caccagccccagaagggcgaaaaggaaaaaacccaggaccaaaacagagaaaggagaccaagcgaagaacaccgca

SEQ ID NO: 195930 - RNA, 71 nt, Homo sapiens
aaaaaaggagaaaaaggaaaaagagaagcgacggggcaaaaggcggaaagcaacaacacccaggagagccc

SEQ ID NO: 195931 - RNA, 75 nt, Homo sapiens
gggaagccccgcggagccgccaccacgacacaagggaaacaaccagacgccgcagaagaacaaaagcggaaaaag

SEQ ID NO: 195932 - RNA, 79 nt, Homo sapiens
cccaccagcaggcgggacccgcaccggaaggccacgccaagcacccacaaaagcgaaaagccagacaggaacaccagac

SEQ ID NO: 195933 - RNA, 78 nt, Homo sapiens
gccgggacccggccccggcccacaggggggggcaaacccgagagaacgggccgcccagacacggggcaacgagaacca

SEQ ID NO: 195934 - RNA, 88 nt, Homo sapiens
cccaagcagcgccgcacccgggcgcggcccccgccacccgccccgccgcccgcgccaggaggagggccccgccgggcgggcgcccagc

SEQ ID NO: 195935 - RNA, 38 nt, Homo sapiens
ggaaagagagccaccgccagggacgggagcagcggaag

SEQ ID NO: 195936 - RNA, 86 nt, Homo sapiens
gccaagagggcagccgccgaaggaacgcgacggcggcgcccgcagaccgcagaaaggcccagggcgccgagaggacagcggggacc

SEQ ID NO: 195937 - RNA, 81 nt, Homo sapiens
ggaaggccagcagcgcgcggagaagaacggggagccagagcggccacggagacggcggccccagaccggcaccaggacccg

SEQ ID NO: 195938 - RNA, 72 nt, Homo sapiens
gcgaggccagcaggagacggagccacggagcaggggaggacacaaccccagagagcggaacgagcaacaaac

SEQ ID NO: 195939 - RNA, 54 nt, Homo sapiens
ccagcagccaccaggagcccgagagagaagggggggcgaagacagcaagaaccg

SEQ ID NO: 195940 - RNA, 80 nt, Homo sapiens
caccgccaggcaggagcaacacacagcagacagcagcaggacaagccagcgcacagcaacagaaggcgaagaaaacccgc

SEQ ID NO: 195941 - RNA, 69 nt, Homo sapiens
gcacaaaaagacacaacagaaagaggacgggccaacgcacggcccggcagagccagcaccccccgcggc

SEQ ID NO: 195942 - RNA, 74 nt, Homo sapiens
acaacccgacccgacgagggagcagacaccgcaggccgagcgggaaacgcacgagcagagaaggagcaggacaa

SEQ ID NO: 195943 - RNA, 70 nt, Homo sapiens
aaggagagcagacccaggaaacaagagaggcgagagagcgaagcaccgcgcagaccgaaaggcacacgga

SEQ ID NO: 195944 - RNA, 38 nt, Homo sapiens
cgaccgcacacggccacccgagaaaacgagaaagccga

SEQ ID NO: 195945 - RNA, 78 nt, Homo sapiens
ggaaagaggcccgacacaaccaagcggacccaaaggaaagcagaaaggacgaggagccagcagaagaccacggcaaaa

SEQ ID NO: 195946 - RNA, 83 nt, Homo sapiens
ggagcagcccaagagccgagccgagaagacgaccccgacgcaggccaggagccgcggacagaagccgagcacggccgagacaa

SEQ ID NO: 195947 - RNA, 69 nt, Homo sapiens
gccggagcagacccggcacacagaaagaagccaaagaaaggaacggcagaggccaaaacagaagaggca

SEQ ID NO: 195948 - RNA, 76 nt, Homo sapiens
gaccccagcgcggcgcgcggaagcaccagaagccacgggacggaggaaaggaagccgaagacagaagaggagaaca

SEQ ID NO: 195949 - RNA, 40 nt, Homo sapiens
ggaagcaaggcagaagaggccaacccaagaagacacacgc

SEQ ID NO: 195950 - RNA, 62 nt, Homo sapiens
gcgcgagccaggacccgaacgaagcgcgcggcaggcgcgcgccgccccaggccgcaagaccc

SEQ ID NO: 195951 - RNA, 88 nt, Homo sapiens
cgcgcgggacggccgaggaaggaacggcccccccccagcccgccccaaaaggaacgcaagcacaggaccagaaacgaaaggcagcaga

SEQ ID NO: 195952 - RNA, 77 nt, Homo sapiens
ggggacagggcggaggccggggggggccgaagggggccggaccgagaggccacagcagccacccagcccgccggccc

SEQ ID NO: 195953 - RNA, 86 nt, Homo sapiens
cgccaaccggcggaccgcgagacagccagccgaccgaggaaccgacgcacagggaccaaacaaaacccccggggaccgaagaaaga

SEQ ID NO: 195954 - RNA, 74 nt, Homo sapiens
acgaagaaagcagacggggcggcagaccgagagggggccagcccagacgggcacaaccggaggaagagaaggcc

SEQ ID NO: 195955 - RNA, 67 nt, Homo sapiens
acagacacccgccaacagaacgaaaacaaacggaagagagggcagcaagaaagaacaagaaagcgaa

SEQ ID NO: 195956 - RNA, 73 nt, Homo sapiens
gccggcagggggcacccgcggccggcccggggccccgggaccggcgcccccccggaaagacaaggccccagca

SEQ ID NO: 195957 - RNA, 84 nt, Homo sapiens
aaaagacagaggccagcagacccgaggaagcgcgacccaggaccacaccagaagccaacgggggaagacagaaggagacggcag

SEQ ID NO: 195958 - RNA, 80 nt, Homo sapiens
cccagccaacgagaccagccaggcccagccccgaagggcacaccggagaggcgagaacagagcgagaagacaagcagaag

SEQ ID NO: 195959 - RNA, 45 nt, Homo sapiens
cgggacggcccaaggccagcccgcagacagaggcacaaaaggaga

SEQ ID NO: 195960 - RNA, 76 nt, Homo sapiens
cgcaggagggagaccacagcaagacgccaggacccacggaagccagaaagggaacccagaccaggccaaagcaaac

SEQ ID NO: 195961 - RNA, 77 nt, Homo sapiens
acgaggggacagcgcacccaggggacagaaggacggaccacaaaacccaacgcggacccggcagccggacaggacac

SEQ ID NO: 195962 - RNA, 68 nt, Homo sapiens
cagaaaggcgaaccgcaggccacaggaggaaacacgacaggagggcaacggacagaggagaacagaag

SEQ ID NO: 195963 - RNA, 73 nt, Homo sapiens
ccagaaaaaacagcacaccaggaagcaagggcccgaggggccaggagaagcgaagcgagcgggcaacacggag

SEQ ID NO: 195964 - RNA, 63 nt, Homo sapiens
gaaagggcaacccacgagagaacagaggagcgcaggaagcagagaaaagcaagggcaaacggg

SEQ ID NO: 195965 - RNA, 51 nt, Homo sapiens
agacggaaagaccaacggagacaaaacagccaaggcaggaaaggggaaagc

SEQ ID NO: 195966 - RNA, 86 nt, Homo sapiens
cgcagccgagacaccagcccgaaacaccaccaaggacagagcgggagccaccagcgccaaagggaagccaggagcccgggggcacg

SEQ ID NO: 195967 - RNA, 58 nt, Homo sapiens
gcgccgaggcccagagagaccccagaagccacaagaacggaagcagaagcacgcaagc

SEQ ID NO: 195968 - RNA, 77 nt, Homo sapiens
cggcagcaccgggggccgcagcaggaggcgacaagaggaaaagcagggaaccagggagaccaggacaaggaacagaa

SEQ ID NO: 195969 - RNA, 68 nt, Homo sapiens
gcaggaaacaagaaacaccaacacaaaaaaaaccaacagccccccaggaagagaccgagaccaggaac

SEQ ID NO: 195970 - RNA, 51 nt, Homo sapiens
ccgcagccgacccgggccaggacccggcgggggcaaggaagcacggaggcc

SEQ ID NO: 195971 - RNA, 62 nt, Homo sapiens
gagaaggaccaagaaccaggaaagccgaagagacccccagaagccagcagcccgcagagcgc

SEQ ID NO: 195972 - RNA, 74 nt, Homo sapiens
caaacagaaaaggaagaaagggacaaagagaggagcaggaaccacacggcggaggcaccgacaaaccagcgaag

SEQ ID NO: 195973 - RNA, 60 nt, Homo sapiens
gagaaaaggccaagaaggcaggccccccggaggccagccccccgcccccagggcaacgcc

SEQ ID NO: 195974 - RNA, 80 nt, Homo sapiens
agcacagaccagcagccgccaaagccacaggaggcaaagagccgaaggggagcgcacagccaccagaggcccccagagca

SEQ ID NO: 195975 - RNA, 72 nt, Homo sapiens
ccgcgccgcaggaggccggcgaggagcgccgcgcccgcccgcaaaggcagaaccgcccacgaagcacggcgg

SEQ ID NO: 195976 - RNA, 56 nt, Homo sapiens
aaggggagcgggcgcgcgcgaccgcgccccggcaaaccaaccaaaggaaacaaagc

SEQ ID NO: 195977 - RNA, 70 nt, Homo sapiens
accgaccagggcaacaccaaaaacaaaacgaaccaggacggcaaggcgccgcgaaaagaaaacgaaccca

SEQ ID NO: 195978 - RNA, 69 nt, Homo sapiens
aaaaacccgcaacagcccccgcccaaccccgcgcgagccggaaccaggggcaggaacaaggaccaacag

SEQ ID NO: 195979 - RNA, 63 nt, Homo sapiens
cgaccccgcgcgacgacccgccgccgccgggcggaggacagaggacaggaggcgaacgcaaca

SEQ ID NO: 195980 - RNA, 49 nt, Homo sapiens
ggacacgcaacccccagcacaggcaaaccgacaccagcgacacaagcgc

SEQ ID NO: 195981 - RNA, 61 nt, Homo sapiens
ccaagggaacggggggaagaggagcaccacggggcccggcgacaggcaaacaaccaggacg

SEQ ID NO: 195982 - RNA, 61 nt, Homo sapiens
ccgcgggcgaggcccccgcacagcacgcgcagaacaaagggacagcggaagccgaagcggc

SEQ ID NO: 195983 - RNA, 77 nt, Homo sapiens
cagccgaggggagcgcggggcccggcagaaagggggggccccagcccggccgaacgggcgcacgacacaaacacaac

SEQ ID NO: 195984 - RNA, 43 nt, Homo sapiens
ggagaaccacaaacggaccccgggagggcccagcaaccggcca

SEQ ID NO: 195985 - RNA, 70 nt, Homo sapiens
cagcccccgcccacaggaggccccagcgcagcagccccgcccagagcaacccacaagggaagaccagaag

SEQ ID NO: 195986 - RNA, 79 nt, Homo sapiens
gaaccccagagccaaccagcaaagaaaagaagaaaaagaaacgcacggagaaacaggaggagcccaaaagaaacagggc

SEQ ID NO: 195987 - RNA, 80 nt, Homo sapiens
gcgaacccgagagcgggagcgggcgggccaggcaaaagcagaccggaaaacccaccggcaagaccacacccgaggggagc

SEQ ID NO: 195988 - RNA, 80 nt, Homo sapiens
ccccgcccgccccgcccaaccccgggacacgcccaagcaccaaccccggaacagaggggacaccaccccaaaaaaaaaaa

SEQ ID NO: 195989 - RNA, 93 nt, Homo sapiens
caaaccccaggccaagcaaccaccagcagcccccagagcggaacacaggccggccagccgacccagccaggcccagcaccagcacggccaagc

SEQ ID NO: 195990 - RNA, 78 nt, Homo sapiens
ccggccagccacccaaggccccggacgccggagaggcaccggaccggaacaggaggcccggacccccagcacaagcgc

SEQ ID NO: 195991 - RNA, 43 nt, Homo sapiens
ggcacacacggcagcgcagaaaccgcccccaaagccagagccc

SEQ ID NO: 195992 - RNA, 74 nt, Homo sapiens
cacagaagagcgcacaagagaagccaagcggaagcgaggcggccggccacaccagccagccaaaccaagccccc

SEQ ID NO: 195993 - RNA, 72 nt, Homo sapiens
aaaaccagccaaaccaggaaaggacaggaagcgacacaaacccgccgggcgggcaaccaagaacacaacccg

SEQ ID NO: 195994 - RNA, 69 nt, Homo sapiens
ccacagggaaagaaggcaggcggaacaagcgggaaacggagccaccaacaagcgggagaaagacagcaa

SEQ ID NO: 195995 - RNA, 57 nt, Homo sapiens
caagacgagagccggacgagccgaaacacaagcaaggaacacaaagaagaaagaaag

SEQ ID NO: 195996 - RNA, 77 nt, Homo sapiens
agaccggacagcgcaagcaccagcacccgacagagggggcccggccccccccgacaggagagaaccgcggccgggcc

SEQ ID NO: 195997 - RNA, 71 nt, Homo sapiens
aacagaacaggcccaggggcaaccaggcagacccgaccccagcgacacccaaaagagggaagcccaagaga

SEQ ID NO: 195998 - RNA, 66 nt, Homo sapiens
ccaaaacagagcggaaccgaggagagaggcgagcaacagaaaaaggcggccacaccgcgagggcga

SEQ ID NO: 195999 - RNA, 74 nt, Homo sapiens
agaacaaggcggagcccaaggaagaccaacacgcacgaagggaacacacggaagcaaccagcccgcgagaaagg

SEQ ID NO: 196000 - RNA, 55 nt, Homo sapiens
ccggagagcacaagccggccacgagaaaagacacagacgacccagaacgaaggaa

SEQ ID NO: 196001 - RNA, 70 nt, Homo sapiens
aacagccggggaccgccacgagagcccaaagacaacaggcccccccgccccccgcggagccccgcccagc

SEQ ID NO: 196002 - RNA, 81 nt, Homo sapiens
agagacccagcaacgggcagcgggcgcaggaccccgccccacgcccagcagaccagccagccccaagcagccgcacgacaa

SEQ ID NO: 196003 - RNA, 78 nt, Homo sapiens
cgacccggagcgacgacggccgcgccaagcggaaagaaagcgccagcagcgaaccccagacggaaagcccacccacac

SEQ ID NO: 196004 - RNA, 63 nt, Homo sapiens
gcgccccggaacgacaaggaggccaggaagaaggccaaacaaggagaaagacagcaaagaaaa

SEQ ID NO: 196005 - RNA, 69 nt, Homo sapiens
cagcaccaccaacaacagaacaggcccggaagcacagcagggaaagcacagagagcaagccccaaagca

SEQ ID NO: 196006 - RNA, 48 nt, Homo sapiens
acggaccagaccgaccaccaaaacgcagaaccggccgaaaagcacaaa

SEQ ID NO: 196007 - RNA, 71 nt, Homo sapiens
ggagcaacaacgagcccccggccggaccccgcgcggaaagcaaaccagccagcacgggggcccagccagcc

SEQ ID NO: 196008 - RNA, 75 nt, Homo sapiens
cgggcgagccaacgacgaccacgacgccaccaggaaccggggagggacagcgaagggggaagggggagccaggag

SEQ ID NO: 196009 - RNA, 73 nt, Homo sapiens
gggcgacgcccgccgcagcccggacagagcccccgggaccgaggccaacccgaagggagaagggacacaaaag

SEQ ID NO: 196010 - RNA, 38 nt, Homo sapiens
gcaagaccagcgggcaacagagccgccggcccaggcgg

SEQ ID NO: 196011 - RNA, 77 nt, Homo sapiens
gcaggcccacgaggaggagccggaccgcgccaagaggggacaagagcgcccaagcggacagccccacccgacaccag

SEQ ID NO: 196012 - RNA, 80 nt, Homo sapiens
ggggagccccgggagccgcacgagagcacaggagcacgggagcaggggcagacacgggacaccacggacccgcgcagcca

SEQ ID NO: 196013 - RNA, 76 nt, Homo sapiens
gcagggggccaccggagaccgcaccaaaagacccaacagggcgaccagaaacgagacgcacacaacagagagaccg

SEQ ID NO: 196014 - RNA, 79 nt, Homo sapiens
gccgcgccgcaccccgagcgaccggcgcggggaggcccagcccgccgcagggccaccccgcggcccaccgccgccgccc

SEQ ID NO: 196015 - RNA, 75 nt, Homo sapiens
ccaacaaaagcccgggcggacgcaaggccacgggaaggaagcccggaccaaagagacaggcacggcaccaccccc

SEQ ID NO: 196016 - RNA, 49 nt, Homo sapiens
caaaagacaaccccagggaaggggcagcacaaggagcacaaaggacaga

SEQ ID NO: 196017 - RNA, 81 nt, Homo sapiens
cggcccgcccccggggaccgggccggcgccaggaccgaggccaggggaaaagcgagagcgaccagcaggacagcagggagg

SEQ ID NO: 196018 - RNA, 50 nt, Homo sapiens
gcagaagaaaaagccgaaacaggcagcgggccagccggcgccccgcccgg

SEQ ID NO: 196019 - RNA, 83 nt, Homo sapiens
ggaagggcaaaggcgccaaaacgagacggaaagagacccagggcgccaaaaacagacgccgaagagagcaccgagccaaggcc

SEQ ID NO: 196020 - RNA, 79 nt, Homo sapiens
gacacgagccagggaggaaggcgcaggagcccggccaccacacccagcgggggaggaacggacgcggccacggacaaag

SEQ ID NO: 196021 - RNA, 78 nt, Homo sapiens
agacgggggaagcagcacgggacccagcccaggccgcacggacggggggggaagcagaagaaggacaccccacaccga

SEQ ID NO: 196022 - RNA, 74 nt, Homo sapiens
aaaagaacggcaggaacgggcgaacagggcaagaggaagacagaacgaccgcgagaccacaaacagagacagcg

SEQ ID NO: 196023 - RNA, 67 nt, Homo sapiens
cagaaaagaaccagagcgcagcggaacagcaagccgggcgagcccggaggggacgaaggaacgggag

SEQ ID NO: 196024 - RNA, 94 nt, Homo sapiens
cagccgcccaagccgcacagccgcggcggcagcagcaggagagacgggaggcggggcagccgacacgccggccgcgaacaacccggccagagca

SEQ ID NO: 196025 - RNA, 80 nt, Homo sapiens
caagagcgcccagcggacacagccccggagagggaacaagaaggaggggggaggcggaccagagagacaccacccagggg

SEQ ID NO: 196026 - RNA, 83 nt, Homo sapiens
aagaagcaccagccccgacacgaggacgccacccgcgagaaccagccgggaggggaaggcgagcggagacagaaagacgcccg

SEQ ID NO: 196027 - RNA, 87 nt, Homo sapiens
cggggaaggccgggcgccggcccgcggaagagccggaccaagcccacagcagagcggacagagaacgggaccgggcagaagaaaacg

SEQ ID NO: 196028 - RNA, 75 nt, Homo sapiens
ggcaacgagcggcagaaacacaagaaccacaaggaaacagacaggcagaccgaccaaacagggagcagcggacag

SEQ ID NO: 196029 - RNA, 79 nt, Homo sapiens
ggcgacacgccacgggccgagccagaagggaaaaagaaaccccaccacgcggcaggggccgccgaggaaaaagcaacaa

SEQ ID NO: 196030 - RNA, 69 nt, Homo sapiens
aagaaaacaggagcccaacgcagaccacgggcggcagccacagaaggacaccccaagagaaaccaccaa

SEQ ID NO: 196031 - RNA, 79 nt, Homo sapiens
ccgggcggggcccggcggagcccggacgggcgccacaccaacaccacggaaccagccgacggaccgggggggccgaaga

SEQ ID NO: 196032 - RNA, 61 nt, Homo sapiens
cgagcagcggacgccggccgccgcaggagggcacgcagacgcagcaggagggaagcgcgca

SEQ ID NO: 196033 - RNA, 85 nt, Homo sapiens
cccgcagcaccgcaccggagggcgagcggacccccggagaaggaacgacaccaaaacacacaacccaagacccaagcccaacgga

SEQ ID NO: 196034 - RNA, 84 nt, Homo sapiens
gaaaggagaaacagagggagaacaagcgcccccaagagggagaagaagagagccggggaggaagaaaaagaccgggaggacaac

SEQ ID NO: 196035 - RNA, 78 nt, Homo sapiens
ccagcaaggaaagaaaacaaaagaggaagaagacaacaagaaggccgacaaaaggcagagacgggcaagaggcagcaa

SEQ ID NO: 196036 - RNA, 73 nt, Homo sapiens
gggaaaggccagcgcagaaacgcaggacagggcagaccgccagcagcacagcaagccacagagagggccggca

SEQ ID NO: 196037 - RNA, 56 nt, Homo sapiens
gcggaacaccgcacagagcagccggacgccccgaccaagagccaggcagcgagcgg

SEQ ID NO: 196038 - RNA, 59 nt, Homo sapiens
cgagaaccgcaggagccagagggcagaggcgagagccccgaaggaaacaagggaccagc

SEQ ID NO: 196039 - RNA, 80 nt, Homo sapiens
gaaccagagaaagggagcaggggaccaagaaaggcccagggaccaaagcccggacaaggcccgagcaccaggaccgcaga

SEQ ID NO: 196040 - RNA, 56 nt, Homo sapiens
agggccaaagaagggagagaggaccacagaagacaagggacgcgcccccaggacgg

SEQ ID NO: 196041 - RNA, 58 nt, Homo sapiens
gcgacaacgagcaaggaaaccgggacaccccgaaacggaacagcccagcaacagagag

SEQ ID NO: 196042 - RNA, 79 nt, Homo sapiens
ccacgggagaaaaacaagaaacagcagccaaccaggcccgagacaaaaaggggacgacaccggagaaggcagcgacgac

SEQ ID NO: 196043 - RNA, 45 nt, Homo sapiens
ggcgcggacacgcaaaccacacaagacagcaggaacaggggggga

SEQ ID NO: 196044 - RNA, 79 nt, Homo sapiens
cagccgggagccggagcgggcgcggacgccgaggcaccgaggcaccagaggagacaacccaccccaacaagacaccacc

SEQ ID NO: 196045 - RNA, 50 nt, Homo sapiens
cgaggaggaaaggaggacgaggcgcaagagagccgaggccaggcgggagc

SEQ ID NO: 196046 - RNA, 65 nt, Homo sapiens
ccggagcacacggcgagagaaagagccagacacggggacaacagagccgacacagccaagaagca

SEQ ID NO: 196047 - RNA, 75 nt, Homo sapiens
cgaggaccggaggcgggagaaggcaagaacggaagcacgggcggaggaaagcacaagcagagcccccgcagaggg

SEQ ID NO: 196048 - RNA, 59 nt, Homo sapiens
aaagcacaaccagagagcagcgagagccagaccgggagacgcagcagccgccaccagac

SEQ ID NO: 196049 - RNA, 77 nt, Homo sapiens
aaacaacgcagagaaacacggaaacaggaagaggaaaaacacgacaaaggcagccagccacagagcccggcagcagg

SEQ ID NO: 196050 - RNA, 72 nt, Homo sapiens
accagacggagcgaaccaccgaagcaaccacgggcaggggcagccgggcaggggagaggggaccccgcggca

SEQ ID NO: 196051 - RNA, 69 nt, Homo sapiens
ccaggagaaggagcggcaggcgacgaggaggcggagcggacaaaggacggggaaggaagccacacccaa

SEQ ID NO: 196052 - RNA, 41 nt, Homo sapiens
gggaggcagaccacgagaagccagaacagcgcgagccacaa

SEQ ID NO: 196053 - RNA, 75 nt, Homo sapiens
ccggcgagaccaccgggcccgcggccggccggagcgcggcaggacggcggagggcccgacgggccaggagggggc

SEQ ID NO: 196054 - RNA, 73 nt, Homo sapiens
caggagcgagggaaaaagagggcaaccagagcgccgaaaagcgaaaagaaacaagccgcggcaacagcgaccc

SEQ ID NO: 196055 - RNA, 76 nt, Homo sapiens
cgaagcgggggagaaaaggaccagggaggacggaggcccccacggccccaggagaaagcgcgggcgaccggccggc

SEQ ID NO: 196056 - RNA, 55 nt, Homo sapiens
gacaaaccggagaaggagccaagaaagagaagacgaagaacggaagcgccccaga

SEQ ID NO: 196057 - RNA, 64 nt, Homo sapiens
cagcgagggggcagacgcaacgcaaggaccgcagggaaagcacgaagggagcccagcgacacac

SEQ ID NO: 196058 - RNA, 68 nt, Homo sapiens
cggggcacccgcaggggcagacagcacaaccagcgaggcacacccagaagccacaggagaagcaagag

SEQ ID NO: 196059 - RNA, 80 nt, Homo sapiens
acccaccgcgacccggccacgccgccccaagaccgccgaccaggcacgcccaaccccgcgaaggaaggggacccaagccg

SEQ ID NO: 196060 - RNA, 81 nt, Homo sapiens
gggacgaccaaagaaggaaggaaagaacaggcagacgcagaaccgggaaggaaaagccaaagcaaaagaagccggaaagca

SEQ ID NO: 196061 - RNA, 76 nt, Homo sapiens
ccgccggacccaacccaacagaaggaccagaggacagggcagaccgccagcagcacagcaagccacagagagggcc

SEQ ID NO: 196062 - RNA, 41 nt, Homo sapiens
accgccagccgaccacaaggccccggaccagaggaagagaa

SEQ ID NO: 196063 - RNA, 39 nt, Homo sapiens
gcccagccaccagcaaccccccaggaaaacaagaaccaa

SEQ ID NO: 196064 - RNA, 69 nt, Homo sapiens
cggggggcggacgcgcgcggggcagagacccaggaaaaaggaccagaaaaaaaggcacgcaaaggggcg

SEQ ID NO: 196065 - RNA, 80 nt, Homo sapiens
gcccaccgaagaagagacacagcacagaccgcccaagccgaggaccaaaccaaagaaccaggcggcgcaccaggagggcc

SEQ ID NO: 196066 - RNA, 53 nt, Homo sapiens
gaaggccgacaggcagacaaggggcacacaagggagagcggaagaaggggcag

SEQ ID NO: 196067 - RNA, 53 nt, Homo sapiens
cgacaggaggagacaggcgagagaggaggacacgaccgaggcagagcaacagg

SEQ ID NO: 196068 - RNA, 71 nt, Homo sapiens
ccacgccacaagggcccgacccagccccggggacacagacagggggaaaaacggagaggaaagaaggggaa

SEQ ID NO: 196069 - RNA, 76 nt, Homo sapiens
gcgaagaccagcccagagacacggggggagacacgccacgcggccaaaggaacacggaggaaaagcagccaggagc

SEQ ID NO: 196070 - RNA, 78 nt, Homo sapiens
aaagaagaaaacaagggaggagaagacaagcaaaaagacgggaaacggcaaaggcgggagcggaaaggacgaagaaag

SEQ ID NO: 196071 - RNA, 71 nt, Homo sapiens
gagcgcaggacggggagaccgcaggaaggcaggagagacccccgggggccgagagaacagggacgaacggc

SEQ ID NO: 196072 - RNA, 74 nt, Homo sapiens
aaaacaacagcacacagcaaaagagacagacggacaacagcccaacaacacccagagcgaggagcaagagaacc

SEQ ID NO: 196073 - RNA, 76 nt, Homo sapiens
gacagaaaacagccggaaaagacagcccaccgaacaacgccagggacagacaagaaaacaaagagggaaaacggag

SEQ ID NO: 196074 - RNA, 74 nt, Homo sapiens
aggaaaaggcgcagcaaaagaaacgggggcccaggggcagccaggcccgcgccagccggaaaccccgaggaaga

SEQ ID NO: 196075 - RNA, 77 nt, Homo sapiens
ccaaaaacagagagaagagagaggaaacaagaaacccgaaaaacagaaacagcagaagaaaagaggggaaaaccaca

SEQ ID NO: 196076 - RNA, 88 nt, Homo sapiens
gaggacaggagagaagaagaagaaaccggagaaggaacagaccccggaggaggaaaccccagacagccagcagcaggccgggaccagc

SEQ ID NO: 196077 - RNA, 77 nt, Homo sapiens
gaagacacaagagcacgggccaggggaaccgccgcacggggccagcagcaagggcagccagggaagagagacaacca

SEQ ID NO: 196078 - RNA, 79 nt, Homo sapiens
cgggagaggagaaacacagggcaccaacagaagacccagggcgcgaaagaagacagagggcccggggacacgagcggcc

SEQ ID NO: 196079 - RNA, 75 nt, Homo sapiens
gagccaccacgccggcccaccaaacagaaacgagaggagaggaagcccaaaggcaaggacaaaaaggaaagacac

SEQ ID NO: 196080 - RNA, 67 nt, Homo sapiens
agaacgcgggcgaacgagcaccaacgcacccaccaggaggagggagccagccagagcccccccaagg

SEQ ID NO: 196081 - RNA, 84 nt, Homo sapiens
cgaagaaaaaaacggagccagccgccagaagcccaccagaggcgaggggaggaggaagcgagcgaaaagaggcgggaaacaggg

SEQ ID NO: 196082 - RNA, 74 nt, Homo sapiens
gggaccgagcaacaacaggagagggcgaaacggggcgggcacgcaggagcagcacggcgaaggacacacaagga

SEQ ID NO: 196083 - RNA, 69 nt, Homo sapiens
agaccggccacaagaccggacaaggccagccggggacagaggaagacagacggagcgccgcacccaggc

SEQ ID NO: 196084 - RNA, 94 nt, Homo sapiens
accggcgccggcaccccacaagcccagggaccacgggccaggagcagcaccccccggggaaagacacgccccaccgagggcagggccgcccgaa

SEQ ID NO: 196085 - RNA, 81 nt, Homo sapiens
agggagccaccagcagcggggggcgacccccagaagcggacccaaagacaggaccacgcaccagcagagaaggaaagcaaa

SEQ ID NO: 196086 - RNA, 76 nt, Homo sapiens
ggggcagaaacagagaaggaacagggccaggaggcggggagcgcgaacaaacagaccgggagccgcgaggagaacc

SEQ ID NO: 196087 - RNA, 77 nt, Homo sapiens
gaaagggcaacagcccggcggaggccggaccaaccgcgaaaacaacaagacgaaaaacgcgaagaaaaaaccaaaca

SEQ ID NO: 196088 - RNA, 82 nt, Homo sapiens
aggacagcaccagcgggccggaggagccagagcgcagaaagggacaaaaaggaccagaagaaaggcgcacaaaaccagaacg

SEQ ID NO: 196089 - RNA, 78 nt, Homo sapiens
gggggaaaagaaggaccggaagagagcacacaaggcgggagcagccaagagaagcaggaagaagccaagaaggaaggg

SEQ ID NO: 196090 - RNA, 72 nt, Homo sapiens
acacacaaaaagcgaagcacgaaacgacggcccaagcagagagggacaccagggggaaaacaggaaacgaag

SEQ ID NO: 196091 - RNA, 76 nt, Homo sapiens
cgaggccaggaacccggggagaccccgacgggaggccgaggcgaccggcccgaggaccgccgcacgaccaaacgca

SEQ ID NO: 196092 - RNA, 71 nt, Homo sapiens
aggaccaacagggacggagcggagaaaaggaaccggccccggagcccagcaaaaagaggagaagcaccccc

SEQ ID NO: 196093 - RNA, 72 nt, Homo sapiens
cgcccgccggagcagccgaggccccccagccacgccgacagccgcagaacgaagaaggcaaagccgaaccca

SEQ ID NO: 196094 - RNA, 81 nt, Homo sapiens
ccgcaacccagcagagagcaggaccgcaggacaacggccacacagccaggggaccacagaaaggacgcaggaaccgccaaa

SEQ ID NO: 196095 - RNA, 68 nt, Homo sapiens
accacacccacaacaggagagccacgaagaacccaacccggaaggaacccagagggaaacagccagac

SEQ ID NO: 196096 - RNA, 75 nt, Homo sapiens
aacggaaaggagaacggggaaaacgccaagaggggggcccagagcgccaacgcagcgcccaacccccaaggcagg

SEQ ID NO: 196097 - RNA, 72 nt, Homo sapiens
ggacgacaaaccagcggcgccgccaaacgccgccaccagcgcagacagccagcggcgccgacaccggaacag

SEQ ID NO: 196098 - RNA, 63 nt, Homo sapiens
gccgccgccgccaccacgccaccacggcgccgccacagcccggaccccaggacagaagggcca

SEQ ID NO: 196099 - RNA, 73 nt, Homo sapiens
gaagcccacagaaggggaccaagggggcagcagcggcccaggaccgagacaggaagggaaggggcggagacgg

SEQ ID NO: 196100 - RNA, 84 nt, Homo sapiens
ccgggacagcaggagcgggccagccaggagacggcggaggggcggacgccacgccaaagagggacgagggcaacagacccacca

SEQ ID NO: 196101 - RNA, 74 nt, Homo sapiens
aaaacgcgcgagaagagagacgagagagaagaggagagagaagaaaaaggagaagacccaaacagagacaagcc

SEQ ID NO: 196102 - RNA, 77 nt, Homo sapiens
agaggccgaccgagacgggcggagaggagaaggagagccacaagaagaggacagcagcagacaaagaacgcgaacag

SEQ ID NO: 196103 - RNA, 85 nt, Homo sapiens
gcccgccccaacccgcgcgccaggacccaaaggagacaaccagcagcagcagcagcagcagcagagcagcagcagcagcagcagc

SEQ ID NO: 196104 - RNA, 74 nt, Homo sapiens
gagccacccaacgcacgaggccccgaagagcagccccagagacaaggacaggaggccagggcacgggaaggcag

SEQ ID NO: 196105 - RNA, 70 nt, Homo sapiens
gacgaagggaacaaaggaaccagagaaggagaaacagcagggccaaaggcaagaacccgggaaaggcgcg

SEQ ID NO: 196106 - RNA, 72 nt, Homo sapiens
cccgcccgaaccgagggaacagggaggagcgcacgacgggaacccacgagggggaggaggaagagaagcgcg

SEQ ID NO: 196107 - RNA, 104 nt, Homo sapiens
ccggcggccgcggaagcggggcgcacaccaccggacaaccgacaaaaccgccagggagaaaagacgaggaagcccaaaaaccgcaagaaaggcacagaagaagc

SEQ ID NO: 196108 - RNA, 74 nt, Homo sapiens
aacgaggccagcaagaaagcccgcaggcgacggaggcagacagggccccgcgcccggcgcaccggcgggaagcc

SEQ ID NO: 196109 - RNA, 57 nt, Homo sapiens
ggagggccacgaccaagaagaagccacggaccacggcccaacagcgcccggaaccgc

SEQ ID NO: 196110 - RNA, 82 nt, Homo sapiens
gcgccgggcccggacccgcgcagcgagcccgagcggcagcgccggagaaaaacaaccaccagcgagcaaaaaggcaaagacc

SEQ ID NO: 196111 - RNA, 81 nt, Homo sapiens
ggcccgccgacccgggcgccgcgccgcacgagcaccagccagagccaggccagcgaagacggaggaccacaccggaagcca

SEQ ID NO: 196112 - RNA, 78 nt, Homo sapiens
ggccaggacaacaaaggagaccgggacgccgaccagaggccgcagaagaacagaccgccgaagaaacgaagcggcaag

SEQ ID NO: 196113 - RNA, 75 nt, Homo sapiens
aaggagccggaggcggggagaccccgcaccaggacagcgccaggacccgaaaagccagcaagcgagaccaacacc

SEQ ID NO: 196114 - RNA, 78 nt, Homo sapiens
gccaacacacgcaaagcagagaaagcgcacacgagacaaaccaagaaaccacccaaacaagcggccggacaaaagacg

SEQ ID NO: 196115 - RNA, 78 nt, Homo sapiens
gccgcaggcccccaccgcaccagcacgagaaggacgagagcggagacgagggagaaaagcgagaagccgcagcaagcg

SEQ ID NO: 196116 - RNA, 68 nt, Homo sapiens
gaacccaggcagcagacagcggacgggaaaaggaacccaggacaaggacccacgaaaaagcaccaacg

SEQ ID NO: 196117 - RNA, 61 nt, Homo sapiens
cggcgggaggccaccgccagagccaggacaaaaccaggcagaaccaacacgaacccaagca

SEQ ID NO: 196118 - RNA, 78 nt, Homo sapiens
ggaaggaggagagggcggcggagaagaggcaggaagaccgccaacaggggcgacagcaagaaggagccagcacagagg

SEQ ID NO: 196119 - RNA, 70 nt, Homo sapiens
cagaacgacaaaaccagcccaagcaaaacacagacagcaaggaaagcgcagagaaacggggaagacggac

SEQ ID NO: 196120 - RNA, 69 nt, Homo sapiens
cgggaggagaaggaggaggaacggcgggaaaacggcacaaggcgacgagggagggcagaccgccaggcc

SEQ ID NO: 196121 - RNA, 56 nt, Homo sapiens
ccgacagaagaccggcaggggaaccagacgggcaaggcgagaaccggagagagcac

SEQ ID NO: 196122 - RNA, 78 nt, Homo sapiens
ccgggacccgggcgcccgcgcccgccccaacccagccacaggcaaaagcagaccggaaaacccaccggcaagaccaca

SEQ ID NO: 196123 - RNA, 69 nt, Homo sapiens
acgcacgagggcagggcggaagggcgaacacacacaaaagggaccccgcaggcagacacccgaacaaca

SEQ ID NO: 196124 - RNA, 76 nt, Homo sapiens
cagccccgcgccgccgaccccccggcgccgcgccggcggcggagacagcacgcccgaagagaccggcacggcacgc

SEQ ID NO: 196125 - RNA, 70 nt, Homo sapiens
cgcgagcccgggagccaccgccgaaaggccccagcaccacaagaacaggagaacaccccaacggcaaggg

SEQ ID NO: 196126 - RNA, 71 nt, Homo sapiens
ccagcccccgagggcgggaacagagccgcccacagaccaggcagcaaagacagcgagaaagaccaccaaac

SEQ ID NO: 196127 - RNA, 58 nt, Homo sapiens
gaaaagagacagacgaaaaagccagcaacagcggaggaaaagagaggaggagacgaga

SEQ ID NO: 196128 - RNA, 75 nt, Homo sapiens
ccaaacaacccagaggcaggcacagaaaggggaggccacacaggaagaaaagaagcgcaagaggaaaacagagca

SEQ ID NO: 196129 - RNA, 83 nt, Homo sapiens
ccgcgcgccggaccgacaggcgcgggagcgagggaggacgccgggacaccggaagccgagaaaggagagccacccgcacgagg

SEQ ID NO: 196130 - RNA, 74 nt, Homo sapiens
gaggaccaagacagggaccccaaggcacgaggaagaaagggaaaaagcaacacaggaaagagacaaagacagca

SEQ ID NO: 196131 - RNA, 74 nt, Homo sapiens
gaaagcaccaaaaccgaaccagaacgaagacgccccgcaaacaccagcaaggcccgaagaaggacaagcaaaaa

SEQ ID NO: 196132 - RNA, 88 nt, Homo sapiens
gcacggaccacgcgaggcggaaagaagaaaccgaggaccggcgacgccagaacagggccccgcaccaccccagcaaccaaacaccacc

SEQ ID NO: 196133 - RNA, 87 nt, Homo sapiens
agaggaaacagcgggaaccgggacagcgacacgggggagcaaacccaacccggagcacagaagacaacaggacgcaaaaagaagaaa

SEQ ID NO: 196134 - RNA, 78 nt, Homo sapiens
agcccagaagagaggggaccacgaggacagcggaagaaaaggagaaagacagcaaagaaaaggagaagaaaggaaaaa

SEQ ID NO: 196135 - RNA, 76 nt, Homo sapiens
cccaagccaggcacccaaaaaaaccgcgcgagccggcggggcacaggaaccgccagaacccaacaaagccaagcaa

SEQ ID NO: 196136 - RNA, 76 nt, Homo sapiens
gaggaggacgaaccaacggaacgcggaccaggaggaccgaaaagacgcggccccaaaggaaacacccgaagaacac

SEQ ID NO: 196137 - RNA, 78 nt, Homo sapiens
accggcacagaaccacacaggccgcccccgccgaagagcacgccagcccagggagaaagcagaagcaacccaggcacc

SEQ ID NO: 196138 - RNA, 76 nt, Homo sapiens
gcccgaggggagaaggagcggcccgaaacccagaacgcccaggacacggagaaccacagagagccgaggaaaacca

SEQ ID NO: 196139 - RNA, 69 nt, Homo sapiens
ccaaaaacaaaagccccaagaccagagaggccgcacgcaccagagagagccccgcagccccggccccgg

SEQ ID NO: 196140 - RNA, 76 nt, Homo sapiens
cacccacgaagggaggaaaagggcagggacagcgcaggcagcagacaggggcaaggccgaggggaacagcacacag

SEQ ID NO: 196141 - RNA, 76 nt, Homo sapiens
gcagaccaggaacaagagagaaagagggacagccgcacggaggcgaaacacaaaggggcaagaagcaagcaaccag

SEQ ID NO: 196142 - RNA, 63 nt, Homo sapiens
caccaggaggccagggggcgccaggcagccggcgaggggggagcccagcaggagcgggaaaac

SEQ ID NO: 196143 - RNA, 79 nt, Homo sapiens
ggacccagcccgcggaggccgcggagcgccagccaagaaccgaaaaggaagagcagccgaggagaggaaagcggcagca

SEQ ID NO: 196144 - RNA, 70 nt, Homo sapiens
ccggggacccccgacgccaggcagcgcccccaaacggacgaaagagggccccacgcccaaaccaaacgaa

SEQ ID NO: 196145 - RNA, 64 nt, Homo sapiens
ggccgggacggaggacgcgcaggccagaacacaaagcggaaccggaagaaaagcaacggaaaca

SEQ ID NO: 196146 - RNA, 72 nt, Homo sapiens
ccggagcgcgcagcgcgaggggcgcaggagggccggcgcggggggaagagagccccggcgaagcgagacccc

SEQ ID NO: 196147 - RNA, 80 nt, Homo sapiens
cgaaagaaagacaacccgaaagaacaccgaaccaggaacggggcgcgaaagacacggacaacgcaaacccggcccccccc

SEQ ID NO: 196148 - RNA, 96 nt, Homo sapiens
cgcccagcgcccggcccccgcggcggccggcccccccccagggccaggcgccgccagaacggcaaaagggcaacaaggaccaaaggagaaaaagcg

SEQ ID NO: 196149 - RNA, 71 nt, Homo sapiens
agcgcacccagccacccagcagagcccgcagggacccacgagcagccaaccaggagcaaagaaaaaggaag

SEQ ID NO: 196150 - RNA, 76 nt, Homo sapiens
aggccaccacagaaacaaaagcaacaaagagggggaggcaagcaggggggcaaaggaaagaaggcagaaagggagg

SEQ ID NO: 196151 - RNA, 53 nt, Homo sapiens
cccaggacaaaagggggagaacgaccaagcacaaggagaacgcagcgcaccac

SEQ ID NO: 196152 - RNA, 54 nt, Homo sapiens
ccaggagaggagggaacgcggagcggggcccgagggcaggacagcaggcaccgg

SEQ ID NO: 196153 - RNA, 98 nt, Homo sapiens
agcaccagaagaaaagagaggaaagaccaccaccccgccagaagaggaaaaagagaaccaccacaccaagggcaaggagcagccacacaagacaacgc

SEQ ID NO: 196154 - RNA, 75 nt, Homo sapiens
gacagagcacgggcggagaccacggaaggaggaaaaggcccaggcgagaaagaaaccggaagaaagagacgccaa

SEQ ID NO: 196155 - RNA, 77 nt, Homo sapiens
cccgagacgggagccccggccccggaacccgaaaacagggccaaagcaggaaccccagaagaaagcccaaaaacgcc

SEQ ID NO: 196156 - RNA, 96 nt, Homo sapiens
gagcaggagagacaaagaaccagagccggaaccagccagagaagaaaggagaagcagggcccaacaagagagggaagcaggaaaagagcgcaaaac

SEQ ID NO: 196157 - RNA, 77 nt, Homo sapiens
agaaaggacagggagagaagccaagaaagacagcaggagaaggaccaaaaggaacgagacggaagagggagcgcggc

SEQ ID NO: 196158 - RNA, 44 nt, Homo sapiens
ccggcggagccagccggcaccaaaagcggccagagcagcaggga

SEQ ID NO: 196159 - RNA, 75 nt, Homo sapiens
agcccccaccgggccacccccacgaccaccagagaccaacaggaccaccacggcaagaagcaggacagaagaagg

SEQ ID NO: 196160 - RNA, 61 nt, Homo sapiens
ccccgggcccacgacccagcggccccggaaaagacagagagccacgcgcccaggcgcaggc

SEQ ID NO: 196161 - RNA, 56 nt, Homo sapiens
cgggaggaaaaaagacgacagagaaggcaagcaggcaaaacaagggccccaggggg

SEQ ID NO: 196162 - RNA, 62 nt, Homo sapiens
ggaagaaaaacaaacacacgcaaaggagaaaggaaccgacagagccgagagcgccggaggac

SEQ ID NO: 196163 - RNA, 53 nt, Homo sapiens
gaaggaccaagaaaaggaccaacgcagccggagggaggacagacacaagaaaa

SEQ ID NO: 196164 - RNA, 59 nt, Homo sapiens
ggagacgcacgcgacaaagaagaagcaagacaaaggaagcagaagaaagaaggcaagcc

SEQ ID NO: 196165 - RNA, 83 nt, Homo sapiens
gcgcagcaacagaagagaggccagccgggaggacacacaagcggcccccaggggcgcgcagacccacgccaccccacccgcgg

SEQ ID NO: 196166 - RNA, 85 nt, Homo sapiens
gcccagacaccaagggagccagcggaggagcaagaagggccgaccgcgggccgcgcacccaccgccaaggacaaaaggagcccag

SEQ ID NO: 196167 - RNA, 75 nt, Homo sapiens
cagaaagaagcacgggacacagaagagcagcccgccgacaaggaccgccgaaggaggacaggaccccagaaaacg

SEQ ID NO: 196168 - RNA, 97 nt, Homo sapiens
ccaagcggcacgcaggcaacacgagccccagcaacccagaccccaaaagagacagacaggcgagcaaaaaaaacaagcccggaagcgcacaacaaga

SEQ ID NO: 196169 - RNA, 69 nt, Homo sapiens
cccggacgaacaaagaggaaagcaggcccccccaaaggaccagcccgaggggaagggggccagacaacc

SEQ ID NO: 196170 - RNA, 80 nt, Homo sapiens
cagccaaggggagaccacaccaagcgggagacacaccacgccaagggggcaaccaaaagccagaccaaaaggaaggacgc

SEQ ID NO: 196171 - RNA, 78 nt, Homo sapiens
ggagaagaggcaaagaaacaccaaggagaggagggggcccaagcacgccacagggagaccgcgccaaggaacgaagca

SEQ ID NO: 196172 - RNA, 72 nt, Homo sapiens
gagcgacaacaccacggcacaggcaagcaacaccacacaccaaaaaagcagaccccacagagacagaaagaa

SEQ ID NO: 196173 - RNA, 70 nt, Homo sapiens
ggggaccaggcccgggcgccgcaaaaggagaaacaacgaagcaagcccaagggcgcaggggcaacacaaa

SEQ ID NO: 196174 - RNA, 92 nt, Homo sapiens
gcagacccggggcccccgggcccccggaccagggagaccggccgggaacagacggacaagcagaccggaagaccgacggaagaccacacccc

SEQ ID NO: 196175 - RNA, 75 nt, Homo sapiens
gcgaagcgaacaaaaagcagcaaaccggaccaccccgaagaaagcacaggcgggcgacaaaccccgggggaccac

SEQ ID NO: 196176 - RNA, 74 nt, Homo sapiens
gcgaggagcaggaagagaaaccagaacccccacgaggaagaaaggccccggagagggaggcaccgggcacgcgc

SEQ ID NO: 196177 - RNA, 72 nt, Homo sapiens
ggcggcgcgcgccgggcgccggagacaaccagaagacgacagcacagccgccaaagcgacgaaaacacaagc

SEQ ID NO: 196178 - RNA, 53 nt, Homo sapiens
ggaaagcgcacaagaaacaggaacacgaaagaggaaaaacgcacaagaaaccg

SEQ ID NO: 196179 - RNA, 83 nt, Homo sapiens
caacaagagaaagacccaggaagcagaagaagcgaggagaagaagaggcaagcagaagaggaacagaagaagcagagcagaga

SEQ ID NO: 196180 - RNA, 73 nt, Homo sapiens
agacgcagggcgcccccgagaaaccaggcggggaacaagccagcagcccaaggagaagccccacagagcaagc

SEQ ID NO: 196181 - RNA, 85 nt, Homo sapiens
cagccccgagccaggcccgccgccgagcgagagcgagccagggaggcggcccccagcagccagagggaaggacaggagaggggcc

SEQ ID NO: 196182 - RNA, 55 nt, Homo sapiens
gagaggaacaggcggcgggcgagcccggcagacaaccggaaaagaagagcaaagc

SEQ ID NO: 196183 - RNA, 69 nt, Homo sapiens
caaccagggcggaggaaagacaccgcacccgaagagccggcacggagaaacaccccggcggaggcaccc

SEQ ID NO: 196184 - RNA, 77 nt, Homo sapiens
acagaagggccaagcccacgcagagcaaagggaaccaagaccaggacaaagaagacccggagagacaagccggagga

SEQ ID NO: 196185 - RNA, 73 nt, Homo sapiens
aggaccccaggggaacaagaggccacgcagagccacgccgaagagagaagaagcaaaccgggaccggaagcac

SEQ ID NO: 196186 - RNA, 52 nt, Homo sapiens
ccgggaccggcacaaggcaagccagaccgggagggagggccgaccgagggga

SEQ ID NO: 196187 - RNA, 66 nt, Homo sapiens
gcgcccaaaacaagcgaagcacccccggcgaggaaaagcgcaacaccggcagaacacgacaaaaag

SEQ ID NO: 196188 - RNA, 79 nt, Homo sapiens
aacaggaccaagaagaagaaccagcaaaaaaggagcccgcagggccgccaccagcacagggagggagaggagccagagg

SEQ ID NO: 196189 - RNA, 72 nt, Homo sapiens
ccagcccccgagaagcgggaacaggcgaggcgaagagggagagaacaaggaagacggcagacaacacagcgc

SEQ ID NO: 196190 - RNA, 46 nt, Homo sapiens
gacaccaccagcggccaaggccaacgccggacgggccaccacgccc

SEQ ID NO: 196191 - RNA, 72 nt, Homo sapiens
caaagacgagcagacacgcaaagaagcccgaggcgcaagagacaacagacaggacgcggcgccggagccaga

SEQ ID NO: 196192 - RNA, 71 nt, Homo sapiens
gaccaagaaccaggcggagcccggcacgggcaaacagagcaggcagggaaccgccaaggcagaggagcaga

SEQ ID NO: 196193 - RNA, 77 nt, Homo sapiens
acggcgacggcgcagacaccaggcaagaacaaggagggcgcacgacccccgcgacccgagaacgggacccacagagc

SEQ ID NO: 196194 - RNA, 96 nt, Homo sapiens
gcggagcgggcgccgcgggggggggcgcggagagaccagcgaaccagaagaaaaaaagaagagaaagcagcgaaggaaaggacaacccaaagcagc

SEQ ID NO: 196195 - RNA, 62 nt, Homo sapiens
ccggcccacaggggggggcaaacccgagagaacgggaacacccccagagaaaaacgcaccag

SEQ ID NO: 196196 - RNA, 86 nt, Homo sapiens
gcgggccgccgagcggacccggaccgggggccgggacccccgggagaggggcggaacacagcccacagcaaaggagccgccccaga

SEQ ID NO: 196197 - RNA, 78 nt, Homo sapiens
agaaaaaccgcaagaaaccaggcgggaaacaggggacagaaagcagcccggaagccggaaggccccccccgccgggag

SEQ ID NO: 196198 - RNA, 75 nt, Homo sapiens
agaaagagacaacgacagccaacagccagaggagcaagacaacaaaagggaaaaacggaacagagagaaacaagg

SEQ ID NO: 196199 - RNA, 68 nt, Homo sapiens
ccggaaccggaggagaagcccagggagcgcaccccaggaaaccaaggcaccaaaaagcacgaaaggcc

SEQ ID NO: 196200 - RNA, 53 nt, Homo sapiens
aggcacgccaacagacccagccggcgaccagaacaccgaaaacccccagcaca

SEQ ID NO: 196201 - RNA, 52 nt, Homo sapiens
ccgaaaacgaacccaaaggagagcccgaccaagagaacaaacccagagaagc

SEQ ID NO: 196202 - RNA, 72 nt, Homo sapiens
gccaagaagacacaaaggacggaggcacggaaaaacgcaggaggagaagaaacaggagaggaggaaacgcaa

SEQ ID NO: 196203 - RNA, 77 nt, Homo sapiens
gcagggcaaaggggggaagaacaaggacaccaggggggaaaaaccacacaggcaaagaacgcgcaaaacaggacgaa

SEQ ID NO: 196204 - RNA, 63 nt, Homo sapiens
cggcggcggcggcagcggggccgggccggagcgccacaaggcccacgcggaccggcagcgcca

SEQ ID NO: 196205 - RNA, 76 nt, Homo sapiens
accgcccaccgagacagccggagaagagcgaccagccacaagaacagcaacacgcagaagggagaaaccgacacgg

SEQ ID NO: 196206 - RNA, 80 nt, Homo sapiens
accgccacgacagcccaccaggccaccacgcggcgggccgggaacacgacacagaccccggccggaacccagggagacca

SEQ ID NO: 196207 - RNA, 78 nt, Homo sapiens
cgcggcggcggcgccgccgggcgggcggaccgagacaggggcccggcaccgcgcccgagcccacccacagacagaagg

SEQ ID NO: 196208 - RNA, 79 nt, Homo sapiens
ccggccacccaaagcacgggggcaacagagccacccggaggagaaggaggcaccagccccacagaagcagaaaaaccag

SEQ ID NO: 196209 - RNA, 83 nt, Homo sapiens
acagcccaccaaaaggaggagccaggcccccgccagcaagaccgccagaaaaaggaaacgagcacaggaccaaaaaggaaacg

SEQ ID NO: 196210 - RNA, 77 nt, Homo sapiens
gagaagccgcagcgggcccggaaagcccggcagaaaccaaaccccaggccaagggcagcggggaagaagaaaaggaa

SEQ ID NO: 196211 - RNA, 81 nt, Homo sapiens
aaagaacgacagaaaaagggaaccccaaagacaaaacacaaggcagaagccaaaacaagcagacgaaacccaaaagggaac

SEQ ID NO: 196212 - RNA, 52 nt, Homo sapiens
agaagaccacacccacgcagcgaagacaggaagggaaggggcggagacgggc

SEQ ID NO: 196213 - RNA, 71 nt, Homo sapiens
gagccggagaagagggggcccggggggaggaggggcaggcccggcgggcagagagaacacgacaagcacag

SEQ ID NO: 196214 - RNA, 80 nt, Homo sapiens
ggaccaccagcacggacacaagaggaagcggaaaccagggccacagcacgcagccccaggcagaccccacggaagaacca

SEQ ID NO: 196215 - RNA, 72 nt, Homo sapiens
ccaaagaggacgggacacgggccaagggagcgaaaagaacccccaaaagggaacagagacgcaggcaagagc

SEQ ID NO: 196216 - RNA, 61 nt, Homo sapiens
ccgcccccacggagccgccaagcaggagcccagaggaggaggcacagggggaacagagagg

SEQ ID NO: 196217 - RNA, 78 nt, Homo sapiens
cgaagaacgcgcggacccagccgcccggagcaagacccgaacgccgaaagaagggcaagaggagcccaaacgcaccca

SEQ ID NO: 196218 - RNA, 56 nt, Homo sapiens
cagggcgcgagggcgggggcagcggcagaggcgaaaaaaccagaagcgggacaggg

SEQ ID NO: 196219 - RNA, 45 nt, Homo sapiens
cgcagagggcggagcggcagaggaggcgcggaggaggaggaggaa

SEQ ID NO: 196220 - RNA, 78 nt, Homo sapiens
ggccgaaggcgggggaggagacccacccaaacacgggcgacgcacgaggcacacaggaaggaggggagcagggacgcg

SEQ ID NO: 196221 - RNA, 69 nt, Homo sapiens
cgggcgggccggccccggcggccagcccgcggcaccccgcggacagggcggccaaggccaccgagccac

SEQ ID NO: 196222 - RNA, 55 nt, Homo sapiens
acccggaagagaagagggggcaagaaagaacagccagcaaagacaagagcagacc

SEQ ID NO: 196223 - RNA, 56 nt, Homo sapiens
gaaccaagccagccgccgcagcacgagcagacacaggcaagagggagaagacagcg

SEQ ID NO: 196224 - RNA, 69 nt, Homo sapiens
ggagacgggggaagaggagaacgcaagcaggcccaggcagagccgggcacagaagcggcgggcagaagg

SEQ ID NO: 196225 - RNA, 80 nt, Homo sapiens
gaaggacccccggccaccggcggcaagccagaacccaacaaggaggccagggcggccaggcgaccaacgacgaagagcag

SEQ ID NO: 196226 - RNA, 73 nt, Homo sapiens
aggcaaagagcgagaggaacaggcaaaaaggcgcggggcacaagcagcaagacagcgcgcgggccacagaaca

SEQ ID NO: 196227 - RNA, 76 nt, Homo sapiens
caaaccaacacgcagaagaggaaagcgaagccaacaaagaaaggaccggggcaaaacggccagaaggcccaagccc

SEQ ID NO: 196228 - RNA, 65 nt, Homo sapiens
aggcgaggcgcagaaggggacagaacaggcccggcagcgccaggagccgagccggccaccaaagc

SEQ ID NO: 196229 - RNA, 51 nt, Homo sapiens
aaaaaacacagccgacagacgccaccaaaagcaccaggcgcgaggcagaaa

SEQ ID NO: 196230 - RNA, 69 nt, Homo sapiens
cacgggaaaggccagggcccagaaaccagaccccaagaccccagacgcgaggaagaggaggcaccaacc

SEQ ID NO: 196231 - RNA, 74 nt, Homo sapiens
cagaccccaagagaaaggagccccccaaggcgaaccacgggaacaaaggcgaggacaaggagggcaggggacgg

SEQ ID NO: 196232 - RNA, 76 nt, Homo sapiens
gcaacgcgcgcacacggacgagaacggagagaacgcggaaggagacggagaagaacccccggaaagagccgcccga

SEQ ID NO: 196233 - RNA, 72 nt, Homo sapiens
aaggaaccacccaggaaacagcgcaagcaacaaacaacaggcagacgaaagaacggccaggcccccaagggg

SEQ ID NO: 196234 - RNA, 61 nt, Homo sapiens
aagccgacaaccccagaaacagaagaacggaccgaagccaaagaacaagagcgcagggaca

SEQ ID NO: 196235 - RNA, 81 nt, Homo sapiens
ccagcacacagccagagagccaggaagcaaggaggccgaccaaagcaacaaggaaccccagaaccagaaccagagaaaccc

SEQ ID NO: 196236 - RNA, 74 nt, Homo sapiens
accgcgccggcccagcaccccgagaaccgcaggagccagagaccgggaacaccaccaggagggccggccggcgg

SEQ ID NO: 196237 - RNA, 70 nt, Homo sapiens
ccggcggcagaacccccggacccgacaaacggacagcaggaccagaacaaggagaagcaccgggcaggac

SEQ ID NO: 196238 - RNA, 79 nt, Homo sapiens
cacaaggccacgcacggagcaggcggagggaagcgaggcagaaaaggcgggaagacagggaagccaaaggcagagcaag

SEQ ID NO: 196239 - RNA, 62 nt, Homo sapiens
aacccagccgggaggccaagggcacaagcccacccacagcaggaaggaccaaaggaacacag

SEQ ID NO: 196240 - RNA, 79 nt, Homo sapiens
gcggcgcagcgcccgccgcggcccgggcccccccgccggaaacagccaccaggagagaacgccgcgccgcgcgacaacg

SEQ ID NO: 196241 - RNA, 81 nt, Homo sapiens
cgccccagccagaagggcacgccagcggcgcgagaggaccaccggggcggcccggcggagcaacccccagccacaacgcga

SEQ ID NO: 196242 - RNA, 74 nt, Homo sapiens
cacgccccggaccaagcccgggagcaaggagacgccgcacccaggcggaggcagggggaccggcgcgcaacccg

SEQ ID NO: 196243 - RNA, 78 nt, Homo sapiens
gcaggaagacggccaggccggccggccggacaagcccaggagccgaccagagagcagccggggccaaagcgaccaacc

SEQ ID NO: 196244 - RNA, 76 nt, Homo sapiens
ccgaaacgaaggcacagcgggccgagaaagcaaacagaaaggccaaaacccccaagcacagagagaccaaaacaac

SEQ ID NO: 196245 - RNA, 76 nt, Homo sapiens
gaccagaagccagagcgaggacgccggcagacacggccacacagaccgaacacaaacagccaacaggacaaaggac

SEQ ID NO: 196246 - RNA, 76 nt, Homo sapiens
accggcaggaaccaccaggacagaccccagcacaagagaaaacagacagcagaacgaaaagcccagagaccaaaga

SEQ ID NO: 196247 - RNA, 57 nt, Homo sapiens
gggagaggagcagagacaggagcacagggagaaacccagcacaacaggacacacaac

SEQ ID NO: 196248 - RNA, 111 nt, Homo sapiens
ccgccgaggccgggggggacgaaacccaacaaaggaggaacacgcagagaaggaaccagaaagagacaagaagggaccggcgcgggggacccaccacccccgaccacagcc

SEQ ID NO: 196249 - RNA, 79 nt, Homo sapiens
cggcgggcccccgcccgggcccccgaagaggcggcgccagacagggcaagccagcgacgagacaccagaggaacacaca

SEQ ID NO: 196250 - RNA, 84 nt, Homo sapiens
ccagggccaacagggacagccgcaaccaggaagaccaagaccccgcagaggccagagaggacaggccagaccccagcacggagc

SEQ ID NO: 196251 - RNA, 83 nt, Homo sapiens
gcagcgcccagcagcgcagagcgaagaagcaggggagaggccgagcgaagaaccagcggccaaggaggccagaccaagaccag

SEQ ID NO: 196252 - RNA, 78 nt, Homo sapiens
gagcccccggccagaaggacaccagaggaccagaacccacgagaaacagacgagccaaccagaccccaggagccaaag

SEQ ID NO: 196253 - RNA, 66 nt, Homo sapiens
ggacggcccaaacacgcccagaggaggggaacaggccggcgaacacaaaggggacgggacgaggaa

SEQ ID NO: 196254 - RNA, 74 nt, Homo sapiens
gaggccggagacgaggggacccaagcggagacagcaccgacagaaggaaagccgccaggaagcacggaggaaag

SEQ ID NO: 196255 - RNA, 78 nt, Homo sapiens
ccaccagagacacagagaaggaggaaacaggccccaggcccgacggccggccgacggaaagcacccgaggagaaaggg

SEQ ID NO: 196256 - RNA, 71 nt, Homo sapiens
gagccgaaccaggccaacccagaaaggcccgagacaccccgcaacccagccgaaaacccaaagacagcgcc

SEQ ID NO: 196257 - RNA, 83 nt, Homo sapiens
cccccccgggacccaaggccacaaaggagagcccgggagagaagggaaccaggagccgacaacaacccgacgcaaggcagcca

SEQ ID NO: 196258 - RNA, 76 nt, Homo sapiens
ccacgcgggcgagcggcggggagcggcgaagccgcgggcgaggaacccccgaacgcaaagccaccgacggacaaga

SEQ ID NO: 196259 - RNA, 65 nt, Homo sapiens
agcggccgaaacagaaaacaagagaccacagaaggccaaagccgacagaaaaggaagagacccag

SEQ ID NO: 196260 - RNA, 82 nt, Homo sapiens
acgccgcggcggggggggcaagagccgcgccggcagggaacgcagcccgggaccgggagcccgggaccgggagccggggggc

SEQ ID NO: 196261 - RNA, 91 nt, Homo sapiens
gagggaggaggacaacaagacgcgccgacgcgaggccaaaggagcccgcacagcgaaagaagagacaagaaaacagagcggagagccgcgc

SEQ ID NO: 196262 - RNA, 64 nt, Homo sapiens
gaagaggcgaggagcaacccaacaacggcaagcggagaagagcaaggccgaaccgagaggaagg

SEQ ID NO: 196263 - RNA, 74 nt, Homo sapiens
cccgcagccacagagaggaaccccaagccaagcccaagacaaaaacgcgggagagacggcaggacacgagcggg

SEQ ID NO: 196264 - RNA, 77 nt, Homo sapiens
acaaggcccaaagaaaagggaccagaagaacaagaccaagagccacaggaccgcaggcaccgggaaaacgcagagga

SEQ ID NO: 196265 - RNA, 97 nt, Homo sapiens
cccagagcgcccacagagaggacccaagagcacagagccacccgacccaggcagagcacgggaaggagaagcacagagaagacagcacaccgagaaa

SEQ ID NO: 196266 - RNA, 75 nt, Homo sapiens
cggaaaaaaacagagccgagaaaggaagggcgggaccaacagggagccagaggaaacaaagagaaacggggacac

SEQ ID NO: 196267 - RNA, 61 nt, Homo sapiens
ggcggacacacagacccccaccaagcaggagacccccgagacccacgcggagcccgcggag

SEQ ID NO: 196268 - RNA, 58 nt, Homo sapiens
acacagcgacagcacaagaagaaaagcgagacaagaaggaagaaggcacccaacagaa

SEQ ID NO: 196269 - RNA, 67 nt, Homo sapiens
gggcgcagcggggacgcggacgcacggccgaacgaggcggggggcccgagaccacaccacacccacc

SEQ ID NO: 196270 - RNA, 54 nt, Homo sapiens
ggccgcagccgcgccgcgaggcgcggcccgccgcgggccgcagaggcaacagcc

SEQ ID NO: 196271 - RNA, 75 nt, Homo sapiens
cggccggggccgaaccgaccagaccagggcccggccaggccccaccgccacaagcaggggaacaccgccaacccc

SEQ ID NO: 196272 - RNA, 55 nt, Homo sapiens
gagaagagccagagcgggaggacgacgagagaggcacgccggcggcccaacccag

SEQ ID NO: 196273 - RNA, 78 nt, Homo sapiens
ccccgcgcagcccagccgcccgggacgcgccgcccgcggccggggaccgacagaaccgagaagcaggccgggccaaga

SEQ ID NO: 196274 - RNA, 82 nt, Homo sapiens
gagcggacccggaccgggggcgaagggagggccgccccaaccgacgcaccagccggaggaggagggacagggccaggaacga

SEQ ID NO: 196275 - RNA, 92 nt, Homo sapiens
ggccgggaggggacggccgccggagccgcgaggccaagacccaaagacaggaccacgcaccagcagagaaggaaagcaaaccgaagcaggcg

SEQ ID NO: 196276 - RNA, 72 nt, Homo sapiens
aaagaggagagaagccaaaaaaggacggcccgccacgggccccgcagccgcgcccgagcgcccgagcaggga

SEQ ID NO: 196277 - RNA, 54 nt, Homo sapiens
aagcaggaagggaccagccagacacacaacaccccaggggaagagagaaaagac

SEQ ID NO: 196278 - RNA, 63 nt, Homo sapiens
cgccagaagaacgaggaggagaaggagaaacagcacccaggacacccaaagagcggaaccaaa

SEQ ID NO: 196279 - RNA, 79 nt, Homo sapiens
gaaaagggcccgagggggcaacacacccaccagagacggaagagagaagaacgagagccaaaggaccgcagacaggaaa

SEQ ID NO: 196280 - RNA, 80 nt, Homo sapiens
gcaaggacccaacccaggagaaaaaggaagggggagcaacagacaagcccgaaaggaacagcagcaggaacgaaacccca

SEQ ID NO: 196281 - RNA, 68 nt, Homo sapiens
gggacacacaaccgcccagccggcgagggacgccgcaggcaacacccaggaccagcccgcgcgggcca

SEQ ID NO: 196282 - RNA, 76 nt, Homo sapiens
gccggggcgcgcgcgagcagcccccgcagggaagaaccggcccgcgggccggccccgcccaacagagcacggcacc

SEQ ID NO: 196283 - RNA, 80 nt, Homo sapiens
agcagcgaggcagcgagaaacagaaaacaagagagaaaagaagcgaaagagcaagggaacagcacacgggcgacccggga

SEQ ID NO: 196284 - RNA, 88 nt, Homo sapiens
aggggaaggacgggagacacagacacaccgggaagaagcccagcggaggcgaacggcccccgccaacacgaggaccccacggagaggc

SEQ ID NO: 196285 - RNA, 55 nt, Homo sapiens
ggaggccccaagggcgagcgggaccgagagacagagccccagcaacggaaagcca

SEQ ID NO: 196286 - RNA, 53 nt, Homo sapiens
accaagggaaggccacaaagagaggcagcaagaagggaaaacaaagcaagaca

SEQ ID NO: 196287 - RNA, 58 nt, Homo sapiens
caagaaacaccaccaacaaaccggcgcaccggcccagaaggacggcccgggcagagca

SEQ ID NO: 196288 - RNA, 89 nt, Homo sapiens
cggcgcaagcggcgcgccagagcggcacgagggggcggcaccacgccccccccgccccgaggcccggaagccaggcgaggagcccagga

SEQ ID NO: 196289 - RNA, 67 nt, Homo sapiens
cgccacagccaccagagccggcagcaaagagggaacaggagagcgagaaaacggcgccaagaaaaga

SEQ ID NO: 196290 - RNA, 74 nt, Homo sapiens
ccacagaacaaggacacgcgaaaaaaaagcccaggaagggaaagcaaggaagaccgacaagcaggcagcgggac

SEQ ID NO: 196291 - RNA, 72 nt, Homo sapiens
ggagaagaaagcagacaccacccaacaagcccggaccaggacagccaggcccagcggaagaacgccgcagag

SEQ ID NO: 196292 - RNA, 64 nt, Homo sapiens
gggacaggacagcgagcgaggacgaggaacggcgggaggcaccgccccaacccccccccgcccg

SEQ ID NO: 196293 - RNA, 83 nt, Homo sapiens
aagaagaagaaggcgaaggaccccaacggggaggccaacggaagaagcacaggggcaggccgcggccagaaaagcggcccacg

SEQ ID NO: 196294 - RNA, 71 nt, Homo sapiens
accagcaacaagccaggaacagagccgacaggcacgaagaaaaggaaaacccacgcgggggcgcgggagag

SEQ ID NO: 196295 - RNA, 58 nt, Homo sapiens
aaccgggagaggaaccggcccagagcacagaaggcagggagaccccaaggcaaaacca

SEQ ID NO: 196296 - RNA, 80 nt, Homo sapiens
gcagaagaggaaacgacagcggcaaaaccaaggaagggaagccaaagcccaaaaaggagccagcaggccacaacacaaag

SEQ ID NO: 196297 - RNA, 71 nt, Homo sapiens
caaggaggaagaggccagacaggacaaggcgaccagaagacggaagaagcggcggagcaggacacgaacca

SEQ ID NO: 196298 - RNA, 81 nt, Homo sapiens
gggcgccccgacagcgcccgggggcgcacagccacgcagcagaccccgaccgccgcgcccggagggaaaacgacaacgcca

SEQ ID NO: 196299 - RNA, 78 nt, Homo sapiens
caaggcaccagccaaaacacacaccggccaaagagcggaaaggcaaaaggacagaaagccaacaggcagaccagagac

SEQ ID NO: 196300 - RNA, 60 nt, Homo sapiens
cgaccgaaaccacagcgaagggaaaagaaggacgcccacaggggaaacggagacagaaac

SEQ ID NO: 196301 - RNA, 86 nt, Homo sapiens
cagagcccagggcaggacaccgacaggaacagggaccacggggagaccacagcagacacagagacgggcggacacaggccgacagg

SEQ ID NO: 196302 - RNA, 73 nt, Homo sapiens
gaaaaaagagagggggggaccgaccgcaacagaacggacccggacggcaagagaggcgaagagaacgagaaag

SEQ ID NO: 196303 - RNA, 80 nt, Homo sapiens
gcgaaggggggacacaccgcaagacccaagaccgacaaagacaagggaggcgaggacggacaaaaggaaacggacgggag

SEQ ID NO: 196304 - RNA, 70 nt, Homo sapiens
gcaccagaagcccaggcaggaaccaccaccacagacccagacaggcgggaccagcagagcaaaagaacgc

SEQ ID NO: 196305 - RNA, 64 nt, Homo sapiens
gcagcaacggcgacaccagcaaggaccaaggagcggcgcggggaccaaacccggagccagccac

SEQ ID NO: 196306 - RNA, 58 nt, Homo sapiens
gagcccagccacagccaccggacccccaggcaggacagcccaggacacacacgaaacg

SEQ ID NO: 196307 - RNA, 74 nt, Homo sapiens
aaaccgaggaaggacagacggccagccagcacaaacgaacaagccggcgaggagccaggccaccaaaagacccg

SEQ ID NO: 196308 - RNA, 76 nt, Homo sapiens
agcgccgcaccgacaacacagcccaggcaacaggccgaaagagccgcagacgcacagcaaccaccggacccgaagg

SEQ ID NO: 196309 - RNA, 48 nt, Homo sapiens
gagcacaccacaggcaagcccgaggggaccccacggacgccaacgagg

SEQ ID NO: 196310 - RNA, 76 nt, Homo sapiens
ggccagagcccggagcaggaaaaacacagagacagacggcggcaggaaaggaggcccaagaggcgaaacgcaacac

SEQ ID NO: 196311 - RNA, 74 nt, Homo sapiens
caaaaccccgacaagccaggagcgcggaacccgggaccagacagccacagggaaaggaccaggaccgccccccg

SEQ ID NO: 196312 - RNA, 59 nt, Homo sapiens
aacgagaccagccaggcccagccccgaagggcacaccggaggaaaccagccagcaacca

SEQ ID NO: 196313 - RNA, 81 nt, Homo sapiens
gcaggaggcggaggcggccgcggccgggggggcccagcacgcaaggcaggaagaggcagaggaagaggaagaggaagagga

SEQ ID NO: 196314 - RNA, 102 nt, Homo sapiens
aaagcagagacaagagaaggaagcaaacgccggacagaacaagaagacagccaaggccaggacagcaaacagcgcacggaaagcacaccaaagacagccaac

SEQ ID NO: 196315 - RNA, 54 nt, Homo sapiens
ggggaagaagcacagccacgagccaacacaggaaagggccgagacagggcgacg

SEQ ID NO: 196316 - RNA, 68 nt, Homo sapiens
aagcccacgcagagcaaaggcaccccccagacgaggaggcggcgcccacccgcgcaccggacaaagac

SEQ ID NO: 196317 - RNA, 76 nt, Homo sapiens
caacgcagcaacgggaaaggggaaagggaggcaacaacgggcgaaggaacaaaagacgcaagaaaacgagagaaac

SEQ ID NO: 196318 - RNA, 76 nt, Homo sapiens
ggacaggaagcagcggaggaagaccgagacggccagggcgcagaagccgggccccccggacagccagagaaccaaa

SEQ ID NO: 196319 - RNA, 76 nt, Homo sapiens
gaacgccgcaccacgaaccagaccaagcggggccgccgccggcccccaaagagccgagagcagcccgcccggccgc

SEQ ID NO: 196320 - RNA, 51 nt, Homo sapiens
ggccaagcaccacagcgcaccaggacccagccggccggcaaaaaagcacaa

SEQ ID NO: 196321 - RNA, 89 nt, Homo sapiens
gcgaacggggagccgagcggagcgccgcggcgcagccaggacagagcgggagccaccagcgccaaagggaagccaggagcccgggggca

SEQ ID NO: 196322 - RNA, 77 nt, Homo sapiens
aaggaaccgaaaggcaacggcagcagcagaaagggcagcaagacacgaagccgagaaagagcagcgacaacaaggag

SEQ ID NO: 196323 - RNA, 56 nt, Homo sapiens
aaaagcagcggacgaaggaccaccaaccaaaggaagcgccaaagaagcgacgcgaa

SEQ ID NO: 196324 - RNA, 89 nt, Homo sapiens
accgaaccccagcagaccgacgccgcccgccgagcccgaagccacacagagagaaccagaccacggcccggggagcccagaaggggaca

SEQ ID NO: 196325 - RNA, 86 nt, Homo sapiens
agacggagggcaccaccggcccagagcgaggagcaggcaaccaaaggaggacgcaaagcgccaggacaagccaggaagagcccaga

SEQ ID NO: 196326 - RNA, 74 nt, Homo sapiens
ccgagagccccaaggacaagagccccgcgagaacggggcaccaccaagaccccgcggggaccgaagagggcacg

SEQ ID NO: 196327 - RNA, 78 nt, Homo sapiens
caggcggaggccccagggaagcgcagaaagcaggcgaacccgcggcgcaaaacggcacaggaagagggcggcacgcgg

SEQ ID NO: 196328 - RNA, 84 nt, Homo sapiens
ccggccaggaacagggacagcacccaccccggagggggaccacaagacccacgacagggagccgcccaacccggcccccgaggc

SEQ ID NO: 196329 - RNA, 78 nt, Homo sapiens
gaagcacccccagcggggaccgcccgggacaacagcgcggggcacagggacaacaccgggaacgcgagcccagaaccg

SEQ ID NO: 196330 - RNA, 54 nt, Homo sapiens
gacacaaccagcaccacccaacacagaccgaacaacaaaccccgaaccaaacag

SEQ ID NO: 196331 - RNA, 90 nt, Homo sapiens
ccaccaccacgccagccgcaccagccgcccaagccgcacagccgcggcggcagcagcaggagagcccacagcccccacccgagcccccgg

SEQ ID NO: 196332 - RNA, 83 nt, Homo sapiens
agaaaagaaaaaccacaagccaacgaaaggggaaaaagaaaagggcgaagacccgaagcagcgcaggaacagaagagaagacc

SEQ ID NO: 196333 - RNA, 87 nt, Homo sapiens
ccgcgcaagcggcacaaaggaggaaacagaaacagggaggcgacaagagcagccggccccggcagcgaagcgaaccgaaggcggaac

SEQ ID NO: 196334 - RNA, 55 nt, Homo sapiens
aaaaaaaccgcagggcggagagaccaggggagaagccccccgcggggaagaaccg

SEQ ID NO: 196335 - RNA, 72 nt, Homo sapiens
aaggcaagcgcacacagcagggggggggaggcagcaaaggaaggacaaaaccgaaagagcaagggccgaaaa

SEQ ID NO: 196336 - RNA, 75 nt, Homo sapiens
ccaaaaaagggccagacagaaggaagggaccacagaccagcacgccggcgccacgaaccgagcgacaggacgggc

SEQ ID NO: 196337 - RNA, 71 nt, Homo sapiens
gacgagcgcggcaaggccggcaagccaacaccagcagggaaaacagaaccagaggcagggccaggacaccg

SEQ ID NO: 196338 - RNA, 64 nt, Homo sapiens
cccccggagacagacgcagggcgcccccgggcaaccacacccgggcagcacaggcagcacgcaa

SEQ ID NO: 196339 - RNA, 77 nt, Homo sapiens
acggaggaagaaccgcacaaagacggcgccggggcacccgaggaggaagagggcagggcccacggaaagaagggaaa

SEQ ID NO: 196340 - RNA, 74 nt, Homo sapiens
gaagcaagagacgaagggaccgacgaggagggccaagaacccggaggagagcaggccggacacgcacagcagaa

SEQ ID NO: 196341 - RNA, 72 nt, Homo sapiens
ggaggaacggaggaagaaccacacacccccaaaccagagaagacgcgcaagaccgagcaagacgccgcagcc

SEQ ID NO: 196342 - RNA, 69 nt, Homo sapiens
caaagaaacaccggacagacagaacaagccagaagggagccggagggaacagcagggcaaagcaacagc

SEQ ID NO: 196343 - RNA, 75 nt, Homo sapiens
aagaggagagaagaagaacagagagaacaaaagagcagaaaaaaggcagcggaaagaagaaaagaaacggcccac

SEQ ID NO: 196344 - RNA, 97 nt, Homo sapiens
acccgacacaccaaggccgagggcaagcagacacagaacgcaggggaggacgcgccaaggcgcagagaacaccgagcggagcaaggagaagccgccc

SEQ ID NO: 196345 - RNA, 34 nt, Homo sapiens
cccgcccagccccgagagggccagagccggcccg

SEQ ID NO: 196346 - RNA, 60 nt, Homo sapiens
ccaaagggagagggaagccacaacaagccaaagaagaaggcaaggacggggacacaagac

SEQ ID NO: 196347 - RNA, 81 nt, Homo sapiens
gggaggacgggccaccgcggcgcggcgccagggaaggaccgcacacaagccgcaccggacacgcgcggagcgggaggaccg

SEQ ID NO: 196348 - RNA, 52 nt, Homo sapiens
acaggggagagacggaaggggcgacaaggcccccccgggggcgagaagaaac

SEQ ID NO: 196349 - RNA, 81 nt, Homo sapiens
gccgaccgagacgggcggagaggagaaggaggcgcgccaaccggcagggaaacaccaagacgaagagcaacccagaaacag

SEQ ID NO: 196350 - RNA, 80 nt, Homo sapiens
cccggcccgcacgccaagcacggggggcaggccaccggacgagaacccccgcgaaccagaggaacccagcgagcgagagc

SEQ ID NO: 196351 - RNA, 75 nt, Homo sapiens
ccggcgccgccagccccggcgagacccggcccggggggggccccagcccggccgaacgggcgcacgacacaaaca

SEQ ID NO: 196352 - RNA, 71 nt, Homo sapiens
gggccgaggccgggacaagcagcaaggcgcggggggccacgcgaggccgaggccaagaaagccgaaggaaa

SEQ ID NO: 196353 - RNA, 38 nt, Homo sapiens
acgcccggacaagcagcacaggcagcccaacgcgaaca

SEQ ID NO: 196354 - RNA, 84 nt, Homo sapiens
cacggaggagacccccaccgaagccagcccgcaccgccgggccaccacaaggcacaggcacacacgaacaacagaggacaggcg

SEQ ID NO: 196355 - RNA, 83 nt, Homo sapiens
gccgggaccaggcccgggggcggcggccacgccaaggacggggcagcggcagccacagaaggcagaacccaggaaggggaaaa

SEQ ID NO: 196356 - RNA, 81 nt, Homo sapiens
accggggccccgggggacagacccgaggccccagacccccgagccaaacaccgggcgggccccccgggccggccgccggac

SEQ ID NO: 196357 - RNA, 38 nt, Homo sapiens
aggacacggccggaccaggaacaaaaccagaggcaaac

SEQ ID NO: 196358 - RNA, 75 nt, Homo sapiens
agacgaagcagaagggacaggaaacagcaaaaaggaaaccacaaccaaggagggacagaaaggcagaagcaaacc

SEQ ID NO: 196359 - RNA, 69 nt, Homo sapiens
ggaccgggacacgaaaacccagaggagagagacgaggaaagaaggaagcagcgaagcagggaggaagag

SEQ ID NO: 196360 - RNA, 83 nt, Homo sapiens
cagagagaaagaaccccagagcagagaaaaaccaaacggacaaaccgggagcaaagggaaaaggagaccggaaacgagagaaa

SEQ ID NO: 196361 - RNA, 82 nt, Homo sapiens
ggggaccggaaggcgcgggcaggagccggcgaggagcaccccccgccggaaagaaaaagcggggaaggggggcaaaaaaaag

SEQ ID NO: 196362 - RNA, 76 nt, Homo sapiens
ggaccggcggccccagcaacacggcgcgaggcaaggccagcggaagaaaaacgcccaaagacaggacacggagagc

SEQ ID NO: 196363 - RNA, 75 nt, Homo sapiens
acaaaccacagccaacacaacgccaacagaaaccgcgagcaaagcgcacaggcgccgccccagaagagaaggaag

SEQ ID NO: 196364 - RNA, 69 nt, Homo sapiens
cgagcgcgaacagaagagaggaagaaaggacagggagagaagccaagaaagacagcaggccgcccgcag

SEQ ID NO: 196365 - RNA, 36 nt, Homo sapiens
gggccggcgaaaaaccgcaccagagacacgacgcaa

SEQ ID NO: 196366 - RNA, 77 nt, Homo sapiens
cgcagaagggcggggcagcagagccggaccggggggccccacggagcggaccaggaggagcgaggcggcccccaagc

SEQ ID NO: 196367 - RNA, 80 nt, Homo sapiens
cgcgacccggaaccgccgggccgaacagcagacgccgcggagaacacacaacccacggagaaccacggggaccaagaagc

SEQ ID NO: 196368 - RNA, 76 nt, Homo sapiens
gggggcgggggcgccagcccaccaagaagggccgagcacagcaagcaaaggcggaagacagaacagaagcacaaca

SEQ ID NO: 196369 - RNA, 78 nt, Homo sapiens
accaacacacacgacaaacccacgccacaccgggcacgagcggaaggcagggcgggaaccggcaaagccagccagggg

SEQ ID NO: 196370 - RNA, 75 nt, Homo sapiens
agcccccgagagcggaacagaagcgagagccgccacgagaaagcaacaacagccaaaagcggggaccccgaccgc

SEQ ID NO: 196371 - RNA, 79 nt, Homo sapiens
gcgaagcaggggccgcgggaagccgaacacccaacaagaaggcaacgacaaacagccaagcaagccccagggccccgaa

SEQ ID NO: 196372 - RNA, 81 nt, Homo sapiens
gcaccagcgaggcaggcgaaccgggcaccgagagcaagaaaaggcacgaccggagacgagacacgcaaccgaaggaagggg

SEQ ID NO: 196373 - RNA, 79 nt, Homo sapiens
gggcgcagcaaagggagcggagcgcaggcgaggcggcaccggggaacagcacgcacccaggggaagacaagaacagcgc

SEQ ID NO: 196374 - RNA, 87 nt, Homo sapiens
agaccggccccacccaaccacagaaagagaaccacaggcgaggacagaagccgcccagcggagaagcagcaggcacaaggacgagag

SEQ ID NO: 196375 - RNA, 75 nt, Homo sapiens
cgcaccaggccaaagaaagagaagcagcagacgccgggaagcgcacccacccgccaacgcgaagcaccagggaag

SEQ ID NO: 196376 - RNA, 69 nt, Homo sapiens
aagcagaggaaggcagaagaaaaagacccccggagcagagggggagagggcaaggaggggaagaccgcc

SEQ ID NO: 196377 - RNA, 81 nt, Homo sapiens
cccccaggagaaacgaggagcgcggccaccccccggagccgaacaagcaaccggaaaagcaaaggcaagggcagcaccagc

SEQ ID NO: 196378 - RNA, 88 nt, Homo sapiens
ggacccagcgggcgccgcacaccacacccaaccgccacggaagggcgaagaaaggaacccgcagcccccagcacggacaggaaaacaa

SEQ ID NO: 196379 - RNA, 74 nt, Homo sapiens
agcccgacacgcgaaacacgagacccggaacagccgagagccaggaggaccccgcgcccacccaacaaggcagg

SEQ ID NO: 196380 - RNA, 54 nt, Homo sapiens
gacaagcgaacccaagaacaggagggaggccgagcccgaaacaaccccaccggc

SEQ ID NO: 196381 - RNA, 54 nt, Homo sapiens
ccaaacaccgacggcagcagcaaaccaccccgcaacgaacccaaaagaaaagag

SEQ ID NO: 196382 - RNA, 86 nt, Homo sapiens
gaggaggccgccagcagaggcggagcccgcagaccgcagaaggccggagacaccagcagaccacaggcggagcagcagcagccgga

SEQ ID NO: 196383 - RNA, 72 nt, Homo sapiens
gaagaggaaaaacacgacaaagagcggaccaacagcgcacccaacagaaaacacacgcccgcgcgcagaaaa

SEQ ID NO: 196384 - RNA, 49 nt, Homo sapiens
agggacccgggacagcggagaggcgacaaaaccagacccccgacgccgg

SEQ ID NO: 196385 - RNA, 83 nt, Homo sapiens
ccgccggccaagccagccagcgccgccaaggccgacggccccagcccgccaggaccgaggacggacaccccccaggcacagcc

SEQ ID NO: 196386 - RNA, 65 nt, Homo sapiens
gcgaccacaccagacacaggacgaaaaggcccaggccggcggaaaacccaccgccaaaagagccc

SEQ ID NO: 196387 - RNA, 50 nt, Homo sapiens
ggcgcacgccgcgagaggcgcccagcgaccagaagagaaacaacgcagac

SEQ ID NO: 196388 - RNA, 74 nt, Homo sapiens
ggccaccccacagacgggaaagcaggcaaaaaagaaccgaacaggaaaagccaagaaaacaaaccagaaccgca

SEQ ID NO: 196389 - RNA, 70 nt, Homo sapiens
gccaaaaaaacagaggaaaaccagagaccagggaaagaaacagaaggccgaccgggacaagcaggaggag

SEQ ID NO: 196390 - RNA, 78 nt, Homo sapiens
cgcccagaagcaaccgcccacagcacggcggggccgcccagcgcaagagaaagggggacacgcaagagacgcaccgag

SEQ ID NO: 196391 - RNA, 72 nt, Homo sapiens
agccgcaacaagaaggaaagccaagcacaagaccagccaccggggccaggaccggaagaacaggaagcacaa

SEQ ID NO: 196392 - RNA, 81 nt, Homo sapiens
cagacgaccccacccgcgccgcgacccgacacgcacgagaacccccagcaacccaaccgaccggagaacgaggagccaaca

SEQ ID NO: 196393 - RNA, 77 nt, Homo sapiens
ccggggaccgaccggggaccccgccgaagagggcaggaaaaggaggacgagccacgggagaccaggagagggagccg

SEQ ID NO: 196394 - RNA, 50 nt, Homo sapiens
caccgagcgcggagcagagaagaagagacggcaccggccaggccagcagg

SEQ ID NO: 196395 - RNA, 74 nt, Homo sapiens
ggcaaagacagagggagggaaaaaaaaaaccaaggaagcacaaaagagccaggcgagaacaccgagcaaagcca

SEQ ID NO: 196396 - RNA, 77 nt, Homo sapiens
aggcggagccgaccgggccagccgaacacaaccccagagccggcagcgggccccccgccgcggcccaccaccggagc

SEQ ID NO: 196397 - RNA, 76 nt, Homo sapiens
aagggcaaacccacacggcaccaaagcccaagcagaggacacacgaacgagaacccgggaggagaaggacaggaaa

SEQ ID NO: 196398 - RNA, 72 nt, Homo sapiens
gcagcgaacaaggagaaagccacaacagggcggcaacaggggcgagaaagggggcgacaggagacaagagag

SEQ ID NO: 196399 - RNA, 37 nt, Homo sapiens
ggccagacacaaagacccagagggcaccaggcgcgaa

SEQ ID NO: 196400 - RNA, 68 nt, Homo sapiens
ggacggacgcagagacgaaggaggagaagaggagcggaggacaccccggagaggacgggaggacggca

SEQ ID NO: 196401 - RNA, 55 nt, Homo sapiens
cccgagcacaaggcaagagaccaaccccagccccgaaagccgaagaagacccagg

SEQ ID NO: 196402 - RNA, 75 nt, Homo sapiens
gcgacgcaccgagaaaggaaggaaaaccgacgaaaaaggcgacggcggagacagaagagaggagagcccacaaac

SEQ ID NO: 196403 - RNA, 84 nt, Homo sapiens
ggaggaggaccccgcggaggaagaggagccggacgaccagcaggaccggagcagggaggccggcaaccggcccagacagggcca

SEQ ID NO: 196404 - RNA, 70 nt, Homo sapiens
agcagggcagaggaccaggacgcgccaagcggaagcagaagggacaggcccccagaagaagggaacaacc

SEQ ID NO: 196405 - RNA, 62 nt, Homo sapiens
cgcagggcgcccccgcgcaggagggccacgaccagcagcagaagaccacccgaaaaggcccg

SEQ ID NO: 196406 - RNA, 84 nt, Homo sapiens
cggcccgaggaggcagaaggaccgagccgacgcgggccgcgcgggcgaagggagggccgccccaaccgacgcaccagccggagg

SEQ ID NO: 196407 - RNA, 105 nt, Homo sapiens
acccaggggggaggagaaggcggcggcccggccgcagcggcaacagaacgaaaaacagggcgagcacagcaagcgggagcaggcagaccaaaggaacagaagcca

SEQ ID NO: 196408 - RNA, 47 nt, Homo sapiens
cagaaccagcacgagggacgaaccagaggaaagccgggacccgaccg

SEQ ID NO: 196409 - RNA, 76 nt, Homo sapiens
acggaggagaggaaaacgggggacaggaacacagagcaggggaagcagacagagagacgaggacgcgcacaggaaa

SEQ ID NO: 196410 - RNA, 85 nt, Homo sapiens
cgcgccaccccgggagcagaaggaccgaacccaggagcccgcacgggcgaacggccgcgcccaagcggccccgggaccgggagcc

SEQ ID NO: 196411 - RNA, 49 nt, Homo sapiens
gacgcagaggaaacggcagcagaacgaccgaaggagaagaaggagaagg

SEQ ID NO: 196412 - RNA, 84 nt, Homo sapiens
acagcaagcagggagacacagcaacaaaggaagagacccagacgaagagcgcacagaaagagggaaaacaaagaaccaaaacag

SEQ ID NO: 196413 - RNA, 59 nt, Homo sapiens
cgccccggccaggaagcgccggcagcccgcggcacggagacagaaccggaacaccagga

SEQ ID NO: 196414 - RNA, 81 nt, Homo sapiens
cagaaacacgacagaagcccccaagaccccgaagggacggacgccaccgggagggagccaaaacgggagcaacaaaaccag

SEQ ID NO: 196415 - RNA, 86 nt, Homo sapiens
aggcggccagcaggaggcgagaagggggcgcggggcagggcgcggggacaggggcccgacaggagcgcccagccaccgaagcagcc

SEQ ID NO: 196416 - RNA, 79 nt, Homo sapiens
caaaagcggcaaagggaaaaaggcgggcagaagccaaaccgaccacagacacaaggacaaggagacaaaccccagaacc

SEQ ID NO: 196417 - RNA, 77 nt, Homo sapiens
ggagggccccgcggaccaccgccggggacaccaccagaacagagagaagggcgggagaaaccaaggaaagagaaaag

SEQ ID NO: 196418 - RNA, 76 nt, Homo sapiens
ccagcgaggcgccccagagcccagggcaggacaccgacaggaacagggaccacggggggaagcccagaggcacggg

SEQ ID NO: 196419 - RNA, 73 nt, Homo sapiens
gaggggccaccagggcccaggcaggacgccagcagccaacaaaggaacgagcagcaacggccaggaaccaggc

SEQ ID NO: 196420 - RNA, 74 nt, Homo sapiens
cgggaacgggcgccccaggaggcgagcaacaggaaaacgcaagccacagccaggaaacaccagccccccggcac

SEQ ID NO: 196421 - RNA, 77 nt, Homo sapiens
gaggagccaaggggagcagcgcgcgggaggagaaaccagaggcaagcgacgggaaggaccaccaaacccagccagcg

SEQ ID NO: 196422 - RNA, 80 nt, Homo sapiens
gagacaggaggcagagccaaacacccaggccacacacggccccccgagagcggaagagacccccagcacggggagcgggc

SEQ ID NO: 196423 - RNA, 75 nt, Homo sapiens
aagaccgaaggcgccggccaaaagaggagaagagagcggacccacaccagggaagacaggggagagggggcacca

SEQ ID NO: 196424 - RNA, 48 nt, Homo sapiens
ggccaggagcgcagaggacaggacagccggaaacagcgggggggccca

SEQ ID NO: 196425 - RNA, 56 nt, Homo sapiens
ggcgcgccccagggaggcccgagagcacccagccccagcgagcgaccaccagcagg

SEQ ID NO: 196426 - RNA, 83 nt, Homo sapiens
aggggcgcggacgcggcgccccggggggccggacccgcccccgaccgccgagccagaaacagccaaaggccaggaggacagag

SEQ ID NO: 196427 - RNA, 53 nt, Homo sapiens
gacgccagaggaggaaaggaagacaagagaagaccaagagacagaagggacgg

SEQ ID NO: 196428 - RNA, 71 nt, Homo sapiens
cccacaaccagcacgccgcaacaagcgacagcaaggggaggaagcacaagacccggaagggacacaaaaca

SEQ ID NO: 196429 - RNA, 79 nt, Homo sapiens
ggcccccgaccgcgcccgcgccggcgcacggcggccgcggcgcggcgccacgggcggagaacggaaaagcaccaggaag

SEQ ID NO: 196430 - RNA, 66 nt, Homo sapiens
gcagcagcgcggacccggagcgacaagcgccccgacggagcgccaggacgacgcaaacagcagacg

SEQ ID NO: 196431 - RNA, 69 nt, Homo sapiens
agaacgacccaaaaaagcaaaacacaacccagcacggccaaaaagaaggacacagaaaaaccagcacag

SEQ ID NO: 196432 - RNA, 80 nt, Homo sapiens
gggccacaggaggcggcgggccccgcccgccgaagggcaaggcaggcgaggaaagcggccccgccccagaggaacgaaga

SEQ ID NO: 196433 - RNA, 75 nt, Homo sapiens
ggaggacacaccaaacagggaacccaagccgggaacggagaagcccagggaaacaagaacaacagccgcccccgc

SEQ ID NO: 196434 - RNA, 74 nt, Homo sapiens
aagaagaggcccaacccccaccccgcccaaggaggcccagcggagccccccaaggcaaccgaaacaccagcagg

SEQ ID NO: 196435 - RNA, 69 nt, Homo sapiens
ccacgcagaagagacaaggaccacagccgagcgagagcaggaagacggaagaggggaagaaaagggaag

SEQ ID NO: 196436 - RNA, 67 nt, Homo sapiens
cgaccgccagaaaccccccgaccaggccacagccgggacaccacgccacccaagagagagcaaaaac

SEQ ID NO: 196437 - RNA, 79 nt, Homo sapiens
agaaccccaggacgcgcccccgggagcgggcgcccagagcaaaggagagccagagcgaacccaagacggggcacgccgg

SEQ ID NO: 196438 - RNA, 84 nt, Homo sapiens
gaagcggccagccgagcaagcggaggaccacgccggccggagaggagcgggaaggccccgcacccggagaccgggggaagacaa

SEQ ID NO: 196439 - RNA, 82 nt, Homo sapiens
gcccgcgccacccagggccggcgccgggcagggaggcgccgagacgcgcggacaagcaggcacccacgaggcggcgacggaa

SEQ ID NO: 196440 - RNA, 73 nt, Homo sapiens
ccgcgccgccgaccccccggcgccgcgccggcggcggcagagagggcagcgcccgagggcggagcgcgcgccc

SEQ ID NO: 196441 - RNA, 94 nt, Homo sapiens
gagaaggcacccgcggaaccgacggccagggccggacgcggcggaggcgagcgagaaaacaccgggaaaggcccaaaccggcgaaaacccccgg

SEQ ID NO: 196442 - RNA, 62 nt, Homo sapiens
gcaccccagaacagcagaagcgagggggaggggacggaaaaacgacccggaaacgcagacgg

SEQ ID NO: 196443 - RNA, 58 nt, Homo sapiens
gagagcgcgccggccacccggcgccacccgaccaggcgaggcccgcaggcaagaccaa

SEQ ID NO: 196444 - RNA, 81 nt, Homo sapiens
ggagaccccgaaaacggaagcgcagggagaaggaagaggggaaaaggaaacacagacccagaccagaagacgaaacccgcc

SEQ ID NO: 196445 - RNA, 76 nt, Homo sapiens
agaaacccaagagagaacgaggaacagagaaagcccacaggcggggagcgcccccaggagcagcggagcgggagcg

SEQ ID NO: 196446 - RNA, 51 nt, Homo sapiens
gacaacgggacgggaaacgggcaaaggaccggaagcggggccaggaggaaa

SEQ ID NO: 196447 - RNA, 72 nt, Homo sapiens
ccggcagcgcgcagacgaccacaacagcgggaaaacagcaccaggaagaagaggcggaagaaacaacaagcg

SEQ ID NO: 196448 - RNA, 54 nt, Homo sapiens
ggaaagaaaagcaccaggaccaaacgcaaagggaagagccacaaagggaaccag

SEQ ID NO: 196449 - RNA, 51 nt, Homo sapiens
ggcgccccacccagcacgagaaaaaagggccggcgccgacacaggaacccg

SEQ ID NO: 196450 - RNA, 59 nt, Homo sapiens
gacacggaggccaggggcaggaagaaaaaacaccagcagcccagcaaccaaaaagaaga

SEQ ID NO: 196451 - RNA, 84 nt, Homo sapiens
gagaacaggccgcgggaaagaagagacaacacagcacccggcggcaaaccaaacaaaaccagagcacggggaaaagaaccgggc

SEQ ID NO: 196452 - RNA, 83 nt, Homo sapiens
ggaaacagcaagcgaagccgaaaaagcgcccgagacgggcccgccgaaagaacaagcaaagagcggcaggggcccggaggcac

SEQ ID NO: 196453 - RNA, 69 nt, Homo sapiens
gaggcccaaccgaagaaaacaaggacaccccgaaacggaacagcccagcaacagagagacaaaacagca

SEQ ID NO: 196454 - RNA, 75 nt, Homo sapiens
cacgcagagggcggagcggcagacggcaccaaacggcaaggaggaaaaaaccagaaaccagacggcggcgagaac

SEQ ID NO: 196455 - RNA, 63 nt, Homo sapiens
gccaaagaagcggaaccccagcgcaaacgggcggcaacgcggcaggggcaacaccggaggaca

SEQ ID NO: 196456 - RNA, 41 nt, Homo sapiens
ccccacccaggccacccccacagacccggagacagcggccc

SEQ ID NO: 196457 - RNA, 88 nt, Homo sapiens
gacccggagccgaaacaccggaggagcggggaggaacccagaagggggccgggacacagcccccggaggaccgggaaaggccagggcc

SEQ ID NO: 196458 - RNA, 86 nt, Homo sapiens
ggccgaccccccaccgaggaagaccaaggcacagcaacaagaggaaacggccaacaaaaacagaacagccccggaaaccaggcagg

SEQ ID NO: 196459 - RNA, 82 nt, Homo sapiens
ggggaggaggcgagccaggccggaagcgggcgggacaccagacacgaaggaccacaggccccggaggggggacagccaggcc

SEQ ID NO: 196460 - RNA, 72 nt, Homo sapiens
agagaagcggcggaggacgagcccgggagcgacccgcgcaaacaaacaggcggagcagagcccgacaggggg

SEQ ID NO: 196461 - RNA, 90 nt, Homo sapiens
caagaagggacacgaggaacccagggaggaaacacggggcaaaaagacccggcaccaacagaaagaaggaggaacgaaagaaacaccaga

SEQ ID NO: 196462 - RNA, 74 nt, Homo sapiens
gggccggggcgaacgcggccgcaaagcgaggcagcaagcggacacagaagcacacgaaagggagagagacgcgc

SEQ ID NO: 196463 - RNA, 74 nt, Homo sapiens
aagaagagacgaaaaacccgaccacagccggacagggaacgagaccgcccaagcacagagagcagcgagagaca

SEQ ID NO: 196464 - RNA, 81 nt, Homo sapiens
ccgaccagcgggggcgcggcggccgcgcagccacccaagggagaaacagccagccaaagaaaagcagggacaacaggaaca

SEQ ID NO: 196465 - RNA, 79 nt, Homo sapiens
cacagcaaaggcagaaacaagagagaaacccgcaaagaagcgagccagcaaagaaacggggggacccacgagagaaccc

SEQ ID NO: 196466 - RNA, 70 nt, Homo sapiens
acaccacaaacccgagagcaaccagacagaccagaggagcagccccagaagcacgaaacagcccacagga

SEQ ID NO: 196467 - RNA, 77 nt, Homo sapiens
aagcaaccaccagcagcccccagagcggaacacagaacaggccaacaccgcgccacaaacaggacaaaaaagaaggc

SEQ ID NO: 196468 - RNA, 76 nt, Homo sapiens
gacgaaaggagacaaagaccgggcgacgaggcacagcgcgcaagaagggagcgggacagcaagggaggcagcagac

SEQ ID NO: 196469 - RNA, 70 nt, Homo sapiens
gaagaccagagaccacccacaagaaaacgaagaagacacgaacaggggacgaaaaacgagccgggggcaa

SEQ ID NO: 196470 - RNA, 70 nt, Homo sapiens
aacaagcggaggacaccgagaccagcagccccagaggccggaagagcgggagcgggagccaggcagaagg

SEQ ID NO: 196471 - RNA, 62 nt, Homo sapiens
gagggggccggaccgggagggcaggaacgcacaccagcaccagcccaccaaaccagcacgac

SEQ ID NO: 196472 - RNA, 78 nt, Homo sapiens
ccccgccccgccccggggaacccgcagaggacagaagaggccaccaaacccgagggaggaaacacaaacgggaccacg

SEQ ID NO: 196473 - RNA, 78 nt, Homo sapiens
agcgcacacagcaagcacgaggaccccggaggaaaagcggaagcggcagcggcgaacgccggaacggaccaacaggag

SEQ ID NO: 196474 - RNA, 75 nt, Homo sapiens
aaccgaagaggacaccagagaaacacgcagagaccaacagaccagcaacaggccggcagggcacagcagccgcag

SEQ ID NO: 196475 - RNA, 82 nt, Homo sapiens
acggaccgagaccggaccgagagcggaccgagagcgcgaaacgcacgagaagggaaaaggggcgaggccggccgaccgacaa

SEQ ID NO: 196476 - RNA, 58 nt, Homo sapiens
aaacgccacaggaccccacacagcagggcacagagcagaggacaccacaggaaggagg

SEQ ID NO: 196477 - RNA, 68 nt, Homo sapiens
ccgcgaggcacaaaacaacccggacaaggccacccccgggaagaggcacagacgcgacaacacaccag

SEQ ID NO: 196478 - RNA, 66 nt, Homo sapiens
gggacaggaccccggacgagcccggcgaggggcacgcaaaaaaaccaagggaaaagagacaagacc

SEQ ID NO: 196479 - RNA, 57 nt, Homo sapiens
gccacacggcagaaaaagaggaagaaaacgccagagaagcagagcagcccggagcga

SEQ ID NO: 196480 - RNA, 72 nt, Homo sapiens
gcaggcgcgggggggcgcgaggacccggacagccgccaaaagcaggccggcaccggaggcagaacccaaggg

SEQ ID NO: 196481 - RNA, 71 nt, Homo sapiens
gagcacgcaccgaagcaaaaccaacgcaaccaccccagggccagcagaacagagaagaccccggaaagaag

SEQ ID NO: 196482 - RNA, 51 nt, Homo sapiens
cagacacccgaacgggggacaaggagacaacggcaagcggagaagagcaag

SEQ ID NO: 196483 - RNA, 72 nt, Homo sapiens
acgaaagaacacacacaggaagcccaggaggcaaaagggcccccaagccggcaggggaacgaggagggagcg

SEQ ID NO: 196484 - RNA, 77 nt, Homo sapiens
cgccagcaaggaggaggacgcgccacccacaaccccgagggaggaaagaccacagcaagaccacgcccccagccggg

SEQ ID NO: 196485 - RNA, 73 nt, Homo sapiens
cccacagagaacccagacaacaggacgccgccaaggcaaaagacgcgggcaacgaaaagaagacgagaggcac

SEQ ID NO: 196486 - RNA, 57 nt, Homo sapiens
cgagagaagaagcagaaaacggcaaaaaaggggagcagggcaaagacaaacgccgca

SEQ ID NO: 196487 - RNA, 68 nt, Homo sapiens
caggcccgaaccacaccacagggacgaaggagaaggaaagagcagcgaaacaaagagaacagcaacac

SEQ ID NO: 196488 - RNA, 76 nt, Homo sapiens
gggggcgcggccgcgcgccgccggcgaaggaggaggcggccggggcgagggacaggccgagcggagcccaaccaga

SEQ ID NO: 196489 - RNA, 85 nt, Homo sapiens
ccgagccacgcaagggcgggggccccaccgccccaggcagcggccacaccaccaggcacccaaaaagaacaagagcagccgagga

SEQ ID NO: 196490 - RNA, 84 nt, Homo sapiens
caccacaaccagacacagcaggggaaaggaacaggcgcaagaaaaagcagcaccacgccacggaccccaccaaacacagccgag

SEQ ID NO: 196491 - RNA, 77 nt, Homo sapiens
gaccccgcgcagcggcccggcggggcccggcaccaggaccaccgcggcagcacgcggcgagcccagcaaaaagagga

SEQ ID NO: 196492 - RNA, 81 nt, Homo sapiens
gacgccgacaccccaacccacaccaaggacacaggaaacagacacggacagagggggggaaaaaaaaggcaacaggagagg

SEQ ID NO: 196493 - RNA, 70 nt, Homo sapiens
gaggcaaggggccagaggacagaggacaggcgccaccagcaaaaccagagaaacaggcagagaaagacac

SEQ ID NO: 196494 - RNA, 54 nt, Homo sapiens
gcagggggaacgggagggggacgcagaaaacagacacacagcggagacaagcag

SEQ ID NO: 196495 - RNA, 76 nt, Homo sapiens
gggaaccacggagcacgagaaaacggcgggggcagcaggagcggagggcccccgcccaggggaaggacgaggaccc

SEQ ID NO: 196496 - RNA, 79 nt, Homo sapiens
gaccagaacccgcggagccacccaagggagacgccagaccgggaggaggcagggcgccggcggggcggcaacaaggcca

SEQ ID NO: 196497 - RNA, 80 nt, Homo sapiens
cgcaggaggaccgagcgacagcgcacggcagcggcaccacggcgacgcacaagggaccccgacggagagacaaagaagac

SEQ ID NO: 196498 - RNA, 83 nt, Homo sapiens
agagcggcccgccagccgcggggcggcggggagcagagacaggggccaggccaggggcaggggaagcacccaaccaacgagcg

SEQ ID NO: 196499 - RNA, 73 nt, Homo sapiens
aggaacaagggcaagcagcgggggaagaggaacgaaaggaaaagagacgcagacaggcacaagacagcccaac

SEQ ID NO: 196500 - RNA, 76 nt, Homo sapiens
gaagcagcagaagccgcaacaggaaagcagcccgaaaaagacgcgagaagccacacggacaggagagacaacggag

SEQ ID NO: 196501 - RNA, 59 nt, Homo sapiens
cagagcgggcaccgaacgcaacaggaaacaagcgaggacccccgaggccacgacagaga

SEQ ID NO: 196502 - RNA, 79 nt, Homo sapiens
aagaagcaacacgcaaacgagagcgaggcaagaaaaacaggggaggcaagcaggggggcaaaggaaagaaggcagaaag

SEQ ID NO: 196503 - RNA, 79 nt, Homo sapiens
acgggcacaacccagccaccgagaaggcacggcaccagacagaagacacggcccagccgggacaccacagcaagaggaa

SEQ ID NO: 196504 - RNA, 78 nt, Homo sapiens
ccccagaacgcaccggcacggaagacggaagagagcccggggcagaaggcgaagaggccggacggagacagagacaga

SEQ ID NO: 196505 - RNA, 74 nt, Homo sapiens
aaaaagcagacaaccagaagaaagaaaaaacaggcgcgccaggccgacgccgagaaggggccaaacgaaagcag

SEQ ID NO: 196506 - RNA, 53 nt, Homo sapiens
cagaacgagcacagccaacaggcgcaaggggacggaaaccaaggaaccaaaga

SEQ ID NO: 196507 - RNA, 78 nt, Homo sapiens
ccagggagggcagagccaaccaggacacaaacagccagagaagaggagacaggccgagaccgagggccccgcaccccg

SEQ ID NO: 196508 - RNA, 70 nt, Homo sapiens
cgagccgaaccagcagggccagaccaaaggaaccagagcaggagaaaacgaggggcgagcgaaacacaga

SEQ ID NO: 196509 - RNA, 68 nt, Homo sapiens
accgccggggacccagggagagcgccaaacggaggcccgaagaaaaagaaccgaaaaagaaaccacag

SEQ ID NO: 196510 - RNA, 79 nt, Homo sapiens
agcgagcgcgcgcgcgaaaacccgggcaggcgggcccaccggaggcaggggaggaagcgagccacaaaaacggaagcga

SEQ ID NO: 196511 - RNA, 71 nt, Homo sapiens
gccaagcgcggagaagcagacaggaaccgggccgcccgcggcagagcagcagagcgccgcccacaagagac

SEQ ID NO: 196512 - RNA, 60 nt, Homo sapiens
gagacgggacagcagagccagggaccaaagcagaccacaaaacgaccggaacgaggcggg

SEQ ID NO: 196513 - RNA, 80 nt, Homo sapiens
cggggccgggcgacaggagcagagccaggacaaaaccaggcagaaccaacacgaacccaagcacaaacaagaaaacgagc

SEQ ID NO: 196514 - RNA, 79 nt, Homo sapiens
caagcagaaaaggacaaccagaaccacaaaacaaggccggcgaggaccacagacacagggccgggaagcaaagcagccc

SEQ ID NO: 196515 - RNA, 74 nt, Homo sapiens
agacagggcccgaaggacagccaccagcgaacaccagcaccacccaaagcagggaaaaaccaggacaaaaagca

SEQ ID NO: 196516 - RNA, 41 nt, Homo sapiens
gcaagaagaacacccagagagaagacggcccagcagagcac

SEQ ID NO: 196517 - RNA, 80 nt, Homo sapiens
gagcgaacgccagggacccggcaggccgcccccggcaagagcgcacagcgaggaggggggcgcgcagcccggggaccccc

SEQ ID NO: 196518 - RNA, 84 nt, Homo sapiens
cggccaggcggcaaccagacggggccaagaaaaagcggggaaggggggcaaaaaaaagaagcaagcgaagcaccgagcacccac

SEQ ID NO: 196519 - RNA, 53 nt, Homo sapiens
cccagggcgccaaaaacagacacacgaagagaagagcccggaaaaggagaaga

SEQ ID NO: 196520 - RNA, 58 nt, Homo sapiens
cacaacaggcagacagacaaacaccccgccacccgagcaccgcacaccggccccccag

SEQ ID NO: 196521 - RNA, 75 nt, Homo sapiens
ccagaacaccccaaccgcaccgggacgcgccggcaaccccaggaaccacagagggaccggcagacgacccgaaca

SEQ ID NO: 196522 - RNA, 72 nt, Homo sapiens
cgggcgcagcacgcgagagaacagggcagcgagggaccaggcgggggaagccgcccagcccccagacaccca

SEQ ID NO: 196523 - RNA, 56 nt, Homo sapiens
gcccggggcccgggacgagggaagcgagaacaagccaaagacagaccgccagcgca

SEQ ID NO: 196524 - RNA, 72 nt, Homo sapiens
gcacacggagggagaacgaggacacaggaacccgcgcacccacagcgcgccagccgagagggagccagcaaa

SEQ ID NO: 196525 - RNA, 82 nt, Homo sapiens
cgaaaaagaacgacagagcaaccaggaaagaagagggcccggggccggggagggaagggcaggagaggaagccggagcggac

SEQ ID NO: 196526 - RNA, 64 nt, Homo sapiens
cagaaacacaagacccgggaaaaaacgagaaacagacaagcacggcccagccccgacagggaga

SEQ ID NO: 196527 - RNA, 78 nt, Homo sapiens
cgcgggacacaagacgggcaaggacaacacaccgcccaaccgggacaaagaaaggaaaagagaagaaccggagccgga

SEQ ID NO: 196528 - RNA, 77 nt, Homo sapiens
caaaggggaacccaaccgaccacgggagagaagacgaccaaggcccgaaccgaaaagcacccagaggccccacaggc

SEQ ID NO: 196529 - RNA, 83 nt, Homo sapiens
cccgcgggccaggccgggagggaaaagaagaccccggagcaggcccgaaaggcggaccagccagaggccccgaaggcacagac

SEQ ID NO: 196530 - RNA, 67 nt, Homo sapiens
gaacagaagagggcaaggcaggaaaggagggaagagccgcaggaggagaaccaaacgcgcgcaaaga

SEQ ID NO: 196531 - RNA, 76 nt, Homo sapiens
agagaacaaaagagcaggagaagaaaacggagaagaagagaagaaagaaagagagagccaaacaagagggacggga

SEQ ID NO: 196532 - RNA, 66 nt, Homo sapiens
ccaaccccaccgaggaggacagagacgcaagcccgaagcgggaaggcgagagccaaccagaccccg

SEQ ID NO: 196533 - RNA, 77 nt, Homo sapiens
gcgccccggccgaggggcggcggccccaggggcgggaagaagcccgccgccaccaccccaccaccagcgcagcagag

SEQ ID NO: 196534 - RNA, 78 nt, Homo sapiens
caagacgccgacggcgcaaaccccaccggccaaagggcgggccaccaccccaacgaagcccacacagaaaccagccca

SEQ ID NO: 196535 - RNA, 57 nt, Homo sapiens
cagaaccgcccaggggccggcgccaggccggggaggagacacccgcagggcgagaag

SEQ ID NO: 196536 - RNA, 72 nt, Homo sapiens
aagacaagacggcggggcaccagcagccgaggagggaagggaccacagaccagcacgccggcgccacgaacc

SEQ ID NO: 196537 - RNA, 51 nt, Homo sapiens
aggaacgacgcccggcacccacgaggcggcgacggaaagccccccacggga

SEQ ID NO: 196538 - RNA, 84 nt, Homo sapiens
gcggcgcgcgcggcgcgggacgcgcgcgggcacccacggagccccggggcgggccagcgggacggcaccgccgagaacgggacc

SEQ ID NO: 196539 - RNA, 71 nt, Homo sapiens
caaaaaccgaggccagaaaggggaacgcccgcggacggcagggcgcgacaagaagcgcccgcccgacgagc

SEQ ID NO: 196540 - RNA, 70 nt, Homo sapiens
ggcagacaaaagggccaaagaagggagaacagaaaacacccggagccggcccgaggaccaagagagcgga

SEQ ID NO: 196541 - RNA, 67 nt, Homo sapiens
ggaaagccgcaaagggacgccaacagcccagagagaaacagaaaaggaacaaccaaacgacacggcc

SEQ ID NO: 196542 - RNA, 78 nt, Homo sapiens
cgccaaaagaccaaagcacgcagacgacgagcgagccaaaaggggggacacccaagaagaggccccaggaccggcgag

SEQ ID NO: 196543 - RNA, 77 nt, Homo sapiens
gagagcggaggacagccgagaggagccacacccaccgcccgggcaggccacggcggagagggccgggcgcgcacccc

SEQ ID NO: 196544 - RNA, 84 nt, Homo sapiens
gaccccaaaggcacccgcgagcgcaacccaagccagaccccagcgccccccgcccacggacggaccagacgaccccagaccgcc

SEQ ID NO: 196545 - RNA, 72 nt, Homo sapiens
gcggagacagcacacgcaaaaagcgaggaaggaaggagaaagacaaacccaagaaaacaagaagagaaaagc

SEQ ID NO: 196546 - RNA, 68 nt, Homo sapiens
ggagaaaaggccaagaaggcagagcgagcccagccccgcggaaccaaggccccccaagagggagaaag

SEQ ID NO: 196547 - RNA, 70 nt, Homo sapiens
cccaggcgccaacccggcggcccgaaggaggaaagccggacaaggacacacagcaacgaagcaggggagg

SEQ ID NO: 196548 - RNA, 105 nt, Homo sapiens
cagagcggcgggacagcccaagggccagcaccgcgcccaggcagagccagaccggcgcccccccaccagccgacgaaggaccgcgcggaaccccgcaggagacca

SEQ ID NO: 196549 - RNA, 80 nt, Homo sapiens
cgcgccaaaacccgcccggaaaggggacaccgagcaacacgcgccaaccccagagagcgccacgccgacagagagaagag

SEQ ID NO: 196550 - RNA, 37 nt, Homo sapiens
caggaccagcaagaggaccggggagaagcagaccgca

SEQ ID NO: 196551 - RNA, 80 nt, Homo sapiens
ggggcgagcagcccggggagagcgcgccaagaccgcgcagccgcggcgaggcgcccaagaagccaaaagggaagcacgag

SEQ ID NO: 196552 - RNA, 76 nt, Homo sapiens
gagggcggcccggaccgggagacacggccagacgcccccagcggagaccgacgcggaaaaaaagacccaggaggag

SEQ ID NO: 196553 - RNA, 46 nt, Homo sapiens
agcagccacacaggaggccgccacccaggggcaccaggggggggcc

SEQ ID NO: 196554 - RNA, 81 nt, Homo sapiens
cgcgagccccaggcgaccagaaagaggaaagagagccgggcgacccaaccaagggaccagaccgaggccaaaagaaaggaa

SEQ ID NO: 196555 - RNA, 68 nt, Homo sapiens
gaaaaagcaggggaagcagcgcacgccagagaagacgcgcaagaccgagcaagacgccgcagccgagc

SEQ ID NO: 196556 - RNA, 37 nt, Homo sapiens
acaccaccaccaagagagaacgagggccaaagccaac

SEQ ID NO: 196557 - RNA, 71 nt, Homo sapiens
cggacgcagagaaaaggggcgggcggcgacggcggagggcccgggcagcggaacgcgccgacgccgcaacc

SEQ ID NO: 196558 - RNA, 82 nt, Homo sapiens
aggaggacagcgcacacagcaagcacgagaccagaaaggaggccaggggggaagggacgacaagacacagcaaaaagcggaa

SEQ ID NO: 196559 - RNA, 67 nt, Homo sapiens
ccggaggacaagccaggccacaaggaaccaagacagcgccacagacagaaaagaccccgggccacgc

SEQ ID NO: 196560 - RNA, 84 nt, Homo sapiens
ccgcagcgcgaggccgggccgggggagaccgcggaccagaagcagcagccccagaagccccgaagccggggcaccccaccaccc

SEQ ID NO: 196561 - RNA, 88 nt, Homo sapiens
gagaagcgcagcgacggcgcgggagagcgcgccagccggccgcgacagaagaggcggccacccacgagccgacggcaaacgccaggga

SEQ ID NO: 196562 - RNA, 73 nt, Homo sapiens
cggcccagcgcgcccggacgcgccaaccgcccaccgcgccgacccacccaagaccccacacggagcgccggcc

SEQ ID NO: 196563 - RNA, 82 nt, Homo sapiens
aaacaggaccgccaaacccaaaccggggaggacgccagcggacaccacgaccggaagagcaggcgagaaaggacgcccacgc

SEQ ID NO: 196564 - RNA, 77 nt, Homo sapiens
cgaccccccaaaggaacgaagaccgcccacaaaacccagggacaacccgccacaacgacaaaggaccccaaagaccc

SEQ ID NO: 196565 - RNA, 80 nt, Homo sapiens
gagaacccaaccagggggaaacacagaacgcaggaaagaaggaacacacggacgcccagaaagaggccacagaaggaaac

SEQ ID NO: 196566 - RNA, 43 nt, Homo sapiens
aagaagaggccaagcaaggccagaggccacggcgcggcacagg

SEQ ID NO: 196567 - RNA, 104 nt, Homo sapiens
ccggaaaacaaggaccgcaccaggagaagcaaaaggaaggagcccgggccccccgcacagaaaaagccaccggagcgaagcgaaggaagcgaggacaacaccgg

SEQ ID NO: 196568 - RNA, 70 nt, Homo sapiens
ccccggaacaagaaccacgcccgcaccagccacgacgggagaacagaagagcagacagagccgagccagg

SEQ ID NO: 196569 - RNA, 74 nt, Homo sapiens
cgccgaggaacgagagcgcgaagcaagacgcggcgcgcaacgcaagccccaaccgcgaggagagcgcagcaggc

SEQ ID NO: 196570 - RNA, 64 nt, Homo sapiens
ggaaagcagagacaacaaaacagcgggaacaacaccaccggcggcccaccaagagcccgcaacg

SEQ ID NO: 196571 - RNA, 89 nt, Homo sapiens
ccgcgagaccgcagaaggagcggagcggcagcagaaggagcccccaaaggaaagccgaccaagacggcaccccaacacacagagacagg

SEQ ID NO: 196572 - RNA, 78 nt, Homo sapiens
caaaaggaagacccagccagaccagggacaaagagcaaacagacagggccgcagacggccagggcagaaggaaaacac

SEQ ID NO: 196573 - RNA, 49 nt, Homo sapiens
gcacggacccccgggacaagagccgcccagcaaaacccaacgggaaccc

SEQ ID NO: 196574 - RNA, 72 nt, Homo sapiens
cccagcagcggccgaagaaaccaaaaggaaaaagagagccacacccggcacacagggagaagcccgagggaa

SEQ ID NO: 196575 - RNA, 83 nt, Homo sapiens
cacagaagacaggacacaaagcacgcgacaggaaccaggaaaaggaccagcgcagccagacaaaacacgccaaggcaggggac

SEQ ID NO: 196576 - RNA, 74 nt, Homo sapiens
gcagagagccccagcaggaaggccaccgagggaacccgaccggacccagccccagaaggcgcagaagagcaaga

SEQ ID NO: 196577 - RNA, 83 nt, Homo sapiens
gcaaaacgccccggcgcacccgaccgagggacccgaacccagagagagaagacgaaaaggcgaacccccaggaagaaaaccag

SEQ ID NO: 196578 - RNA, 83 nt, Homo sapiens
cacgagcgcccaaagccaacgaggcccaagccccaggagagaggaagcaagaggcccccaagaacacaccgaggaaaaggaca

SEQ ID NO: 196579 - RNA, 59 nt, Homo sapiens
ccccggcacacccggggagagccacgagccaagggggcacgagcggacccaacaagcgg

SEQ ID NO: 196580 - RNA, 81 nt, Homo sapiens
ggaaaacacaaacaacccgagcccagggccaaccccacggaacaccacacacccagaccgagaggaaacaaaacagagagg

SEQ ID NO: 196581 - RNA, 88 nt, Homo sapiens
gcagccaagcaggaccacccaccagccaccagagacccaagggccggaccacggagcggccgagaaacgagccacagaagacaaagac

SEQ ID NO: 196582 - RNA, 81 nt, Homo sapiens
aggcgcgcagaaccagaccgggagcacgcacccacgaggcgccgcagcgggaaccgcaagagcggggaggaacgccccccc

SEQ ID NO: 196583 - RNA, 72 nt, Homo sapiens
agcggccagcaaaaagaaacacagaaaacgcgaagaagacaccaagccagcagcaggcgcaaaaacgaaccc

SEQ ID NO: 196584 - RNA, 54 nt, Homo sapiens
gggaacaagccggagcgagagcacggaccagaaggacacaccggacgggggcgg

SEQ ID NO: 196585 - RNA, 76 nt, Homo sapiens
ggcaaaggaggcaccaaggcacaaaaccgcgcggaaaccaccggaagcaggcaccgcaagagagaccgcgggaagc

SEQ ID NO: 196586 - RNA, 69 nt, Homo sapiens
agagaggcccccgccgagcacggagagcccggggccaccccagaggaagggggaagcgcggaaagaagg

SEQ ID NO: 196587 - RNA, 53 nt, Homo sapiens
agcagcgcagcgaccggggaccggagcgacgccagagccaccacacaccaggc

SEQ ID NO: 196588 - RNA, 69 nt, Homo sapiens
acacccccaacgagcgagacgacggaacagccagcgcggggcccaccgcacacagggcagcgcggcggc

SEQ ID NO: 196589 - RNA, 55 nt, Homo sapiens
aaggaaacagggaaaccccagaagagaccagcaagaaggaagagcaagcacaaca

SEQ ID NO: 196590 - RNA, 70 nt, Homo sapiens
agagcgcaggaaagacaagccgggagcagacaagagacgaagccgagccgggacgacgacagcagaaccg

SEQ ID NO: 196591 - RNA, 52 nt, Homo sapiens
ggaaacgagggacaacacagacccaccagcagagagacacaaacaacaccac

SEQ ID NO: 196592 - RNA, 78 nt, Homo sapiens
caccgccagcacgcgccgccccgcgcgcgagccacgcagcccccaggagccagcaccgccgaccgccagcgccagaag

SEQ ID NO: 196593 - RNA, 85 nt, Homo sapiens
gcggcggcgcccaggcacccggcccggggaacaaagaagcagggacaccaggccgaccagagagagccagccaccaaaggaggaa

SEQ ID NO: 196594 - RNA, 55 nt, Homo sapiens
cggccgagaaggcagaggcgggaagaaggagaaagggccaaccccgaagaagcaa

SEQ ID NO: 196595 - RNA, 34 nt, Homo sapiens
gccaggggggacacaaccgggcacgagcaaaaaa

SEQ ID NO: 196596 - RNA, 76 nt, Homo sapiens
gagcgcaccggagggacggcacagggaggccagccggagaagcgagcagcggccccccgggcagaagaaacaccac

SEQ ID NO: 196597 - RNA, 58 nt, Homo sapiens
gcgggggaaggacacacaacgcccaggaggaacccacacaagacccggaaaagaaaac

SEQ ID NO: 196598 - RNA, 69 nt, Homo sapiens
gaaaaaaaaaacggaagcagagaaaccgagagaagagaaaagaccgaggacggaggaaaaaacggaaac

SEQ ID NO: 196599 - RNA, 80 nt, Homo sapiens
gggacgcaacacgcagcggcccccagcccacagggcagcacggagccggcccaggagcagcagggaggcgggaacgccca

SEQ ID NO: 196600 - RNA, 74 nt, Homo sapiens
ggaagacgggaacccggcgcaaggggggagaccgagaaagaaaagaaagaaaacaagggaagcaaagagaaggg

SEQ ID NO: 196601 - RNA, 72 nt, Homo sapiens
gaccagggaccggacaggaaaggaacacagacagaccacaagcgagcagaaaggaacaggaaaaggaccaaa

SEQ ID NO: 196602 - RNA, 86 nt, Homo sapiens
ccgaaggacccggggaggaagaaaggccaaaacagaagaggcaaagcccagccacagcagcagcccagcagcaaacaaccaaagag

SEQ ID NO: 196603 - RNA, 75 nt, Homo sapiens
acaagaagacgccaacgagcggcgcggacggcgcgcggacaccaggagaagcgagccccgacccaacggaaccga

SEQ ID NO: 196604 - RNA, 61 nt, Homo sapiens
aggagagcagggaaaggacgcacccgcgcccaaacaggagcgccggccggcgccacgccag

SEQ ID NO: 196605 - RNA, 76 nt, Homo sapiens
aacacccacaaggacccgaggaacagcgcacgggcgggcgaaggcagcccacgagggggcagacccaaaggaaacg

SEQ ID NO: 196606 - RNA, 73 nt, Homo sapiens
ggaggacgccgcagaaggagagcagaaaagagacgcagacacaagaacaaaacagcggagcagcccagccaga

SEQ ID NO: 196607 - RNA, 79 nt, Homo sapiens
caagaaaagcgcaagccccagaagcccagagcacgccgaagccaccagaccgcagcccgaggaccagcagcaggggcgg

SEQ ID NO: 196608 - RNA, 77 nt, Homo sapiens
aggaaaaaaggagcaagaaagcaaaggaacaacacaccaccaccaagaaggaggcggagcggaggcagacacacacg

SEQ ID NO: 196609 - RNA, 69 nt, Homo sapiens
agaaacagccccccgacagcccgggaagaagcagacacaagcgacgcacaaggaaaaacagagagaaag

SEQ ID NO: 196610 - RNA, 71 nt, Homo sapiens
aacacagggaagcaggcgaaggaagagccaggaaagcaaaagggcacccgcccccaaccaaagccacagcg

SEQ ID NO: 196611 - RNA, 75 nt, Homo sapiens
gccccagcggcagaagccagaggaacaggagacagcggagaaagagcccgggaagcacgaagccgagaccagcca

SEQ ID NO: 196612 - RNA, 74 nt, Homo sapiens
ccggaccaacgaccgcacggaaacgaagcgacacacagcaccaggcccgaagcagaaaacagagggaaagaaac

SEQ ID NO: 196613 - RNA, 75 nt, Homo sapiens
cagacaagacgagcccaccacggacagcaaacaggccgagaggagggagacccaggaccaagaacaaggggcacc

SEQ ID NO: 196614 - RNA, 108 nt, Homo sapiens
cgcaccacagacccgcccgccccgccggcccaccccggggagcaacagggaaaccaccccacccaacccccgacacagaagaggagaaaacggaacaacaggagggca

SEQ ID NO: 196615 - RNA, 77 nt, Homo sapiens
gaggagaggcccagaggccggaggagcggacgcgccacgcagagccccgccaggaagacacgccggggaacgaagca

SEQ ID NO: 196616 - RNA, 79 nt, Homo sapiens
aaaggagcaggcagggccaacaggaacagccaccagcaggaaaaagcaaaagggcccaaggcccgaccaggaacaaaga

SEQ ID NO: 196617 - RNA, 83 nt, Homo sapiens
agggcgagagggcaccgcggacggggccgcccagcggccaaccagagaggaaagccgaggacagccacacacgccccgggcac

SEQ ID NO: 196618 - RNA, 50 nt, Homo sapiens
gacgcgaggggacgaggaagacagcgcaagccagcccgcaggcccccgag

SEQ ID NO: 196619 - RNA, 82 nt, Homo sapiens
cgggggaaaaagcagcgaacccgagaccaacgggaggagcggggggaaggccaaccgggacgcggcgagcaggaaccgaaca

SEQ ID NO: 196620 - RNA, 83 nt, Homo sapiens
acccggagggggcaagggaccagcaaggcggcagagcaaggggcacgcagaaggaccggccacgacgagccacagcaagggac

SEQ ID NO: 196621 - RNA, 77 nt, Homo sapiens
ggagcccagaggcaagaaggggagaccggagaagcggaggggggccccaggacccggacagacccaaaagggaaaaa

SEQ ID NO: 196622 - RNA, 69 nt, Homo sapiens
gcagaagaagcaaaagggacccagaaaaaccacaggcaggaggcaaaggcaaaaagggagcggcccaac

SEQ ID NO: 196623 - RNA, 80 nt, Homo sapiens
ccaccgccccacacggcggagaagcagcggggggccacgcgacaagggccgccaggaacgcccaccggcagaaaacacca

SEQ ID NO: 196624 - RNA, 76 nt, Homo sapiens
ggggaagaaaacaaccaacagagcccgcagagcaccaggcccaccggaaaggccgcgaagagccccaaggggggag

SEQ ID NO: 196625 - RNA, 83 nt, Homo sapiens
gcgggacccggcgaagacgcgaccgcggcgcgagcaccaggcgaagccgacgagcccgaacagacgcaccagcgggaggaaga

SEQ ID NO: 196626 - RNA, 60 nt, Homo sapiens
ggcccggagacaggcggcagacggggggacgcagacacgagcagggcgacaccagccaac

SEQ ID NO: 196627 - RNA, 77 nt, Homo sapiens
accaccacccagggagacagggacagcgacccgcagccccccggagacccgcggccaggggccacggaaggagacac

SEQ ID NO: 196628 - RNA, 66 nt, Homo sapiens
ggaggagaccacccaaacgcggcacgggaggagaaggcagaggccccacaggaccccccagaaaag

SEQ ID NO: 196629 - RNA, 74 nt, Homo sapiens
ccgacccgacgcgccggcccacgcgcggccaagcaggcagcggcaccaacggacagggacaagaagaagcggac

SEQ ID NO: 196630 - RNA, 61 nt, Homo sapiens
cggaaacgcggggacgccacaagaagaaaagaggaccagggaacagaaagcacaggaccac

SEQ ID NO: 196631 - RNA, 39 nt, Homo sapiens
accaaagggagacacacacgggagccacgcaccccacgc

SEQ ID NO: 196632 - RNA, 49 nt, Homo sapiens
gaaccgccacccaggcccaagaagcaccgaggagcaacacccccaggga

SEQ ID NO: 196633 - RNA, 79 nt, Homo sapiens
aaaacaacgccaagagggaaggggacccgccgggaggacgcgcgagcagacaaggcacaccggccacgggaccggggcc

SEQ ID NO: 196634 - RNA, 86 nt, Homo sapiens
gccccggaccgacccacgaccccgaccggccccgcccaggagggacgccgaggggcccggagcggcccgggacagccagggcggca

SEQ ID NO: 196635 - RNA, 79 nt, Homo sapiens
cgagagcggaccgagagcgcgaaacgcacgagaaggaaagacgggaaggccgcccaccacgaggacgggcgaagcacgg

SEQ ID NO: 196636 - RNA, 80 nt, Homo sapiens
cgcagaccgcagaaggccggagacaccagcaggaggccagagcgaccacagcagaagcgcggagcagaaaggaagacaga

SEQ ID NO: 196637 - RNA, 82 nt, Homo sapiens
gaagaagcggaccccgcaagcaccaccgcggcgggacccgaccagcgcggacagccagagcagcggccacgcaggaacgccg

SEQ ID NO: 196638 - RNA, 67 nt, Homo sapiens
acaaaagcaggcgcccacgccggacacggaaaggaagcagggaagacaccgagggaagagagagaaa

SEQ ID NO: 196639 - RNA, 75 nt, Homo sapiens
gcaacggcacgaccagaaaaccccggaggggagcaccagaagagccagagagcgaaagcacacgaagaggcagcc

SEQ ID NO: 196640 - RNA, 97 nt, Homo sapiens
cggaagagagcgggaaccagaaaaaacagcaaggggaggcggagcaacacacgagacgacggagagggacaaacaaccaagggagggaacccagcgc

SEQ ID NO: 196641 - RNA, 77 nt, Homo sapiens
gagcgcggcgcccggccccccgcggcgcggccacggccaggcagggggggccccagcccggccgaacgggcgcacga

SEQ ID NO: 196642 - RNA, 83 nt, Homo sapiens
accccccaagggaggcagcaggcaccgacgcaggcagaacagggccacaccaccggggaaagccaaaacccagaacccgaagc

SEQ ID NO: 196643 - RNA, 78 nt, Homo sapiens
cacaggaggcagaagcccaggagcaggcgggcgcgaagcccagggaaccaccaaccccagaaacacaggggaggagag

SEQ ID NO: 196644 - RNA, 103 nt, Homo sapiens
cgcagaccgcgcgagcacgcccaagaaaccaacacccaacagccaccaccaccaccagaggcaaaagcagaccggaaaacccaccggcaagaccacacccgag

SEQ ID NO: 196645 - RNA, 70 nt, Homo sapiens
agaaagagaaaaaagggaacgaggacaggcccgaggaggagaaacaaggccccgaacacagcgccggacc

SEQ ID NO: 196646 - RNA, 79 nt, Homo sapiens
cgggcggggggacacaagcccagaacggaacggaaacgcagaagacacaaaagaaggccagggcagcaggaaagccccc

SEQ ID NO: 196647 - RNA, 71 nt, Homo sapiens
ggagggaaccagcaacaagccaggccacgagggcacagaacgagcggccacgcccgaaccagcaggacaaa

SEQ ID NO: 196648 - RNA, 68 nt, Homo sapiens
gaaaagagaccaaacacaaccaaagaaccggccccgagcgaggcaccggacccgacacccccggcacc

SEQ ID NO: 196649 - RNA, 79 nt, Homo sapiens
ggagaagccgcggcggcagcacgacagcgccggcaacacgcggcacaagacaaccggggaccgaggagggccgagagcc

SEQ ID NO: 196650 - RNA, 75 nt, Homo sapiens
gacagccaggaccaggcacccgggaaggacagcgacagcagacaagcaacacaaggggaagaccggaaagaagcc

SEQ ID NO: 196651 - RNA, 86 nt, Homo sapiens
cgccgcgaacggaggcgagggagccccgcggacgaggaaagccggccaggccgaagacgacacggccacaagaagagaaaacgcaa

SEQ ID NO: 196652 - RNA, 76 nt, Homo sapiens
gacaaaccggacaacacaaaaagaaacccgaaaacccagggagaagagcagaagaagcggaaagaggagcaggccg

SEQ ID NO: 196653 - RNA, 72 nt, Homo sapiens
ggaggaaaccacacagggagccgggaccagggaacggcaaaaagcaacagagagacgggggcaccagagcca

SEQ ID NO: 196654 - RNA, 71 nt, Homo sapiens
ccgcccgccaggccgggccgcgggagccgaggcgccgaaggaccgacgcccgggcggaggcaagacgcaac

SEQ ID NO: 196655 - RNA, 48 nt, Homo sapiens
acgggacgggaaacgcccgggagcgagacgcaacagaaaagccgagac

SEQ ID NO: 196656 - RNA, 56 nt, Homo sapiens
accagccccgccaggacaaagaggccaggagacacgccaccgccggcggcccccgg

SEQ ID NO: 196657 - RNA, 78 nt, Homo sapiens
cccaaggacagccccagcccgccaggacagagaggaggaaggaccgagcgcaggaaccaggccagcgcccagcaagcg

SEQ ID NO: 196658 - RNA, 34 nt, Homo sapiens
aaggccagcccaacggcaggaaaacgggagcggg

SEQ ID NO: 196659 - RNA, 62 nt, Homo sapiens
ccggccccacgcacgacgagagggacagcacggcaaagaaacccagccacacagccacccag

SEQ ID NO: 196660 - RNA, 74 nt, Homo sapiens
gcacggaggcaaagaaccgaagaagaggaggggggcaccgcagggggaaagaccaccgcaccagaaagcaaaca

SEQ ID NO: 196661 - RNA, 76 nt, Homo sapiens
cccccagaaaggaggacaacgggacccagaagagaccgaaggaaaagaagccccaggcaggcggggaccaacgcga

SEQ ID NO: 196662 - RNA, 77 nt, Homo sapiens
caggggccgccgccgggagcggggcggcacggggcgggggcaagggcgcccgcggggggaaaaaaacaggggaagag

SEQ ID NO: 196663 - RNA, 82 nt, Homo sapiens
cggggacggagccccacagaccggaaagcggcccccccaacccagagcaaagagacgccggcacccagaggccccacaggcg

SEQ ID NO: 196664 - RNA, 65 nt, Homo sapiens
aggaaagcggaagcggccggcaggggaaggacgagcagggccggaaagagggcgggcccgcacgg

SEQ ID NO: 196665 - RNA, 95 nt, Homo sapiens
gagaaacaaaggacggaaacgccgaggaacccggcgaggcggcagcaaggcgccaccggaagaaacgggaggggaggagccgggaaagacagcgc

SEQ ID NO: 196666 - RNA, 59 nt, Homo sapiens
gcaacaacggagaaaagaagacgacacaggcaggccaccggcgccagagcaagcccgcc

SEQ ID NO: 196667 - RNA, 107 nt, Homo sapiens
aggaacggccgggcaagagcgggggcggaggaacccgccgcgggcaaagacgagggcggagaacggaaaagcaccaggaagcagagaggaccgcagaagggaaggag

SEQ ID NO: 196668 - RNA, 68 nt, Homo sapiens
ccaagaggaggggcagaaagggagcgcgacgacagggccggagcgagggagagcaggaacacagagag

SEQ ID NO: 196669 - RNA, 72 nt, Homo sapiens
acaaagccagggaccggcgggcccaccgcaaccggcccgaacgccagcaagagcaccgcgacccacaaccgc

SEQ ID NO: 196670 - RNA, 78 nt, Homo sapiens
gcaaggccacgacccacgagacaggggcccaagaaaaagcaccggacgggacgcacagaaaagacaaaacaaagacgc

SEQ ID NO: 196671 - RNA, 41 nt, Homo sapiens
gcccccggagcccaacgggcagacaggccaagccaagaacc

SEQ ID NO: 196672 - RNA, 71 nt, Homo sapiens
ggaacgaaacgcggccacgaaggaagagacgaccaggaaagccggcgcggaacggcgggagaagaagagcg

SEQ ID NO: 196673 - RNA, 87 nt, Homo sapiens
cccagagcgacagcccgggacaccaagaaagaacgcaaaaagggcgagacgaaaaacaagcaccaggaaggagcaagaccggcacac

SEQ ID NO: 196674 - RNA, 84 nt, Homo sapiens
ccggccgccgcccgagcgccgagaaagccccgggagaagcagcgccgcccggggcagaccaggcagggaggaagcacagaagca

SEQ ID NO: 196675 - RNA, 65 nt, Homo sapiens
gccgcccaagccgcacagccgcggcggcagcagcaggagaggagcagcaccgaggccccccccac

SEQ ID NO: 196676 - RNA, 87 nt, Homo sapiens
aaaacgggcagccggacaggaagccgccggcccgccgcgccccaccgcaaccggaggcaagcaccaaggcgaccaacgacgaagagc

SEQ ID NO: 196677 - RNA, 77 nt, Homo sapiens
accggagccgagcgggagggcgagagcgcaggagaacaccaaccaccagggaagagcgggaaagaaagagaaaggaa

SEQ ID NO: 196678 - RNA, 69 nt, Homo sapiens
acaaagaccagggaacaaaaccggaccagcacgagggcaccaggggggggcccggagccgcggggcaga

SEQ ID NO: 196679 - RNA, 74 nt, Homo sapiens
gccagcgcgcccgggccagggaagggccccggagccaggacagaaaacagccacgcaaagggaggaggagggag

SEQ ID NO: 196680 - RNA, 56 nt, Homo sapiens
agcccagcgccgaagcgaggcccccccacaagcaacaaccgagagaagaacaaaca

SEQ ID NO: 196681 - RNA, 67 nt, Homo sapiens
ccaccggcaccaccaaacagagccccgagaggggcgcgcagaaacgggaagaaacacgacaggaaaa

SEQ ID NO: 196682 - RNA, 58 nt, Homo sapiens
gacgagcgcaccagcgaccacaagacgccaaaggacacaaccagagggaagcacgccc

SEQ ID NO: 196683 - RNA, 59 nt, Homo sapiens
ggcaccgacccacgaacaacgggaaaagagaaagcaagccagccaagagggaccagcga

SEQ ID NO: 196684 - RNA, 82 nt, Homo sapiens
ggacccaccgagacaccaagggcggggcgaggaagaggggccaaagcacggaggcaacgggggagacagagagaaagaaggc

SEQ ID NO: 196685 - RNA, 63 nt, Homo sapiens
aaacgcgcggacgggcagggaggaagaagcgaagcgcaggacaagcggagaaaacagacacga

SEQ ID NO: 196686 - RNA, 69 nt, Homo sapiens
gaggaagaaaggcccacgcacagaaacgaaggcaacgcacgcacagagccaaagcagacccccaagcga

SEQ ID NO: 196687 - RNA, 73 nt, Homo sapiens
aacaagcgaggggacccagagaagaaacaacacaggagaaaagaaagccagaaggaaggaagcaacgaaccaa

SEQ ID NO: 196688 - RNA, 91 nt, Homo sapiens
cgccgcagccccccaagcggccgcgagaagcagcgggggggcaggcgacgaagcgcaaacgccaaggcgccggggagcaggagaagaaggc

SEQ ID NO: 196689 - RNA, 76 nt, Homo sapiens
cagacacagggggccaggaggaaccaacagaggcaaaacccgacgcaaacgacccagaaggcagaaaccgcagaga

SEQ ID NO: 196690 - RNA, 88 nt, Homo sapiens
gaacgggaacggcgaggacaggaaggagcacacaaacgggaccccaccacacagcagaagaagagagaagggcacagaccaagacaac

SEQ ID NO: 196691 - RNA, 83 nt, Homo sapiens
gaacccaagcgggccggacacgagacgccaccacaggcgccgcggagggcgaggagcagaggacaaggggagcggggaaaggg

SEQ ID NO: 196692 - RNA, 61 nt, Homo sapiens
ggcggacacgccggcacagacccagaggggccaacgccaaagccaccagagccccccggag

SEQ ID NO: 196693 - RNA, 35 nt, Homo sapiens
accagaagcagcccaaccaacgggacaaggaagca

SEQ ID NO: 196694 - RNA, 74 nt, Homo sapiens
gacaaacagacaagacaccagaaagacagggggcaggggcccgcaccaaaccacggaaggacagagaaaggcgg

SEQ ID NO: 196695 - RNA, 77 nt, Homo sapiens
ccaccaggccggagaacgccccaaggagcaagggaccaggaaggcacacggaccgcaaaaacaaaggaaagaaagcg

SEQ ID NO: 196696 - RNA, 75 nt, Homo sapiens
gcacaaacccgaaaaacgagcccgcggcaggcggggccaggcccgagccagaaggaggcccacagagccccccac

SEQ ID NO: 196697 - RNA, 81 nt, Homo sapiens
gccccgagccggaagggagagaccggagagaggagcgggaaggccccgcacccggagaccgggggaagacaagcacaagag

SEQ ID NO: 196698 - RNA, 59 nt, Homo sapiens
cagaagaggcacggcacccagagccacggcccggcaggagcccaggaggcgagcaaggc

SEQ ID NO: 196699 - RNA, 69 nt, Homo sapiens
gacagaagcagcagaagcagcagggccggggacacaagcaacagccagaacaagccgaagcacgaaacc

SEQ ID NO: 196700 - RNA, 75 nt, Homo sapiens
gaccgaaaagagaagacccgggcagggaaagacccaagaagccagcaagaagacaggagggagccgagcgcgccc

SEQ ID NO: 196701 - RNA, 81 nt, Homo sapiens
gacaagggaggaaagagacggagaggaggacaggggagaacagacggccaacaggaaagagaagaggaacggggcccaacc

SEQ ID NO: 196702 - RNA, 70 nt, Homo sapiens
cccccgggaaccgaaagggcccagagaggaagaagcaacagaaggaaggcaacagaagcagcagaaagga

SEQ ID NO: 196703 - RNA, 71 nt, Homo sapiens
agggcacccacgcacaccgcccggagaaggaaggcccgaagaggcacaggagcgaaccgccgacggaccca

SEQ ID NO: 196704 - RNA, 76 nt, Homo sapiens
gggggggcggagcgcgcgggcagccaaaagaagcaagggaaagaccaggagccagaaaccaaccaaagagggagga

SEQ ID NO: 196705 - RNA, 65 nt, Homo sapiens
ccggggccccaccgggcacagcaccacaacaaacaggcccaggaagacacgagaagcccgaggag

SEQ ID NO: 196706 - RNA, 79 nt, Homo sapiens
ggaaccagcggggagaaggcccagcgagcaccgccagcaccgcagaacacacaaaaagcacaggacaagcacccaagac

SEQ ID NO: 196707 - RNA, 57 nt, Homo sapiens
ggggcccgaggcgaagggcagaaagaagaaaagagacagcccggggacccgagacac

SEQ ID NO: 196708 - RNA, 74 nt, Homo sapiens
gacagaagaggcgccaggacgaaggcccacgggcaaggccccagccagcagggcccaagcaggacgaagcaggg

SEQ ID NO: 196709 - RNA, 72 nt, Homo sapiens
acggggcagacaaacacagaggccacaacagagaaggaaccagggacccaaagcaacggagccacagagaca

SEQ ID NO: 196710 - RNA, 80 nt, Homo sapiens
aggccacgcagagccacgccgggccccgcacggccagcccagcccacggagggcaccccgccacccgagggcacccccac

SEQ ID NO: 196711 - RNA, 83 nt, Homo sapiens
cgcggggaggaggcgaagccacacagagggcaagggacgaggcaccaagccagacgcccaagggagcaaggagaacccccagg

SEQ ID NO: 196712 - RNA, 49 nt, Homo sapiens
gcacgcgcggcagccagccgcccgcagccgcacaaacacgcagaggcaa

SEQ ID NO: 196713 - RNA, 84 nt, Homo sapiens
caccgccgacccggaagaccgccgccgggaaaccggcaagcagcccagccgagcagccccagaccgcgccgcccgaagcaagcc

SEQ ID NO: 196714 - RNA, 69 nt, Homo sapiens
gggagaacaggcgggccagcacggcccgagcccgggcaacccagggggcaggacgaccagcgggaggcc

SEQ ID NO: 196715 - RNA, 76 nt, Homo sapiens
agacgcccagagcacagaagggcccccccaggggaacaaggccccggagcgcagcacaccagcgccgcgcggggcc

SEQ ID NO: 196716 - RNA, 79 nt, Homo sapiens
agagcgagcgagggggggcgcgccggaaaccggagcgcgcagcaggcacgggcgagagcgggaagagcacgcacaagca

SEQ ID NO: 196717 - RNA, 79 nt, Homo sapiens
cggccgcgggccgcgcgggacaaagaaggccaagaagacgacacaaaaggagcaccgagcggacaagagcgacacaagg

SEQ ID NO: 196718 - RNA, 87 nt, Homo sapiens
ggacccaagaaagccgccagaccggcccagggcagagcgccggcgcaggcagggaagcagaccagcaggaggaggaggaagaggagg

SEQ ID NO: 196719 - RNA, 64 nt, Homo sapiens
gggagccgcaagggcccgcgggacgcgcgcaaaacccggggcgggagaccgaccgcacggaaac

SEQ ID NO: 196720 - RNA, 81 nt, Homo sapiens
ccgcggcaggacggggggcgggccgcccagcaagggcgacgacagcgccagcggaggggagccggcagcccgggaaaagga

SEQ ID NO: 196721 - RNA, 74 nt, Homo sapiens
ccggaggcaccggcaaggacagcccggacgaggggcaggaccggggacacacgacgcgggacgagcccgccgcc

SEQ ID NO: 196722 - RNA, 57 nt, Homo sapiens
gcccgcagggacgaggccccaaggagagacggacagaaaaacggacacgacagaaaa

SEQ ID NO: 196723 - RNA, 81 nt, Homo sapiens
accaggcccagggccggcccccccaggacaacccagaggcaacaaaggcgagggacgaacagcggggacgccccagcagac

SEQ ID NO: 196724 - RNA, 87 nt, Homo sapiens
cgagggggcagacgcaacgcaaggaccgcagggccggacagaccagacagccaccagaggacaaggacgcgcggacaggggaaggaa

SEQ ID NO: 196725 - RNA, 64 nt, Homo sapiens
accaggcgaagcggccgagcaggcgagcgaacgacgagacgaggacgcgcacaggaaaggacgc

SEQ ID NO: 196726 - RNA, 70 nt, Homo sapiens
acgcgagcgcaggggaaaaagaggagcaagcagggaggggcccagggggaagccgcaggcacggccagcc

SEQ ID NO: 196727 - RNA, 58 nt, Homo sapiens
gaaacccaaagccaggaagaaacagcgaaccgcgcgcacaaagagcacaacgccccac

SEQ ID NO: 196728 - RNA, 69 nt, Homo sapiens
agagagagagcggaacgggagaaagcacgggaggagaggaccgacaagacggaaaccgggagggggaaa

SEQ ID NO: 196729 - RNA, 79 nt, Homo sapiens
cgcagggccgggccgccgcgcaccgcagcgccggggcacgacacaaaaacagacgcaaacagcagacggaagaccccac

SEQ ID NO: 196730 - RNA, 32 nt, Homo sapiens
aagaagcaaaacacgaggcacccgacgagcac

SEQ ID NO: 196731 - RNA, 87 nt, Homo sapiens
aggccgacggagccggagcgcggacgccgcggggcccgggacagagaaggcaccggccaaagggggcgaccgggacaggacgacgac

SEQ ID NO: 196732 - RNA, 75 nt, Homo sapiens
ggaagggaggcgcgcggcagcaggggcgacgaggcgggacgcaggaagggggcagggcccagaggccggagcgag

SEQ ID NO: 196733 - RNA, 76 nt, Homo sapiens
caaaaaaacaacaccgcgaaagggagaagcggagagaggagaagagaagaaaaggcaccgcgcaacaccgcggagg

SEQ ID NO: 196734 - RNA, 56 nt, Homo sapiens
caccagaccagcgcggagcgagcgggaagggagcgccacgccagccagccaaaggg

SEQ ID NO: 196735 - RNA, 65 nt, Homo sapiens
acccccgaggaggacaccgaagaagacaggccgggaggccaacaagcggcggagaagcggaaagc

SEQ ID NO: 196736 - RNA, 37 nt, Homo sapiens
gccccgggagcgggacacagacaccaaccccgccccc

SEQ ID NO: 196737 - RNA, 85 nt, Homo sapiens
ccggagcgagccccaggccggggaggggggagcacgagaagaacgagagcgacaggacccagaccagccaaagagaagaagaaag

SEQ ID NO: 196738 - RNA, 101 nt, Homo sapiens
gggcagggccagggcgcaggggagaaacaaggcgccggagcaggacgagaacccccgcgaaccagaggaacccagcgagcgagagcggaccagaggacgga

SEQ ID NO: 196739 - RNA, 80 nt, Homo sapiens
accagaacagaaacaccaggaagggagaacggcaaaggccggcgggcagccccagggccccccgcgggacccagccagca

SEQ ID NO: 196740 - RNA, 84 nt, Homo sapiens
gcccggagcggcgacggcgagccaggcgcggggcgcagcgcgcaagcccagaaagcagggggccgagacaccaagacagaccgg

SEQ ID NO: 196741 - RNA, 71 nt, Homo sapiens
cccccgcaacgcccccggcccgcagcccccgccggccgcccaacaccgaacaccaagaagagcgaggacag

SEQ ID NO: 196742 - RNA, 73 nt, Homo sapiens
aacacagccagcgggagcagaagaaggaccgggccacagaagggcgagcagagccgcgcaagaccccaagaag

SEQ ID NO: 196743 - RNA, 76 nt, Homo sapiens
caccccacggccagggccaccaaccccaacccggagagcggcgagcagacaggacgcggcgccggagccagaacac

SEQ ID NO: 196744 - RNA, 110 nt, Homo sapiens
ggacgaaggggcagagaaggagcggcagcaggcgaagccacccgggagcaccaagagcaggagaccagcggaaggccagaggggaacgggacaagggaaagggaaggaaa

SEQ ID NO: 196745 - RNA, 74 nt, Homo sapiens
gagggagcacagcggaacaaccacagccacccaggacccagcgggcggggccaggccacaaccccaggcaacca

SEQ ID NO: 196746 - RNA, 71 nt, Homo sapiens
ggagagcccaggaacacaggacgagccagaaacacacacgagggaaaacaggaaaccaagcagagcgggac

SEQ ID NO: 196747 - RNA, 75 nt, Homo sapiens
ggccggcggccccgcggccgagaaacagacaacccacagaacaaagcggaccaaggcacccccagagcgagccgc

SEQ ID NO: 196748 - RNA, 76 nt, Homo sapiens
gcccgccaccagggccgcgggccccaagagccgcggcccgcggcccaccggacaaacccccaacccgcccaccacc

SEQ ID NO: 196749 - RNA, 79 nt, Homo sapiens
aagaaacacacacaaaacgggaaccacggagcaaagccaccagggcagcggcaaaggaggcggagaacggaaaagcacc

SEQ ID NO: 196750 - RNA, 68 nt, Homo sapiens
cgcacacaaggaacggcagaagagaccgacagcccacagacccagacagagggagcggagacaacgaa

SEQ ID NO: 196751 - RNA, 75 nt, Homo sapiens
gcaggaaaaacaaagaagacccaggaaacgggggcgcacaggaaacagaaaaaacagcaaagggagcaagacacg

SEQ ID NO: 196752 - RNA, 71 nt, Homo sapiens
cacggggaagacaccccacaaaacgacacggagaaccacggggaccaagaagcgagcagcccaaacggacc

SEQ ID NO: 196753 - RNA, 58 nt, Homo sapiens
gccgcccaacaccgaacaccgacgcaacggaaaggacaaggacaccaaggggacaggg

SEQ ID NO: 196754 - RNA, 67 nt, Homo sapiens
ggcggcgaaccgggccaaggacgccgccagccccaaagcgggaacaggggccacacagaaagaaaaa

SEQ ID NO: 196755 - RNA, 71 nt, Homo sapiens
gaggcgacagggacaacagaacaaaggaagggcaccggcgaggaacgcccaaccaccgcgagaaacggcgc

SEQ ID NO: 196756 - RNA, 85 nt, Homo sapiens
cccaggaagcgagagcgaagccgccacccaaaccagcaaaccaggaccgaaagaaccgcacagagcaggcccaccggcaacacaa

SEQ ID NO: 196757 - RNA, 72 nt, Homo sapiens
ggaaaaacccaaaaagaggggggacagcagcagcagacggggcgagcaccaaagccaaggaagcccagaaga

SEQ ID NO: 196758 - RNA, 76 nt, Homo sapiens
gagcagcccaggcaacagccccggggcagcaagcacggaggggcccaaagcacaagcgaccgccgaaggagccccc

SEQ ID NO: 196759 - RNA, 67 nt, Homo sapiens
cagaaccagagacagggcgggacacacacgcaccaaagcggaaagaacaaacagggagaagaacaga

SEQ ID NO: 196760 - RNA, 78 nt, Homo sapiens
ccaccgccgccgcgccaccgcggcagcccagccgccaggaggcgggcgagacaagggaaccgggaccggcgcccacca

SEQ ID NO: 196761 - RNA, 80 nt, Homo sapiens
acaaggaagaaaagaccagagagaagcaaaaaagcccccaccccgcgcacacagcgcaacaaacagccggcaccagagaa

SEQ ID NO: 196762 - RNA, 80 nt, Homo sapiens
cgcgggacggccgaggaaggaacggcccccccccagcccgccccaaaaggaaacccgaccgccccaggggcacagcagga

SEQ ID NO: 196763 - RNA, 77 nt, Homo sapiens
acagacagcccagcgcaggaaagcagggaggagccccccaaacagaaaacaagccaacgaaggaaaccgcgggcccc

SEQ ID NO: 196764 - RNA, 80 nt, Homo sapiens
cgggacacagcggcccggcccggccagagcgcccgggagcaccccccggaacgcacacccccgggcgcgccggacaggcc

SEQ ID NO: 196765 - RNA, 66 nt, Homo sapiens
gacggacaggcagggagagccgaaggcagaagggcacaacacagaagaaggcggggcaaaggaaaa

SEQ ID NO: 196766 - RNA, 79 nt, Homo sapiens
ggggaggccgcaccgcagcgaggccaggaacccggggagaccccgacgggaggccgagaacgaaaacaaacggaagaga

SEQ ID NO: 196767 - RNA, 79 nt, Homo sapiens
gccaagccagccgggaaccagaggcaccgcaagcgggacagaaaggggagcaggagaaccgaggcagaagggaaaggaa

SEQ ID NO: 196768 - RNA, 76 nt, Homo sapiens
accccagcaccagcccagagggaaagcacaccaccccagccaacagggaaaggacccggccaaggcgcaacagaac

SEQ ID NO: 196769 - RNA, 59 nt, Homo sapiens
ccagaaagcagagcgcgcgcggccgcaagaaaaggacagacgcaacacaggaaacaaga

SEQ ID NO: 196770 - RNA, 69 nt, Homo sapiens
cacggaggggccgcggaggggcacgagcgccacaaccccagagacacaggacagcggaagcagagcgcg

SEQ ID NO: 196771 - RNA, 91 nt, Homo sapiens
cggagcggggaccacggagacagaccccggcccggcgaccgagcgggcccggagccaccggcccagcggacacagcgggcaggaggaacag

SEQ ID NO: 196772 - RNA, 103 nt, Homo sapiens
caggcccaagcgaaaaagcgggaacgcaggacccaaagcgaacagaccggaaggccccaagaggaccaaaggcaccccccagagaacccacacagccgcacgc

SEQ ID NO: 196773 - RNA, 57 nt, Homo sapiens
cggcccggcagcgacaggaaggacgcagcaaccaggaaccccggcagcaagacgccc

SEQ ID NO: 196774 - RNA, 65 nt, Homo sapiens
aacaaaccaaagaggcgacacggcaagagagcccaaggccgcaacaccagaaagcgagcgacgga

SEQ ID NO: 196775 - RNA, 77 nt, Homo sapiens
acaaggccagaagcacaagaaagcagggaggcagcgacacccagacccaccggaccaggcccacccagaagcaacag

SEQ ID NO: 196776 - RNA, 69 nt, Homo sapiens
aacaaaaacagcaacacaaaaagggcccagcaagagaggaaaaccagacgcggaagggagaaggacagg

SEQ ID NO: 196777 - RNA, 56 nt, Homo sapiens
cgagggcacgaggcagggggaacgggaccacacgcccaaaggggcaggacaagaca

SEQ ID NO: 196778 - RNA, 65 nt, Homo sapiens
caccgcggagcgggaccgccgcaggaagcaaggaagaggaaccccccaaggaggaaaagaaggga

SEQ ID NO: 196779 - RNA, 80 nt, Homo sapiens
caagaccgcgcggaaggaagagcgcgcacaaaggacgggaagcagaacccagcacccagagggccacacgggcaggacac

SEQ ID NO: 196780 - RNA, 93 nt, Homo sapiens
aaaaaaggaagagaaaaagagagaaaaggagccagaaaagccggcaaaaccacacagcgaaaaggccagaccaagaagaacagccccagaaag

SEQ ID NO: 196781 - RNA, 70 nt, Homo sapiens
aaaagggcgaggaacgagcaggcaccccgaaacccgacagggcggaggaagacgccagaggggacggcag

SEQ ID NO: 196782 - RNA, 62 nt, Homo sapiens
gggcgcgggacacccccggcggagcgacagcggcaaagccaaaacagaagaggcaaagccca

SEQ ID NO: 196783 - RNA, 69 nt, Homo sapiens
cggggaagggagccgacaccgccgggcaccgcccccaagcccagcagcggggaagaaaacgccagagaa

SEQ ID NO: 196784 - RNA, 70 nt, Homo sapiens
aacagcaaaccacccagacggcaagagagccggccaggacacacagggcagacacaaggaacagccagcc

SEQ ID NO: 196785 - RNA, 80 nt, Homo sapiens
aaaggcgcgagggaccaacaaagacagagagccaagaacaggaaacggaccaagcggacagcccagagcaagcacacgga

SEQ ID NO: 196786 - RNA, 80 nt, Homo sapiens
cccgggccaggccgcggccggggcaggagcgcagggacgaagccacgacagcagagaggagcacggcagaggggcaaaca

SEQ ID NO: 196787 - RNA, 65 nt, Homo sapiens
cgcccgcccacccagggccggaaaagccaacgccggcgaagaggcagcgaggcgcgaaaaaaacc

SEQ ID NO: 196788 - RNA, 75 nt, Homo sapiens
gcacagccccgggccgccggacaagacgcagccagacccgagcgaaaccacgccaggaccaagggaaaggaaacc

SEQ ID NO: 196789 - RNA, 73 nt, Homo sapiens
agcgaagccgaaaaagcgcccgagacgggcccgccgaaagagcgccgccagcggaggcaagggaaccagccac

SEQ ID NO: 196790 - RNA, 79 nt, Homo sapiens
agccgacggggcgaccgccggcccaggggacgacaccccgcgaccgaaggccgccgcgccgagaggaacgcgggagaca

SEQ ID NO: 196791 - RNA, 83 nt, Homo sapiens
cggcgccgcggccgcgggcgccgaggacggcccaggagcagagcggccagagcccagggcgccgcgagacccgggcaaacagc

SEQ ID NO: 196792 - RNA, 79 nt, Homo sapiens
cgccaagggaaggagccaaaacccgcccagagcaaagcccggcccccacgacacaccgaagaggcccacggagaggaca

SEQ ID NO: 196793 - RNA, 69 nt, Homo sapiens
cgcggggccaccaacagaaacaggagaccgaaacacgaaagagaccaggcgaagcagcaaaacacacag

SEQ ID NO: 196794 - RNA, 83 nt, Homo sapiens
cggggcacccaccccaaccaccgcaacccgggccaaggcaacaacaccccacaaaggcccgggaggagcggggacacgaggac

SEQ ID NO: 196795 - RNA, 67 nt, Homo sapiens
caagaaccagagaaacaggggaggaacagcaaaaaagagggaacacgccacaccagcccgaaccaga

SEQ ID NO: 196796 - RNA, 56 nt, Homo sapiens
aagcaaacgagcagggcaagggaagaaaacgccagagaagcagagcagcccggagc

SEQ ID NO: 196797 - RNA, 52 nt, Homo sapiens
ccagagcgcgaccgcagaggagccccagaaaaagaccagggaaaagcccagc

SEQ ID NO: 196798 - RNA, 84 nt, Homo sapiens
agcgcgggcccgagggaggcagaggagccaggagcaggggcgcggcagaggcgcggacgagcagcgcagggcggggcgcgcgcc

SEQ ID NO: 196799 - RNA, 83 nt, Homo sapiens
cgggccccgggccccgaggccccgaccgcggcggagcccgacccacccaagcagaaagcgaagcagaagccgagaacagcggc

SEQ ID NO: 196800 - RNA, 67 nt, Homo sapiens
ccacggcccggagagagcacgcccaccgcgccggagccaaagagccgcccggacaagagccgggaag

SEQ ID NO: 196801 - RNA, 77 nt, Homo sapiens
aacgagaacggacccagagaagaaagaaaaagccagcagcggaggagcaccggaacacagaagcagagaagcccaca

SEQ ID NO: 196802 - RNA, 101 nt, Homo sapiens
accacggcccaagaaaaaaagcggcagcgggaaggagaagaaaccgacaccggccaaggagaaagaagccaagcggccggcagcaccagacaacccgggag

SEQ ID NO: 196803 - RNA, 58 nt, Homo sapiens
gcccgcagggaaaaaggccagccagacggggcagaagggcgcaaaacgcggaaaaccg

SEQ ID NO: 196804 - RNA, 76 nt, Homo sapiens
cggacacacagacccccaccaagcaggcacagagaagcaggcgacaaccacaccggagaggacaaagccagaaaac

SEQ ID NO: 196805 - RNA, 103 nt, Homo sapiens
ccagcagcccccccccaccacacccaaaccagccgggacagacccgcgccgccgcccccacgccacgcacgaagacagcgagaagaacaggaggccaaacaca

SEQ ID NO: 196806 - RNA, 73 nt, Homo sapiens
ggaaagccggacagccaaagccaagaaaaaggggaaaggcgccacgagcaggaggaacacagaacacgaccac

SEQ ID NO: 196807 - RNA, 58 nt, Homo sapiens
ccaagacacccgaaggccgcggggccccgaccccgggcaagaaccgaagcaaaagagc

SEQ ID NO: 196808 - RNA, 58 nt, Homo sapiens
caaccaccacacaagagaaaaggcaagaaacccgaggagggacgggaagagaggaaca

SEQ ID NO: 196809 - RNA, 45 nt, Homo sapiens
gccggacccccggaccccccgaccgccagccgccgcagggaagac

SEQ ID NO: 196810 - RNA, 79 nt, Homo sapiens
caccaaagagaacgggaagaccacaaccaggccccagggaaaggaccgaggcaggaaagaggccagacgcagggaccgg

SEQ ID NO: 196811 - RNA, 80 nt, Homo sapiens
cgggcgccgcgcagccccaccgcacaacgaacgggcaacacacacgcacgcccgcaagaaaaggggcgaagggaaaccgg

SEQ ID NO: 196812 - RNA, 74 nt, Homo sapiens
ggccccgggcacggggagaacgcggacagcccaagagagagaccaaaaacgacagaagacgaggcgccaagaaa

SEQ ID NO: 196813 - RNA, 78 nt, Homo sapiens
agacagagacgccacaccggagagcagcaacagagaaagaccagaccgacaccacccaaagagcgaccccagaaccga

SEQ ID NO: 196814 - RNA, 77 nt, Homo sapiens
gagcagaggagacaaaccggagaaggagccaagaaagagaagacaacgacaaagccacgcagcaccaaagagaccgc

SEQ ID NO: 196815 - RNA, 68 nt, Homo sapiens
aaaagcaagaaacaaaaacacagggaaccgaaccgaggggcgaagccggggaagcccaaagcagaagg

SEQ ID NO: 196816 - RNA, 74 nt, Homo sapiens
caaggggcacgcagaaggaccggccacgaccggggggccgcgcgcgaacccccaccggccgccccaccgaggcc

SEQ ID NO: 196817 - RNA, 78 nt, Homo sapiens
caaggccgcgagaacagcaagcagggaagaggagcgcaagcgccggggaggccagcaagacagaaccgccaaagcgcg

SEQ ID NO: 196818 - RNA, 79 nt, Homo sapiens
ggaggaaccagagcacagagaagagaaaaacacccacccccacagaggcaagcgcaccacccggagcgagacgcgccga

SEQ ID NO: 196819 - RNA, 74 nt, Homo sapiens
cgcccggcccgggaaacgaacaaacgcacggagcacaagcagaggaaccagggaaccgccgccagcaaccaaca

SEQ ID NO: 196820 - RNA, 77 nt, Homo sapiens
gccgcacccggacggaccgccacgcgcccgggagacgcccgcgccgccgagaagaccccaacgacaaaagccgcaga

SEQ ID NO: 196821 - RNA, 74 nt, Homo sapiens
gaggaggaaaggaggacgagaggggcaggacacaaccccaaagagagccgggcggccgacggagaaaggggccc

SEQ ID NO: 196822 - RNA, 74 nt, Homo sapiens
aaccgccacccccaagagcgacccacgcagaggcgaagacggggagccacgaggacaaagcccacaaacgcacg

SEQ ID NO: 196823 - RNA, 82 nt, Homo sapiens
gcccggccagccggcggagcccacgacgagcggaaaaggaacacgaggacccaaagaacaaacccggagagaagaaaacccc

SEQ ID NO: 196824 - RNA, 76 nt, Homo sapiens
acaggaaaaggccaaaggggacggaaagagagccgcagcgcagaacaagggaaaaaagggcaaaaagggcaaaaaa

SEQ ID NO: 196825 - RNA, 79 nt, Homo sapiens
cccgggccaggccgcggccggggcaggagcgcagagagggaagggcaggagaaaaaaaggcaaaagaagaggcggaacc

SEQ ID NO: 196826 - RNA, 53 nt, Homo sapiens
cagcccaagagccagagacacggagaggcaaggacccagacagacggcacgcc

SEQ ID NO: 196827 - RNA, 74 nt, Homo sapiens
gaagaccacagagggacccggacaaccagaggcagccagcagggggagcggagcgacaaaagagaagaccagaa

SEQ ID NO: 196828 - RNA, 69 nt, Homo sapiens
agaaggggagaaggcaggcaccacaaaaaggacaggcagaaaggagcagaagacaaaacaggcagaaaa

SEQ ID NO: 196829 - RNA, 78 nt, Homo sapiens
aacagacgggacccccagccaaaggcaaaggcaggcgccagagggacccacgacccagacgccgggcccgggaacagc

SEQ ID NO: 196830 - RNA, 67 nt, Homo sapiens
agaccaagcgcgaaagcgccaaaaggacagcagacacgagggagagaggagcccagaaaagcaggac

SEQ ID NO: 196831 - RNA, 80 nt, Homo sapiens
cacgacccaggccccggcaacccaggggacccacgagcagccaaaaaaagaagcaaaagacgcagaaacaaccaccaaac

SEQ ID NO: 196832 - RNA, 74 nt, Homo sapiens
aacagacccggcgcccagcggagcccccgcgccccgacccaggaagaagagagggcgaaggaggccacacagaa

SEQ ID NO: 196833 - RNA, 79 nt, Homo sapiens
ggagccagcggacaacggcccaagacaggcccacccagcccccggagaaacaggccccccaccaggcgcccaccccacc

SEQ ID NO: 196834 - RNA, 88 nt, Homo sapiens
cgaggacgggggcagcaacaacgagccggaacaggagggacggcaccagagagacaagagagacaccccaaccgacaaagagcaccag

SEQ ID NO: 196835 - RNA, 74 nt, Homo sapiens
gaaaccaaggcagggggaaagagagagccgcaacaggccagcccgacagaaccaaaggggaggggggaaccgaa

SEQ ID NO: 196836 - RNA, 78 nt, Homo sapiens
cacgcgcgggcgggcagccccgggccaggccgcggccggggcaggagcgcaggccccccaccagaaagagcagagccg

SEQ ID NO: 196837 - RNA, 78 nt, Homo sapiens
cagagagccccagcaggaaggccaccgagggaacccgaccggacccagccccagaaggacccagcagccagcgaagcc

SEQ ID NO: 196838 - RNA, 71 nt, Homo sapiens
gcccgccgcagagaggagaaagcaggaagaagacggcacgggacccccagcacaggcagcaggccgggaga

SEQ ID NO: 196839 - RNA, 71 nt, Homo sapiens
accaagcgcacaggaggcccagagaagcgacagcaaagcacgggaccagcacacacaaaggagaaaaccag

SEQ ID NO: 196840 - RNA, 61 nt, Homo sapiens
ccagggagcaggagccagggccgagcacgggaaaccccgcgaggcaagacaagaccaggca

SEQ ID NO: 196841 - RNA, 66 nt, Homo sapiens
gccccacagcaaccagcaccagagaaggagcacccggggaggagcggcaggagaagcaaagcagga

SEQ ID NO: 196842 - RNA, 67 nt, Homo sapiens
cgcgcaaaggccccggcaagaagacaacggcaagcggagaagagcaaggccgaaccgagaggaaggg

SEQ ID NO: 196843 - RNA, 78 nt, Homo sapiens
ggaaaaggggccaggggagagcagaggcaaaccgaaagaccccagaggagggagcaaaagggcagaaaagcagggcaa

SEQ ID NO: 196844 - RNA, 65 nt, Homo sapiens
caaaaacccaaaccccccaccagcgccaagagccgagagcggcccaggaggaacaaccagcccac

SEQ ID NO: 196845 - RNA, 81 nt, Homo sapiens
ccgaggcgcaccaagggcgaaggagccggcccaagagacgaagaggagcagaaccagaagggacacacaggacggcaggaa

SEQ ID NO: 196846 - RNA, 44 nt, Homo sapiens
gagaacaccagacagagagcaggaaaaagcccagaggaacaggc

SEQ ID NO: 196847 - RNA, 85 nt, Homo sapiens
gcggccgcggagaccaccgcggcgcggcagcgcgcccgaggaacggggcgcgaaagacacggacaacgcaaacccggcccccccc

SEQ ID NO: 196848 - RNA, 72 nt, Homo sapiens
cccaccgccagccacccacgccagcagagggccagagggggcgaccgggacaaacggcggaggcagaagagg

SEQ ID NO: 196849 - RNA, 42 nt, Homo sapiens
ggcgccacaccggaagagcaacgaaaaacgcgcacagaacgg

SEQ ID NO: 196850 - RNA, 83 nt, Homo sapiens
ggaggaggcacagggcgcggaccgcacgagcgcgagacgcaccgggcagggcaccaagccgggccgcggggggacccgagcgg

SEQ ID NO: 196851 - RNA, 83 nt, Homo sapiens
agaagcgcagcgaaggccggaacaggccgggccccccaggccgccaagaacgagcaggacaaaaacaccgaaccagaagcgag

SEQ ID NO: 196852 - RNA, 40 nt, Homo sapiens
cgggccgaccaaggaccccaagagacggggcgccagggcc

SEQ ID NO: 196853 - RNA, 77 nt, Homo sapiens
cgagcgggacccggcaggagacggcggcagcagacagcagcgacgggggacaggaggcgcgcaggaacagaaacccc

SEQ ID NO: 196854 - RNA, 78 nt, Homo sapiens
ggacgcgcacgagggacggggaaagggcccaagcgccacggcggccagacagccccggaagcagcccacaacaaccga

SEQ ID NO: 196855 - RNA, 75 nt, Homo sapiens
accaccaacagcaggagacgcccccgagcaagacaaggccacagacgggcagaccgggccggcaccaaaaggcca

SEQ ID NO: 196856 - RNA, 48 nt, Homo sapiens
agcaagacagaaccgccaaagcgcgacaggagaacggcggccccgagc

SEQ ID NO: 196857 - RNA, 67 nt, Homo sapiens
cacaggcccgcagcccggggcgaacacggacaccaacgagcgaagcaggccagaggcacggacgacc

SEQ ID NO: 196858 - RNA, 72 nt, Homo sapiens
gacccaaggaaccaaggcggcccggcgggggaaccacagacaaggcccacggccagacacaccaagagcggg

SEQ ID NO: 196859 - RNA, 83 nt, Homo sapiens
cgacgggcagcagacacaagaaacacgccacccacacagaaagccagggccggagggagaacagagcggccccccccacccca

SEQ ID NO: 196860 - RNA, 56 nt, Homo sapiens
gacaaaaccccggaaaaccgaaggaccgggcccagcaaagcacagcagcggacaca

SEQ ID NO: 196861 - RNA, 59 nt, Homo sapiens
gacaggaaaacgggagcgcgcggcgaaagcgacgggaccggaccgggaagccggaagca

SEQ ID NO: 196862 - RNA, 78 nt, Homo sapiens
aacggacaagcagaagaagaagggaccccaaaagagccaagcccagagacccagccccagagccagggcaccacgcgc

SEQ ID NO: 196863 - RNA, 86 nt, Homo sapiens
cccgagagccgcgagcgcccggccgaacccgcgaggaaaagcccagcggcccgccaggcccgcgcaaaccagcaaaagcagaaagc

SEQ ID NO: 196864 - RNA, 78 nt, Homo sapiens
cggacccagcgagcgggcggcacgcacgcagggacaccggcgccacacaggacacgcagcaccgaggcaccaggaagc

SEQ ID NO: 196865 - RNA, 76 nt, Homo sapiens
ggacccgacagcaccagaccagcaccagacagcgaaaaagaggacccaaaaaagagagaaaaggccaaagagaggg

SEQ ID NO: 196866 - RNA, 104 nt, Homo sapiens
cacccaccgagaagccagcgggagacaaccgaacccaggaagcagacacaagaggcagcgacaagacaagccccagcccagaaaccaccccggacaggaagccg

SEQ ID NO: 196867 - RNA, 82 nt, Homo sapiens
gcccacgaggcaacacgcaaggccgccaccaggggcagcggcgccgcaagcacgcgagcggccagacgcaacccaagaacac

SEQ ID NO: 196868 - RNA, 51 nt, Homo sapiens
gcaaagacgagagcggaaaaaggacacgagcgcagcaacaaacagccggcg

SEQ ID NO: 196869 - RNA, 60 nt, Homo sapiens
ggccacacagaaggacggcccgacggaaggagggccaacccggaggaccccagcaacaaa

SEQ ID NO: 196870 - RNA, 53 nt, Homo sapiens
cgacgggacaggcccaccggaccgcagaaacgaggaaacgcggacaagggcaa

SEQ ID NO: 196871 - RNA, 72 nt, Homo sapiens
cagccgccccagcggcgcggcgccgcccacggagcgcgaaccaccgcggcagaacggcggggccgaggacca

SEQ ID NO: 196872 - RNA, 79 nt, Homo sapiens
gaaccagagagcgagggaaaaccgaggggggcacaacgaaaagaaggaggccagcgggacacacaaagaaagacgaagg

SEQ ID NO: 196873 - RNA, 70 nt, Homo sapiens
gccggagccgaagacacgacagacccgacgcacaggccaggcggaaaggcaaccggccgcaggccagccc

SEQ ID NO: 196874 - RNA, 69 nt, Homo sapiens
gaaggaccaagaaccagggagacaggcaggcaaaccacgaaggacacgcaacaccaaagaaaggaccca

SEQ ID NO: 196875 - RNA, 79 nt, Homo sapiens
gcagccagcccgaagaaaagggaaaacgcgcgggccaaggcaagaacggaagcacgggcggaggaaagcacaagcagag

SEQ ID NO: 196876 - RNA, 76 nt, Homo sapiens
accggaaggcccgcaggacccaggcggcaggccgccaggcacagagaaggcaaacgggagggcgaggacaccaaga

SEQ ID NO: 196877 - RNA, 68 nt, Homo sapiens
ccccagcccgaaagcccagagccaaacagaaaagaagaggagaagcaagcagagcgcccgagccggaa

SEQ ID NO: 196878 - RNA, 81 nt, Homo sapiens
gcaccagcagccaccaggagcccgagagagaaggcgagaccgggaccaagcgggacccgaggagggggagcgagagacacg

SEQ ID NO: 196879 - RNA, 71 nt, Homo sapiens
aaccgcgcggcaggccaggggaccggaaaggagagggcaacgaacgacagccaggaaaccagcaagaaagc

SEQ ID NO: 196880 - RNA, 79 nt, Homo sapiens
gcagacccaagaagacagaccccgaggagacgagaggacggggacgggccccaggacgaggaagacaaggccagccacg

SEQ ID NO: 196881 - RNA, 56 nt, Homo sapiens
cccggggaagagccccaagggggggccccagcccggccgaacgggcgcacgacaca

SEQ ID NO: 196882 - RNA, 69 nt, Homo sapiens
accagagccgagaaacgcgaaaaggaagcggaagggcccgggcacccaggacccagaggcgacagcggc

SEQ ID NO: 196883 - RNA, 80 nt, Homo sapiens
cagcgcccggcgcgcggcgcgccgcccggcgagcgggccggaggaaaagaaaggaaagaccacagcaagaccacgccccc

SEQ ID NO: 196884 - RNA, 82 nt, Homo sapiens
gcggacccgagaccagcagggccgggcgcagaggccagggcggccccaacacagcaggaaagcacagccggcccgaaaggac

SEQ ID NO: 196885 - RNA, 79 nt, Homo sapiens
gccacgcaccaccgccagcggaggagaaccagccaaaagaggacccgcagacacaacggaggcccgaccgagcggcccc

SEQ ID NO: 196886 - RNA, 84 nt, Homo sapiens
cagcgcagcagcacaggcgagcccccgggccgggccccacacaccgcccagggagaccgacaggcaggagcgaggcagcgcagg

SEQ ID NO: 196887 - RNA, 86 nt, Homo sapiens
gaaggggggggcggcggcacgccggcggggaccgcgggaaggcgaggacgaggacgaggacgcaaggacacaccagaggacgaaag

SEQ ID NO: 196888 - RNA, 68 nt, Homo sapiens
cagaagaagcaaagccaaaagaaggcagcggagggaacgaaggaacaaaggcagaaccagagaccaca

SEQ ID NO: 196889 - RNA, 84 nt, Homo sapiens
cgggagcacaggcccgggagggagagaaacccaggggcgggaaccgacgaggaccccagagacacgcccagaaccaaccaggag

SEQ ID NO: 196890 - RNA, 73 nt, Homo sapiens
ggaagcagacaaaggaaacagaccagacgaaaggcgaaaaaagcccagaaaagaaaggaggaacccgaaagaa

SEQ ID NO: 196891 - RNA, 37 nt, Homo sapiens
ggaaagaaggcaaaacacggagcgagccgcgaccagc

SEQ ID NO: 196892 - RNA, 72 nt, Homo sapiens
ggccgggagggcccgccagccgcgcccggcagccgccgcaaagggacgacgaagggacagccagaagggaag

SEQ ID NO: 196893 - RNA, 61 nt, Homo sapiens
gccgcgccggcggcgccaggagcacacggcgcacgccaacacaacacaggcgaagaggccc

SEQ ID NO: 196894 - RNA, 81 nt, Homo sapiens
gcacgggcccagcgggacccgcgcccccggacggccacgagaccggacagacgggggcggcaagaggccgaaaggaagagc

SEQ ID NO: 196895 - RNA, 78 nt, Homo sapiens
agggcaaaggggaaacagcagagaccccagacgccaccacaacccccagacgcaagccaagccgggggaagaccagac

SEQ ID NO: 196896 - RNA, 74 nt, Homo sapiens
ggcaccacagacaagaaagcccccacggaaggccacgagggcggaccccggggcaccagcgggcacaccaagaa

SEQ ID NO: 196897 - RNA, 63 nt, Homo sapiens
ccccggcgccgcgccggcggcgccccgggaacagagagaccagcgccccacaagaaacccaaa

SEQ ID NO: 196898 - RNA, 72 nt, Homo sapiens
cccaggcggcgcggacggggcggagacgaggccacaagaccaggcggcgaacccggccaagcgaccccgccg

SEQ ID NO: 196899 - RNA, 81 nt, Homo sapiens
aggaaagaagaacaacagacgagaagagaagggagcaccaggagacgccaggccgaccaaagagcagagacggaaggaaaa

SEQ ID NO: 196900 - RNA, 36 nt, Homo sapiens
ggaaccacccaccagagagcggaggagcgccaacag

SEQ ID NO: 196901 - RNA, 55 nt, Homo sapiens
ggggccgcgcccccccagggaccagcaccggcagggagaagcagaagcccgcaca

SEQ ID NO: 196902 - RNA, 76 nt, Homo sapiens
gagccccagcaggaaggccaccgagggaacccgaccggacccagccccagaaggaaccagacgccgcaggcccacg

SEQ ID NO: 196903 - RNA, 83 nt, Homo sapiens
gaggacgaggacgaggacgcaagagccgcgaagcagccacggaccccagcacgaaaagacgggagaaaaaggggccagggaca

SEQ ID NO: 196904 - RNA, 83 nt, Homo sapiens
gccgcggcggggcgacggccgcggggaccggagcgagaggagcgcgccggaccagcgcggacggggcagacccgcagagacca

SEQ ID NO: 196905 - RNA, 82 nt, Homo sapiens
cacagggcacgccacagaacaggagcagagccccgggccgcgcaggagcgcccccagggaagcggaggacacccgggccggg

SEQ ID NO: 196906 - RNA, 79 nt, Homo sapiens
cggaaaaccagcgggacaaggcaccaagccccgacaagggaccgggcgggccccgcaggaaacccccaccggcccacac

SEQ ID NO: 196907 - RNA, 56 nt, Homo sapiens
ggccgcacgccccagcaggcagcgagcggggcgaaaggaagccgggggaccaacaa

SEQ ID NO: 196908 - RNA, 74 nt, Homo sapiens
ggggacacacaaagaccaggagcgcaggcagcagcccacggaaaaaaagacggggagccccggagaggaccaga

SEQ ID NO: 196909 - RNA, 60 nt, Homo sapiens
cggcagacggaaacgacagaagcagaggggggcacaagccacggagcgagcccggggagc

SEQ ID NO: 196910 - RNA, 67 nt, Homo sapiens
agaagggaggagcagcccaacagaagggagagcccagagacaagcaaagaggcaggacagaaccaag

SEQ ID NO: 196911 - RNA, 78 nt, Homo sapiens
gagcccaaggccacaggaagccacagcaggccaccagccagaagacccaacagaggaagagggggaaccgacacgcag

SEQ ID NO: 196912 - RNA, 59 nt, Homo sapiens
caaggcaacagaaagagcaacagcagggcaacagaagagagggcaaccgcaagaaccac

SEQ ID NO: 196913 - RNA, 72 nt, Homo sapiens
cgaggcaccggggaaaagcagcaggcaagggaaagggaggagaggacggccaagacagagcgcgaaaagaaa

SEQ ID NO: 196914 - RNA, 75 nt, Homo sapiens
caagacaggaagcccaagcagcaaccaaaagagccaaggacccaaaaaccaggaacagagaaaaggaggccggac

SEQ ID NO: 196915 - RNA, 79 nt, Homo sapiens
gcagacagcgcaaggcaaagggggaccccacgaccgcagcgcccagcgaccggaggagcaaaaaggacagagcacagag

SEQ ID NO: 196916 - RNA, 82 nt, Homo sapiens
ggcagcggcgccacggaccacggcggcgcccgcagccccaccggagaagaaggaagacgaccccgaccacggggggcagagc

SEQ ID NO: 196917 - RNA, 70 nt, Homo sapiens
agacacaggcaccaaaaggcaggagaacgaccaagcacaaggagaacgcagcgcaccacacccgagcaga

SEQ ID NO: 196918 - RNA, 93 nt, Homo sapiens
ggagccccaggagcccagacaccagccccccaccaggaaagccgaggaagagagccgcggaccccaaggaaaacggggcagaggggggagaag

SEQ ID NO: 196919 - RNA, 79 nt, Homo sapiens
gggaggccgcaaaagcgacgaaccaaagacagaccaacaaccacacaggagagaaaaggacccgagccccaaagaggac

SEQ ID NO: 196920 - RNA, 59 nt, Homo sapiens
ccggcccaggacacccgggccaggagacaccgaggcccggcacgagccgccagcccgcc

SEQ ID NO: 196921 - RNA, 84 nt, Homo sapiens
agaacccaaagacggcagccggcaggagagcgacaaaccaaggaggcccacaagacagggacaagaggacaacgcagaaagaac

SEQ ID NO: 196922 - RNA, 66 nt, Homo sapiens
gaccccggagagcaaggaagaaagcagcccaggaaaccgcaagaagcaagcgaacagaagcgcccg

SEQ ID NO: 196923 - RNA, 83 nt, Homo sapiens
gacagagagcccggacaggaagggcaggcccgaaggccccgagccccggccccaaagacccaaaacagagacaccccccagcc

SEQ ID NO: 196924 - RNA, 77 nt, Homo sapiens
ccgcagaggaaacacagggcgaacaccaggaaggaacggcacggagccagacacaaaagggcagcgcaagaccccgc

SEQ ID NO: 196925 - RNA, 84 nt, Homo sapiens
gagaggcggccagaagaaaacgaggggcggaacacccgccaaagcagagaaaaggggccgacgacgagccccgcgaggagcgca

SEQ ID NO: 196926 - RNA, 78 nt, Homo sapiens
agcgccggagcccgagggacggggacggagagaacacgagcccacagggggggccccagcccggccgaacgggcgcac

SEQ ID NO: 196927 - RNA, 75 nt, Homo sapiens
ccgaccgcacgccggcgcacgggaaacccaagcgccgcaccccccggaggcggccgagcccacgcgacgaagaac

SEQ ID NO: 196928 - RNA, 76 nt, Homo sapiens
aaaaacgaacgccacgcgcccggcgcccagcccaccagcacggcagcaaaggcacagaggccgccgggcacaacga

SEQ ID NO: 196929 - RNA, 73 nt, Homo sapiens
gcccacggccggccagaagagaagcgagcggaagaccggggcaagaacgcgcaacacagcgaccgacgggacc

SEQ ID NO: 196930 - RNA, 68 nt, Homo sapiens
ggaccccgacgccgcgggcccggccccggacgcggaccccggggaaggagggggggcgggcccaggcg

SEQ ID NO: 196931 - RNA, 37 nt, Homo sapiens
gggggcagcacaggagggggggccgcaaggccaggcg

SEQ ID NO: 196932 - RNA, 81 nt, Homo sapiens
accacaaagaggaaaggacgccaggacacacggcacaagcacccaccccgaagaacagaaaaagcagggcacaagacacgg

SEQ ID NO: 196933 - RNA, 80 nt, Homo sapiens
cggcagccggcgggcagcagccggccgacccagaggcagggaaaaaccaggacaaaaagcaaaggacggcgcaaggaggc

SEQ ID NO: 196934 - RNA, 76 nt, Homo sapiens
aacagacagggccgcaggcggaacgcgacaaacagcgaggcgcgcgaccacaaagccccaagaaaaacaagccggg

SEQ ID NO: 196935 - RNA, 38 nt, Homo sapiens
acacagaaaccggccccggccagccggccccaaccaag

SEQ ID NO: 196936 - RNA, 51 nt, Homo sapiens
gccccaccgcgccccagcggccacggaggggaagagagaagacagcagcga

SEQ ID NO: 196937 - RNA, 68 nt, Homo sapiens
cgaagcaacaagaaaaccccaacaacagaggaccacaccgcagaaggacaccagcggagccacccaag

SEQ ID NO: 196938 - RNA, 40 nt, Homo sapiens
gggaccgaagaacagacaagccaaagagaaaagacgaacg

SEQ ID NO: 196939 - RNA, 67 nt, Homo sapiens
gggccggcacacaggggcggaaggaagcggccccacccacaccacgaaggaggagccagagacgagg

SEQ ID NO: 196940 - RNA, 78 nt, Homo sapiens
gaaacccaggaccaccacgggaccacccaccgagaaaaggacacaaaggagaagcggggggggaccccacgacagcca

SEQ ID NO: 196941 - RNA, 79 nt, Homo sapiens
aaaaaggcgccagcaaacagcccgcaggaaggagaggaaacgcagaagaggaagcgagcaacggagcccgagaggccgg

SEQ ID NO: 196942 - RNA, 76 nt, Homo sapiens
ggccagcggccgcgcacccccggccggaggcaccagcggacgcacaccgagacgaacacagaacagcacgaccaga

SEQ ID NO: 196943 - RNA, 76 nt, Homo sapiens
agccacaccgggacgaccaagccgagaccacgcacccagaggcgaggaacgcacaccagcaccagcccaccaaacc

SEQ ID NO: 196944 - RNA, 72 nt, Homo sapiens
cgcccggagagcaaaggaggaggagagaaaggaccccagcgacaacagaaagccgggaaggaccagaagagc

SEQ ID NO: 196945 - RNA, 72 nt, Homo sapiens
caccgacggaaccaaaaccagccacaaagcagaaagcccaaagagaagagaagcaaggaaagaagacaagaa

SEQ ID NO: 196946 - RNA, 79 nt, Homo sapiens
gcgaagaaacagcggagaaggagaagggagaagaaacagcagccgcagggcgacccaccaacaggcaacccagacaaag

SEQ ID NO: 196947 - RNA, 82 nt, Homo sapiens
caaggcagcgagggcaggcccgcagcgggcgccggagccagagccgccgcagggcgaaggcgaggacccccagcccccagag

SEQ ID NO: 196948 - RNA, 67 nt, Homo sapiens
gggagagagacgcgggaaccgccagcaaaccacacaggaccagaacacacggggaaaccgggaaccc

SEQ ID NO: 196949 - RNA, 62 nt, Homo sapiens
caaaggagcagggaggcccccagagagcccacgaacggcgggaacagaaagccagaggccgg

SEQ ID NO: 196950 - RNA, 71 nt, Homo sapiens
cggccgggagcggagccccggggcagaacgggaaaaaaaagcacggacagggaaggagaagaagaaaggga

SEQ ID NO: 196951 - RNA, 76 nt, Homo sapiens
cacccccggcgggcccgaggcggcgagagaggcaggcggagccgaccgggccaggacccagcaggcccgccccagg

SEQ ID NO: 196952 - RNA, 76 nt, Homo sapiens
cagagagcaaggggaaacacaccagcacacaaaggcgcaccccccgcgccggccccgccagcagaccccgcgagcg

SEQ ID NO: 196953 - RNA, 79 nt, Homo sapiens
gaggacgcaaaggcccccaaggcccagaggcgaagggcccagcgcagggcggcagaagaggagaaagaggacacggccg

SEQ ID NO: 196954 - RNA, 103 nt, Homo sapiens
gcgcgaccgcgagcggcagcccgacggcaccccgggggacgggggcggcggggcgccggcggcgggacaggcaagaaaaccgcccacgaaggacaggaagccg

SEQ ID NO: 196955 - RNA, 77 nt, Homo sapiens
agcagggaagaaggaacacgaggcagggggccacacgcaaggggaacaggcccgccagcgggaccccccacaacaac

SEQ ID NO: 196956 - RNA, 68 nt, Homo sapiens
gcagccagcgccgcaacaagcggcagcaaggacgagagcacagcccccaggagaggcaggcgcaaagg

SEQ ID NO: 196957 - RNA, 70 nt, Homo sapiens
gagagaaaccaacaagcgggccccagcagccgagcggaacaacaagcccggaaggaaagaaaacaaagac

SEQ ID NO: 196958 - RNA, 100 nt, Homo sapiens
accaagccggcagacgcgaaggagaaaaagcaggggaagcagcgcacgccaggaggggccgccgcgccaggagagggggaacggcccgggggcgcaacag

SEQ ID NO: 196959 - RNA, 66 nt, Homo sapiens
ggagaccccaggcaccacagcccgaggcccggagcgaccagaaaagaggccaggggacccaaccaa

SEQ ID NO: 196960 - RNA, 79 nt, Homo sapiens
caccaacaggacagccagagaccgaacagagagaacaagagacgcagccgcacagagagaccgaaggagcagacgaggc

SEQ ID NO: 196961 - RNA, 81 nt, Homo sapiens
ggaaggcagcgcacgacagcaaaagaaagccaaggacacgcaggacgaagaaggaggagagcccagaagaaaccaaagggg

SEQ ID NO: 196962 - RNA, 81 nt, Homo sapiens
ggccgcggcgcagggcgcgggacacaaccgcagaaaggaagagaggggggcggaagcgaggaaggcggaggcagggcgcga

SEQ ID NO: 196963 - RNA, 85 nt, Homo sapiens
ccggaagcccccacgggccaccgacccgcaggcggccacacacccggagcaccgcacacagcggcaagccaccggaccagcccca

SEQ ID NO: 196964 - RNA, 76 nt, Homo sapiens
ggcggcagggcgcgggcacgcgccacgccacgccgcgggcggacaccagcagccgggacaccacgcaaacaaaaga

SEQ ID NO: 196965 - RNA, 73 nt, Homo sapiens
agaaggggaaaagcaccaaggaggccacaccggcccgcagaggaggaaggcccgcacacacccgcaggcaccc

SEQ ID NO: 196966 - RNA, 76 nt, Homo sapiens
cggagaaacaggaccaggacaaaagaacaccgaaaacaacagacagaacaccgcccggcggaagcgccaggacggg

SEQ ID NO: 196967 - RNA, 34 nt, Homo sapiens
gccagagggaaggacaggccaggcgcgggccacc

SEQ ID NO: 196968 - RNA, 57 nt, Homo sapiens
agagaccccaaaggcacccgcgagcgcaacccaaggacaaccaccaccagcgagcaa

SEQ ID NO: 196969 - RNA, 109 nt, Homo sapiens
gaacccagaaggccgaggaaggacggcagagcgcaggacgccacagcaagaggaccccaccggcggcgaaggaaagcggaacaagaaacaacaaccacgaggcaacacc

SEQ ID NO: 196970 - RNA, 80 nt, Homo sapiens
aacagcacagccggcgacggcgcggagccagacaggacaagagggcagcaccgcagagaccacgagccggccacaacgaa

SEQ ID NO: 196971 - RNA, 47 nt, Homo sapiens
cccagaagcgcgcccgggaggcgagggaggcggccggagccaaaccg

SEQ ID NO: 196972 - RNA, 59 nt, Homo sapiens
gcggcgcccccaggaccccgcacgggagaaaacccggaaagcaaaaccaagaacagaaa

SEQ ID NO: 196973 - RNA, 73 nt, Homo sapiens
aaagaagaggccacaagcaagaacaaccaccgaaacgggcgaaaaagaagaacagcaaaacacgaaaggcaaa

SEQ ID NO: 196974 - RNA, 59 nt, Homo sapiens
gggcgagcacgagcacccgccccaacgaggggagaagcccgacagagaaaggagaaaag

SEQ ID NO: 196975 - RNA, 57 nt, Homo sapiens
ccaaggaggaggcccaagaaaggccacgcacaggggaccagcggggacaaggggacg

SEQ ID NO: 196976 - RNA, 70 nt, Homo sapiens
cagagacagagaagacaacgcaaggaagagaaaggaaccgcccgaacccggaccagaaacaacccaacgc

SEQ ID NO: 196977 - RNA, 56 nt, Homo sapiens
gcggaggcgacacccagagagcccagaaaaccaccaagaaagaaaaaggagaagaa

SEQ ID NO: 196978 - RNA, 60 nt, Homo sapiens
ccgggggccacaggggcccgacaacggcacgggacccgagaggggcggggagagggcggc

SEQ ID NO: 196979 - RNA, 70 nt, Homo sapiens
aacacccccagagacacaagccaagccaggccgccccccccacacaccagcccgcgcagaccacagaagc

SEQ ID NO: 196980 - RNA, 85 nt, Homo sapiens
gaaaaggaaccgaggcagacggagcggacggaaagcccagggcgggacaaagagacagcagaaggaggagcccccagaagcaccg

SEQ ID NO: 196981 - RNA, 75 nt, Homo sapiens
gaacaccaaacggaggagccagacccggggaggcgcacacacaccaaaggagcgcgggcgcggagacacagcggc

SEQ ID NO: 196982 - RNA, 68 nt, Homo sapiens
agacagggaggacaaaaaaagccgccgaaggagaaccgaaacagaggaccgaaaccaaagaccaaacg

SEQ ID NO: 196983 - RNA, 72 nt, Homo sapiens
aagagcaccccagagaccgccccaccgacgccgaaggggaggacgcgagcggaagagaagcaaaaagacaag

SEQ ID NO: 196984 - RNA, 70 nt, Homo sapiens
cagcgcccagacaaggaccagcgacaaggagcgcagcagcagaaagcaggacagccccacaccaggcgac

SEQ ID NO: 196985 - RNA, 52 nt, Homo sapiens
gaccaagaaccaggacgaaggacaggcgggcgggacccccaggcgccacaga

SEQ ID NO: 196986 - RNA, 56 nt, Homo sapiens
aaggcgccggggaacggagccgcgggaaaggaaacacagaaagggcgacaagaaac

SEQ ID NO: 196987 - RNA, 56 nt, Homo sapiens
caccaccgcgcagaggggcagggggaggggaaaaagaaaagggcgaagacccgaag

SEQ ID NO: 196988 - RNA, 76 nt, Homo sapiens
gggggcgacggccgagcagggggccgagacaacaagaaggggaggaacaaaagcgcaaaccggagccagaaacaac

SEQ ID NO: 196989 - RNA, 70 nt, Homo sapiens
gcgaaacagagaaacgcagcacagaccggacacggaagcagaacgccgggcaggaaccccgcacccacaa

SEQ ID NO: 196990 - RNA, 82 nt, Homo sapiens
caccccagcacaaggagcgaggccgcgacaggggacgcagagccaacgggagccgggagggaaacacaaaggagcaccagac

SEQ ID NO: 196991 - RNA, 81 nt, Homo sapiens
agcgcgcacaaccccccccggcccacgacccaaggacacaacccggccgcagagcccagggcgcccgcgccggcagaggag

SEQ ID NO: 196992 - RNA, 84 nt, Homo sapiens
cccgcaaggccgcaggcaggagaacacggcacccggcggagggacgcgccggcggagcgccccagacccgaaaagcggacagca

SEQ ID NO: 196993 - RNA, 68 nt, Homo sapiens
ccagcgccaccgacccggccccggcagggcaggacaggcacccgaaccgaagcagaaccgagaaaacg

SEQ ID NO: 196994 - RNA, 67 nt, Homo sapiens
gcacggggaaacgaccgccccaaaacgcgggacgacccgggacagcccacggggcagaccagcgacc

SEQ ID NO: 196995 - RNA, 51 nt, Homo sapiens
ggggcgccccacagaggggcgacgaaggcgacacacaacaacaggacaacc

SEQ ID NO: 196996 - RNA, 89 nt, Homo sapiens
ggaagaggacgacgcgacacaaacaaaaggaggagacagcaaggaagaagaaaagagagccaaggcggcaaaacccaaaaccagggcca

SEQ ID NO: 196997 - RNA, 70 nt, Homo sapiens
gcggaaaaccgacacaacagaacccgacaagaaagagcaaagggacagcaaaggcacaacacagaaagac

SEQ ID NO: 196998 - RNA, 78 nt, Homo sapiens
cgacgcccccaaccggcagggcagagagaagagcacacagaaggccaggagcgacagagcggggaacacgagacagca

SEQ ID NO: 196999 - RNA, 39 nt, Homo sapiens
cccacgcagagggcggagcggcagccaggacccgaaaag

SEQ ID NO: 197000 - RNA, 80 nt, Homo sapiens
gcacgaaaaaagcccgggcaaggggacgcgcagcgagagacaagcgcaagcagccagagcccgggcgcaaagaaccaggc

SEQ ID NO: 197001 - RNA, 82 nt, Homo sapiens
ggcgggaaggcaggaacgacacaggaaaagcaggaaaccaagaggacccaagaccccgaaggaagcagagcaggacccagga

SEQ ID NO: 197002 - RNA, 75 nt, Homo sapiens
cccagcccccggccggccggcgacccgacagggccagacgcaccgcgggcaccaagccagcaaggaggggacacc

SEQ ID NO: 197003 - RNA, 80 nt, Homo sapiens
gcggcccacggacgaggccgccccaggcgcccgacgcggaccccagaccaagaaaaaggggacaaggaaagcacagcaag

SEQ ID NO: 197004 - RNA, 82 nt, Homo sapiens
ggcacagccacacgccgggcaggagccacggcacccgggggagcgcccaggacacacccccagcgaagaagaagagagggac

SEQ ID NO: 197005 - RNA, 70 nt, Homo sapiens
cacagcgggcacagaaacgcaccacgcacagggagaaggaacggaaaagaagaagcgagagaggcgaaga

SEQ ID NO: 197006 - RNA, 60 nt, Homo sapiens
ggagcgggagcaaccccacaaaaagggcccaaggagaagcaggaggcgagaccaagagcc

SEQ ID NO: 197007 - RNA, 55 nt, Homo sapiens
ggacgaccggcgagcgggggaacgcggacagacaccaaccacaacaaccgcaaac

SEQ ID NO: 197008 - RNA, 47 nt, Homo sapiens
cgcagggcgcccccgggaaggaagaaggcggaggaacacaccgcgcc

SEQ ID NO: 197009 - RNA, 72 nt, Homo sapiens
gggccaaagaccgcaagaagacaacaggagacggcaagcaagcgagacggaaagaacccagagcgccaaaac

SEQ ID NO: 197010 - RNA, 60 nt, Homo sapiens
acaaaacaaccaacgaagacaccgagcgaaagagaaagaggcgaccaggcaccggccagg

SEQ ID NO: 197011 - RNA, 81 nt, Homo sapiens
cgaacacagaaccagaggaccagaacaaaccagagccgacacccgcacgccaggaccaagagcagggcgggggcagacacg

SEQ ID NO: 197012 - RNA, 61 nt, Homo sapiens
ccgcaccccgccccccgaccacccagcggacccagcagccagcgaagccccaaggaagccg

SEQ ID NO: 197013 - RNA, 77 nt, Homo sapiens
cccagccaaaggcaaagaccaagcaaggaaccagcgagcaaacgcaaacacaacagaaaaaagaaaacacgaccgac

SEQ ID NO: 197014 - RNA, 80 nt, Homo sapiens
agcccccgaagcccccgccgccgcgagaaggcccaagaggagcgagaaaccggccgggagccaaggaaaaggaaagcagc

SEQ ID NO: 197015 - RNA, 64 nt, Homo sapiens
aagggcaccccaacaagagggcggcgacggcggcgcgaggaccgaccgggcccgcggacgaaga

SEQ ID NO: 197016 - RNA, 63 nt, Homo sapiens
acgccccggcggaggaggggcacagaggcccacccacagggcacgcagacgcagcaggaggga

SEQ ID NO: 197017 - RNA, 76 nt, Homo sapiens
aggaggccagccgcgccaggcaccgcgaggaccccaacagcgggaggccacacaagcagagggcagagaagccggc

SEQ ID NO: 197018 - RNA, 79 nt, Homo sapiens
cccggccccccaggggcccccgcggcggccagaagacgggcggaccccggcaaaacgcccgagggagcgcgcccagcgg

SEQ ID NO: 197019 - RNA, 86 nt, Homo sapiens
gacgggaaggcgggagacgagaagccgaaaagcgcagcgagcggagccgccggagaccagaaaggaggccaggggggaagggacga

SEQ ID NO: 197020 - RNA, 72 nt, Homo sapiens
gcccgggcgaaggggccacgcgagccaagggaggaaaaacgcgccaggaaaccaggaggccaaccgagaaaa

SEQ ID NO: 197021 - RNA, 80 nt, Homo sapiens
acacggacagcacaaaccgccacacaaaagcggacaagcgaaggacacaaccagagggaagcacgcccgggcacagcgga

SEQ ID NO: 197022 - RNA, 66 nt, Homo sapiens
cagagaagaagggcaacgaacaagggcaaggacggaaggcgaccacaccaccccagacacggccga

SEQ ID NO: 197023 - RNA, 80 nt, Homo sapiens
accagccacagcggggcggagaggcagagggcagaccggaagagaagaaggagcagaaggaaaagggccaagggggcgga

SEQ ID NO: 197024 - RNA, 70 nt, Homo sapiens
gagaagagcgcaggcgcgaaagcccacaagcggcgcccgacacccgccagggaacagggaagcagggaca

SEQ ID NO: 197025 - RNA, 102 nt, Homo sapiens
cacagaggcaaccccaaggacccgggcgacggaccaagcaccaggggcgagaaccagcgacggagcacgcgacggaaggacaaaaaagacgggggaaaggac

SEQ ID NO: 197026 - RNA, 74 nt, Homo sapiens
ccgaaaaccacccagccgccggggccggcacgaggaggggccgcggaaccaggagcccaggacagcaccagcac

SEQ ID NO: 197027 - RNA, 62 nt, Homo sapiens
accacgcgggcgcacccccgccagccgacacaaccagaaaggaggcgcagcccccaagacgg

SEQ ID NO: 197028 - RNA, 58 nt, Homo sapiens
gacgagcagagaacagcaaaagagcacaaggaagagagaaggccacgcccgaccccaa

SEQ ID NO: 197029 - RNA, 76 nt, Homo sapiens
gccaaaagccaccgagggagcgaaaaccgggccaggagcgcagaggacagacggaggcgcaaagaaggcacagaag

SEQ ID NO: 197030 - RNA, 76 nt, Homo sapiens
gcagccagaggccgcgagcaaaaccaccaaccgggaccagggcgccaaaacagacggaccccagcagccaccccga

SEQ ID NO: 197031 - RNA, 80 nt, Homo sapiens
ccggccccggcccacaggggggggcaaacccgagagaacggggagaagaaaaagcagaaaggaacagaaaacaaaagaac

SEQ ID NO: 197032 - RNA, 77 nt, Homo sapiens
cgaaaaagggaaacaaagaaacggggggagccgaccaagaccacagaggaggaagaacggcaaaacggaggagcaga

SEQ ID NO: 197033 - RNA, 86 nt, Homo sapiens
gcgccgcggggagggggcccgggcgccccgcagccccccaacaccgcccgccaggacgacgacgagaacccccgcgaaccagagga

SEQ ID NO: 197034 - RNA, 56 nt, Homo sapiens
gaaagagaaacccggagggcgccgggcagggaagacacacccaggaccaaccgaaa

SEQ ID NO: 197035 - RNA, 58 nt, Homo sapiens
aggacaagcgggcagaacagcgcggcagacggcccgccacgggccccgcagccgcgcc

SEQ ID NO: 197036 - RNA, 51 nt, Homo sapiens
aaggaccaagaaccaggcgagaggccagcgaacgaacacgaagaagaccaa

SEQ ID NO: 197037 - RNA, 74 nt, Homo sapiens
gcgaagacagagagaaggagagagagcccaagacgaaagggagcaacgggagcgccaaaagggcgcgagaccgg

SEQ ID NO: 197038 - RNA, 57 nt, Homo sapiens
acaccggccccacgcacgacgagagggacagcacgcacagcggcaccacgacgggca

SEQ ID NO: 197039 - RNA, 54 nt, Homo sapiens
gaagaaacaacacagaaagcacaccaaggaaaccgggaacggagccgccgaaac

SEQ ID NO: 197040 - RNA, 71 nt, Homo sapiens
ggagcggcggccacggaggcaccagaagaagcaccagggagccgaacggaaccgacaagggggcggggaaa

SEQ ID NO: 197041 - RNA, 45 nt, Homo sapiens
accgcccccagaggccgggccgcaccccccaaaccagccggcggg

SEQ ID NO: 197042 - RNA, 76 nt, Homo sapiens
gcgaaggaagaaaggaaaacggaaaacgcccagagaaacagaaaaccgagaacagggggggcaaaaccaagcacgg

SEQ ID NO: 197043 - RNA, 67 nt, Homo sapiens
gggggagaacgggccccgcggccacgccgggaacggcccagcgggcagaggaaaaacgcagccaacc

SEQ ID NO: 197044 - RNA, 86 nt, Homo sapiens
ccgagccgggccgcggcgccgagcgaacggggagccgagcggagcgccgcggcgcagccagacggaaaggagagcggacccaccga

SEQ ID NO: 197045 - RNA, 79 nt, Homo sapiens
gggagaccacagcaagacgccaggacccacggaagccagaaagacgagggacacgaccgagaacccccaaaccgagaca

SEQ ID NO: 197046 - RNA, 76 nt, Homo sapiens
ggacacaaggaccacaacgaagccgaagacgaaaagaaacgcacaaacaagcacgaagcacaaacgagaaggccca

SEQ ID NO: 197047 - RNA, 76 nt, Homo sapiens
acgcacccgagagccggccacaacaagcccacaagccgacgcgggggaacacaggccgagacaaagccagaaaaca

SEQ ID NO: 197048 - RNA, 82 nt, Homo sapiens
ccgaggccggccgccccgccgcgaggcagacgcagccgccggagggcgcggagcggggaccgcacaccgcccgacgcccaca

SEQ ID NO: 197049 - RNA, 77 nt, Homo sapiens
ggaccagaacggaacaggccggcggccccaccccccagaaccaaacacagccggagccgacggaggccgcagacagc

SEQ ID NO: 197050 - RNA, 53 nt, Homo sapiens
cccaaagaccagcccaggacaaaaacgcggaggggaccagagaccaaaaaaaa

SEQ ID NO: 197051 - RNA, 61 nt, Homo sapiens
accagaacccaagaagaccgaaagaaacacgaaaaaacaccagcagcccagcaaccaaaaa

SEQ ID NO: 197052 - RNA, 88 nt, Homo sapiens
cagagcaaggggcacgcagaaggaccggccacgagcagcccgacggccaggaggcgaagagacgaggaagcccaggagcccgaacaca

SEQ ID NO: 197053 - RNA, 66 nt, Homo sapiens
cccccccggcacgacaccgccccaacccacgagaggacagcccaggcaccccgccaggaagaggcg

SEQ ID NO: 197054 - RNA, 70 nt, Homo sapiens
gcaacacgcgcaagaagaacaagaaacccacacacagacgccaagacgagaaaccaggaaacgaggaaca

SEQ ID NO: 197055 - RNA, 113 nt, Homo sapiens
acccacgaccagcaggaagaacaaacgagaaggcagagaggggaagaccaagagcacagaaggacagaaaacgggccccagacacaagccccaccaagaggacaccccaggaa

SEQ ID NO: 197056 - RNA, 78 nt, Homo sapiens
gcagaggccgacgggaagggcacaaagacacagaaaagacaaggagggagcgaggcccaacacagacccagagccaaa

SEQ ID NO: 197057 - RNA, 71 nt, Homo sapiens
aaagagaagccccggagagcaacacgggggcagggaaacagacgagccggaggagcacacaagcggggacc

SEQ ID NO: 197058 - RNA, 87 nt, Homo sapiens
agaagacccagcaaccagcagcaagaccaagagaggcccgggacccaacggaagggccggccagcaggagacagagaggaagcggga

SEQ ID NO: 197059 - RNA, 68 nt, Homo sapiens
gccccccgcggcggcagccacagggaagcccagaggcacggggcagaacaccaacagagggccgaccg

SEQ ID NO: 197060 - RNA, 67 nt, Homo sapiens
ccggagccacccagagcaacgcccgcacgggcacagacaggcaaggacaaaaaggggaggggacggg

SEQ ID NO: 197061 - RNA, 63 nt, Homo sapiens
ggaccagagcaaggagaggaacggccaaaacgggccgaagccgcgagccacagcaggacaggg

SEQ ID NO: 197062 - RNA, 83 nt, Homo sapiens
cccggccaagaggcaaaggggaggacgcagcaaaccaccagaagcgagcaggcgggggcgcagcagggcccccgcacacggac

SEQ ID NO: 197063 - RNA, 45 nt, Homo sapiens
gagaaaaccgggcgcagccgacaccaaaggaaccacgcaagagcc

SEQ ID NO: 197064 - RNA, 34 nt, Homo sapiens
cgaggagcaacccagaggagagaaagaacccacg

SEQ ID NO: 197065 - RNA, 32 nt, Homo sapiens
ggcccaccccccagggaaggaacaaagcagag

SEQ ID NO: 197066 - RNA, 76 nt, Homo sapiens
ggaaagagaagaaagaaccgaaagggaagaaagagccaaacaggcgagaggaagaagcaaagacaaagcaagagaa

SEQ ID NO: 197067 - RNA, 82 nt, Homo sapiens
ccaccggcaccgagaaagacaaccccgacaagggaccgggcgggccccgcaggaaacccccaccggcccacacagacgcagc

SEQ ID NO: 197068 - RNA, 77 nt, Homo sapiens
gaggagagaaagagcaacacccggacagacacggaaggagaacgcacagagagaggcccggcacacgcccaggacaa

SEQ ID NO: 197069 - RNA, 59 nt, Homo sapiens
gaaaccaaagaaaaacgaagcaacccaaggcagagggagagaagcccagcccgcggcgg

SEQ ID NO: 197070 - RNA, 79 nt, Homo sapiens
cgggcggggcggagcgccgggccgcgcagcgccgaacgacgggccacaggacaccaggcagaaagagcccacaagacaa

SEQ ID NO: 197071 - RNA, 83 nt, Homo sapiens
cacgcgaccaaggacggagagcggaagaccggcccaaggcagcacaaagaggagagacacggcgaagcgagaacggggaggga

SEQ ID NO: 197072 - RNA, 75 nt, Homo sapiens
acccgaggacggacaggagcgccgaagagaagccagccgaggcgcgcccgcagcggaggcagcccgccagcccgg

SEQ ID NO: 197073 - RNA, 78 nt, Homo sapiens
gaacgacaacaccggccccgaccccccacgacgcgcggaaaagagcgcccgcgagcagccggacacggccagaaagcc

SEQ ID NO: 197074 - RNA, 71 nt, Homo sapiens
cgaagacgaaagaacagcgaggggacacagaagccagaaaaccagcgacacgaacccccagcgaggaagca

SEQ ID NO: 197075 - RNA, 91 nt, Homo sapiens
gagacaagcgaggccgagggagaggaccaagaaggagcggaacagaaacccgggcgaggcaaaaagcaagcaaggaagggaagaagaacga

SEQ ID NO: 197076 - RNA, 76 nt, Homo sapiens
caacccgcccaggacaagccgcgcggggacccgacgcccgcacgggcaacccgcccagaagaggcaccaggcccac

SEQ ID NO: 197077 - RNA, 70 nt, Homo sapiens
cacaggaaccgcagcacaaaagaaaaacaggcccggacagcacaaaccacaggaaggcaacacaaaccac

SEQ ID NO: 197078 - RNA, 59 nt, Homo sapiens
caccgcgcagagacacgagggagaaccccaacccaaacgaccccagcggccggcacaga

SEQ ID NO: 197079 - RNA, 79 nt, Homo sapiens
agcgagcggcagaagaaggcaaggaggggagaaacaacaggcaaccggaaggcaggcgccagaacaagcgaaggcacca

SEQ ID NO: 197080 - RNA, 77 nt, Homo sapiens
gggcacgccgcacaaggaaaaggagccggcacaggacccaaagaggcggaggggccagcaccggggcccggcgcaag

SEQ ID NO: 197081 - RNA, 69 nt, Homo sapiens
gacaggaggagacaggcgagagaggaggacacgaccgggaaagaccaaaccccaaagcaggccaaaccc

SEQ ID NO: 197082 - RNA, 91 nt, Homo sapiens
ggcgagaggggcgagaacgccacgcgggccggcgaaagcggaagaaggaccggggagacaggaacacgggcaagacagcgcgggcaccgcc

SEQ ID NO: 197083 - RNA, 68 nt, Homo sapiens
gcgcagacgacacgccgcgagcgccccggccaagcagaaacggaaggcagagacaggccagaacccca

SEQ ID NO: 197084 - RNA, 52 nt, Homo sapiens
gccccaacccaccaaaagcacagaaagggacccagccgggaaaccgagagcc

SEQ ID NO: 197085 - RNA, 72 nt, Homo sapiens
ccggcgcaagggccacccggggccccaggcccggcccagcacccccaggcaaccccgcacaaacccagcgaa

SEQ ID NO: 197086 - RNA, 76 nt, Homo sapiens
ggaaaagagacgcaaaccacgaggacagagaagagagaagccaccagcaaaagaagcccgaaagagagacaaacag

SEQ ID NO: 197087 - RNA, 65 nt, Homo sapiens
gccaaaaaggaaaaccgccaaggaccgaccccaaacgcgaagaagagagggcgaaggaggccaca

SEQ ID NO: 197088 - RNA, 98 nt, Homo sapiens
gcaacacgccgccgagcagccgccagccccacggacggacgccagccccacaacagaaggaggcagaaagggagccccaagagagagggccaagccaa

SEQ ID NO: 197089 - RNA, 75 nt, Homo sapiens
aggcacgagcaacaacggagaaaagaagacgacacaggcaggaggaagaagccagagccacgaggagggagccca

SEQ ID NO: 197090 - RNA, 76 nt, Homo sapiens
acggggagaacgcggacagcccaagagagagcgaccacgacccacggagaaggcagaggagagaaaaccgacgcgg

SEQ ID NO: 197091 - RNA, 78 nt, Homo sapiens
ggaaagccccaagagggcggcggcagcgggccacgaggagggcgcagagcccaggagacgggaaacccagacgacaag

SEQ ID NO: 197092 - RNA, 74 nt, Homo sapiens
cgggccgccagacgggaaggccggcacagccacaccgagaagaccggcccaagaaccccaccgcccgaagacag

SEQ ID NO: 197093 - RNA, 78 nt, Homo sapiens
gaggacagcgcacacagcaagcacgagagacacaagcagcgaggaccaggaacaacagagacaagaacaagcaggaaa

SEQ ID NO: 197094 - RNA, 103 nt, Homo sapiens
ccagggggaggaaaaggccaagagagcggggcgagagaagccaaggacccgaccagaaacccagacgcccaggccgccaggcaccggaacacgaccccgcaca

SEQ ID NO: 197095 - RNA, 39 nt, Homo sapiens
gcccaaggaggcccagcgggggcgaggccggaaggcaaa

SEQ ID NO: 197096 - RNA, 58 nt, Homo sapiens
aacgcggaaaaccgacacaacagcgcgggccaggcacgacaccgcaacgacacagcag

SEQ ID NO: 197097 - RNA, 80 nt, Homo sapiens
gggacgaaggcacaccacagcgcccaaggagaccgggagagagacgaaggacgcgcaggggcagcagacacggaaacgaa

SEQ ID NO: 197098 - RNA, 80 nt, Homo sapiens
gagacgaagcgcccggggggcgagcccgccgcacccgggccgcgccggcacgaggggagggggggccagcggcggagcgg

SEQ ID NO: 197099 - RNA, 72 nt, Homo sapiens
ccaggacagaccaagaccggaagcaaaaaagcgggccacacaccaggcccaaagaacgacacgaacgcaagg

SEQ ID NO: 197100 - RNA, 65 nt, Homo sapiens
ggggagcggcaagagaccggaaggagccaccaggacagacaaagacaggaaacagaacgacagcc

SEQ ID NO: 197101 - RNA, 78 nt, Homo sapiens
cagcgcaacgagcaaagagcggacccagcaggccccacgccaagccccaggaaagagcaaggacaggaggagcagccc

SEQ ID NO: 197102 - RNA, 80 nt, Homo sapiens
aggaaaagggccaaagggagcgaggaacagcgcccccgggcccccacgacaggggcccagcgaaggggggagaaggcacg

SEQ ID NO: 197103 - RNA, 88 nt, Homo sapiens
ggagccgcccgcacagcggcccggggaaggaagcggagaacgcgggcagccccagggcgaagacccccccccagggcaaaccaccagg

SEQ ID NO: 197104 - RNA, 73 nt, Homo sapiens
ccgcgccggggacgggagcccccccccccgcagaaaaccagaaggcaccgacaggaaaggaaaaggagaacca

SEQ ID NO: 197105 - RNA, 71 nt, Homo sapiens
gaaaaaacggagaaaagggaggacgacgaaagacccgaaggcaaaggccggacagaggaaagggagaacag

SEQ ID NO: 197106 - RNA, 71 nt, Homo sapiens
gcccaacccggaccggggacgcacggaccaaaaacccgcaacagcccccgcccaaaccccaaaagaaccgg

SEQ ID NO: 197107 - RNA, 82 nt, Homo sapiens
gccgcaccacagcccccgcacccccgcagccgccacaaccacgcgcccaggagccgggggggcgagcccgccgagagcgcca

SEQ ID NO: 197108 - RNA, 81 nt, Homo sapiens
ggcgaccacaaccaccgcccccgacaaggcccgacaccggggccgcgcgcccggccaggcccagggcggcccggaagcgac

SEQ ID NO: 197109 - RNA, 54 nt, Homo sapiens
aaccagcggaggagacgcaaacagcagacggaagaccccacggcaaaaccacac

SEQ ID NO: 197110 - RNA, 75 nt, Homo sapiens
ccagcccaacacccaagaagcggaaaagaagaagagagccaaccaaagaagggagaggaggaggcccgcagaaag

SEQ ID NO: 197111 - RNA, 55 nt, Homo sapiens
caacacaacacgccccgaaggggccgcaaggccaggcgcgcagaggcacccaacg

SEQ ID NO: 197112 - RNA, 71 nt, Homo sapiens
cggccacacggcgcgccagcggcagaccagggcccacgaagacgaaaccacgggcgggggccacccgccca

SEQ ID NO: 197113 - RNA, 67 nt, Homo sapiens
cccccggcacgacaccgccccaacccacgagaggacagcccagcaacccccagccacaacgcgaacc

SEQ ID NO: 197114 - RNA, 52 nt, Homo sapiens
caaggggacaggcagaagggccaccaaggcaacggggcccacgccacaccac

SEQ ID NO: 197115 - RNA, 64 nt, Homo sapiens
acagacagccgcacgaaccggaccaggaggacgacagcgaacacccacccaggagcaaagacgc

SEQ ID NO: 197116 - RNA, 87 nt, Homo sapiens
cgacgcggagggggagaagcacaggcaacggagcagcagccccgagaaggaagaggaggaagcgagggcccgcgagggcgcaggacc

SEQ ID NO: 197117 - RNA, 98 nt, Homo sapiens
ggcccgcacacagggcccacgggaaccggccacgcaagccgcccggaacggcgagcagcgccagggcacagcgagaagcaaggagcgaaacgcagcaa

SEQ ID NO: 197118 - RNA, 72 nt, Homo sapiens
agaaaaacggcaagaaaacaaaacaagaaaaagggcaagggcgacaaggagccaggcacagcagggaccaga

SEQ ID NO: 197119 - RNA, 70 nt, Homo sapiens
aggaggccagaagaccagaagcgacagcacgcaggaaagacagggaagacaaggaacggaggaaacagcc

SEQ ID NO: 197120 - RNA, 77 nt, Homo sapiens
cggcagggcaccgcgcgaagcggccaaagccgcccagacggccaccggcgggaggaacaaaagaccacacgaagggg

SEQ ID NO: 197121 - RNA, 79 nt, Homo sapiens
ccaggaaaccagggcacagggaaaagcacagggccaggaagcagagggacagccaggccagaaacaggcccagcaaccc

SEQ ID NO: 197122 - RNA, 73 nt, Homo sapiens
gccccccgagcgcagaccgcggccgcaggggcgcgcgcggcaaaagcccacagagagagccaggaccaaggcc

SEQ ID NO: 197123 - RNA, 78 nt, Homo sapiens
cagggccgcggggaccgaaaggacagaacaggaccggaaagacagaccggcgcaggagaaaagggacagggccgcaag

SEQ ID NO: 197124 - RNA, 63 nt, Homo sapiens
cgagaagaagccccacacggacagggacccgggggaagcaagagcaccaaaaaaaacaaaagg

SEQ ID NO: 197125 - RNA, 71 nt, Homo sapiens
cacccggagaccccaaggcacaacggggccacagagagcagccaccaaaacacaagaggacaaagcccggc

SEQ ID NO: 197126 - RNA, 70 nt, Homo sapiens
ggcccgaaagaacgagagaagcagcgcggggcacgcagcgccaccccgcacacccccagcacccgcgggc

SEQ ID NO: 197127 - RNA, 88 nt, Homo sapiens
cggccggcggcggcgcgggcgagcggcgagccgaaaagcgagcgcgaggaaaaggcggcgggagcccggccgccccagccgcgccgcc

SEQ ID NO: 197128 - RNA, 74 nt, Homo sapiens
gcgaggagagagacgcggcagaggaacgcccaagcacaaccaggaagggagcagcgagaagagccagagaagaa

SEQ ID NO: 197129 - RNA, 67 nt, Homo sapiens
ggagggacgcccgaccgcggccgggaggcccgggggccggggcccgagcggacaaggcaaaaccagc

SEQ ID NO: 197130 - RNA, 68 nt, Homo sapiens
gcgaagagcggagagccgccccagaacccccggggcaccaccgcaccaccccggaaaggcagccggcc

SEQ ID NO: 197131 - RNA, 37 nt, Homo sapiens
gaagccgcccgaacaccaggccgacacgaacggacaa

SEQ ID NO: 197132 - RNA, 76 nt, Homo sapiens
agaacaccggaacagagagacaaagggggaggaagaaaggaaaggcacccaaagcagaacggcggagaccacaaca

SEQ ID NO: 197133 - RNA, 48 nt, Homo sapiens
aaaccagcccgcacagggcgcggggcacaagcgggccagaagcacacc

SEQ ID NO: 197134 - RNA, 70 nt, Homo sapiens
cggcccggagcaacgagcgcagcgccgggacaagagaaaaaaagggcgggcgaacaaaaagagcagagga

SEQ ID NO: 197135 - RNA, 76 nt, Homo sapiens
ccagcgagaacacccaaccggggagccaggcaggcaggaaacgggaaaacacgaagaggcgacaaacagacccccg

SEQ ID NO: 197136 - RNA, 80 nt, Homo sapiens
gaagaggcgggacggcgccggccggggggacgggcacggggaccaccagacaacagccaaaccaagcacggaacaacacc

SEQ ID NO: 197137 - RNA, 82 nt, Homo sapiens
gacggagccagccgccagacagaaagagggaaaggaggaacgcaaaggagccagagaccaagagcccagagaacagagcgcc

SEQ ID NO: 197138 - RNA, 37 nt, Homo sapiens
gggcagcgcccagccccgggggcaagacgccaagaga

SEQ ID NO: 197139 - RNA, 83 nt, Homo sapiens
acgcagaaggacgcccacgagcaaccaagagcccggggacacgagaccggccagcagacgaccacgaccggacacacggagag

SEQ ID NO: 197140 - RNA, 83 nt, Homo sapiens
aacgaacccggcgccgggacgccccccgcggcaccacccggcaccaggagaaagaagaaacaaagagggacccagccaccaaa

SEQ ID NO: 197141 - RNA, 72 nt, Homo sapiens
gaggcgaacgccaccagcgcggcacggagaccggaccaaaccagagacaaaaggcacagccagaacgaaaga

SEQ ID NO: 197142 - RNA, 77 nt, Homo sapiens
gcaagaggaagaaggcacccggcgagagcccgggaagcgcagagggaacacggccacgaggggaacgggacagagag

SEQ ID NO: 197143 - RNA, 73 nt, Homo sapiens
cccgggcccccagcggcaaaggaacgaagcagagcccaacaggggagccgagaagccgaagcagaaggaaacc

SEQ ID NO: 197144 - RNA, 59 nt, Homo sapiens
acaacaggcagacagacaagaaaacgggccacaacacaacccccacaccagaggaccgc

SEQ ID NO: 197145 - RNA, 67 nt, Homo sapiens
gcgcccgggagagcaaggcaggcccaacacgcaaaagacaggcacacagcaacagaagaccggccgc

SEQ ID NO: 197146 - RNA, 58 nt, Homo sapiens
cgggccaacgaaaggaacagggcaaccggagaaacgcgaagaagaagaacagaggaag

SEQ ID NO: 197147 - RNA, 80 nt, Homo sapiens
agcggagcggcgggggggggagcccgcccccggcggccccccgcgcacagaacgggaagcagcgaaaaaaaagagcgagg

SEQ ID NO: 197148 - RNA, 68 nt, Homo sapiens
gcggcacaaaaaggacgccggcaaccaaccgcgaccgcaagcccaccgggaaggagaccgggcgaggg

SEQ ID NO: 197149 - RNA, 50 nt, Homo sapiens
aaggccaaagaagcacacaggacacagccaagcccgagcgccccccaaga

SEQ ID NO: 197150 - RNA, 72 nt, Homo sapiens
ggaaagccgcacccaagccacagacaacaggcacaaagagagaaggaacacccacagggcagacagagaaag

SEQ ID NO: 197151 - RNA, 81 nt, Homo sapiens
agacaaccgggcccgcaaaccaacccaggaacccaggcaaaacccaaggcggggcgcccggcccagagggaccgacgacaa

SEQ ID NO: 197152 - RNA, 71 nt, Homo sapiens
acccggggggccagggaagccacacccaggcacgggaccaggcgcccgcaccagcggagaggggggaagaa

SEQ ID NO: 197153 - RNA, 86 nt, Homo sapiens
caaggagacaagcgcagcccacagaaacaaaagacaggcgcagcaggggagaccacaggacaccgcacccgaaggcccagggacca

SEQ ID NO: 197154 - RNA, 69 nt, Homo sapiens
gccgggccgcgcccacgggcagcgagacaagcagaccggaagaccgacggaagaccacaccccgaggga

SEQ ID NO: 197155 - RNA, 64 nt, Homo sapiens
aaaagcagggaagaaagcgcaggcaaagaaaccccaaagccagcaagaccacagcagcacgcac

SEQ ID NO: 197156 - RNA, 55 nt, Homo sapiens
ggaagcaggacgcgccgcgccccaagagagggccgaggcagacaagggaaaggcc

SEQ ID NO: 197157 - RNA, 62 nt, Homo sapiens
ccgcaccagccgccgaccacacaaggcaggacacaggcggagaccgggagacgggccaaaca

SEQ ID NO: 197158 - RNA, 73 nt, Homo sapiens
cgaagcaggaaagaacgacgccagggagggcgcagaaacccgagacgaagcaaggccaagcacggcaaggcgc

SEQ ID NO: 197159 - RNA, 79 nt, Homo sapiens
gcagggcccgacgacaccggacggaaaagcagacaagccaccccacaaaccggcaggaccccagcgacacagcccccaa

SEQ ID NO: 197160 - RNA, 80 nt, Homo sapiens
cccgccgacccacaggccgacaagaaccccgcagccacccacagagcacgcagccccgaaggcggcccggccccccaaaa

SEQ ID NO: 197161 - RNA, 35 nt, Homo sapiens
ggagcgcccggggccgggcacgacgacggagagag

SEQ ID NO: 197162 - RNA, 88 nt, Homo sapiens
gcggcggcggaggaggaagaggcacgcgagggggcgcgaggggaacggaggccagagcgcgaggaggccagaaaccagcagccacagg

SEQ ID NO: 197163 - RNA, 77 nt, Homo sapiens
caccagccaaagcagaccggagggggaacacccacacaaagaaaagccacgaccaaggcaccaagcagccgaagaga

SEQ ID NO: 197164 - RNA, 72 nt, Homo sapiens
agagcacgacgccacaagaagccccagagagcccaaaaggcagagcgaggagagaagaaggagggaaagcca

SEQ ID NO: 197165 - RNA, 86 nt, Homo sapiens
gaggcagagaaaaaaacaacacaaagaaggagcacaggaacaggcagcaccacgaacaggggcaccggcagcgccccagcacggag

SEQ ID NO: 197166 - RNA, 66 nt, Homo sapiens
aacaggcggaccagaacggaagcagcaagaaaccaaaggaagagaccacacagagcaaaggaagcg

SEQ ID NO: 197167 - RNA, 69 nt, Homo sapiens
agaagaaggacggaggaggacaaaagggagagccaaacaggaaaggggagaagcagaccgcaccaggcg

SEQ ID NO: 197168 - RNA, 42 nt, Homo sapiens
aaggcccgcggcgccccggcgcaggagagggaaaaggcagaa

SEQ ID NO: 197169 - RNA, 73 nt, Homo sapiens
cacaaacacaaagacggcaaggcgccacgaaagacaagggcaaaggaggaagaacggggaggaagggaacccc

SEQ ID NO: 197170 - RNA, 70 nt, Homo sapiens
gaaaggagcggaaaaccaccagggggacggaacgcagacacagcaaagccaaccagaacccagagacgaa

SEQ ID NO: 197171 - RNA, 83 nt, Homo sapiens
cggccggaggacaccccacggcagagcggcgggaggggaaggagcagccacccgggcagaaaggccgggcgaagggccaagac

SEQ ID NO: 197172 - RNA, 61 nt, Homo sapiens
aaagagagaaggcgagaagaaaacagaacacccaggccaggccacagggcaccacaacacg

SEQ ID NO: 197173 - RNA, 77 nt, Homo sapiens
acgaaggggcgcgaaaccaagcgcggcccagaaggggcaagaagaacaggaaaacaggggcacagacgacagaagcc

SEQ ID NO: 197174 - RNA, 63 nt, Homo sapiens
cagggagacgcacagccaggacaccggaaccgggaaagggcagaacaagaagggcaaccaggg

SEQ ID NO: 197175 - RNA, 75 nt, Homo sapiens
aaacaaagagacagaagggaacgaggaacacagcacccagacagggccacggaccagaacagagaagaaagcagg

SEQ ID NO: 197176 - RNA, 59 nt, Homo sapiens
gcggaacacggaggcgggaaaggagggaaaccccgaagcccaccagaacggaacaaaaa

SEQ ID NO: 197177 - RNA, 75 nt, Homo sapiens
gccagaccgcaggccacaccagacgaacgaagacaaagcaaaaccacaggagaaacagaaacagaaggcagcaca

SEQ ID NO: 197178 - RNA, 91 nt, Homo sapiens
gccccccacccgccagccccgggagaggagccgcacccggccggcccggccccagccccaggaccccgagcagccagagcccgggcgcggg

SEQ ID NO: 197179 - RNA, 67 nt, Homo sapiens
ggaaaggcgcacccaaccgaggacggaaccgagaacgggaagaagaagaaggcgaagaagcacaaca

SEQ ID NO: 197180 - RNA, 58 nt, Homo sapiens
cagcacccaacagcaccgagagagagacccagcggggggcaggaccacgagaccaggc

SEQ ID NO: 197181 - RNA, 84 nt, Homo sapiens
cggaggccccagggaagcgcagaaagcaggcgaacccgcggcgcaaaacggcggggccggggagcccgggccagaccccccaga

SEQ ID NO: 197182 - RNA, 74 nt, Homo sapiens
aggcacagcaggacgggacagggaaagagcaccgaaaccaggcggaaacacggcaggcaacccacgcggcccaa

SEQ ID NO: 197183 - RNA, 75 nt, Homo sapiens
aggagccgccggagcagccgcagcccgcagaccggagacgcgacaggacgagagggagcaccagccggaagaagg

SEQ ID NO: 197184 - RNA, 83 nt, Homo sapiens
gccgggccacgaacacggaaggaaaagcagcccgccacaacgccgccggggcccaggagcccacgaaagggccagcagccccc

SEQ ID NO: 197185 - RNA, 71 nt, Homo sapiens
gcggaggaccccaagaaccagaacagcagagcagaaaccgggggcccacaacagggcggaaaccgccaggg

SEQ ID NO: 197186 - RNA, 78 nt, Homo sapiens
ccgaagaaggcgagcaggggcgggagagccccgcagaagacgccgacgagggcgcacaaaagagcacaaaagcaccaa

SEQ ID NO: 197187 - RNA, 67 nt, Homo sapiens
cggagaaggccgccgggcccgggcaggggcggggcaacgcggaaggcgggccgaacgccgagcgggg

SEQ ID NO: 197188 - RNA, 87 nt, Homo sapiens
ggcgaacagacagaaggagaaaggaggaaaaacagccagggggcaaacgcagaggcgggaacaaacagccccaagacgggaaagagc

SEQ ID NO: 197189 - RNA, 73 nt, Homo sapiens
ggagacggcaaggaggagccagaggcaacaaggcggacaagagaagccgccaggacgccagaaagagggcaac

SEQ ID NO: 197190 - RNA, 68 nt, Homo sapiens
cagcagaaacggccacagaggaagccaaaaggggagaagcagaccgcaccaggcgggaccccgaaaaa

SEQ ID NO: 197191 - RNA, 83 nt, Homo sapiens
acccggcagaacaagagcaccccagaagacagagagccgcgccaagaccccaagaagaagcggaagaggagccgcggaaccaa

SEQ ID NO: 197192 - RNA, 79 nt, Homo sapiens
cgccgccgaacgacaggacgggggcggccggcccccagaggaaaggaccacccacccaccgcgcgggcagcacccacac

SEQ ID NO: 197193 - RNA, 73 nt, Homo sapiens
ggaaagccggcgcggaacggcgggagaagaagagcgcgagaggacgggacagggccaaaaccacaccaaaacc

SEQ ID NO: 197194 - RNA, 46 nt, Homo sapiens
aggcagagcagcagcgcaggggaaggcacagaaccgacacggccaa

SEQ ID NO: 197195 - RNA, 91 nt, Homo sapiens
cgaggagacgagccaacggcggccgccccgggcacacccggcccccggacgcccggaaaacgaagaggcggggacacgagaggacccagcg

SEQ ID NO: 197196 - RNA, 74 nt, Homo sapiens
cccagaggcagagccgccccagcagcaggggcgccaggagaagaagacaggcagcaggccaagaggggagaagg

SEQ ID NO: 197197 - RNA, 53 nt, Homo sapiens
agcccacggcgcagacggcccagacgccaacaagcgggccgccgcccggcgaa

SEQ ID NO: 197198 - RNA, 70 nt, Homo sapiens
gaggggaacccacgaaggaggaacagcgcggggacaaagcacccgaaagagcgaaagcccagacaggaag

SEQ ID NO: 197199 - RNA, 33 nt, Homo sapiens
acggagcgccaggacgcaaacccaggaacacgg

SEQ ID NO: 197200 - RNA, 82 nt, Homo sapiens
ccgaggccgggacaagcagcaaggcgcggggggccacgcgaggccgagacaacaggcacaaagagagaaggaacacccacag

SEQ ID NO: 197201 - RNA, 77 nt, Homo sapiens
cccacggggagcgcacgagaaagcccggcccacagaggccggcggcggcaaggagagcaagacaaagggcgccccac

SEQ ID NO: 197202 - RNA, 78 nt, Homo sapiens
cgcgggccgcggcgacggcaggacgcgggcagagagcggacccgcgacgcgggcgcaggaggacgcggcacaccaaga

SEQ ID NO: 197203 - RNA, 68 nt, Homo sapiens
agaagaaggacaaagaccaccaggcaaaaggcaagcggcagccacacccggagaaggagccgcccagg

SEQ ID NO: 197204 - RNA, 102 nt, Homo sapiens
cccaacgcacaggggaacaagacaccccccaccccagaaccccacacagacagaacaccccaaaggaaacgagagagagaccacgggggcccgacgagccgc

SEQ ID NO: 197205 - RNA, 78 nt, Homo sapiens
aaaacagaggccaacccagagaacggagaccaaccgggcgaagaaagaagaaaagcgaaacaggaacccaccgccaaa

SEQ ID NO: 197206 - RNA, 71 nt, Homo sapiens
gagagaaggcgagagcgaagcggaaaagaagaaggggacccaaagcaggcacacagagcaagacgaagcca

SEQ ID NO: 197207 - RNA, 61 nt, Homo sapiens
ggaaaagacacgaaaggcccaacaggagaaacacagaggaggaggaagcagcacaaggcgc

SEQ ID NO: 197208 - RNA, 75 nt, Homo sapiens
agcggggcacaggcgggcacgcgcccagggagacaacagccacacaaagcagcaacaggagcagggaagaaaagg

SEQ ID NO: 197209 - RNA, 59 nt, Homo sapiens
ccgcacacaggacaaaagaaacccagcggcggcagaaccagccggcacaaagccgaacc

SEQ ID NO: 197210 - RNA, 75 nt, Homo sapiens
gaccgaggaacaaacggcaagcaagaagggcgggcccgcacacccaagggagccccgccgaagagaaggccagag

SEQ ID NO: 197211 - RNA, 82 nt, Homo sapiens
aagaagggacagagggcaggacagcaaggaagggggcggaggcagcaaagacaggccgggggccagcaaggcagaaaagcag

SEQ ID NO: 197212 - RNA, 69 nt, Homo sapiens
acaccggaagaggcaacaaacacggccgggcccaaaacgacagacgcgaaaggggacgacgaagaggaa

SEQ ID NO: 197213 - RNA, 75 nt, Homo sapiens
ccaagaagaccgaaagaaacacggcccaaaaagagagaggaagccaccacgcaaccagaccccgaacacaaacca

SEQ ID NO: 197214 - RNA, 73 nt, Homo sapiens
gacacaggacgaagcacaggggcaacaacaacaaaccgaaggaacccaaagggcgccggaacccaggaagcgc

SEQ ID NO: 197215 - RNA, 74 nt, Homo sapiens
gaagcaccgaagagagagagaagcaaaaggagaacgaaagcggaccaggaagggccccacaccaaaccgccacg

SEQ ID NO: 197216 - RNA, 75 nt, Homo sapiens
ggcgccgaagacaaggccaaggccaccacgcccagagcgggccacaaacacgacgccacagcaacaagcagggcg

SEQ ID NO: 197217 - RNA, 59 nt, Homo sapiens
ccaggccaggcagcgcggaggggcgagccagcggccaggaacaggacacaaagaggcgg

SEQ ID NO: 197218 - RNA, 74 nt, Homo sapiens
acagcacccgaaaccaaaggcaccggccagaccacccccagcgagcacagccaggagcgaccaaagcagggcac

SEQ ID NO: 197219 - RNA, 43 nt, Homo sapiens
cacgcgaagggccgcaccgcaagcgcccccgaggcagccagag

SEQ ID NO: 197220 - RNA, 59 nt, Homo sapiens
acacagcagacaaagaccaacccagaggagcagaggaagcagagcaggaaggagggaag

SEQ ID NO: 197221 - RNA, 86 nt, Homo sapiens
agccggagaagaaaacgagcaggagcgacggccgccaagaagcacggcaccaaaaacaagcgcgggcggagaacggaaaagcacca

SEQ ID NO: 197222 - RNA, 79 nt, Homo sapiens
gaggacggaggcacagcgcagcgacgagagggcaaacggggacagcgccgaccggaacagggaccacggaagcccagga

SEQ ID NO: 197223 - RNA, 75 nt, Homo sapiens
gggaacccccacgcggccagcgaaaacgcccagcacagaggacccgaaaccggagagcaccgcgaaaaggcggcc

SEQ ID NO: 197224 - RNA, 88 nt, Homo sapiens
aagacacggggcgacgccacagagaaagacgccagcagcccggacgccaccaagccgagccacgggcagcgggcgacgggagcaccgg

SEQ ID NO: 197225 - RNA, 78 nt, Homo sapiens
gaggcgcgcggggcccgccaggcgcgcggagccacacaaagggccaggaccgaggaagcggacccccaggaggagggg

SEQ ID NO: 197226 - RNA, 53 nt, Homo sapiens
agcagagacacaccgaggaacggcccaaaagaggacgaagcgaagcaccaaca

SEQ ID NO: 197227 - RNA, 73 nt, Homo sapiens
cgaggaccgggacgacggagcgaggaaggggccgcaaggccaggcgcgcagaggcacccaacggcacagaccc

SEQ ID NO: 197228 - RNA, 79 nt, Homo sapiens
gggacccgcgccccagacagccgcccaccagggccaccagcgccccgggaaaaagggccccagcgcaaagcccaaggcc

SEQ ID NO: 197229 - RNA, 76 nt, Homo sapiens
cgccgcgcagcccccgcgcgggcagccaccccgcccccgccccccccgccgcaccagggcgccggccgagcccggg

SEQ ID NO: 197230 - RNA, 63 nt, Homo sapiens
caaggcacggggccacaccacgaagaccggggggccgcgcgcgaacccccaccggccgcccca

SEQ ID NO: 197231 - RNA, 77 nt, Homo sapiens
acaggaagggaacgggaaagcgcaacaggacccaaacagacaccgcaagccccacccggcacagccgcgcagaacgc

SEQ ID NO: 197232 - RNA, 90 nt, Homo sapiens
cgaccaggggcgagagcgggcaccccccaaacgacgcagccacggagagccccagaagacaggcagcagagagaagaccagaggagaaaa

SEQ ID NO: 197233 - RNA, 59 nt, Homo sapiens
caaggagaccacccagaagaacaacaaccaggcaccaaagagaccaccaggagaccagg

SEQ ID NO: 197234 - RNA, 52 nt, Homo sapiens
cgagaaaaggccccagggaaccaagccgccacagggagaaaagagcagaggc

SEQ ID NO: 197235 - RNA, 49 nt, Homo sapiens
cgcaggcacccgggcccccgcccacgacgcaccggagaggagaaacgaa

SEQ ID NO: 197236 - RNA, 72 nt, Homo sapiens
ggcccaggaaagcgaccccggggccaccgagccaaaaggacgggaaacggccagcaaggacaaaaaagagag

SEQ ID NO: 197237 - RNA, 67 nt, Homo sapiens
aacacccaccacagcagagggaaccgagagacacaggggcacaagacgggacaggcaaaaaaaagaa

SEQ ID NO: 197238 - RNA, 59 nt, Homo sapiens
aggaaccacccacgcaggcaggagaacgaaacggaaccagcagaagaggagagaaggcg

SEQ ID NO: 197239 - RNA, 38 nt, Homo sapiens
ccccaggcccgggccgagcaccaagcaggagaccccca

SEQ ID NO: 197240 - RNA, 73 nt, Homo sapiens
ggagcaagccaagaaagaaccgaagacagaaacgcccccggaaagagccgcccgagagacaaacccccacccc

SEQ ID NO: 197241 - RNA, 77 nt, Homo sapiens
aaggagggcgacggaaccaacggaggccaggagcagagcagaagcaaaggagaggagagacgcacggacaggagagc

SEQ ID NO: 197242 - RNA, 68 nt, Homo sapiens
agaagacacgcaaaacaagcggcagaaggaggaaggggacacaccagggcccgagacagaaaagacag

SEQ ID NO: 197243 - RNA, 69 nt, Homo sapiens
gaacaaaagcaaagccccagacggacgacgccccagggccaccgccagcagacgacagaagggaggcgc

SEQ ID NO: 197244 - RNA, 79 nt, Homo sapiens
aacgcaaacagcaagaacaggacagagcaacaagacacagcaggggccagacaaccagacccgggaggcaagagacgag

SEQ ID NO: 197245 - RNA, 80 nt, Homo sapiens
caggcgccaaaaaggagcaagaggcagggaacaaggcagaccaaccaccccaccgggccacgacagccaccaaaccggga

SEQ ID NO: 197246 - RNA, 78 nt, Homo sapiens
ggagaagaaggccacacgaaaggcaaagaggcacagaacccagggacaggagaaagagcaccaggggaaaaggaggaa

SEQ ID NO: 197247 - RNA, 75 nt, Homo sapiens
ggccgaggggccgcagcggccggaggggaagaggggacaccgcaagccaggacaaccccccgggcacaaccacaa

SEQ ID NO: 197248 - RNA, 73 nt, Homo sapiens
gcgcgggagcccgggcaccagagcgacgggcaggaaggagggggcgcacaaacgaggacgaacgaaccacggc

SEQ ID NO: 197249 - RNA, 82 nt, Homo sapiens
acccgcgcgcccgaggcggccgccgcgcacccaccgcgacccgggacccgcccgcccgcgggaggcaaagaccagcaaggca

SEQ ID NO: 197250 - RNA, 77 nt, Homo sapiens
gaaaaaggacagaagaacacgaaaagaggccgagaacgaaaggagaagagaacccgagcaagaaggacaagacggcg

SEQ ID NO: 197251 - RNA, 75 nt, Homo sapiens
cagagggggaaagccaaggaaaaacggagagccacaaaaaaggaagcgaaaaggccggaagagcgggagcgggag

SEQ ID NO: 197252 - RNA, 79 nt, Homo sapiens
cggggccacgacccagcggacggaaccagcagggaaggagaaacaacgaacgagcaaggaagggccaaggcagacccca

SEQ ID NO: 197253 - RNA, 86 nt, Homo sapiens
agcgccgggagaggccggcagccccgggacacccccgcaagcgagcagggagacaacagccacacaaagcagcaacaggagcaggg

SEQ ID NO: 197254 - RNA, 76 nt, Homo sapiens
gaagagcaggggcggccgccgacagcgggacgagaagaagccaccgggcaccggccgagggcggagcagcgcagga

SEQ ID NO: 197255 - RNA, 66 nt, Homo sapiens
cccggcgcagcgaccaaagcaggacggggaagggggggcaggaggggaccgagagccaccgaaagc

SEQ ID NO: 197256 - RNA, 80 nt, Homo sapiens
acacccggacccccgaccagaaccaaagggagaagccaagaagcacgaaaggaacgcccccaagcccaaggaaacacgga

SEQ ID NO: 197257 - RNA, 69 nt, Homo sapiens
cccgcaccaccgagggacacagacccccacaagcagcggccccgacgcagacgcccgaggggggaggac

SEQ ID NO: 197258 - RNA, 100 nt, Homo sapiens
cccaacagaaaaagagaggagggagaacacagaaacccgccccggagacaaagcaggaggacacaagaagggaggaaaggcggacccaggaaccaccacg

SEQ ID NO: 197259 - RNA, 64 nt, Homo sapiens
ggcaccccacaccggagacgaagacaaccccaaacagccgcaacgccccagggaaaggccaaga

SEQ ID NO: 197260 - RNA, 77 nt, Homo sapiens
aaacaccaagagcccaggaaaaacaggcccaaccgccgcgacagggcagaagcccagaaaacgcaagaagagcaacc

SEQ ID NO: 197261 - RNA, 82 nt, Homo sapiens
ggggagccaacaacaagggcgcggcagagcggagagggcgaccagaacgcaacaaagagaggaaacacgaaagccgacaaaa

SEQ ID NO: 197262 - RNA, 75 nt, Homo sapiens
gaccccacgagcgccacacggccgcaccgcgcgagcacgggcggagcgaacggcggggaccaacccaagccaaac

SEQ ID NO: 197263 - RNA, 76 nt, Homo sapiens
gcggcgagcggcccgcacaaggccggcagggcccaggacagaaggcgggcaaggagcgccccccgagcacccccca

SEQ ID NO: 197264 - RNA, 55 nt, Homo sapiens
cacaacacggggacgggccagcaagacacagagaagaagagcgcgccacagaccc

SEQ ID NO: 197265 - RNA, 76 nt, Homo sapiens
aaccaggcggaaggcgcgagaagcgagcgcgacaaacccagaagcaaggaagaaagaagcaccacagagagacagg

SEQ ID NO: 197266 - RNA, 82 nt, Homo sapiens
aggaacaccgagccggcgggccgcgagcccggccgcggccgcggcagggccaaggacacaacgggacgggcccgggacagac

SEQ ID NO: 197267 - RNA, 66 nt, Homo sapiens
agccggacagccggcggcagagcaaggggagacaaagaccaccaaaaaagcaagagaccacccaga

SEQ ID NO: 197268 - RNA, 80 nt, Homo sapiens
cgggcccgccagccccagcggcgccgagaaaggagagcaagcccacccgcgagaagcggaagagaagaacagccgagacc

SEQ ID NO: 197269 - RNA, 77 nt, Homo sapiens
aaggaaccaggaaagccacaggaggccaccagaacccaagaagaccgaaagaaacacgacccaaagaagggcgacac

SEQ ID NO: 197270 - RNA, 78 nt, Homo sapiens
aaagggccgaaagcagaagaaaagggacgcaagaaacccaggacgagaacagcaacaggacggccccgcgccacaggg

SEQ ID NO: 197271 - RNA, 79 nt, Homo sapiens
cgcggcagccgggaaggacacgcccacgaccggggggacagcgcccaagcgggacagacccaccgaaccagcagacagc

SEQ ID NO: 197272 - RNA, 44 nt, Homo sapiens
cgagacccgccggaggaacgccagccggcgacccaaggcacaga

SEQ ID NO: 197273 - RNA, 74 nt, Homo sapiens
aaccacaggcacagggaccgccagaaaccaaagacgagagacggaacagccaaccaagaaaggggcacggcaaa

SEQ ID NO: 197274 - RNA, 67 nt, Homo sapiens
agccagcaacaccaaagggaacggcacggaggacagcgagcgaagccggacagacaagaggagaccc

SEQ ID NO: 197275 - RNA, 78 nt, Homo sapiens
cagaaccaggccggcggcaggaagggaaaaggccgaggcacagcgggaagaccgcaaagacgacccgagacagggaac

SEQ ID NO: 197276 - RNA, 81 nt, Homo sapiens
cagcacgagccaggaacgcgcagccccgagcgccgcggacgcgcacgagggacggggaaagaaagggacggaaaaccaaaa

SEQ ID NO: 197277 - RNA, 58 nt, Homo sapiens
accgcccggaaccacagcacgggaggcaccgccccaacccccccccgcccggagaacc

SEQ ID NO: 197278 - RNA, 77 nt, Homo sapiens
gaacccgacaagagcgggaacaggaccaaagcagcagaccacagccaacgaaaccaagcgccagggaaggggaaaaa

SEQ ID NO: 197279 - RNA, 42 nt, Homo sapiens
ggagcagccacgcgcccacgacgccaggccgaggacgcgaag

SEQ ID NO: 197280 - RNA, 82 nt, Homo sapiens
agaccgggcgaccagaagggcgcacccgcaggaacccgccgagggagggcgcgccgcccgggcggcagaccgggacagaccg

SEQ ID NO: 197281 - RNA, 59 nt, Homo sapiens
cgcagagcccggggacggcgaggccccagaccacacgcggagaaccccgccaaccagag

SEQ ID NO: 197282 - RNA, 80 nt, Homo sapiens
cgcggcaccaaggcacaggacccaggaagcgcccccggcaggagggagcgggaaggggagcgaaggccgcgcagccagag

SEQ ID NO: 197283 - RNA, 61 nt, Homo sapiens
gaagccagcccccaggcggaacgcccgccccgcagagagaaaaccggcgcagagccaaaag

SEQ ID NO: 197284 - RNA, 75 nt, Homo sapiens
gaacaggcggcgcgcgcggcgcgggacgcgcgcgggcacccacggagccccggggcggacccgaacacggaagaa

SEQ ID NO: 197285 - RNA, 85 nt, Homo sapiens
gccgcagagcgccgaggaggcccgcggggcaaccgccacgagacaccaaggggcgaagacagagacgccacaggaaaggaagccc

SEQ ID NO: 197286 - RNA, 79 nt, Homo sapiens
caggcccgcccggacaccgagagcaccgaacagcagaaagaacaagcacgccgaaagccagagaggaaacacccagggc

SEQ ID NO: 197287 - RNA, 85 nt, Homo sapiens
gaagggacaaagaccgccaggcagaacagggaggagcaggagaaggagaccccgggagaagccggcaagaagccaacggagaacc

SEQ ID NO: 197288 - RNA, 72 nt, Homo sapiens
ccagaagccagcccgacagacagaggaggcggaaaacggaacgaagcagaaggacgccaacacaaaagagaa

SEQ ID NO: 197289 - RNA, 73 nt, Homo sapiens
ggcgagcccgggccgcgcccgagaaccaaggagacagggaaaaccgaccagagaaaagaagccgggaagcaga

SEQ ID NO: 197290 - RNA, 85 nt, Homo sapiens
ggccgcggggaggacaggccgcgcacaggccggggaagggccaggccgggcagccgccgacgagcagaggagcaacacccaagga

SEQ ID NO: 197291 - RNA, 81 nt, Homo sapiens
agaaagacacacggagacaaaccgcgccaaggaaagcagaggggagcgaaagccacaccagacaaacaaccacccagcaga

SEQ ID NO: 197292 - RNA, 76 nt, Homo sapiens
cgagggcgacgcgcaaaaaaaggaagagaagacagaggagccagaccaagagacagcacaggcgagcgagcagaga

SEQ ID NO: 197293 - RNA, 114 nt, Homo sapiens
cccgacggaacagacagcggcccggggggccggcggcggccgcgggcggcaggaaggagaaccaccaggcccaccgcgcccccgcagaacggcagacggaagccggaacccacc

SEQ ID NO: 197294 - RNA, 75 nt, Homo sapiens
cagcccacgcgagaagaagaccgccccgcccagacggccgaggaggaacgaggcgcgacacaccagcggagcggg

SEQ ID NO: 197295 - RNA, 85 nt, Homo sapiens
ccgagaagggaacagccgcgacacggcgggcaggaaaccaccccgcgcaccgccgcagggcccaacgaaccgaagagaaaaggcc

SEQ ID NO: 197296 - RNA, 81 nt, Homo sapiens
cagcaccccagggaggaaagccacagcgggaggaccgggaaggcaggaagcacagaaggaccagaaagggcgggaaccagc

SEQ ID NO: 197297 - RNA, 86 nt, Homo sapiens
cagcaagaggaggggcccggagagggggaagggcccaaagccagaagcccacggggacgcgccgccaccgcccaccacccccgccg

SEQ ID NO: 197298 - RNA, 44 nt, Homo sapiens
ggaaacaggcggaagcgcaaaggagggcccccggacccgggagc

SEQ ID NO: 197299 - RNA, 76 nt, Homo sapiens
ggccgagaaacagagagaaaagagacggagcaagagaacgcaagagacgcccgggaagcacacaaaacgcgggaga

SEQ ID NO: 197300 - RNA, 59 nt, Homo sapiens
cggaaaccggagcgcgcagcagggggagccccccagacccgaaaggagacaagaggaca

SEQ ID NO: 197301 - RNA, 75 nt, Homo sapiens
gcaacccccagcacagagccgaggaaacccagacccaagaccaaccgaggaggaggaggagggagacgcgcccag

SEQ ID NO: 197302 - RNA, 52 nt, Homo sapiens
agaaacaccgggcgggccccgggcgagcgggggccacaggccaacgacaacg

SEQ ID NO: 197303 - RNA, 74 nt, Homo sapiens
ggggacggagagaacacgagcccacaggagggcaacaacaagcagagacgcgacaaagaggggggggagaccgg

SEQ ID NO: 197304 - RNA, 86 nt, Homo sapiens
caacacccggaccaagcaacaccgccccaccccaaaggcggcaaaggcagaagccagagggcgcgaacccgggaccggaacaagaa

SEQ ID NO: 197305 - RNA, 69 nt, Homo sapiens
cggccacagcaggaggacgcggaacgaacacgcccaggacgggacagaagccacgagaccgccaaacac

SEQ ID NO: 197306 - RNA, 76 nt, Homo sapiens
gggcggccgggacggaggacgcgcagcaccagaacagaagaggaacgacagcgccaccccccagaaggcgacaaca

SEQ ID NO: 197307 - RNA, 79 nt, Homo sapiens
gccaccgcccagcgggagaggagcccaccaggacgaccgcgccgcccagcacgccagagcacaaagacaggggcggaaa

SEQ ID NO: 197308 - RNA, 85 nt, Homo sapiens
gccgccaaccgcagggacgcgccaaggccacggccgagagacaccaggcgccgagaaggccagcagagaaacaggcaggagaggc

SEQ ID NO: 197309 - RNA, 77 nt, Homo sapiens
ccccacacaagccaacacgggcgccggagagcacgagccagggagccgccgggaccggcccgggagacgacaaccca

SEQ ID NO: 197310 - RNA, 77 nt, Homo sapiens
acagaagaacagagacagggagaaacacgcccgcaaaggcggcgacggcggcgcgaggaccgaccgggcccgcggac

SEQ ID NO: 197311 - RNA, 72 nt, Homo sapiens
gcaggaaagccagccggcgagagcagccgccgccagcgcgcacgcaaggaggcggcggaacgcccagccgac

SEQ ID NO: 197312 - RNA, 94 nt, Homo sapiens
aagagccagaggccgacggccccaggggaccaggggacgaagggaacagcaggacgaaaggacaggaaacagaccacagcacagaaacagagac

SEQ ID NO: 197313 - RNA, 84 nt, Homo sapiens
cgaacaccagcaccacccaaagaagaggggagaacaaccacggaagaggagcccagggcagcagggacacgcccgaagaggagg

SEQ ID NO: 197314 - RNA, 73 nt, Homo sapiens
ccacgcgcggaaggcagcgcccagcagcgcaggagcggagagacgaggagcagagaaggagacaccgaaggcc

SEQ ID NO: 197315 - RNA, 79 nt, Homo sapiens
gcagaggaaaagcggcgcgcgcgcgcgcgcagcaccaggagaggagggaacgcggagcggaggcagaagaggccggacc

SEQ ID NO: 197316 - RNA, 84 nt, Homo sapiens
caaaggggaggacgcagcaaaccaccagaagggacccccggacagccaacaccaaagccgcgggcacagcggccgcagcggcac

SEQ ID NO: 197317 - RNA, 55 nt, Homo sapiens
cgaaagacaacaaggccagaccaggaccacccgcacccaggggacgcacggccca

SEQ ID NO: 197318 - RNA, 80 nt, Homo sapiens
aaaaggcaaccacagagagagagagggagggggcggaggagccagagagcagacagaagcacgagccgaacaggaacaga

SEQ ID NO: 197319 - RNA, 69 nt, Homo sapiens
gggacaagcccagaaaaagcaacaagaagagacaagcggccaaaaggacaaaagaacgcaaggcaagga

SEQ ID NO: 197320 - RNA, 82 nt, Homo sapiens
cgccgcccgccaggccgacaaggaagcgccccacaaagccaagcgaggagagaccaagaccacagcgagacacaaaacgcgc

SEQ ID NO: 197321 - RNA, 70 nt, Homo sapiens
aaccgcccccacggccagacccgaacacggaagaaagacacgcaggaggccgcggccgagcagcgccacc

SEQ ID NO: 197322 - RNA, 75 nt, Homo sapiens
gaaaacagacagaacagaacccaaaagccgacaaccccagaaacagcaagccccagccaagacccaccaggcagg

SEQ ID NO: 197323 - RNA, 56 nt, Homo sapiens
gccagggcaaacagcgaaaaccgaaacaggaaaaccagagacccagacacgcgaag

SEQ ID NO: 197324 - RNA, 78 nt, Homo sapiens
acggcggaaaacggagagacggggagaaaaaaacagcaggcggggaaggaggcgagcccggaacccggagaccagcgc

SEQ ID NO: 197325 - RNA, 69 nt, Homo sapiens
caaagaggaagcccaccacaaaaacgaaggcggcgggaagccccggaccgaagacccggacggaaggag

SEQ ID NO: 197326 - RNA, 76 nt, Homo sapiens
gccccgccgcgcccaggagcggaacaacgcggcgagcggggcgccggcgaaagcaacgaagggacgccagaacaag

SEQ ID NO: 197327 - RNA, 80 nt, Homo sapiens
aggaacagcggccaaaacacaccgaaacccgggcacagcggcgcggaaaaggaacagaagaggaaccgaaacccaagaaa

SEQ ID NO: 197328 - RNA, 77 nt, Homo sapiens
gggaaggaagcggagaacgcgggcaggacccagaccacaagacaggaggaccgccccggagcagagggagcagaaag

SEQ ID NO: 197329 - RNA, 67 nt, Homo sapiens
ccgcggccccccgcgcgcccgggaacgagaccagaaagccacaggacagggagaaaagaagggaagg

SEQ ID NO: 197330 - RNA, 84 nt, Homo sapiens
agcggggaggccgcccggcgcagcggggaccggcggcggcgcccaggcacccggcccggcaaggagagccagggaaaggcgcag

SEQ ID NO: 197331 - RNA, 55 nt, Homo sapiens
gccccgcccgcgggccagggcgccggcgcaggacagcggccgaagccagagccgg

SEQ ID NO: 197332 - RNA, 81 nt, Homo sapiens
acgccggggaccccggcagccacccaccgccgccgcccccagggagaagcccaccacgcaacgggacggcgcggcggaagg

SEQ ID NO: 197333 - RNA, 79 nt, Homo sapiens
agaagaaccggaagccgacccggagccgagcaaccagcgccagcaaagcacggacagagaaggaggagaagcgagccag

SEQ ID NO: 197334 - RNA, 35 nt, Homo sapiens
cggaaaggccacacccaggagaaggagagggaagg

SEQ ID NO: 197335 - RNA, 83 nt, Homo sapiens
caggcgcaaggccaggcgacccgacgggccaccggcagcacaacaagacgcagcgggaggggagccagcgaaggccaccccag

SEQ ID NO: 197336 - RNA, 70 nt, Homo sapiens
gcaccaaggaaagcagaagacaaaaaccggaaggcaaaaagccaaaaggacacccaacaacagcaaggcc

SEQ ID NO: 197337 - RNA, 78 nt, Homo sapiens
gcgacagaaggaagagaccgcaccacgccgggaacggaggagcggaggagccccaggaaggcgccaaaggggcagaag

SEQ ID NO: 197338 - RNA, 86 nt, Homo sapiens
ggaggaggcggcccggcgcggggaagcaggggaaaacgcaaggaagccgggaggcacgcgcggaccagccgggcccgcagccgcac

SEQ ID NO: 197339 - RNA, 85 nt, Homo sapiens
caagccgggggacgaccgggacagcaccggcgcaccaggacagcccagagcaagcacacggaggcccgggagccagaccgggagc

SEQ ID NO: 197340 - RNA, 71 nt, Homo sapiens
cccccggagggcaccagaacaaaaggggccaaaacacaagcaggagcgaacacaaaaccccgacaaccccc

SEQ ID NO: 197341 - RNA, 90 nt, Homo sapiens
ggcgcgcaagccagcccggcaaacccaaaagacagcaagggaaggcacacagacgcccaaaggacggcacacgagggagcgaccacaaaa

SEQ ID NO: 197342 - RNA, 76 nt, Homo sapiens
ccccggagcaggccaagcggggccaggacgcgggaggaccggagaacggaaaacagccagaacaccagaggccgaa

SEQ ID NO: 197343 - RNA, 77 nt, Homo sapiens
aaagccgaaacgcaaccagccccacgcccagagcaggaacgagggccaggagaaaaggcaccaggcggagaagcaga

SEQ ID NO: 197344 - RNA, 68 nt, Homo sapiens
agaaaggaacagaggcagacagaacggggccacgggaaacaggcacagaggcgggaagaggccacaag

SEQ ID NO: 197345 - RNA, 74 nt, Homo sapiens
caccggaagagccacggagcaggaggccaaccagaaggagaaagaacgagcacggacaggaagaaagacagcga

SEQ ID NO: 197346 - RNA, 70 nt, Homo sapiens
gcagcccgcccagaagccacggccggggaaccaggggggaaccaccagaggaagagagcaaagcagaaac

SEQ ID NO: 197347 - RNA, 78 nt, Homo sapiens
ccacagcccgggcgggaccagcacagcagccaccggcggaggggaaacacaagaggagccaccgcacccaggcggagg

SEQ ID NO: 197348 - RNA, 76 nt, Homo sapiens
aaggcgaaaaacacagaaaggacgcggaaaaagaaaaggcgacggcggagacagaagagaggagagcccacaaacg

SEQ ID NO: 197349 - RNA, 76 nt, Homo sapiens
gaccacagccagcagaacgagagaggaccggaaaacccccaaggccaggagagccccaacacccacgcccccagcc

SEQ ID NO: 197350 - RNA, 88 nt, Homo sapiens
agcgccaccaccacgccagccgcaccagccgcccaagccgcacagccgcggcggcagcagcaggagagggaacgaagcccaaaaggca

SEQ ID NO: 197351 - RNA, 43 nt, Homo sapiens
gaccaagaaccagcaggggccagccggagggagcaagggcaca

SEQ ID NO: 197352 - RNA, 70 nt, Homo sapiens
caggcccggagcagcgcacagaaacacgccacgcagaagagccaaaagagaggaggccgaaaacgcgggc

SEQ ID NO: 197353 - RNA, 73 nt, Homo sapiens
cccgacgccaggcagcgcccccaaacgagcgaaaagcggcaagaacagccagaggaacagaggagaagaaaga

SEQ ID NO: 197354 - RNA, 55 nt, Homo sapiens
ccaacaaggcagcagagcacgcacccccacccaggccacagcagcagccacgagc

SEQ ID NO: 197355 - RNA, 61 nt, Homo sapiens
cccgcccccggccgagcgacggccgaaagaagaaaacccgagcagagaaaacaacaaagcg

SEQ ID NO: 197356 - RNA, 82 nt, Homo sapiens
cgaacgagcgagagggcccccggcccgggaaccccacggcccccgccagcacacaccgagcaggggccacggggaccaggcg

SEQ ID NO: 197357 - RNA, 69 nt, Homo sapiens
gcaacccagcacgaacaagaacgcggcagaacggaggcaggcagcacgagacacaccacaagagggaca

SEQ ID NO: 197358 - RNA, 85 nt, Homo sapiens
agaaccgagcagaaagagggaaaaaacccagggggcaggaagaggcagaagccccagaggagcccgaaacccccaggcgggcagg

SEQ ID NO: 197359 - RNA, 63 nt, Homo sapiens
gggaacgaagaagcgccccgacaccaggaaaacccagaaagcaaggaaaaaccccccccgcca

SEQ ID NO: 197360 - RNA, 69 nt, Homo sapiens
gaaggaaaggcgcaacaacacaaaaaaagcagcaaggacaaacccacaagcgaaagaacacgagaagaa

SEQ ID NO: 197361 - RNA, 44 nt, Homo sapiens
gcccaggcacagccgacgccgcggggacggaacaaaaagccgga

SEQ ID NO: 197362 - RNA, 59 nt, Homo sapiens
gacagcgcacacagcaagcacgaggaacaaggcgcgccagggcacagggagcagccgaa

SEQ ID NO: 197363 - RNA, 52 nt, Homo sapiens
aaggggagccacaggagagcgcccaggggcaccccccgggaagaagcccccc

SEQ ID NO: 197364 - RNA, 99 nt, Homo sapiens
ggaccaggcagaagcacgggacaggcggggaaacggcgcgcccggacaacagagcaggacaagacccaaaagggcagcgcaaaagaagagacagaggga

SEQ ID NO: 197365 - RNA, 73 nt, Homo sapiens
ccagcgccccaggccaagagggacccacccggcgagggaaggggaacaggaccggccacagacagccccccag

SEQ ID NO: 197366 - RNA, 53 nt, Homo sapiens
agcagcggaacaggccgacagcccagccaagaacgcagagaaccccagcaacc

SEQ ID NO: 197367 - RNA, 80 nt, Homo sapiens
ccagaaaaagagaaggaggcgcgagcaagaggggaaacaacagaagaagcaaggaaaacagagaggcacaacgcccgaag

SEQ ID NO: 197368 - RNA, 85 nt, Homo sapiens
caaccccaccacgccgcggccggggcccgaccgcggggacccaggaaccagaggaaagccccagaagcaaagagaggagaagaaa

SEQ ID NO: 197369 - RNA, 81 nt, Homo sapiens
ggccaaaaagacacagcggaagaagaagaagagcagacggcagccaccaaggagacgagagggccccaaagggaccaggga

SEQ ID NO: 197370 - RNA, 74 nt, Homo sapiens
gcgggcaccgggcgggcgccagcgagggaccagggcgaggaggcggagccagccaggaggaggggccgcggccc

SEQ ID NO: 197371 - RNA, 70 nt, Homo sapiens
caagggagacgcgcaagaggacagcagacagacgagcgcgcgacaaccaagaggaaccagcagaaggaac

SEQ ID NO: 197372 - RNA, 72 nt, Homo sapiens
gccaaaccagaggagggaaaacgccgaagaaggaaggggaggagcacagaacgccaggaccaaaacagggag

SEQ ID NO: 197373 - RNA, 60 nt, Homo sapiens
cagaggaccagcaacaaacgaaaaagcagcaaagggagaaaagaaggccaaacagaagca

SEQ ID NO: 197374 - RNA, 71 nt, Homo sapiens
gcaaaagccccagaacggacaagacggacagaaacgaacagcgggcgagccaggggagccagagggaagag

SEQ ID NO: 197375 - RNA, 67 nt, Homo sapiens
caggacgcacaggagagcaaaggagaccacggagagaaaagagaccagagagcaagccgagggccga

SEQ ID NO: 197376 - RNA, 76 nt, Homo sapiens
aaaccaccaaccgggaccagggcgccaaaacaggaggagggcgacgcgcaagggaaaagacgcgagacgaggagga

SEQ ID NO: 197377 - RNA, 64 nt, Homo sapiens
acggagagggagaaggcagcgggagagaggagagcagagagcagaaacaccgaccacccaaccc

SEQ ID NO: 197378 - RNA, 73 nt, Homo sapiens
aggcagggagggaggggaaagacccacaccaagagggagagagaaggcccaaaagccaggggccgacggacaa

SEQ ID NO: 197379 - RNA, 72 nt, Homo sapiens
gccgggccgcccgcggcgacccaaagacaggaccacgcaccagcagagaaggaaagcaaaccgaagcaggcg

SEQ ID NO: 197380 - RNA, 69 nt, Homo sapiens
caggaagccaggcacgcacagcacgccaaaagccaaaacgacaggggagcaaaaggaagaagggaaaac

SEQ ID NO: 197381 - RNA, 82 nt, Homo sapiens
agagccccccacacagccacacagacaccgccacaggagagagcaaggagacgacaccaagaggaaaaaccaggcaaggaag

SEQ ID NO: 197382 - RNA, 82 nt, Homo sapiens
gaagagccggggcaccccccgcggccgggcaacgcgcggccggagcaggaaccagcacgggggacacacagcgaagacgaca

SEQ ID NO: 197383 - RNA, 70 nt, Homo sapiens
caggagcgccacgcgcggaaggcagcgcccagcagcgcagccaggacccgaaaagccagcaagcgagacc

SEQ ID NO: 197384 - RNA, 79 nt, Homo sapiens
cggggcggcgcaggaggagccgaggcgagccaacagcacgcaagaacggaagcacgggcggaggaaagcacaagcagag

SEQ ID NO: 197385 - RNA, 71 nt, Homo sapiens
gaccccgcggagacagcgagacccgccaggagcaaaggccaccaggcaacgcaccaacaacaccacacaaa

SEQ ID NO: 197386 - RNA, 56 nt, Homo sapiens
gcccgccgggcgaagccgaacaggagacaggaagccagccggccccaacccaggga

SEQ ID NO: 197387 - RNA, 73 nt, Homo sapiens
gaaagaccaccaccccgccagaagaggaaaaagggcagaaccccagagagggaggagaaggaccgagaggacc

SEQ ID NO: 197388 - RNA, 85 nt, Homo sapiens
accgcacaggcagacgcgggccagcccagcaccgacagccgacgcgcagaagcagagccaccggggaaagcgcgccaccccacga

SEQ ID NO: 197389 - RNA, 79 nt, Homo sapiens
gcgaaggcccagagccgggggagacaaggacagaaagacagagcaaccacggcaggcaagcgaaagaaaaaaagacagg

SEQ ID NO: 197390 - RNA, 78 nt, Homo sapiens
gccccccccagacccaaaaacccaccccgaccagacaaaccaaccaacccaccagagagcgcagacacagcgccccca

SEQ ID NO: 197391 - RNA, 70 nt, Homo sapiens
agagcccgcaggagcagaagaagccaaaaacacggacaacggcaagcggagaagagcaaggccgaaccga

SEQ ID NO: 197392 - RNA, 74 nt, Homo sapiens
gccccaggcagcgggcggcgccagcggagaacagcccgaccacgccaaacagaggaaagagcggagcccgccag

SEQ ID NO: 197393 - RNA, 73 nt, Homo sapiens
gacccagcacagaaacgacggcgaagaaaggacgaagcagcacaagacagacccaaggaccaccaccagaggg

SEQ ID NO: 197394 - RNA, 74 nt, Homo sapiens
gccaccgaagacgggccccaacacccagagacgaaagagcaaaaggagaagccaaaccaagaggagagcgcgac

SEQ ID NO: 197395 - RNA, 76 nt, Homo sapiens
acgagaccaaacggaagagacgcgagaaggaagaagaacacaacagaaagagcggagaaaggcaaccccacacacc

SEQ ID NO: 197396 - RNA, 79 nt, Homo sapiens
gcgcaggccgcagccagagccgcccaaccccggacaacgcagaccagacccggacgccacggacagcagaccacagccc

SEQ ID NO: 197397 - RNA, 81 nt, Homo sapiens
cgcaaaaacaggccaagcagaagaggacggaagacgagacacaaaccgacccagcagaccacgggaggggaaaaagagacc

SEQ ID NO: 197398 - RNA, 91 nt, Homo sapiens
accacgcaccgacagcgccgccaccgagccgggcccaccccccaccaaggaagaggccagccggccgaccgcacagacgaccacacgcgcc

SEQ ID NO: 197399 - RNA, 71 nt, Homo sapiens
aaaaaagaaagcacgggccgcagaaaagaggacagccaacccccaacaagagaagagaagagagaacaccc

SEQ ID NO: 197400 - RNA, 53 nt, Homo sapiens
gccagagcggaccggggcagaccaaacggcaagacacagcgagaagaggccac

SEQ ID NO: 197401 - RNA, 73 nt, Homo sapiens
ggagccaagagccgagagggaccgaaaaggaagagccgaaccagacagccagaaaacaaaccggcgaggagaa

SEQ ID NO: 197402 - RNA, 81 nt, Homo sapiens
aggagggcaccccaaaagaaaggggggacacagcgagccacgcgccaggaagcccggccaaggagccaaccgcgcgagccc

SEQ ID NO: 197403 - RNA, 35 nt, Homo sapiens
gccgaccacggacgccagacaaaacagaggagacc

SEQ ID NO: 197404 - RNA, 68 nt, Homo sapiens
acagacaaaagaaaaaagacagcaaaaacaaaagcgagagggaagggaagaacgagaacccaaaagga

SEQ ID NO: 197405 - RNA, 75 nt, Homo sapiens
cgggacaagccaccagacccgcaccagaaaacccccaccagaaccagccacgcggaagcgaaagggggcagacag

SEQ ID NO: 197406 - RNA, 67 nt, Homo sapiens
cgaggaaggagagcagacccaggagagccagaaggccaggaaaggcgaacaccccaggccgcgaggc

SEQ ID NO: 197407 - RNA, 76 nt, Homo sapiens
cacaccgacaggcggagcgcgagagggcgagacgggacacccccggaacacaggcccaggcaggcaacacaggacg

SEQ ID NO: 197408 - RNA, 75 nt, Homo sapiens
accgagaccgccaaaagagaccaccccggacaagaagaagaaacagacccaagagcgaaggacaacgggggagag

SEQ ID NO: 197409 - RNA, 88 nt, Homo sapiens
ggcaggaccccgggacacccggaagccaggaaaggagaggaaaaacgagacgcaggacaaagagaaacgcgaagcggaggacgacgag

SEQ ID NO: 197410 - RNA, 102 nt, Homo sapiens
aaggaaaagacccggaaagaagagacacagaggagccacacccccaggaggggcagcagcaggacagggaacccgggagacagcaacagacggaggaacggg

SEQ ID NO: 197411 - RNA, 57 nt, Homo sapiens
cagccagcccgaagaaaagggaaaacgcgcgggccaaggaggcggcggggaaagaca

SEQ ID NO: 197412 - RNA, 79 nt, Homo sapiens
ggggacaaaccaacagaagggcaaccagggaaaggagcggaaggcgaaaagagcaggagaggagaggacccggaacaga

SEQ ID NO: 197413 - RNA, 68 nt, Homo sapiens
ccggggcgcccgcacgacggagagccgacccgacacgagccaagaaaagacgcccaaggggcaagaag

SEQ ID NO: 197414 - RNA, 80 nt, Homo sapiens
accagcgaacagaagggcaagagaggggacggagggaaaagacccaaaggaaaccaagacggcaaggcagccccggcaga

SEQ ID NO: 197415 - RNA, 109 nt, Homo sapiens
caaggccagaggacacgccgaaccacgagaccaaggaccaagggcccaacagcaggaaacaggcaaaggagcgacagacagcgagggaagcaccggaagacaccagaga

SEQ ID NO: 197416 - RNA, 56 nt, Homo sapiens
gaagcggccggaccggaacagggcgggacacaaggagacagagccagcaacagcag

SEQ ID NO: 197417 - RNA, 78 nt, Homo sapiens
gagcgaaacagaaccgccaggagcggcagacggcaggccagcgcgaaaaggagcgaacaggggccacagcggaagaag

SEQ ID NO: 197418 - RNA, 78 nt, Homo sapiens
cccgacgcgcgcacaccgaaggacagcaggagcagggacggggggaaaagcgcacccgggcccgggcgagaaagaaga

SEQ ID NO: 197419 - RNA, 84 nt, Homo sapiens
ggccgggggcgcgggcggcggcgccggcaggaagggaaaagccgggccacagaagcaccaccacaagccacaccaacaaacgac

SEQ ID NO: 197420 - RNA, 94 nt, Homo sapiens
ggggaccgcagcagcgagaaaggagccggggaccccccaaagacaagcagagaagcagaggagagggcaaggaagaaaccaccaaggccaaagc

SEQ ID NO: 197421 - RNA, 83 nt, Homo sapiens
gccccaccggaacccagcaacggcgccgggcagggacagagagggggcccacgcggcagcagggacccaccccagcagcgaag

SEQ ID NO: 197422 - RNA, 50 nt, Homo sapiens
caacccaaaacaacggaaaagcaaggacaaggccagccaagccagcagac

SEQ ID NO: 197423 - RNA, 73 nt, Homo sapiens
cgaaggccccaaagcgggaaagcgcaaagaacgggccaagccagccgaggaagaaggaagaaagagaaagaag

SEQ ID NO: 197424 - RNA, 79 nt, Homo sapiens
cggcggcggcggcggcggcggcgcaggacccagagagggaccagggccaaagaagagccggggggcaggcggacagcaa

SEQ ID NO: 197425 - RNA, 59 nt, Homo sapiens
cgcgcaccggaagcaccagcgaggaaggagagcaaagagcccgacaaccggaccacagc

SEQ ID NO: 197426 - RNA, 72 nt, Homo sapiens
agaaggcaccaggggcgggaggggccccgggcgcgggagccagccgaagaaaggaaaagagaggcgccgaca

SEQ ID NO: 197427 - RNA, 70 nt, Homo sapiens
gcagacggaaacaaggcaacagaaagagcaacagcagggcaacagaaggagaccgcaggaaacacacaaa

SEQ ID NO: 197428 - RNA, 79 nt, Homo sapiens
ggggagaagacgcggcggcggaacagcgagaacagaccaccaaaccaccgcgaagcccaagcgacgaggcagggacaac

SEQ ID NO: 197429 - RNA, 61 nt, Homo sapiens
gcaagcccagacaagccggggaggaagggcggcggaccggccagacacaacaggccggggc

SEQ ID NO: 197430 - RNA, 82 nt, Homo sapiens
cccgagccagaggagcgaccccacccggaggaagggcagagccaggaacacagaaggcgcgccacccaagcacaccacaccc

SEQ ID NO: 197431 - RNA, 72 nt, Homo sapiens
gacaagggagcaccaagggagaacgggaagggaacacaacagagagagaagagagaccaggcgcaaggagac

SEQ ID NO: 197432 - RNA, 54 nt, Homo sapiens
cacagcagaagccgaacggccgaagaaagaagcagccgccaggaggaagaaagc

SEQ ID NO: 197433 - RNA, 74 nt, Homo sapiens
gccagcggccaaccgcacaaaaagcgagcagcaagccgcgacacagagaagagcgggagcagggaaagaaagag

SEQ ID NO: 197434 - RNA, 66 nt, Homo sapiens
cgcgagagacacaggaacggaacggccagaaaggagggggcagaacccgagccagaacaaaggcgc

SEQ ID NO: 197435 - RNA, 59 nt, Homo sapiens
caggaacagcgcccagccgaaagagaggaagcccaaaaggaaagaaccagagacgacac

SEQ ID NO: 197436 - RNA, 89 nt, Homo sapiens
cccgcagcaagaggcggacgagaaggacagggaaggccgggcgggggaggcgagacacgggaggcacacacaacgccaacgggagcgga

SEQ ID NO: 197437 - RNA, 64 nt, Homo sapiens
cagaagacaaaacaggcagaaaacaagaaggacacagacaaaagaccaggagagagcagcaaag

SEQ ID NO: 197438 - RNA, 63 nt, Homo sapiens
agaacagcagggaagcgggaacacagcaaagccagaaaacaagagaggccccccacccggcgc

SEQ ID NO: 197439 - RNA, 82 nt, Homo sapiens
aacggcgagggaccacagcgagaccgcgccggcgaccagaggaccccaagagcagaagcgaagacaaagggcgaggcggcgc

SEQ ID NO: 197440 - RNA, 81 nt, Homo sapiens
gaccccgggagcccagccaccacagacagccagagacccagagcagcagcgaagagaaggcccagcccccccgccaccccc

SEQ ID NO: 197441 - RNA, 73 nt, Homo sapiens
agcagaaggcccgaacaggcacgaaaaaacccagcgaagaccacagaaaccaaaagccaggcgccggcaggag

SEQ ID NO: 197442 - RNA, 69 nt, Homo sapiens
ccacccggccaagcacacacaccaccggcggacacaggaaaacgggcaacagaaggaaagagcggcaaa

SEQ ID NO: 197443 - RNA, 99 nt, Homo sapiens
ccaacgaggagcaagaaacgaaaaaggccgaaaaagagaagaagaaggaggccgcggccagaaacccaagaaaaagcgaaggaacgcagagcgaagaca

SEQ ID NO: 197444 - RNA, 84 nt, Homo sapiens
acacccgagaacggcgggaagagaagacacgagcacaaacgggcccacgagacgcgaacaaacgccgcgccgccagaagaacag

SEQ ID NO: 197445 - RNA, 80 nt, Homo sapiens
aaagcgccccccaccccgaaagccccgccagaagaggcgacgagggagccgcagggcacaccaagaaagcaagacaggca

SEQ ID NO: 197446 - RNA, 83 nt, Homo sapiens
gcccccaaaggcggaacagaaacaccggcgggcgggccgacgaggccagacaagaacaaggccgacgcacgcagcaggcaaga

SEQ ID NO: 197447 - RNA, 77 nt, Homo sapiens
aacgggacgggcacccaccggcagccaggaaagacgcgcccaaccgggggaaggggcggcaccaaggaggacccacg

SEQ ID NO: 197448 - RNA, 83 nt, Homo sapiens
ccccggcacgacaccgccccaacccacgagaggacagcccagaggcgcaggaagggcaacaccaaaccagaagaaggacgagc

SEQ ID NO: 197449 - RNA, 76 nt, Homo sapiens
cgggccggcgcaggcggcgcggagagggggcgcgagcgggggaagacccgcggaaggcacacaagacacagccaac

SEQ ID NO: 197450 - RNA, 69 nt, Homo sapiens
ggggaagccccgcgccggccgcccggaccaaggaaacagcggagaacaaccggagaaaaaagcggaagc

SEQ ID NO: 197451 - RNA, 61 nt, Homo sapiens
agaaccccacagccacaccagccaaaggaggagagaaacaaaccgggcaaggcaggcccgg

SEQ ID NO: 197452 - RNA, 72 nt, Homo sapiens
cacgccgaaaggcgaccccccaaagaacacggcagaagcccccaagggaaaaaggaaggagcagacacaaca

SEQ ID NO: 197453 - RNA, 72 nt, Homo sapiens
ccgaccgcacgcgggcgcgagaacggccgcccgccgcagcggagccgagcacaccacaggccaaacggagga

SEQ ID NO: 197454 - RNA, 80 nt, Homo sapiens
ggcgaaggcccacgggagaaaaccgggcgcaagaaagagcacgaggcgagcggggagacccgagagaccaagggggagga

SEQ ID NO: 197455 - RNA, 87 nt, Homo sapiens
cggagaccccgaaaacggaagcgcagggagaaggaagaggggaaaaggccgggcccaccagcggcgccaccgcgacgaggacaaagc

SEQ ID NO: 197456 - RNA, 36 nt, Homo sapiens
cccgggcacccgcaggccacaggaacggggggggcc

SEQ ID NO: 197457 - RNA, 77 nt, Homo sapiens
agcccacacacagggaaaaaggagcagcccgggcaccacagaaaaggggccggaacagggccaaaccagcgaggcgc

SEQ ID NO: 197458 - RNA, 75 nt, Homo sapiens
ggccaagccagaaaggagccacacgaccccgccagcgcagggagcaacagcgagcaacaggcaacgaaaacagac

SEQ ID NO: 197459 - RNA, 74 nt, Homo sapiens
agacaaggaaacagcagaaaccggaaccacacacaccacaggaagccagaaggacgagacgagaccgggacgga

SEQ ID NO: 197460 - RNA, 82 nt, Homo sapiens
aaagagacccgcagagccacagggcagccgggagcccgacgaaagccaagcacacgcaaggaagagggccgccgaagaggag

SEQ ID NO: 197461 - RNA, 76 nt, Homo sapiens
gagcgaaagaaccccagacgcgcccaacagacgcaaaggacaaccagccagaacagccagcagaagcacaccaacg

SEQ ID NO: 197462 - RNA, 70 nt, Homo sapiens
cgggccggagcagccgcgggcgcccgaggggccgagcgagccggaaccaaaaagaagccccagagccggg

SEQ ID NO: 197463 - RNA, 80 nt, Homo sapiens
ggagccacaagaggcacgccaaccgcgagcagccaaaaggaaggaggaagagagccgaccagaagaagacgagaagcccc

SEQ ID NO: 197464 - RNA, 80 nt, Homo sapiens
gccgggcggccgcgcgagccggcggcccggagggggcggcggcaccgcaccaacgaccgaagcaccaggcacacccacaa

SEQ ID NO: 197465 - RNA, 70 nt, Homo sapiens
gggcggagcggcgagagcccccacggacagcgaacccacccaacacggcaaaacaaagacaccacaccca

SEQ ID NO: 197466 - RNA, 60 nt, Homo sapiens
ggcggcgcggcccgcgcgcagccggccgggaaagacaaggagccgggccgagaaaccgaa

SEQ ID NO: 197467 - RNA, 74 nt, Homo sapiens
agcaggcgacaaagagaagagaggaaaagaggggggcaagcaaaggagcccacgggcacgcagaggacgcacgc

SEQ ID NO: 197468 - RNA, 69 nt, Homo sapiens
cggaagggcgcagcaggaccggccacgggcgcacaaaccccaggacgcgacgaaggacgaagaggcaag

SEQ ID NO: 197469 - RNA, 73 nt, Homo sapiens
gaacggcgaagaggcaccaaaaagaaccgcagacaggcagaagcccccggggagagacagacagagggacaca

SEQ ID NO: 197470 - RNA, 72 nt, Homo sapiens
cccgccggcaaggaggcaccgcggcagacgggaccacgaggcaacgccccaggccaacggaccacaccaaaa

SEQ ID NO: 197471 - RNA, 85 nt, Homo sapiens
cgggcacaggagggaagagcaaggggaagaaacgagcgagcccgggacagcaagagccaagcgccgggacagccagggccagcca

SEQ ID NO: 197472 - RNA, 71 nt, Homo sapiens
ggccaggggccagggcaaaggcggacaggaaaaaacggaacgggaagggacagcagcggggagcgagcacc

SEQ ID NO: 197473 - RNA, 83 nt, Homo sapiens
gccgggaggggacggccgccggagccgcgaggccaagggaacgcccgcggacggcagggcgcgacaagaagcgcccgcccgac

SEQ ID NO: 197474 - RNA, 88 nt, Homo sapiens
caagcgccgcgagaggggacaggcgcaccggcaggacccgagacagggcgggaccgagacgacggagagcaggggcccgggcggcggc

SEQ ID NO: 197475 - RNA, 54 nt, Homo sapiens
accagggagagagaggaggcacaaagaaccccagaccgcgacgacagagcagcc

SEQ ID NO: 197476 - RNA, 72 nt, Homo sapiens
aaggaggaagaagacaccggggacagacaggacaaagacccgaaggggaggacaacaaagcaaaccacagac

SEQ ID NO: 197477 - RNA, 87 nt, Homo sapiens
gcgcgccggcccggaccggcgggcacgccccacagccgcgcgcccaggcccgaaagaaaaggaccaaggccaagaaggacaaagccc

SEQ ID NO: 197478 - RNA, 69 nt, Homo sapiens
cgaagacagacacacaagaggacagggagaaagggccccaagagaggagccaggaggagagaacaagaa

SEQ ID NO: 197479 - RNA, 85 nt, Homo sapiens
aggcgcggaacagcccggaggagaggaccgaagaagaggaggggccccaggccaaaccgggcaggccgagaacgggaggaagcgg

SEQ ID NO: 197480 - RNA, 52 nt, Homo sapiens
acccacggaaccagagacaccccgcgaggcaagacaagaccaggcacacgac

SEQ ID NO: 197481 - RNA, 79 nt, Homo sapiens
ggcacacagggcagaccaaccaccccacgacggcaggcgcacggaacagcgaggccagcaggagacggagccacggagc

SEQ ID NO: 197482 - RNA, 66 nt, Homo sapiens
gcccccaaaaagcggcaaaagcaagagaacagggaagaaggagaaagggccaaccccgaagaagca

SEQ ID NO: 197483 - RNA, 76 nt, Homo sapiens
agacggacacggaagaaacccagaagagccaaagcagggagggaaaagaaccagaaaggaggcagggaccaaggag

SEQ ID NO: 197484 - RNA, 79 nt, Homo sapiens
ggcccagcagaagagcgaaccagcaggcaacaggacaacgagggaaacaaagaccaaacagcgggggaaagaccagaaa

SEQ ID NO: 197485 - RNA, 61 nt, Homo sapiens
acccgcaggacccgcaacagcgcagaggggggacggcgcgaagaagagaagacaggaacgg

SEQ ID NO: 197486 - RNA, 79 nt, Homo sapiens
gagaagagaacggcgacaccgaccgcaggccgcccgggggagcgagcggcgccgaacacgcaggcaggagaagggcacc

SEQ ID NO: 197487 - RNA, 82 nt, Homo sapiens
cgacaagccgcggcagccgcggaccaccgccgccaggagcgcagcaaaagcaacagcaaaggcagaagaaccgaggcgagaa

SEQ ID NO: 197488 - RNA, 66 nt, Homo sapiens
gggccaggccaaggagggacagggcgccggggaagcggaggagaaggcagagcccccccaggcaga

SEQ ID NO: 197489 - RNA, 57 nt, Homo sapiens
gcagagccaagccacggcacaaagaggaccacgaccagcggggcacaaagaagggga

SEQ ID NO: 197490 - RNA, 81 nt, Homo sapiens
ccacgacggcgccacaccgagcgcgaggcgcggagagcaacgccgggacagcgcaagacagaagcgaaggggacaggggga

SEQ ID NO: 197491 - RNA, 79 nt, Homo sapiens
gacgaacaaacagcaagaaagaccacaagaccagcagggagaccccaaggcaaaaccaccacacgacaaaaaccggaac

SEQ ID NO: 197492 - RNA, 38 nt, Homo sapiens
ggccggaccgcagccgcaagagacgggcccccccacac

SEQ ID NO: 197493 - RNA, 74 nt, Homo sapiens
ccacaaaagacacgccacaaccgagcccaaggacccagaacccaaaaagaccccggcacagcaacaaagagaag

SEQ ID NO: 197494 - RNA, 76 nt, Homo sapiens
ggaccagccagggcacggccgggacggcagaaggcggcagggagcacgcaccaggagcccacggcccacccacagc

SEQ ID NO: 197495 - RNA, 73 nt, Homo sapiens
accaacgccaaggcagcgcggacaagacccccagcacaacacaccggggggcggggaagagacacagaaggga

SEQ ID NO: 197496 - RNA, 69 nt, Homo sapiens
ggcgccaccagcccggagaaagaaggaggccaagaccaaaaacaagaggaagcaagagaggcaaaaggg

SEQ ID NO: 197497 - RNA, 49 nt, Homo sapiens
ccccagaaccccgaggagacggaagcccgcagccgcccggcgaccgaaa

SEQ ID NO: 197498 - RNA, 79 nt, Homo sapiens
cgagggcacgcgggcaagggcaaccgcggggaagcggggcggcaccggacaccaagacggagaaacagccacccagcga

SEQ ID NO: 197499 - RNA, 76 nt, Homo sapiens
gaacagagccccgagacccgcacgcagaacgcaggaacagaggagcggccaacggaccacaccaaaagccaccaaa

SEQ ID NO: 197500 - RNA, 69 nt, Homo sapiens
aacggcagcagaacggagcaccgaagacgagcagcagcacgcagcagccccagagcagccagcgccagc

SEQ ID NO: 197501 - RNA, 81 nt, Homo sapiens
agggagcgaggaaccaccggacgaagacagcaaggagacccgccaaagccgccgggcaagaggaccgcccacaagggaggc

SEQ ID NO: 197502 - RNA, 65 nt, Homo sapiens
caaaggaaaagcaccaagggcaccaaacacccagaacaacaaagaggaggacagcacaaaaacac

SEQ ID NO: 197503 - RNA, 86 nt, Homo sapiens
ggacaggaagaagcggagggcgaggaggagcagaggagcacacagagaagcagcgccacccgacagagaaaaacaaaagggacagc

SEQ ID NO: 197504 - RNA, 53 nt, Homo sapiens
cggagcgaaccaccccaaacagccgcggggaaaagcaggagacgccgacgacg

SEQ ID NO: 197505 - RNA, 66 nt, Homo sapiens
ggagaaaaccccagcccggagggagcgcaccacacacaagccacagcaaggggaacccaaaaacgc

SEQ ID NO: 197506 - RNA, 96 nt, Homo sapiens
cccacgcgcgcacggcagccagcgcaagaggcgggcagcacgcgaccccagaagaaaggcggacaggaggaccacccgacgacccaggggagaggg

SEQ ID NO: 197507 - RNA, 81 nt, Homo sapiens
acccccgagacccggaagcagaacccaagaaccgggaaacggcaagaacggaagcacgggcggaggaaagcacaagcagag

SEQ ID NO: 197508 - RNA, 54 nt, Homo sapiens
gcaggaaccccggcaacgcgcgagccagggaacagggagcacccggcgagaccc

SEQ ID NO: 197509 - RNA, 61 nt, Homo sapiens
aaagcccccaacaggagaagagagaggacagcggccggacgcagcacccgacgcccgcacc

SEQ ID NO: 197510 - RNA, 77 nt, Homo sapiens
gagagggacgacggggagggaaagggaagacacgaaaaaagagaaagggccaacggcagagagcaagaggcgaagca

SEQ ID NO: 197511 - RNA, 83 nt, Homo sapiens
cgaccggagggggccggggagcccgaccggaccgcggaggggaggggggagacacgaaccgcgcacccgcgagcgcagacgcc

SEQ ID NO: 197512 - RNA, 70 nt, Homo sapiens
cgacacgcccagaagcgcagggaagccccgaagagcagagcaggccaagggcccgaagacaccccgccaa

SEQ ID NO: 197513 - RNA, 67 nt, Homo sapiens
gagaaaaaccggacgagcgagcaagccaggacacggccaaggccggcgagaacgcccgcggcagcga

SEQ ID NO: 197514 - RNA, 89 nt, Homo sapiens
gaacaggagcgagagcgaagagacacaaggacggcgagaaagcaaggagggcagccagcagccggcccgggggcagccaccccacccaa

SEQ ID NO: 197515 - RNA, 72 nt, Homo sapiens
ccgacggcggaagggcggacacacaggccgcacccgcacccggagccccaggcagagcaaggcacgagagga

SEQ ID NO: 197516 - RNA, 79 nt, Homo sapiens
gcagcgggaccacgccggagccgaggacacccgcgcacagagaaccaacgccagagagaacaggacaggggacggaacc

SEQ ID NO: 197517 - RNA, 74 nt, Homo sapiens
cgccacggggcccagacggagcccaagagacacaggcagaagaagaccgcaaggaagaagagggacaggcagag

SEQ ID NO: 197518 - RNA, 122 nt, Homo sapiens
gacgccaagaagaaaaagacccaacgacaggaagggagagaacagggagaaagcacggaccaacggaggccgcagaagaagcggaggagcagagcgagagcagcagcgaaagcgccgaggcc

SEQ ID NO: 197519 - RNA, 56 nt, Homo sapiens
ggagagccaaacacacacaggcggagcgggacagaccccacagcgggcaaagacgg

SEQ ID NO: 197520 - RNA, 76 nt, Homo sapiens
aggcagcccggaaagagcaacccgacgaagacgccaaacaaggaaaagaagaggaagccaccaagaagaggacccc

SEQ ID NO: 197521 - RNA, 69 nt, Homo sapiens
ggacagcgcagagccaagacggagaaacaagggggccaggaggagccccagcacagcagagaaaaaacc

SEQ ID NO: 197522 - RNA, 68 nt, Homo sapiens
gaccaaacaagacaggcgggccgccagcgaaccaagaggccagagggaaagcaccaagagaacgggaa

SEQ ID NO: 197523 - RNA, 62 nt, Homo sapiens
cggacggccgcgaagaggcgggccgggaaacgcgagccccaccccaccgccggcggcaacca

SEQ ID NO: 197524 - RNA, 74 nt, Homo sapiens
gcaaggcacaagaaaacaccggcccgaagccccaccaagcccagcgcaccgccggaagaagagcaggacccaag

SEQ ID NO: 197525 - RNA, 72 nt, Homo sapiens
caagaacgggaacaaaaccggcaaaacaagggcggagaacgaggagagagacccggaaggccaaaaagccag

SEQ ID NO: 197526 - RNA, 82 nt, Homo sapiens
agcccagccgaaggagaagggggagcccagaaccgccccagacaaggcccggcccgcggcagagacaagagaagaaagggac

SEQ ID NO: 197527 - RNA, 70 nt, Homo sapiens
accgagcccaagcggaaagcacgcgcacagaggaaaagcacacgccggacggaaacccacagccaagggg

SEQ ID NO: 197528 - RNA, 77 nt, Homo sapiens
ggaaggaacagaagcgggccaggggagggaaaacaaggacaaggccacccaagaagcccaccgaaccgcagaccaaa

SEQ ID NO: 197529 - RNA, 74 nt, Homo sapiens
gaagggcaaaacgaaaggagcccaaagaacagcggagaggagaaaaagaaacccaaaggggcacaagaggagac

SEQ ID NO: 197530 - RNA, 70 nt, Homo sapiens
gagcgggaaaggccgcgggggcaacggagaaaacccggaaccgcgacggcggcagggacagaacacagga

SEQ ID NO: 197531 - RNA, 56 nt, Homo sapiens
gcacaccgccagggacccaggcgcccccccagagcgagggcagaaagggcccagcc

SEQ ID NO: 197532 - RNA, 54 nt, Homo sapiens
aaccgcccgggagaccaaccgccgaagcgcggaggagaaagaagaaacaaagag

SEQ ID NO: 197533 - RNA, 69 nt, Homo sapiens
gcgccccgacggagcgccaggacggcaaagagaagaaaccaagagggaagaggaaagaagaaacccaga

SEQ ID NO: 197534 - RNA, 55 nt, Homo sapiens
gaagagccccagcacagagggaccgggagccgcaccaacgggagaagaaccaaca

SEQ ID NO: 197535 - RNA, 88 nt, Homo sapiens
caaagcggaagaacacggagcgagaacccgagcagcgccagagcaacacaccgcgccccagcacgcaggccgggccccagcggcgggc

SEQ ID NO: 197536 - RNA, 73 nt, Homo sapiens
agcagcccgccccccggaagggcaccgcgacgacaccccggggaggcgaggagagaggagaaggaaagagcag

SEQ ID NO: 197537 - RNA, 73 nt, Homo sapiens
cgggagcacccagaagaggggagaaaggaaacagaggacgcaaggaacaaacacccaaagcagccaggagcca

SEQ ID NO: 197538 - RNA, 77 nt, Homo sapiens
gcgcaggccccccccacagccgcaggacccacggagccgccccccagcagggccagcgaccccccaagcaggaccac

SEQ ID NO: 197539 - RNA, 78 nt, Homo sapiens
agaggggagcacagagcgagaccaggaaagaagggggcagaagagggaaccacaaccagcagggaggacgacacagca

SEQ ID NO: 197540 - RNA, 80 nt, Homo sapiens
ggcccacaacggggcacgaccgagggcagagagagcacaaggagagaacaggggggcccacacgcccccagcgcgagacc

SEQ ID NO: 197541 - RNA, 36 nt, Homo sapiens
aggaccaagaaccaggcccgggcgcaggaccgcgga

SEQ ID NO: 197542 - RNA, 82 nt, Homo sapiens
acgccccgcgggaccccccgccggaccccacagcaacaagaacgccaaaagacgaacacaaagggaaagaggagaggcaccc

SEQ ID NO: 197543 - RNA, 79 nt, Homo sapiens
ggaggggcgcgcggagcgcccgggccccagcagggccagagaccacggaagccccgggggaacagagcccggaaaaggg

SEQ ID NO: 197544 - RNA, 80 nt, Homo sapiens
caggcggagaacaacaaacagaccagggaagggacgagacagaccggagaggacgggaggcccgagagggggagcgcggc

SEQ ID NO: 197545 - RNA, 70 nt, Homo sapiens
ggacacgaggacgcacagaaggcgccggcgaaagcaacgaagggacgccagaacaagagaaggagagcag

SEQ ID NO: 197546 - RNA, 70 nt, Homo sapiens
gggcacagaagaaaaaaccagaggcaaagaagaaaacgaaccccaaaaaggggccgggcgggggaggcga

SEQ ID NO: 197547 - RNA, 81 nt, Homo sapiens
ggaaaaaccacacacaccagcaagaagacgacccaagcggcagaagcccggagcagcaaggaggggcaaccggggagcgcc

SEQ ID NO: 197548 - RNA, 80 nt, Homo sapiens
cagaagcagcagaagccgcaacaggaaagcagcccgaaaaagacgcgagaagccacacgggaagcggacagcaagacagg

SEQ ID NO: 197549 - RNA, 61 nt, Homo sapiens
aaaagccaagaggaggacagcgcacacagcaagcacgagcacccagccaaacccaggcccg

SEQ ID NO: 197550 - RNA, 76 nt, Homo sapiens
gcgggccgcgcgcggacgcaagcagccagcggaaacggagggaaagaagaagaggagggacacccgagaggcagcg

SEQ ID NO: 197551 - RNA, 74 nt, Homo sapiens
gagcaaggcaaccgaccacaaagaagggaaggacacaaccgaggcccagcaagagccaacacagcagccaccac

SEQ ID NO: 197552 - RNA, 74 nt, Homo sapiens
agcccccagcgcagcggccgcggcccaacaacaacagaagagaagagaaagaaggggacgacacagcagaaaaa

SEQ ID NO: 197553 - RNA, 82 nt, Homo sapiens
gagcgcgccggcaggagacgaagagcccgggcggcgccgaccggccacgggcgagcgcggcaggggcggcgaaaacacccac

SEQ ID NO: 197554 - RNA, 76 nt, Homo sapiens
gaaggagacagccacggagcacaccaggaaaagcagagagcgcagaagacaggacaaaaagcccacacaacaccag

SEQ ID NO: 197555 - RNA, 58 nt, Homo sapiens
ccaaagagcccggagcaacgaaaagagaaggaacagaacagacaccaccgaaacgcgc

SEQ ID NO: 197556 - RNA, 84 nt, Homo sapiens
gcgagccggcgcggggcggcgcgggcggaggcggcggagcgcgagagccgagcggaccagacacaaggcaggacaggcccccaa

SEQ ID NO: 197557 - RNA, 77 nt, Homo sapiens
cccggcaggccgcccccggcaaggcagcccacggaagggccaaggcgaacagagagcccaggaggacgaaggccgag

SEQ ID NO: 197558 - RNA, 55 nt, Homo sapiens
acaaaaaacacaaaaaaccaccggcgaaagaacccaaaccaagaaaaacagaacc

SEQ ID NO: 197559 - RNA, 55 nt, Homo sapiens
ggcaaggcgccagaccaagggcgaacgggccaggcccaggacaggccacacggga

SEQ ID NO: 197560 - RNA, 64 nt, Homo sapiens
ccgcccagagagccaccagaaaagaaaaacccccaacccagaagagaaaaagccaacagaagag

SEQ ID NO: 197561 - RNA, 70 nt, Homo sapiens
aacaccaggcgccaggacgcaagaccagaagccagaagaagaagaaggccagaggccacacaagcaccag

SEQ ID NO: 197562 - RNA, 70 nt, Homo sapiens
gaacagacaaggggacacgccacacacaaacgaggaccagaacagggggccaaaccccacggcaccggga

SEQ ID NO: 197563 - RNA, 99 nt, Homo sapiens
cacccccgccggcggccacacgccacgccaccagcggcaagggaggacagagcccaggaccaagagcacaacaacacggaccagaaaaaacagaggagg

SEQ ID NO: 197564 - RNA, 82 nt, Homo sapiens
ccggagccagccaacgagcgcaccaaaaggagcaaaacgagccccccaccagaccaaaggccagaggggcagcgagccaaga

SEQ ID NO: 197565 - RNA, 93 nt, Homo sapiens
cgcagcggaacaccaaacggaggagccagacccggggaggcgcacacacaccaaaggcccccggacccgggcgcccccagccgcgcggccggc

SEQ ID NO: 197566 - RNA, 59 nt, Homo sapiens
ccggcccgcgggaagcaggacgcgccgcgccccaagggcagagcagagaccaaggagcc

SEQ ID NO: 197567 - RNA, 81 nt, Homo sapiens
acccggcagcgggggcagcagagcggagccaagagcgaagggaaacaacgaagcaagcccaagggcgcaggggcaacacaa

SEQ ID NO: 197568 - RNA, 64 nt, Homo sapiens
cgcaggcgccgaagaagggagaaaaggccagacggccagcagccacgccaggcaccgcccaggc

SEQ ID NO: 197569 - RNA, 78 nt, Homo sapiens
acaccggagaaagcacaagaagaagcagaggaggcccacaggcccgcccggacaccgagaaacggcgaggaaagagag

SEQ ID NO: 197570 - RNA, 79 nt, Homo sapiens
aaagaccacggagaaaaaacgaagcacccacagcaacaagagcagcccgacggccaggaggcgaagagacgaggaagcc

SEQ ID NO: 197571 - RNA, 61 nt, Homo sapiens
cagaggaagccgaggaccaccacagaaggaagaagaccaagacacccaggagaaagacagc

SEQ ID NO: 197572 - RNA, 77 nt, Homo sapiens
gcacccggcaaaggaagggcggagccccggccacacccgccccaccaaggagaggaagaggagagcggagcacggcg

SEQ ID NO: 197573 - RNA, 81 nt, Homo sapiens
caagaagggcggggagaccagaacaacccccacgccagcacagcgccccccgcacccgagggacccgaggagcccaccaag

SEQ ID NO: 197574 - RNA, 74 nt, Homo sapiens
ccaccagcccagacaaagacccccagcaccccgggcagcggagaggccggcccggagcaggagcagcagcggaa

SEQ ID NO: 197575 - RNA, 87 nt, Homo sapiens
caggggaggagcagcaccgggaccccgcgcggcgggcgccccacaaggggggacacagcgagccacgcgccaggaagcccggccaag

SEQ ID NO: 197576 - RNA, 82 nt, Homo sapiens
cccaaggaaaaacaggacaaaggaagccaagcaggaggcaaggacaggagaaacaggggccaaaaaaccaaaggagaagaaa

SEQ ID NO: 197577 - RNA, 84 nt, Homo sapiens
gaggagcgccgcgcccgcccgcaggagcagggaaaaggcccacgagacaagaagggccacacaagcagagaaggaggaggcgcc

SEQ ID NO: 197578 - RNA, 75 nt, Homo sapiens
cggggacaaccaagacacaccaacacaagacggccccgcacgaggaacagaagcagagacagaagcccaagccag

SEQ ID NO: 197579 - RNA, 77 nt, Homo sapiens
agcccaacaggcaagcaaaaggcacaggggcagagccagggcagccacccaagagcaacaggggcaccccaacccaa

SEQ ID NO: 197580 - RNA, 78 nt, Homo sapiens
gaccgacaccgcaagaccccgaagcccaggaccggggcggccgagccgggagaggccgcccagcgccaggccgacaca

SEQ ID NO: 197581 - RNA, 87 nt, Homo sapiens
aaaccccgcaaaagggaagcgaagccgaaaaaggcagcagcgaaggcaccaggcggagaagcagaacagcacaccgagaggacacga

SEQ ID NO: 197582 - RNA, 56 nt, Homo sapiens
aggagaccagaacgaacccccccccccgaccagcgcaaaggagaagcgaaggaaga

SEQ ID NO: 197583 - RNA, 51 nt, Homo sapiens
gcggcccagacaccgcaaggcaccggcaaaagcagaccggaaaacccaccg

SEQ ID NO: 197584 - RNA, 71 nt, Homo sapiens
aaggaccaagaaccaggcaagccaaaaccccggaagaaagaaccgggaacaaagggccaaagaaagaaggc

SEQ ID NO: 197585 - RNA, 73 nt, Homo sapiens
ggcacaccgggccagcgccgcacaccgcgggagggagagcgcgcgaggcgcaaaccggaagaagaacaaagga

SEQ ID NO: 197586 - RNA, 56 nt, Homo sapiens
accagacaggacacccggacccgcgagacggcaccagagagagccccagaagaccc

SEQ ID NO: 197587 - RNA, 84 nt, Homo sapiens
gcggaggcagaggggaggcgcgaaagaggaagacaccaccggacaccgaccaggccgcccgagcagcgaggcccaccaggcacc

SEQ ID NO: 197588 - RNA, 95 nt, Homo sapiens
ggacaggggcggcgcggcccgggggcaggggaggagacgaggccaacggaccacaccaaaagccaccaaaggaacacgccaggaaaccagagaca

SEQ ID NO: 197589 - RNA, 71 nt, Homo sapiens
ccccccccggcccgaccgcccgcggccggaccgcaccggacagagcggacacaccgaagcccggggcggcg

SEQ ID NO: 197590 - RNA, 82 nt, Homo sapiens
ccccggcagcacacacaacagggcccagcgaagggcgagaagaagcagaaacacagaccacacaagaaacagagaagcgaga

SEQ ID NO: 197591 - RNA, 77 nt, Homo sapiens
gaaaaccaggaaggagagaaacccaggaaaccgaaccagagagcgaagaggaggcaaagaagaagagacgggagaga

SEQ ID NO: 197592 - RNA, 77 nt, Homo sapiens
cagcggggcacacaggcgggaaaacaccgagaggcgccagggcccgggggagccagcgccgaggagcccagcgggca

SEQ ID NO: 197593 - RNA, 75 nt, Homo sapiens
agaaggccgggcgccaccccaaaccaggaaagacaggagacagaaggcagacgacggagcaccgagaccagagaa

SEQ ID NO: 197594 - RNA, 76 nt, Homo sapiens
ccaggaaaccggcacaccaaggagacggcaaagacagcgcaagggacagagcgaagaaccccccaagaagacgaaa

SEQ ID NO: 197595 - RNA, 89 nt, Homo sapiens
cgcgcccacgccacggcacccgcccgggcggcgccgccaggacgcccggggcgcccagcaggagggagaggcccgagcgcaggccgcac

SEQ ID NO: 197596 - RNA, 66 nt, Homo sapiens
ggagacccggggacccccgacgccaggcagcgcccccaaacggcaccccagccgacgccacacagg

SEQ ID NO: 197597 - RNA, 73 nt, Homo sapiens
gaacgccggcccagccccagcggcagacggaaacgacagaagcagagggggcacccgagcccgccaggccccc

SEQ ID NO: 197598 - RNA, 73 nt, Homo sapiens
aggagcacggacgccagaacgaacccaggagaaacgagagggacagcaaggaagacgccagagagcggcacac

SEQ ID NO: 197599 - RNA, 82 nt, Homo sapiens
cgagagcaaaagagaaacgaccgaaagaagaaggcacgccgaaggaggcggcgacgcgaaaagagaaccagacacaggcgag

SEQ ID NO: 197600 - RNA, 79 nt, Homo sapiens
gcagccaggagaggcgggccagcggagccgggacggaggcggacgaaagaaagaaggagcaccaacgcaaagaaaaaga

SEQ ID NO: 197601 - RNA, 51 nt, Homo sapiens
agaacaggcaaggaagagaggagggcgccagcaagagacaggcagagggag

SEQ ID NO: 197602 - RNA, 76 nt, Homo sapiens
aggccccgcagcgaaaacccaacgagaccaaagaggcaagccaacgggacaggaaaaccagcccacagcgcaagaa

SEQ ID NO: 197603 - RNA, 43 nt, Homo sapiens
ggaccaccagaaagcaccccacaggggaggaacgggacccgaa

SEQ ID NO: 197604 - RNA, 84 nt, Homo sapiens
cgaggaacggcggagcagggagcccaaagaccccggagacagggcggagaacggaaaagcaccaggaagcagagaggaccgcag

SEQ ID NO: 197605 - RNA, 85 nt, Homo sapiens
aggcaggcgcggcgccggcggcgggacgaagagggacgggcccgcggcgagcgagcccgagaacaaacaccgcgcagaacagaac

SEQ ID NO: 197606 - RNA, 79 nt, Homo sapiens
agccacagccgcaaagacaggaggaggggcccggaacacacgcaggacgaaagagacaaaagccacacgagaacaggaa

SEQ ID NO: 197607 - RNA, 75 nt, Homo sapiens
ggagcacagagggggcccggaggaggcgaagggagggacagagcacgccgaggcgcggagcccggccagggccag

SEQ ID NO: 197608 - RNA, 83 nt, Homo sapiens
caagacagggcaaaggacagaccaggccgcaggagggaagcgcacggaaaccgccccgggaggcacagagcaggagacgccac

SEQ ID NO: 197609 - RNA, 86 nt, Homo sapiens
gaggcgaagggaccggggaccgagaaaccaggagcacccacacccggacccccagggagcccggaggcccggccagacgacagcca

SEQ ID NO: 197610 - RNA, 75 nt, Homo sapiens
ggcaagacaagaaaaacacaaccagagcgccaagaagcaccacaaagaaagggaaagaaaacaagccacccagac

SEQ ID NO: 197611 - RNA, 57 nt, Homo sapiens
cagcgggacggacaggcagggaagcaacgcagagagggacggaaacagacgacgaca

SEQ ID NO: 197612 - RNA, 82 nt, Homo sapiens
caaagcggaccacaaaaacgcccagcacaccggaaagcgcaaggcccagcacagaaagcccagagacagaaagaaacccaga

SEQ ID NO: 197613 - RNA, 81 nt, Homo sapiens
cagcgagggcccggcgaggagaaccaacggcccgaaagagaaggccaaaaggaaggcaggaagaacaaaggaagaagaacg

SEQ ID NO: 197614 - RNA, 76 nt, Homo sapiens
ggagccaggggggcccggaacagagcacacccccggggagacacggaaccagaggcagcagcccaaccccgaggac

SEQ ID NO: 197615 - RNA, 69 nt, Homo sapiens
cacagaacccaccagggaggagcggcaaagcaacagcccccacagagagcacacaaacaaagcgaaacc

SEQ ID NO: 197616 - RNA, 61 nt, Homo sapiens
caaagcccgggcgcggaagaagccaagcccgcgggggccggcccccgccagacccgcgagg

SEQ ID NO: 197617 - RNA, 80 nt, Homo sapiens
gcagaaccagaccgggagcacgcacgccacgaaggcagagcccgcccagaacgaggacgcacccgacaccagagccaggg

SEQ ID NO: 197618 - RNA, 78 nt, Homo sapiens
cacccaccccccacaccccccgagcccaccagacaccggccagcacgaaaaccagcaccaagaccaggcaccagggaa

SEQ ID NO: 197619 - RNA, 75 nt, Homo sapiens
gggcggcgaggcccccaccggagcagcccacagcgcggcaccgaccccggggggcgcggggggcccagaccaaga

SEQ ID NO: 197620 - RNA, 55 nt, Homo sapiens
gcgagaggaccaccggggcggcccggcggagcgccacgccaggaggcccgaaccg

SEQ ID NO: 197621 - RNA, 66 nt, Homo sapiens
gcgcaagaggggaacaagaacggcgacagacaagaggcgaagagaaggcggagaaaagaacagagc

SEQ ID NO: 197622 - RNA, 75 nt, Homo sapiens
acccgggcgccgggcccccagccgacagccagggcggaagcccgccccagagcaggcaaaagggaaagcaagggg

SEQ ID NO: 197623 - RNA, 72 nt, Homo sapiens
cggggccaagagagacgagaccggccgaagcccaggaccaccgaaggagcgacccgagcggcaggaagaagg

SEQ ID NO: 197624 - RNA, 74 nt, Homo sapiens
ggcacggcacgccccgcaagaaacgggggaagcagagcgcacaaagggaaaggaaccgaaggagagcagacgag

SEQ ID NO: 197625 - RNA, 77 nt, Homo sapiens
gcccagcggcgcgaagcgaaaccggggccaaaggagacgagaaagagcggggaaggcaaagccgaagaagcagcagg

SEQ ID NO: 197626 - RNA, 83 nt, Homo sapiens
cgggcggacggccggcgggggcggcggcggccagcgccaggacccaaagacaggaccacgcaccagcagagaaggaaagcaaa

SEQ ID NO: 197627 - RNA, 74 nt, Homo sapiens
agcaggggaggaccaaagggcgcaccagggaaaccggaccggaaaaggcccgacccggccaaagccagagccca

SEQ ID NO: 197628 - RNA, 76 nt, Homo sapiens
ccgcgggccccagagggccgcagccgagcgccccgcaccgccaacgcgagccacccgccgggggaacgagaacacc

SEQ ID NO: 197629 - RNA, 79 nt, Homo sapiens
cgcgacaccggcgcaggccgaaaagacgaggcgaggaggcgagacacccaacccaccccaccccggagggccagacccc

SEQ ID NO: 197630 - RNA, 69 nt, Homo sapiens
cccacccgacccggcaccacacgcagaacgggcggacgggcgcccagccagagaagaacggcacacacc

SEQ ID NO: 197631 - RNA, 80 nt, Homo sapiens
caaggagcaaccagaggaggagccagaagcagaaggacccgcaagaggagacaagggcagcagcggcagagaccgccacg

SEQ ID NO: 197632 - RNA, 83 nt, Homo sapiens
cagaaacccaggaaacgagaccagaccccagagaggaggcacagaagagaccccaaggcgagcccggaacagcagcaaaacgg

SEQ ID NO: 197633 - RNA, 45 nt, Homo sapiens
cccgggagcgggaccacagggagaagcagcagccaaccccccggc

SEQ ID NO: 197634 - RNA, 76 nt, Homo sapiens
caccgcgaaaaggccaagaggaacagaaaccgaagagaaaggccaacgagaacaagcacagagaagaaagcgacag

SEQ ID NO: 197635 - RNA, 35 nt, Homo sapiens
ccgacacccaaaccgagaacacccacacgaggcac

SEQ ID NO: 197636 - RNA, 72 nt, Homo sapiens
cgaaacaaggacacgggaaaagaggaaacaggcaagccagcagaagccgcagcaggcccagaagccacagga

SEQ ID NO: 197637 - RNA, 77 nt, Homo sapiens
gcgaggaggagcggacaagaagacaaccggcgaacggcgcagggaggaaccgaacaagacagaaagcgggacgcgca

SEQ ID NO: 197638 - RNA, 68 nt, Homo sapiens
ggacgcgcgcgaggggcgacggggagaaggaaacccaaccggacacgcggcgcccacgcacaagaggc

SEQ ID NO: 197639 - RNA, 77 nt, Homo sapiens
aacgccaggcccggaggccaggagaggcgagcaccacgccgaaaaacgggagaacgccaaaaaacaaacgcccgcaa

SEQ ID NO: 197640 - RNA, 89 nt, Homo sapiens
ccgagacggaagcaccaagaggacaaccacaggaccgaagcaaaacagggagagcgggccgaagaaacagagggaaacagaaaaaccag

SEQ ID NO: 197641 - RNA, 69 nt, Homo sapiens
cgaggaagacacacaccccacaggaacacaggcaggaccccagaagaacagaaggccgggaacggacgc

SEQ ID NO: 197642 - RNA, 45 nt, Homo sapiens
ccacaaaagggagaacggggccacgcaggcgggcaacggaagcaa

SEQ ID NO: 197643 - RNA, 76 nt, Homo sapiens
agaccgacacaacccccgggacagaccacacgcggacaccaaggcgccaggcgaggggaccaccgcagaccacaaa

SEQ ID NO: 197644 - RNA, 75 nt, Homo sapiens
gaaccacgaaggacagaagacaccacagagagcccagacacgaaaggggccacgacccaagaaagggaggaagga

SEQ ID NO: 197645 - RNA, 81 nt, Homo sapiens
caccgcgagagacaacagcacagacccaacccagcaggccccacacaggacgagaaggagccccgagaccggggagcgggg

SEQ ID NO: 197646 - RNA, 75 nt, Homo sapiens
gaaaaacggagagccacaaaaaaggaagcgaaaacaccagggaccagcacaagccagagaaaaaccaagaaaagg

SEQ ID NO: 197647 - RNA, 81 nt, Homo sapiens
gggcaccagagcagacagaaccgcggagccagggggaagacgggaaacgccaacggacgggaagaagggagacccagggcc

SEQ ID NO: 197648 - RNA, 64 nt, Homo sapiens
cggaaccgcgcggcacacaaccagagcgaggccgaggaaccgggccgggcagagcgagagaggc

SEQ ID NO: 197649 - RNA, 91 nt, Homo sapiens
caggagagcgccccagggcaagccccgcccggccaacaagcagagagacgaagagagaagcagggcagaaagagcggaaacgagaagagca

SEQ ID NO: 197650 - RNA, 80 nt, Homo sapiens
gccgagccagcgccggccgcgcgccgcgcccgcgccacaggggccggacaagggagggcaagaacccaggaggagggcaa

SEQ ID NO: 197651 - RNA, 107 nt, Homo sapiens
caccgcccccccccaaaccggaaccaggaccgaacaaagaaacagagcgggccccccaccagcgacaagggcggggcaaccaaggaaaagacaagacacgggaaaag

SEQ ID NO: 197652 - RNA, 70 nt, Homo sapiens
caagggaaagcagcacgagggaaaggaagacaggacgcgccaacgagacagcaagacaaaccagagacgg

SEQ ID NO: 197653 - RNA, 75 nt, Homo sapiens
gggccaccagaagggacagggccagccccagagagaaaaggaagagagaagggcacagaccaagacaacgaaccc

SEQ ID NO: 197654 - RNA, 51 nt, Homo sapiens
gcaagcacaccaaagaggagaccacggagagaaaagagaccagagagcaag

SEQ ID NO: 197655 - RNA, 57 nt, Homo sapiens
gacagggagggagcggagaacacagccacggccccggaaggacaagagcggggagga

SEQ ID NO: 197656 - RNA, 69 nt, Homo sapiens
aacagaggaagacacacggcccccagccaggaacagccgaagccaggcggaaagcaaaagacgaaaccc

SEQ ID NO: 197657 - RNA, 78 nt, Homo sapiens
gcagaggaagagaccgaaaaaccagccaaaaccaggggaaccaaacaagacgaacaggagaaggaacaaaggaaacgg

SEQ ID NO: 197658 - RNA, 60 nt, Homo sapiens
accagaggacgggaggagcagcaacaggagagaaaaacaggccaggaagagcaccaagca

SEQ ID NO: 197659 - RNA, 71 nt, Homo sapiens
gacagaagcgccggagccgcggccggcgggccagcccgggcccccagcggcaaaggaagaagacgggcaaa

SEQ ID NO: 197660 - RNA, 61 nt, Homo sapiens
ccgccgccccgccggcacagcgggaagagcggccgcgggagagcgggggcgggaggcgggc

SEQ ID NO: 197661 - RNA, 70 nt, Homo sapiens
gaaaaaccgaggggacaaaacaaccaacgaagacaccgagcgaaagagaaagagaaccagaacagggaga

SEQ ID NO: 197662 - RNA, 86 nt, Homo sapiens
gagaaagcgcccacgcacgaaagcccaggccaaaaagaggggcacgcccacggaagccccccaaagcgagggacacaagaccccac

SEQ ID NO: 197663 - RNA, 84 nt, Homo sapiens
ggcaggacacaccacagcaggcgcaaacaccaagagagacgcccggagcgggagagagaggaagaagaggaagaaagaaacaga

SEQ ID NO: 197664 - RNA, 85 nt, Homo sapiens
aagaaccgcagccgagcggggccggccacagaaccaaaggcaagaaccggagcaggagaaaagccggaaagaaaacgcagaaaga

SEQ ID NO: 197665 - RNA, 73 nt, Homo sapiens
ggcagaccccaggcagagcaggcaacaagacccggcggaagagggaggaacagcagcggaaacaagcacggac

SEQ ID NO: 197666 - RNA, 51 nt, Homo sapiens
gcgcagacaacggagccggaaacggaggagaaacacagagaggaccaggag

SEQ ID NO: 197667 - RNA, 108 nt, Homo sapiens
ccacaggaggcgcggaggacgccccaccgccgacgcccccagccaccaggcggcggaaggcggaaaggacccggaaaggccaagacaaaggcggcccgccgcagagag

SEQ ID NO: 197668 - RNA, 76 nt, Homo sapiens
aacaaagagagaaagcagcagcaagccccagagggggggccgcccgcccaaggcaggaagaggggccgcaaagaag

SEQ ID NO: 197669 - RNA, 57 nt, Homo sapiens
caaccaacaaccaccagcagaacagacaacgccccacaacgggcagccggcagccac

SEQ ID NO: 197670 - RNA, 54 nt, Homo sapiens
aaacaacagagagccaccagaacgagagaggcggacccgaccaaagacgccccc

SEQ ID NO: 197671 - RNA, 75 nt, Homo sapiens
gaaagaagcggagggaaagccaaacgcgagcgggcgcagggaacggccaggcaagggggcaggcccgcccggggg

SEQ ID NO: 197672 - RNA, 82 nt, Homo sapiens
gaggaacagggaagggcgcgagcggggacaaagcggacaagaacccaagaaacaggaaaaaacccaaaacaccaaaaggacc

SEQ ID NO: 197673 - RNA, 65 nt, Homo sapiens
caaacagacaggacaccaaaaagaaaacaagccgacagaagaaagcagacagagagagggcacca

SEQ ID NO: 197674 - RNA, 67 nt, Homo sapiens
gacagaaagggaggaaggccggccagccgcgaacacaaagagcagacaacgacaaaccgcgccagcg

SEQ ID NO: 197675 - RNA, 76 nt, Homo sapiens
ggcggacccacaagccaccaaagccgcagacagacaaacggaagagggcccagccggagaagaggaccacgggaga

SEQ ID NO: 197676 - RNA, 60 nt, Homo sapiens
cacccgaagaaggcagcccacgaacaccgcagaaagcaccgggaggaaagagagccacac

SEQ ID NO: 197677 - RNA, 67 nt, Homo sapiens
cggcgcgaagaggcggaccggacggccgagcccgagacagccccaaggcccggcaggaggagaccac

SEQ ID NO: 197678 - RNA, 47 nt, Homo sapiens
caagcgcaacaccagcagaccagccgcacccacgcccccggggaagc

SEQ ID NO: 197679 - RNA, 80 nt, Homo sapiens
ggacaaccagaggcagccagcagggggagaccccagccacagcggaggacgaggccaacaaggagcaggaacagaggagg

SEQ ID NO: 197680 - RNA, 55 nt, Homo sapiens
gccagcgcagccgccagcgccgggcgagaacaagagagggaaggagaaaacggac

SEQ ID NO: 197681 - RNA, 54 nt, Homo sapiens
aggacgcgccgcgccccaagaggagaacagaagcggagaacacaaagccacaag

SEQ ID NO: 197682 - RNA, 78 nt, Homo sapiens
agccgcgcagcaggcccaggccgagcccccagggaacaagacagcaaacagcgcccgcggcaggacccggaccacccg

SEQ ID NO: 197683 - RNA, 73 nt, Homo sapiens
ggaaaaacgacccagggcaggacgaaacggaaaccagaccacaaccacggaaccagggggaagaaggaccccg

SEQ ID NO: 197684 - RNA, 73 nt, Homo sapiens
cacgccacagcagcgcgcgcggaagaaaagccaccagagagcaaggcccgccagaacggagccccgcacaaaa

SEQ ID NO: 197685 - RNA, 98 nt, Homo sapiens
gcgcgcccgcccggcccgcacgccaagcacggggggcaggccaccgcacccgagggacccgaggagcccaccaagccgaccgcaggcaagggccgggg

SEQ ID NO: 197686 - RNA, 110 nt, Homo sapiens
gcacgaggggcgaaccacggaaaggaggaagaagacaccggggacagacaggggaagagacccccgacgacagagaagagccgcagggacagagcggacacagcaaccgg

SEQ ID NO: 197687 - RNA, 73 nt, Homo sapiens
ggcccccagcccaggcggcgggcggcgggacgccacaggcgggaaggaacaccaagaacaggaaacaggacag

SEQ ID NO: 197688 - RNA, 56 nt, Homo sapiens
agacagaggggcgacgaccgcacaacagaaggacacaagggcgcaaccaaagcacc

SEQ ID NO: 197689 - RNA, 74 nt, Homo sapiens
cagagcgccgcgcaccgcagccgcgcccgggagaaggccagggcgaggaacagaagggaagaagcaacaagcca

SEQ ID NO: 197690 - RNA, 64 nt, Homo sapiens
cgcggagaggggggcagaagacaacacaggcagcacaaccggccaccccccggacccgggaggg

SEQ ID NO: 197691 - RNA, 76 nt, Homo sapiens
acccccagaaacaccgccgagaccagcccaacaggaccaggagcgggagagggccagaaggccgagcccacagaga

SEQ ID NO: 197692 - RNA, 80 nt, Homo sapiens
acaggaaccgagccagaggaaagcagcgcccgcaaggccaagccggcgaagcccgcgcgcagccccaaaagcagaaccac

SEQ ID NO: 197693 - RNA, 74 nt, Homo sapiens
cccccaagaggaagacagggacaaaaccacgaaaagcaaagaggcaccacgacccggaaccaccacaaggcgcc

SEQ ID NO: 197694 - RNA, 88 nt, Homo sapiens
ccgggagcaggaggacggaaccagggccaggcgaggaccaacccaccccgagagacagcgcggagaccacccagccggcgaaacacaa

SEQ ID NO: 197695 - RNA, 74 nt, Homo sapiens
gggaccaaggccgagagccggaacaaacgagggcccgggaggaccgacgcagccagggagaagagaagaccaga

SEQ ID NO: 197696 - RNA, 79 nt, Homo sapiens
gccccgagagcggacacagacacaacaccacccagcaagacacacagggcaccaaggagggaagcaaaggacggagcgg

SEQ ID NO: 197697 - RNA, 83 nt, Homo sapiens
cggcagccgcgcgccaaggccggacccggggacagggcggaccccgccaacagagcccaccgggccggaggagcagcgagaga

SEQ ID NO: 197698 - RNA, 77 nt, Homo sapiens
cagaagccgcgggaagcgaaccggaagccggccgacaccgggcccggcaggaaccggaacaacccacagggcagagc

SEQ ID NO: 197699 - RNA, 92 nt, Homo sapiens
gcagggccgggccgccgcgcaccgcagcgccggggcacgacacaaaaacagggaaagcaacggcgcaagcggcggcggcgggcagaggacac

SEQ ID NO: 197700 - RNA, 69 nt, Homo sapiens
gcggaggcgccccaaaaggccccccgcgcaggcacacagcaaagggggagaaaccgaaacgaacccagc

SEQ ID NO: 197701 - RNA, 79 nt, Homo sapiens
ccaaagcggaaggccagcgggaagcgagccgagagcggacgcagccaccacgccgcaccaagcggagagccaagcgaca

SEQ ID NO: 197702 - RNA, 72 nt, Homo sapiens
aaccacgacccagcaggagcgagcgcacgaaaacagcagagcgccacaggccaacccccaaggagcgaacgc

SEQ ID NO: 197703 - RNA, 85 nt, Homo sapiens
cagagcgcagaggaagaagccaagaggggagaaaggagcgccagagaccccgacacggccgaaacaccagcgcggcacgggaagg

SEQ ID NO: 197704 - RNA, 80 nt, Homo sapiens
caggagggaaaccacgcaggcaaacgagaaaaagccgagaaggccagacggggaaaaagaaaagggcgaagacccgaagc

SEQ ID NO: 197705 - RNA, 72 nt, Homo sapiens
acgaaggcccaaacaggagaaaacccagacagaacaccacgacaaggaagccacgccccccggcggccacag

SEQ ID NO: 197706 - RNA, 70 nt, Homo sapiens
gaagacgaaaagacaacacggcgggagaagccggggcaaggaagcgagaaggagaagaagcaccagccga

SEQ ID NO: 197707 - RNA, 76 nt, Homo sapiens
ggaaaagcagcaggcaagggaaagggaggagaggacggccaaggcaccggcacggaccaccccaacaccgggggag

SEQ ID NO: 197708 - RNA, 77 nt, Homo sapiens
gaacagcgagaaacgagaagcgcagaaccaacgaggggccgaaccccaggaacaagaacggccgagcgaccaggaga

SEQ ID NO: 197709 - RNA, 35 nt, Homo sapiens
cacgccaccaggccgcgagagacggggcgacgggg

SEQ ID NO: 197710 - RNA, 79 nt, Homo sapiens
ggccagggaagacaacaccagggggaggccaggggaccagcggagaccacaagaaggcgcacagccacggaaagcgccg

SEQ ID NO: 197711 - RNA, 76 nt, Homo sapiens
caggacgcagaaccaccaaaagccaagaaacgacgggagagaagcgccggccggaaagaagacggggaggagcagg

SEQ ID NO: 197712 - RNA, 87 nt, Homo sapiens
gcccggcggcaaagaggccagcaccgggcgcaacaggagaccagcaagaagaccccccccccaaaggagccaccgcacccaggcgga

SEQ ID NO: 197713 - RNA, 76 nt, Homo sapiens
aaagcaggaggaaaggagagcagagacaagcggggaccaagaaaaaaaggagcagggcagggaagccccaacggga

SEQ ID NO: 197714 - RNA, 83 nt, Homo sapiens
ggccccggcccacaggggggggcaaacccgagagaacgggaggggcaaccggcggggaaggccccagcaaagggacaccagac

SEQ ID NO: 197715 - RNA, 80 nt, Homo sapiens
ggccggcgagcccggccccgccggcaccagcggacacgcccaagaagaaccgagaagaaaagcaccaacgagcggcacga

SEQ ID NO: 197716 - RNA, 70 nt, Homo sapiens
gcccgcccaagggggggccccgagcccacgggccccgcgcccgccaggaccaaagggaggggaaacaaga

SEQ ID NO: 197717 - RNA, 67 nt, Homo sapiens
gaaagaaagccccagcgggcaaacagcgccagaggcaagcggcggagaaaccaccacaaacacgagg

SEQ ID NO: 197718 - RNA, 42 nt, Homo sapiens
cgggggcagggggcccgggacaggccaagaccggcccagaca

SEQ ID NO: 197719 - RNA, 82 nt, Homo sapiens
aggcgcagggcgacggccccaccccggccacgggacggcggcgcggagaaggcagcccagagagcaagagggaggaagaaga

SEQ ID NO: 197720 - RNA, 82 nt, Homo sapiens
cgcaaaccaaggacggggaccgcacacccaagaccgagggcagcagccaggaccccgggccccccaaaacgcagccaccgcc

SEQ ID NO: 197721 - RNA, 40 nt, Homo sapiens
ccagcgcgcgcccggacagacaaggaggccgacccgaccc

SEQ ID NO: 197722 - RNA, 78 nt, Homo sapiens
gaccggccagagggaaccaaccgggaccccaagccaaagaacccacacaaggacaaggagccgcagggcacccaacca

SEQ ID NO: 197723 - RNA, 60 nt, Homo sapiens
cagaaggccggagacaccagcagaaacccaacgaagcaaaaaaggaagcccagaaccacc

SEQ ID NO: 197724 - RNA, 86 nt, Homo sapiens
gagaccacagagaccacagacaaagcagaggacccgcaaagaacaacgaagacccccagcaaaggaacgaaacaagaaccgcccca

SEQ ID NO: 197725 - RNA, 70 nt, Homo sapiens
acacgggcaagagcagcaggcaggaccacgcaggggcccgggggaagccggaacccggaggaagccggaa

SEQ ID NO: 197726 - RNA, 89 nt, Homo sapiens
ggccacaaaaccagagcggagacacccaggaggcagaagccaggcggcgacggcggcgcgaggaccgaccgggcccgcggacgaagaag

SEQ ID NO: 197727 - RNA, 73 nt, Homo sapiens
cagcgccaccaaagaccgcgacgccagagaggacggggacgggccccaggacgaggaagacaaggccagccac

SEQ ID NO: 197728 - RNA, 48 nt, Homo sapiens
caaaaaggagagaagaccacaggagaaccagccaaaaaagggcagaac

SEQ ID NO: 197729 - RNA, 75 nt, Homo sapiens
gggagccgaccgaggcgcccgcggggcggggaccgccgcccgggcggcggagaaaccaccacaaacacgaggcca

SEQ ID NO: 197730 - RNA, 76 nt, Homo sapiens
aaccacacacaccacaggaagccaccggccccaaagacgggaaagcacgccaccaaagccacggcacagggaagaa

SEQ ID NO: 197731 - RNA, 63 nt, Homo sapiens
caccaggaaaccaggcagccaaggcaggacaagcacacaaggaagccccgcccacggccccca

SEQ ID NO: 197732 - RNA, 37 nt, Homo sapiens
gaggacggcgacggaggggggaggagggacacacgac

SEQ ID NO: 197733 - RNA, 67 nt, Homo sapiens
cgcgaacccaagaacaagcaaagagacaccagcaggaggacccacccggcccgaacaaggccacaaa

SEQ ID NO: 197734 - RNA, 75 nt, Homo sapiens
gcgaagcacaagggacccagccaccacaggcacagaagaacgcagcccaggcaggagcccagcaggaacccaggc

SEQ ID NO: 197735 - RNA, 74 nt, Homo sapiens
ccccgcccccaccgccgcagacccccaagcagcagaagaggcggccacccacgagccgacggcaaacgccaggg

SEQ ID NO: 197736 - RNA, 60 nt, Homo sapiens
agcagcgccgcccgccgacagccaggcccgggagaaggcggagaacggaaaagcaccagg

SEQ ID NO: 197737 - RNA, 80 nt, Homo sapiens
ccgacggcccgcagagagaaacagaacggcaggaccagggccgggccccccaccgaagccaggaacacgaacgggaagag

SEQ ID NO: 197738 - RNA, 72 nt, Homo sapiens
ggccaaagaggaagacaacacggggacaaccaaggacagcgagaaggaaaaaccaagcaaaagccggaagac

SEQ ID NO: 197739 - RNA, 57 nt, Homo sapiens
cggaggagacgagagagagccgccgacggaagaagaccacaccgcgccagacccccc

SEQ ID NO: 197740 - RNA, 56 nt, Homo sapiens
gaacaaggccaggaagaccagagaagaggggccagagcacagagaccaaaacgaca

SEQ ID NO: 197741 - RNA, 76 nt, Homo sapiens
caaaagaaaaggcaagacaaccacaggcagagagcaaagagggggaaccaagccgcgggggaggagaagcgaacgg

SEQ ID NO: 197742 - RNA, 83 nt, Homo sapiens
cgaagcagccgggagccggagcgggcgcggacgccgaggcaccgaggcaccagaggaggcaacagaggagaagaggaagagga

SEQ ID NO: 197743 - RNA, 80 nt, Homo sapiens
gaaggccaagaggcggcgggagaccccaaccgcagagcgcccgacaggccggacacaaccacaaacgagccacgccaaag

SEQ ID NO: 197744 - RNA, 36 nt, Homo sapiens
cggggccacaccacgaagagccccgggggccacgca

SEQ ID NO: 197745 - RNA, 64 nt, Homo sapiens
aagaagaaaagggcagaacaaaaacgaccgagccgaacaacgccgcaccaaaaagcccgggcac

SEQ ID NO: 197746 - RNA, 78 nt, Homo sapiens
gcggcggcggcggcggaggagagccgcagagcgcgcagaccccgggcccccaggcgagccacgccaccgggcacggag

SEQ ID NO: 197747 - RNA, 55 nt, Homo sapiens
gacaaaacaaccaacgaagacaccgagcgaaagagaaagaggagaaagaggacac

SEQ ID NO: 197748 - RNA, 67 nt, Homo sapiens
ccaaagaagggagagagaaggagaggccagggagacgaaacacgacccacagcacaaggagacggag

SEQ ID NO: 197749 - RNA, 74 nt, Homo sapiens
gaagccggagacagcaggggacagggagaagaaaggccagaagcaaaacgcagagaaggaccaccgccaaacaa

SEQ ID NO: 197750 - RNA, 57 nt, Homo sapiens
cacagagagagagagggagggggcgacaagagaaaaagaaagaaaccccaaaaacaa

SEQ ID NO: 197751 - RNA, 83 nt, Homo sapiens
ccgcgagcagcgcgggcggcagcccgggggaagcgaagggcccggaggggccgccccacgccggcgagccaggacagcccaac

SEQ ID NO: 197752 - RNA, 70 nt, Homo sapiens
caacgggccaagagcaggacagcacgagcagacagacaggcgagaggacagccgacggaccagagcgagc

SEQ ID NO: 197753 - RNA, 67 nt, Homo sapiens
cgggccaccacgggacccaccgcccggcgccccagccgccccggaagcgcccccacgagaccccaga

SEQ ID NO: 197754 - RNA, 76 nt, Homo sapiens
acaggcccagcgacgcggggaaaacaacccgcaccgaggccaggagggggcgacagggccaggcagggcagcgggg

SEQ ID NO: 197755 - RNA, 75 nt, Homo sapiens
acagcggcgagagagccagagccgaggggagcccgccccccggggaagcggggagagagggggcccgcccgcccg

SEQ ID NO: 197756 - RNA, 82 nt, Homo sapiens
cgcgccggagcggaccgccgcgccggagaggaggaccgcacgagaaggagcgcaagcaccagaaggaaaaccaacggcccgg

SEQ ID NO: 197757 - RNA, 53 nt, Homo sapiens
gccagaccaagaacaaccgcggacacggagaggaagggccgaggaaaggagac

SEQ ID NO: 197758 - RNA, 79 nt, Homo sapiens
ggccagccgacacgggagacagggaggcggccagcggcagcgggcgcggccacaggccgcgcacggggccacacagagc

SEQ ID NO: 197759 - RNA, 79 nt, Homo sapiens
gaagagcagcaccgcggaccggacacacaaggccaacaggggacacacagccgagggggagaagaccaggcggggagaa

SEQ ID NO: 197760 - RNA, 97 nt, Homo sapiens
cccccggaccgcagacgggggacgcagggaggagcgggacaccccggaagcgggaaagccaggaagaggcgcccccgcccgccagacaagccgaggc

SEQ ID NO: 197761 - RNA, 81 nt, Homo sapiens
gggcaccagcagcgacggagccacccgcgaaaacggccagggccgccggggaagcagggaaaggccggagagaggaagcgg

SEQ ID NO: 197762 - RNA, 54 nt, Homo sapiens
gcagggcgcagagccaaagcagcaggagaaacgagaagaaacagacgcgcgagg

SEQ ID NO: 197763 - RNA, 78 nt, Homo sapiens
gacagggaacacgaggccagcaaaaggacacagcgcagggacaaggacggcaaggaaaaagaaggacaagaacggaac

SEQ ID NO: 197764 - RNA, 54 nt, Homo sapiens
ccccaagagcgggagcagagcggaaagaaacaccaagaacgggcgcgaaaaccg

SEQ ID NO: 197765 - RNA, 51 nt, Homo sapiens
acaccaagaagcaagggacagaaggaaccagaaaccaggcggaagcaacaa

SEQ ID NO: 197766 - RNA, 79 nt, Homo sapiens
gagaggagccgcgcacgagcgccaaccccgaaagacacgagaggcgagggacgacagagcaagcggcagagggcaagcg

SEQ ID NO: 197767 - RNA, 54 nt, Homo sapiens
aggaccgggagaagacggaagccaggacaaaggaaccaaaggcaagaaccggag

SEQ ID NO: 197768 - RNA, 39 nt, Homo sapiens
agggcaagacggccgaggcacgcaaacccaaccaggaaa

SEQ ID NO: 197769 - RNA, 77 nt, Homo sapiens
gccaaagacagcaaagggacaccacacagagcaggcacgaggagcgcggagacccacacaagggccacacgaacgag

SEQ ID NO: 197770 - RNA, 76 nt, Homo sapiens
aagccaacccgcgggggaacgcacccgaccacgggagagcaccacagcaacggccaagcgagaaagaacgcagcgc

SEQ ID NO: 197771 - RNA, 69 nt, Homo sapiens
ccgaacaacagacgaaaaaccgccagaaggaaacgaacaaccgccaaacagcaagaggacggaagaaga

SEQ ID NO: 197772 - RNA, 55 nt, Homo sapiens
ccccgagcccagcaccgcgggaagaacagcgcgagccacaaggcaaggaagcagg

SEQ ID NO: 197773 - RNA, 96 nt, Homo sapiens
gggggcaacggcacagaaccgcagcagggacgcgggcacgggaccggcgaggacgagcccaaaaggcagagcgaggagagaagaaggagggaaagc

SEQ ID NO: 197774 - RNA, 74 nt, Homo sapiens
ggagaccagccaaggccggcagcgagaccccggggccaagaagcggggcggagagaagcgggcaccggggccca

SEQ ID NO: 197775 - RNA, 78 nt, Homo sapiens
aagaagcaacaaagcgaagaaccacaggggaaaccccaccacgcggcaggggccgccgaggaaaaagcaacaagaaga

SEQ ID NO: 197776 - RNA, 69 nt, Homo sapiens
agacggaaggagggaaaaggcgaccacagcacacaagccgcgaccacgagcgccagaagaagaagaaga

SEQ ID NO: 197777 - RNA, 76 nt, Homo sapiens
ggaagaacccaaagaagccagaaaaacgagaacacacgaaaagcacagcaaggcaaaaacaagaaaaaggcgcagc

SEQ ID NO: 197778 - RNA, 77 nt, Homo sapiens
accgcgcaaaacaagcaaaaaaccaacaggacgccacggagaagaaagcaagcagaaagcaacagaagcagaagaaa

SEQ ID NO: 197779 - RNA, 84 nt, Homo sapiens
gagaacggggaagaccacaccccgggccagaccaggccgcccacaccagaagcagagccgcaaaaaggaggaaaacaggaaagg

SEQ ID NO: 197780 - RNA, 53 nt, Homo sapiens
aaagcaccagcaagaacaccaccgaagaaccaggggcgacacccgacaggaaa

SEQ ID NO: 197781 - RNA, 78 nt, Homo sapiens
agcccaccaaagggaacgggaagaaggaggaacgacggaacaagggagaagcggagcaaggaagccaagagaccagaa

SEQ ID NO: 197782 - RNA, 82 nt, Homo sapiens
ccaaggggcgggcgccggagccgacgccgggaacccgccgcgcgccgcgaccccaagcaggcaacaacggccagcccaggga

SEQ ID NO: 197783 - RNA, 48 nt, Homo sapiens
agggacaaagaccgaaaacgagccacgcgccgagaacgcaaaagcgac

SEQ ID NO: 197784 - RNA, 38 nt, Homo sapiens
gccaacccgcacggcagggggagccacaaagaaacccc

SEQ ID NO: 197785 - RNA, 75 nt, Homo sapiens
cggcgggcgggcgggagcgcccaagggggcggagagcggggggggggccagacagggcccggcgccccgcggacc

SEQ ID NO: 197786 - RNA, 74 nt, Homo sapiens
ccggaagggcgacgcgcgcgggcgggcgcgagcggcccggcgcccggcggcgcacgacacgggaaaaggggggc

SEQ ID NO: 197787 - RNA, 73 nt, Homo sapiens
cagaagacacgaccaccagcaaagagcacacacacacgcaccaggagggggaaaacaacccagaaaagaaaag

SEQ ID NO: 197788 - RNA, 82 nt, Homo sapiens
aagcgagcaaggggaaaaacgaacccgccacaacaaaagaggcacgagggaacagcgagccaggacaaaaccaggcagaacc

SEQ ID NO: 197789 - RNA, 81 nt, Homo sapiens
gcggacagcggagcccaggggcaccaagaaacacgaggaagaggagcagcaagcaggaagagagaagacgggccaacgcga

SEQ ID NO: 197790 - RNA, 79 nt, Homo sapiens
gagcggccggggcccgggcggcgggcggagacggggcgcccccccgccaaggcccggcgagcgggggaccaagaggacc

SEQ ID NO: 197791 - RNA, 87 nt, Homo sapiens
acaaacgccaagccaggggacccagaaaggcgccaagcgcaccacagacaaacgcaaagggccaggagcacaggaacaaacgaggga

SEQ ID NO: 197792 - RNA, 75 nt, Homo sapiens
acacgaaacgagccaaaggggagcacgaggggaacgcaacccaagcaacgaacagacagcacaacgggcaagggg

SEQ ID NO: 197793 - RNA, 68 nt, Homo sapiens
cgaagcgcacgaccccgacacccccaaggagcggggaagcaaagaaggacgcaccccaccgacaggac

SEQ ID NO: 197794 - RNA, 76 nt, Homo sapiens
gaggacccgccgccggggacccggaggggggaccccgagggcccagcccaagcaacagcgcggcaccgcggacgag

SEQ ID NO: 197795 - RNA, 59 nt, Homo sapiens
ggcaccgaggaccagccaagacaggaccgccagcagcagccgaaaacgcacaagaccaa

SEQ ID NO: 197796 - RNA, 72 nt, Homo sapiens
agggaacccggcaggaccagaagcgagagccaggaacccaggccgcacagcccagggacgaaagaacacgcc

SEQ ID NO: 197797 - RNA, 81 nt, Homo sapiens
cccgcagggcaagccaagagacggcagagacccacggcagggcaaccccaccgcggaaggcaggcacacagacgagaacag

SEQ ID NO: 197798 - RNA, 60 nt, Homo sapiens
cagcaaaggaccaccaaagggcgggaggggaccagccccgacccacagcagccgggcagc

SEQ ID NO: 197799 - RNA, 61 nt, Homo sapiens
aacggccacagcaagaagcggagacagagcaagcacagcacaccgggagcagaccaccaag

SEQ ID NO: 197800 - RNA, 56 nt, Homo sapiens
ccacgccgcaacccgccccagagccgaccaaggagaacagaagcgcgccaggcgcc

SEQ ID NO: 197801 - RNA, 78 nt, Homo sapiens
ccaagaagccgagacacgcgggaagaaagcacgggaaaaggccgggcccacaggggagagcccagaaaaggcacaagc

SEQ ID NO: 197802 - RNA, 78 nt, Homo sapiens
ggcccgaggagcccagaggaagccgagccacaggagaggcccaggccgaccggcgcgcggaggcaaggacacggagcc

SEQ ID NO: 197803 - RNA, 77 nt, Homo sapiens
ccaggagaacccagggccggagcggagggaagacccaccaacaaccgaaaacaggggaacagaagcaggcggcagag

SEQ ID NO: 197804 - RNA, 60 nt, Homo sapiens
gcaggacaccgacaggaacagggaccacggggggaccggagaaggcaaccagaccccgga

SEQ ID NO: 197805 - RNA, 61 nt, Homo sapiens
ggaaacggaccaggaccaggaagaacagaggaggacgagacggcaagcaggaaacggagga

SEQ ID NO: 197806 - RNA, 47 nt, Homo sapiens
gccgggccgaaccggaagggcaagaccagaggacaacacaaggaccg

SEQ ID NO: 197807 - RNA, 72 nt, Homo sapiens
agagggaaggcacgaggaagagacaacaccagagggccccagcggggacgagagccccggcacaaacggacc

SEQ ID NO: 197808 - RNA, 70 nt, Homo sapiens
acgagaagagaaagaagggaggcggcagcgaagaagacgaaaaaaacccaggaagcagaccaacgccaag

SEQ ID NO: 197809 - RNA, 56 nt, Homo sapiens
agaagaccaaacaaagccagccggaaaaccaacggcaaaggaacacgcaaacacac

SEQ ID NO: 197810 - RNA, 61 nt, Homo sapiens
agcaaaggagacaaacaagggcggcaggaccacaccccaagccaagcgggcaccaaccacc

SEQ ID NO: 197811 - RNA, 77 nt, Homo sapiens
agggaaggccggacgaagggcaccacggagagaagggagcaacagcgcgaagcagacgcccggacgccgggccaaaa

SEQ ID NO: 197812 - RNA, 71 nt, Homo sapiens
cgcgccgggagaccgcggaggccgacaggacgggcgccgccccgcgcggcaggagaggcaccggccccacg

SEQ ID NO: 197813 - RNA, 73 nt, Homo sapiens
gaaggccagaaaaacaccagcccgaagaagccgggcagaccaggcagcagcggaaaggagcagggaaggacca

SEQ ID NO: 197814 - RNA, 77 nt, Homo sapiens
ccaacacgcgggcagcgaacaagcgggagcaaggagggcgaagagcgaggagggcccgacaagagaggcggagccac

SEQ ID NO: 197815 - RNA, 72 nt, Homo sapiens
cccgcgccgccggcacgcggggaacacccaggcaggccgaagccggcagcaaggcgcggcgaggcggggcca

SEQ ID NO: 197816 - RNA, 84 nt, Homo sapiens
gcccccgggcgacaaaaccggagcccgggccgggcgcggagggaggaggacggcaagaagaagcgaaaaccgcccacaacacca

SEQ ID NO: 197817 - RNA, 44 nt, Homo sapiens
ccgcggggccgcggcgcgcccggcccggagacggggcgccaggg

SEQ ID NO: 197818 - RNA, 86 nt, Homo sapiens
cagcagcccccaccacggccggaccgaagggcggcggcggaggggagccagggcgccccagcagggggcaccaccgcaccaccccg

SEQ ID NO: 197819 - RNA, 76 nt, Homo sapiens
cagccgggaagcagcgggagagcagcagagacacaagccgcgcccagcccccgccccaggccaaggaggagcccac

SEQ ID NO: 197820 - RNA, 89 nt, Homo sapiens
ggcaggcgcccccgacccccagacgccggaaagaaggcccccgcccgagggggggagcacgcgggcgagaggagcgagggaaggcagag

SEQ ID NO: 197821 - RNA, 88 nt, Homo sapiens
caaaacggcaccacgggcacagccccacgcggccacggccagggaacaaggaagaaaacaccggagcccaagacaccaaaacagacgc

SEQ ID NO: 197822 - RNA, 78 nt, Homo sapiens
gacacaaggagggggcagagcgagggcaaacagaccaccggaagccaagaagcaaggccaccaagggcaacgcagcgg

SEQ ID NO: 197823 - RNA, 76 nt, Homo sapiens
agacccagccgaaagaacaccagaggaacaggcagcacaaaacaaggagagccacagaaacagggcaccaacaccc

SEQ ID NO: 197824 - RNA, 76 nt, Homo sapiens
aaaccaaacaccacaggccagaaggggagcgaacggcggcgaagaagccgggggaaccacagccggagaaggagga

SEQ ID NO: 197825 - RNA, 66 nt, Homo sapiens
acacaccgccgcaggcgcccccggcgagacgacgggaccgaaggaccccgccagagacaaccgagc

SEQ ID NO: 197826 - RNA, 62 nt, Homo sapiens
ccaaaagagcacagaaccaagggaagagaacacacggaccgagagagaggcagagcaacagg

SEQ ID NO: 197827 - RNA, 74 nt, Homo sapiens
cgcccacccccgaccgcaaaaccacgggcgaggcgccgcggcacgcgaggccccgccaggcaccaaccagaagg

SEQ ID NO: 197828 - RNA, 41 nt, Homo sapiens
gaagccccaagaggcgagcagcgcgcaaagagagaaggcgg

SEQ ID NO: 197829 - RNA, 68 nt, Homo sapiens
gccgcacacacaagccaacacacgaccagggaccacgccagagcgccaaagaaaacccgcgcccaaaa

SEQ ID NO: 197830 - RNA, 67 nt, Homo sapiens
agcccaccaaacacgccggaaaccccgcccacagcacgagcaagcccaagccacagaccaaaaagag

SEQ ID NO: 197831 - RNA, 73 nt, Homo sapiens
gcacagcagcggaaaaacacagagggcacacggcacagaccaggggccgcaaggccaggcgcgcagaggcacc

SEQ ID NO: 197832 - RNA, 81 nt, Homo sapiens
ggagggccgagccgggggagaccagcagaaagcaagaagacagcggaagcggaggaggacagaaaacacggggaagagaaa

SEQ ID NO: 197833 - RNA, 68 nt, Homo sapiens
cagacacacaagaggacagggagaaagggccccaagagagcaagacccagagaaccccggaagaagag

SEQ ID NO: 197834 - RNA, 83 nt, Homo sapiens
ccagcgcacccacccaccccacagcgggcaccgacgcgggagaagccaagacgagagacgacggggggaccaacaagaggaaa

SEQ ID NO: 197835 - RNA, 40 nt, Homo sapiens
agcaaaccaacaaaaccccagcacgaaggaagcacagaag

SEQ ID NO: 197836 - RNA, 66 nt, Homo sapiens
cgcaccggaaaggccaccagaggagggaagggaagaaaagccgagaaagaaccgcagagcgcaaaa

SEQ ID NO: 197837 - RNA, 90 nt, Homo sapiens
cgccccgcccgcccgcccgccggagcgcccggagcggccgcgagccaccgaggcccaggaccgccagcagcagccgaaaacgcacaagac

SEQ ID NO: 197838 - RNA, 79 nt, Homo sapiens
caagacgccccaaaggaagagggccaacaagacacacagagggccccgagaaagaccacagcccaagcgcgacccacaa

SEQ ID NO: 197839 - RNA, 80 nt, Homo sapiens
caccaggcacccgggcccagccgggaacccccacgcggccagcgaaaacgcccagcgcaaaagaagcaccgcgaggagac

SEQ ID NO: 197840 - RNA, 84 nt, Homo sapiens
cggcgcccgcgccacagccaccagagccggcagcaaagagggaacagggggggaagaaagaaggagaaggcggaggagggagag

SEQ ID NO: 197841 - RNA, 71 nt, Homo sapiens
gggccgccgagcggacccggaccggggaacgccaggagccagaaccccgaggaaaggggaaaagccgcaac

SEQ ID NO: 197842 - RNA, 79 nt, Homo sapiens
acacggggaaccaacagaagaagaccagcaccagacagcgaaaaagaggacccaaaaaagagagaaaaggccaaagaga

SEQ ID NO: 197843 - RNA, 71 nt, Homo sapiens
ccaccccacagagacagaaccaagcccacaggcgcgaccagccacagaagccagccaacacagcaggcggc

SEQ ID NO: 197844 - RNA, 83 nt, Homo sapiens
gccgaaggcgggggggggaggcccgaggcagcagcagcagaggaaaaaagagaccgagagaaagcagcagaaaggggggagag

SEQ ID NO: 197845 - RNA, 75 nt, Homo sapiens
gaggcggcaaaaaagcaaacacgaggccacggggaaacacagcagaacacaggggggagaaaaggccaagggcag

SEQ ID NO: 197846 - RNA, 72 nt, Homo sapiens
ccgggcgccccgcagccccccaacaccgcccgccaggacgacgaggcacccagccaacaccggacagaggaa

SEQ ID NO: 197847 - RNA, 78 nt, Homo sapiens
acgcacgcaaaaagaccagcccagggcagaaaggccgaacaagcaaccggaaaagcaaaggcaagggcagcaccagca

SEQ ID NO: 197848 - RNA, 84 nt, Homo sapiens
agacaaggacaaggccaccagcaccaggcgccaagaaggcccgcccagggcaggccagagaaaaccaacggcccggaggaccac

SEQ ID NO: 197849 - RNA, 65 nt, Homo sapiens
gcaacaacccagacccagcccgggcccggagcaggacagacccccagcaaggcgccaccggaaga

SEQ ID NO: 197850 - RNA, 78 nt, Homo sapiens
cccccagcagagcgccgagcggcgggaggccaccgccccaccagcaggcaacgccacagaccgccagcgccaggacac

SEQ ID NO: 197851 - RNA, 77 nt, Homo sapiens
acacagcgcaacaagccacagggcaaggagaaacccacaaaggggacacagacaaaaagcgcgcagcaggagaaccc

SEQ ID NO: 197852 - RNA, 69 nt, Homo sapiens
agaacgcggccccagccacaccaagcagcacaacacgaaaggagaagaggacgggaggagaaaagccga

SEQ ID NO: 197853 - RNA, 36 nt, Homo sapiens
cacccggaaacagcgggaacaaagcaaagcagcggc

SEQ ID NO: 197854 - RNA, 72 nt, Homo sapiens
gaaagcaaaggcgccgaagcgcacgaccccgacacccccaaggcccgagccggcaaacgagagcaaaaggga

SEQ ID NO: 197855 - RNA, 48 nt, Homo sapiens
cggcaagccacagacgagggggggccaggcccagggggccaaacccgg

SEQ ID NO: 197856 - RNA, 76 nt, Homo sapiens
ggcaacagagcggccggagcgaaggagacccaacaccccggccagacgggccaccaggccggcgccccacgcccgg

SEQ ID NO: 197857 - RNA, 77 nt, Homo sapiens
caaggcaagaccgaacagaaggaacgacgcggaccagaagccagagcgaggacgccggcagaagggccaaaagaaac

SEQ ID NO: 197858 - RNA, 105 nt, Homo sapiens
agaaaagaaagcagggaaaaaagcagcaaacacgggacaaaaaccagaccaggagggaaaagagacacccccggaggagccccccaggggaccaagaccggaaag

SEQ ID NO: 197859 - RNA, 79 nt, Homo sapiens
cgccgagggccgcggccaggacacgaggaccagccagcccaggggcaccgccagcacgcccagagaagacggcccagca

SEQ ID NO: 197860 - RNA, 73 nt, Homo sapiens
ggagaaaagcacgccacaagaaaccgaaggaccagaggaacacccaggcaggacaggggggagcagcagcagc

SEQ ID NO: 197861 - RNA, 67 nt, Homo sapiens
caggccggggaaaagcggaccccaagcaacgaacaccacagacgaaagccaagggaacgcaaagaag

SEQ ID NO: 197862 - RNA, 86 nt, Homo sapiens
agcccccgagggcgggacacagcaaggccagcagagcccaagggcgccagccaccacccagacgaccagacgagagcagacacgcc

SEQ ID NO: 197863 - RNA, 77 nt, Homo sapiens
gaggcggaagcagcccgccagccacagcacgcagaggccccaaaggcgagccacacggaaaagaaagcagacaccag

SEQ ID NO: 197864 - RNA, 65 nt, Homo sapiens
gcgcggagagcaacgccgggacagcgcaagggggagccagccaccgagacgccgacagcccgacg

SEQ ID NO: 197865 - RNA, 75 nt, Homo sapiens
agagaaccggagagcacccaacagacaaccacaccgaaggccaccccaagaagaggggacagaaagacagacaga

SEQ ID NO: 197866 - RNA, 75 nt, Homo sapiens
ggcgcggggaagcagggaaggcaagcagaagggcaaacaagaaacaagaagcagcagggaagccacccaaaccgg

SEQ ID NO: 197867 - RNA, 60 nt, Homo sapiens
cacggagcccccagaaaagacacaggagagccacagacagaagcacccgcggaccgcacc

SEQ ID NO: 197868 - RNA, 64 nt, Homo sapiens
ggaaaccggagcgcgcagcagggaccagaagcagcagccccagaagccccgaagccggggcacc

SEQ ID NO: 197869 - RNA, 56 nt, Homo sapiens
cgcggccgacaccagaggagaagacgagcagaagggaggaagcccggcgccagggg

SEQ ID NO: 197870 - RNA, 74 nt, Homo sapiens
gagaaccgaccagaacgcagcaacaaagagacgaagaggagcagaaccagaagggacacacaggacggcaggaa

SEQ ID NO: 197871 - RNA, 85 nt, Homo sapiens
ccggcccccacagaagccaccgcaagggccacgcgggcagaccgacagaagaacacaccgccggggagccagaagaggaggaagc

SEQ ID NO: 197872 - RNA, 73 nt, Homo sapiens
cggggcccacgcacggaaaaggagccacgccggacacgggcgaaggagcggccgacagggaggagcagaagcg

SEQ ID NO: 197873 - RNA, 77 nt, Homo sapiens
gaaaaccaaacggcaaccaaggaacaggagccggccacacaagaggaggggagagcaagaccaggccaggacaccag

SEQ ID NO: 197874 - RNA, 80 nt, Homo sapiens
ggcaggagcgggagaacgcggagccgcgggacggcggcggggcgccgaggcagccgggacaggccggaaggggagcaaag

SEQ ID NO: 197875 - RNA, 83 nt, Homo sapiens
ggccgggcgcagggccagggggccgaggcccggaaggaggccaacaccccagagcaagcgggagggcccagagagcaaacccg

SEQ ID NO: 197876 - RNA, 76 nt, Homo sapiens
ccaccaacagacgaggaacagcgaaggggagcccagggaagcccgggaccgaaaaaacgggggaccagcaggcggc

SEQ ID NO: 197877 - RNA, 80 nt, Homo sapiens
agccggagcgcgaaggccgggacccggccccggcccacaggggggggcaaacccgagagaacggagaagacacagaaaga

SEQ ID NO: 197878 - RNA, 74 nt, Homo sapiens
gagaccccgcggaacgcccaccgcggagagcagcacgaccccagcacagggcacaggcaaccagaaggggaaag

SEQ ID NO: 197879 - RNA, 81 nt, Homo sapiens
gaagcaaagaaggcggggaccaccaaacagaaccaaagccaaggaagggaaagaaaacaagccacccagacaagaggaaag

SEQ ID NO: 197880 - RNA, 83 nt, Homo sapiens
gggagagcagaggcaaaccgaaagaccccagaggagggaggaagcagagaaaacccggacaacagccagacaaacagaaaaga

SEQ ID NO: 197881 - RNA, 39 nt, Homo sapiens
cccccagagcagcggcgaagacacacaccacgccaagaa

SEQ ID NO: 197882 - RNA, 88 nt, Homo sapiens
gcaaccggcgagcgcccggcggaaaaccgaagggaaggccagcagcgcgcggagaagaacggggagccaggccaagacaaggggcgca

SEQ ID NO: 197883 - RNA, 76 nt, Homo sapiens
acagagccggggggagccgccgagggcgagaggacagccgacggaccagagcgagcgccagagccccggaacaaga

SEQ ID NO: 197884 - RNA, 75 nt, Homo sapiens
ggggaagacagggacggaccacgggaccaagcagacaaaccaaggacaaacaacagaccaaggggcggaaaaccc

SEQ ID NO: 197885 - RNA, 69 nt, Homo sapiens
caacgggacgaagcagaggaacggggcaacgcgagcagaacagcccagccgaggaccgccacggaacac

SEQ ID NO: 197886 - RNA, 76 nt, Homo sapiens
gaagaccgccagcagcgggcgagagagagaggcaagaaggcgcgagacagagagaagccggcgaaagagacggaga

SEQ ID NO: 197887 - RNA, 61 nt, Homo sapiens
ccaagcggaaaagacgagaagcacgacgaggcaaggaagaccggagcacccgggacggcca

SEQ ID NO: 197888 - RNA, 59 nt, Homo sapiens
ccaaagccccggccccagagacaggcaaaagcagaccggaaaacccaccggcaagacca

SEQ ID NO: 197889 - RNA, 75 nt, Homo sapiens
cccgcacaccagaagaaggaggcaggcacccaaccgccgcagacccgaacagaccgaggcgcaagaccacaaggg

SEQ ID NO: 197890 - RNA, 81 nt, Homo sapiens
gccgcgcccgcgcgcacggcgcagccgcggggcgcaggaggcgggcacagcgccaagaggagaaggagaaacggaggacgc

SEQ ID NO: 197891 - RNA, 55 nt, Homo sapiens
ggagcaggcgagaagagaagaaaaccccaaagaaggcccccgcggcgcaccggca

SEQ ID NO: 197892 - RNA, 44 nt, Homo sapiens
accagaccaaggcagggaggcgaacaaacggacccaggacaaaa

SEQ ID NO: 197893 - RNA, 78 nt, Homo sapiens
gccagcaaagcaggcgaggaggagcaccggaaagaacaggggccgaacaagccgagacggggccggccgagcaagacc

SEQ ID NO: 197894 - RNA, 82 nt, Homo sapiens
cgggggagcaggaaagggcaggaagaggacaccagcccgggagaagaggcaacacccgagcggggcccgaaaacgcagagaa

SEQ ID NO: 197895 - RNA, 85 nt, Homo sapiens
cggaggagcgcagcaacagaagagaggccagccgggaggacacacaagcggagggccaaacaagaaggcccgaagagaccccagc

SEQ ID NO: 197896 - RNA, 96 nt, Homo sapiens
gaaagggggacagcgcacaaacggcaaccagggaccgaaagcaaagaaagaagacaagccaccagcaagccgccggccgcccccaccagacccccc

SEQ ID NO: 197897 - RNA, 75 nt, Homo sapiens
cagaacacgggagaaaaaggaaaacgcggaaaaccgacacaacagggaagggaggcggggccacggagagccaag

SEQ ID NO: 197898 - RNA, 66 nt, Homo sapiens
gcaacacagggagggcagaacacagaccaccaggcaaaacaagaaaaagcaccaagaaaaagccag

SEQ ID NO: 197899 - RNA, 76 nt, Homo sapiens
gcggccccggcggggcaagagcgggggcgggaccccgccgcggcgggagggagaaaagagccggaagcaaacccca

SEQ ID NO: 197900 - RNA, 93 nt, Homo sapiens
cgaaaccagccccggacgagaagcgcagcaacggcgggggaccacgagagcagaacagaaagccaaagggaggacaccagagagaaacacccc

SEQ ID NO: 197901 - RNA, 53 nt, Homo sapiens
ccagcacaccccagcagaaagacaaagcaccagagcgcacaaaaggagcggag

SEQ ID NO: 197902 - RNA, 32 nt, Homo sapiens
cgacacaaccagaaagcgcggggagcccccac

SEQ ID NO: 197903 - RNA, 78 nt, Homo sapiens
ggaaaacccgaggagacgcaagacccaaacaaaaagacacgaagaggaggaagcccagacaagaggaaaagggagaac

SEQ ID NO: 197904 - RNA, 39 nt, Homo sapiens
ccggccccgccaacgcgccgccggccccgcgcccacacc

SEQ ID NO: 197905 - RNA, 47 nt, Homo sapiens
cagccggagaaaacacggagaagagaggacagagacggagaagggaa

SEQ ID NO: 197906 - RNA, 65 nt, Homo sapiens
acacaaaccaaccaacggaaaacggcaccaagaagagagaaagagaccaagcaagcagagagggc

SEQ ID NO: 197907 - RNA, 78 nt, Homo sapiens
cagcgccgcccgccgacagccaggcccgggagaaagagaaaccgaagaaggcccacacacacaggaaggcagaaagca

SEQ ID NO: 197908 - RNA, 39 nt, Homo sapiens
cgaggaagaggaggcgaggcaaggacggggacacaagac

SEQ ID NO: 197909 - RNA, 62 nt, Homo sapiens
cccgggcgccgcgccgcacgagcaccagccagagccagaggggggcccgagagcaagaaacg

SEQ ID NO: 197910 - RNA, 83 nt, Homo sapiens
gccgggcagagcggagcggagcgcgcgcccgccccgccgggaggaccgcgaggaggcacaaaaagaacaaccagaaggaacgc

SEQ ID NO: 197911 - RNA, 74 nt, Homo sapiens
cgcgccaccgcgccggagcgaagaaacgccccgggacagacaccgggaagggcacgacaggaaaagacgacgaa

SEQ ID NO: 197912 - RNA, 79 nt, Homo sapiens
cagccacacacacgaccaccaggaccgcgggacaagaacggcgcggcaggcaccgcccagcccagccgccaagccacca

SEQ ID NO: 197913 - RNA, 85 nt, Homo sapiens
caaggcgccaggcaggacgacagcagcagcagcacgccccagagagaaccccacccaagagacaaagaccaacgagccaccacag

SEQ ID NO: 197914 - RNA, 73 nt, Homo sapiens
cccggcaagaccgaaggcgccggccaaaagagccaaagcgaggccaggaacgacacaaggggaagcgaaaccg

SEQ ID NO: 197915 - RNA, 75 nt, Homo sapiens
gcgcccaggcggcccggcccggaggcaaaagagcggaaaaggcacaggagcggggagaggaaaaggaacagaaag

SEQ ID NO: 197916 - RNA, 86 nt, Homo sapiens
cacggcggggagaagcagcggcagaagcagacggaagcaaacagacggcaaaagggggaagaagaggagaacgaacggagaccaag

SEQ ID NO: 197917 - RNA, 75 nt, Homo sapiens
cgagcaccccaacgggcaggcaaaacgggcgggggcaaagaaccacaagaacaaaaggcaagaaacacagcgcag

SEQ ID NO: 197918 - RNA, 81 nt, Homo sapiens
agcaacagcgacgacagacccgagcgacaggccacggcagcaggcagcagagcagacccacggggacgaggccccaccaaa

SEQ ID NO: 197919 - RNA, 53 nt, Homo sapiens
caaagcaaaagagagaaagaccagggagcaacgggaggcgaccaccgcaggaa

SEQ ID NO: 197920 - RNA, 74 nt, Homo sapiens
ggaagaacaaaaacgaccccaggccagcacgaggacaggaacaggagaaaggaggacccgggaagacagagacg

SEQ ID NO: 197921 - RNA, 80 nt, Homo sapiens
ccagcagaggcggagcccgcagaccgcagaaggccggagacaccagcagaaagagcacgaggcgagcggggagacccgag

SEQ ID NO: 197922 - RNA, 73 nt, Homo sapiens
gggcaggcccaccagggaacggccccggaagcacaggccagaacaacccggaagaggaaggaagaaggcacag

SEQ ID NO: 197923 - RNA, 73 nt, Homo sapiens
gggagccaggcccagcccacgggaaggagagaaaacaaggagcaagaacaacaggacagggacccagacgcgg

SEQ ID NO: 197924 - RNA, 73 nt, Homo sapiens
ggagggcagaccgggaccagccccgggcacccccaggggaccaacccagaggcccagggcccgagaagaagca

SEQ ID NO: 197925 - RNA, 82 nt, Homo sapiens
agggcagggacggggaggaggagcccccgagaggaggcagacccccacaagacgacacccgacggcccggccaacgcaacag

SEQ ID NO: 197926 - RNA, 71 nt, Homo sapiens
gcgaggcggccaccgcgacccggccgcgccggcgccgaccccgcgcgccagggacaggaaaagcgagaaac

SEQ ID NO: 197927 - RNA, 119 nt, Homo sapiens
aggcaccgcaaccagaccagagaaacccagaagcagagcaagaaagggaacaacggggcgggccccggccagggcccaggcagccggggcggaacccccagacagcacgcgacaaagaa

SEQ ID NO: 197928 - RNA, 75 nt, Homo sapiens
caaaccagcaggcaccaaggaaagcagaagacaaggcaacccgccgagggcgcggcacggaggcagcgggccgcg

SEQ ID NO: 197929 - RNA, 77 nt, Homo sapiens
gagaaaaggaacaagaaaacaacggaggaacaggagcaccacgagagcacccagagggacaggaacccccgaaaggc

SEQ ID NO: 197930 - RNA, 73 nt, Homo sapiens
aaaagccacaagacagacagaacagagaagaaagggaacaggggaggagcacccgccccaccccccacaccac

SEQ ID NO: 197931 - RNA, 77 nt, Homo sapiens
ggggccaggcccgggaggagcccgaggaggccaccaaggggacgagccaccacaggcagacgcgaagcacggcaccc

SEQ ID NO: 197932 - RNA, 75 nt, Homo sapiens
gagcagacccccggggcccaggaacccggcccgcaagcaacagggagcagaccggcaaccaccacacgaaaggga

SEQ ID NO: 197933 - RNA, 78 nt, Homo sapiens
ggccaggcagggagcagggaccagcgacgcaccccggcggagaaaccaccacaaacacgaggccagcaacgaccaaca

SEQ ID NO: 197934 - RNA, 70 nt, Homo sapiens
gcccacggcaagacagcaccaacaacaggccccccacccggcgccccgggccagcgggacaccagcaagc

SEQ ID NO: 197935 - RNA, 69 nt, Homo sapiens
gaaggaccaagaaccagggaacaacggaccggccagagagagacaagaacaaccaaacagaaacaagaa

SEQ ID NO: 197936 - RNA, 86 nt, Homo sapiens
aggcacgggcggcccgcaggaccggaccgggggagagggcacaagaaggacgaagggagccagaccccaggagcgcgaaggaacac

SEQ ID NO: 197937 - RNA, 89 nt, Homo sapiens
caaaaacaggaacagaccgggcaagccagccaaccaagaaagagcagacccccgcgaccagcccaaagagaggggccagagaacgccgg

SEQ ID NO: 197938 - RNA, 72 nt, Homo sapiens
gaggcgggacgcgaacacagagggaagagaaagcaaacgagcagggcaagaccgaagaacacacgcaaaaac

SEQ ID NO: 197939 - RNA, 78 nt, Homo sapiens
ggggcccccgggcaccccggaccgcgcagccaccgcggcccccgcggaaaagggggcagacacggacaggacagagga

SEQ ID NO: 197940 - RNA, 56 nt, Homo sapiens
gcccgccacacccgccgccagcaaaagcggaaggagagacaggaagggcacagaaa

SEQ ID NO: 197941 - RNA, 75 nt, Homo sapiens
cgacaccgggcaaccaaagacgggcgccacagacacaaaaggaaggggcagaccaacaccacccagcaaaaaccc

SEQ ID NO: 197942 - RNA, 89 nt, Homo sapiens
cagagaaagaaggcggccaggccaaccgaaggcaaaagcagaccggaaaacccaccggcaagaccacacccgaggggagcccaggacac

SEQ ID NO: 197943 - RNA, 72 nt, Homo sapiens
gaccccccagacaccacagcagagccccgcgcccccgaaaggagcaggccagggcgggagacaccagacaaa

SEQ ID NO: 197944 - RNA, 58 nt, Homo sapiens
cgaagagagggcaagggcgaggcgccccagacgggaggagaaagcagcagcgcaggcc

SEQ ID NO: 197945 - RNA, 82 nt, Homo sapiens
agcaagcggggccggggcgcccggcggagaccccgcgccggacccgaggcagcgaacccaggacccggccccgccgccgggg

SEQ ID NO: 197946 - RNA, 51 nt, Homo sapiens
ccgggaagagagcgaggagacaaggcaacaggacaacgcgggcaccaccga

SEQ ID NO: 197947 - RNA, 94 nt, Homo sapiens
ccccacggcaacagacaccgcgaaagcgaagcgcgaaaaccagcaaggcacaggcagcacagccaggccaaaaccccagaggcacagaggcaaa

SEQ ID NO: 197948 - RNA, 40 nt, Homo sapiens
cccagggcgcccccagccacaggagaccacagcggcgccc

SEQ ID NO: 197949 - RNA, 67 nt, Homo sapiens
caggacgcagaaccaccaaaagccaagaaacgcgagacgacgggaccgaaggaccccgccagagaca

SEQ ID NO: 197950 - RNA, 56 nt, Homo sapiens
acacagcgaagaagaccgcgaggcacagagaggagagcacagaaggggacaacacc

SEQ ID NO: 197951 - RNA, 79 nt, Homo sapiens
gacaccgccccacgccggaggcacaccggcccgggccacggcagcgcggccacaccggcccagcaggagggcggggccg

SEQ ID NO: 197952 - RNA, 82 nt, Homo sapiens
ggaagaggcggccggcaagagcggcggagcgcaggggagaaccggaaggggaacacaagaacgcccaggaaaacagcgcacc

SEQ ID NO: 197953 - RNA, 72 nt, Homo sapiens
acgaccacccagagcaacccagccgcaagcccacagcggagggaaggaagcaagaaacagggaggacagaaa

SEQ ID NO: 197954 - RNA, 106 nt, Homo sapiens
gacccccgcgcgaccgcaccccgcggccacgggccagccgcgggacgaagacccaccaagacaagcagaccggaagaccgacggaagaccacaccccgagggagcc

SEQ ID NO: 197955 - RNA, 80 nt, Homo sapiens
acaccggcaggaaccaccaggacagaggcggacaggaggaaggcaaggaaggaggcacaggcgggcacagcacacgggca

SEQ ID NO: 197956 - RNA, 70 nt, Homo sapiens
gacacaaggaaagcgaagcggggggagaaaaggccaagggcaggagacacgagacgcaggaagcagcgaa

SEQ ID NO: 197957 - RNA, 72 nt, Homo sapiens
gaacgacaaacaggaccgccaaacccaaaccgggacggaaaaggcgcacacgacccggagaaccccacgaaa

SEQ ID NO: 197958 - RNA, 81 nt, Homo sapiens
ggcacggcaccagacagaagacacggcccagggcggaagggcaagaaagaaggaaagcccaagagggagcgcccgacacgc

SEQ ID NO: 197959 - RNA, 79 nt, Homo sapiens
aggacaccggaagcgggaaagggagccgaagcggcaccggaggggagcggagagggcagaggagcggcggagggcgaac

SEQ ID NO: 197960 - RNA, 73 nt, Homo sapiens
ggaacggcaagaagacagcacgagaacagcagaaacagcgcccacaggagaaacaaggaagagcaacgcgcga

SEQ ID NO: 197961 - RNA, 76 nt, Homo sapiens
aagcaaccaccaacgcagcggaaggccggaaccggggagaaaaaaaccgggcagaaagacagaacggagcagaagc

SEQ ID NO: 197962 - RNA, 69 nt, Homo sapiens
ggcaccagcccacggcacggagcaccagcacagcaggaggaacgagagaagcgggcaggaagagagcaa

SEQ ID NO: 197963 - RNA, 72 nt, Homo sapiens
aacaagacagcgcaggccagcagccgggggggaggcgcggcggaggaggaacggggggccacgacgggccaa

SEQ ID NO: 197964 - RNA, 86 nt, Homo sapiens
cccacgccggaggaaccgagaagagcagagcggagggagccccagacacgcaaacggggacagcgccgaccggaacagggaccacg

SEQ ID NO: 197965 - RNA, 72 nt, Homo sapiens
cgacaggacggcgagccacagacgcaccagaggggagcccaaaagcacgaagcgccagaggacaccgcggcc

SEQ ID NO: 197966 - RNA, 74 nt, Homo sapiens
aaagacacaacccagcagcggaacaagaaagcggcaacaagaaaccaaaaggacaggcggagaggaaaaccagg

SEQ ID NO: 197967 - RNA, 65 nt, Homo sapiens
ccggaacaagcaacggcagaaaaggaccaaaccgaaaccgccagagcaggcggacaacggaaaca

SEQ ID NO: 197968 - RNA, 48 nt, Homo sapiens
gcacacacgaaagacagccccggcgcaggaacacaggacggccgaaca

SEQ ID NO: 197969 - RNA, 74 nt, Homo sapiens
cacccacagcagaaaagccgagacgagacggcaagggaaaggcagcccgaagagagcacagacaggcagcccgg

SEQ ID NO: 197970 - RNA, 78 nt, Homo sapiens
acagcgccgccaagacaggaagaccaagaaaagacagcgggcaggcagccacagccagcgagaagaacgaacagaaca

SEQ ID NO: 197971 - RNA, 121 nt, Homo sapiens
ccagcaggaaggcgcggagaccacgacgggggggaggcggcagcgcaaccacgagacggccccaaggccgggagaaggggcaaggcgagacacagcccgggccagccacggaccggccgcc

SEQ ID NO: 197972 - RNA, 79 nt, Homo sapiens
ggacggcggggccgggccggagacgcgcccgcgcgcaggggaagcgggcaggaccacggcagcggcgacgacacgcggg

SEQ ID NO: 197973 - RNA, 71 nt, Homo sapiens
cgcggcgcggcggcggcgccgccgggcgggcgggaccgccgcgccgaccggagacaacagacgcaccagcc

SEQ ID NO: 197974 - RNA, 55 nt, Homo sapiens
gaccccaacaagggggaagaaaccagcaggcaaccaaaagagacggggcgccgga

SEQ ID NO: 197975 - RNA, 93 nt, Homo sapiens
ggccggccccgcggggagcgcccccggcgcgagccccaggaaagagccgaggaaacccagacccaagaccaaccgaggaggaggaggagggag

SEQ ID NO: 197976 - RNA, 74 nt, Homo sapiens
cagccacgggccaggcacaccaggagggcggacggacggcgacggagccgcccacgaggacgcgggcccagggc

SEQ ID NO: 197977 - RNA, 75 nt, Homo sapiens
ggccccaggacggccagggcccgcaagcgaaccgagcacagcaccaagccagggcgccagcacgagccccccccc

SEQ ID NO: 197978 - RNA, 82 nt, Homo sapiens
cagaacagcaacagagaaccaaaccaaaaccacaggcacaaagacagggcacggggacgaccaaggccagcaccaacggcag

SEQ ID NO: 197979 - RNA, 77 nt, Homo sapiens
gcgcagcagccccggcgccccgggcccacgcgaagccgaggccccgcaacggcaagacggcccaagcagccagagag

SEQ ID NO: 197980 - RNA, 76 nt, Homo sapiens
ccccagcgcgcaaagcgcgaggggcgaggaacgcaacaccagaggcacaggaaacagacaaccaccccaaggggcc

SEQ ID NO: 197981 - RNA, 59 nt, Homo sapiens
caccaaggagacgcccaaggaaccccgccggccaccggcggcggagcaaggaccgaacg

SEQ ID NO: 197982 - RNA, 58 nt, Homo sapiens
gagggcccgcaaggccacagcacggggacccaaggccagccagccccaggcaccagcg

SEQ ID NO: 197983 - RNA, 54 nt, Homo sapiens
agggaaccaacccacccggcgccgcggcccaaaagggcgccggccgagcccggg

SEQ ID NO: 197984 - RNA, 80 nt, Homo sapiens
cacaagaccccccgggaggaccgcaccgccaagccaagccaacccaaacagacgaggggagggaagggcaacaacccacc

SEQ ID NO: 197985 - RNA, 77 nt, Homo sapiens
acaccggaggcgacggccaggccacagaacagcaaaagcagcaaggccggggcaggcaccgagggcgcccagccccc

SEQ ID NO: 197986 - RNA, 76 nt, Homo sapiens
gaacaaagacagccagaggaagggagagagcgcgcgccgcgcgcccgcacaaacgccggggacaacaacccgaaga

SEQ ID NO: 197987 - RNA, 71 nt, Homo sapiens
aggaaagaagaccgcgagaacagaacggcacccccccgcgcgcggggcagagcgaaggaaaaccagagaaa

SEQ ID NO: 197988 - RNA, 84 nt, Homo sapiens
gcgcgaaccccggcgcgcgccccgccggaccggaaacaaagacagagggagaggaacaaaagaagagaggcagccgcacagccc

SEQ ID NO: 197989 - RNA, 69 nt, Homo sapiens
gcccccccgcggagcaggcaacgaaagcaaaccgagagcaggcgaaggccgggacccaggcccaccacc

SEQ ID NO: 197990 - RNA, 71 nt, Homo sapiens
aaacggaccagaaacaaaacgcaaaacagggaagcccacagaggacgggagggagacaagagccggcgcac

SEQ ID NO: 197991 - RNA, 90 nt, Homo sapiens
cccacggggacggagggccgagaagcggggcaccacgaaggaccgaagagaagcaaaaagggaaagacagggaaaccaacaggacgagga

SEQ ID NO: 197992 - RNA, 59 nt, Homo sapiens
gccggacgaagcacaggcgacaaggcgaggagcgccccacaaaaccaagcgaggccagg

SEQ ID NO: 197993 - RNA, 77 nt, Homo sapiens
aggaagccacggcagacacacaacccgacccgacgaaaaggagaaaagaggcgcggaccaggggaaggcaaaaggcc

SEQ ID NO: 197994 - RNA, 56 nt, Homo sapiens
cccgaggagcgggaacagcagggagaaggagccacagagggcagagacaggaaacc

SEQ ID NO: 197995 - RNA, 60 nt, Homo sapiens
ccgggaggggggagcggcgggaggccaccgccagcaaaccagccggcgggcgccacaacg

SEQ ID NO: 197996 - RNA, 59 nt, Homo sapiens
cggagcgccgccgccgggaccccgcccagcaggcagcagggagaccagaccaggacaga

SEQ ID NO: 197997 - RNA, 68 nt, Homo sapiens
gccccagaagaggacgcgcccaaagcgaccacaacgagaaagcagcaggcgcaaaaacgaacccacaa

SEQ ID NO: 197998 - RNA, 71 nt, Homo sapiens
acgcccacggccggcgccgaaaaggaacaacaggaaaccagcaccaaaagacgagaagacccccgaacgaa

SEQ ID NO: 197999 - RNA, 81 nt, Homo sapiens
gaaggcgcaaacgacaccacccgaccggcggcacagcaaacacacaagagccagcaaagggagcagcacagaggcagaaca

SEQ ID NO: 198000 - RNA, 68 nt, Homo sapiens
caggcccgggggcggcggccacgccaaggacggaagcccaccagaggcgaggggaggaggaagcgagc

SEQ ID NO: 198001 - RNA, 69 nt, Homo sapiens
ggaaaggagagcgcagaggcgaccaggagcgcaacacagacaaacgaagaaccccaaacgcagcgacac

SEQ ID NO: 198002 - RNA, 90 nt, Homo sapiens
ccagaaccagaaccacagccccgaggagccccaaaccgcgagggcgaggcccccagcaggagacggcacacccggacagcccccagccac

SEQ ID NO: 198003 - RNA, 59 nt, Homo sapiens
ccagcaggcacagacggcgccacggggagaaggccggcacgcagcacgccgaacccggc

SEQ ID NO: 198004 - RNA, 89 nt, Homo sapiens
gaggaagacgagccgggaggaacggcccggaaacaggaggacgcccccacagggcaggaagccgccgcccagccaggacggggaggagc

SEQ ID NO: 198005 - RNA, 97 nt, Homo sapiens
aggacaccagcacgccccgaaacgccgccccaggaagccaagaccgacaagcgggcacggcggccaagaccccaagaagaagcggaagaggagccgc

SEQ ID NO: 198006 - RNA, 78 nt, Homo sapiens
aaacccggggaccaggagggaggaggggcgggcgaaggaggaagggcggagaacggaaaagcaccaggaagcagagag

SEQ ID NO: 198007 - RNA, 68 nt, Homo sapiens
caaggcggacaagagaagccgccaggaagaccgcaggaaagcaggaaggcaagaaagccaaggacgaa

SEQ ID NO: 198008 - RNA, 53 nt, Homo sapiens
aagagaggccaaaggaaaaccagcaaaaagaagagagggaaagaaaacaagcc

SEQ ID NO: 198009 - RNA, 79 nt, Homo sapiens
agcgacacaaacaaaccgaaagaagaagaggagaagaaaagaccagacgccgacagaacagaaaggcaaaaagagacac

SEQ ID NO: 198010 - RNA, 89 nt, Homo sapiens
ggggccccccggacgggacgggggcggcggcggggccccggacccgcggcgcacaccccgcccagcgcagagacagcagaacaccgaac

SEQ ID NO: 198011 - RNA, 56 nt, Homo sapiens
gaccggcaaaaagggccagaaggaccggccagcccaccccccgcgccgggacgggc

SEQ ID NO: 198012 - RNA, 77 nt, Homo sapiens
gggcggccgcccgcccaacagcagcaacccacacgcccgggcgggacaagcggcaagcgagccagggcagcgacgcg

SEQ ID NO: 198013 - RNA, 75 nt, Homo sapiens
cccacaccaccgaccaggaccgggaagccgcaaccaagcgaggggaccagaagaaggagaacccacgacgaaagc

SEQ ID NO: 198014 - RNA, 82 nt, Homo sapiens
agcacgcacaccgggcagggccgagaggacgccagcggcgcgcaggaagaagacggcacgggacccccagcacaggcagcag

SEQ ID NO: 198015 - RNA, 77 nt, Homo sapiens
agcaccaccaggcgggagcaaaacggaagaaaagaggcacgaggaagaaccaagaccccaaggcccagcggggggga

SEQ ID NO: 198016 - RNA, 75 nt, Homo sapiens
gccaccgacaaggccagagaaagaacaccaaccaaagcgccaaagaaaaggaggcacccgggaagcggaaaagca

SEQ ID NO: 198017 - RNA, 77 nt, Homo sapiens
cgagcggagaaggccacaccacgcagaacgcaacaccaaggcacaccaccccaggcaagagggagaagacagcgacc

SEQ ID NO: 198018 - RNA, 67 nt, Homo sapiens
ggcggcgcaaggggagggcggccccagaaccccaggggagccgccaccaaaagcagacggaaaaccc

SEQ ID NO: 198019 - RNA, 69 nt, Homo sapiens
cccaggacaccccgaagccgagaaagaaaaacaaccaccagcgagcaaaaaggcaaagaccaagaccac

SEQ ID NO: 198020 - RNA, 80 nt, Homo sapiens
cccaacccccaccccgcccaaggaggcccagcggacagagcgggagccaccagcgccaaagggaagccaggagcccgggg

SEQ ID NO: 198021 - RNA, 75 nt, Homo sapiens
cggagggaaccagcgaggcgagaagcggcgagggcgcccgagagacggcgaggggccgcaaggccaggcgcgcag

SEQ ID NO: 198022 - RNA, 82 nt, Homo sapiens
ccgggcaccagagcgacgggcaggaaggagggggcgcacaaacgagggagcaacacccgcgaaggggccagggcgagcccgc

SEQ ID NO: 198023 - RNA, 43 nt, Homo sapiens
agagggccagcagagcccccccagggggggacgcgaggcccca

SEQ ID NO: 198024 - RNA, 69 nt, Homo sapiens
ggcagaagcacacgccggggcaccaacagacccacaacccacgcgccgaccacgagaccgagaagacaa

SEQ ID NO: 198025 - RNA, 75 nt, Homo sapiens
aaacggaccaaggacgcgaagaacccaaacaggggaccagggcgcaagaacccaagggcagaaggggaaagagcg

SEQ ID NO: 198026 - RNA, 68 nt, Homo sapiens
acgaaaggagaggaagaggcaggcgcggggcacaagcgggccagaagcacacccgcccggcgcgacaa

SEQ ID NO: 198027 - RNA, 76 nt, Homo sapiens
aaagaagcgcgggcaacagcaacaacaaaagggcagaaaagacaggcaccgcagacacccggcgggcgagcgaggc

SEQ ID NO: 198028 - RNA, 85 nt, Homo sapiens
gcagggcaccagaggggacggcagccccaggccgccaggacgcaggaggagcaagcacaacaggccgaagaggccggagaaggac

SEQ ID NO: 198029 - RNA, 88 nt, Homo sapiens
gggaccggcacccgaaccggccgccgggccccgagccccggccccaaagacccaaaacagagacaccccccagcccccgcgccccgaa

SEQ ID NO: 198030 - RNA, 34 nt, Homo sapiens
gccgagccgccacccggcggcggggcgccgaccc

SEQ ID NO: 198031 - RNA, 84 nt, Homo sapiens
cgaccgcgagccgggaacgcccgaagccgcagggccggcgcggggcaccagaagaaccggccagccagaacagacaagcgagcc

SEQ ID NO: 198032 - RNA, 82 nt, Homo sapiens
cggaaacaggggccacggagccacggccacggccgcaagcgcacacgaccggccggagcgcgcggggcggggagcgcggagc

SEQ ID NO: 198033 - RNA, 57 nt, Homo sapiens
gaaacccaagagcagcggcaggagagcgaagccgcaccaggcaagccggaaaacaga

SEQ ID NO: 198034 - RNA, 76 nt, Homo sapiens
gacaaggagaacagaccaggaagaggcagaagaggaggcgcagagacaaggaagggaagcggagaaaaggagcaaa

SEQ ID NO: 198035 - RNA, 78 nt, Homo sapiens
agagagaggcagcagaaagcgcggaggccacgacagaaaagcaggaaacgcaaggaggcccgcaccaccccaccaccg

SEQ ID NO: 198036 - RNA, 80 nt, Homo sapiens
ggagaggcggccagaagaaaacgaggggcggaacacccgccaaagcagagaaaagaaacgaaagagcccagacacccaag

SEQ ID NO: 198037 - RNA, 87 nt, Homo sapiens
ccggagcgcggcgcccgcggccgggcggcgcggccgcccgggccgggccccaccggacggagaaacaggcgccaaacgacagagacc

SEQ ID NO: 198038 - RNA, 69 nt, Homo sapiens
caggccaagagaaacagggaagcaccacgagcgaggaaaacgccacgacagacacaaccaagcaccgga

SEQ ID NO: 198039 - RNA, 78 nt, Homo sapiens
agcgcaaaaacgagacaaaaaaggcaaaagcgcagaaacagaaacaggagcaagaggcagacagaccgagacgggcaa

SEQ ID NO: 198040 - RNA, 38 nt, Homo sapiens
ggggaggggagagagagggcgcaagaagaacggacaga

SEQ ID NO: 198041 - RNA, 74 nt, Homo sapiens
ggccaaacagagacccagacgagaacaagcgggccaacggcacaaaaggcacgggacaaccaaaaaagcagggg

SEQ ID NO: 198042 - RNA, 77 nt, Homo sapiens
cggaagaaagggcagagaaaagcggccaagcacacggggacagaggacgcagaaaacaaccacccccaggaccaacg

SEQ ID NO: 198043 - RNA, 57 nt, Homo sapiens
ggccaccacagaaacaaaagcaacaaagagggccagagggggcaaacccaaccaccc

SEQ ID NO: 198044 - RNA, 34 nt, Homo sapiens
aagaggcccggggaccagaacagagaagaaagca

SEQ ID NO: 198045 - RNA, 113 nt, Homo sapiens
cgagcccaccaaaagaaacaggacagaacaacaaaagaacagcagagaagggaacgcaaagggggagcgccaggagagaagagacccggccaaaacacagcaagacgggacac

SEQ ID NO: 198046 - RNA, 76 nt, Homo sapiens
aagcaccggccagggcaccggggcccggcgcccgggcccgccccggaggaaggacaggagaaacaggggccaaaaa

SEQ ID NO: 198047 - RNA, 74 nt, Homo sapiens
gccaaacacagaagcagagcccgggagacacacccggaacagggaaagaaaacaagccacccagacaagaggaa

SEQ ID NO: 198048 - RNA, 74 nt, Homo sapiens
agcagccaccagcagcccccagagcgggaccacaggcacccacccgcgagacccccaagagacaaaagaaggga

SEQ ID NO: 198049 - RNA, 78 nt, Homo sapiens
gcaggaaaggccggacaccagacaaaacgaagggagcaccggccagccaggagagaccgacgaaaccagaaacaccag

SEQ ID NO: 198050 - RNA, 72 nt, Homo sapiens
cgacaccacccgcaagaggcccacgcggaccggcagcgccaccggaccaccagacaaggacacggcccaagc

SEQ ID NO: 198051 - RNA, 41 nt, Homo sapiens
gacccccgacgcccacccaggggagacggacgcaaagacaa

SEQ ID NO: 198052 - RNA, 79 nt, Homo sapiens
gcagaagacggggacgcaccacgagaaccaaggccacccaacaacccaccacagagacaaagacacaaggagccaagac

SEQ ID NO: 198053 - RNA, 77 nt, Homo sapiens
gcagaccggccacgccccagaccggagggcccgcggcggggaccacaagcagacgagccaagaaaaggagcaacggg

SEQ ID NO: 198054 - RNA, 67 nt, Homo sapiens
accaagcgaagagcgcggaggggacacgcgcccaccagggggagccagcagccgggagcgccaccag

SEQ ID NO: 198055 - RNA, 69 nt, Homo sapiens
cgggacgacggccccagccagcgacggagacgcccgcagggggggaccgaaccaacggcgacgaaagcg

SEQ ID NO: 198056 - RNA, 81 nt, Homo sapiens
gaagcccggccacggcgccagagccggggacgaaagggaaggacaggcagagcaaacaaggcggcaccccccacgcacacg

SEQ ID NO: 198057 - RNA, 80 nt, Homo sapiens
gccgggcacacaagaaggcaccgccgcgccaggacggcagccagacgagcagggccgcagcaggccgcagcgccaaagac

SEQ ID NO: 198058 - RNA, 84 nt, Homo sapiens
gcaggggagccgagagccacagggagccaccagcgggcagcacaggaccccaccaccagccggcccgcgggccgacgccgccca

SEQ ID NO: 198059 - RNA, 82 nt, Homo sapiens
agacaacggcccaaggcaaagggagcaggagagggcagaagccaacagaaccaacccgcggcaggcgaagggaagaagaaac

SEQ ID NO: 198060 - RNA, 84 nt, Homo sapiens
ggcagagggcggaccccagaccaggcgggggcccgaccgaccccgggcagccccacccacgcacgggacagcgagaggcgggac

SEQ ID NO: 198061 - RNA, 83 nt, Homo sapiens
gcggagagcgaggagaggagcgccccaccaagagccgcgcgcccagccgcgagacaggggccaggccaggggcaggggaagca

SEQ ID NO: 198062 - RNA, 67 nt, Homo sapiens
gcagacggaaacaaggcaacagaaagagcaacagcagggcaacaggagcaggggagagaagacagaa

SEQ ID NO: 198063 - RNA, 74 nt, Homo sapiens
aggagggcccagagccgaggcacaagaagcaaggaagagagacgaagaggagcagaaccagaagggacacacag

SEQ ID NO: 198064 - RNA, 77 nt, Homo sapiens
cacggaccgcgggacaagaaaacagcgaacaacaagaaggagaaagacacaacgacagaagaaaaaacacaagaaaa

SEQ ID NO: 198065 - RNA, 74 nt, Homo sapiens
ggccgggggaccgagcagcgggaggcgccccccagccggaagggcagaggggggaaacggcagagccacaacgc

SEQ ID NO: 198066 - RNA, 66 nt, Homo sapiens
caagagcccccaagaagggagggaggcggggagaagacaggcccaaaaacgcgacggcaacacaag

SEQ ID NO: 198067 - RNA, 62 nt, Homo sapiens
aaggcaggcaccacaaaaaggacagggccgcaagagacaccacaaaaggacacccgagcgcg

SEQ ID NO: 198068 - RNA, 73 nt, Homo sapiens
agccccacggccacacaggaaaaaagaaggcacgaaggccaggagaagcaaaacacagaggaaaagggaaaga

SEQ ID NO: 198069 - RNA, 66 nt, Homo sapiens
cccgggccaggccgcggccggggcaggagcgcagacgaggcgaggaaccaaaggccaccccgccga

SEQ ID NO: 198070 - RNA, 82 nt, Homo sapiens
gagacccgccgccgaggaggcccggggagcgaaggagcgcagcaccagagcagcccgacggccaggaggcgaagagacgagg

SEQ ID NO: 198071 - RNA, 75 nt, Homo sapiens
gggcgggacccaacagagcaggaaaggaggacaaaaggaaaaaaaaaaagggaagacagagaggcggggaaaggc

SEQ ID NO: 198072 - RNA, 69 nt, Homo sapiens
agcccaagggacaagggcaacaaggccggccgacagggaggaccggcgcacaaacaccagagggagccc

SEQ ID NO: 198073 - RNA, 63 nt, Homo sapiens
cccaaagcggccgggagcgcgccccccaccccgagacagcgcaaacgccaaggcgccggggag

SEQ ID NO: 198074 - RNA, 75 nt, Homo sapiens
gaacaggccaagcggccgcaagcaccggagcacacgcgaagaagcacgcccacgacaaagcgacaaccaagcccg

SEQ ID NO: 198075 - RNA, 54 nt, Homo sapiens
agacgcagggcgcccccggaccgcgcgcgcagggaagcaggacggccaaggcag

SEQ ID NO: 198076 - RNA, 84 nt, Homo sapiens
gcggagccccccaagagccggaaaggagaacggaagccagagaaaaggaagagagagcaagagaggccacgcccacgaggcgac

SEQ ID NO: 198077 - RNA, 84 nt, Homo sapiens
caaagaaacaagccgggaaagggacaagaagggcaaagccgaaggggggggagccccccaaaagaaacagcgccaaccaaacgg

SEQ ID NO: 198078 - RNA, 77 nt, Homo sapiens
gacaggaaccccggggagcagaccgcccagaaaaccgcagaccgggccgggccgccacagaacaccggcagagagag

SEQ ID NO: 198079 - RNA, 68 nt, Homo sapiens
acacaaagaggacccgacagacagcacaaacacggaagagaccagcagccccgaaaaagaaccagcca

SEQ ID NO: 198080 - RNA, 75 nt, Homo sapiens
cgcccacacgaagagacgccggagggaccacaagagaccgaaggagcagacgaggcacgagcgccagcgcgagac

SEQ ID NO: 198081 - RNA, 62 nt, Homo sapiens
ggaagaaagagaggaaagaagaaaaccaagaaagccccacggccaggggagagagaaagccc

SEQ ID NO: 198082 - RNA, 90 nt, Homo sapiens
ccagccgacaaggagggaagcggccccagcaccccagcgcgcagggccgccaggggcgccggagaaggcaaccaaaggcaggacacaaaa

SEQ ID NO: 198083 - RNA, 75 nt, Homo sapiens
agccgccgaggagccacagccagcccagcccgccccggcgccccaaccccggcagccccagagagcggaaccgca

SEQ ID NO: 198084 - RNA, 76 nt, Homo sapiens
gccgggagggccacaggaggcggcgggccccgcccgccgaaggaacaccggaaacgccaggccacaagggagcaaa

SEQ ID NO: 198085 - RNA, 84 nt, Homo sapiens
cgcaccaagaccgaaggcagcacaggaccggaaaaaacaacccggaggaaagcccagagggaagcgcaagaagcaggccagaaa

SEQ ID NO: 198086 - RNA, 69 nt, Homo sapiens
accgccccacacacccggggacaggagacagggaaagagaaggcacagggcagagcaacagagacacag

SEQ ID NO: 198087 - RNA, 70 nt, Homo sapiens
aaagaccagacaccaaaggaagcggacgcaccaggacgcggcccccggggagaggaaaccacaacaagcg

SEQ ID NO: 198088 - RNA, 70 nt, Homo sapiens
gaaaagccacgaccgccccagcgacgccgcaacaaagggcaaaaacacagaaggcacaaagcaagccaga

SEQ ID NO: 198089 - RNA, 74 nt, Homo sapiens
ggcagcacgccaggacgagcagagccccccccaccagaggacgggaggagcagcaacagagaaagcaccaaaaa

SEQ ID NO: 198090 - RNA, 39 nt, Homo sapiens
ggagccgagcgggagggcgagcaagccaaggagacacca

SEQ ID NO: 198091 - RNA, 74 nt, Homo sapiens
ccccagaagaggaccgcggagcaagcggcagccacacccggagaaggagccgcccagggacgaagcacccaggg

SEQ ID NO: 198092 - RNA, 79 nt, Homo sapiens
gccgcaggagggagaccacagcaagacaccgggaccccggaagccaaaaagggaaagaaaggcaaagcgagcaagaggg

SEQ ID NO: 198093 - RNA, 79 nt, Homo sapiens
ccgcgaccccccgcagccgccccccccccggaaaaggcccacgccgggcgagaaggaaggcagagcccacaaacccaag

SEQ ID NO: 198094 - RNA, 65 nt, Homo sapiens
gagcccccaggggacggcgaacgcaggcaacagaggagaagaggaagaggaaaccagcaagaagg

SEQ ID NO: 198095 - RNA, 85 nt, Homo sapiens
gcgggcagccccacccacagagcccaacgccaggcccgcgggcggcccgcaaaccccgccgagccgccgagcggaggcgagccgg

SEQ ID NO: 198096 - RNA, 74 nt, Homo sapiens
aaggaagaaacccccagccgacgcccgcgccccccagcaaggaacgggaagggcacaggaagaaaggaccaagg

SEQ ID NO: 198097 - RNA, 94 nt, Homo sapiens
gaaagggacggaagaggcagaggaggcagaaaagaccagaaaagacccagacaaaggagaagaagacccagaagcgcacaagaacggggcgacc

SEQ ID NO: 198098 - RNA, 75 nt, Homo sapiens
ggggccgacgcgcaggccacggggcgaccacgcaagccccggggacacccaccgccggggaaacccagacgacaa

SEQ ID NO: 198099 - RNA, 74 nt, Homo sapiens
agaggccgcaagaggagcaggaggaagggggcagaggccggcgcacgcgcagacccagcaaggagaaaagaagg

SEQ ID NO: 198100 - RNA, 79 nt, Homo sapiens
ggggaccagcgcgccagaagccgacggaacacgaggagcggcccgcgcacagagaccaaggggcccaggcaaggcgggg

SEQ ID NO: 198101 - RNA, 48 nt, Homo sapiens
cagaacacccaggcgacaggggccagaaacagagaggcagaccacagc

SEQ ID NO: 198102 - RNA, 59 nt, Homo sapiens
gaaccagagcaaaacgacagaaagcaagaccaggacagcagggaagaacggaaaccaga

SEQ ID NO: 198103 - RNA, 76 nt, Homo sapiens
cagcagccaaagcagcagaacagaaccggaaagagaaggagaaaacgcgcaaacaaccagaggagccgccggccca

SEQ ID NO: 198104 - RNA, 84 nt, Homo sapiens
ccaggcgaccgagcggccggagccgacacgccagcagcacagaaaggagggggaaaggggaccagccgaaagcccacgcggcag

SEQ ID NO: 198105 - RNA, 79 nt, Homo sapiens
ccgagagaacccccagagcacaccaccggagaggggagaggcaccagcaacagaccaaccgcagcaagcacagagacag

SEQ ID NO: 198106 - RNA, 75 nt, Homo sapiens
ggcaacgacacaagaaacacaaccagacgcagaaaaccaggaaggggcagcaccggacccacaccgagaccccac

SEQ ID NO: 198107 - RNA, 67 nt, Homo sapiens
aacagcagaaaccggaaccacacacaccacaggaagccagggccgcagaagcgagacaaacagcggg

SEQ ID NO: 198108 - RNA, 78 nt, Homo sapiens
aagagacaacaacaaacaaacgcggaccagcaccaccacagccagccagaacagaaggcccgaaccaggcacaaccgc

SEQ ID NO: 198109 - RNA, 87 nt, Homo sapiens
agcgcgccggaggcccggccacccgagaagggagacgacgcgcgggccgcgagcggggcgacccgagggcccgccgagagaaaggaa

SEQ ID NO: 198110 - RNA, 68 nt, Homo sapiens
gcaaagaaaggaaaagccagacgcaccggaacgggaccggcgcggaagccaagcgaaagacagaggcc

SEQ ID NO: 198111 - RNA, 75 nt, Homo sapiens
aggaagccgaggacagggcaaggggagccaccggcccaggcggaggcaaggcgcggccggccaccccaaccccac

SEQ ID NO: 198112 - RNA, 57 nt, Homo sapiens
ccgagaaccgacccagaagaggggagcgacgaaggcagaggccgcgcgaggaacaac

SEQ ID NO: 198113 - RNA, 80 nt, Homo sapiens
caggaacaccccgggaagcgccggggaagcagaagcacagggcacgccaacccagggcggcacccaccccccgagcccgc

SEQ ID NO: 198114 - RNA, 70 nt, Homo sapiens
cccgcacagggagcgggccgcagcaccggggcacccaaggccccccagccccagcgcgcgcgccaggagg

SEQ ID NO: 198115 - RNA, 43 nt, Homo sapiens
gaaagagaaccaggccaacaccgggaaccagggagccggccgg

SEQ ID NO: 198116 - RNA, 75 nt, Homo sapiens
ccccggagggaacccgcccccagggagggaacaaagcccacagcaccgagccaacgcgaacaaggacacggagac

SEQ ID NO: 198117 - RNA, 75 nt, Homo sapiens
aggagaagcacaaaccggcgaagagaaaccagcccggacagcgcaccccacgcggccgacggcaccagccccccg

SEQ ID NO: 198118 - RNA, 73 nt, Homo sapiens
ccgagagccgcccgggccagcggccgcgcacccccggccggaggcaccagcgaaaagaggacacccagagacc

SEQ ID NO: 198119 - RNA, 55 nt, Homo sapiens
gaacaccaccgccaggccaggaacaccggagagccacgagccggggaaaaagggg

SEQ ID NO: 198120 - RNA, 58 nt, Homo sapiens
cccggaggccgggacaccacacgacgggaaccccgggggagaaaaacagcgcgagaag

SEQ ID NO: 198121 - RNA, 50 nt, Homo sapiens
cggaggcgaggcccaaccaggagccggagaccgcggcaaccggcccggaa

SEQ ID NO: 198122 - RNA, 79 nt, Homo sapiens
gggcagccgaccggaccacagccagcagaacgaaaagccaagaaagacccaaaagaccccagaccagaaagaggcgcca

SEQ ID NO: 198123 - RNA, 60 nt, Homo sapiens
aaaacaaccgagggcagagaacacgaaacccgaagaaaggggggccagaaggcaagagac

SEQ ID NO: 198124 - RNA, 68 nt, Homo sapiens
agggccgcgccccccaggcccacaaccagcccagcagcagcaagcagagaccacacacaaaaccaccc

SEQ ID NO: 198125 - RNA, 86 nt, Homo sapiens
gcccgaggcgcgggaggggggaccggcccgagcgggaagaagccgcagcaagccgcagcggcgcgcaccgggcggcccaggaccga

SEQ ID NO: 198126 - RNA, 59 nt, Homo sapiens
cacaaaccccgaagagacgaaaacacacgaagcagacaggacaagcacccggggggcgc

SEQ ID NO: 198127 - RNA, 59 nt, Homo sapiens
ggaaaacaagccagggcccacgacacaagcccccgaaggcaaccaacagcggacaacac

SEQ ID NO: 198128 - RNA, 74 nt, Homo sapiens
cccacagagccaaggcaagaccgccccaaggcccgggcaggggacacggagaaccacggggaccaagaagcgag

SEQ ID NO: 198129 - RNA, 82 nt, Homo sapiens
gcggccgaggagaagcggcgcggagcgaaggccgccgaaccgccggcagccggcgacgaggacgaggaccggagggccggaa

SEQ ID NO: 198130 - RNA, 56 nt, Homo sapiens
caagaaggcggacgacagccgaggcgccggcggcagagcggggagacgagacaacc

SEQ ID NO: 198131 - RNA, 76 nt, Homo sapiens
gaggacccagcacacaccacacaccacggccacaccaccacccaggccacacagggggggcgaccgaggaaaaaaa

SEQ ID NO: 198132 - RNA, 63 nt, Homo sapiens
cgagcgcggccggacgccagcggacacgcgggcgaggcacgcgagaaggggagggggagaaag

SEQ ID NO: 198133 - RNA, 73 nt, Homo sapiens
ggcgcccgcgccggagagagagcagccgcgcccacgacaacacacacagacgccggccagccgacgaggacac

SEQ ID NO: 198134 - RNA, 84 nt, Homo sapiens
aggagagacagggccccacagcaaggaccaaaaggacaagcagggccaagacagccagcaggggcagaagcagcagacggaacg

SEQ ID NO: 198135 - RNA, 83 nt, Homo sapiens
ggacagggccaggaacgacggccacggcccgcagaagcggaggaggcagaaaaagcgcagagagaggagaggcccaccaagcc

SEQ ID NO: 198136 - RNA, 76 nt, Homo sapiens
gagcaccgcaaaggcaccggccgagccacggagcaaggggccaggggcgggcacaagggaagacagcgcccgggac

SEQ ID NO: 198137 - RNA, 68 nt, Homo sapiens
agggagggaggggaaagacccacaccaagagcccgagagagacgcagcgcaaggccgggggaggccac

SEQ ID NO: 198138 - RNA, 36 nt, Homo sapiens
cgccagcggagccccgagagcaacgaaaggcaccgg

SEQ ID NO: 198139 - RNA, 74 nt, Homo sapiens
gcggggggacgcgccaggcacagcagcaggaccgaaaagacgcggccccaaaggaaacacccgaagaacacagc

SEQ ID NO: 198140 - RNA, 82 nt, Homo sapiens
gggcaacagaggcagcgggacccgcggaagagccccgcccgggacacccgggcaggagggcaccagaacccagcgggcccag

SEQ ID NO: 198141 - RNA, 77 nt, Homo sapiens
gaaggggcagaggccaagagcccaacaccacccgagagccccaaggagaaaagcagaagcccaggacgcccggcacc

SEQ ID NO: 198142 - RNA, 75 nt, Homo sapiens
gcgcggcggaggacgaggaagaggggcgaggcagaccgccccgggccgcggccgccgagacacaagcgggacgga

SEQ ID NO: 198143 - RNA, 70 nt, Homo sapiens
gcccccaggagcgggaacagaagaaaaaggcgcagcaggcaagagcgaacaagcagagccccaaaccaca

SEQ ID NO: 198144 - RNA, 47 nt, Homo sapiens
aaaacgcacagggggcagcaggagacaccaaaggaggcaagcaaaga

SEQ ID NO: 198145 - RNA, 52 nt, Homo sapiens
cgcccaccggcccgcgccgcccaggccccgcaggcggggccccgggccgcac

SEQ ID NO: 198146 - RNA, 97 nt, Homo sapiens
aaggaacaagggaaagagccgggaaggggcagaacagcagacgacagagagagggggaagggccaaaagaggaagaggcgggaccaacgggcagagg

SEQ ID NO: 198147 - RNA, 61 nt, Homo sapiens
gacgaggggcccgggcccagagcggaagacaagacgaaccaaaggcagacccagaagagca

SEQ ID NO: 198148 - RNA, 75 nt, Homo sapiens
gcccgaacacacaccgacaacgcaaggagggacaggacggaaggagcggaggaagacacaagagcgagcgaagaa

SEQ ID NO: 198149 - RNA, 58 nt, Homo sapiens
ccacagccagcacggaacgcgcagccacacaggaaagaagcaaacaccaccccggccc

SEQ ID NO: 198150 - RNA, 76 nt, Homo sapiens
agccggcggggagcaaacacccaccagcaccagcacgaaggcgacggggccagcaggagggagggaacgcaaagac

SEQ ID NO: 198151 - RNA, 76 nt, Homo sapiens
cggccagggacgacccccgggccagcgaagcggaggcggccgcgccgaggacagggcccaggacaggcacacaggg

SEQ ID NO: 198152 - RNA, 97 nt, Homo sapiens
gccggacccgaggcagccgaaagaacgcaggaaggagaaacacagaacggcggccaaagcgccagacaagggccgagccccggagagccccccgcaa

SEQ ID NO: 198153 - RNA, 79 nt, Homo sapiens
gaaaacagaaggaaagaaggaacggagaaggcaaagaaggaaccagccacacgaggaagcagcagcgcagcaaaggaag

SEQ ID NO: 198154 - RNA, 62 nt, Homo sapiens
agcaggcggagagacacgccaggaggagagagcaaaaggcggagaagccacccgaccaaaaa

SEQ ID NO: 198155 - RNA, 69 nt, Homo sapiens
cagggagccccagacccacagaaagaaacccgaagacaacacacagagacacccgccaaaacgagagga

SEQ ID NO: 198156 - RNA, 58 nt, Homo sapiens
ccgagccggcgccaagagcgcacagcgaggaggggggcgcgcagcccggggacccccc

SEQ ID NO: 198157 - RNA, 73 nt, Homo sapiens
caaaccagcaagagcaaagggggaccacaggcagcagcacaaaccagcaccaggaacgggaccccacccccca

SEQ ID NO: 198158 - RNA, 73 nt, Homo sapiens
gcaaaccacgaggacagagaagagagaagccaccagcaaaagccgggcaaaagacaggagaagaaggagaggc

SEQ ID NO: 198159 - RNA, 65 nt, Homo sapiens
gcccccaagcggggagacagcacaaggcagggggaaggaaaggagagaacaaggagcaggccaac

SEQ ID NO: 198160 - RNA, 77 nt, Homo sapiens
gggaaggggaaacccaaacaacacccgcaccgggcgccccgcagggagcaacagcgagcaacaggcaacgaaaacag

SEQ ID NO: 198161 - RNA, 81 nt, Homo sapiens
ggaagagccgggcagcccggagcgggccagagcggcgggaggggaaggagcagccacccgggcagaaaggccgggcgaagg

SEQ ID NO: 198162 - RNA, 73 nt, Homo sapiens
ggagacccgacggagcagacagaaggggcaccagccgaagccaggcaagcaagaaccaacaagaagaccccaa

SEQ ID NO: 198163 - RNA, 86 nt, Homo sapiens
cgcccccgcaccagggcaccgcaggcggacgcgcacagaaaggacacccagagcccaggaacgaccagcacaagaagacagccgac

SEQ ID NO: 198164 - RNA, 56 nt, Homo sapiens
cagaccgaagcgggaagacgcaaagccaacaagagaccacgagagacgggcaccgg

SEQ ID NO: 198165 - RNA, 83 nt, Homo sapiens
agcgcgaaacgcacgagaaggcccacccccccacgagcacaaaaaaccccacaccagccagaccaacaccacaggacaaccgc

SEQ ID NO: 198166 - RNA, 77 nt, Homo sapiens
aaagccacaaaggagcgaccgaccaaggagggggcagcaaagaagaaagaagaggaagacccagaaacagcaggagg

SEQ ID NO: 198167 - RNA, 77 nt, Homo sapiens
ggcgacccgcacagccgcaccccaacccccagggacgaacagcggggacgccccagcagaccgcccaggagaggaaa

SEQ ID NO: 198168 - RNA, 77 nt, Homo sapiens
cgccaagccccgcgagcgcacgccaacgacgaggaccgacgcagaggggaccacaaacaggcccaccggagcagcag

SEQ ID NO: 198169 - RNA, 72 nt, Homo sapiens
ccgccgaccccccggcgccgcgccggcggcggcccaggcccccgcgcgcgcgaggccagccaggcccagcag

SEQ ID NO: 198170 - RNA, 77 nt, Homo sapiens
cacgccggggggcaaaggcacgcagacacggaggcccagcacaaagggaaggcacccacaccaaggaggagcacccc

SEQ ID NO: 198171 - RNA, 79 nt, Homo sapiens
gagggcccgggcgcggcggcgggacaccgagcccggggaggggccccgcgagagccgggcacaaagccagcgagcgaaa

SEQ ID NO: 198172 - RNA, 68 nt, Homo sapiens
cccacccggccccaaagagggcaaaccgacaaaaacccccaccgcagaggagccgccgcgcccaggcg

SEQ ID NO: 198173 - RNA, 65 nt, Homo sapiens
aagacagcagagcagaaaggggaagaggaagaagcaaagaggcagggcaccgcgcgcccaaagcg

SEQ ID NO: 198174 - RNA, 79 nt, Homo sapiens
gagcgagcaagaacaagaccaccggccacacaagccagcaacagcaagaaacaagcaaaggggacaacgcaacaaagcc

SEQ ID NO: 198175 - RNA, 83 nt, Homo sapiens
gccaagcgccggagcaaggaaggaaaaagaggccacagaaggccagcagacaaagagcccaggacaccacagacagacaagag

SEQ ID NO: 198176 - RNA, 71 nt, Homo sapiens
ggagcagccacagggcagaccccggccaaaggggccggagaaaagaaagcaaccagcaacagcaggaagac

SEQ ID NO: 198177 - RNA, 71 nt, Homo sapiens
caaaggcggcggaggggcaggaggcgcggacacgcaaaccacacaagagccaacacccgaagcgaagggcg

SEQ ID NO: 198178 - RNA, 73 nt, Homo sapiens
ccggaggccagacaaggaggaccgcacgacagcggcccgcggaaagcacgaggccaagggcggggaaggagcg

SEQ ID NO: 198179 - RNA, 64 nt, Homo sapiens
ggagagcccacagggcaaagagagcagacccgaggagcccgcagcacccaccaaggcccggagg

SEQ ID NO: 198180 - RNA, 72 nt, Homo sapiens
agaaacaaagaaaaccacggaaaagaaaagaaaggagaaacgaaacacaagggcaaggaaagcagcccgagc

SEQ ID NO: 198181 - RNA, 80 nt, Homo sapiens
gaaaaggcgacgcagcacagcacagaggggcaagaaaagcagcacgaagcaaaaacccacacaaaaaaagagggagcgaa

SEQ ID NO: 198182 - RNA, 83 nt, Homo sapiens
gagagagagaagaaagggagaagcgaggagacccacaaaaaacgaaggcagagacaccaacaccggggaagggaaaggacacc

SEQ ID NO: 198183 - RNA, 96 nt, Homo sapiens
aaggcaggaccacacggacgcgccagcaagccggccaaacaacaagcagacccaacagaggaagccgcaagaaacgggacgacaggaaggccagag

SEQ ID NO: 198184 - RNA, 52 nt, Homo sapiens
ggcggcgagagaggggaggcaagcaggggggcaaaggaaagaaggcagaaag

SEQ ID NO: 198185 - RNA, 76 nt, Homo sapiens
cagcaccagggggcacagaacaccgcgccaagccgacgccagcgggcgccacccaacaggcgcaccgcccacggcc

SEQ ID NO: 198186 - RNA, 75 nt, Homo sapiens
cggggaagaaaagggaagccaagaacagcaacgacccaaaggagaggaaggaacaagagccgccggcccaggcgg

SEQ ID NO: 198187 - RNA, 91 nt, Homo sapiens
cgacgcggaccagaagccagagcgaggacgccggcagcaccagaacgcacaccaccacggcaggaccaagggcagcaagccaccacgcggg

SEQ ID NO: 198188 - RNA, 94 nt, Homo sapiens
aacacccccagcggccagcggaggcacccaccacgggccaggcgggccagaggcaagccgcgggagccacgccggaacacggcaccagcccgag

SEQ ID NO: 198189 - RNA, 85 nt, Homo sapiens
cgcggcacggcccggggccgggagcgcccgaggaacacgccgcagaacgcagacccagcagcccagcgccgagcgcagggacaga

SEQ ID NO: 198190 - RNA, 77 nt, Homo sapiens
cccgcgccgcgggaccccggcacgcccaggccgagcacgagccgagaaagggcacaacccaggaagacaaaaccaag

SEQ ID NO: 198191 - RNA, 77 nt, Homo sapiens
cacgacacggccgcacgggcccacgccagaagcaggagaagaggcgggccgaccacaccaagcgccacaaacaagac

SEQ ID NO: 198192 - RNA, 38 nt, Homo sapiens
accgcaggaggacgcagacggaggagaggcggcaccca

SEQ ID NO: 198193 - RNA, 75 nt, Homo sapiens
caggacgaagaccagcgccagggaaagaaggcgaagggagggccgccccaaccgacgcaccagccggaggaggag

SEQ ID NO: 198194 - RNA, 74 nt, Homo sapiens
ggagcagcccggaagcggggccaaagccgcggacaggcgggcacagcgaaggaggagcccggagacacacaggc

SEQ ID NO: 198195 - RNA, 85 nt, Homo sapiens
gagagaacgaggaggaaggagagaaaaggcgccacggggagaacagcagcgacccgaaccgcagacggagaacaaaggcagcggc

SEQ ID NO: 198196 - RNA, 83 nt, Homo sapiens
agaacggaggcccaccgagccagcgaaaaggaagagcccgagggccgcagacccacgcgaccacgggagggagaagaaacaca

SEQ ID NO: 198197 - RNA, 50 nt, Homo sapiens
cggggggcgcccaggccggggggggcacagagccccggaagacagccccc

SEQ ID NO: 198198 - RNA, 95 nt, Homo sapiens
ccgcgggaccgaggccgggccccgggaaagaccacagcaagaccacgcccccagccgggggaccaggccgaacgacccggacacaaaggagggaa

SEQ ID NO: 198199 - RNA, 83 nt, Homo sapiens
aagcaggccaagccccagcacccaagcggacgaggagcgcgccgccgacggggccccgagcacgaggccaccagcgggagagg

SEQ ID NO: 198200 - RNA, 46 nt, Homo sapiens
ggagccaggcccggaagaaacaagcacaggagggagcaggaaaaag

SEQ ID NO: 198201 - RNA, 65 nt, Homo sapiens
cggggaccggacaaccccccaagaagccggggcccaccagccgagcagacagaagacaggggccc

SEQ ID NO: 198202 - RNA, 56 nt, Homo sapiens
cggcaagacgggggaagccccggccagaacgaggagcccgagagacggggcaccgg

SEQ ID NO: 198203 - RNA, 80 nt, Homo sapiens
gccggagccgggccgggcagcagcagggcgccggcagaaaacacagagaaaacacggagaaacagcaacaggagaaaagg

SEQ ID NO: 198204 - RNA, 73 nt, Homo sapiens
cgaggccccgacaggcggcgcacggaaacagccacagcagacgaaccgagccaccgcaaaggcagacagcacc

SEQ ID NO: 198205 - RNA, 37 nt, Homo sapiens
caaacgcaaacgggaacgagacgaggacgcgcacagg

SEQ ID NO: 198206 - RNA, 68 nt, Homo sapiens
aaaaggcaacaccggaaaacaccccagaggaaccagacgccgggacacaaaagaccaagaagagggca

SEQ ID NO: 198207 - RNA, 72 nt, Homo sapiens
gagagacagagggaaccggcagggcaagcggcgacacacgacgggacccggacaggaccacccaaagcaaga

SEQ ID NO: 198208 - RNA, 85 nt, Homo sapiens
agaaaacagaaacgaaacagaacagagagaagcccagggcgccccagaacaaaccagaagcagaagggaggaaaaaagaaaacga

SEQ ID NO: 198209 - RNA, 77 nt, Homo sapiens
aaagggggcgccaggagggcgacaaggcaaagaaccgaagacgacccaaaagggaccaggccagaacacagcagaaa

SEQ ID NO: 198210 - RNA, 68 nt, Homo sapiens
acaggcccacggagacaccggacaagcgggaaccgggaagcagcacgaccagacaggccaagaggaag

SEQ ID NO: 198211 - RNA, 60 nt, Homo sapiens
ccggcagaaagcaaagaagcgggagaagccggaagggagcagggacggagaggcaggcga

SEQ ID NO: 198212 - RNA, 81 nt, Homo sapiens
ggcgcgggggcccgagcaccccaggagaacaccaaggccagccaccaacggacacaagcggaagggcgggcagcagcggcg

SEQ ID NO: 198213 - RNA, 85 nt, Homo sapiens
cggcgcggaccccgcggcgccgccgcccgcagccccgagaccgcagcacaagagggccagggaccaggggacgcccaagacggcc

SEQ ID NO: 198214 - RNA, 72 nt, Homo sapiens
agacgacgaggagagaggagcccccccgccaagggacggcaaagcccacacagaagaagaggagggagaacg

SEQ ID NO: 198215 - RNA, 74 nt, Homo sapiens
ggaaacgggcgaagcgacgagccgcgaggagggagaaccccaccaccacaaggggggaaggagaacaagaagac

SEQ ID NO: 198216 - RNA, 73 nt, Homo sapiens
cacacgccgccaccgggaggcccagggaaggacgcaggagaaagaggagaaaccacgcaaggcaggaaagggc

SEQ ID NO: 198217 - RNA, 74 nt, Homo sapiens
cacggcagcggggggcgccccgcgccaccgcggcccgcgcaggagaccgaggaaaaccaagcaccgacggaaac

SEQ ID NO: 198218 - RNA, 82 nt, Homo sapiens
aaaaagccagagccaaaaaaacggcggaaaaaagcggagaagaggaccaggaagaaacaggcccgccagcaccgacagcaac

SEQ ID NO: 198219 - RNA, 74 nt, Homo sapiens
gcggggcccgggcccagaaggcgagaccagagacgagaagcgagccacgaagagaagagcccaaggccccacca

SEQ ID NO: 198220 - RNA, 56 nt, Homo sapiens
cgccgcgccacagcagggaaaacagacggagggaagggagccgggcccaaaaaacc

SEQ ID NO: 198221 - RNA, 63 nt, Homo sapiens
acaaggcaaacgagggaaacaaccaaggcccagcagacaccaggaggaggacacagaggacga

SEQ ID NO: 198222 - RNA, 70 nt, Homo sapiens
ccaaaggccgccaggccgcagacgcgaaggaacggcaaagaaccggagaagcacaagggggccagcccag

SEQ ID NO: 198223 - RNA, 73 nt, Homo sapiens
aacaagcgcacgaaacacgaaaggcaggacagggacaagcgcacagcggagaaagcagcgcggccaggaggcg

SEQ ID NO: 198224 - RNA, 99 nt, Homo sapiens
gaggagccccccgcccggcagcgccccgcgagaacacacagggcccggcaaaacacaggaggagggcacagcgggaagaaccggcgccgggaaaccggc

SEQ ID NO: 198225 - RNA, 54 nt, Homo sapiens
ccggaggagggcgccggggcgggggaagagggaaaggaagggagggcaggaagg

SEQ ID NO: 198226 - RNA, 98 nt, Homo sapiens
ccaggagggacccaggacccaagaaaacccgcgagagaccaagagaggcggcaggacagcagaccacagcccggcaggcccaaaaacccaaagggaca

SEQ ID NO: 198227 - RNA, 73 nt, Homo sapiens
cagccccccaacaccgcccgccaggacgacgagaagacagaggagccagaccaagagacagcacaggcgagcg

SEQ ID NO: 198228 - RNA, 84 nt, Homo sapiens
acgccggcccagcgcgccggcgcaggaggccgcccaggaccgacccgcgcacagccagggggaccccagagcagcggcacgcac

SEQ ID NO: 198229 - RNA, 70 nt, Homo sapiens
ggcagggaggagaccggcacccagacaggggcgacggcagaggaggcgcccgcgccggcagaggaggcga

SEQ ID NO: 198230 - RNA, 80 nt, Homo sapiens
gcgcgaaggccgggacccggccccggcccacaggggggggcaaacccgagagaacggcggaacacgggcaacgggggaag

SEQ ID NO: 198231 - RNA, 70 nt, Homo sapiens
cagaagggaaggaaaagggcagaacagagaagaacccaaggaaagaccggaaagaaggaagaaaagacac

SEQ ID NO: 198232 - RNA, 77 nt, Homo sapiens
gcagcgccagaggcggcacggccagcggcaccacccccagcaccaccccagccccgcgcccgcccaagagacaacca

SEQ ID NO: 198233 - RNA, 84 nt, Homo sapiens
gcacaacaagaaaaagaagcgaggacacagaccgaacagacagcagggaagaacggaaaccagagaaagaaacgcccccacaca

SEQ ID NO: 198234 - RNA, 100 nt, Homo sapiens
gaggccgagccgggaccaggcccgggggcggcggccacgccaaggacgggagaccgcaagcagagcgacaagcaacgcaaaaacaggcggggcgcgcgcg

SEQ ID NO: 198235 - RNA, 81 nt, Homo sapiens
aagcaggacggaggagcgaccaccggcccccagcacaagggggcaccaggcggagaaggacgccacacgcagggacccgca

SEQ ID NO: 198236 - RNA, 71 nt, Homo sapiens
gcgaggcgggcgggccggcgagcgcagcgcgaccgggaggcccagacagacaagagaagagaggaaaagaa

SEQ ID NO: 198237 - RNA, 74 nt, Homo sapiens
cggacccaaaggccagcaagagccgggaggaagccggaacgggggacaggcgagaagcgccaaaggcaaaggca

SEQ ID NO: 198238 - RNA, 79 nt, Homo sapiens
accacaacgacaccgaaccaggccaagaagcggaaaggaaggaaaagcgggggagcaggaacgggcaaggggaccggga

SEQ ID NO: 198239 - RNA, 72 nt, Homo sapiens
gcgaccgggccggggagccggcaggacccgaagacgagacaacggcaagcggagaagagcaaggccgaaccg

SEQ ID NO: 198240 - RNA, 71 nt, Homo sapiens
accacaaaacacgaagaggaagccagccaggaggagaacacggaccaggacgaacccaaacggaggacgac

SEQ ID NO: 198241 - RNA, 80 nt, Homo sapiens
ccggggaccggacaaccccccaagaagccggcggcgaagaggaaaaaaaacagaacaggaggggagagggcaggaaccac

SEQ ID NO: 198242 - RNA, 83 nt, Homo sapiens
gcagacaccacaagaaggagagcagagacccagggggcagccagcacgaaaacgaggagcgcaaggcccggcggagcaggcag

SEQ ID NO: 198243 - RNA, 83 nt, Homo sapiens
ccaagcagacggaagcccccggacagcacaggcccgagcgaaacagaagaccaccgaacaggaggcagaacgggcgcaaaaag

SEQ ID NO: 198244 - RNA, 78 nt, Homo sapiens
gcggagccggacccagcgccggcccccaggcgaagaagcgcagccgcaccggccaagggggaacgagaacgcagccac

SEQ ID NO: 198245 - RNA, 74 nt, Homo sapiens
acggagcgggcgacgagcgacccgggagacacgacggaaagcgaagccaacaaagaaaggaccggggcaaaacg

SEQ ID NO: 198246 - RNA, 72 nt, Homo sapiens
ccaagagagaaaagccaaggaccaccagaagacaagaggggcaggaacacccagacaggggaagggaaaaaa

SEQ ID NO: 198247 - RNA, 90 nt, Homo sapiens
cggcggcggcggcagcgggcgggccccgagagcagcagcgggcacacgggccacagaggaccagcaaggagaagaaaggagcagcacaga

SEQ ID NO: 198248 - RNA, 85 nt, Homo sapiens
agaagcggcgcaaaagggcaagggaccaggggccgaaccccccacggaaaggacgaaagaaagaagcagccccagaaagaaggac

SEQ ID NO: 198249 - RNA, 74 nt, Homo sapiens
cagaaaaaggacagaagaacacgaaaagaggccgagaaaggacccccgccaagaggccaaagaagaacaggaac

SEQ ID NO: 198250 - RNA, 122 nt, Homo sapiens
ggagaaggaggaggcggcgaacacaaaaggcgccgaagcaggacccgaagccaaaccaggaggagagcagcaccagcagaagagggcccgaccacggcaacccagaggcgaagcaggacacc

SEQ ID NO: 198251 - RNA, 40 nt, Homo sapiens
ccccaaaccaccagcgaagaagacgaagcacagccaacac

SEQ ID NO: 198252 - RNA, 55 nt, Homo sapiens
gagcgcggcgccggggcggggcccaggagacggaggagagcgagcgacgggccag

SEQ ID NO: 198253 - RNA, 62 nt, Homo sapiens
cgcagagcaagcgcggggaaccaaggagacgcccggcacgcagaacaaggaagccccccaga

SEQ ID NO: 198254 - RNA, 74 nt, Homo sapiens
cgccccggggggagccaccgggagagccgagcagccccagcaggacggcggacgaacccaaccccagagacaga

SEQ ID NO: 198255 - RNA, 80 nt, Homo sapiens
gcccccaaaggcgagaacaggaggagcagcagcgccggccgagccccaagccaacaagcagaacccccggcccccaccag

SEQ ID NO: 198256 - RNA, 76 nt, Homo sapiens
ccaaccgcccgggcccgccccacaggagccggacacgcagacagcaagggaaagacaaggagccgggccgagaaac

SEQ ID NO: 198257 - RNA, 50 nt, Homo sapiens
ccgggaaaggagccggccggcggcaaagcccacacggaacaagcaccgaa

SEQ ID NO: 198258 - RNA, 69 nt, Homo sapiens
gggcgagcgcccgagggagaaaaccaccaaaaaaagaagaagaaaacacggacgggcgcgaggcaacag

SEQ ID NO: 198259 - RNA, 68 nt, Homo sapiens
acccgacaagaagcacgaacagcaggccaaagaccagagccaaaaccaaccaacaacaacgaccggcc

SEQ ID NO: 198260 - RNA, 71 nt, Homo sapiens
agaccgcagaggaagaaagcggaaagagcgacaaacaaagaaagacggacagaagaccacagaaacagcca

SEQ ID NO: 198261 - RNA, 73 nt, Homo sapiens
ggagcaaggccacaggacagacagaaggcgcggccgaacccagcgagaaaccaggaaccaccccgggagccga

SEQ ID NO: 198262 - RNA, 61 nt, Homo sapiens
ggagcgcagcgaccacaccgaaggccagcaacagcccaccaaggacccagaaacaaagccc

SEQ ID NO: 198263 - RNA, 106 nt, Homo sapiens
cgcaagaccacacaccagccggacggcggggccgggcccccggccgcaagcagaagacgaccccgacgcaggccaggagccgcggacagaagccgagcacggccga

SEQ ID NO: 198264 - RNA, 85 nt, Homo sapiens
aggggccaagccggcacaccgaggccggccgccccgccgcgagcccaagcaggagcagcaacacgccggcgcccaaacccaaggc

SEQ ID NO: 198265 - RNA, 81 nt, Homo sapiens
aaggaaaggaccagcgaagccaccaagggcccagcacagaagacagcacgccaccagaacagagacgaaaaaacacagcag

SEQ ID NO: 198266 - RNA, 67 nt, Homo sapiens
ggaaaccggacagagagcgcacacaccaaaaccgaggaacagacagccagagagcacgcgcccaggc

SEQ ID NO: 198267 - RNA, 40 nt, Homo sapiens
gaaagcaacagggacgagaaaccgaagaagcacgagggaa

SEQ ID NO: 198268 - RNA, 71 nt, Homo sapiens
acgcaccgaagcaaaaccaacgcaaccaccccaggccaagaaaaaacagaacaacaagagaaaaagaggaa

SEQ ID NO: 198269 - RNA, 79 nt, Homo sapiens
agagcaccggcgggagcgggcaccggcgaggggcgcggaggcgcggaggcaggggccgggagaggaaggccccaagcag

SEQ ID NO: 198270 - RNA, 57 nt, Homo sapiens
gagaagagaagagaaaggcccggagacgaggacggaagacacgcggggcaccgggaa

SEQ ID NO: 198271 - RNA, 73 nt, Homo sapiens
ccccggcgggcacagaggaacacaccccaaaacggcccacggccgggcccaccagcggcgccaccgcgacgag

SEQ ID NO: 198272 - RNA, 76 nt, Homo sapiens
agacaggaggcagagccaaacacccaggccccccagagaagcccgagaccaggacaggaaaaacgggaagagagac

SEQ ID NO: 198273 - RNA, 80 nt, Homo sapiens
ccgaaacgaggcgggagcagcacagacacgcacgagaacccccagcaacccaaccgaccggagaacgaggagccaacaag

SEQ ID NO: 198274 - RNA, 91 nt, Homo sapiens
ccggcagccacccgccaacggagcgcagcggaggaagcgaaccggcgaagcgccccccccaacccaacggcaccaaggaagagagaaggga

SEQ ID NO: 198275 - RNA, 79 nt, Homo sapiens
gaaaagcaaaagaagacggagagggcccaccgaccacaagcaccggagcaagagacacgcccccgggccaccaggggag

SEQ ID NO: 198276 - RNA, 71 nt, Homo sapiens
cacgagcccggcaaaagcgcacaaacgcccaagacgaagaacggaagcgccccagaggagagggcggagag

SEQ ID NO: 198277 - RNA, 63 nt, Homo sapiens
aaaggacgaagggggaagacaaaaaggcagggagaacgagccgcggggacggagggcaccccc

SEQ ID NO: 198278 - RNA, 65 nt, Homo sapiens
gagcaaagaacacgggccacagggccaacggagagacggcagagagaacagcaaaagagcagaga

SEQ ID NO: 198279 - RNA, 75 nt, Homo sapiens
gggcgggacgggggggcggcccggccccgcaggcccggcgagcgaccgccgggggaacgcccgagcggagcagca

SEQ ID NO: 198280 - RNA, 84 nt, Homo sapiens
cagaggagaccacagagaagacgagacgcaccgcagccggaggagcggccgagggacaccagcagcgccgccggaccaccgggc

SEQ ID NO: 198281 - RNA, 76 nt, Homo sapiens
ccaggccccgggagcgcccaccacgccgcgcccccagcagccggaagggagaccccccgaggaagcgaaggcagaa

SEQ ID NO: 198282 - RNA, 74 nt, Homo sapiens
cgcagaccgcagaaggccggagacaccagcagggcggagaacggaaaagcaccaggaagcagagaggaccgcag

SEQ ID NO: 198283 - RNA, 85 nt, Homo sapiens
gcggcggcagcgggacagggcgggagcaggagcgggagccggggcacggggagcgcggccacagacgcacaggcagagacacaag

SEQ ID NO: 198284 - RNA, 103 nt, Homo sapiens
ggcgcacacagggagaacagagggccacacagcgccaacagcgaacgcaccgaacaaggaccccacaagcgaccggcaaagcgccagagaacaacaaaggagg

SEQ ID NO: 198285 - RNA, 56 nt, Homo sapiens
cggagcccggaacacccgggcgcgccgagcgaaggaagagccaggaaagcaaaagg

SEQ ID NO: 198286 - RNA, 83 nt, Homo sapiens
cagaagacagagaggaagagagagccaggacaaacagagcaacgaacagcaggacggcgggggcagcagacacagagaagcac

SEQ ID NO: 198287 - RNA, 67 nt, Homo sapiens
gacacaggcaaaagggaagcacaaacacgaaaccagacagcaggggaaaacaaagcgagggaggcgg

SEQ ID NO: 198288 - RNA, 76 nt, Homo sapiens
gcgaacgacggaccgccccagggcacggcaggcggacccccgggcaggacaggagacggaagggccacagggggcg

SEQ ID NO: 198289 - RNA, 68 nt, Homo sapiens
gaggcccacagaaaagccacaacccagcaccgagaaggcagggaacagggcagcaacccgcgggcccc

SEQ ID NO: 198290 - RNA, 64 nt, Homo sapiens
gaggagagcgcggagccgcgcccccggacgccgacaccccaggccacgagccccaggccacggc

SEQ ID NO: 198291 - RNA, 83 nt, Homo sapiens
aacccgcgaaagcaggaaagggcaaaagcggcaaagggaaaaaggcgggaaagggcagacaagaacaaagcgcgccaagggga

SEQ ID NO: 198292 - RNA, 76 nt, Homo sapiens
gggacgagagcgccacacacaagacaacgacgaaagacccacagaagcgcgccgggcgcagaggacaggcacacac

SEQ ID NO: 198293 - RNA, 74 nt, Homo sapiens
caaggaccaagagaacaagggaaccagccaaaagggaacacccaggcaggccgaagccggcagcaaggcgcggc

SEQ ID NO: 198294 - RNA, 83 nt, Homo sapiens
cgaggggaacgcaacccaagcaacgaacagaaagaaccaagagggagacaagggaaaaggaagacaaaaaacacaaggaaaga

SEQ ID NO: 198295 - RNA, 35 nt, Homo sapiens
aaaacaaagaccaaagaggagacacgggaagccga

SEQ ID NO: 198296 - RNA, 44 nt, Homo sapiens
gggagacacggccagacgcccccaggaaggccgccaaagcccaa

SEQ ID NO: 198297 - RNA, 60 nt, Homo sapiens
cgcgcacaacgcaggaccggcgccgaaggcccgccagggaccggaggggggagaagaaaa

SEQ ID NO: 198298 - RNA, 67 nt, Homo sapiens
gacaagaaaccaggcagaaggaaggaagggaacacggacgacgagacacgaccaacacaggcgacca

SEQ ID NO: 198299 - RNA, 71 nt, Homo sapiens
gacagaacagagaagaaagggaacaggggagcaccaggacaaaagaagggcagcacaaaggaaagccccaa

SEQ ID NO: 198300 - RNA, 75 nt, Homo sapiens
cggcacgacaaggcaagaacaagggagagccggcgcaaaaccggaacgacagcgaaacagagaacggaagacaaa

SEQ ID NO: 198301 - RNA, 69 nt, Homo sapiens
gggggcacggggaggcgcagcccgaaggccccgggcaaagcggacaccgggccccgacaagggaccggg

SEQ ID NO: 198302 - RNA, 70 nt, Homo sapiens
caaagagaggagagcgaaaacaggccaagaggaagaaaacacgcagccacaagaagacccggaaacggaa

SEQ ID NO: 198303 - RNA, 83 nt, Homo sapiens
caaggagggaaccggagacacagcagggacaccggacccacccgggcccacaccccggccggagcggagagccgaccacagga

SEQ ID NO: 198304 - RNA, 76 nt, Homo sapiens
aggacgccgggacaccggaagccgagaaagagaccacgcccaccccgggcccaacgaccccacggcccccaaagcg

SEQ ID NO: 198305 - RNA, 73 nt, Homo sapiens
ccgcgcacaggaacgggaagagaggggaaaggagaaaggaccgcacagacccccaacaccacaagacagagcc

SEQ ID NO: 198306 - RNA, 76 nt, Homo sapiens
aggacacaccaaaaggaggcacacgcagagcaggggaagagaaagaagggaaaaaccagccgggcgaaaagcaagc

SEQ ID NO: 198307 - RNA, 69 nt, Homo sapiens
ggaagaggggccaaccggaccgcccccaacaaccagcaaagcgaccagaaaagaggcaagcaagccgga

SEQ ID NO: 198308 - RNA, 68 nt, Homo sapiens
ccagcccgccgccgcacaggcggagcagggagagcaggaccacacacggagggaggcaccaggccagc

SEQ ID NO: 198309 - RNA, 79 nt, Homo sapiens
aacgccagcaccgacggccagcccagaacccacccacacagaaagccagggccggagggagaacagagcggcccccccc

SEQ ID NO: 198310 - RNA, 68 nt, Homo sapiens
gacagccagagacagcaaaaaagaaccccgccaaagccaaacgaaagggccaaacgaccaggagcaaa

SEQ ID NO: 198311 - RNA, 68 nt, Homo sapiens
gccgcagcaacggcaccccaccacgcagccgaagagcaggacagagacaggcccagggaaggcccccc

SEQ ID NO: 198312 - RNA, 72 nt, Homo sapiens
gccaggaacaccaagcggacaagccacaccgcccggaccaagggcccaaggaccaagccgacacgcaccgcc

SEQ ID NO: 198313 - RNA, 76 nt, Homo sapiens
aaagcgccaagcagggacagagcggagaaagcgaccggaccggaccaaaccagagacaaaaggcacagccagaacg

SEQ ID NO: 198314 - RNA, 85 nt, Homo sapiens
gagccccagccagggaaccacggagcacgagaaaacggcggggacacaaccagagggaagcacgcccgggcacagcggaagagac

SEQ ID NO: 198315 - RNA, 72 nt, Homo sapiens
agcacagcaaaaagcagagcggaaggccaaagacagacgggcccagcacacagggacaacgccaggggcaca

SEQ ID NO: 198316 - RNA, 79 nt, Homo sapiens
gaaccgaggagagacacggaccaccacgcccggaagggaaagcgaagaagcaggaaaaagaaacacaagacggcaaaaa

SEQ ID NO: 198317 - RNA, 65 nt, Homo sapiens
ggggaagccagaacacgccaaggcaagaacccaggccgccgagaggaggccaggggaaagagccg

SEQ ID NO: 198318 - RNA, 65 nt, Homo sapiens
agcccggcccggcagcgacaggaagacaagggaggcgaggacggacaaaaggaaacggacgggag

SEQ ID NO: 198319 - RNA, 57 nt, Homo sapiens
acaaccggcgggccgaggccgcaggaggagggagggaggcccaagcagccccaaaaa

SEQ ID NO: 198320 - RNA, 69 nt, Homo sapiens
ccgacgagcagccccgagaccccagagagggagcagaggggaaaaggaccacgaaccaggaagggacag

SEQ ID NO: 198321 - RNA, 43 nt, Homo sapiens
agcgggagcgggcgggccaggaaaggaagccgaagacagaaga

SEQ ID NO: 198322 - RNA, 80 nt, Homo sapiens
cagacccagaggccaacccaaagaaggagcgcaaggaacagcaagacaagccgcaccaaagacaaaagcaaaagggcaga

SEQ ID NO: 198323 - RNA, 75 nt, Homo sapiens
aagaggaagcccaccacaaaaacgaaggcggcgggaacacggacaaagccacgccaaagacccgcggccaaaaca

SEQ ID NO: 198324 - RNA, 80 nt, Homo sapiens
cgacaacccccagaaagccaagccggacaagcaacgcaccacaacgggcgagcacaacgaaccagggggaacacagccag

SEQ ID NO: 198325 - RNA, 73 nt, Homo sapiens
gacccccgccacccccgccaggcccagcccgccacagccaaacgcagccagaaggaacaaacacccaaagcag

SEQ ID NO: 198326 - RNA, 75 nt, Homo sapiens
ggcggcgaagaaggaggcaggcacgggagccgaagagagaagggaacagcagggacaggccacaacggcaaagca

SEQ ID NO: 198327 - RNA, 84 nt, Homo sapiens
gcgccggacgcagagcacacagcggagccccgcagcagcagcaggcacgaagaagaagccgcgcccccaccgcgaagccagcag

SEQ ID NO: 198328 - RNA, 70 nt, Homo sapiens
aagacaccgaaaaggggaacccgaaaagcgcagacgaaggcagcaccaaaaaaagcgaaccgcagagacc

SEQ ID NO: 198329 - RNA, 76 nt, Homo sapiens
gacgggacggggcaaaccgccgccgcccccaccagacagacgcgcaaaacccagaaggaaggggccacaaaaaaga

SEQ ID NO: 198330 - RNA, 74 nt, Homo sapiens
ccaggacgcccggcggccggggagccggcccaagcggccgggacagaccggagcggggaggagcgccggccgaa

SEQ ID NO: 198331 - RNA, 78 nt, Homo sapiens
caggccgagccccaccacgggggagcaccccgcgagccagccccccagagaagcgcgcaagacgcaacacaaacgaga

SEQ ID NO: 198332 - RNA, 78 nt, Homo sapiens
acccaacgaccggggcgcggcagccacccgcccacaacacaagaagagcgcccaaaggacgcggaacagcaccacggc

SEQ ID NO: 198333 - RNA, 78 nt, Homo sapiens
agccacgcaccaccccaccaccccagcggccagacggccagcggcagcaagaacccggccagggcggggccagccgaa

SEQ ID NO: 198334 - RNA, 82 nt, Homo sapiens
cagccgggccagggacacggccaccggcagccaccaggagagaacgccgcgccgcgcgacaacggcccggcaggcaaggccg

SEQ ID NO: 198335 - RNA, 61 nt, Homo sapiens
ggcgaggaagagacgacagcaaggcggccagagacgcgcacgaaacgacgaagaggcccga

SEQ ID NO: 198336 - RNA, 54 nt, Homo sapiens
caagcaggggcggaagccacacaggccagaacgagggaaacagacaggagccaa

SEQ ID NO: 198337 - RNA, 70 nt, Homo sapiens
gaaggaccaagaaccaggagagcacgcgcaagggaccaccaccgcacgaccagaaagaccgggcaaggcc

SEQ ID NO: 198338 - RNA, 76 nt, Homo sapiens
caagaccagccgcccaacagcagggggacgcccaccggcgcggccgggcacggcagccaggccgggcgccagcaca

SEQ ID NO: 198339 - RNA, 90 nt, Homo sapiens
gcacaagggcgcacagagcagccggagaccacacaaggggacaacggccacccgagaggaccgcaaacagagcaccagccccaggaaggc

SEQ ID NO: 198340 - RNA, 88 nt, Homo sapiens
cgcccgcaagagcgagccgccgccccgggcgcagacagagcaccagcaccagcagagggaaagggagcagcaccggccacacccacag

SEQ ID NO: 198341 - RNA, 77 nt, Homo sapiens
caccaaacccgggaccaaccacagagacaagcaagaaagaaaacccccgaccagacgcaacaaggaggaacaaaagg

SEQ ID NO: 198342 - RNA, 74 nt, Homo sapiens
ggcccggaaagaaaagggccggggaagaacacagcaggagcgacagacagaacgccggaggcgagggaggacgg

SEQ ID NO: 198343 - RNA, 75 nt, Homo sapiens
accaacgccaccaaccaaccgaaaaaacaccagcagcccagcaaccaaaaagaagaccgcacccaaacaagggaa

SEQ ID NO: 198344 - RNA, 63 nt, Homo sapiens
ccgccaagagaagggcacccgcacggccggcccggacaggacccagaccagccaaagagaaga

SEQ ID NO: 198345 - RNA, 90 nt, Homo sapiens
cggcaggagagccggccgcgacaggacgggaagaagcccagcggaggcgaacggcccccgccaacacgaggaccccacggagaggcccgc

SEQ ID NO: 198346 - RNA, 81 nt, Homo sapiens
caccacccacaaggcacgaggccaacaacccaccaggcggcaggaaggggacccaacaagccccaggacagaaggaaagcc

SEQ ID NO: 198347 - RNA, 74 nt, Homo sapiens
acggcacgggccgcagaagacagggcggcgggccggacgacaagcggggaccaaagaagagcagcagcagaacg

SEQ ID NO: 198348 - RNA, 102 nt, Homo sapiens
cgccccacccgagagccgcgagcgcccggccgaacccgcgaggaaaagcccagcggcccgccaggcccgcgcggggaccacgagccaggacccagcgccccc

SEQ ID NO: 198349 - RNA, 68 nt, Homo sapiens
cccagaggcaccgaacccagcacggcaaccgcgcggcaggccaggggaccgccgcccgaaaaggggaa

SEQ ID NO: 198350 - RNA, 89 nt, Homo sapiens
ccaacacagagccaagcgccaaggaggcacagcgagaagggaaggaagcccaggaggacacgaagaaggaggagcagacaaaagaagcc

SEQ ID NO: 198351 - RNA, 87 nt, Homo sapiens
ggaagaggcccacccggagaaccccacggagaaccagagaccaaccaagcagcggacacgcgcggcacggaacgagcagcacgccaa

SEQ ID NO: 198352 - RNA, 55 nt, Homo sapiens
gaaacgggagggaaccagcaacaagccgacgaagcaaagcgagaggagaaggagc

SEQ ID NO: 198353 - RNA, 73 nt, Homo sapiens
agcgccaaggcaaagaaccgaggaacaaaacagccagagcaggcacgaaaagcagaaagaagacaaggacaaa

SEQ ID NO: 198354 - RNA, 61 nt, Homo sapiens
ccggcagccgcacaccaccgcgcgcggcggaagccccccagggaaagcccaaccagcagac

SEQ ID NO: 198355 - RNA, 59 nt, Homo sapiens
cgccaagccgcacgcaaccaccgcccggccacaccaggggagcgcaccacacacaagcc

SEQ ID NO: 198356 - RNA, 62 nt, Homo sapiens
accgggcagcaaggacgcgaggggggccagcagcaagaacagagagagcagagagagccaga

SEQ ID NO: 198357 - RNA, 66 nt, Homo sapiens
acccgggagaccgacagggaggaaccgggagccaaccgaggcaaaagaaacaaacacgcacaccaa

SEQ ID NO: 198358 - RNA, 81 nt, Homo sapiens
agaccgccccccgcacgacaggggaaggagcgcggccaggagccacagcggccgaggagccggaaacgaaacagcgcagcc

SEQ ID NO: 198359 - RNA, 50 nt, Homo sapiens
gcaaagagacaggaaagcgagacacgagagaaaaaagcggcacaacaaga

SEQ ID NO: 198360 - RNA, 76 nt, Homo sapiens
cagaaggaacgacgcggaccagaagccagagcgaggacgccggcaggcggagcccggcacgggcaaacagagcagg

SEQ ID NO: 198361 - RNA, 49 nt, Homo sapiens
acagagaggagggagaacaagcaacggcggcacccagcagcgaagagca

SEQ ID NO: 198362 - RNA, 82 nt, Homo sapiens
gaggcccagaacgccacccgacaacagacaaacaaggggggaagagaagagccaagaaaccggcgcaaagccagggaaaacc

SEQ ID NO: 198363 - RNA, 78 nt, Homo sapiens
ccagagccacaaggaggagagacagccggaggaacggaaacaaaccagccggacagcccgggagacgagccccggagc

SEQ ID NO: 198364 - RNA, 72 nt, Homo sapiens
cgaagaggaccggacccaggaggaccgacggaagcaggagggcaggccggggacccgcggcagggggcggcg

SEQ ID NO: 198365 - RNA, 75 nt, Homo sapiens
acagcgaccgaagaacagagcgaaaaaagggacccaagaaagccccgaacaacaacagaggcaaccagaaggaga

SEQ ID NO: 198366 - RNA, 64 nt, Homo sapiens
cgaggacacccccgccagcaaagcccagacaagccagggaacgaagggcccaccccaggaggaa

SEQ ID NO: 198367 - RNA, 85 nt, Homo sapiens
cccaaagaagaaggaccccggaggaaacagaagaaaagaagcgcagaagaaagacgcaaggacaaggagagcaccagcgagccgc

SEQ ID NO: 198368 - RNA, 87 nt, Homo sapiens
cgcgggacggggcgccgcccggggcgaggcagggccagcagcaggcgggaggcgagcacacagagaggggaagggcagcagcagcag

SEQ ID NO: 198369 - RNA, 60 nt, Homo sapiens
caaaagaaaccaacaccgcacgccagcaaagcacggacagagaaggaggagaagcgagcc

SEQ ID NO: 198370 - RNA, 75 nt, Homo sapiens
cagagcaacgggacaagggggaaccagcgccccaccaggacacggagggccagaacgcagcaggcgcaaaaacga

SEQ ID NO: 198371 - RNA, 56 nt, Homo sapiens
aggacacggcccacccggggggggaagaaagaaggagaaggcggaggagggagagg

SEQ ID NO: 198372 - RNA, 83 nt, Homo sapiens
ggaagacagggaaaacaggacaaggaacgagcaccaaaagcgagaggaggagagagacggaggggggccggagaggccaaaaa

SEQ ID NO: 198373 - RNA, 42 nt, Homo sapiens
aaacaaagaagacccaggacccaccggcccaggggaacaaga

SEQ ID NO: 198374 - RNA, 37 nt, Homo sapiens
cagaacaggaagcagggaagcggaggcggaccggaaa

SEQ ID NO: 198375 - RNA, 77 nt, Homo sapiens
gccccggacgccggagaggcaccggaccgagccaggacaaaaccaggcagaaccaacacgaacccaagcacaaacaa

SEQ ID NO: 198376 - RNA, 56 nt, Homo sapiens
aaaggacgacagccagagaggcaaagaagaggacacagagggagacccacggacca

SEQ ID NO: 198377 - RNA, 39 nt, Homo sapiens
ggccaaggaggcaaagcacgccagccaagcagagaagga

SEQ ID NO: 198378 - RNA, 75 nt, Homo sapiens
ccacaagggccgcaagccccgggccagcccgccagaggcccacccacagagcgcggaggagaaggaccggagaag

SEQ ID NO: 198379 - RNA, 85 nt, Homo sapiens
cccgaccgcccacagacccaaacaaaggcagagaagaaaacgcaggcgcagccgaggagaagaagacgggcaaccacgaagcagg

SEQ ID NO: 198380 - RNA, 81 nt, Homo sapiens
agggcgagcgggcaggacacggaggaccggagcggccgccgagggcacccacagaaggagaacaagcagagcaccggacac

SEQ ID NO: 198381 - RNA, 75 nt, Homo sapiens
ccccggggcgcgccccgagagaacgaggaggagccccacccgcgcagagagacggccacagagagcgggagcacc

SEQ ID NO: 198382 - RNA, 83 nt, Homo sapiens
acaccacacagaacacggaaaaccaacggcccggaggaccacagcccaggggccccaggcgaaacccagccggagcgcaggca

SEQ ID NO: 198383 - RNA, 67 nt, Homo sapiens
gccgccgaagaccgcccgcccgggcgaaagagagggcagcgaggaacagaagaaaaagaaaggcaca

SEQ ID NO: 198384 - RNA, 60 nt, Homo sapiens
cccagaaggcagaaaccgcagagagcaagggggcaccagccgaagccaggcaagcaagaa

SEQ ID NO: 198385 - RNA, 70 nt, Homo sapiens
agaaaccccacggaacaggcgcgagaccagacccacaacgaaaagacgaagaacggaagcgccccagagg

SEQ ID NO: 198386 - RNA, 81 nt, Homo sapiens
gaacacacgagcgcagaagggaagaagggaaaaagcgaagaagaaaaggggcaccgccgaccgaaaccgcaaacacacgac

SEQ ID NO: 198387 - RNA, 82 nt, Homo sapiens
cgagggagacacaggcggggaacgagccagcgagacccagacaaggacagcggggcaagacgacgcagcgaacacagaccca

SEQ ID NO: 198388 - RNA, 76 nt, Homo sapiens
gcggggcgaaggcgcagccgcgaagccgagagacccaaggaagaagacccaaagggcaagaccagagaccccgccc

SEQ ID NO: 198389 - RNA, 74 nt, Homo sapiens
aaggccaggaagaagacgacggacgaaaagaccagcccggccaccagcacagccgagcagcaagcggcgcaagc

SEQ ID NO: 198390 - RNA, 67 nt, Homo sapiens
aaaacacacccgggccagccggacagcggacaaggcgccggccacacggcgggggccccaccaggcc

SEQ ID NO: 198391 - RNA, 79 nt, Homo sapiens
accggagacgccgaaggaccggaggaggaccacgccgcaccccacaagggagcagaaacgggagaaaggaaagaagaag

SEQ ID NO: 198392 - RNA, 52 nt, Homo sapiens
agaacggcaaagggcaaaaaaaggagaaaaacccacagggaaaaaccaagga

SEQ ID NO: 198393 - RNA, 57 nt, Homo sapiens
gacgcaccacgaggaaagccagcccaccagcgcggggggcgcgccgcgcggcggcgg

SEQ ID NO: 198394 - RNA, 69 nt, Homo sapiens
cgacagccagacaacgagacacccgcacggacccgggcgcaggggcacaggaagagggcggcacgcggc

SEQ ID NO: 198395 - RNA, 81 nt, Homo sapiens
cgaacccgccacgcagcaggagcaggggacgaaggaaccacccagcgaaagccaaggaagagacaaacaacacgacaaggg

SEQ ID NO: 198396 - RNA, 52 nt, Homo sapiens
cgagacgaggagaaaacccagaaaaaagggcagggacggaaaaggcgcacac

SEQ ID NO: 198397 - RNA, 83 nt, Homo sapiens
gccgaggggacagaggcaccgcagcgagaggagcagccaaggagggaagccacagccgcgcggaagcggccgggcgaagggag

SEQ ID NO: 198398 - RNA, 53 nt, Homo sapiens
accccggagaaaaggccaagaaggcagcacagggaacaccagaggcgggacca

SEQ ID NO: 198399 - RNA, 72 nt, Homo sapiens
aagcacccaaaaggccacccaaacaacgaagaaagaagcgaaagagagaagagcaagagaaagcaaagaaca

SEQ ID NO: 198400 - RNA, 74 nt, Homo sapiens
cgcgggaaaccgcacagccgagaagaaaaaacaagacagagcacaggagaagaggggagccccgaggagaccga

SEQ ID NO: 198401 - RNA, 90 nt, Homo sapiens
ccgacaagggcaggccgacaaggccaggaagcaaccaccagaggcacacggcgcaaagaagagaacacacgggagggaggaggaaggagg

SEQ ID NO: 198402 - RNA, 71 nt, Homo sapiens
agaagcagagagaccgccagacaggaccccgagaaggccacaggaggaccggcagcgcggaccggcacggc

SEQ ID NO: 198403 - RNA, 88 nt, Homo sapiens
ccaacaccagcaccgcagaggcaaggggccaccaggaggccagggggcgccagaacaggaaacccaggcccaacggcaggggagcaag

SEQ ID NO: 198404 - RNA, 66 nt, Homo sapiens
aaaacagccggacacagaccacaaccgccgacaaccccgagaggggcagacagggaaagaagacaa

SEQ ID NO: 198405 - RNA, 70 nt, Homo sapiens
ccagagaggggcaccccggggacaagccgcaccacgccaaggaaaggacacaaccagagggaagcacgcc

SEQ ID NO: 198406 - RNA, 76 nt, Homo sapiens
cacagggacccagcaaaggagagcaggagaaaaacggcagcagagacccaaaacccaagacacgaagaaaggaaag

SEQ ID NO: 198407 - RNA, 77 nt, Homo sapiens
ggaagcagaagcaagaaagcgcaaagcaggacccaaaaggcgggcgaaaacgccaaaaaccagacgggagcgcagag

SEQ ID NO: 198408 - RNA, 69 nt, Homo sapiens
caccgagaaaaagggggaagaaccgagcagagagcacgcaacacaacacaggaccaagacagcagccag

SEQ ID NO: 198409 - RNA, 75 nt, Homo sapiens
aggacagaccaggcccgccacaccccggcgccggaaaggcagccaaagccaggacacacagggacaacacaaccg

SEQ ID NO: 198410 - RNA, 81 nt, Homo sapiens
agccccgagagcgggacaggaggcgcgcgccgcccggagccggccagcgagcccggccgccgcccgcgcgacgcagcgcac

SEQ ID NO: 198411 - RNA, 81 nt, Homo sapiens
cccgcagcacgaccagcaggaacgggcccgacccaggcaagcgagcaggcgagcaggagcccacagccgagcagcggccca

SEQ ID NO: 198412 - RNA, 79 nt, Homo sapiens
ggcacacgcagcaggcggacgggccggcgcagcaggaggagggcggagaacggaaaagcaccaggaagcagagaggacc

SEQ ID NO: 198413 - RNA, 65 nt, Homo sapiens
agggcggccacgcgggaccaccggcaccaccaaaacaagcagaccggaagaccgacggaagacca

SEQ ID NO: 198414 - RNA, 89 nt, Homo sapiens
cagagacgacgccgcagcaaggagaccaggaagggggagacaaggaagaggaaggggggcaggggcacacgcagagcagcacggaggag

SEQ ID NO: 198415 - RNA, 59 nt, Homo sapiens
gagaaaaggccaagaaggcagaagcagcgaagaaccacggacaagggccaaacgcaaag

SEQ ID NO: 198416 - RNA, 80 nt, Homo sapiens
acggcggggcgcccggagcccgaggcgagcagcgcgcaaagagagaaggcgggaccaagaagaaagaaagaagggacaga

SEQ ID NO: 198417 - RNA, 76 nt, Homo sapiens
caacacggccaagaagaggaaaggcgggcaacacaacaaggcgcggacacccagacaagcgcgccaccggccccga

SEQ ID NO: 198418 - RNA, 60 nt, Homo sapiens
accgaacaccgggggcgggcagccgaggccgggaaccagcgagggggacaacagagccga

SEQ ID NO: 198419 - RNA, 67 nt, Homo sapiens
cggccggccagaacaggcggggggggacggacccgcaccagccgggccaggccacagagcggcagag

SEQ ID NO: 198420 - RNA, 73 nt, Homo sapiens
agcgacaacacgcggggaacggcagagcaaagccaagaaagaaggcaggcaggaagaacaaagggcagaagca

SEQ ID NO: 198421 - RNA, 71 nt, Homo sapiens
agccgggaacagcccaagaggaacaaagacggagagcccagagacacgcgcggaggcggaggccacccaga

SEQ ID NO: 198422 - RNA, 79 nt, Homo sapiens
acaccccaggaacgaagacagcagcgcacccgggaggagggagccaaggaagccaagacagcagaaagcaggagaaagg

SEQ ID NO: 198423 - RNA, 82 nt, Homo sapiens
gcggacggacacccagcggcgacacgcgacgcgccaaaacccgcccggaaaggggacaccgcacagaggcccgaaagcagaa

SEQ ID NO: 198424 - RNA, 117 nt, Homo sapiens
gagcgaccgacgcgccacccgccgacgcccagccgcggggcccgcacggaccccaccagcagcgcaagacccaccaaaaagggaacgaacccggcagccccccaccaagaagagcgg

SEQ ID NO: 198425 - RNA, 75 nt, Homo sapiens
aaaagggcaagaggcagcagaaaacaagcgaccagaagaacgcacaaaaagagcgcagggaaaggccaggggaag

SEQ ID NO: 198426 - RNA, 77 nt, Homo sapiens
agcaaaccagaccgacacacgccagggcaggcgccccaacccaagccagaggaggcacccaggacgcgggcaaggga

SEQ ID NO: 198427 - RNA, 74 nt, Homo sapiens
cgccaagcagccagcccaggagagggaagagcgagacaagagccaaggacagggcccgccaccagaaggaccca

SEQ ID NO: 198428 - RNA, 78 nt, Homo sapiens
gccagcgcgccggagccgccgagcccggggacccagggaaagggaccccagacccacgggagcacgaagccaagaggg

SEQ ID NO: 198429 - RNA, 78 nt, Homo sapiens
agcgcacagaagaggagaaaggaaccgggaaaccccgaaaggaccgaaacaacacgaagcgaaaccggggccgaggca

SEQ ID NO: 198430 - RNA, 44 nt, Homo sapiens
agcgccgaggaacccacccagaaccgagccagcagaagagacac

SEQ ID NO: 198431 - RNA, 81 nt, Homo sapiens
ggggagagaacaagaaaagaagaagaagagaagaaagagaaaccgagccccgaaacaggaggagaagggccaccacgaagc

SEQ ID NO: 198432 - RNA, 80 nt, Homo sapiens
gaccgagaccggaccgagagcggaccgagagcgcgaaacgcacgagaaggcacgcgagaaggggagggggagaaagaaga

SEQ ID NO: 198433 - RNA, 74 nt, Homo sapiens
gggggcagccgccgcacgcccccgggagcgcgggcaaaagagccagaaggggggagaacgaggagagcagacag

SEQ ID NO: 198434 - RNA, 57 nt, Homo sapiens
caccgagggcgcggcgggcagggaaaaaacaacgaggaagaaaagaaacggaagcga

SEQ ID NO: 198435 - RNA, 85 nt, Homo sapiens
cagcgagcaaaaccaaccaacaccgaggagcaaccaggcacacgaccaagacgcaagcggcagcccgcaccacgacaaagaagag

SEQ ID NO: 198436 - RNA, 90 nt, Homo sapiens
agaggcagccggcgcaggagcagcagcgcaggaagaaacagccccgggcccccaggaagggcccaggagcgcaagcaggccaggacagag

SEQ ID NO: 198437 - RNA, 72 nt, Homo sapiens
cgccaagccagaaccaagggaaggagcccccaaagggacagggaaacgccccaccccacggaggacagggca

SEQ ID NO: 198438 - RNA, 75 nt, Homo sapiens
ccccaggaacagacgggacccggaaggaggcagagcgcagaacacggcagggacaccgaaaagcaaagggagagg

SEQ ID NO: 198439 - RNA, 67 nt, Homo sapiens
accacagccgaaacaaccaacgacaacaaggcagaaggaagagagaagacagcagcgaacaagaagg

SEQ ID NO: 198440 - RNA, 57 nt, Homo sapiens
acagagagaacaaaagagcagaggccagcgccaagaagccggggccaccaggggcgc

SEQ ID NO: 198441 - RNA, 79 nt, Homo sapiens
gccgcgaccagagagacaggacagcggcaagggggccggcggccgaccaacccccaagagcccgccgcaacacagcgcc

SEQ ID NO: 198442 - RNA, 80 nt, Homo sapiens
aaccccagaacgaacaaagacaacagccggaacgccccaaaaaagaaaaacaaccaccagcgagcaaaaaggcaaagacc

SEQ ID NO: 198443 - RNA, 111 nt, Homo sapiens
acaacccgcgcccaggccagcgccccaggccaagagggacccacccggcgcaagaggagccaggagcacggggggaacaagaccgccgggacggaagacgggagcgggccc

SEQ ID NO: 198444 - RNA, 82 nt, Homo sapiens
agcagccccggaacgcggggcagccccccaacacagaccgggccacaggaggagaagcagccccaaaagacgaaggaacccc

SEQ ID NO: 198445 - RNA, 52 nt, Homo sapiens
aaaaacaaaagcagcccaagcaccaggagggaggcccaggacgggagagaca

SEQ ID NO: 198446 - RNA, 59 nt, Homo sapiens
ccggccccccggagaccccggccacgagagcccgggaagcgcagagggaacacggccac

SEQ ID NO: 198447 - RNA, 75 nt, Homo sapiens
aggcaaggagagcgaaaggaaaacaaggcaccaggaccaaagccacaagaaggagagacgcagagccagacaaga

SEQ ID NO: 198448 - RNA, 72 nt, Homo sapiens
ggaacaggagaaagacggccgggaacaaaaccaaaacccagacccaccacaccagccagcaacgcagcaggg

SEQ ID NO: 198449 - RNA, 72 nt, Homo sapiens
agccagagccagcaagcgcagcccggacaggaaaccaacgcaaaagagggagaagcacggaaccgaaagagg

SEQ ID NO: 198450 - RNA, 75 nt, Homo sapiens
ggcgcgcgaccgacacgaagacggcccgccacgggccccgcagccgcgcccgagcgcccgagcagggacagcgac

SEQ ID NO: 198451 - RNA, 77 nt, Homo sapiens
gacggccagccgggagcacgaccacccacagccggagcgagaaaggagcgccaacgcaaggcagcccgacaagacag

SEQ ID NO: 198452 - RNA, 52 nt, Homo sapiens
cagcgcagaccgagagccaagagccgagggcggagaacggaaaagcaccagg

SEQ ID NO: 198453 - RNA, 77 nt, Homo sapiens
gagagaagaacaccgaaaccagaagggagcacaacagggagaagacagcaagaccccgaaccgagcagacgaggcaa

SEQ ID NO: 198454 - RNA, 78 nt, Homo sapiens
cgcggggcgagcccggaaaaccagaccagaaacggaggagcccgccgaagcaggccccgggaccaaggacacgcagac

SEQ ID NO: 198455 - RNA, 72 nt, Homo sapiens
ggcggaggacgagaggaggaaacagcgcggagaccccagacccccagcgcggcacgacaaccccccaagcgg

SEQ ID NO: 198456 - RNA, 76 nt, Homo sapiens
ggcccgaagcagccggcaagccaagggcagccaaagggcaggcagggaggccagcaacacacaacggccaacccac

SEQ ID NO: 198457 - RNA, 75 nt, Homo sapiens
gcagaccgaccccgagagaggacgggagacccgaccaccggaagccacggcccggacccccgccacgcaagaccg

SEQ ID NO: 198458 - RNA, 77 nt, Homo sapiens
gggaccacaccagcccagcggacgagcagccaaagcgacagaggcgaggcgaggggccccgaaccgaggaccagcgg

SEQ ID NO: 198459 - RNA, 55 nt, Homo sapiens
cagacgcagggcgcccccggcgaagaagaaccgcgaaggacgcgggcagggcggg

SEQ ID NO: 198460 - RNA, 88 nt, Homo sapiens
ggggaggacaaagccgggaggcgcagaaggccggggaggacagcacaggacagcagaccacagcccggcaggcccaaaaacccaaagg

SEQ ID NO: 198461 - RNA, 81 nt, Homo sapiens
ggaagcaggagagggccagcagcagccaaaggacagaccaggaagagcagaagggacgagcgcggaaaaggcaccagaaga

SEQ ID NO: 198462 - RNA, 81 nt, Homo sapiens
gcacgcacgaaaagcagcaaagccacagagaaacaggaccggaagcagagggcccagccacaggagaggccgcccagacac

SEQ ID NO: 198463 - RNA, 43 nt, Homo sapiens
gggggagccggccacccaccggagagagaaggaggaacccagg

SEQ ID NO: 198464 - RNA, 73 nt, Homo sapiens
cagggcgcaccgcgggcgccccgaggccaagccaccccggcggaaccgcccccagccggggaccgccacaaga

SEQ ID NO: 198465 - RNA, 77 nt, Homo sapiens
gcaagacacagcagcaaggaggagcggagaaaggcacagccagggccaaaccaagccgaggcccagcggaacgcccc

SEQ ID NO: 198466 - RNA, 77 nt, Homo sapiens
gaccagaaaaccgacaacccccagaaagccaagccggggggggaaaaggcgccgagccaaaccagaaaggggacagc

SEQ ID NO: 198467 - RNA, 55 nt, Homo sapiens
gccggcagggcccgcgcgcgccgccggacagaagccaaaacaggaaccgaaaggc

SEQ ID NO: 198468 - RNA, 83 nt, Homo sapiens
gccagaggaggagccagaaacagaccagccccgggccccagcgcccacccaagggcgaggacgaggaggagaccacgcagaag

SEQ ID NO: 198469 - RNA, 72 nt, Homo sapiens
aacagggggacgggggcaggggggagaggcaccagcaacagaccaaccgcagcaagcacagagacaggaagc

SEQ ID NO: 198470 - RNA, 75 nt, Homo sapiens
ccaaagggggaggagaggccaagcgcggcagggcccccaccggccgaccgcgcgccacgcgagaaccgccggcga

SEQ ID NO: 198471 - RNA, 77 nt, Homo sapiens
cgcagggccgggccgccgcgcaccgcagcgccggggcacgacacaaaaacaggcccacagacaagccgcccccccac

SEQ ID NO: 198472 - RNA, 55 nt, Homo sapiens
ggaaccacagaggaacagaggaccaagaaaggcccagggaccaaagcccggacaa

SEQ ID NO: 198473 - RNA, 58 nt, Homo sapiens
aggacacaccggccgagggcccaccagaccaaacgcagcggaaacccagacagcgcac

SEQ ID NO: 198474 - RNA, 81 nt, Homo sapiens
agcaggagaacgaaacggagccagagaaggcagaagggaagaccacaagaggggcagcagagccccagaagaaccccagcc

SEQ ID NO: 198475 - RNA, 36 nt, Homo sapiens
acagcagccagagccagggcggagacagggaagaac

SEQ ID NO: 198476 - RNA, 69 nt, Homo sapiens
gacagggagaccaagagacagacaccgccccgagacgagggggaaacaaacaaagaaaggacacaggaa

SEQ ID NO: 198477 - RNA, 82 nt, Homo sapiens
gccggagccgagggcggcaagagcggcaggggcgcaggagaaagagaaacggggacaggccaccaacgggagcgggacacgc

SEQ ID NO: 198478 - RNA, 39 nt, Homo sapiens
gcgacccgagcagcgcagaccccaggagccaccgcaccc

SEQ ID NO: 198479 - RNA, 90 nt, Homo sapiens
aggaggaaagaagaaaagcacccgaagaggaagaaggcacgaaaaccgggccagaaggagaggagaagaggaacgcaggagagcagcgaa

SEQ ID NO: 198480 - RNA, 56 nt, Homo sapiens
caagaaaaaggcacaggccgaacaggaagaacagaaccagagaagaccacaacccc

SEQ ID NO: 198481 - RNA, 79 nt, Homo sapiens
cggacaacggcccaagacaggcccacccagcccccggagaaacaggaaagccacagcgaaaggaggagaacaagaccca

SEQ ID NO: 198482 - RNA, 73 nt, Homo sapiens
gcaaacagaccaaaccacgaggaggagaccggaaaagcggcacccgcagagaaagaggcgaaagcaagaagcg

SEQ ID NO: 198483 - RNA, 76 nt, Homo sapiens
gaccggggcccacgccgccaagccgccccgaccaaagagacaaaagccgagagcgaggacaggcgaaaccacgcga

SEQ ID NO: 198484 - RNA, 58 nt, Homo sapiens
caaaacagaagaaagaaagcagaccgggcagaaggaggcagcacggcaggagacgagg

SEQ ID NO: 198485 - RNA, 85 nt, Homo sapiens
cgagcggcaaggaggggaaaacccgcagaaaaggagagccaaaacagaccaggggaagaagagcgcaacaggaggaaaccagggg

SEQ ID NO: 198486 - RNA, 59 nt, Homo sapiens
cccagaacgggaggccgaggcgggcggaaccgagaagcaccagcaccaagaccagccag

SEQ ID NO: 198487 - RNA, 68 nt, Homo sapiens
caaggcagccagacgcaagcccagagccaaggggaagaagccaaacaggagaaagacagcaaagaaaa

SEQ ID NO: 198488 - RNA, 82 nt, Homo sapiens
aggggggggcaaacccgagagaacgggaacagggaaagaaggaagacaggcgcaagaaacaggacagcaaagccagaaagcc

SEQ ID NO: 198489 - RNA, 80 nt, Homo sapiens
gccaaccacgagaaggcaaacgaaagacacagccggagaggagagagggaagaagcaaaacgcgggcccaaggagcaaga

SEQ ID NO: 198490 - RNA, 106 nt, Homo sapiens
gcgcagggccgggccgccgcgcaccgcagcgccggggcacgacacaaaaacaggcccaggggacacccagcaggccagggaagaggcagcccaggggacacaggag

SEQ ID NO: 198491 - RNA, 68 nt, Homo sapiens
agggacagggggagaaacacccgaacgaaggagacaaagaggagcagcggaagaaacccccgcaacga

SEQ ID NO: 198492 - RNA, 85 nt, Homo sapiens
ccccacggccccaacccgcgagggagaccaggcccagaagcgcgggaggcagacagccaggacgaaggaagaacaagcagagcaa

SEQ ID NO: 198493 - RNA, 76 nt, Homo sapiens
agccggcggcggccggccgcccagcgggacccgccaggaaaagaccaaggagacagaggggggggagcaaaggcca

SEQ ID NO: 198494 - RNA, 70 nt, Homo sapiens
accgccggaaccgacaaagcccggagagggaaagaagcagaagcggcacgagcaggcaagagagaagcga

SEQ ID NO: 198495 - RNA, 80 nt, Homo sapiens
caggacaaaaccgaccgaggcagagcgcagccacgggcgcgcagcgcaagagcaaagcgaggacgggaggcccggggaaa

SEQ ID NO: 198496 - RNA, 75 nt, Homo sapiens
acacccccaaagagcaacgaagacaacgcagcggcagaaacaaggcgcaggaaaagcccggaaaagcagccaagc

SEQ ID NO: 198497 - RNA, 53 nt, Homo sapiens
cccgcaggcggcgcacaggaagcacggacgaaaaggcccaggccggcggaaaa

SEQ ID NO: 198498 - RNA, 85 nt, Homo sapiens
ccggcgccgcgccggcggcggaagaccgaggaggcaggagagggacagggaaggagagggaggggcaggaggagcccggccccca

SEQ ID NO: 198499 - RNA, 71 nt, Homo sapiens
aaccaaagaaaacagaacagaaaaggccacagcggaacaagcgccccccaaaagcagagcgcaaaaaaaac

SEQ ID NO: 198500 - RNA, 73 nt, Homo sapiens
ccgcgcggccgcgcgcccgggacgacggaccggccggcgggcgccggggaaggaaccagaacggcaccccccc

SEQ ID NO: 198501 - RNA, 41 nt, Homo sapiens
cagagggacggccccagaaggcaggcggccgcgcgccgggc

SEQ ID NO: 198502 - RNA, 56 nt, Homo sapiens
gaggaggaaaggaggacgaggaacgcccaaaacccgccggaccgaagaaggggcaa

SEQ ID NO: 198503 - RNA, 82 nt, Homo sapiens
gacccgcgaacacggacagaaacaggccaggagggacaggaccggaggcgccagccaaccacagccaacaggcgccgcggcc

SEQ ID NO: 198504 - RNA, 70 nt, Homo sapiens
cggccaggcgacgccacccaagacacaaacggcgacacagaagcacaaggaccgaggaaccacgccaggg

SEQ ID NO: 198505 - RNA, 79 nt, Homo sapiens
ccgcaggagacgagaggacgggaccaggcgaagcggccgagcaggcgagcgaacgacgcagaagcacccgagcagggaa

SEQ ID NO: 198506 - RNA, 80 nt, Homo sapiens
gcgccgcggcgaggagcgagcgcgcgaggggcggccgaggaaagaccacagcaagaccacgcccccagccgggggaccag

SEQ ID NO: 198507 - RNA, 85 nt, Homo sapiens
cccaggcgcagcaaggagaggcggcggcggcccggcgaagaaagaaggaagggccgggccggggcacgggcccacggccccccac

SEQ ID NO: 198508 - RNA, 82 nt, Homo sapiens
gccgagccgagccgagccgagcggagccggcggagcccggaacacccgggcgcgccgagggcaggaggaggaagccccccca

SEQ ID NO: 198509 - RNA, 59 nt, Homo sapiens
cgagccagcccaggaaaaggagagaaggagagagcacgaccaccgccgagagacccaca

SEQ ID NO: 198510 - RNA, 73 nt, Homo sapiens
caacgcccagggagacccggaaggagacggcccgccacgggccccgcagccgcgcccgagcgcccgagcaggg

SEQ ID NO: 198511 - RNA, 79 nt, Homo sapiens
cgcgagccgaagcgccgcaggcgcgcccggaccgacgcgcaccccggacaccccggggcaacaaggacccagacaaggc

SEQ ID NO: 198512 - RNA, 73 nt, Homo sapiens
aaaccacaccaaaaaaaggccaccgggagcaggagagggccagaagacaaagggccagaggccaggcacacac

SEQ ID NO: 198513 - RNA, 75 nt, Homo sapiens
aagaagcgcagcacacgaccgggcccccacgggccccaggagaacacacaaccagcacaccgacaaacgaagcgg

SEQ ID NO: 198514 - RNA, 76 nt, Homo sapiens
gaagagcggagagacgggagacacagccacagaggacaagggcggagaagccgaagggccagaaccacccccaggg

SEQ ID NO: 198515 - RNA, 84 nt, Homo sapiens
ggagggaggaggaggaggaggaggggaggaggggaggaggggaggaggcgccggaccggggggggggaccagaggaaacaaggg

SEQ ID NO: 198516 - RNA, 78 nt, Homo sapiens
caacccgccaggcaggccccccggagcggccccgccgcggcagaagcccccggggagagacagacagagggacacaga

SEQ ID NO: 198517 - RNA, 92 nt, Homo sapiens
aggaaaccagggccagagcccgagacacgagccccaaggggaagcacccggaccccgagccggagcgcgggcccgcccagacagacgcagaa

SEQ ID NO: 198518 - RNA, 78 nt, Homo sapiens
aacccggacaagggaagggcccgaggaggacacaacaccgcggaggaggacaggaggaggccagagaacccaaaagca

SEQ ID NO: 198519 - RNA, 75 nt, Homo sapiens
cggaagcacacaacaggaaaacaaaagaggagaaaggaacaggaggcccggacccccagcacaagcgcaggccag

SEQ ID NO: 198520 - RNA, 39 nt, Homo sapiens
ggggccagggagcccggaagcagccggcccagcccaccc

SEQ ID NO: 198521 - RNA, 81 nt, Homo sapiens
agacgcacggaggcggcccgcccggaaggcaagcgcagcaacaacagagagcacggggacgaacagcggggacgccccagc

SEQ ID NO: 198522 - RNA, 67 nt, Homo sapiens
agaccacgccggccgcgaccaaggaagcaaaagcaggaaaccaagcacaaaggagccgggacgccag

SEQ ID NO: 198523 - RNA, 68 nt, Homo sapiens
ggaaccgaccagaaccaaaggcgaccccaggccagacaaacaagagcagcacaaagggaaggagcagg

SEQ ID NO: 198524 - RNA, 85 nt, Homo sapiens
ggagcgcgcccggcccccagcgcccccagcacgccgccgagcccgccgccagggccggggggggagaggccaagagaacacggca

SEQ ID NO: 198525 - RNA, 82 nt, Homo sapiens
caaccggaaagcaagggagcggcacagccagaagaccgaagcgcgacggaagacccgggaggcccccgggagaagaagacga

SEQ ID NO: 198526 - RNA, 70 nt, Homo sapiens
ccacaaacacacggcccacggaagagggcacagcccacacagcaacagcccgcagggccccgacgccaga

SEQ ID NO: 198527 - RNA, 60 nt, Homo sapiens
cggccaacaagcaggagggaggccgcaacccaggagcccccggcagcagcgaaagccacc

SEQ ID NO: 198528 - RNA, 61 nt, Homo sapiens
gaagaggacaagagacgacacgcaagcaggcaaccgaaacagcggagaagagagcggaaag

SEQ ID NO: 198529 - RNA, 84 nt, Homo sapiens
cggcaaggccacaagggaacgggcggccccggagagagagccgcgcacgcacagacaagaaaaagagaagcgcagcgaaaagaa

SEQ ID NO: 198530 - RNA, 71 nt, Homo sapiens
ggagccgccgcgacgagccagaccgccaaaccagagaaagaaacacccgaacagcgaacaaacaggaccgc

SEQ ID NO: 198531 - RNA, 88 nt, Homo sapiens
ccgacacaagcaagagcgcgggacccggcagaagccaaagagccgggggggccacaacaacaaacggacaggcaccagccccacggga

SEQ ID NO: 198532 - RNA, 78 nt, Homo sapiens
agagaaagaaccacaccaagagacccaagaggacgaaacaggaggcacaggaggaagaccacgcggcaagcaaaaagg

SEQ ID NO: 198533 - RNA, 74 nt, Homo sapiens
gcagaccaacccagccacaggaggagcaagagaagagcgaacagcaaaaaccccgaaaaaaaaaaacagaaaaa

SEQ ID NO: 198534 - RNA, 56 nt, Homo sapiens
ccaaccaagccaggcacacagggaagaagccacagaaccaaaaaacgagagacaga

SEQ ID NO: 198535 - RNA, 59 nt, Homo sapiens
gacaagcgaagaaaaccgaaaccagcaagaagccccaacagaagagagaggccaaaggg

SEQ ID NO: 198536 - RNA, 85 nt, Homo sapiens
gccagcgagccagcaggagcggcgcggagcggcgagggacccgcagggagccaccgagcacccggacacgaccaaaacccccaaa

SEQ ID NO: 198537 - RNA, 58 nt, Homo sapiens
aaaaaacccaaggcaaacggcagagacccgagaagagagagcccagccacaacagccc

SEQ ID NO: 198538 - RNA, 80 nt, Homo sapiens
aacgggccgcgaaccgcagacagcggccaagaagacacaaaggacggaggcacgagcagcccgaagagggggaagaagcg

SEQ ID NO: 198539 - RNA, 74 nt, Homo sapiens
aaaaagcaaacacgaggccacggggaaacacagcagaacacagggcgcccaagcgcaaggaaaaggcaccagac

SEQ ID NO: 198540 - RNA, 74 nt, Homo sapiens
caagagacgacacgcaagcaggcaaccgaaacaggggaggcaagcaggggggcaaaggaaagaaggcagaaagg

SEQ ID NO: 198541 - RNA, 57 nt, Homo sapiens
ggacagggccaacagccagggaccgaggggagcagcggaggaagccacaggacgccg

SEQ ID NO: 198542 - RNA, 85 nt, Homo sapiens
ccgaggcgaaggagcggccgggagcccgccgcgcggagcgggaagaaaacgccagagaagcagagcagcccggagcgaggggaga

SEQ ID NO: 198543 - RNA, 78 nt, Homo sapiens
ggaggccgcgagaccaggggaccaggaccccaggcaaagaacagcgaacgacaagaggagaggaagaagagaagaaga

SEQ ID NO: 198544 - RNA, 63 nt, Homo sapiens
aagagagaaaagaaaggagagcaagaaccaaggaccacgagaggagaagagcagaggagggag

SEQ ID NO: 198545 - RNA, 76 nt, Homo sapiens
caacagggaagcacaaggagggaaggacaagcccacaaggcaggcagaggggcagacaggagggcgaaaggaacca

SEQ ID NO: 198546 - RNA, 70 nt, Homo sapiens
gacaacaagaagccagaggcccggccaaagcagaacagcacgagggcgagacccggagaaggcaggacac

SEQ ID NO: 198547 - RNA, 55 nt, Homo sapiens
agacagcagacgaagccaaggccagcaaggaaccgggaaggagaggaccggaacc

SEQ ID NO: 198548 - RNA, 102 nt, Homo sapiens
gcgcgccggaccccgccccccccgcgcggcgcgggcgccgggggcaccgagggcacacagagaaaaaaagggaacaaaacacagcaagcagacaaaaggggg

SEQ ID NO: 198549 - RNA, 67 nt, Homo sapiens
gccacaaagaaagacaagagcagcacccaaaagaccaggagccacaaaggaggcaccgaagagcaag

SEQ ID NO: 198550 - RNA, 69 nt, Homo sapiens
ggcgagcggcggggagcggcgaagccgcgggcgaggacgaacacaaaggggcagcaacaccagacagaa

SEQ ID NO: 198551 - RNA, 53 nt, Homo sapiens
aaaccagggccacagcacgcagccccaggcagagaacacagaccaccgaagca

SEQ ID NO: 198552 - RNA, 80 nt, Homo sapiens
agaagaagggggaccacggagagggcaaaagagccggggggcccacgcgcagacgaaacgccaagagagaaacgaggcac

SEQ ID NO: 198553 - RNA, 70 nt, Homo sapiens
aagcagggaaaacaggaaggaaccagccaaaaagcaaggcgcgacacaaaaacggggacggggcaggaag

SEQ ID NO: 198554 - RNA, 71 nt, Homo sapiens
aaacacaggaagcccacccaagacaggaagacggcacaaagagcggaaggaaaaccaaggagaggaaaggc

SEQ ID NO: 198555 - RNA, 80 nt, Homo sapiens
ggagcccgagcggaggaagcccccagggccaggacgcccggaccacacaaaccgacccagcagaccacgggaggggaaaa

SEQ ID NO: 198556 - RNA, 51 nt, Homo sapiens
agggaaaacaaccacaggcagggaagcaaagagcacccgagcccagcaggc

SEQ ID NO: 198557 - RNA, 76 nt, Homo sapiens
gcagcgcagccgggggccaggacgaccgaaaacccagccagacaaaagagaagcagaggagcgaagaaagagagag

SEQ ID NO: 198558 - RNA, 71 nt, Homo sapiens
aagcagaagacgaggacacgcagccggccgaggaccccccaggaaggagaccgcaaggagaagaccacaaa

SEQ ID NO: 198559 - RNA, 71 nt, Homo sapiens
gacagccaagaaccaaaaaggaccacgaaggggaaaggaaggaaaaacgggaaaagaaccggagcagaaga

SEQ ID NO: 198560 - RNA, 86 nt, Homo sapiens
aaccccaggagcaagggaaggagcccggaggggagggaagagacaggaagagggcccaggcggagcgccgcgcccaggcggaggca

SEQ ID NO: 198561 - RNA, 82 nt, Homo sapiens
agcgcagagcccggggacggcgaggccccagaccacacgaggcggcagcagccaccacgaccccaggcccccagccagccgg

SEQ ID NO: 198562 - RNA, 56 nt, Homo sapiens
aggcaaccacagccagagggaaacacgcgagccgggaggggccccaggcccaagcc

SEQ ID NO: 198563 - RNA, 78 nt, Homo sapiens
acggaagcagacaaaggagacgcaggcagaaggaaagggcgcagaccgggcagcagcagccgcggaacggccaggcca

SEQ ID NO: 198564 - RNA, 85 nt, Homo sapiens
agcccccggccgcagcgcaggcagcccagcaggccaggcagagcagcccaccagggaggggagggggggaggcgcaccccgcgcc

SEQ ID NO: 198565 - RNA, 79 nt, Homo sapiens
gcagaagcgcggcagggagcgcgggggcccgcgcagcagcgaccacgacgccaaacgcgaaagggagaaagaagaacgc

SEQ ID NO: 198566 - RNA, 76 nt, Homo sapiens
ccccgggcaggacccggacccggaagagaagagggggcaagaaagacaagggaggcgaggacggacaaaaggaaac

SEQ ID NO: 198567 - RNA, 68 nt, Homo sapiens
ccgcgccgcccccaggagcacaaaagggcaacggggcggcacacaaggagcgaagggcagggagaacg

SEQ ID NO: 198568 - RNA, 78 nt, Homo sapiens
cgcgcccaacccgggggggaggaagccggcccgcaaacgggcagcaaagcgcgcgaaggggcagaaccaggcacccga

SEQ ID NO: 198569 - RNA, 69 nt, Homo sapiens
cccgacacccggcagaccaggcagccagcgaaggaagaaagggaccaaaaccaaaacagcgaaaggcca

SEQ ID NO: 198570 - RNA, 76 nt, Homo sapiens
cggccggcccgagcgcggcggcgcggcgcggagcggcgcggagcgcggcaagccacagccaggaaacaccagcccc

SEQ ID NO: 198571 - RNA, 67 nt, Homo sapiens
agcccacagcaaggaaggagcagagaaagcaagagacgcaaccgaacgcagagcggagaacggcggc

SEQ ID NO: 198572 - RNA, 76 nt, Homo sapiens
gcagcgagccagcaccgcggaccgccaagcgggagggacaggagaacaggcacgaccccaccggcaccaccacggg

SEQ ID NO: 198573 - RNA, 76 nt, Homo sapiens
cggccggcgcggacagacgagacagagaccagcagagggggcaagaagacgaggcagagggacaccgcaccaaaga

SEQ ID NO: 198574 - RNA, 86 nt, Homo sapiens
gagaacccagcggcggagcaggacgcggaacacccagaggccagcacaacaaagcagaccccacgagcgaaagggaaaaaacgaag

SEQ ID NO: 198575 - RNA, 42 nt, Homo sapiens
accagccagaaagcacgagggccgcaggagccggggccagcg

SEQ ID NO: 198576 - RNA, 54 nt, Homo sapiens
agaacaaacagcaggcaagcacaacgaaaccagccaagcaaccggaaagaggca

SEQ ID NO: 198577 - RNA, 67 nt, Homo sapiens
ccccagcgaaacaccaagaggggagaacaacaagaagaaacccaccaagagaaaacgggcacaccaa

SEQ ID NO: 198578 - RNA, 79 nt, Homo sapiens
cccggagcagcagcccgccggcacgcgagccccagcaaggcccggagcacacaaggcgaaagaaaaggcaagagaaccg

SEQ ID NO: 198579 - RNA, 78 nt, Homo sapiens
agagaccggggaaccaccccacgaaaaaaacagggggaagagagaaagacacaaggcagacaaagaagcacggaacag

SEQ ID NO: 198580 - RNA, 50 nt, Homo sapiens
aggaaaaggccacgggaggaagacccaaaagggcacaggaaaaaagagcg

SEQ ID NO: 198581 - RNA, 79 nt, Homo sapiens
gcgcagcaacagcaagccccgggcagggaccagaccaccacagcgccccgagagaccccggagaccaagcggccgcaag

SEQ ID NO: 198582 - RNA, 82 nt, Homo sapiens
cagccggggaagagacccaaacgccaacagaaacgcaccaccaagaagcggcagaagcagagccacccaaggggcggagcgg

SEQ ID NO: 198583 - RNA, 84 nt, Homo sapiens
ggcaccgggacggaccgagaccggaccgagagcggaccgagagcgcgaaacgcacgagaagagaggcgacaaagacgcggggag

SEQ ID NO: 198584 - RNA, 74 nt, Homo sapiens
cggcggagacgggcggccggccgacccccgcgcgacggcgacgcgggaggccagggacaagagaaaaaaagggc

SEQ ID NO: 198585 - RNA, 63 nt, Homo sapiens
ccgcgcacagaagcaaggacaaccagaaagcaggggaccacaggacacacagaaagaccaaca

SEQ ID NO: 198586 - RNA, 63 nt, Homo sapiens
ccgagggcaagaggccgaccgacaggcaggagcgaggcagcgcaggagcagaccggagccgga

SEQ ID NO: 198587 - RNA, 84 nt, Homo sapiens
ccgcgggccgccagacgggaaggaggacaccccaaggcaccggcgggcgacgagaacaaccccgagagcgggacgcgcgccaca

SEQ ID NO: 198588 - RNA, 68 nt, Homo sapiens
ggaccaagaaccaggagccaacccgggaagagccacacggaaggaggaaaaaccaggaacgcagccca

SEQ ID NO: 198589 - RNA, 79 nt, Homo sapiens
caaacgaaacacgaacggcaggaaaagcagaccggcgaaggagacaaccgaacagcgaaaggacacagacagaggagcg

SEQ ID NO: 198590 - RNA, 46 nt, Homo sapiens
aagaccaaacaacaggcagcagaggcaaggcggcagcaaaacgggc

SEQ ID NO: 198591 - RNA, 73 nt, Homo sapiens
acaacaccaaaaagccgcagggccagaagacgaaacaggaacacgaagcgcaaacgccgagaaggccagaaac

SEQ ID NO: 198592 - RNA, 86 nt, Homo sapiens
cgcgggcgagcggcggggagcggcgaagccgcgggcgagagagcgccgccgcggcccccgggagacgacccccaaaaaggaaacaa

SEQ ID NO: 198593 - RNA, 83 nt, Homo sapiens
cgagagccgcggggagaaggccacacccaggcagcaagggcaccgcgagcaaggaggagaggcaacacgcgggcagccggcag

SEQ ID NO: 198594 - RNA, 82 nt, Homo sapiens
gaagggggaaaggcaccaggacaagcaaagggcggaagggcaagaaagaaggaaagcccaagagggagcgcccgacacgccc

SEQ ID NO: 198595 - RNA, 76 nt, Homo sapiens
cggagcccaccaagcgggaacagcgagcaaggcaagaagccgaggaacggcagaagggcgggaaaaaggaggaggc

SEQ ID NO: 198596 - RNA, 70 nt, Homo sapiens
accacccggggccccgccgagaaaccgcagagcacagaaagcggcagcccagaaccggaagcgaccacgg

SEQ ID NO: 198597 - RNA, 71 nt, Homo sapiens
acaagaaaccgcacaagaccgggagggacgagagcggccgaacgcaagggaccccaacacgcaccgaaacg

SEQ ID NO: 198598 - RNA, 82 nt, Homo sapiens
aggcggcggcgaggacggcgacggcgaggagagagaggaccagaaccagaccggaaagcaccaggcaaagaaaaaaacagga

SEQ ID NO: 198599 - RNA, 73 nt, Homo sapiens
agagaaaaaaacaaccgcacgggcaaaaggacaaacgagcgcaacccccgaaacggaacgagcgaaagacgag

SEQ ID NO: 198600 - RNA, 77 nt, Homo sapiens
ccggacagacccccgccccgaggacggacaagcggccaaccagagaggaaagccgaggacagccacacacgccccgg

SEQ ID NO: 198601 - RNA, 53 nt, Homo sapiens
acgcggacgaggcccaacagcgaggggacgagaaaggggcgccggccgagccc

SEQ ID NO: 198602 - RNA, 98 nt, Homo sapiens
gcgaacagcacagagcccccggaaggagagcgcgggcgggcgcgccccaggggaaccgcccaaaagcccgccagaagaaggacgggagccaaaagaag

SEQ ID NO: 198603 - RNA, 83 nt, Homo sapiens
cgaaaagagagcagaaggagggaggaaggccccacaggaacacccagacccccagcgaaggggggcccaggcaagcacagcgg

SEQ ID NO: 198604 - RNA, 78 nt, Homo sapiens
cggcgacggagcacgacccaaggcccagcaacggcccccgaacccagcccgagggagcgcccaaacggaaccgccacc

SEQ ID NO: 198605 - RNA, 69 nt, Homo sapiens
ggggcaccaagccagcccacagaccagcagacgaaacacgccaaagagggagcggaagacagcaccgca

SEQ ID NO: 198606 - RNA, 70 nt, Homo sapiens
ccgagacgccccgcgccccggagacccgcggaaccagggcacaggcacgggggcccaccaccccacgcag

SEQ ID NO: 198607 - RNA, 65 nt, Homo sapiens
cccccgggaaacaagagacgacgggaagagaggagccacacaggccggaagccacccagggccag

SEQ ID NO: 198608 - RNA, 69 nt, Homo sapiens
ggaggcgaggcaaacggggggcgcggagggaccagcgagcgggaggcaagaccgggcagacaagaagcg

SEQ ID NO: 198609 - RNA, 77 nt, Homo sapiens
gccacacaccgcggagccaaccgaggcgcacaagaagccacacaaaagggacacacgacccgagaccacgacgagag

SEQ ID NO: 198610 - RNA, 72 nt, Homo sapiens
cagaacgaggccggggccaagccaacaggagaggacggacggacaaagccaagcaaaccagaggccccacag

SEQ ID NO: 198611 - RNA, 72 nt, Homo sapiens
agcccccacgcgcgccgggcgggagcgcgagaccgaggcacgggcaggcacagcagaccagaagcagcgagg

SEQ ID NO: 198612 - RNA, 83 nt, Homo sapiens
gcgcgggagcagcacccacagccaaggcgggagccacggaggaaaaggcccacacgaccaggaagaaagaagaaagagagagg

SEQ ID NO: 198613 - RNA, 35 nt, Homo sapiens
gaccaagaaccaggacccagaagaaccacgcgcag

SEQ ID NO: 198614 - RNA, 72 nt, Homo sapiens
gaaccaagaacaagcacgcagagggagcccccacaagggaccgaggaggaaggagaagaagcgaaggaagga

SEQ ID NO: 198615 - RNA, 75 nt, Homo sapiens
aacccaaagaccccgccggagacgagaggcgccacggggggaaccagaagcacaagcacgaaagccacaaaaggg

SEQ ID NO: 198616 - RNA, 60 nt, Homo sapiens
ccaacacagggggaagggagccagccagcccccagcgcagccgcgagggcaaagaagggc

SEQ ID NO: 198617 - RNA, 54 nt, Homo sapiens
ggaggacgcacccggggaaccagcaaacaagcggaaaagcggcgacaaccggcg

SEQ ID NO: 198618 - RNA, 74 nt, Homo sapiens
cagcaaaccaccgacaaaccagaggagaaaaggaagacgggggccgggagaagcacggaaagcaggggaggcaa

SEQ ID NO: 198619 - RNA, 69 nt, Homo sapiens
aagaaaaaaaccgcacagagacgcaaacaaagacccggacccgaaagaaggacgcaaagcaaggagagc

SEQ ID NO: 198620 - RNA, 78 nt, Homo sapiens
gaagccaagcagaaaaaccaaagcacccgaaagaaaggacacaaccagagggaagcacgcccgggcacagcggaagag

SEQ ID NO: 198621 - RNA, 77 nt, Homo sapiens
caaccacaagaagaaaccaagggcagagcaacaagagaccgcaaccccgaccgagaccaccagcagacagcagcagc

SEQ ID NO: 198622 - RNA, 77 nt, Homo sapiens
aaaaacccccaccgggaaaaaggggaagcgggcccgaacagaggagcagagccaagcagccacgaacagaggcaggc

SEQ ID NO: 198623 - RNA, 64 nt, Homo sapiens
aaagggacgaacacagagaaggaccggggacaacacaggacagaccggagagaacagaaaaaaa

SEQ ID NO: 198624 - RNA, 85 nt, Homo sapiens
ggagggggcagcccgggagaaccgcggcggccggagcgcggagaccaggccaaaaggagggaaaacccaccggacaaagaggagg

SEQ ID NO: 198625 - RNA, 78 nt, Homo sapiens
cgcgcccccaggagaaccaagagaggaccggcaaaaagcggaaaccaacaggagaccacccccaaagaagaaacaaga

SEQ ID NO: 198626 - RNA, 76 nt, Homo sapiens
cacccccggcgggcccgaggcggcgagagaggcaggcggagccgaccgggccagaggacaacagcagagccaggag

SEQ ID NO: 198627 - RNA, 53 nt, Homo sapiens
agcggaggagaaggcaggaagagccaaggagacaacagaacggaccaagaacg

SEQ ID NO: 198628 - RNA, 52 nt, Homo sapiens
gaaagccacccacaaacaaacacccacggaaccagagaccacaggaaagaga

SEQ ID NO: 198629 - RNA, 88 nt, Homo sapiens
gggcccgcgcgcccggccaagaggcaaaggggaggacgcagcaaaccaccagaaggaggggagggggggccagcggcggagcggagga

SEQ ID NO: 198630 - RNA, 72 nt, Homo sapiens
agaccaccgcccaacacaacacgcagggccccagggcaaagagcggcagaagggaggagaggagggggaggg

SEQ ID NO: 198631 - RNA, 73 nt, Homo sapiens
caccccgaccccccaggcgggagaccgggcaccgccgaccgaaaccgcaaacacacgacagaggcaaggcaaa

SEQ ID NO: 198632 - RNA, 70 nt, Homo sapiens
gaacagggaaggcccaagacaagaggagcagacccgggacgaggcagcacacggcaaccccgcacaaacc

SEQ ID NO: 198633 - RNA, 78 nt, Homo sapiens
ccgcagcccccgggcacgaccccggacacgggcaggcaggccaagccgacgccagcgggcgccacccaacaggcgcac

SEQ ID NO: 198634 - RNA, 58 nt, Homo sapiens
acgggcaccgagagggacacggggcaccgcgccgcagcggcagagacggggagccccg

SEQ ID NO: 198635 - RNA, 70 nt, Homo sapiens
agagcccggaaaggcccgcggcgaggagcgagcagaggggaaaaaagcagcggaggagaaaaaaaagaag

SEQ ID NO: 198636 - RNA, 82 nt, Homo sapiens
cgaaccgcagacagcggccaagaagacacaaaggacggaggcacgccagggccccccacgcgagaacccgggccggggcccg

SEQ ID NO: 198637 - RNA, 75 nt, Homo sapiens
accccgccgccgggcgccccgcgggaacaaggaccaacaccaaggaccagccaccgaaccacacaccaaagaaaa

SEQ ID NO: 198638 - RNA, 60 nt, Homo sapiens
ccggagcaggagaaacccagcgccaccagcagacgaaaaccagacgagagacagaagacg

SEQ ID NO: 198639 - RNA, 73 nt, Homo sapiens
acgaggccggcaacccacagaggcaaccaacacaaggacagagacggaaagggcaaagaagcgcccccacaga

SEQ ID NO: 198640 - RNA, 70 nt, Homo sapiens
ggcggccgcaccagagcccgcgcgagcggcccagacagcaggcggccgaagggcagaaagagagccggag

SEQ ID NO: 198641 - RNA, 71 nt, Homo sapiens
gcgaacagggagaagacagggcagacagaaaaaaggggacaagccacaagagaagagacaacaggaaggac

SEQ ID NO: 198642 - RNA, 69 nt, Homo sapiens
gacaagaggagacacgagggaacaaacaccggagcaccgcgggaaaacggcacaaggcgacgagggagg

SEQ ID NO: 198643 - RNA, 75 nt, Homo sapiens
gccccaccgagaccccagcagccacacacgaaggagcccggaccgaacagcaacccccagcggagggacaggacc

SEQ ID NO: 198644 - RNA, 66 nt, Homo sapiens
cgaaaaccaagacacaaaccaccacagagaagacaccgaaacggcgcacaccacaggccaaacaca

SEQ ID NO: 198645 - RNA, 93 nt, Homo sapiens
cggcaaggggacccaggcgcccgcacgcgagggaacgaggggccagccccggggagcccacgcgccacagcaggaggagggagggcggggggg

SEQ ID NO: 198646 - RNA, 50 nt, Homo sapiens
cggggcgagccggaggagcacccaaccccgcggcgaagaccagggccaca

SEQ ID NO: 198647 - RNA, 81 nt, Homo sapiens
ccccacgcagccagccccggcggggccccgggagacgggcgggagagagcaccaacccgagaacagcgagccaagacgggc

SEQ ID NO: 198648 - RNA, 75 nt, Homo sapiens
acacaaggaaacaaacaacaaaaacaaaagccagaaaaccccaaagcaaacgcgggagagaggaaggaggccgaa

SEQ ID NO: 198649 - RNA, 77 nt, Homo sapiens
gaggccgagaggcagagcgcaggaaccggagggacggagggcaaccaggaagaaggggacaccaacagagagaggca

SEQ ID NO: 198650 - RNA, 78 nt, Homo sapiens
cgccacagcggcccggccccccggacagacgccgacgcccagggcggagaacggaaaagcaccaggaagcagagagga

SEQ ID NO: 198651 - RNA, 77 nt, Homo sapiens
aagaaaacagaccccacagaaaagaagaagcaagcaaagaacaaaacaggagcaaagccaggagaaacagacgaccc

SEQ ID NO: 198652 - RNA, 81 nt, Homo sapiens
aaagcgaaggccgcggggaaggggcccggcaaggcgccaccggaagaaacgggaggggaggagccgggaaagacagcgcca

SEQ ID NO: 198653 - RNA, 82 nt, Homo sapiens
gcagcagcccagcggcagcagaaagagcaggagaacaagccgacggagaccgcccgcccagggcacaggagccccggggaga

SEQ ID NO: 198654 - RNA, 53 nt, Homo sapiens
aagacaaggggggcgaggaggaaaccgagggaaaggaggagaagaacaagagg

SEQ ID NO: 198655 - RNA, 73 nt, Homo sapiens
accacggccacagccgccgcagacccagcagccaagagggaagcagacgagagcaagacacaagcgggacgga

SEQ ID NO: 198656 - RNA, 76 nt, Homo sapiens
cccgcgccgcaggaggccggcgaggagcgccgcgcccgcccggagacgacaacgagggagccgcggaagaaggccg

SEQ ID NO: 198657 - RNA, 71 nt, Homo sapiens
aaccagagaagccggcgagacagccgaacgccggaagcacaaggcaccaagccagcaaggaggggacacca

SEQ ID NO: 198658 - RNA, 62 nt, Homo sapiens
ccacgacgccgggaccggccaagggcccacacaccaagaccaagcgcaaggagaggcgcacg

SEQ ID NO: 198659 - RNA, 64 nt, Homo sapiens
gccagcgcagccgcggcggagacgcacaggcccgacgcggggaggaggaggaggaagggagcgg

SEQ ID NO: 198660 - RNA, 69 nt, Homo sapiens
gaaagacaaagacccaggaacaaaccgggggcaaggccaaaaagaagggccagggaagagcgggggccg

SEQ ID NO: 198661 - RNA, 48 nt, Homo sapiens
acgcagccaagaaccagggaagcacgaaacgcccaacacgcgcgcacc

SEQ ID NO: 198662 - RNA, 67 nt, Homo sapiens
ccaaagggaaaacagaaacaggggagaagcagaccgcaccaggcgggaccccgaaaaagcccaaaca

SEQ ID NO: 198663 - RNA, 75 nt, Homo sapiens
acacagcgccagaagcaccacggaaaccagggaggcccaagcagccccaaaaaacagacaaacgcaggcaagggg

SEQ ID NO: 198664 - RNA, 90 nt, Homo sapiens
gcggcaccacggcgacgcacaaggcccagccacaggccagcggggccccgggggaggagggcagcaaagaagaacagacaagggcccacg

SEQ ID NO: 198665 - RNA, 72 nt, Homo sapiens
gcgaagccgaagaagaaaacacggggccagaggaacgccacaaagcaggcgaacaagaacacaggaaagaaa

SEQ ID NO: 198666 - RNA, 48 nt, Homo sapiens
ccccagccggacgggcagggaaaggacgaagagcaaacccccgacagg

SEQ ID NO: 198667 - RNA, 74 nt, Homo sapiens
caaacacaggcagaacaagagagacagaaagagaaaagggacagagcgaggaaaaggcacagggaagcacgcag

SEQ ID NO: 198668 - RNA, 78 nt, Homo sapiens
agagcacgagcggaccgcgagagacgagagcacgacacggccgcacgggcccacgccaggaaggacaggccgagcgcc

SEQ ID NO: 198669 - RNA, 79 nt, Homo sapiens
ggcaggaaggacagcacgcaaggccagggggaaccagggagggccccccggagaaagggaacggaaaaagcaacaaaac

SEQ ID NO: 198670 - RNA, 71 nt, Homo sapiens
cagagggggaaagccaaggaaaaacggagagccacaaaaaaggaagcgaaaacggacgccacgccaccccc

SEQ ID NO: 198671 - RNA, 80 nt, Homo sapiens
ggaacgcagaagaagcgccgcgaagacccccagaaaaccaaaggcagacgcggacaccagaccaagagaccaaacaagcc

SEQ ID NO: 198672 - RNA, 74 nt, Homo sapiens
acccaggaaacagcgcaagggcaggacccgaggcgccagcagcagcaagaccgggggaccaggcgaacgaggca

SEQ ID NO: 198673 - RNA, 87 nt, Homo sapiens
cagacaacccagccgccgcggcccggaaacgggcacccagcaccggcgaccagaagagaggcaagaagcagacagcccgggaaagaa

SEQ ID NO: 198674 - RNA, 66 nt, Homo sapiens
cggcgagacggcggcaggacggcggcagcaggaacgaagcaggaagggaacgagcggcaaggcgaa

SEQ ID NO: 198675 - RNA, 38 nt, Homo sapiens
ccgaacggggcaaaaaggcgggcggagaacggaaaagc

SEQ ID NO: 198676 - RNA, 74 nt, Homo sapiens
gagaaacccccgccaacacaccacgggaccgggcaagggaagaaaaggaaacagaacgacagcccgcaccgacg

SEQ ID NO: 198677 - RNA, 54 nt, Homo sapiens
ggcgcccggacacagaagaggacaggggacaccgcgcagggggcccccggcccc

SEQ ID NO: 198678 - RNA, 62 nt, Homo sapiens
ccaagaaggagaccaccagcaggcagaagacaccaacccaagaaacagagcggaaccaccag

SEQ ID NO: 198679 - RNA, 83 nt, Homo sapiens
gaagagacagcaggggccccaggcaaagagggagcaggaacagagacacagcccgacgagcagaaaaaccccccccgagagac

SEQ ID NO: 198680 - RNA, 60 nt, Homo sapiens
gaagccggggaccagaaaggaacggcaagacaacaagacaaaaaggacccgacagcacac

SEQ ID NO: 198681 - RNA, 76 nt, Homo sapiens
accagaaaacaaagacaaaaggagacgagaagaagacaagagggcgaccaaggaaagagccaaaagagccaggaag

SEQ ID NO: 198682 - RNA, 63 nt, Homo sapiens
ggcggggaccacggacggaccccgaccgggacccacgaggaagcggccgcggcgaaccccaga

SEQ ID NO: 198683 - RNA, 64 nt, Homo sapiens
gggccaagggggaggcggaaggaaggacacaaccagagggaagcacgcccgggcacagcggaag

SEQ ID NO: 198684 - RNA, 79 nt, Homo sapiens
cgaggcggaccggagacagacccccgccccgaaggcgaaaccgggagggagccggaaacaaagaagaggagaaaaagcc

SEQ ID NO: 198685 - RNA, 68 nt, Homo sapiens
gaggagccccgggagggccgcggcgacggagccacgcagcagggaagacacacccaggaccaaccgaa

SEQ ID NO: 198686 - RNA, 40 nt, Homo sapiens
gagaagaggggggcggaaagacggcgaaccaaacccacca

SEQ ID NO: 198687 - RNA, 80 nt, Homo sapiens
ggacacacaacgcccaggaggaacccacacacccagggagcaaaagagagcgcaggagccgggcccagcccccagccgcc

SEQ ID NO: 198688 - RNA, 81 nt, Homo sapiens
cacggcccccccggggcgcggcgaccccggcggcgggaggcccggccgggcagggagacccgaccaccggaagccacggcc

SEQ ID NO: 198689 - RNA, 72 nt, Homo sapiens
gcaaggaccgcaggacccaggccagaccggagcagcggggacagggaagaccaaagcaagggaggagaagcc

SEQ ID NO: 198690 - RNA, 74 nt, Homo sapiens
ccccaagagagggaacagggcaagcaaaggaggcacggaaggacgcagagacgaggaaaaaacgaaacggagag

SEQ ID NO: 198691 - RNA, 67 nt, Homo sapiens
aagacacaagaggcgccggcgggaaaacaacagccggcgaggcaaacacacagccaaggggaaaaag

SEQ ID NO: 198692 - RNA, 69 nt, Homo sapiens
gcgccacggccacgccccccgcaacaacccacaagggggagccccccagacccgaaaggagacaagagg

SEQ ID NO: 198693 - RNA, 87 nt, Homo sapiens
cagaccggcgacccgcgacgccgagcacccaggcgacgcccaccaaggaacccaagacagaccaggagaggagcagccggaaagcaa

SEQ ID NO: 198694 - RNA, 88 nt, Homo sapiens
gcaaggcgagcccaagaaaggcgaaacccacagaacgcaggggcagaagaggcggccacccacgagccgacggcaaacgccagggagc

SEQ ID NO: 198695 - RNA, 80 nt, Homo sapiens
ggcgcgagggcgggggcagcggcaggacagaaagaaggaaaaaacgcaagaaggaagaaagagagaaagcaaggaaaacg

SEQ ID NO: 198696 - RNA, 53 nt, Homo sapiens
aagggccaaagaagggagaggacgagagacaaagaggcacgaggcggagaaac

SEQ ID NO: 198697 - RNA, 76 nt, Homo sapiens
gggcccagcaaagccaaaggaaggaccagaaaagacgcagagcccagagaagaaagagaccagcagggggagagca

SEQ ID NO: 198698 - RNA, 77 nt, Homo sapiens
ggccaggggccggccagagcaggaaaaaagcgaaggcaacaggagcgggaaacggcagaggaaggcggaaggagccg

SEQ ID NO: 198699 - RNA, 78 nt, Homo sapiens
cgagaccggaccgagagcggaccgagagcgcgaaacgcacgagaagaagaggaacacggggcgccacccgaccaccca

SEQ ID NO: 198700 - RNA, 63 nt, Homo sapiens
accccgacaccagagaaggaaacagcagcaacggaccgcaagaacaacaggaaaccgcgaaca

SEQ ID NO: 198701 - RNA, 78 nt, Homo sapiens
ggggagcgcgccagaggccagcccgcggcccgaaggggaaaaggggaggcaaggcaagagcgaacagaaggaacgacg

SEQ ID NO: 198702 - RNA, 82 nt, Homo sapiens
cgacgaggaacggcggagcagggagcccaaagaccccggagacaggaagaaaacaccggagcccaagacaccaaaacagacg

SEQ ID NO: 198703 - RNA, 111 nt, Homo sapiens
caccgcggagcaaggaaaagacccggaaagaagagacacagaggagccacacccccagccagcggaccacaagcaaacaaaagccaacacgaaccccaagcccggccaagc

SEQ ID NO: 198704 - RNA, 73 nt, Homo sapiens
aacacagcagaaccgccagagaagagagacaaaaccaaaggaggaaggccagcggaagacacacccgcaaaac

SEQ ID NO: 198705 - RNA, 72 nt, Homo sapiens
agcagcggaggcagccaggcaagaggcgcgcagccccgagacacaccgggcaccacacggcaacaggcgacg

SEQ ID NO: 198706 - RNA, 79 nt, Homo sapiens
ggaggaagagagaaggcagagcgaaggacaaggaagcggagagcacggcagaagcgagacacaagaaaagagcaagaag

SEQ ID NO: 198707 - RNA, 68 nt, Homo sapiens
ggaggcgcgcggagaaagggggcacagcaacagagcgcaccccgaagaacgccagagggaagaaaacg

SEQ ID NO: 198708 - RNA, 35 nt, Homo sapiens
gaaaggcgagggaagcgccggagaaaaacccagga

SEQ ID NO: 198709 - RNA, 67 nt, Homo sapiens
ggccaggcggccccgagcggaacggagaaagcgagggacaagaggaccacacccagcccaggacaaa

SEQ ID NO: 198710 - RNA, 59 nt, Homo sapiens
cgcgggggacagagagagccacgaggcagccagacacgggcaaaaaagcgggagcggag

SEQ ID NO: 198711 - RNA, 74 nt, Homo sapiens
gaaggaccaagaaccagggggacgaccaccagccaggccggggacaaacaggcaaccgacggggaggggcaagg

SEQ ID NO: 198712 - RNA, 73 nt, Homo sapiens
gagcgcacagagaacggcacccaggccaggcaccggccgccaccagggcacgcgcagaaccggccgaaaagca

SEQ ID NO: 198713 - RNA, 71 nt, Homo sapiens
gacacggggccacgacggggggagcccacaagcccggagggcacgagccacacgccacgcccgcagggccc

SEQ ID NO: 198714 - RNA, 77 nt, Homo sapiens
caagcccacgaaagaaagccacgaggcggaagaaacggacaccaccagagcaagccccgaagccaccaagacccagg

SEQ ID NO: 198715 - RNA, 75 nt, Homo sapiens
aggacaggacccagcgcgggacagccagcggaaaagccagggcggaaaccggcaagaggaagagaaagaaaaaaa

SEQ ID NO: 198716 - RNA, 82 nt, Homo sapiens
aggcgccggccggcgcgaagacgcgggggccgccccccggcccaggggaaggacaccgagcgggcagaggacaagcgacgag

SEQ ID NO: 198717 - RNA, 53 nt, Homo sapiens
cccagcagccaaaaaaaaagacagaaagaacagaaaaccagaaggcaccgaca

SEQ ID NO: 198718 - RNA, 74 nt, Homo sapiens
gaccgaagaggaggcaagcacggggggacgggcaggcaaaggcggaaaaaggcaccaggaccagaggacgcacc

SEQ ID NO: 198719 - RNA, 82 nt, Homo sapiens
cggggccccgcacagagagccgaggcgccccgcgggagaaggacccccgcgccggcagagggcagaccggaagagaagaagg

SEQ ID NO: 198720 - RNA, 80 nt, Homo sapiens
gggagaggcagaaggcaacggggaagagcgcaggggggcaacagggcagagagccacaggcggccaggccagagaagcca

SEQ ID NO: 198721 - RNA, 91 nt, Homo sapiens
ggcgaggcagagaagggccaggagaggagcacgaggacaggccccgacgaggacagagccagggagaacgaagagacaaagagcgccgcgg

SEQ ID NO: 198722 - RNA, 73 nt, Homo sapiens
ccgcaggcgagcagaaccagcggcagggagaagcagacacggccaacacgcgccagcagggggccccaggacc

SEQ ID NO: 198723 - RNA, 85 nt, Homo sapiens
acaaaaccgaggcccaaagagcccaggagaagcggagcggcagagaaaaaggccaccgaggacagaggacgcagaaaacaaccac

SEQ ID NO: 198724 - RNA, 70 nt, Homo sapiens
cagccagcaggccgggcggggaagaaagacaaggcgaccgaaccaaggagcaggccagaaaagaccaggc

SEQ ID NO: 198725 - RNA, 76 nt, Homo sapiens
aaaccaggccccaaggccggaagaagggagagcagaagccgcgaaaaaggggggccgagcaccacgcgcgcccgag

SEQ ID NO: 198726 - RNA, 68 nt, Homo sapiens
caaccaaccccaccgaggaggacagagacgcaagacccggacacgaagacgaaaccagagggagggcc

SEQ ID NO: 198727 - RNA, 77 nt, Homo sapiens
gcccgcaacccgaaccacggacaggacccgcccagcccaacggggaggggacgaagggaacccgccgggcggcccgg

SEQ ID NO: 198728 - RNA, 83 nt, Homo sapiens
gggagggcagaggacaagcggagccgaaccagcggaggcccagcccaacacccaagaagccagccggcgggacaccaagcagg

SEQ ID NO: 198729 - RNA, 65 nt, Homo sapiens
aagagagccacacaacacgaaaaagcaaagcacgcagggccagaggccagacagagcgcaagcga

SEQ ID NO: 198730 - RNA, 69 nt, Homo sapiens
aaaccaaaccagcaccgggcaccacaggcaagaggagcccagaccgagaaccgggggaacgcgggcgcc

SEQ ID NO: 198731 - RNA, 55 nt, Homo sapiens
cccggccgaaccccgccgcaccacgcaccaggcacacaagggacacagagacacc

SEQ ID NO: 198732 - RNA, 80 nt, Homo sapiens
gggccccaggggaccggagacccagggcgaaaacggcggcagaccagcagacagaggagcagccgcgcaagggggaaggg

SEQ ID NO: 198733 - RNA, 70 nt, Homo sapiens
gggagccgcgcaaaggccccggcaagaaggggagagaacaaaaggaaaagacacaaaggagggcaaggcg

SEQ ID NO: 198734 - RNA, 87 nt, Homo sapiens
cgcggggcccggcggggcggccggggcggcgcgacggcgggcgcagggaggcgacaagagcagccggccccggcagcgaagcgaacc

SEQ ID NO: 198735 - RNA, 52 nt, Homo sapiens
gacaccgacagcaggaaagaagggggaacaacgagaccaacccacagaggac

SEQ ID NO: 198736 - RNA, 71 nt, Homo sapiens
agacgcgaggacggagggcgaccagcagaagcacagaagaccccagccaggaagaagccagcgagaagccc

SEQ ID NO: 198737 - RNA, 84 nt, Homo sapiens
cgcgagcccgacccccaggcagccgccgccccagcacccccagcgacacccgcgcccggagaaagggggagagagagcggagcc

SEQ ID NO: 198738 - RNA, 89 nt, Homo sapiens
ggagaaacacaggacagaagggaagaaaaagggaacccggcaggaccagaagcgagagccaggacaagcaggaggacagaagacaggag

SEQ ID NO: 198739 - RNA, 80 nt, Homo sapiens
gcggagcagaggggaccgaccgagagaagaacccagggcgccaggcgccggaaccggcaggggcgaacccaggcacccag

SEQ ID NO: 198740 - RNA, 80 nt, Homo sapiens
gcaaggacggcagagaacgacagggcagcggagaccaagagggaaaaccaagacccaccaagacaggggagcgcccaggc

SEQ ID NO: 198741 - RNA, 82 nt, Homo sapiens
ggcaccgggacggaccgagaccggaccgagagcggaccgagagcgcgaaacgcacgagaagccgccaccggcaacaaccaga

SEQ ID NO: 198742 - RNA, 79 nt, Homo sapiens
ccccggggaacccgcagcacaccagggggcaggcccggaacaagacgaccaacaaccaggagcgaagaaccaggccacc

SEQ ID NO: 198743 - RNA, 74 nt, Homo sapiens
gcaagccaagcaaagcagcggacccggggcacagggaaagggcccccaggggccggacacaagagggcaagaaa

SEQ ID NO: 198744 - RNA, 82 nt, Homo sapiens
ccgaccggcaccgccaccggacaaacggacaccggggcgcgagacaggaagaaaaaagcgggcacgggcagcacaaagccgg

SEQ ID NO: 198745 - RNA, 80 nt, Homo sapiens
cccacaagccacagaaaacaacagcgcgaagagagagacaaaaggacccaggaaaggaagacagcagagacaaagccgcc

SEQ ID NO: 198746 - RNA, 80 nt, Homo sapiens
ggggagcccagcggcgcgccggcagcaggaaaccaagggagaggacaagagacagaaagacagaaaaacacacggccaac

SEQ ID NO: 198747 - RNA, 74 nt, Homo sapiens
cagaacagaaggcccccccaaacaaacccaaagggccaccccccaacaggcaagacagaagacgggggacccac

SEQ ID NO: 198748 - RNA, 80 nt, Homo sapiens
accagagccaaccccacaggcagagaccagcaccacaagcaaagaccacggcaccaaggaggagaggcgcaccagaaggg

SEQ ID NO: 198749 - RNA, 71 nt, Homo sapiens
accagggggaaacacagaacgcaggaacgagagcccagacagagaaagcagacacgaacaagccgagcgac

SEQ ID NO: 198750 - RNA, 56 nt, Homo sapiens
cgcgggcaggcagagcaccaggcaaaccgacaccagcgacacaagcgcgagggaac

SEQ ID NO: 198751 - RNA, 74 nt, Homo sapiens
gaacaccaagcggaaaagagcagcgcccagccccagcagagccggaggagccaccaacagaagcaggagccagg

SEQ ID NO: 198752 - RNA, 87 nt, Homo sapiens
gcagcggcccagcggcagcagcagcggcgggaggagccccggggggcaggcagggcccagcaggacgcggaaacaccccggaggcga

SEQ ID NO: 198753 - RNA, 77 nt, Homo sapiens
accacggacggaagacaaaagagggacaggccgccagggggacagaaggagcaggcaaaagcgccaaaacaaccccc

SEQ ID NO: 198754 - RNA, 76 nt, Homo sapiens
caccccgcccacagggaccacgccagaccggccaaacgcacaggcaccgacggaccgaagcgcgcagccgaccacc

SEQ ID NO: 198755 - RNA, 81 nt, Homo sapiens
cgcggcggcggcggcggaggagagccgcagagcgcgcagaccccggagcgaaagaaggagagagcacaacaccacacaaaa

SEQ ID NO: 198756 - RNA, 56 nt, Homo sapiens
gaagacgcccgggccaccaagcaagagaagaacggggagcgcacgcaccagaagaa

SEQ ID NO: 198757 - RNA, 70 nt, Homo sapiens
acgaggagcgcggccaccccccggacaacaacgcagcacacaaacgaggccagacaagaaacaacgacca

SEQ ID NO: 198758 - RNA, 84 nt, Homo sapiens
aaagaaggcccgagcaaagaagagcccgaacaaacaaacacccagaaacaagagagcccaaaaggcagagcgaggagagaagaa

SEQ ID NO: 198759 - RNA, 75 nt, Homo sapiens
gagagagagccgcgcacgcacagacaagcaagcccggagaaaacaggacccggaaggaaacggcgaagaccgccg

SEQ ID NO: 198760 - RNA, 64 nt, Homo sapiens
cacccgaacccccaggcgcgcggcaggagggaccaaggaacagaagacgcccgaaacgaacgac

SEQ ID NO: 198761 - RNA, 81 nt, Homo sapiens
ccggagaaccacccggaggagacggggcagacaacggagcccgggacaagggaggcgaggacggacaaaaggaaacggacg

SEQ ID NO: 198762 - RNA, 82 nt, Homo sapiens
gccccggcagggaggagacggagcgcagcggcacgcacgcgaagacagcggcaggccgagacgcaccagagccggaccgggg

SEQ ID NO: 198763 - RNA, 39 nt, Homo sapiens
cagcagaaggccccggagggaagggacgagccggaaggc

SEQ ID NO: 198764 - RNA, 73 nt, Homo sapiens
aacaccaagccccgaagcacacagaaaggcacccggaaacaagccacgaaggagagaaaaccagcagcagcgc

SEQ ID NO: 198765 - RNA, 69 nt, Homo sapiens
accacaggggagggagcagagccgcaagggccaaagcccaagaacgagaaggccccaggacaccgaagc

SEQ ID NO: 198766 - RNA, 70 nt, Homo sapiens
ccgaagaagggggccggggggggaagacaacccggagaacacccaggggacgcccagaccaaacaacaaa

SEQ ID NO: 198767 - RNA, 81 nt, Homo sapiens
cgggcggaggggggccagagggccccccaggccgccccgcccggaaggaggaaacacaaaacagaaaaccgcagacaagaa

SEQ ID NO: 198768 - RNA, 115 nt, Homo sapiens
gccgcaggagacgagaggacgggaccaggcgaagcggccgagcaggcgagcgaacgacgggggagccccccagacccgaaaggagacaagaggacagccgcacggaacacaaaaa

SEQ ID NO: 198769 - RNA, 81 nt, Homo sapiens
aaaagggcaagaagccagaaggccacggcaagccccaaggacggggcccacgaggccagaggacgccgggcaagagcgcca

SEQ ID NO: 198770 - RNA, 67 nt, Homo sapiens
accggagcgccacggccacggcccccacaaggcgaagagagaacacgcacggaaggaaggagaccac

SEQ ID NO: 198771 - RNA, 84 nt, Homo sapiens
cacaacccgaccaccggagaaccggggcgcaccgccaagagcgggaaacgaaggaggcccaaccacaaaaggagccgacggaac

SEQ ID NO: 198772 - RNA, 56 nt, Homo sapiens
acggcagacacacaacccgacccgacgaacccaagaccaggagcaagaagagagca

SEQ ID NO: 198773 - RNA, 64 nt, Homo sapiens
aaggaaacggagaccaaacgagacaggaagcagagacggagcgcaggcccaggcggcgaacccc

SEQ ID NO: 198774 - RNA, 71 nt, Homo sapiens
ggagagacagcacagcacccacaaagcaacgaggcgacacgggaaacgcacccgcacagagcgcagaacgc

SEQ ID NO: 198775 - RNA, 67 nt, Homo sapiens
caggaaaggcgccgaagaggacccaagaagaacagaaggaagacaaagagacggcacccccaaagaa

SEQ ID NO: 198776 - RNA, 62 nt, Homo sapiens
cgacaggaggagacaggcgagagaggaggacacgaccgagggcagcagaagggcggggaaac

SEQ ID NO: 198777 - RNA, 50 nt, Homo sapiens
gaggcacgaagacacagagaaagcgggaaagggaacacaagaggaaacag

SEQ ID NO: 198778 - RNA, 78 nt, Homo sapiens
cccagccaccagcaaaccaggagccggacagggcagaccgccagcagcacagcaagccacagagagggccggcagggc

SEQ ID NO: 198779 - RNA, 67 nt, Homo sapiens
cagggcggaagcccgccccagagcaggccggccggcaacagagaaaggcgaagaaccaagaaggacc

SEQ ID NO: 198780 - RNA, 76 nt, Homo sapiens
gagggcaaggcgccagaccaagacaacaggcacaaagagagaaggaacacccacagggcagacagagaaagaacac

SEQ ID NO: 198781 - RNA, 79 nt, Homo sapiens
gaagagcgccacagcggcaaacaggcagacagacaaccgagcacaaaaaaggcacccggagaacagacagaccagccga

SEQ ID NO: 198782 - RNA, 71 nt, Homo sapiens
ggaagcggcgccgaaaaaaaggagaaggcgagcggccagacaaaggaaacaaccgcggcaaggaaccacag

SEQ ID NO: 198783 - RNA, 72 nt, Homo sapiens
gcagaacgcaggaacagaggagcggacagggacaagcgcacagcggagaaagcagcgcggccaggaggcggg

SEQ ID NO: 198784 - RNA, 71 nt, Homo sapiens
aaggacccaccagcccccagagcgagacacagaggcgagaacagagcgagaagacaagcagaagcccggcc

SEQ ID NO: 198785 - RNA, 80 nt, Homo sapiens
caccggcggaagccccaaggaaccacgccaacggaagcagggcgcaggagagaccgcagccagcgagaacgcaaaagccc

SEQ ID NO: 198786 - RNA, 77 nt, Homo sapiens
ggaggccgagcaacaagaaccagacgaaagagcccggaacgccagagcggaaaggaagagaacgccggaagcgcaac

SEQ ID NO: 198787 - RNA, 60 nt, Homo sapiens
acagcaagcacaccgaaaacccccccaggaggaggaccagacaagcggaggagagaaagc

SEQ ID NO: 198788 - RNA, 63 nt, Homo sapiens
cccggaaaaacccaaggacacaagcgggacggaagaggcccggcgaccggacagaaaccaagc

SEQ ID NO: 198789 - RNA, 87 nt, Homo sapiens
cgcaggagcgcagccacggcgagcagggcgccgggagagcaccggaagaagcgcggcggaagaaggagcggcaaacagcccgacgcc

SEQ ID NO: 198790 - RNA, 81 nt, Homo sapiens
gaacgccgcgggaagaagggccagaaaaaagagagcccaaaaggcagagcgaggagagaagaaggagggaaagccaaacaa

SEQ ID NO: 198791 - RNA, 84 nt, Homo sapiens
cggggacgcgggaacacgaacaacagggcaagagaacagcacccggacaaccaggaagcaaaagggacagcaaacaaacggaaa

SEQ ID NO: 198792 - RNA, 81 nt, Homo sapiens
acacgcgaaggcaagaagacaggaacgggacacacaaaccccaaccagggacaagggaccaagaaaggcccagggaccaaa

SEQ ID NO: 198793 - RNA, 40 nt, Homo sapiens
cgcagagggcggagcggcagggaccggggaggcgcgggaa

SEQ ID NO: 198794 - RNA, 81 nt, Homo sapiens
aggcgcgagcggcccgcaagacacaacccacggagggcaccccaaggccacccggagagaaccccaagagagcccagaaac

SEQ ID NO: 198795 - RNA, 38 nt, Homo sapiens
gacagagacaacaccgagagagaaggcacaaaaccgcc

SEQ ID NO: 198796 - RNA, 82 nt, Homo sapiens
cgccgagcgcgccgcgagaccccgccccccaggaagggagcgagaaaccacagaacagaggggccgaacccacacaagcaga

SEQ ID NO: 198797 - RNA, 67 nt, Homo sapiens
gcacccggggggcccagacaggaagggaaggggcggagacgggcggaacgcaggaggccagaggaca

SEQ ID NO: 198798 - RNA, 52 nt, Homo sapiens
gagaccaagcaggggcgaaggaaaccagacgaaacaacagccaaagacaaac

SEQ ID NO: 198799 - RNA, 75 nt, Homo sapiens
ggacggaaccaccagaagccagcccccaggcggaacgcccgccccgcagagagaaggcacaaagagcacacggaa

SEQ ID NO: 198800 - RNA, 70 nt, Homo sapiens
gaaaggcgagggaagcgccggagcgcagaggcaggcgggccgggggcagcgagcccgggcaagagaccgc

SEQ ID NO: 198801 - RNA, 79 nt, Homo sapiens
cccggccccggcggcacggcgccgaccagcaccaggggaagcgggacaacggggccccaaggcacaaaagaggaggaaa

SEQ ID NO: 198802 - RNA, 72 nt, Homo sapiens
cgaacccggcccaagcaaccaccgccggcccccaaaggcgcaaacagacccacagagcgcgagacgaaaaaa

SEQ ID NO: 198803 - RNA, 71 nt, Homo sapiens
gaccaaaagccaacaaccccacaacaaaaggccacccaggagaagccagggcagcagaagaagccgaaaga

SEQ ID NO: 198804 - RNA, 75 nt, Homo sapiens
agccagcccaccaccacgagcgggagcgaagagggaaccagcgcgcggcagccgcgacggcgacgccggaccgcg

SEQ ID NO: 198805 - RNA, 60 nt, Homo sapiens
gagcgagcgcagagcccggggacggcgaggccccagaccacacggaaagcaaaaccagag

SEQ ID NO: 198806 - RNA, 37 nt, Homo sapiens
aaagaagaaccccgaacaaaaagaacggggacacgcg

SEQ ID NO: 198807 - RNA, 61 nt, Homo sapiens
ggccagagcagcaccaggccagagccagaacagcggggaagaagaaccccaagcgaaagaa

SEQ ID NO: 198808 - RNA, 74 nt, Homo sapiens
gacaaagccagcacccaaaggagcaacagacagcccccagaacagcaccagggccggcggggccagagcgccgc

SEQ ID NO: 198809 - RNA, 84 nt, Homo sapiens
ggccgaccgagacgggcggagaggagaagggcccgacccaggcaagcgagcaggcgagcaggagcccacagccgagcagcggcc

SEQ ID NO: 198810 - RNA, 96 nt, Homo sapiens
cacccgagcggaaggaagggaaagaaacaagagaaaggacccagagccggacgagcgggagaggacaccacacaaaaaacaggaaaagagaacagg

SEQ ID NO: 198811 - RNA, 85 nt, Homo sapiens
agcccaggagaagcggagcggcagagaaaaaggccaccgaagggcccagaccgaagccaaccccgcccacagaagccaagcccag

SEQ ID NO: 198812 - RNA, 80 nt, Homo sapiens
ccaaaccccagcggaacccggccacagccagcagcaggaagagaccgagaccaggaaccaggcaggggaacggagcgaac

SEQ ID NO: 198813 - RNA, 72 nt, Homo sapiens
ccgccggccacgcaccgagccgcgcggccaggccgacaacaaccacccagcgcaaacgaccaaaagaacgga

SEQ ID NO: 198814 - RNA, 50 nt, Homo sapiens
gaaggaccaagaaccagaagcccccccagacccaacacaccgaaaagaga

SEQ ID NO: 198815 - RNA, 72 nt, Homo sapiens
gggcacaggcccaggcccagcgggccccgaggccccagaccaacaaccccacgagccccggccggacggccc

SEQ ID NO: 198816 - RNA, 76 nt, Homo sapiens
cacgagaagagccagaccaggcacagccgcgggccacgcaggccccagccagcacgggcggcacagaaacacccag

SEQ ID NO: 198817 - RNA, 68 nt, Homo sapiens
ggccccagggaagcgcagaaagcaggcgaacccgcggcgcaaaacggccccgggaccaaggacacgca

SEQ ID NO: 198818 - RNA, 91 nt, Homo sapiens
ccagcgccaccaccacgccagccgcaccagccgcccaagccgcacagccgcggcggcagcagcaggagaggccaagacaaggggcgcagag

SEQ ID NO: 198819 - RNA, 80 nt, Homo sapiens
acggccaggcggccccgagcggaacggagaaagcgagggcggcggccggggcagcgccgcgagccagcaacgggggaagg

SEQ ID NO: 198820 - RNA, 84 nt, Homo sapiens
agaaagaggagaagccggaaacaggcccacacagcgcgacaccacacccggggcgcccacgcccgagggaacccaacccagagc

SEQ ID NO: 198821 - RNA, 86 nt, Homo sapiens
cagaagaaaacgcaccaaggggcaacaagcacaagaagagcgccacgccagaaccgaggagcagagccggccccgcaaaccacccg

SEQ ID NO: 198822 - RNA, 67 nt, Homo sapiens
gcaggaggccaggccggaggggcgagacgggacacccccggaacacaggcccaggcaggcaacacag

SEQ ID NO: 198823 - RNA, 84 nt, Homo sapiens
agcgggacgacagggcggagccacccccagggagagcgcgcaggagacaggccgagcagaccccccagagggcagcacccccaa

SEQ ID NO: 198824 - RNA, 69 nt, Homo sapiens
ggagcaaaggcggcggaggggcaggaggcgcggacacgcaaaccacacaagaaaagcgccaggcaggca

SEQ ID NO: 198825 - RNA, 76 nt, Homo sapiens
agaaaggaacggcaccgcggacagagcagacagaacagacaaggggacacgaggagcagccccagaagcacgaaac

SEQ ID NO: 198826 - RNA, 73 nt, Homo sapiens
aagccccaggggccaggacccacaggacagcacacaccaagcccgaaggcacgaacggagcagccccaaccac

SEQ ID NO: 198827 - RNA, 72 nt, Homo sapiens
acgcagggcgcccccgccagagcccgcagcccaacacgccgccacaagaaccccggcgccacccacgagcaa

SEQ ID NO: 198828 - RNA, 78 nt, Homo sapiens
agcagaggcggagcccgcagaccgcagaaggccggagacaccagcagccacgcgcccaggcggaggcagaggcgaccg

SEQ ID NO: 198829 - RNA, 73 nt, Homo sapiens
ccgagcgacggcgccggcgcgcccggccgcccgcggcgggaaaacggcacaaggcgacgagggagggcagacc

SEQ ID NO: 198830 - RNA, 60 nt, Homo sapiens
aagggagggccgacgggaccgaaggcagaccccaagaggagccccgccacaccagcaggc

SEQ ID NO: 198831 - RNA, 80 nt, Homo sapiens
gaagaagaagaaaccggagaaggaacagaccccggaggagagccacgaggagggagaaccgaggagcagccacaagggac

SEQ ID NO: 198832 - RNA, 79 nt, Homo sapiens
cagaaggccgcagaggcaggcgcggagccccggccgcaggggccagaagccaggagaggccgggcggcgaaggggcaga

SEQ ID NO: 198833 - RNA, 76 nt, Homo sapiens
ggccaagaagacacaaaggacggaggcacgagaaggagggggcagagcacggcaggcagaaggggccaacccgggg

SEQ ID NO: 198834 - RNA, 33 nt, Homo sapiens
aaagagggaagcacaggagcaaaacacaaccca

SEQ ID NO: 198835 - RNA, 94 nt, Homo sapiens
cccccagggccgcgccgggaccccccccaaaccggccccagcggccggcgccggaaacgggagacgagagagaaaaaaaagaggaagcagaaga

SEQ ID NO: 198836 - RNA, 69 nt, Homo sapiens
caagaaaaaggacacaggaaccgcagcacaaaagcgaaggaagaggacaccccaagacaaaacagccag

SEQ ID NO: 198837 - RNA, 81 nt, Homo sapiens
accgagaagaacgaagcacacggccgggacaagcaaggacaaggaaaggagaacaggaccacccagcccacgaaacagcga

SEQ ID NO: 198838 - RNA, 79 nt, Homo sapiens
gcggaagacccaagccaacccaccaacacggaaaaccgacccaaaaagaaaacaccgaagggcaccagacacgaaagag

SEQ ID NO: 198839 - RNA, 72 nt, Homo sapiens
aggaaaaccgacagcggcggaacccgcggacccggaccccacaaggcaagaaacaacagcgaccagagccga

SEQ ID NO: 198840 - RNA, 67 nt, Homo sapiens
cggacaagcacagccggaagcgaagaacagagggaggaggaaagccaacgaaagaaaagaaggagag

SEQ ID NO: 198841 - RNA, 52 nt, Homo sapiens
ccgacagccgcagaacgggaaagccagagacacaccgccccaaagggcgaga

SEQ ID NO: 198842 - RNA, 84 nt, Homo sapiens
gcgcagcagagggagcgccgaaggacaagaacagcgccgcaccagcagagaccgaaggagcagacgaggcacgagcgccagcgc

SEQ ID NO: 198843 - RNA, 74 nt, Homo sapiens
gaagcaagaagacccggaccagcggccacacagacagcagggaaaacccggaaccagaaggcagcgaaaagcca

SEQ ID NO: 198844 - RNA, 76 nt, Homo sapiens
accgaaaaaacgaagaacgaaacggagaaggaacgagccagcagcggacaagagagcagaagaaaaggggagccac

SEQ ID NO: 198845 - RNA, 57 nt, Homo sapiens
gcgacggggaggcgcggccaacggggccacaagaaaacccggacaaccagcggggca

SEQ ID NO: 198846 - RNA, 75 nt, Homo sapiens
aaaacagcagacccaagagcagcggaaaagaccagcacagaggccggaagagcgggagcgggagccaggcagaag

SEQ ID NO: 198847 - RNA, 76 nt, Homo sapiens
ggacggaaggggagaaccaaccaggcaccaaggcgcccggcgcaggccaaagggcccccgaaccagcgaaaacaaa

SEQ ID NO: 198848 - RNA, 80 nt, Homo sapiens
cacggcgggccggccaggagccggggagcgacgcgggcaggaacgcccaggagaaagagggaagagaaaaggaacaaggc

SEQ ID NO: 198849 - RNA, 77 nt, Homo sapiens
cacagggcagacagagaagaaggcgcgcaccggaaaagagccccggaagggcgacgcgccacagagcgggcgggcgg

SEQ ID NO: 198850 - RNA, 72 nt, Homo sapiens
aacccgccgcgcaccgacccgacgcgccggcccacgcgcggccaagaacaccccaccagaccacccagcaag

SEQ ID NO: 198851 - RNA, 75 nt, Homo sapiens
gcccgcccggcgcgcacacccgcggggcccggccggggaacggacaaaggggccacaaaccggggaaggaaaaga

SEQ ID NO: 198852 - RNA, 76 nt, Homo sapiens
cagacagaccggcaggcaggaaaacgggagaacacgacaccggcgaggaacggcagagccaggacgccccaaggcc

SEQ ID NO: 198853 - RNA, 81 nt, Homo sapiens
ccaacccacaccccacgcacgcagggacccgggcaggcagcacgaagggagaaggagacccaggagaagagaccaccccag

SEQ ID NO: 198854 - RNA, 87 nt, Homo sapiens
gggacgcgagcggcgagccggagcgcggagcccggccccgcaccaggaggaggacgacagcacgggacagcacacagcacacacaca

SEQ ID NO: 198855 - RNA, 87 nt, Homo sapiens
ccaccagcagacgcagccgagacaccagcccgaaacaccaccaagacgggagagaagcgccggccggaaagaagacggggaggagca

SEQ ID NO: 198856 - RNA, 86 nt, Homo sapiens
caggaaggcaggggagagagacggagggggaagcaggagcacagacaggaaaaccagagacccagacacgcgaaggaacgaaaggc

SEQ ID NO: 198857 - RNA, 87 nt, Homo sapiens
ggcagcggagcacgaggcgggcagcagcagccccggggcccggagaggcagggcaagaacccgccacacaaggcgaacagagggcag

SEQ ID NO: 198858 - RNA, 113 nt, Homo sapiens
cgcgagccagccgcaggaggaggaggcacgacggccgccacgccagccagcacccggaggcccggagggggggccccagcccggccgaacgggcgcacgacacaaacacaacc

SEQ ID NO: 198859 - RNA, 76 nt, Homo sapiens
ggccccacaaacagcacaagggcaacacaacagcacaaacacaaccaggacccagagagggaccagggccaaagaa

SEQ ID NO: 198860 - RNA, 73 nt, Homo sapiens
acagccacggaaagaagaccagggacggagcgaaccaggcaggccaccgaaggcacgggacagagacaaggaa

SEQ ID NO: 198861 - RNA, 77 nt, Homo sapiens
ggggccggggaacacacagggaaaaccagaaaaccgggaagcggaaccaccgccagggcgaaggagacacaaccggc

SEQ ID NO: 198862 - RNA, 85 nt, Homo sapiens
cccagcccggagcccagccagagggggccgacacacggcgaaacggcagcggcagagaccaccacccaacccccggccccgccag

SEQ ID NO: 198863 - RNA, 71 nt, Homo sapiens
ccgggaaagccaccgaaaagagcacggaacggcgaaggcaggcgaagaagcggagaaccccagagagaagg

SEQ ID NO: 198864 - RNA, 87 nt, Homo sapiens
cagcccagaggagaaaccgccgcccagaagacagccaacagcgggaacaagaggcgggagaagacgggaagccaccagagcccaggc

SEQ ID NO: 198865 - RNA, 57 nt, Homo sapiens
caaaagcaggcaccaaagaggcgaacggcgggggaagaggaagaaaagcggaacaag

SEQ ID NO: 198866 - RNA, 85 nt, Homo sapiens
aggcaccgggacggaccgagaccggaccgagagcggaccgagagcgcgaaacgcacgagaaggggggcacaagccacggagcgag

SEQ ID NO: 198867 - RNA, 52 nt, Homo sapiens
cagacgcagggcgcccccgagcggcagaggacacgccacccaggcagaagag

SEQ ID NO: 198868 - RNA, 88 nt, Homo sapiens
caacaagcagccaagcccagacaagccccagggaagccacagcaccccagcacccaggaagaagaggacaggaccacccagacacagg

SEQ ID NO: 198869 - RNA, 82 nt, Homo sapiens
gagagagagaaaaaaagcagcacaacggcagcagcaagcggaccacgcgaacgaaacccagacaccaagccaggagagccaa

SEQ ID NO: 198870 - RNA, 57 nt, Homo sapiens
gcagagaacccacaaagaggcgggccggggacacaagcaacagccagaacaagccga

SEQ ID NO: 198871 - RNA, 53 nt, Homo sapiens
gcaagaacacacaaccgaaaaggaggaagagaaacaccccgccagccagaaga

SEQ ID NO: 198872 - RNA, 82 nt, Homo sapiens
gcaccccagagagcaaggagaagaccccggaggggagagggagccccaaggcgcacaccggagccggacacagggagggccg

SEQ ID NO: 198873 - RNA, 32 nt, Homo sapiens
cagggacagcaaaaagaaccgaggggcgaagc

SEQ ID NO: 198874 - RNA, 80 nt, Homo sapiens
cgcagagggaccgcggccacaacaaggcggggccggggagcccgggccagaccccccagacccagcccaccccggagcag

SEQ ID NO: 198875 - RNA, 74 nt, Homo sapiens
cccgagccccgcaacaccgcggcccacgggacccccaggagggacccgcagacggagccaccaccaccccgaga

SEQ ID NO: 198876 - RNA, 104 nt, Homo sapiens
agccacagccagcccagcccgccccggcgccccaaccccggcagccccagaacccggaagacccgccccaaccaggagaggaacgaggccacaacaggaccgac

SEQ ID NO: 198877 - RNA, 79 nt, Homo sapiens
acgcgggccgggcaacacgcagccgagcggccggggggggcacagagccccggaagacagcccccagcgaccagaccca

SEQ ID NO: 198878 - RNA, 72 nt, Homo sapiens
cgccacccacaaggcacaacaggaagcgccgaaaagcgaaaagaaacaagccgcggcaacagcgaccccaag

SEQ ID NO: 198879 - RNA, 49 nt, Homo sapiens
gacgggaggggaggaagaggccaggcggcagcaggggcgcagggaacgg

SEQ ID NO: 198880 - RNA, 78 nt, Homo sapiens
ggagacgaccggcaaccgcgacccaaacacccaacgagacgggcaagagcaaacgagacggaagaaaaaaccgacggc

SEQ ID NO: 198881 - RNA, 73 nt, Homo sapiens
gcggcgcgccacccggccgcagcaaacccgagaacacgaaacaaggaagaaagaagcaagaaaaacagaccgg

SEQ ID NO: 198882 - RNA, 66 nt, Homo sapiens
acagcacggggcaaagacgcaagccaccggggccaagcaaagccaagcgcagccagccgaccgcgc

SEQ ID NO: 198883 - RNA, 71 nt, Homo sapiens
agacggacaaaaggaacaagaaaacgacaaaggcgaaaaaggggagcagggcacaaaagaccaaagcagac

SEQ ID NO: 198884 - RNA, 74 nt, Homo sapiens
gcgcggcgcggcggccgggccccgagacggggacgacaccacgccacccaagagagagcaaaaaccgagaacca

SEQ ID NO: 198885 - RNA, 73 nt, Homo sapiens
aagaacacgggaggacgcagaaacgaaaaacagcagaaacggaaggaagccaagaacgcagagaaaacaaaca

SEQ ID NO: 198886 - RNA, 70 nt, Homo sapiens
ggagacgccggccccgggcgcacggcgcggcaaggccaggggagaagacaccgaggccggggggggcaca

SEQ ID NO: 198887 - RNA, 67 nt, Homo sapiens
cgcagggaggagcgggacaccccggaagcgggaaagcgccagaccaaaacgaagaagacgagccaaa

SEQ ID NO: 198888 - RNA, 82 nt, Homo sapiens
aagccaacccaagaagcggagcgaagcgcgggaggcccccagccccgagaggaaccgcacccaaggacggcggaggcccagc

SEQ ID NO: 198889 - RNA, 76 nt, Homo sapiens
agggaaccgcgaaagcagccagaagcaccgagaaggaagaggcaaggaaccagagcagacgccccgccagaccgaa

SEQ ID NO: 198890 - RNA, 74 nt, Homo sapiens
gcaagccgccccagagaacgacgcacgacaaggagggcggaacggcggaaggacagagcgggagccaccagcgc

SEQ ID NO: 198891 - RNA, 79 nt, Homo sapiens
gccggacccgggggagagcgggcgaggcacgcgggcggagaccagggacaaacaacagaccaaggggcggaaaacccga

SEQ ID NO: 198892 - RNA, 69 nt, Homo sapiens
cacgggcggcgccaggccggcccagacgcaaaccagaaggagaaaaaggaacgggggccccgaaaaaag

SEQ ID NO: 198893 - RNA, 74 nt, Homo sapiens
cacagggcaagccaaaggaccaaagaaacgaaagggagccagcccagcagcaaggagcgacccacccagacccc

SEQ ID NO: 198894 - RNA, 57 nt, Homo sapiens
gccgaaaggcaaggagcccggaagcaagagaccagagcccaagacaaaacagaggag

SEQ ID NO: 198895 - RNA, 85 nt, Homo sapiens
cagagcccccccagaaaccccgcgccgccacggcccagaagaagccagaagaggaaggacccaggaaacagcgcgaccagaggag

SEQ ID NO: 198896 - RNA, 72 nt, Homo sapiens
gccagaaaacccgcgagcaggaaccccaggaaacggccaggagagaaaagacacaggagaacgggaggcgca

SEQ ID NO: 198897 - RNA, 57 nt, Homo sapiens
agcgggacgaggaccgagaccgcggccgggaccgaggaaaagacggggacgagcggc

SEQ ID NO: 198898 - RNA, 71 nt, Homo sapiens
cgcgccgaggcggagcgccgagcgaggcccacgcggaccggcagcgccaccggaccaccagacaaggacac

SEQ ID NO: 198899 - RNA, 66 nt, Homo sapiens
acaagaaggcgagcgcaggacggcaagaagcaagaagacaaggagcagagacaggccaagggaaca

SEQ ID NO: 198900 - RNA, 73 nt, Homo sapiens
aaacaggcggggaccggcgaggagcgaagaacaaacacccgagcgcgagaacggggcagaggaggaggggaaa

SEQ ID NO: 198901 - RNA, 84 nt, Homo sapiens
gcgcgcggcgcgccgcccggcgagcgggccggaggaaaagaaagccgagccacacgccagacaccaggggaagggaaggcggag

SEQ ID NO: 198902 - RNA, 79 nt, Homo sapiens
aagagaccagaagaggccgcgagcagcagcccacagccggcagcacacaaccgcgacaaaacgagaacaccagagcagc

SEQ ID NO: 198903 - RNA, 82 nt, Homo sapiens
ggcaacaggcagcacagccgagaggccagcgagaagacggagcggccccggcccaacacccacaccgcgccgcagggaccac

SEQ ID NO: 198904 - RNA, 57 nt, Homo sapiens
ccggcgcggcccagcgccccaggcagaaccagagaccacagaagaaggaagggccac

SEQ ID NO: 198905 - RNA, 76 nt, Homo sapiens
acgggccgcgaaccgcagacagcggccaagaagacacaaaggacggaggcacgcccgaccgacccaccaaaagagc

SEQ ID NO: 198906 - RNA, 75 nt, Homo sapiens
cagacaccaagaaggacgcacgaccgcccaagcaccgcgcacgcacggagaaggggcgccacgcacccgggacgg

SEQ ID NO: 198907 - RNA, 87 nt, Homo sapiens
cgagcggggggacgccggcggagacgcgggcgaggacagcccagagcaagcacacggaggcccgggagccagaccgggagcccgccc

SEQ ID NO: 198908 - RNA, 57 nt, Homo sapiens
gcagggcccaccccgcgcccgacaggaaggaagaaagacggaacagaccagagccgc

SEQ ID NO: 198909 - RNA, 74 nt, Homo sapiens
cgggccggcgagcgcagcgcgaccgggaggcccagaacccccacgaggaagaaaggccccggagagggaggcac

SEQ ID NO: 198910 - RNA, 78 nt, Homo sapiens
gcggcacggccagcggcaccacccccagcaccaccccagccccgcgcccggcgggaagacagggaagccaaaggcaga

SEQ ID NO: 198911 - RNA, 89 nt, Homo sapiens
cagaggaccccaaacgggccacaaaccggcccaacaaccacaagggcgacacaccaaagaaaaaacacaccaagcagaaacggagccaa

SEQ ID NO: 198912 - RNA, 70 nt, Homo sapiens
gaacggagcacagccgccgggacagcccccagggaagggcgagccaggccaagagggagaggggcaccag

SEQ ID NO: 198913 - RNA, 84 nt, Homo sapiens
agaggacaagcgcagacggggccacgcaaacaagaccacccgggacaacgcccaggcaccggggggaacaagggaccggaggac

SEQ ID NO: 198914 - RNA, 74 nt, Homo sapiens
cacagcgaccccacccccaaagacacgccgggaaagaaagaaagcccaagcagggcaagaaagccagagcccga

SEQ ID NO: 198915 - RNA, 81 nt, Homo sapiens
acaaacacacgcaggcaggccacggcagagacaacgggaccccaaggcacaggcgaccaccccaaaagcaccggccccgca

SEQ ID NO: 198916 - RNA, 80 nt, Homo sapiens
accagcccgggcccaggaagcagaggcaggcacacgccaagcaaggaggaacaacgggaccggcaggcccaaagggaccg

SEQ ID NO: 198917 - RNA, 78 nt, Homo sapiens
ccagacgagagcccaagcgggaaaccacgggccacaggaaaggcaggagccgggaacgacggccccagcagcggcccg

SEQ ID NO: 198918 - RNA, 82 nt, Homo sapiens
ggacccaacgaagaccgcgccgagcaccaggagacaaagccacaaaaacaccagaaaaaccaagcagaaaaggagcggcagc

SEQ ID NO: 198919 - RNA, 59 nt, Homo sapiens
cgcccgggaccgacccccgccgcggccgcgccgagagaccaggcacggaccaggaagcc

SEQ ID NO: 198920 - RNA, 73 nt, Homo sapiens
ggaaaagacggaaagaccaacggagacaaaacagccagagcggagcccacagagccaacagaaaggggagaag

SEQ ID NO: 198921 - RNA, 80 nt, Homo sapiens
cgcccagaagcaagagaagcaccgcacccagagaaagcgcggacaacaccaggaaaagacagaggcccagcaacggccac

SEQ ID NO: 198922 - RNA, 86 nt, Homo sapiens
ggggcgcgcacccgcaagcggaacccggcggacggacccgcagacggagacggggccggagcgggagaacagagacccaccaagaa

SEQ ID NO: 198923 - RNA, 78 nt, Homo sapiens
gccacccagcaaggccgcagagcaagacgcgcacacaacccaaaaccacgccaacacaccgcaaaaagagggggaaag

SEQ ID NO: 198924 - RNA, 72 nt, Homo sapiens
cagaggccccaaaggcgccccccagcgaacggggccagaccaggcggcacccggcacaggaacacagccagg

SEQ ID NO: 198925 - RNA, 91 nt, Homo sapiens
gacggcagagcagcccccacagcgggcggcaacgaggagcggcagcggcacggcagcgagagcggaggcccgcgagaggacggcggcccag

SEQ ID NO: 198926 - RNA, 76 nt, Homo sapiens
caccagccgcggagaagacccaagcagcgccgcacccgggagggcaacagagagaaaagcgaacacccaggcgcgc

SEQ ID NO: 198927 - RNA, 83 nt, Homo sapiens
ccagcggagcaagaagaggaccggcagggcagagcaggaggccccccgaggccaaagccacccccaaaggcagaggaagaacg

SEQ ID NO: 198928 - RNA, 78 nt, Homo sapiens
gagcaggcgagcgaacgacggagaggagccaagcccaacgggacgggaaaacggccacagccaacgacgcagcagaga

SEQ ID NO: 198929 - RNA, 69 nt, Homo sapiens
acacagagaacacccgccaccagacaagagccacaacccacgcaaaggcccagggagaggaacgaccca

SEQ ID NO: 198930 - RNA, 101 nt, Homo sapiens
gacccgagaaagccgcccaagacaaccgccgggaccacacaaagaggaaaccgagaagggaagccaagcagagaagcgcgaccagacaaccagccgcgcag

SEQ ID NO: 198931 - RNA, 77 nt, Homo sapiens
cgggaccccgccgcgcaaaaaccgaggaaggagagggaccggaccagggcggagaacggaaaagcaccaggaagcag

SEQ ID NO: 198932 - RNA, 78 nt, Homo sapiens
cgccggaaaggcagccaaaggaagaggggagcgccggggcgaacaacaacagcagagagggcaaaggagcagaagagg

SEQ ID NO: 198933 - RNA, 82 nt, Homo sapiens
cggggaacgacgcggcgcgcgcggacgaagagccccccccccaacaccgcgacacgcaggaaaaagaacgcacgggaaaccc

SEQ ID NO: 198934 - RNA, 58 nt, Homo sapiens
caagaagaccggaggaaaagggagcgggcgagccggggagcacgccggaggaacagca

SEQ ID NO: 198935 - RNA, 57 nt, Homo sapiens
aagaagcagaagaagcaaggaaccagcacaccacccgaaggcccaaaccccgccaga

SEQ ID NO: 198936 - RNA, 72 nt, Homo sapiens
acggaaaaaacagaagacacgggcaacaaggcgaaggagagcccggaagaggaaaaaaggcgggaggaacca

SEQ ID NO: 198937 - RNA, 87 nt, Homo sapiens
acagaagagaagggaaaggcaagggagcaccaggagagaaagggcggaaacaccagacacacaccacagaacagcaacagaaaccac

SEQ ID NO: 198938 - RNA, 80 nt, Homo sapiens
gcaggcgaggagcgcccagagcaccgccacaccccagagaccgaagcggcacaagacaggccacaccaacaagacaagaa

SEQ ID NO: 198939 - RNA, 59 nt, Homo sapiens
gcagaaaccagagacaagcgcgacgagaaaccaaagaaaaaggaaacaaaggaacacag

SEQ ID NO: 198940 - RNA, 39 nt, Homo sapiens
gccgacacaggaggcgcgcggcggggccgagacaacaag

SEQ ID NO: 198941 - RNA, 72 nt, Homo sapiens
gaaaacagaggaaggacagcaggaagcagaccacgccaaagcaggcacgagcaagaagaaccgaaggcagaa

SEQ ID NO: 198942 - RNA, 63 nt, Homo sapiens
cacgaaaagggaaacaaagcgaagagaggcagaaacggggacacaagcgaaaggcaacggcgc

SEQ ID NO: 198943 - RNA, 74 nt, Homo sapiens
cacaaacggcagaacagccggcacaaagagaaagagaagacggaacagggcgaaagaacacgccacaaacaggc

SEQ ID NO: 198944 - RNA, 68 nt, Homo sapiens
aagccggaagaaccgcagccgagcggggccggccacaggaaagcagaccacgcagaagcaacagcaga

SEQ ID NO: 198945 - RNA, 83 nt, Homo sapiens
gacaggaggcagagccaaacacccagggggagaggcaccagcaacagaccaaccgcagcaagcacagagacaggaagcccgcc

SEQ ID NO: 198946 - RNA, 50 nt, Homo sapiens
agcgacgacagaagcagccgaacaacaggagaaccgaaagcaggggagca

SEQ ID NO: 198947 - RNA, 78 nt, Homo sapiens
aaccgaaccagagacagcgaaagccgcagcaaggaagcccacgaccaggggcgcgggaaggaacgcagagacaaaacg

SEQ ID NO: 198948 - RNA, 70 nt, Homo sapiens
gaggcagcaggcccgaagcagccggcaaggcccaaccaagaccgaacccaagccagggaaacacgcacgg

SEQ ID NO: 198949 - RNA, 69 nt, Homo sapiens
gaagcacacaacagaccaaaagcaggccaccaagccagcaacaaggagcccgcggaccagcacagaagc

SEQ ID NO: 198950 - RNA, 77 nt, Homo sapiens
aagaacaccgaggggccgggaacggcgccggaggaccagacccaggaggaaggagacccaacaccccggccagacgg

SEQ ID NO: 198951 - RNA, 82 nt, Homo sapiens
caggacgagaacagcaacaggagaacacaggaccggaagacggcacggaagaccagaagagagagaagaagaacccgaagcg

SEQ ID NO: 198952 - RNA, 71 nt, Homo sapiens
cagcagagcagggagacggaggaggaggagaagaagagaggggcggagccggcagaagcaacagcccaaga

SEQ ID NO: 198953 - RNA, 71 nt, Homo sapiens
ggaccaggaggcgagcaacagaaagaacagaaagccccagccacaaggggacaaacgaacacacaacgaaa

SEQ ID NO: 198954 - RNA, 73 nt, Homo sapiens
ccggcgcacaaagaagcaacacgagcagcgaaggcgaagcggcacaaccggggcagacacagggagggccaag

SEQ ID NO: 198955 - RNA, 84 nt, Homo sapiens
caccgacgccaggccaccacggcagcggaggagaccaaggacacagacggaagggagggccacccacggcaggcccagccgcaa

SEQ ID NO: 198956 - RNA, 85 nt, Homo sapiens
acgaggccccggccggaggcacacgagccgggcccacaagcggccgcagccaacaagcacaagccaggagaggcagagaccaggg

SEQ ID NO: 198957 - RNA, 79 nt, Homo sapiens
acagccagaaaaagggacggacccacagaagagagggagcccagaccaggggagaaggacggcagaaaacgagacgccg

SEQ ID NO: 198958 - RNA, 76 nt, Homo sapiens
gccaccgggagggggaagagccggggcggaaaacaccccaaaagccaaaagggaaaggaaaagaccaacaacagcg

SEQ ID NO: 198959 - RNA, 80 nt, Homo sapiens
gccaggccgcccggagcggcgacgaggggcgccacacgcgcaggacagccgccgaaggaccacggaaagagaaggaggag

SEQ ID NO: 198960 - RNA, 84 nt, Homo sapiens
cgaagagaacgcgcccaagggcggggacacgggccgcgcgaaaaagccaaacccaccaagggacgaagcgcaccacgcagagaa

SEQ ID NO: 198961 - RNA, 77 nt, Homo sapiens
ggcggcgcgcggcccccgcgcagacacggccacacagaccgaacacaaacagccaacaggacaaaggacaccgaaag

SEQ ID NO: 198962 - RNA, 62 nt, Homo sapiens
agaggacacagcgggacaccagcacccccagaccgacccggggaaggcacaggaagagggcg

SEQ ID NO: 198963 - RNA, 81 nt, Homo sapiens
cgcgggccacccaagaggagccccggggaacccgcagcacaccagggggcaggcccgggccggcccagggagaacgcaaaa

SEQ ID NO: 198964 - RNA, 76 nt, Homo sapiens
gaaaaagagaggagggagaacacagaaacccgccccgggagagagaaggagagaagaggcagaggaggacgaggaa

SEQ ID NO: 198965 - RNA, 70 nt, Homo sapiens
gccccgcccacaaccagcccaaacgccgcagcccacagaccacgcgcgaaaagagaagcagaagacacag

SEQ ID NO: 198966 - RNA, 74 nt, Homo sapiens
aggaggcggcgggccccgcccgccgaaggggcgggaagcggggaaaggaaaacaccagcacaccaaagaccggg

SEQ ID NO: 198967 - RNA, 81 nt, Homo sapiens
aaggaacggccaaacaacagggaaccaaggggacaaaccaacagaagggcaaccaggggagaagcgggcccggagccagag

SEQ ID NO: 198968 - RNA, 75 nt, Homo sapiens
gcacgcgcgaacccggcccgggcagcgcccgacagggaccagccagcgagaacccccagcaaggcccaggcacca

SEQ ID NO: 198969 - RNA, 79 nt, Homo sapiens
cggggacaggaaggaggacagcggcagaaccccccacggaaaggacgaaagaaagaagcagccccagaaagaaggacgc

SEQ ID NO: 198970 - RNA, 70 nt, Homo sapiens
agaaaccggcggccaaaaaaaaaaaaggaagcacaccaagagagcggaaacggcacggaaaacagacagg

SEQ ID NO: 198971 - RNA, 81 nt, Homo sapiens
cgcgccacgccagcagcacagacacagaccgcaagaacaagaccgccccgaccgcgcagagcacaggcaaccagcgccacg

SEQ ID NO: 198972 - RNA, 67 nt, Homo sapiens
acaaacacccagaaacaagagggccgcaagagacaccacaaaaggacacccgagcgcggaaaaagga

SEQ ID NO: 198973 - RNA, 78 nt, Homo sapiens
gacacaggaccgcgacgaagccaaaaacgaagaagaggggaaagcccacccagggggaggcacccaaaacggccaaag

SEQ ID NO: 198974 - RNA, 71 nt, Homo sapiens
caccaggagacaaaaccgccgcagccaagccggaacaggagcggcgagcccaaacgcaagggggaagaaaa

SEQ ID NO: 198975 - RNA, 62 nt, Homo sapiens
agaggaggacagcgcacacagcaagcacgagacgaagggaacgcacgggaaagcgcgcaaaa

SEQ ID NO: 198976 - RNA, 68 nt, Homo sapiens
aaaaacgcaagccaggaccaggggcacaaaaacgcagccaaagccgagaacaagccaaagacagaccg

SEQ ID NO: 198977 - RNA, 78 nt, Homo sapiens
accgacacagaagcacggagcccaaggccccacacaggacgagaaggagccccgagaccggggagcggggagcgcccg

SEQ ID NO: 198978 - RNA, 57 nt, Homo sapiens
gaacccaaaagccgacaaccccagaaacagacagggaagaagaccgcaacacagcaa

SEQ ID NO: 198979 - RNA, 77 nt, Homo sapiens
cgaagcaccaacggcgccaggggcacgcccgagacaaagacgccgaaaaacaccaaccaagagggaacagacacaaa

SEQ ID NO: 198980 - RNA, 78 nt, Homo sapiens
ccgaggaccaggccggcgcagccaggcgacggagaaagagggaccaaagcacagaggcgggccaaaggggaggcacca

SEQ ID NO: 198981 - RNA, 62 nt, Homo sapiens
gcaccgggacccacaggaaaaccagcagagcgcccaccacaggaccgcggaggcaaccccgc

SEQ ID NO: 198982 - RNA, 92 nt, Homo sapiens
cggcaagaacggcgccgggacggggccccagagacgcggcgcgcccgcccgcagcgcccaagcaggggagcgggaagacccggacaacggac

SEQ ID NO: 198983 - RNA, 59 nt, Homo sapiens
acccgggagaacacccccccaggaggcgaggagagggggcgcaggaagggccccacacc

SEQ ID NO: 198984 - RNA, 49 nt, Homo sapiens
acgcagggcgcccccgcccgacacgggaagagaagaggaggccacccga

SEQ ID NO: 198985 - RNA, 79 nt, Homo sapiens
ccagacccgcccaacagaaaaagagaggagggagaacacagaaacccgccccgggccccagggaaaggaccgaggcagg

SEQ ID NO: 198986 - RNA, 69 nt, Homo sapiens
acgcgaggacggggcccaggaacggaaaagggcagccgcacggggcaacaagaggaaacaacagcacgg

SEQ ID NO: 198987 - RNA, 76 nt, Homo sapiens
ccagagcagcacggaagaaaacaagcaacaacagaaaccaggaaagaaaggcaaagcgagcaagagggagaccaac

SEQ ID NO: 198988 - RNA, 87 nt, Homo sapiens
cccagggaagagacccgcaaagaccgggagaccaaggccaggagccggcggcacacccaggacaggagccccgaccgcgccagcggc

SEQ ID NO: 198989 - RNA, 79 nt, Homo sapiens
aaagaggagcggccaagaaagcagcacacaggcacaggggacccaaccgcgccacaaagcgaacagccgaagggagagc

SEQ ID NO: 198990 - RNA, 75 nt, Homo sapiens
gcagggcaccccaccgcaaaccaaacaaaggcgaccccgaaagggaaacacaaagaagacaccagaagggccagc

SEQ ID NO: 198991 - RNA, 82 nt, Homo sapiens
ccgggagcaagaagaacacccagaggcgacccgcccggccccggggccccagccgcgcgggccgcccagccccggggaaccg

SEQ ID NO: 198992 - RNA, 71 nt, Homo sapiens
gccagagcggaccggggcagaccaaacggcaaggccggaaaggaaaaacaccagaacggaaacagaaggac

SEQ ID NO: 198993 - RNA, 74 nt, Homo sapiens
caccaaacacgccggaaaccccgcccacagcacgagcaagggcccaaaccggacagaaggagaaacacacaaca

SEQ ID NO: 198994 - RNA, 74 nt, Homo sapiens
gaaaggaaagcaagacaccgaggcacaaaggagcacaaaggccaaggaaaaggaacagagagagcagaaccgaa

SEQ ID NO: 198995 - RNA, 79 nt, Homo sapiens
aacacaagaagcagccagaaccacaccgcaggccaccgacgacacagaaaaacaggagaaggaccaaaaggaacgagac

SEQ ID NO: 198996 - RNA, 80 nt, Homo sapiens
ccagggagcccccgcgcgcccggccggcccggagcaccgagccgcggcacggaggagccccgcacaaggcagaccggcca

SEQ ID NO: 198997 - RNA, 69 nt, Homo sapiens
agacaacaaaccacagccaacacaacgccaacagaaaccgcgggccaaaggaaccgcgccacagcgggg

SEQ ID NO: 198998 - RNA, 83 nt, Homo sapiens
accagacagccacaggcccgaccgagaggaaagaacagggagaaggcaaccaaaggcaggacacaaaaacaaccgaaagaggc

SEQ ID NO: 198999 - RNA, 74 nt, Homo sapiens
cggaagcaaaaaccccagggaaggcgggggagcgggaggagccagagcacaccgcaccacggccacaggcgccc

SEQ ID NO: 199000 - RNA, 42 nt, Homo sapiens
aaaacccagcgaggcccaccggaggaagaggaagaggagccc

SEQ ID NO: 199001 - RNA, 53 nt, Homo sapiens
accagaaagccccgggaagaagcccagcaagccccagccagcgaagcagaagg

SEQ ID NO: 199002 - RNA, 80 nt, Homo sapiens
agagcagaggccccagaccgccaagaggcacagaaaccccaccacgcggcaggggccgccgaggaaaaagcaacaagaag

SEQ ID NO: 199003 - RNA, 100 nt, Homo sapiens
cccgcgcccgccgcgggagagaggacccccccccccccccaagggagagaaggcgcgcaggagagcgcagagacccgcccggaagcgaggcaacaggcgg

SEQ ID NO: 199004 - RNA, 84 nt, Homo sapiens
gaggcggcccgcccggaaggcaagcgcagcaacaacagagagcacgggggcccccggagggccacaagccagagcgccccggcc

SEQ ID NO: 199005 - RNA, 79 nt, Homo sapiens
cagaagccgcgaaaaaggggggccgaggggcccccggagggccacaagccagagcgccccggccaaggcagaccagcgg

SEQ ID NO: 199006 - RNA, 75 nt, Homo sapiens
ccgggagcgggaacagaccaacgaaccaacagcgccaaaaggacagggcgaacggggaccccagaagcaaaaaga

SEQ ID NO: 199007 - RNA, 73 nt, Homo sapiens
aaaggaccggggaccccaaagacaaacgacaagcccaaggagcccaggggcggcgaagaccaaagcagagagc

SEQ ID NO: 199008 - RNA, 77 nt, Homo sapiens
gcccacccagaggcagggggcgacccgaacccaaaggaggaaacagcggcaagccacagacgaggcaggaaccgcag

SEQ ID NO: 199009 - RNA, 70 nt, Homo sapiens
gaaccggccaccggccccacacgaccgagaagggcgaagagaaacaaagaagagaccagccagaggaggg

SEQ ID NO: 199010 - RNA, 81 nt, Homo sapiens
ccaccccccgagagggggacacaggcaagcaccggaagcaccccggcggccgcggaagcggggcgcacaccaccggacaac

SEQ ID NO: 199011 - RNA, 72 nt, Homo sapiens
aaaagggccaaagaagggagagagggacaaagaaacaagcgacggaggacccaaaaacaacaacgaaagcag

SEQ ID NO: 199012 - RNA, 81 nt, Homo sapiens
gccgggcggagcccacgagaaacaaagacaaccgcaccaggaagcacaagccagcagacgacaacaggcgcaggagacaca

SEQ ID NO: 199013 - RNA, 68 nt, Homo sapiens
ggaccacacagccagaacagggacgccagccgcagaggaagacccgaccacaggccgcggggcacaac

SEQ ID NO: 199014 - RNA, 85 nt, Homo sapiens
cagcaagacccgcccaccaccgccccagcgcaggagaaccgaagggcaccagcgcagacccaggggagcccaccagccagcaaca

SEQ ID NO: 199015 - RNA, 80 nt, Homo sapiens
gggccgccgcgccccaggaggccggagagaaggcacaccggggcaacagaagggcaagacacagcagggcacagcccccg

SEQ ID NO: 199016 - RNA, 70 nt, Homo sapiens
acaagggagcccccccaccacccccgaaggagaagcaagggacagaccacaacacaacaaccaaacggga

SEQ ID NO: 199017 - RNA, 47 nt, Homo sapiens
gacgccacaaacgaaggaacagagaggaagacgcgaggaagaaacac

SEQ ID NO: 199018 - RNA, 82 nt, Homo sapiens
cggacggcccggaaccggcaccagggagcgggggagacacagaaagagaccgggagcgaaggacgcggcagagcgcaagccg

SEQ ID NO: 199019 - RNA, 77 nt, Homo sapiens
cagggacccgacccgggcagcacccccgacagccggccgggacccaaccgcgagccagaacgagccaagagacacca

SEQ ID NO: 199020 - RNA, 51 nt, Homo sapiens
acccggggcgaaaaacaaaggggagaagcagaccgcaccaggcgggacccc

SEQ ID NO: 199021 - RNA, 68 nt, Homo sapiens
cacgaagccgagaggaagggaaaggaagggagaagaaacagcagcacgaagaacaagagccaagacga

SEQ ID NO: 199022 - RNA, 71 nt, Homo sapiens
aaggcccccagaacacacaggccgagccgagcagcaacaaggaccaggccgcagcagccaaagcaaggcaa

SEQ ID NO: 199023 - RNA, 72 nt, Homo sapiens
cgcacaaggaaaagaagcccaacccagaaacaggacccggcgggggcaaggaagcacggaggcccgggaaca

SEQ ID NO: 199024 - RNA, 70 nt, Homo sapiens
aagcggacaccaaaacccgacgagacggaggaacagaaaaccaagcgagagggcaaaaaaaaaaggaccg

SEQ ID NO: 199025 - RNA, 80 nt, Homo sapiens
aggagaggggcgcggcggggccgcagcagcagagccgcgcagccaggccccaacaaggacccggcgggggcaaggaagca

SEQ ID NO: 199026 - RNA, 79 nt, Homo sapiens
gaggaggccgccagcagaggcggagcccgcagaccgcagaaggccggagacaccagcaggccggaaggccacgacaccc

SEQ ID NO: 199027 - RNA, 73 nt, Homo sapiens
ggggcggcccaccaacaggaacagggcagacgagcggaggacacccaacccggaacaggacagagccacgacc

SEQ ID NO: 199028 - RNA, 86 nt, Homo sapiens
cggccgaagacacgcgacccggagacagcccaaaacccggaagagcgccccaggagaaacaagacaaagcaggacccaaaggaaac

SEQ ID NO: 199029 - RNA, 79 nt, Homo sapiens
aaaagaggaacccgcgacccgggcacccagagcagggagggaaacgagaagaacgaaagagaaacccaaaaaaaggagc

SEQ ID NO: 199030 - RNA, 80 nt, Homo sapiens
gaaggggaacggggccccaggaccccacaacaccagaacaaaaggcagaggcagaggacagacacaaaaagacgacggga

SEQ ID NO: 199031 - RNA, 71 nt, Homo sapiens
ccccccccaagacaaaccaagggcgggggggcacaagcccaaggagccagaaacacacgccaacgaaaccc

SEQ ID NO: 199032 - RNA, 70 nt, Homo sapiens
gcaaaaccagaaagccaaagaggggagcaacacgaagaaacgaagccggaggggagggggcgcccgaacc

SEQ ID NO: 199033 - RNA, 70 nt, Homo sapiens
gaaaacacaggacaaccagcagcaggagggcgaaccaaagaaggaaggcgacccaaaaccacgaagcaca

SEQ ID NO: 199034 - RNA, 106 nt, Homo sapiens
acaaaggcagcggccggaacagccagcgggaagggaggaagcacgcagagacaacgaagaaaggagcacaaaagaacaaacacacgagccaaaagcacaaacaaga

SEQ ID NO: 199035 - RNA, 82 nt, Homo sapiens
aagaagcaaaaagaccggaccaaaagaaaaagacaaagaggcgaaagcaggacaggcacggcaggccgccgcgcccgagagc

SEQ ID NO: 199036 - RNA, 47 nt, Homo sapiens
ggggacggcgacagcgccgaacaggagaacagaccaagcacgaaaac

SEQ ID NO: 199037 - RNA, 101 nt, Homo sapiens
ccggcccaccacggccacccacagaaagaagcagagggccagaggacgccggacgagagaaggacagcgaagggagaaacgacaccaggacggacaaagcc

SEQ ID NO: 199038 - RNA, 74 nt, Homo sapiens
ggagggcagacggcgcacagcaagagggcccaaccgcggcggacaaaggccaaaggaccccccgacacaaccgc

SEQ ID NO: 199039 - RNA, 60 nt, Homo sapiens
aaaaaaaagcaaaggccagacggagccaaacagccacagaaggaggaaaccgacacaaag

SEQ ID NO: 199040 - RNA, 76 nt, Homo sapiens
accgaggagagccccgccaggcagggcgccaggacaggaaccccaaaacccagaacccagcaaagaaggcccagac

SEQ ID NO: 199041 - RNA, 85 nt, Homo sapiens
cccggggcaggaagaaggaaggacccccaaccggacaaccaccaccagcgagcaaaagaacaaagaccaagaccaagaagcgccc

SEQ ID NO: 199042 - RNA, 80 nt, Homo sapiens
cagacccagcagccaagagggaagcagacgagagcaagcacggaccgccggcaccggggagacaacgggcaggcagcgag

SEQ ID NO: 199043 - RNA, 76 nt, Homo sapiens
ccggcgcggcagcgagcggcggaaccccgcggcgggagcgcggcggggccgcagaggccgcgagagaacggaaccg

SEQ ID NO: 199044 - RNA, 77 nt, Homo sapiens
gcgacggaaaggcacgaaagccagggggccccaggacccggacagacccaaaagggaaaaaggaaaaccagaagcca

SEQ ID NO: 199045 - RNA, 67 nt, Homo sapiens
ccgaaagcaagcgcggaagccccgaaaccccaggacccagacacagacaagagaagccacaccggag

SEQ ID NO: 199046 - RNA, 35 nt, Homo sapiens
gacaggcacagacaaccagaggagagcgggggcgg

SEQ ID NO: 199047 - RNA, 122 nt, Homo sapiens
cgggccggaggagaccgacgggggggccgcgcgcacggccaggagggcacggccgcggaacaccgggggcaggagccggagagccccaggcaccgggaagacagacccgggcccgacaggca

SEQ ID NO: 199048 - RNA, 56 nt, Homo sapiens
gcagacgaagaccaacgaaagaaaacacacacacacaacgcgcgggacacgccggg

SEQ ID NO: 199049 - RNA, 60 nt, Homo sapiens
cccccgccgagcacggggagccggcacagagaaaaggccagaaaccggccaccggaccaa

SEQ ID NO: 199050 - RNA, 75 nt, Homo sapiens
aagggaaaccgagaaggccaggagcaacaggggcaagcccaaaaggaagggggagaccgagaaagaaaagaaaga

SEQ ID NO: 199051 - RNA, 78 nt, Homo sapiens
accaggcgacaccgcgacaccccaacaaacaccagcgcggggcggagaacggaaaagcaccaggaagcagagaggacc

SEQ ID NO: 199052 - RNA, 80 nt, Homo sapiens
gggagaggagagaaaggcggaagacgagggacaagccaaccaagaacaagaagagcaagcggaaaaaagaaggcccaggg

SEQ ID NO: 199053 - RNA, 52 nt, Homo sapiens
aaaacccaccagaaagacagaaaaggacggaaaagaagccaaccaggaaacc

SEQ ID NO: 199054 - RNA, 37 nt, Homo sapiens
acagacaaaagccaagaagcaagggccagagaaggag

SEQ ID NO: 199055 - RNA, 46 nt, Homo sapiens
agccccaggaaagcgccggacgcagaagcccccgagcgcccacagc

SEQ ID NO: 199056 - RNA, 78 nt, Homo sapiens
ggagacgaagagcccgggcggcgccgaccggccacgggcgagcgcggcagcgaccgggcagccagaacagcacacagc

SEQ ID NO: 199057 - RNA, 78 nt, Homo sapiens
gaaaacgccacgacagacacaaccaagcaccggagaaaacccacggggggacacgacgagcggacagcaacgggacga

SEQ ID NO: 199058 - RNA, 57 nt, Homo sapiens
ggccgagacacgcagcggcggccagggaccagcgggccccgcgcgacacccccacag

SEQ ID NO: 199059 - RNA, 42 nt, Homo sapiens
gaggccccaagagcccagaccagagccccgggggccacgcaa

SEQ ID NO: 199060 - RNA, 72 nt, Homo sapiens
gcggcccccgcgcccgacagggccaagccccacaggagggcaaggggggggcacagaaaaggaccacacaga

SEQ ID NO: 199061 - RNA, 74 nt, Homo sapiens
ggcagacaaaagggccaaagaagggagagaggaaaaagcagcaaagggagaaaagaaggccaaacagaagcagg

SEQ ID NO: 199062 - RNA, 78 nt, Homo sapiens
caagagccaggacccccgaaagccagacaggcacacacgaacaacagaggacaggcgccacacgaggagaagcaagca

SEQ ID NO: 199063 - RNA, 79 nt, Homo sapiens
aaagaacgacgaaacggaggccccggaccagacgagcacagaccaaccaggcgggcaggacccaacacagaccagaagg

SEQ ID NO: 199064 - RNA, 78 nt, Homo sapiens
gaggaccagggacagacacggggcaacgacgcagacggcagggggaaaagaccagccaaggacgccgccagccaccgg

SEQ ID NO: 199065 - RNA, 83 nt, Homo sapiens
gcagccaggagcgcccacggagcggacccccagagccgcgcggcgccgcagcaggggcgagccacaagggcaggagaaaccag

SEQ ID NO: 199066 - RNA, 60 nt, Homo sapiens
aaacagcccgagagaggccggagaccagacccgggggcagcaggggaccacgaccacaag

SEQ ID NO: 199067 - RNA, 74 nt, Homo sapiens
gaaacccaccaagacacacgcccggaggaggaggcacggcccagaagagcagcgggcacggcccagcagagcag

SEQ ID NO: 199068 - RNA, 74 nt, Homo sapiens
aacaggcaagcgaaaaagggaaaaggagagaaaagagcagaacgaagaaacccgcagcggagggacgggaagag

SEQ ID NO: 199069 - RNA, 77 nt, Homo sapiens
gcagggccgagaggacgccagcggcgcgcaggagcccaaaagaaacagggcgcaggaaaagacgagccaggaaaagc

SEQ ID NO: 199070 - RNA, 78 nt, Homo sapiens
aacccaggccagcaaagacacacccacaagccacagaaaacaacagcgcgaagagaccaaggagaagacgcagacgag

SEQ ID NO: 199071 - RNA, 77 nt, Homo sapiens
aaaaacggaaacccaaagcccgaaggcgccaccagaaacgaaagacaagcccagccaaacagcaaaacaagacagca

SEQ ID NO: 199072 - RNA, 69 nt, Homo sapiens
accaccaacagacagcggcccccagaagcacggaaaagcccccggccaaaggggcgcgagcagaggaca

SEQ ID NO: 199073 - RNA, 94 nt, Homo sapiens
caaaccgcccccaagagaagagcccccaggagaaaagccagagcggcccaacaaccgccgcgagacgcagcggacaaaggcagcaaccaaccaa

SEQ ID NO: 199074 - RNA, 54 nt, Homo sapiens
acccagggcagaaagaacgagaaagcaaagggcaagacgccaagagaaaaggcg

SEQ ID NO: 199075 - RNA, 81 nt, Homo sapiens
acacggcgcggcgcggcgcgccggagcgcgacccggccggcgccggacaggacagcccagagcaagcacacggaggcccgg

SEQ ID NO: 199076 - RNA, 82 nt, Homo sapiens
caccggaggagcggggagggggacacacaaccgcccagccggcgagggacgccgcagacaggacgacacaaacacagcgaag

SEQ ID NO: 199077 - RNA, 86 nt, Homo sapiens
cggaccgagcaacaccgagagaggaggagccagacgacaagcacacacaggcgcgaaacggaaaaagggaaaaagaggaagcagga

SEQ ID NO: 199078 - RNA, 82 nt, Homo sapiens
gaagcccgacggacccagaccggcggggccagagccccccccaggcagagaccagaccgacagggcgaacagcccgggcacc

SEQ ID NO: 199079 - RNA, 69 nt, Homo sapiens
cccgaacccacaaagaaaccacacaaaggaccgccacaccaacaagacaagaaccaaacagaacccacg

SEQ ID NO: 199080 - RNA, 69 nt, Homo sapiens
gcgacaggaggagacaggcgagagaggaggacacgaccgaaacaacggacacccccgggaacccaccaa

SEQ ID NO: 199081 - RNA, 65 nt, Homo sapiens
gccggcgccgacaccacgcgcaccggagccaagcggccgagccaggacaaaaccaggcagaacca

SEQ ID NO: 199082 - RNA, 85 nt, Homo sapiens
agaacaggggggcccacaggagagggaacagcagcagggagagggccaaaggaacgggacagcacggcacacaccccgcaccagc

SEQ ID NO: 199083 - RNA, 70 nt, Homo sapiens
gggcaacaccgagaaagccagacagcaaagacaaccagcaccaagggaacggaagccccagcccgcgcga

SEQ ID NO: 199084 - RNA, 33 nt, Homo sapiens
gagaaggcagaggcggaaagagagaagcgacga

SEQ ID NO: 199085 - RNA, 60 nt, Homo sapiens
cgaggaggcaagcaagcagcagccacgcagcagggcgcacagaggcggggagcaggccag

SEQ ID NO: 199086 - RNA, 56 nt, Homo sapiens
ggaccagacggggacgcacacggaagaaacgcaacccacgcagacgggacacggcc

SEQ ID NO: 199087 - RNA, 78 nt, Homo sapiens
gaggcgagcgccgcgcgcaccacgaaggaccacgggaggcagaccccgacgacacaggaacccaaagcgagcagagcg

SEQ ID NO: 199088 - RNA, 63 nt, Homo sapiens
gcgaagagagggcgcgagaccagccgaggacggcgcaaggggccaagacgcccccgcggcccc

SEQ ID NO: 199089 - RNA, 77 nt, Homo sapiens
gcaaacaaaagcaagcggccgggaaaaaaagggcgacccagcaacgcggccggccaggggcaagcgagcacggaggg

SEQ ID NO: 199090 - RNA, 74 nt, Homo sapiens
cgccgggggccggccgcgccggccggccgggaccagggggccaaagggcgagggcacaaaaaaccacacccccc

SEQ ID NO: 199091 - RNA, 81 nt, Homo sapiens
caaggggagggaagaggacagccggccaggggagcaggcggaagaagaggaaggcgcgaggcaccaaagcgaacgaagagc

SEQ ID NO: 199092 - RNA, 77 nt, Homo sapiens
ggcgacagcaccaagaacccacgcaggaagggggagcaacagacaagcccgaaaggaacagcagcaggaacgaaacc

SEQ ID NO: 199093 - RNA, 53 nt, Homo sapiens
aggccaaggggcggcaaaaagcccggaacgaccaggagacgcgggaaggacag

SEQ ID NO: 199094 - RNA, 80 nt, Homo sapiens
gcgcaggagccaagaccacagcagcacccagcgggaccccacaccagccagggaacaacggcccccagcagacagagcgg

SEQ ID NO: 199095 - RNA, 68 nt, Homo sapiens
ggcgcccggacacagaagaggacaggaacaagcgggaaacggagccaccaacaagcgggagaaagaca

SEQ ID NO: 199096 - RNA, 55 nt, Homo sapiens
cgggcccgcggcggcgggcacccggaggcgcccgagcggaaccccaaagaggccc

SEQ ID NO: 199097 - RNA, 80 nt, Homo sapiens
ccaacacgcgggcagcgaacaagcgggagcaaggagggcgaagagcgaggagccgcggccgcacgagcggaaggacgaac

SEQ ID NO: 199098 - RNA, 73 nt, Homo sapiens
ggagcacggagcgcagccgggggccgggaccccgaaccagacccaaaagagcaaacaaccgacggagaaggaa

SEQ ID NO: 199099 - RNA, 62 nt, Homo sapiens
gcaccgaccaccgaggcggagggggagaacacccaggccccgggggcgccgagggcacaagg

SEQ ID NO: 199100 - RNA, 83 nt, Homo sapiens
ggagcacgggcaaggcggagaggacggagcggcgagcccccgcggcgacagcacaaacacacgaagaacaaacaaggcaaacg

SEQ ID NO: 199101 - RNA, 85 nt, Homo sapiens
gaaacccagcaaaagcgggaagaacaaaggaaggggagcccgggacccccgggggcgcagacaccacaaaaccgaaaacaggacc

SEQ ID NO: 199102 - RNA, 83 nt, Homo sapiens
gaagaggcccagccggcccgcgggggagccccgggagccgcacggccccgacaagggacacagacaagcgagccgcaccccgc

SEQ ID NO: 199103 - RNA, 39 nt, Homo sapiens
ccccgcggacagggcggacaaagaccagcaacaggcgca

SEQ ID NO: 199104 - RNA, 43 nt, Homo sapiens
ccaccgcaaggcggaggcggcccggaagccaggcgcgcacccc

SEQ ID NO: 199105 - RNA, 74 nt, Homo sapiens
aggaggaaacagcggcaagccacagacggagacgagagggccccaaagggaccagggacgcgcccgcgcgggag

SEQ ID NO: 199106 - RNA, 85 nt, Homo sapiens
gccagccggaccagcaccccaccacgacacgggaggacgggagccgcagagccaggccaggcaggggccgccagccccccgacgc

SEQ ID NO: 199107 - RNA, 63 nt, Homo sapiens
ccggacccccagaagaagaggggaacagggccaaacagaagaggagaagcaagaagccccagg

SEQ ID NO: 199108 - RNA, 76 nt, Homo sapiens
cagaaacacagaccacacaaggacgcgcaggcggaacaggggacaggaggaggaagaaacaaaccagacagagagc

SEQ ID NO: 199109 - RNA, 83 nt, Homo sapiens
aagggagcgcaccccaggaacaaagggaaggacgagacccgaagccagacccccaccccgcaagagccccacagagcacgagc

SEQ ID NO: 199110 - RNA, 75 nt, Homo sapiens
gagccaaacccggcgcacgagaacggacccaaagacaggaccacgcaccagcagagaaggaaagcaaaccgaagc

SEQ ID NO: 199111 - RNA, 117 nt, Homo sapiens
ggacacggggaccgaaacagcccaccgccccagaccacgggagcagcaaccggccaggagcccacgaggaaaaacgcaagaagaggaaccaccaacgaaacagggagcaccaggggg

SEQ ID NO: 199112 - RNA, 75 nt, Homo sapiens
aaggaccgagaaacaaacccaggaaaaagccaagagagaccggagaacgcgacagcggcagcggagagccgcccg

SEQ ID NO: 199113 - RNA, 71 nt, Homo sapiens
cgggcggggagcgcgacgggggacgaggaacaaccgcaccagaccaacagccaccgaggaggaccagccgc

SEQ ID NO: 199114 - RNA, 78 nt, Homo sapiens
gagaacccccggccgcccacgagccacagagcagaacagaaacaaacagaggcaccgccccggcacagccagggacca

SEQ ID NO: 199115 - RNA, 58 nt, Homo sapiens
ccccagagggcagagcagccaggcccgacgccgccgcaggaagagggaagcggaggcg

SEQ ID NO: 199116 - RNA, 52 nt, Homo sapiens
cggcgaggagcaccccagacaggaggcaaggaggccacggggccgaagacac

SEQ ID NO: 199117 - RNA, 66 nt, Homo sapiens
acaggagccccagcgccaccgccgaccgaagccgcaaaaacggccggggacgagaaacgaaacaag

SEQ ID NO: 199118 - RNA, 79 nt, Homo sapiens
gcagggcaccgcgcgaagcggccaaagccgcccagacggccaccggcgggaggaacaaaaggaagagagcgagcggaaa

SEQ ID NO: 199119 - RNA, 68 nt, Homo sapiens
cgaacccccccccccggccccaccgagaggacacgcagccgaacacaccggacacaccccacagcggc

SEQ ID NO: 199120 - RNA, 84 nt, Homo sapiens
gggcccgagagcaccgcgccagacagccaccaggagagaacgccgcgccgcgcgacaacggcccggcaggcaaggccggccgcg

SEQ ID NO: 199121 - RNA, 55 nt, Homo sapiens
gaaagcgacaaggaacaagagaccgcagacacagcggaccagaccgaagaagacc

SEQ ID NO: 199122 - RNA, 85 nt, Homo sapiens
gcgggacccggacggcgacgacgggggaagggcgcggaccggcagcagcgcaccagggcaagagcgcaagacaaggacggacggg

SEQ ID NO: 199123 - RNA, 67 nt, Homo sapiens
gcagcaggccggaccgcagcccggagaaggccccggacagggaagcgcggcgcagccagacgcaaaa

SEQ ID NO: 199124 - RNA, 77 nt, Homo sapiens
cagaaaaggaagacacagacagaacaacaggagaagagaacggacagcaagagcagccccggaacggaggaagggag

SEQ ID NO: 199125 - RNA, 87 nt, Homo sapiens
cgcagcggccgcagcagcagcggcagcacaggcacacagcaaagaggccaagaagggacccagacacgacccggagaaaaagccaga

SEQ ID NO: 199126 - RNA, 75 nt, Homo sapiens
ggggcgcccgcacgacggagagccgacccgacacgagccaagaaaaggacccaaccgcggcacacagaaaacccg

SEQ ID NO: 199127 - RNA, 73 nt, Homo sapiens
gaggccccccagcagaccagggggccgccccgggggcccagacaacgaccgaagaaagaagagaaccagaaag

SEQ ID NO: 199128 - RNA, 98 nt, Homo sapiens
aaagccaagccaccgagacccggaggaggcgaagcgagaggacagaggggacccagagccgccgggaacagccagagaagaggaacccagacgcagcc

SEQ ID NO: 199129 - RNA, 73 nt, Homo sapiens
ccgaaaagcgcgccgacgggcacaaggccaagcaagagaagcaaacaaagacccaagcgacaaaagagacaca

SEQ ID NO: 199130 - RNA, 81 nt, Homo sapiens
ccagggaggaacccacaggacaaaacagcaagggccgggagggcccagggaagcaaggcgagagacgaagcagaaccaaag

SEQ ID NO: 199131 - RNA, 92 nt, Homo sapiens
gcgcgcccacaacagggaccggaagagcccacggacacacaggaacgggggccacgcacggagaacaccagcacggagggcccagcaccccc

SEQ ID NO: 199132 - RNA, 54 nt, Homo sapiens
gagcacagccaggcagagaaaacagacagacccacaggcaacgaaagcaaaccg

SEQ ID NO: 199133 - RNA, 80 nt, Homo sapiens
gggcccgcggggaggggcagcagcaggagcccacaagccagaccgacaccgcggagcaaggaaaagagcccggaaaaaag

SEQ ID NO: 199134 - RNA, 84 nt, Homo sapiens
ccgaaaagcacgcaggaaggccagaagcggacccagaagaggggagcagcaaggaggaagacagccggggccggaggggagccg

SEQ ID NO: 199135 - RNA, 77 nt, Homo sapiens
gcgcgccaccgcaccccggcagcgagaggaagaaaggacacaaagcagaagaaaagccacaaacagaagcaacgaac

SEQ ID NO: 199136 - RNA, 81 nt, Homo sapiens
gacgaaagcaaccagcaagagcgagaagcacgagaaaaggccagcagaaaagagacgaggaagaagaggagagaaggcaaa

SEQ ID NO: 199137 - RNA, 86 nt, Homo sapiens
gccgcccccaggagaaggagcgagcgcaacagccggcgagagagaaccgagagccagaagcaacaaagagccaaggaccaacgacc

SEQ ID NO: 199138 - RNA, 65 nt, Homo sapiens
gggaacaaacggcaagagccagaagcccggcggaagaaacagcccgagaggggaaaagaaacccc

SEQ ID NO: 199139 - RNA, 72 nt, Homo sapiens
cgcagacgggagccgggagccggcagggggcagcacgccgaaggagagaccagacaacaggccagggaaggg

SEQ ID NO: 199140 - RNA, 77 nt, Homo sapiens
agccgcagaagcacaaggccccagcccgggccggacacagcccaagccccggggaccgggagagacggggcgccagg

SEQ ID NO: 199141 - RNA, 78 nt, Homo sapiens
agacaacaacggagagcgggagagggaaggccacgaggacgagaggacaaagcagagcaacccaacagaggaaagcca

SEQ ID NO: 199142 - RNA, 37 nt, Homo sapiens
ggacccacacaaccaccagcgagggacggggcaccag

SEQ ID NO: 199143 - RNA, 66 nt, Homo sapiens
acagcccccaccacccaaagagcagcaccacaccgcgggccacacacaaggaccagaacagagaag

SEQ ID NO: 199144 - RNA, 72 nt, Homo sapiens
ggcaaaccacggaacaagaaggaaacacggggaacggccaggccgcgcaggcagacgggggacggaagaagc

SEQ ID NO: 199145 - RNA, 80 nt, Homo sapiens
cggcgccccgcagacggcgggggcacgacagcgcaaggaggccgcacccaaggccgcagacaagaaacagagaagcgaga

SEQ ID NO: 199146 - RNA, 58 nt, Homo sapiens
ccgcagcaagagccgggccccagaaccacaaaaagccccgggaggccggcacaccccg

SEQ ID NO: 199147 - RNA, 64 nt, Homo sapiens
aagagacaagcgggcaaggagggagaggcgcacacaggaaagacaaccaggcgaagaacccccc

SEQ ID NO: 199148 - RNA, 70 nt, Homo sapiens
ccaaaccggagcaacaaaggaaagcgaaagaggcacgcagacagccgcccccaaccggccccgccgcacg

SEQ ID NO: 199149 - RNA, 73 nt, Homo sapiens
agagagacaaaagacggcggccaaacagagcagaacaagcgcgagaaggaacaaaccaggagaaaccgaacag

SEQ ID NO: 199150 - RNA, 73 nt, Homo sapiens
ggcgcgggggacaccagaacgaggagacgagacgaggccggcaacccacaggggccacacccaggggaaaagc

SEQ ID NO: 199151 - RNA, 61 nt, Homo sapiens
cccgacgaccaccagggcgcacgccgcagagcagaggccaggaggggcccagcccggccag

SEQ ID NO: 199152 - RNA, 52 nt, Homo sapiens
accgccgagagagaggaaggccagacaagaaaaccccaggacacagagcggg

SEQ ID NO: 199153 - RNA, 69 nt, Homo sapiens
gcggagagaagagaagccgaagacggagaaaaaggaacagggaggggaggcgccacggggggaaccaga

SEQ ID NO: 199154 - RNA, 69 nt, Homo sapiens
ccgcagacgggggacgcagggaggagcgggacaccccggaagcgggaaaggcggaccagggaaaggagc

SEQ ID NO: 199155 - RNA, 69 nt, Homo sapiens
ggagcggagggggggcgccagacaaggaggagcccaaaggcgaaaggggcagcccgcccgcaaaccaag

SEQ ID NO: 199156 - RNA, 73 nt, Homo sapiens
caacaacagcaacggaggcgggaccggaacaggcacaccccacacaagcacgccaagaaaaccagaaggcacc

SEQ ID NO: 199157 - RNA, 57 nt, Homo sapiens
caccaagcacagacaagcagaagaccgaggagcagggagcaaccacaaggaaaggaa

SEQ ID NO: 199158 - RNA, 68 nt, Homo sapiens
aggagcgccacgcgcggaaggcagcgcccagcagcgcaggaaggaggcagaaagggagccccaagaga

SEQ ID NO: 199159 - RNA, 82 nt, Homo sapiens
cgcgccggaccccgccccccccgcgcggcgcgggcgccgggggcaccgaggaccaacgggacccacccccaccacggcacag

SEQ ID NO: 199160 - RNA, 69 nt, Homo sapiens
gggacaaaaaccagaccaggaggcaggggaagcacaaaagcgcacccgcgccagcgaggaccggaacgg

SEQ ID NO: 199161 - RNA, 76 nt, Homo sapiens
ggccaccgccgaggaccccggcagcaccagcggaaagcaccagacccggaggagcagcaccccggcaggcagacca

SEQ ID NO: 199162 - RNA, 60 nt, Homo sapiens
acaacacccccagcggccgccggccccccacgaggggcgggaagaagcccgccgccacca

SEQ ID NO: 199163 - RNA, 50 nt, Homo sapiens
cagaaaaacacgacagccagacagaaacgggagcgagggccaggagacag

SEQ ID NO: 199164 - RNA, 74 nt, Homo sapiens
cagcaaaaagaacacaaaggacagacagagagagaccgagaagaggcaagccccaggaaggcaacagacaacaa

SEQ ID NO: 199165 - RNA, 76 nt, Homo sapiens
ccggggcggaacccggcgaccacgccccggggcagcaggcgaccagcgccacggagggccaaagaagacagcaaaa

SEQ ID NO: 199166 - RNA, 80 nt, Homo sapiens
ggcccagcaaccacacaaggccggagacggaggagaagccaccccaccacccaccagaaggcgacggcccccccgccccc

SEQ ID NO: 199167 - RNA, 101 nt, Homo sapiens
aaaagcgggagaggcaacagaaaagagcgcaaagggcaggaaacaaacaggggaaaaagaaaagggcgaagacccgaagcagcgcaggaacagaagagaag

SEQ ID NO: 199168 - RNA, 76 nt, Homo sapiens
ggacgaggagggagaagacgaggagagcggaaaaaccccaagaccacaggcaaacgagagaccggaacacaggaaa

SEQ ID NO: 199169 - RNA, 58 nt, Homo sapiens
ccgggaccgaacaggcgagcaacaaggagacgcgccgcccggcccaagcgaaccaaca

SEQ ID NO: 199170 - RNA, 97 nt, Homo sapiens
gcggcgacggcaaacaaggcgggggacccagcaggcaggaggccagaaggggagagggaagcgcagggaagacccggaggagccgacaaggggagcg

SEQ ID NO: 199171 - RNA, 80 nt, Homo sapiens
caggaaccagccgggggccaaccgaggagccacgcagcagaaggaaccaggacaacaacgaagcagcagcgcgagcggag

SEQ ID NO: 199172 - RNA, 78 nt, Homo sapiens
aaggcagaccacagcgcaagacgaaaaaccacaaaagagaccaggcacaggaggaaaacccgccaggccaagcaaccc

SEQ ID NO: 199173 - RNA, 77 nt, Homo sapiens
gagaagagagaaaaccacggacaagaaagcgccaaaaacaacaccaaaaagccgcaggggaagagagaaggccacgc

SEQ ID NO: 199174 - RNA, 85 nt, Homo sapiens
gcggcgcccgcggccgggcggcgcggccgcccgggccgggccccaccggacgacggcccgccacgggccccgcagccgcgcccga

SEQ ID NO: 199175 - RNA, 75 nt, Homo sapiens
gccgaagaaaggcgcagccgcaagaggggcacacgcccgcacgagcagcggagaagcacacgaccgcgagagggc

SEQ ID NO: 199176 - RNA, 84 nt, Homo sapiens
aggacggcccgggcaaagccggcacaagggcccaacggaaccacacgggggaaaaaacccacacgagggacagacccacccaaa

SEQ ID NO: 199177 - RNA, 80 nt, Homo sapiens
aggaggggcggcccggccggggcgccccggagccgcccccgggacgcagccggaggaggcgaggggcccccggcccaggc

SEQ ID NO: 199178 - RNA, 94 nt, Homo sapiens
gagccagggacccacccccgacagggacacagggagccccagacccacagacaaggacgaggggaccaccccaacaacagccagccccgagcgc

SEQ ID NO: 199179 - RNA, 76 nt, Homo sapiens
gccgcccccgccagccacggagccaaggcggcagcgcgcgagggaccggccagggaccccaacgagggaccacgcc

SEQ ID NO: 199180 - RNA, 62 nt, Homo sapiens
ggggagcaccaggaccgggccggaacgagacgcacggaagaaaacaccggagcccaagacac

SEQ ID NO: 199181 - RNA, 54 nt, Homo sapiens
cggccgaaaggggagacaggcggccacaggcgccaacccaaacgagcgagacac

SEQ ID NO: 199182 - RNA, 84 nt, Homo sapiens
ggcccccgggacccccggcaggccaaacccgggaacccaggcggcccccacccccccggcaccaccagagccgggaacaccggg

SEQ ID NO: 199183 - RNA, 81 nt, Homo sapiens
ccaacaaaagccaaccacgaacaaggaaacagaacgacagcccgcaccgacgccggcggccagccagagagcacgccggcc

SEQ ID NO: 199184 - RNA, 58 nt, Homo sapiens
ccgggagccgccaggcccccaaggcacgggccacagagacgagaccccaacaacaaaa

SEQ ID NO: 199185 - RNA, 67 nt, Homo sapiens
agaggcgccgccagcagcagcagcccgacgcggcgggggcaggagacgaaacgcgagcaaacgcaga

SEQ ID NO: 199186 - RNA, 41 nt, Homo sapiens
cccacaccagaacccagaggcaggagagcggcgacaaaaag

SEQ ID NO: 199187 - RNA, 78 nt, Homo sapiens
gacagcagacacccaacggggaaccccagcggcgacgagaagaggcgaacggaagcaacacccgggaaaagcagcgag

SEQ ID NO: 199188 - RNA, 87 nt, Homo sapiens
cccagcccagcaccgcggagggagcgcgccgaaaagacgaggcgaggaggcgagacacccaacccaccccaccccggagggccagac

SEQ ID NO: 199189 - RNA, 61 nt, Homo sapiens
gccggcggagcagggcagcaccacgagccagaagcagagccgagcggagagcagacaagaa

SEQ ID NO: 199190 - RNA, 95 nt, Homo sapiens
ccacgccgccggccgacgcggagggggagaagcacaggcaacgcaacggcgaaagaggagagcaaaaacagcagccaagcccagcaaagagcaaa

SEQ ID NO: 199191 - RNA, 81 nt, Homo sapiens
cccacccccaagaaccaacccccaaaggcgggacaggaaacacgccgcaccagggaggagagaaacgacaccccccacccg

SEQ ID NO: 199192 - RNA, 97 nt, Homo sapiens
agcgccgacagaaggggacagcaccgcgaaagccccaggggccaggacccacagagacgcaaaaggacacaagaaaaaggcaccggaggagagagca

SEQ ID NO: 199193 - RNA, 67 nt, Homo sapiens
ccaggcacgaacccgagaaaacaggcaacgcgaaaggaggcaagaagccggaacgcgcgccacccgg

SEQ ID NO: 199194 - RNA, 76 nt, Homo sapiens
aaacagcgccccaacaggcccgcagaccgccagcccagacagggccacagacccggccaaagagggggcccaaggc

SEQ ID NO: 199195 - RNA, 70 nt, Homo sapiens
gaaaagcgaagccgagcccaaacaaagggaagaacgaagcgcgcagaaaacacagaaggcaaaagcgcaa

SEQ ID NO: 199196 - RNA, 75 nt, Homo sapiens
ggacaaagaaaggacccaacacaggaggagagacgagagggacaggagcgagcaagcccagagcggccgccagca

SEQ ID NO: 199197 - RNA, 59 nt, Homo sapiens
cccgcgccgccgaccccccggcgccgcgccggcggcggcaaagccccggaacaagacaa

SEQ ID NO: 199198 - RNA, 81 nt, Homo sapiens
gaaagacgaaggggccccagagccaaggaggaaggggccggaagcccaccagaggcgaggggaggaggaagcgagcgaaaa

SEQ ID NO: 199199 - RNA, 71 nt, Homo sapiens
cgaggcgcaggagaccgccgccgcaccacaccagccgagcagcccaggccgccgggggcgaggggggggaa

SEQ ID NO: 199200 - RNA, 78 nt, Homo sapiens
gggcacggaagacccgacagcagcagacggagggcagcggacacggcagagcggaggggggccaaaggaggagcccgc

SEQ ID NO: 199201 - RNA, 78 nt, Homo sapiens
ggcgcagcgagcgcggacggagaggaaagcggccagccaccagcagcgacaagaggaaaaccaagaaaacccagcaga

SEQ ID NO: 199202 - RNA, 81 nt, Homo sapiens
ggaagcagaggaacgaagcgcccccgcagaacgccccccggcagggacagaaggggcagaccaacaccacccagcaaaaac

SEQ ID NO: 199203 - RNA, 71 nt, Homo sapiens
gaacccaaaagccgacaaccccagaaacagaccgcaacagagaccaaggaaggggaagccaaggaggccca

SEQ ID NO: 199204 - RNA, 36 nt, Homo sapiens
cacgcaggaaacacgagggccccagggcaggggccc

SEQ ID NO: 199205 - RNA, 101 nt, Homo sapiens
agccgaaaaagacaaggggaggacagcggaaaaaccggagacgccaaaaagaggaaaacgcgagagagacgcaaccagcacaaagaaaaaagaaaaggccc

SEQ ID NO: 199206 - RNA, 82 nt, Homo sapiens
ggaaaggagcccgggcgcgggggcggcggcagggggcggagcggggaggggggagacacgaaccgcgcacccgcgagcgcag

SEQ ID NO: 199207 - RNA, 73 nt, Homo sapiens
cgagacgagagcaagcagaaaagggggaggagcgagccaagggaaaggagaagggaaagacgggaacgcacca

SEQ ID NO: 199208 - RNA, 51 nt, Homo sapiens
cagaaacgccacaggggacgcaccaccggggacagacaccgccagaagcac

SEQ ID NO: 199209 - RNA, 84 nt, Homo sapiens
ggcgcgagaggggcgcggccggagcgggcggcgagacaaaggcgacggggaggcacaaggcgggacagccaagccaccagaagg

SEQ ID NO: 199210 - RNA, 35 nt, Homo sapiens
gagacaggagccacaggacagggagagcaggagaa

SEQ ID NO: 199211 - RNA, 91 nt, Homo sapiens
ccccgccaagggccccaagagggcacacagcacacaccgacagcacccgacagcacaaaggcaagaaagaaaaagccccagccgcccgccc

SEQ ID NO: 199212 - RNA, 83 nt, Homo sapiens
gaaccgggaacccacgggcaccggagacccagagaggcgagggagccgaccacagcgaagcagaaggccccccggaggagggg

SEQ ID NO: 199213 - RNA, 43 nt, Homo sapiens
agaaggagcgcaacccggaaaagaggcgcccccaccccggcca

SEQ ID NO: 199214 - RNA, 69 nt, Homo sapiens
gccagccacacacaggagcacaacaaagaacggacacggcacgccacacccggaaaagaccggcagaaa

SEQ ID NO: 199215 - RNA, 82 nt, Homo sapiens
gcacccaccccggagggggaccacaagacccacgacagccaccaggagagaacgccgcgccgcgcgacaacggcccggcagg

SEQ ID NO: 199216 - RNA, 70 nt, Homo sapiens
ccggcggggggaggccacaggcgcaagcagagacaaaaccgaacgcggagagagcccgggaagaacaaag

SEQ ID NO: 199217 - RNA, 68 nt, Homo sapiens
cgcacgcgcacggacggcacagcccgccgaacccgaaaggagggaggacagagcccaggaccaagagc

SEQ ID NO: 199218 - RNA, 81 nt, Homo sapiens
cgacgccccaggggaaaacccccgggaccaggagcagcccgaagcagcagcagcagcaccagggcagcagcacaacagggc

SEQ ID NO: 199219 - RNA, 68 nt, Homo sapiens
caccaagcgcaaagaagcagcagacggccagggaccgcgccaacggaggaaccaccgccgacggaaag

SEQ ID NO: 199220 - RNA, 75 nt, Homo sapiens
gaaaaacggacaccagaaggacgccagaggagaaaaacagaaccgaaagaacggagaaccgagacacacccgcga

SEQ ID NO: 199221 - RNA, 68 nt, Homo sapiens
aggcaacagcaagaaacggaaagacccgccaagagagaaaccaacaagcggcccgaaagagaaccagg

SEQ ID NO: 199222 - RNA, 65 nt, Homo sapiens
gcggaaaacggcgcagccaacaagggaggcaggacaaaaagagagagccacacggcccacccagc

SEQ ID NO: 199223 - RNA, 76 nt, Homo sapiens
gaagcggcaaagccagaaagaggaggccagagcgggcagaagcccccggggagagacagacagagggacacagaga

SEQ ID NO: 199224 - RNA, 72 nt, Homo sapiens
ggccacgagcaccgcgccggcccagcaccccgagaaccgcaggagccagaggaaagcacagcagacagaacc

SEQ ID NO: 199225 - RNA, 66 nt, Homo sapiens
aaaaggcacgagggaacgggaaagaacagagaaggccaacacacacgagcgggcgaaaacgcgacc

SEQ ID NO: 199226 - RNA, 73 nt, Homo sapiens
agcgcaggggggcggaaggcagcaagaaacagaccgaagagcaagaaacacgagaacagcacccacaaaacag

SEQ ID NO: 199227 - RNA, 81 nt, Homo sapiens
agcacacacggccaagagcgggcaccaggaagcgaaggcggcacagaagacgagcacgaggagaggaaccaacgaagaaag

SEQ ID NO: 199228 - RNA, 80 nt, Homo sapiens
cgagaggaggcaccgcggcacgccccccgggccgggcgcccagagaaacagagggcaaagaggaccaaagaacaaacagg

SEQ ID NO: 199229 - RNA, 79 nt, Homo sapiens
cccgccgccgccgaggaggcgagcagccgggagacaccgccaccgccagaacagccagcaaagacaagagcagaccagc

SEQ ID NO: 199230 - RNA, 60 nt, Homo sapiens
gcggcggcgcgagcgcccaggccacggagcgccgacacggagcgacccgcaacccgagga

SEQ ID NO: 199231 - RNA, 62 nt, Homo sapiens
gaccaacagcggagggccgagggaggaaggggagaaggacggcagaaaacgagacgccggcg

SEQ ID NO: 199232 - RNA, 79 nt, Homo sapiens
cgcgcccccagccagccacgcgggccgcccgacggcggccaccgggacgaaaacccgaggcaccggacagaagggagga

SEQ ID NO: 199233 - RNA, 51 nt, Homo sapiens
gaaaccgaaacacgcagaaagagaggccagcgaagacggaggaccacaccg

SEQ ID NO: 199234 - RNA, 73 nt, Homo sapiens
caggccaccacagaaacaaaagcaacaaagagggaacaagagaaaggggggcacagaagaagaagaaagcggg

SEQ ID NO: 199235 - RNA, 77 nt, Homo sapiens
ggcggacaccaagaaaccagaccgcccagggcgaaggaagcccagaagacacaagacaaccgcacaagcccggagcc

SEQ ID NO: 199236 - RNA, 83 nt, Homo sapiens
ggaccccggagacaagcggaaggcaggggcggcagcaacgcagaacgagccacacggaaagagaagggagggcgacgagagcc

SEQ ID NO: 199237 - RNA, 77 nt, Homo sapiens
gcacaaagggaccccagccgacgaaccacggagggaacaaagagcagaggccagcagccaccgacagcccgcggcga

SEQ ID NO: 199238 - RNA, 69 nt, Homo sapiens
ggaacagggagcacaaccgaagggcaccaccagcacgcagcagggcaggacgccccgcgacccgggagc

SEQ ID NO: 199239 - RNA, 74 nt, Homo sapiens
cagaaggagcagcgaaaaacccgaccccccaagcagacgaggaccaaaacggaaggcaaaacacgcaagcgacc

SEQ ID NO: 199240 - RNA, 82 nt, Homo sapiens
gccgagcgcccccgccagggcccccagccccagccgacccaccgacaacgagacacgagacacagcgcagccaggccggggc

SEQ ID NO: 199241 - RNA, 79 nt, Homo sapiens
caaggccggaagaagggagagcagaagccgcgaaaaaggggggccgaggaccgaacccgcggcgggacacccccggcgg

SEQ ID NO: 199242 - RNA, 58 nt, Homo sapiens
agacaccaggacccaggcacacacagaacaaaagcagcgaggagaaagcgcagaggag

SEQ ID NO: 199243 - RNA, 75 nt, Homo sapiens
aggacagcaaaaaccagggcccacagaggagaaggggcagaccaacaccacccagcaaaaaccccgacgaacgcg

SEQ ID NO: 199244 - RNA, 53 nt, Homo sapiens
gccgccaacgcgcccccgagcaccgagccagaagaaacccaggagcgaggaac

SEQ ID NO: 199245 - RNA, 51 nt, Homo sapiens
cccggcggggaaaagggaaggaaaagagacgcagggaagggagcccaaaac

SEQ ID NO: 199246 - RNA, 78 nt, Homo sapiens
cgccccccccgccaaaaggggcgcaagagagcgcccagagggccgccagggaccagggacaagagcaacaagagcgga

SEQ ID NO: 199247 - RNA, 38 nt, Homo sapiens
gagggcaccaaccacaaagaaacccgaagagagcccac

SEQ ID NO: 199248 - RNA, 47 nt, Homo sapiens
agcgcgccaagcgaacggagagccagccgggaggaaaagcgccacca

SEQ ID NO: 199249 - RNA, 71 nt, Homo sapiens
cacaccaggaaagaccgaaacgcaccgagcaccaagccagggcaaaaagcacaggagggcaggacccagcg

SEQ ID NO: 199250 - RNA, 122 nt, Homo sapiens
cccaaacacagaagaagacaccaagcagaagagacccccgcagaccgaaggacggaagaggaggaacgcgcgggggacaggcgcccaggaggacaacagcaaacagcaccaaccacgacaaa

SEQ ID NO: 199251 - RNA, 74 nt, Homo sapiens
agagcgagcgagggggggcgcgccggaaaccggagcgcgcagcagaaacaaacagggaccccgagccagcgagg

SEQ ID NO: 199252 - RNA, 72 nt, Homo sapiens
caccgggcgaaaaggaggaaaagaagccagaccgaggaaaaacgaagagccgaagaacaccagccccagaag

SEQ ID NO: 199253 - RNA, 40 nt, Homo sapiens
gcacccacgcacagagagacgggcggaaagagagcgcaga

SEQ ID NO: 199254 - RNA, 65 nt, Homo sapiens
aaaagcagcagagcgagagggaacaaccccgcacaagcagcaccgccaagcaacaggcacaaaac

SEQ ID NO: 199255 - RNA, 75 nt, Homo sapiens
ggggaggcaaggggggaccagacaggcggcaaggggccacggagaaccagcgcagcccaacacagaggaggaggc

SEQ ID NO: 199256 - RNA, 73 nt, Homo sapiens
ggaaaccccagaacaaagacagcgcgaccggcccgaggaccgccgcacgaccaaacgcagaacccacacccca

SEQ ID NO: 199257 - RNA, 80 nt, Homo sapiens
cgagcaacagacaaagcccggggaacagaggccgggggccagccagccgagcgccacccaaagcagcagcaccaaaaaag

SEQ ID NO: 199258 - RNA, 83 nt, Homo sapiens
cggggggccagaaggggaagcgaggaagacagccaagcagagaaacgaaggagcgacaaggagaccggcccccggcagaacgg

SEQ ID NO: 199259 - RNA, 35 nt, Homo sapiens
aggcgagggaagcgccggggccccagggagagccc

SEQ ID NO: 199260 - RNA, 83 nt, Homo sapiens
gcccgaccgccgcccgacgccacgcccggcccggccgcgcccgcggaaccagaccagggaacgaacacaaaccccaggcccca

SEQ ID NO: 199261 - RNA, 64 nt, Homo sapiens
accacggagcacgggccagccccgacggccggcagaggcgagacaacccaggcgcggccccaac

SEQ ID NO: 199262 - RNA, 71 nt, Homo sapiens
accccaaccggggaggaaaaccgacgaaggcaagccgacaggaacacccgacgggaccaagcgcaacggag

SEQ ID NO: 199263 - RNA, 77 nt, Homo sapiens
gagagccccaggcgggcagaagggcgcgccccgagaccccgcagcgcgccagaaggcgggaagaaaccggaaggggc

SEQ ID NO: 199264 - RNA, 58 nt, Homo sapiens
cgcacgacaggcacaggaagggagagacgaggacccagccaagaacccaaaagaagcc

SEQ ID NO: 199265 - RNA, 76 nt, Homo sapiens
gcgggcgccgggggcaccgaggacggagccacgggcccaggcggaggcagggcgccacggccacgcaggcgcccgc

SEQ ID NO: 199266 - RNA, 70 nt, Homo sapiens
agcagggccaaccgcagaggccgacgggaagaaaaagaaggagccagcaacaaggccagcaggcacaaca

SEQ ID NO: 199267 - RNA, 69 nt, Homo sapiens
gggagccgccggcaccgccggaaccggcgcaggaacccaagacagaccaggagaggagcagccggaaag

SEQ ID NO: 199268 - RNA, 89 nt, Homo sapiens
gggcggccccgacggggcgcgcgcgaagcgagcgagaaggcacggagcgccgcggagcgcagacgcccaggaccacaccgcagcgaacg

SEQ ID NO: 199269 - RNA, 83 nt, Homo sapiens
cgccggcaagacaagaggcagccagcggacgggcaaaagcagaccggaaaacccaccggcaagaccacacccgaggggagccc

SEQ ID NO: 199270 - RNA, 85 nt, Homo sapiens
gcccgacccaggcgccgggaccccaggccagacagggccgaggccccagaggggcaacaaagcggaccagcgggggccagggcga

SEQ ID NO: 199271 - RNA, 73 nt, Homo sapiens
aacgacgaacgagcagacaacaaagaaaacgggaagagcacccggagaggagccaaaagacacgccaaacgaa

SEQ ID NO: 199272 - RNA, 91 nt, Homo sapiens
caacaagggccacaaaggaccaagaacggagcaagcccaggcacagccgacgccgcggggcgcgcccgggacgacggcgcggcgcgcccag

SEQ ID NO: 199273 - RNA, 35 nt, Homo sapiens
gggacccgggagggaaggacaagcgcggacgagga

SEQ ID NO: 199274 - RNA, 88 nt, Homo sapiens
gaggcggcgcggcagcggagggacggcagccgcgcgagacaccaggcgccgagaaggccagcagagaaacaggcaggagaggcccaca

SEQ ID NO: 199275 - RNA, 76 nt, Homo sapiens
gaccggaaagcagaagaaggagcggaacacacagcaagccgccgggacagccacgacgaaacgcagaagaggaagc

SEQ ID NO: 199276 - RNA, 78 nt, Homo sapiens
ccgggccggggccccgcagcgacaacaggaggccggaagacccaaagcgagacaacggcaagcggagaagagcaaggc

SEQ ID NO: 199277 - RNA, 79 nt, Homo sapiens
cgcacagcaccacagccgcggcaaggaggaagccagccaggcccacgagaggaaaacgcgagagagacgcaaccagcac

SEQ ID NO: 199278 - RNA, 39 nt, Homo sapiens
gccccggccgcccgggcagagacgaagggagggaaggaa

SEQ ID NO: 199279 - RNA, 67 nt, Homo sapiens
gaagggacccaaaaagacggacagcccacgggaacaagaggggacagaaaggaccgaaacaacaaga

SEQ ID NO: 199280 - RNA, 67 nt, Homo sapiens
gccaccacaacccccagacgcaagccaagggagagcccagagacaagcaaagaggcaggacagaacc

SEQ ID NO: 199281 - RNA, 76 nt, Homo sapiens
gaaagacaagcaccggcggcaccaggaaagaggaaggacaaggaggggaacccgcccaaaaaaccggaaaagacag

SEQ ID NO: 199282 - RNA, 63 nt, Homo sapiens
ccggcccgcgggggagccccgggagccgcacgggccccgggcgcgggagccagccgaagaaag

SEQ ID NO: 199283 - RNA, 53 nt, Homo sapiens
cggcagaaggcacgcgcccggacagacaggcagcggaacacgccaagaacaga

SEQ ID NO: 199284 - RNA, 75 nt, Homo sapiens
aagaagaaacccaccgcaaagaggggggcgggaacgaagagaaaacaaaggccggagacggggaaccgccgccca

SEQ ID NO: 199285 - RNA, 81 nt, Homo sapiens
cccgccgccgccgggcggagaagacgaccccgacgcaggccaggagccgcggacagaagccgagcacggccgagacaaaag

SEQ ID NO: 199286 - RNA, 82 nt, Homo sapiens
ggcgcagccccaaagcgagcgaagcagggcgccgccacgccgcaggaggcggaggggaccccagcggaacacacccaccaca

SEQ ID NO: 199287 - RNA, 72 nt, Homo sapiens
ggcggcggcagcgggccagacccaggaccgcgacacgggaaagggaaaggacgggagaggagcacagcagag

SEQ ID NO: 199288 - RNA, 70 nt, Homo sapiens
gggggaaaagcgcaaacagcccagcgcgggacaggagaaaccagaagaagacacacaggggaaaaggccc

SEQ ID NO: 199289 - RNA, 75 nt, Homo sapiens
acacaacagcagcgggaaagaagagcgggaagggacaaaacagaggcaacaaggaccggagcgaaggcagagacc

SEQ ID NO: 199290 - RNA, 104 nt, Homo sapiens
cggccggcaggggagcccggagacccggggaagaagagaaggcacacaccccaggagcagccccaggagaggcggcagcccgggacgaccagggccccagggaa

SEQ ID NO: 199291 - RNA, 88 nt, Homo sapiens
agcagcacaagccgaaggcagagggcacaggcgcggaagaggaccggagaaggcccggcggagcaggggcagagaggaggcggaccgg

SEQ ID NO: 199292 - RNA, 58 nt, Homo sapiens
ggcccgcccaccggggaggagaggaaggaagagggaacacagcaggggagagcacgga

SEQ ID NO: 199293 - RNA, 73 nt, Homo sapiens
ggaacagcccggcagaacacacagaaccacacagaaagagccgcagacgcacagcaaccaccggacccgaagg

SEQ ID NO: 199294 - RNA, 88 nt, Homo sapiens
cccgccaaccgcaaccagacgccagcgggacgaggaccgagaccgcggccgggaccgagggacagagcgggagccaccagcgccaaag

SEQ ID NO: 199295 - RNA, 56 nt, Homo sapiens
ggaacaaaacacacacccgcagacaagaacggagagggccgggaggaagaaacccc

SEQ ID NO: 199296 - RNA, 72 nt, Homo sapiens
gcagcgcgaccgggaggcccagcgagcgggcggacaccagaacgaggaaagggaaagccaaccgcacagggc

SEQ ID NO: 199297 - RNA, 77 nt, Homo sapiens
gagagcgccaacagccaggaggacccggacggggacagagagcgagaaggggccgccagggaccagggacaagagca

SEQ ID NO: 199298 - RNA, 87 nt, Homo sapiens
ccgggacgggaagggccaaggaacgaccaaccaccccagaggaaagccaggcccgcgggcccgcagagcccagggagaggaagaccg

SEQ ID NO: 199299 - RNA, 87 nt, Homo sapiens
ccccccccaggcagacgggacagcccagaaaccgccaaagacggaaccgccacagcaccaagccaggcgaaccagccgaaaaaggag

SEQ ID NO: 199300 - RNA, 73 nt, Homo sapiens
aaggcaagggagcaccaggagagaaagcgaccagaagcgaccacacaaggacgaagaagagagacggagcaaa

SEQ ID NO: 199301 - RNA, 99 nt, Homo sapiens
aggcgcaggaagccagccgcgccgacagcacgcagagcggagaagccccagaccagagggaaaagaggacgaggcgcgaaaaggcaaaggcaagaaaga

SEQ ID NO: 199302 - RNA, 72 nt, Homo sapiens
ggagaggaggaaaaaaaggaccaccccaacaggaaacaagccgaaaggggagccagccgcaggggccgagaa

SEQ ID NO: 199303 - RNA, 79 nt, Homo sapiens
acgggagacggaccaggagccggaccaacgagcggccgaacagcagcaggagggagagggccgcacaaaccagggcagg

SEQ ID NO: 199304 - RNA, 74 nt, Homo sapiens
agaaggggaacagcagaacccaaacaaggagggagcagagaagagaaaaggaaaagaaaaaaagaggcgagaaa

SEQ ID NO: 199305 - RNA, 66 nt, Homo sapiens
aggggcgcgcgcaaagaaggaggaaacacggaacgacgaccccggacgaggggcaggaccggggac

SEQ ID NO: 199306 - RNA, 37 nt, Homo sapiens
gcgcgcgcgcggcacaccggcccacgacgaccaagac

SEQ ID NO: 199307 - RNA, 80 nt, Homo sapiens
cacagagaagacgagacgcaccgcagccggaggagcggccgaggcgcgcggagccaggacagcggagcagcgcggacccc

SEQ ID NO: 199308 - RNA, 61 nt, Homo sapiens
accgagaacaacaggaagcaaacaggcacagggcgggcagccccaggcccagagacggcgc

SEQ ID NO: 199309 - RNA, 82 nt, Homo sapiens
aaaccggaggacccgccgcaagaaacgaaggaggcccaaccacaaaaggagccgacggaacccagacggagaacaaaaggaa

SEQ ID NO: 199310 - RNA, 71 nt, Homo sapiens
agcccccccagaagccgcgcagaccagaaaacgaccacaagaaggcacacggaaagagcgccccagaccac

SEQ ID NO: 199311 - RNA, 56 nt, Homo sapiens
gcaagcgaaaacagaccgcgagcccagagagagggccccgccagagggccaaccca

SEQ ID NO: 199312 - RNA, 65 nt, Homo sapiens
ccgggcccagaccacagaggcaggagaccgacacgagccccaccaaccaggaaacgaaagcaccg

SEQ ID NO: 199313 - RNA, 81 nt, Homo sapiens
ggaaaaaccaggagacacaaacagaaaaggaagaaagggacaaagagaggagcagcagagaggaagaggagcgaaggaaaa

SEQ ID NO: 199314 - RNA, 77 nt, Homo sapiens
ccaccccaggaggaaccccccaccaggccggacccacagaagaagaacagggacggggcgaaagacaaagaagcaac

SEQ ID NO: 199315 - RNA, 79 nt, Homo sapiens
aacaggccagggcccagcaaagcaacagccaagccagagccgggccccaacaacccgggaggccagagaggagcccacc

SEQ ID NO: 199316 - RNA, 77 nt, Homo sapiens
ccgaccccgagggagcggggcgggggaaaaagagcccgaagcggaagacgggagaggcacggacccaaaagaacaac

SEQ ID NO: 199317 - RNA, 78 nt, Homo sapiens
aagcagccaaacgcaggaccccgccaaacgcagggaaggggcacgaagaccaaccggccaaagaagagaacccagaaa

SEQ ID NO: 199318 - RNA, 71 nt, Homo sapiens
ccgcgccgcgggaccccggcacgcccaggccgagcacgagaaaaaccggaagggaaacccgcgacaccgcg

SEQ ID NO: 199319 - RNA, 77 nt, Homo sapiens
cacccagcagggggagcagggagcaaggcaggcaccacccaggccgggccaagaacgggaaggagggagcgggcggc

SEQ ID NO: 199320 - RNA, 78 nt, Homo sapiens
aaaggaagagaagacagaagcagagacaagaagaggcaacagacgaaccacaaaagcgaagaagcacgagggaaccag

SEQ ID NO: 199321 - RNA, 73 nt, Homo sapiens
gcgacgcgcgggcaccccgggccgcagcggagggccagcgggccggccggccggagcccgggccagccgcccg

SEQ ID NO: 199322 - RNA, 73 nt, Homo sapiens
caagaggccgcgcagccaaccaacaagaaaaagcggggaaggggggcaaaaaaaagaagcaagcgaagcaccg

SEQ ID NO: 199323 - RNA, 102 nt, Homo sapiens
gaccccaccgccggcgcgggaaacgggcgaagcgacgagccgcgaggagaagaagagccgaaacgcgcggccaggggagacagcccccgaccagcggcaaca

SEQ ID NO: 199324 - RNA, 70 nt, Homo sapiens
aagcacagaaacgaggggacaaacacaccagaggacagggacaagcgcacagcggagaaagcagcgcggc

SEQ ID NO: 199325 - RNA, 56 nt, Homo sapiens
ggggcgagaaggcgggaagccgaaggcagccacagaaggagagaaccaggagaccg

SEQ ID NO: 199326 - RNA, 88 nt, Homo sapiens
ccggcgccgcccgcgggagccgccgccggccacccgggaaggaacccaggcggcagccccaacgggggcgggggcgggccccaggcca

SEQ ID NO: 199327 - RNA, 74 nt, Homo sapiens
gcggcgcccacgagagggcccccgcaggccccccagggccccccccaccgggccgggccccaggagcgagagcg

SEQ ID NO: 199328 - RNA, 77 nt, Homo sapiens
ggaaaacaaaagaggagaaaggaaggggagaggccaacaaccaaaaagacagaagggccacaaacccaggaagagca

SEQ ID NO: 199329 - RNA, 79 nt, Homo sapiens
gccgcacccgggccgcgccggcaccggagccggagcgaggcgggggaggcagcagaagcccgcccccgagagcgacccc

SEQ ID NO: 199330 - RNA, 90 nt, Homo sapiens
agaagggacaccaggcacaggcccacggccgcgccagaagaccggaggaagaggaggcaagacagcggggaagcacagccgagcccgccc

SEQ ID NO: 199331 - RNA, 61 nt, Homo sapiens
gaaagacacagcaggccaagcaaagaggaccagacagcaggaaaagacaagaaaaggcgcc

SEQ ID NO: 199332 - RNA, 76 nt, Homo sapiens
gggcgaggcgagacccccgcccacgcaaacccaaagaccccgccggagacgagagcacgagccagggagccgccgg

SEQ ID NO: 199333 - RNA, 60 nt, Homo sapiens
gaaggcgcacaccccagcgcgcaaagcgcgaggggcgagcagaccgaaaagggcggaaaa

SEQ ID NO: 199334 - RNA, 73 nt, Homo sapiens
acaaaggggaacggaaaaccacagccggggaaagcaagcagaagcggagaaaagaggaacagagacgccaagc

SEQ ID NO: 199335 - RNA, 71 nt, Homo sapiens
aagaccaagcccgcggacgccaggggccagacccacccagaagaaccgaaaccgcagaggggggccccgcc

SEQ ID NO: 199336 - RNA, 67 nt, Homo sapiens
agcacggccaagcagccaccggacggggcccccgagagccgaagacacgcaccccccagccagcgac

SEQ ID NO: 199337 - RNA, 76 nt, Homo sapiens
gcacggcacggggcagagcaggaggccagagaggagcccacccccaacagaagagagaggaaaccgaaaaaccaaa

SEQ ID NO: 199338 - RNA, 52 nt, Homo sapiens
agcggcaacgagaaacggcccaggacggaccgaacccaccggacacccccag

SEQ ID NO: 199339 - RNA, 43 nt, Homo sapiens
cgcacgcgccacaaaagcagcgggcagggcgggcagcggccga

SEQ ID NO: 199340 - RNA, 82 nt, Homo sapiens
cccaggggccggcgcggcggcccaggcgggggcccgccagcaagaggaaaagcagagacacccggcacccaggacgggacgc

SEQ ID NO: 199341 - RNA, 77 nt, Homo sapiens
acaacagaaagcgacaacagccaagagggcgcccagagacaacgagagaacgaaagaaggggagccagagagcggcc

SEQ ID NO: 199342 - RNA, 90 nt, Homo sapiens
gaccggcccgcagcaagaggcggacgagaaggacagggaagagagcacagcagacgaaccgaaaaaaagaaaagcaggccgacccaaaga

SEQ ID NO: 199343 - RNA, 88 nt, Homo sapiens
aggaggagggagcggccgccgcggccaccgaagccaccgcggccacggagaagggcgagaagaagaaggagacgccccgaaccaaaaa

SEQ ID NO: 199344 - RNA, 87 nt, Homo sapiens
gcaacaccgggagaaacagaaggggccaaaggagccacgagcccgaagaagcggccaacgggaaccggaacacagagagggagcggc

SEQ ID NO: 199345 - RNA, 45 nt, Homo sapiens
gggagagaagccaagaaagacaggagcagccaacacgaacgggca

SEQ ID NO: 199346 - RNA, 63 nt, Homo sapiens
ccaccgccggcgcgggaaacgggcgaagcgacgagccgcgaggagcaagaggagccaggagca

SEQ ID NO: 199347 - RNA, 105 nt, Homo sapiens
ccacgcaacccaaacccgggccgagcgacccccacccagcccgagagcagacacggggacccaggaggaaaccagcagccgcaccgcccgagaaggcggcgggcc

SEQ ID NO: 199348 - RNA, 74 nt, Homo sapiens
aacacgaccagcgccccaagacagagcacaaagaggcaggacaacacaggggggaccaacggagaaacgccagc

SEQ ID NO: 199349 - RNA, 75 nt, Homo sapiens
cagaccgggcggcggacacaagcaggacgccccacacacgaccacacgaaggggcagaagagcacaagacggaag

SEQ ID NO: 199350 - RNA, 81 nt, Homo sapiens
cgggggaggagaaggaaaggaggcagccccagagcaggaggaggaaaaccagcccaggaagcagcagggcaccaagggcca

SEQ ID NO: 199351 - RNA, 84 nt, Homo sapiens
cgcaaggccaacggaaccggcaacgggcgccaagccgcggagccccagacggacgggagcgggccgagaaaaaccacagagaca

SEQ ID NO: 199352 - RNA, 74 nt, Homo sapiens
ggcggaagacaggccacccagcggggagcacggcgagcagccaggccaggagaggccagcgaagacggaggacc

SEQ ID NO: 199353 - RNA, 80 nt, Homo sapiens
aaaacagccagccgcagagaccccaaaccccggcccgacaggagcacaggcagcaaaaccccagaagaggcgaaccgcag

SEQ ID NO: 199354 - RNA, 61 nt, Homo sapiens
cagaagcacaggcccgggcgaaggggccacgcgagccaaacgaccaagaaagcgggacgcg

SEQ ID NO: 199355 - RNA, 42 nt, Homo sapiens
cccgggcggccgcaccgccaggaggaacgaaccaaagaaaag

SEQ ID NO: 199356 - RNA, 77 nt, Homo sapiens
agcggaaacaccggagaagaggccagacagagcaggcgagggaaaaagcgggaggaggcgggccagaacacgaccgg

SEQ ID NO: 199357 - RNA, 66 nt, Homo sapiens
cacacaacccgacccgacgagaaacagagcggaaacagacacccaccacaagaaggacccgaccac

SEQ ID NO: 199358 - RNA, 73 nt, Homo sapiens
aaaccaggaaaaggggcagcaaaggaaacaccgaagcaaaaagaagcccggcagaagacagcgcgcagagacg

SEQ ID NO: 199359 - RNA, 52 nt, Homo sapiens
ggccccagcggaccgaacaggacccgccccgccagggaacaccccacggggg

SEQ ID NO: 199360 - RNA, 80 nt, Homo sapiens
aaggcagccccgcacaggccccacgacgacagccagaagaaggaaccagcaaagcgccacgaagcacaagcaagaggacc

SEQ ID NO: 199361 - RNA, 72 nt, Homo sapiens
cccacaccgcaacccagcgagagaaagggcggagaacggaaaagcaccaggaagcagagaggaccgcagaag

SEQ ID NO: 199362 - RNA, 70 nt, Homo sapiens
gggacccgagccagcgccgcacaggaccggccaccgcccccgcaccgacggccaggcgggcgcggacggc

SEQ ID NO: 199363 - RNA, 74 nt, Homo sapiens
cagcagacccaagaagacagaccccgaggagacggcgagaacgcggacaagcaaacaaagaggaaaaagagggc

SEQ ID NO: 199364 - RNA, 79 nt, Homo sapiens
ccaacagaaggggccaagccgcaagaaggacccgaccgaagagaacaaggagagggacaagaaccccgacggagcccca

SEQ ID NO: 199365 - RNA, 82 nt, Homo sapiens
acaccgaggccaaacccaggcgcagagggaaacagacggagacacaccgcggaaaacgagagccgaccaagaagacaggagc

SEQ ID NO: 199366 - RNA, 82 nt, Homo sapiens
ggcccgaggaggcagccaagccgagccgccacccggcgaaagaggagggagggagggcaggccgcagcccgagcccgccgca

SEQ ID NO: 199367 - RNA, 73 nt, Homo sapiens
caacagaagggaacccccacaaagaacagaagcaaggaagcgggcaaaagacagcaaagccacagagagagcc

SEQ ID NO: 199368 - RNA, 57 nt, Homo sapiens
cagacggccaagacagagagcgcggacagggaaaggaggagcacgaagacaacggac

SEQ ID NO: 199369 - RNA, 76 nt, Homo sapiens
agggccaccccacaggagaccaggggggcaagccgagcggcaacgaaacaggagccacccaaacagcaacacgacg

SEQ ID NO: 199370 - RNA, 79 nt, Homo sapiens
aagaaggccgacaccaaggcccagacaggcggagggcggcggccccaccccgggcgggacaggaggaagccggcagacg

SEQ ID NO: 199371 - RNA, 76 nt, Homo sapiens
ggccgagacaaaggcaccaggccaccacagaaacaaaagcaacaaagaggcacaaaagaccccacagcgagagaga

SEQ ID NO: 199372 - RNA, 70 nt, Homo sapiens
ggaggacacagagccgggaagacgccgaagggcgggagggcgacaggacaacggacagcaaaaaaggaga

SEQ ID NO: 199373 - RNA, 87 nt, Homo sapiens
gaagcccccgggggcacagacgcgccagcacgccgccgccaggccggcgcggaagaggccggcggcgggacggccccacgggacccg

SEQ ID NO: 199374 - RNA, 76 nt, Homo sapiens
cgcgcgcgaggagaggagcgcaacagcagcaccaggacacaagacacccaagaagcccagcagacccaacgcccag

SEQ ID NO: 199375 - RNA, 70 nt, Homo sapiens
gacgacgaagagacaaaggcaccggaaagccaggaaaaacacacggccccgaagacaccggccgaaagga

SEQ ID NO: 199376 - RNA, 81 nt, Homo sapiens
gccgcgcccgcgccagccccgccccgggcaaagcccacggccgccgagcagaaaaacaaccaccagcgagcaaaaaggcaa

SEQ ID NO: 199377 - RNA, 79 nt, Homo sapiens
cccgcccggaccgcgcagaaccagggcggcggccagcgccacgcgcaaaagaaggaccccagcaggaaaagcaaagcaa

SEQ ID NO: 199378 - RNA, 79 nt, Homo sapiens
gcgcacacggcacaggcaccagcccgggcagcgagcgcaaaagcacgagaagagaagcccagagcaaaacaccccaaac

SEQ ID NO: 199379 - RNA, 71 nt, Homo sapiens
accagaggaagcccacacacgccagcagaccaccccgggagggagacaggcgacacaacagggaagaccgg

SEQ ID NO: 199380 - RNA, 73 nt, Homo sapiens
gcacagaaccgcagcagggacgcgggcacgggaccggcgaggacggccgaggaggaggagacaaagagggcag

SEQ ID NO: 199381 - RNA, 68 nt, Homo sapiens
gcgccgccgaccccccggcgccgcgccggcggcggagggagccaggagcgcgggagcgaaggccagcc

SEQ ID NO: 199382 - RNA, 70 nt, Homo sapiens
ccacggcccgcggcggccagccccgccagccagcagagccgcccccgggcagaccgaaacaaggaccccc

SEQ ID NO: 199383 - RNA, 86 nt, Homo sapiens
cggagggcgcgggccgaccgggcgcaccgaccaggccccaaagccccaaggcgacaagaccggaccggagggagccaggagcgcgg

SEQ ID NO: 199384 - RNA, 75 nt, Homo sapiens
ggggaaagccaaggaaaaacggagagccacaaaaaaggaagcgaaaacaaggcgagggaaaccaacacaagacgg

SEQ ID NO: 199385 - RNA, 71 nt, Homo sapiens
cgaaacgaccccaccagccccaaaaggcggcaacaggcccacggagccagaccacaaaagagcgaggaggg

SEQ ID NO: 199386 - RNA, 71 nt, Homo sapiens
gcgggcccggcaccggcccaagcaggcccggggaccgagagcgcggaggcggcgagggaccgaccacaccc

SEQ ID NO: 199387 - RNA, 86 nt, Homo sapiens
ccgcgccagcaccacgcccgcgccgcgccgccgccaccagcccaagagaaagggcgaccagacgaggggagacggacgggggagag

SEQ ID NO: 199388 - RNA, 67 nt, Homo sapiens
gggaacagcccaagaggaacaaagacggagagcccagagacacacggaaccaaagccgaccccgaaa

SEQ ID NO: 199389 - RNA, 53 nt, Homo sapiens
agaacgcgcagaccggggagggaaagaaaacaacggcaagcggagaagagcaa

SEQ ID NO: 199390 - RNA, 80 nt, Homo sapiens
aaggcccccgcgcggccccagcagaaccaggcgggggagcgggaggagccagagcacaccgcaccacggccacaggcgcc

SEQ ID NO: 199391 - RNA, 42 nt, Homo sapiens
cgcgaacaccaccagaagacacagaggcaccgaacggaccaa

SEQ ID NO: 199392 - RNA, 70 nt, Homo sapiens
cacaggaaaggacaaaaccagaagcagggggcccgagggcaggacagcaggcaccggcgaagcacagaga

SEQ ID NO: 199393 - RNA, 75 nt, Homo sapiens
ggccgagcccggaggcaggagcagccgccaggccgagagcacgagcacccacgggagaccggggggcaagaaaag

SEQ ID NO: 199394 - RNA, 78 nt, Homo sapiens
aacgggccgcgaaccgcagacagcggccaagaagacacaaaggacggaggcacggcgccggcgaaagcaacgaaggga

SEQ ID NO: 199395 - RNA, 74 nt, Homo sapiens
accaacagcagccggccacccaaagacaggaggaccccacagcgggagaagccggcgaggggcgggaggcccag

SEQ ID NO: 199396 - RNA, 37 nt, Homo sapiens
agcgcgcggcgaaccgaaaggacacagagcgggacaa

SEQ ID NO: 199397 - RNA, 74 nt, Homo sapiens
gccgcaagaacaagacccggcaggagccccaggagcccacagcgaaaaaagcccggcgaacagccaccccccag

SEQ ID NO: 199398 - RNA, 92 nt, Homo sapiens
gggcacaccgggcccccacggggcccgccacgcgcaccggacacaccgcacacgcagacggggcaccagagccaggaggccaacccgacccg

SEQ ID NO: 199399 - RNA, 89 nt, Homo sapiens
gagaggacgccaaccaaagacagacccacgaagcaagcagcggaggcagccaagcccggaacccagccacagagcagggggccacggcc

SEQ ID NO: 199400 - RNA, 86 nt, Homo sapiens
cgggccaggaacggcggacggggggcggcagccagccgcaggacagcccaagaagccagcagaggacgaaaagacgaagggaggca

SEQ ID NO: 199401 - RNA, 64 nt, Homo sapiens
agaggggccggcgcccggcggggacgcagacaagaacaagccaggaggagagaaagagaacaga

SEQ ID NO: 199402 - RNA, 73 nt, Homo sapiens
cccagggaggcaggggcagaaacagagaaggaacagggaagaacacaccaaacagacaagaaaaggaaaaagc

SEQ ID NO: 199403 - RNA, 73 nt, Homo sapiens
cgcgcccccaggggcggccgcggcgccgggcgccgagccacaagaaggagagacgcagagccagacaagacca

SEQ ID NO: 199404 - RNA, 86 nt, Homo sapiens
cggaaacaaggcaacagaaagagcaacagcagggcaacagaccgggacccacaaccaagcagcagaggagcacgaggacggggagc

SEQ ID NO: 199405 - RNA, 80 nt, Homo sapiens
gccggagaaggagaagaagcagaggcgaaccagaaccgagagccagaggccgcacagaggggaagagaagaaaccagagg

SEQ ID NO: 199406 - RNA, 78 nt, Homo sapiens
gccgaccgagacgggcggagaggagaaggccggggggggcacagagccccggaagacagcccccagcgaccagaccca

SEQ ID NO: 199407 - RNA, 61 nt, Homo sapiens
cggccccaacggaagaccgacccccaggagccggcagaagcagacccgcgcggaggacaag

SEQ ID NO: 199408 - RNA, 87 nt, Homo sapiens
cggccccaacaccccggagaagagcggggagcccccacgacccgccaggccggccccgggcccaccgcccccccagcccacgggcac

SEQ ID NO: 199409 - RNA, 81 nt, Homo sapiens
ggaggccgcccgagcagccgagcaccaagccaggaccgcccgaggcaggccccagaagaccagccgacagcgaccaaggcc

SEQ ID NO: 199410 - RNA, 55 nt, Homo sapiens
cagacagacgaaaccacgagcgcacagcaaagccgggaggaaaggaaacgggcac

SEQ ID NO: 199411 - RNA, 75 nt, Homo sapiens
ggcggccaccccccccccaccccgcacccacgcccggcccggcccggccccgacacgaaccgacgacagaagcca

SEQ ID NO: 199412 - RNA, 68 nt, Homo sapiens
ggagaacgaccagggacccgaggagcaagaggaaaaccagacacagagagagcaagaggcacggagcc

SEQ ID NO: 199413 - RNA, 85 nt, Homo sapiens
cgggagccgggccgagccggggcgaagcggaccccaggacccaaccgcggcacacagaaaacccggacccaccccgcccagaacc

SEQ ID NO: 199414 - RNA, 54 nt, Homo sapiens
caaggaacaccaccaaaaacagcccgggaagcaggcgcaaaaacaggaaaacga

SEQ ID NO: 199415 - RNA, 76 nt, Homo sapiens
gagccgcacgccacagcgaaggcgcgagggacaagagcagagacaaccgagggagcaagaaaggaaaaaaagaagc

SEQ ID NO: 199416 - RNA, 74 nt, Homo sapiens
ggagaaaaggcggacagcagcgcaggcaaaaaacaggccaagaagcgagagaagaaaaacagaaaaagccaaga

SEQ ID NO: 199417 - RNA, 67 nt, Homo sapiens
gcgacaagcgccccgacggagcgccaggacggcgccggcgaaagcaacgaagggacgccagaacaag

SEQ ID NO: 199418 - RNA, 77 nt, Homo sapiens
ggagagcagcgccaggaagaagagaggaagagaccggaacagaagcgaaacagggccaaccagaagacggagcaggc

SEQ ID NO: 199419 - RNA, 62 nt, Homo sapiens
acaacaacaaccggaaacacgaaggaacccaaacaaccagcaagaggagcagaggcggaagg

SEQ ID NO: 199420 - RNA, 67 nt, Homo sapiens
ggagcggagcggagcccggaggcccgagaaaagcacagcacccgcaggccaacacaggaccaacaga

SEQ ID NO: 199421 - RNA, 81 nt, Homo sapiens
cgggaaggggcgacggccggcccgaggggccagcgcccacccaagcgcgggcaaaagcagggcaacggcccggccaaagga

SEQ ID NO: 199422 - RNA, 66 nt, Homo sapiens
gacgcaaccgcgcgcaaaaaccaccgggccaggagcggaacgggcacaaagaaggcgcaggcaaga

SEQ ID NO: 199423 - RNA, 90 nt, Homo sapiens
gcagccacgcacagaaaacaaagacacaggaaaacggaagaggaagcagaaaggcgccgccgaggagggcccgcggagcgccgaggccgg

SEQ ID NO: 199424 - RNA, 88 nt, Homo sapiens
ggcgccagcgggccagcagcaggagcaggcgcccccgagcaagagaggagcgggaaggccccgcacccggagaccgggggaagacaag

SEQ ID NO: 199425 - RNA, 79 nt, Homo sapiens
gcccgagccccggcaggggcagcgaccaggcggcaggcacgagaggggcagcgggccccagcccgccgcccgcagccaa

SEQ ID NO: 199426 - RNA, 54 nt, Homo sapiens
aggaccacgaaaaacaagcagcccaacaacacaggaaaaacggcgcagaacaac

SEQ ID NO: 199427 - RNA, 87 nt, Homo sapiens
gcccgcgccggcaggccggcccggggcgagccccaggggcgggcagcgccgaggcacgacaaccgggccacgggcagcagacggggg

SEQ ID NO: 199428 - RNA, 62 nt, Homo sapiens
agggaacgggaggagcgcgagcaggagagcccacgcaggagacgggaggagcgacaacggag

SEQ ID NO: 199429 - RNA, 77 nt, Homo sapiens
gcaaccagggcggggaggagaacgcaggggccgcagggaaaagaggagaaaagccaacccgggcagggcaaaccccg

SEQ ID NO: 199430 - RNA, 103 nt, Homo sapiens
ggggcgccccacggacgaccaggacgaaggccggcggcaggaggagaaagagaaggaaacccacagacccagcaaagaggagacaaagagaaagcaaaaacaa

SEQ ID NO: 199431 - RNA, 59 nt, Homo sapiens
ggggacgggccggcccgcggaagacaggcaaagacacggggaccaccagcacggacaca

SEQ ID NO: 199432 - RNA, 80 nt, Homo sapiens
cggagaccccgaaaacggaagcgcagggagaaggaagaggggaaaagagcacaaggcggagaggaaacggcccgacagcc

SEQ ID NO: 199433 - RNA, 79 nt, Homo sapiens
cgggccaccagaggcgcaggcgagacgacaacacaagaaccagagaagacggaacaagaaaggaccaggagccccgggc

SEQ ID NO: 199434 - RNA, 84 nt, Homo sapiens
gcacgcagcccggcgggaggaaaagaccaccacgggaagcgaccacaaaaacagagaggagccgcaaaccagaggcagcagcaa

SEQ ID NO: 199435 - RNA, 70 nt, Homo sapiens
ggaagaggcggcgggcaacaaccaccagcccgaggacgggaacgccgaggcccgccaagggacgcgcagg

SEQ ID NO: 199436 - RNA, 71 nt, Homo sapiens
ggcggcccaccccagagcaccggcagcagaaggcggcagggagcacgcaccaggagcccacggcccaccca

SEQ ID NO: 199437 - RNA, 76 nt, Homo sapiens
ccagaggcggcagaaggaaagaccgccgagggaaacgagacaaagggagccaaaggaaaaaagaccccagacccgc

SEQ ID NO: 199438 - RNA, 40 nt, Homo sapiens
aggcgccaagaggaacgaccgaaggggcaccggacggaca

SEQ ID NO: 199439 - RNA, 76 nt, Homo sapiens
aagagcgcagcggggacaagcggaggcacccaccacgggccaggcgggccagaggcaagccgcgggagccacgccg

SEQ ID NO: 199440 - RNA, 73 nt, Homo sapiens
gagggccacaggaggcggcgggccccgcccgccgaaggcccgagcgggcaggcgagggacagcgagcacaaca

SEQ ID NO: 199441 - RNA, 77 nt, Homo sapiens
cagagccaagagagcggaggagcaacgggaggagaacccgagaagcaggaccaacagcccagcacccagaccagcgg

SEQ ID NO: 199442 - RNA, 66 nt, Homo sapiens
ggcgggaagaaagccccaccgagcacagggccagcgggagaagccccgaggccagagggggagcca

SEQ ID NO: 199443 - RNA, 62 nt, Homo sapiens
caaggcccccccgggaagcgaccagggcaaagccggccacaccacccagcagccggggcacc

SEQ ID NO: 199444 - RNA, 83 nt, Homo sapiens
agcgggagcccggccggagcgggcggagacgccgggcagccgaacggagggcgacggagggagcaaaccaacacagcgggaaa

SEQ ID NO: 199445 - RNA, 80 nt, Homo sapiens
agcccccgaagggccgcaagccggacaggagcggaaagagaagggccgaggagccagagaggaccccaaaagccgagacc

SEQ ID NO: 199446 - RNA, 37 nt, Homo sapiens
gacacccccagagccggaaagaggccgaaaggacaag

SEQ ID NO: 199447 - RNA, 79 nt, Homo sapiens
ggagcgcaggcccggccgacggccacacggcggccgcagggcgccggagccccccagccgggggagacggagaacaaaa

SEQ ID NO: 199448 - RNA, 82 nt, Homo sapiens
aacccgggcgaagcgaaagagcaaacgaggccccgagagcccaccagcacaggaaaaacccacagcagaaccggagcagcaa

SEQ ID NO: 199449 - RNA, 52 nt, Homo sapiens
aaaagacggaaagaccaacggagacaaaacagccacggacaaggccaacaaa

SEQ ID NO: 199450 - RNA, 83 nt, Homo sapiens
gagaaagacgaggagaccgaggaaaggggggaggcggaccgccccgccggccccgaggagcaggagcggccgcggagcaggag

SEQ ID NO: 199451 - RNA, 71 nt, Homo sapiens
agaacagaaaacagcgggagagaacgccccaacagaccaggggccaggcacaaagagggcgggacacccag

SEQ ID NO: 199452 - RNA, 70 nt, Homo sapiens
cgccagccacggacgccacagagggaagaccccaagaagcgggaaggcagagcagcacgcgaagagacag

SEQ ID NO: 199453 - RNA, 80 nt, Homo sapiens
aggcccagacacagaaggccgaccaggcagggacagaacggaacaggaaacgcaagcaaaaacccagccaaacccgcaaa

SEQ ID NO: 199454 - RNA, 73 nt, Homo sapiens
agaggagggccggaccggcggggcccgggcaagaaccggaagccccccgaaaaagccgaggaggagaggagag

SEQ ID NO: 199455 - RNA, 72 nt, Homo sapiens
cgaggcggaagggcaccccacccgggcagaaacgaagcacaggaacaagaagccaaaaagccacaaagcgca

SEQ ID NO: 199456 - RNA, 40 nt, Homo sapiens
cgcgaaacgcacgagaagaaccagcgagagggaagcacga

SEQ ID NO: 199457 - RNA, 60 nt, Homo sapiens
gccagccggagaagcgagcagcgaacgcacaagagagagcccagaaggcagaagacggag

SEQ ID NO: 199458 - RNA, 76 nt, Homo sapiens
aaagcacccggaggaggaagaagaaggaagccaaagaaggcaggaagaagcaaagcaggggacgaaggagaaccaa

SEQ ID NO: 199459 - RNA, 83 nt, Homo sapiens
gagagaagcgagggcagccggcgcagggcagccgaccaaggggacacgcgcgcacggccacgccaacggcccagaggcaccag

SEQ ID NO: 199460 - RNA, 121 nt, Homo sapiens
gcagcgcggagcagagcagcagaagccggcgcgcggaggggcccgccaccagagcacacagggacagcaaaaccggcgccacggaccaaacacaaccaagcacgacccccgcagacccaga

SEQ ID NO: 199461 - RNA, 70 nt, Homo sapiens
agccgccgcgcccagcccgaggcgaaagagaggacacaggcagagaacacagccgagaagagacacagaa

SEQ ID NO: 199462 - RNA, 73 nt, Homo sapiens
ccaggggcacgagagacggcaggagggagcaaagaagaacgaggcagcacaacaaaaacaaagaaaacgaaaa

SEQ ID NO: 199463 - RNA, 105 nt, Homo sapiens
gcgagcggcgagccggagcgcggagcccggccccgcaccaggaggaggacgacagcacggacaaggcacgaggcgcggcgaccaccacagcagagcccggcgaag

SEQ ID NO: 199464 - RNA, 74 nt, Homo sapiens
gaagcggcaggaaagccccgggcagcccacgagacgaacacgagcgagacagcacaaaggcgaccccaaagaaa

SEQ ID NO: 199465 - RNA, 73 nt, Homo sapiens
gggacgcgcaaccagacaagacgccgaaacacgccccacgaaagaggggcaccccccaccccgggacacccca

SEQ ID NO: 199466 - RNA, 64 nt, Homo sapiens
cggagcgaagagccggaccaagcgccaggacagggcagaccgccagcagcacagcaagccacag

SEQ ID NO: 199467 - RNA, 81 nt, Homo sapiens
cccaagaggaagacaaacaaccagcccagaccaaaaagggcagccgcagaagccaaaggaagccccacaaaggcccagcgg

SEQ ID NO: 199468 - RNA, 77 nt, Homo sapiens
agcacacagcaacacgacgccaacacgcagaggggacccggaaaccgaccgaaacggaagagagaagacagcagcga

SEQ ID NO: 199469 - RNA, 76 nt, Homo sapiens
gacaggggggagaaaagaagcggaaagaaacacccaccacaggaagccagacggaaagagccaaagagaaaagaaa

SEQ ID NO: 199470 - RNA, 80 nt, Homo sapiens
gagcagcggaggcacagcaacaggcccccccaccccaccaaccgcccacccagcgcacaccccagaccgcccacagaggg

SEQ ID NO: 199471 - RNA, 67 nt, Homo sapiens
ccccccacggccacaacacaacggcacgaggaagccccaaagagggaccaggcagacgaccaaggag

SEQ ID NO: 199472 - RNA, 56 nt, Homo sapiens
ccaaagcgccaaagaaagggacacaaagccacgccgaaacaacaaaaaccggagaa

SEQ ID NO: 199473 - RNA, 55 nt, Homo sapiens
aagaaaaagcgcaaggcaaaacacagaccaggcagaggagaagcgcagcaagcga

SEQ ID NO: 199474 - RNA, 70 nt, Homo sapiens
gggccagcggccgcgcacccccggccggaggcaccagcaggcagcgagaagaaaaagaagagagagacac

SEQ ID NO: 199475 - RNA, 73 nt, Homo sapiens
cgcgccacgccgccagaccgcgcgccaagccgcacgcaaccaccgcccggccacaccaggaagcggaacgcag

SEQ ID NO: 199476 - RNA, 74 nt, Homo sapiens
cccagccagagggggccgacacacggcggaaacaacgggaagacacggagaaaaacggccagagacaccaaaag

SEQ ID NO: 199477 - RNA, 42 nt, Homo sapiens
gcaccaaggaccagcaacaagggacggaaagagagccgcagc

SEQ ID NO: 199478 - RNA, 69 nt, Homo sapiens
accagaggacccggaagcacaacaacagaagacaaccacccccggggccagagcacagagaccaaaacg

SEQ ID NO: 199479 - RNA, 77 nt, Homo sapiens
ccagaacccagcagcgccagcacggcaggaagaagggcaccgaaggagaccccaagaaaaggaaaaagagagaccaa

SEQ ID NO: 199480 - RNA, 73 nt, Homo sapiens
agccccggccgggccggccagcgccggaaaccaacaaacaccgaccggcacagccagagacacggaaacccca

SEQ ID NO: 199481 - RNA, 83 nt, Homo sapiens
gcagacagaccgagacgggcaaccaacaagaaacagacacaccgcacaggaaaggccagcccaaacgacaacacggaacgacg

SEQ ID NO: 199482 - RNA, 70 nt, Homo sapiens
ggaccccggccagggccgggagaaagaagaaaaggggaagaaggagaccagaaaagcagagcagacagcg

SEQ ID NO: 199483 - RNA, 97 nt, Homo sapiens
gggaccccaagaagaccacagagggacccggacaaccagaggcagccagcagggggagaggagcggacccaccagaagcagcgaaaccgggaaagca

SEQ ID NO: 199484 - RNA, 72 nt, Homo sapiens
ggagcaccggacaagcaccagagcccagagcagggaaagcaaaccaccagagacccacagcaccccgcggaa

SEQ ID NO: 199485 - RNA, 107 nt, Homo sapiens
caaggccgagagccggaacaaacgagggcccgggaggaccgacgcagccagggccggcccagggagaacgcaaaaccaccacccccacaaaaaacgcagggagaaaa

SEQ ID NO: 199486 - RNA, 82 nt, Homo sapiens
aagaaggcgagcaggggcgggagagccccgcagaagacgccgacgaggccaacccccaggaccagagaaaggagacccacca

SEQ ID NO: 199487 - RNA, 73 nt, Homo sapiens
cacgccgcgagaagcacgcacagggccgcgggaagaccagccccaaaggggaggagcacagcaaaagaagcgg

SEQ ID NO: 199488 - RNA, 75 nt, Homo sapiens
ccccgggagcgggcgcccagagagaccagaccgagaggaaacaaaacagagaggagagagagcggaggaaaaggc

SEQ ID NO: 199489 - RNA, 57 nt, Homo sapiens
gcggccacggaggcaccagaagaagcaccagacgaaaaggggaaaggagaaagaagg

SEQ ID NO: 199490 - RNA, 69 nt, Homo sapiens
gcgacgggaagcgaccgcaggcgggcccccgaccggaccaaagggaggggaaacaagaaccagacaggc

SEQ ID NO: 199491 - RNA, 61 nt, Homo sapiens
ccagcgggaaaaacagagcgccgacaccacggagagggcagggaacccaggaaagcggagg

SEQ ID NO: 199492 - RNA, 97 nt, Homo sapiens
acaaggaagagagggagcagagggaaagggaaggagaaggagggacgcaggcgcaggccagaaggacaggagaaacaggggccaaaaaaccaaagga

SEQ ID NO: 199493 - RNA, 75 nt, Homo sapiens
caaggaccaaacaccaaaacaggacaaacaggaccgaaacagccacccgccggcacacgaggaccgagaacagag

SEQ ID NO: 199494 - RNA, 67 nt, Homo sapiens
aagaacaccgacggacccacaggaacccaacaacaacaggcgacgggcccaaacagcggaggccaaa

SEQ ID NO: 199495 - RNA, 56 nt, Homo sapiens
ccccgggggccccgagcaaaccagggaaacggcccaacgagaagacgcgaaggcca

SEQ ID NO: 199496 - RNA, 94 nt, Homo sapiens
cgagcggagcgaagcaggcagcgggagcgaggaggggaaaagaggcgaggaagacaacaaaggccaggccgaggagaaggaccaccccgagcga

SEQ ID NO: 199497 - RNA, 77 nt, Homo sapiens
gccgccccgggggcgccaggcgaccggagcgaacgccacgccggggcggcggccggggcagcgccgcgagccagcaa

SEQ ID NO: 199498 - RNA, 76 nt, Homo sapiens
aagcacaaaccacagcaccgagagcggcccgcagaacgccagcagaagacggaaggcacccacaaagggcagagcc

SEQ ID NO: 199499 - RNA, 66 nt, Homo sapiens
ccaaagaagggagagaggaccgggcgaggcagggcacggaccgcaccggacaccaacggcaacgga

SEQ ID NO: 199500 - RNA, 90 nt, Homo sapiens
cgcaggcggcgcacaggaagcacgagccggcccaacagagaacggcaaacagcgagaaaccacagacacaaccaccgacccaggcagaga

SEQ ID NO: 199501 - RNA, 80 nt, Homo sapiens
acggcccccagaacccagagacgggcagaggagaaggcagagcccccccaggcagaagcccgagcgggaaccagcgaagc

SEQ ID NO: 199502 - RNA, 67 nt, Homo sapiens
cagcccgcggaggcagcggaacaaagggcagaagcagagaacagaggccgagcaggagaaagcggcg

SEQ ID NO: 199503 - RNA, 85 nt, Homo sapiens
ccggcccaccaaaccccaaccgagggcaacgggagggcaaagggagcagcacaagccaggaccagcagcagccgccacagccacc

SEQ ID NO: 199504 - RNA, 75 nt, Homo sapiens
cagaacaggaagcagaacgggccaagcccagcccggcgaagagacaacacagacaagaaaaaccaaaggacgcaa

SEQ ID NO: 199505 - RNA, 98 nt, Homo sapiens
aagaaggcccgggaaagcacaaagcaagagacagcgaggacagaaggaagcccgccgacacagccaccaagaaggcacaagcagaacgggaaaagggg

SEQ ID NO: 199506 - RNA, 88 nt, Homo sapiens
aagagaggcaggaaggcgggccggacccagaggcaggaagaacacccagacgcaggagcagacgccccgccagaccgaagccacccca

SEQ ID NO: 199507 - RNA, 69 nt, Homo sapiens
gcggaccgcgggggagaacgccagaaaggaggcccacagccgaccgagcggggcaggacacggaagaac

SEQ ID NO: 199508 - RNA, 74 nt, Homo sapiens
ccgcgaccaaggaagcaccccaggagggcagaggaccccaacaagggaggcacacagccacacgccaggagccg

SEQ ID NO: 199509 - RNA, 63 nt, Homo sapiens
gagcaaaggcagcaagagagcacaggagacagccgccaggaagcaacgcagcgcggaaaggca

SEQ ID NO: 199510 - RNA, 78 nt, Homo sapiens
ccaaacggacacccgagacgcacacagcgggaacgaccgcaaacagcaaaggccccccaccaggcgcccaccccacca

SEQ ID NO: 199511 - RNA, 82 nt, Homo sapiens
ggggcagggcacacgggagagaccggggcagccccccgcagacgagacaccgaggcccggcacgagccgccagcccgccaga

SEQ ID NO: 199512 - RNA, 60 nt, Homo sapiens
aaagagcacgaggagccagaaacgcaaagaacggcagcgcggagggggccgcacggagga

SEQ ID NO: 199513 - RNA, 60 nt, Homo sapiens
gcaaccgaaagagacccccagaccaggaaagacaggaacacaccggaacgcgagcagcac

SEQ ID NO: 199514 - RNA, 79 nt, Homo sapiens
gaaaaaaaagggaagaggagacaccccgggggccccgagcaaaccaggaggcgggccaggccagcgggccggggagcgc

SEQ ID NO: 199515 - RNA, 85 nt, Homo sapiens
gggaccccagggcagcgaagcagcccagaagaaaaggaagcaaaaggacagaggcaagccacggacgcgacggcgccgggggagc

SEQ ID NO: 199516 - RNA, 86 nt, Homo sapiens
cgacccggcgcagccagagccaccagcgcagcgcgccaggagcccagcagcaagaggcagcagcgccccgagccccggcggcaaca

SEQ ID NO: 199517 - RNA, 87 nt, Homo sapiens
gggagggagcaaacaccagccagcgacgggaccaggagacaacacaaggaagaagaaaggaaaggaagcgccacggccccaggaaag

SEQ ID NO: 199518 - RNA, 55 nt, Homo sapiens
gaaaaacaaaaaggagggaaaacagacggcaccagaaccaggaagagcgagacag

SEQ ID NO: 199519 - RNA, 73 nt, Homo sapiens
cgccaccgggaaggcggggaggaggccccaaagggcgagggccgaaacaaaaaaaaaaaccaaggagcaacca

SEQ ID NO: 199520 - RNA, 61 nt, Homo sapiens
gccaaagaagggagagagggccaagaccagccaagcccaggaccagaaaacaacaacccac

SEQ ID NO: 199521 - RNA, 70 nt, Homo sapiens
ccaaggacgggcaaagggggacgggacacgcacgcacgccagccccaggaaggcggagaccacaggaaga

SEQ ID NO: 199522 - RNA, 84 nt, Homo sapiens
gggccgaacgcaccggacgaaggacgggccaaacacacaggaacgccagaccccagccgagggaggcaacagcaaagggacagc

SEQ ID NO: 199523 - RNA, 79 nt, Homo sapiens
ggccaaagaccaggagagacgagcagcccagggagcgggagacagaagacccaaccccacaagaggaagaaacggaccc

SEQ ID NO: 199524 - RNA, 83 nt, Homo sapiens
ggcccaaccccgagccgcgggcacaggcacagaagaaaggcagaaagaaaaaggacacagcagaaggagaaggggggaaaacg

SEQ ID NO: 199525 - RNA, 78 nt, Homo sapiens
accgccagccaccaccccccggaccggcggagacagaggccaagcgaagaggaagaaaaaagaaggaaccaggcacga

SEQ ID NO: 199526 - RNA, 76 nt, Homo sapiens
caaaaagaagaccacagacgcaacaaagagccagggccaaagggcggagcacgaaagcaacaggccaacccaagcg

SEQ ID NO: 199527 - RNA, 72 nt, Homo sapiens
ccaaaggaaaaagacccaaagcgcacgaggccggcagggagggcaggaggggggggagcggaggaaacagcc

SEQ ID NO: 199528 - RNA, 80 nt, Homo sapiens
aggagcccggcaccccccgccgacaaggaggggacaagcggcgcgacggcccacgagcgcggcgccaggggcagcgggcc

SEQ ID NO: 199529 - RNA, 68 nt, Homo sapiens
cgaggaggagcgacccggagaaccaacaggcaaacaaccagaaggcgaaaggccaagacccggaccgc

SEQ ID NO: 199530 - RNA, 79 nt, Homo sapiens
caggagagaagaagcacagaagcaacccaaagacgggaaaaaaccggccacagacccgaagaccaccacaggacacgag

SEQ ID NO: 199531 - RNA, 61 nt, Homo sapiens
gccagagcagccaggggaaaagaggacccgccaaacgccaacggcaagaaagggaaggccg

SEQ ID NO: 199532 - RNA, 66 nt, Homo sapiens
ccgacaaaggagaggaaggaacagacgagcaagaggcccgcagaggggaccggacagagcccaccc

SEQ ID NO: 199533 - RNA, 83 nt, Homo sapiens
aggaccaagaacggagcaagcccaggcacagccgacgccgcgggccagaagcagaggaggagggcgaacgacacagaagagcc

SEQ ID NO: 199534 - RNA, 48 nt, Homo sapiens
ccgagaagcggggcaccacgaaggaccgaagagacacacgggggaaga

SEQ ID NO: 199535 - RNA, 73 nt, Homo sapiens
gaccgccggagccccgccgccgccggcgaaaagcgcccaggaagcggaaaaacaaaagagccgcccaacgacg

SEQ ID NO: 199536 - RNA, 72 nt, Homo sapiens
ggcccacaggacaggagagaaagacggacaccccccaggcacagccacaccccagcggccaaggacgaacgg

SEQ ID NO: 199537 - RNA, 80 nt, Homo sapiens
gagccccgcgcgcccccgcagcaccgcaccggagggcgagcggacccccggagaaggggaaaacaccccaggagaagcac

SEQ ID NO: 199538 - RNA, 38 nt, Homo sapiens
acacaagacaggcagcagaaaaagcggggaaggggggc

SEQ ID NO: 199539 - RNA, 72 nt, Homo sapiens
acgagggcaggaaagggcagcaggcagccggcacccgcacaacccagggggccgaacccagaccaacaaaag

SEQ ID NO: 199540 - RNA, 81 nt, Homo sapiens
ccggcccacaggggggggcaaacccgagagaacgggaggagaacagcaccaacccggacacacaagcgcgacaccaagcgg

SEQ ID NO: 199541 - RNA, 84 nt, Homo sapiens
aggggcgagaacgccacgcgggccggcgaaagcgggaggcgggcgcggggagcccggcagagggaacggacggcggacgaaccc

SEQ ID NO: 199542 - RNA, 60 nt, Homo sapiens
gcagggcgcccccaccgcgcacgccgccaacaagaagcacaagcgccagcccggaaacgc

SEQ ID NO: 199543 - RNA, 85 nt, Homo sapiens
gaaggaaggcaggaaagccagccggcgagagcaggcaggaagagccaagccccgcgcggggaggcggcggcggcggcggcggcgg

SEQ ID NO: 199544 - RNA, 78 nt, Homo sapiens
cggccgccggacgcccccccgcagcgccgagagacgccccaccaggcacagccagcggcggagccacagcagacccca

SEQ ID NO: 199545 - RNA, 70 nt, Homo sapiens
ccaaggcgaagagagacgcccggcggggacggcacaagaagagccaggacggggagcaacacagcaacaa

SEQ ID NO: 199546 - RNA, 80 nt, Homo sapiens
gcaaggcaagaccgaacagaaggaacgacgcggaccagaagccagagcgaggacgccggcagcaagcacaagcgagggga

SEQ ID NO: 199547 - RNA, 77 nt, Homo sapiens
cgccgcccgcacccccggggcccccacaccagcaagcagcaaagaggccgggagccaacaagaccccaaccccaccc

SEQ ID NO: 199548 - RNA, 59 nt, Homo sapiens
ccacagacgacacaaaacaggaccacgagaggagaagagcagaggagggagaaaaacga

SEQ ID NO: 199549 - RNA, 69 nt, Homo sapiens
aaggacagggaaccagaggaccaggccacaccagaagcacaccgacccccaacgggccccaggggaagc

SEQ ID NO: 199550 - RNA, 80 nt, Homo sapiens
cagccgcggagcacacggagccaagagcaaggccggaagaaggaacaagaacaggagcaaaagaaggggaagaaccccac

SEQ ID NO: 199551 - RNA, 80 nt, Homo sapiens
ccgcccagagcaggagcccgaccgaagccggaaacgaggcaccagggaagagccagcaagagaagcgccgagaagcgcag

SEQ ID NO: 199552 - RNA, 71 nt, Homo sapiens
accagcaccaacgggagcggcagcaccacacccaggaaagcccagaggagaacagaagcggagaacacaaa

SEQ ID NO: 199553 - RNA, 71 nt, Homo sapiens
agaacaaggagaaagaaacagacaacccaaggcccaaaaacagacaccccaaacaaagcaggcccagcggg

SEQ ID NO: 199554 - RNA, 82 nt, Homo sapiens
aaacagaaacagagggagaagagacagggcagggcagcagcacgaccgacccagcagccccggcagacccagggaacggaaa

SEQ ID NO: 199555 - RNA, 74 nt, Homo sapiens
gaagaaagagcagaggaaagaaaagaaacaccgaaccgccacccaggcccaagaaggcaacggggaccccggag

SEQ ID NO: 199556 - RNA, 79 nt, Homo sapiens
cgagcaggcggcgcagacaccaacgcgggcgcgaccgggagcggaccccgggggacacagaagagcaacacagcgagca

SEQ ID NO: 199557 - RNA, 82 nt, Homo sapiens
cgcggcacgcgccgcgggacccgaggcgagccaagcaggaagggaccacagaccagcacgccggcgccacgaaccgagcgac

SEQ ID NO: 199558 - RNA, 62 nt, Homo sapiens
cgcgcccgcccagccccgcccggggaagcagggaaaggccggagagaggaagcggcccgggg

SEQ ID NO: 199559 - RNA, 86 nt, Homo sapiens
gcaaaggaacagaacaagaagaagaggagaggaaaaaggaagagagcacgcagccaggaaaccacgagggggcaagaccagagacc

SEQ ID NO: 199560 - RNA, 82 nt, Homo sapiens
aaaaaggccagcacaagccacaggaacaagaaagaaagcgcgccaaggagaaggagacgacacagaaaaccagagaccaaag

SEQ ID NO: 199561 - RNA, 58 nt, Homo sapiens
caaagaaggagccaaaaaaaagggacccccgacaggccagcgccaccaccgccgacca

SEQ ID NO: 199562 - RNA, 85 nt, Homo sapiens
agacccaggacgagacgggcaagaaccgaggacagcccacacgcgcgagggacgcaggcccgagaccagacccagcggccgaaac

SEQ ID NO: 199563 - RNA, 70 nt, Homo sapiens
aaacgcggaaaggaccacccgacagcgcgggagccaggaaacgcagaccccccacgagaagcaggcagag

SEQ ID NO: 199564 - RNA, 63 nt, Homo sapiens
aacgccagccaacccaggaccaagcagcagcacagcaagggaaaaagcacagaccggagccag

SEQ ID NO: 199565 - RNA, 76 nt, Homo sapiens
gggccacccccccaggcaaggccgccaggcacagagaaggcaaacgggagggcgaggacaccaagagcagcgcgga

SEQ ID NO: 199566 - RNA, 59 nt, Homo sapiens
ggcaggaaccaccgcccaaagggaccgcaacaagggaaaacaggcaacgggaagccgcg

SEQ ID NO: 199567 - RNA, 52 nt, Homo sapiens
cagaaacaagaccacgcaggagaagacaagcaaacaacggaaaggaggggga

SEQ ID NO: 199568 - RNA, 85 nt, Homo sapiens
cgcccgagcgggacgccgggaccccgccgcgcaaaaaccgaggaaggagagggaccggaccaggcgacagcgaccgaagaacaga

SEQ ID NO: 199569 - RNA, 67 nt, Homo sapiens
gaaggagccggcggaacaccaccgagcacaaacagaggccaaggagagcaaaaccgaaacaaagaga

SEQ ID NO: 199570 - RNA, 58 nt, Homo sapiens
aaacagacaggagacaaagggccgccgcacagcgcacccacaccagaaagcggcgggc

SEQ ID NO: 199571 - RNA, 99 nt, Homo sapiens
gcaaaggcaaaggcggccgggagacagccggaagcaaggcagaagaggccgaagccaaagcagaaccaagacaaacgaccccggaacacggaggcaagg

SEQ ID NO: 199572 - RNA, 68 nt, Homo sapiens
gccaggaacaagacgagaaagggcagaaaccccccgcaaaaagcgagccccaccaaacaacggaacgc

SEQ ID NO: 199573 - RNA, 78 nt, Homo sapiens
agaccggaccgagagcggaccgagagcgcgaaacgcacgagaaggcggccacagcaggcggaggacaccggagccgca

SEQ ID NO: 199574 - RNA, 75 nt, Homo sapiens
caccacagcagcagcggaagagccggaagaccaggaaggagccggggcggagaccaggcccaggaaggaacgagg

SEQ ID NO: 199575 - RNA, 87 nt, Homo sapiens
cgggcgcaggcggggggcgcagaggacacgaggcggcgggcggagacaggaccgcggcgagcaaggcggagcaggagcaaaggagca

SEQ ID NO: 199576 - RNA, 66 nt, Homo sapiens
cccacgcgggggacggagaggaaccaggagaaaaccaccaaaaaaagaagaagaaaacacggacgg

SEQ ID NO: 199577 - RNA, 57 nt, Homo sapiens
gcaggaaccaccaggacagaacagacaccccaaacaaagcaggcccagcggggcgag

SEQ ID NO: 199578 - RNA, 78 nt, Homo sapiens
cggccaaagccgcccagacggccaccggcgggaggaacaaaagggcgagcacaggccccagagggaagcaccagagag

SEQ ID NO: 199579 - RNA, 71 nt, Homo sapiens
agaaaggcccagaggcccaaaaacacaccccaagagaaaaccgaaagcgggccgcacgggggaaagggaga

SEQ ID NO: 199580 - RNA, 76 nt, Homo sapiens
agcgcacggcgacgccccaggggaaaacccccgggaccagggaaagggagcagcaccggccacacccacagcacga

SEQ ID NO: 199581 - RNA, 57 nt, Homo sapiens
gaaaacagaagcaacacagaaaaacgccgagcagaccaagaccgaccgaagacgaaa

SEQ ID NO: 199582 - RNA, 65 nt, Homo sapiens
acgcagggcgcccccgcaacacgaagaagagacgaagaagggcaagggcaaacgcgagacaacgg

SEQ ID NO: 199583 - RNA, 67 nt, Homo sapiens
ccccccccccaagcaacacagaagcggagcccaggcaccccccagcgccacggaccgcaaaagcaaa

SEQ ID NO: 199584 - RNA, 76 nt, Homo sapiens
ccacggggacggaccacccaggaaggcaagaccgccaccagacgcaaacagcaaagcccagagaggggcgcaggcc

SEQ ID NO: 199585 - RNA, 80 nt, Homo sapiens
ccgccgaccagagccagacacagagcagcagccccacaagggaggaaaaagcagcgaaacagacaaccccccacacaacc

SEQ ID NO: 199586 - RNA, 83 nt, Homo sapiens
ccacaggagaggcggcccccgcgacaggaccagcaggccacgccacccagcgcagaaccaggccgaggggaagagcggggacc

SEQ ID NO: 199587 - RNA, 78 nt, Homo sapiens
ccaagacgcgaccaaacggaccagacgcaggagcagaagcacaagcagaggaagggagccagcaaacgagggcaggag

SEQ ID NO: 199588 - RNA, 81 nt, Homo sapiens
gggagggcgcagcggggacgcggacgcacgagaaggagggggcagagcacggcaggcagaaggggccaacccgggggaacg

SEQ ID NO: 199589 - RNA, 53 nt, Homo sapiens
cagacgacagggggcacagaggaggggcccgagagaagagaagagcggaggaa

SEQ ID NO: 199590 - RNA, 74 nt, Homo sapiens
gccgccagccgccaggcgcgggagaccggcgacggccggcgacacccccaccgccacgggcaaccgcgcgcggc

SEQ ID NO: 199591 - RNA, 63 nt, Homo sapiens
accggcgaagccgggccaaaggacgaagaacccacagaggggaaaagccccagagcggaaggc

SEQ ID NO: 199592 - RNA, 77 nt, Homo sapiens
caagccgggagcagacaagaggaaacacaggggacaaaacccaaaacaaacaaaaaggagaggaacccagccacgaa

SEQ ID NO: 199593 - RNA, 80 nt, Homo sapiens
ccaaggacaacgcaagggggaagagagagaaacaaaagcgccagagccaagaacgaggaaccagaggggccggacacaaa

SEQ ID NO: 199594 - RNA, 55 nt, Homo sapiens
caacccaagggagcgcacgacccacgcggaacgaaagcaccgggaggaaagagag

SEQ ID NO: 199595 - RNA, 75 nt, Homo sapiens
aaggacggcggaccgggaggaggcagacgggcgacagaggaacgggggagagcacccggcaccacagccgccgcc

SEQ ID NO: 199596 - RNA, 76 nt, Homo sapiens
accacagaaggaagaagagggagcggaaggggcacgaccgagaaaggaccggccaagccaacccaggcgacaacag

SEQ ID NO: 199597 - RNA, 78 nt, Homo sapiens
aaaggaaacgaaaacagaggaaagaagggagagaccagcagccgcgaaaccacccgaaagaacaaaaagaaaaggaaa

SEQ ID NO: 199598 - RNA, 69 nt, Homo sapiens
acacagcaagacccggccccccgggcccccagcagcacggacaacgggggacccaaacagacagggggg

SEQ ID NO: 199599 - RNA, 57 nt, Homo sapiens
cgaaggacaaggggagagcggcccccgcagaccacagaaaccacgagggagaaccgg

SEQ ID NO: 199600 - RNA, 81 nt, Homo sapiens
ggccggggaggaggaggaagaggaagaggaggagacccacgagagaaggacaaaccagggaagaggcaaaacagaaaaagg

SEQ ID NO: 199601 - RNA, 64 nt, Homo sapiens
cccccccaacaggcggcccaggcacagcaagcagaagcacggcagccagggaaggcccccaacc

SEQ ID NO: 199602 - RNA, 53 nt, Homo sapiens
ggccgagaaaagagacgcgagcgaacaagagggagaccgaaaaacgggcaacc

SEQ ID NO: 199603 - RNA, 71 nt, Homo sapiens
gcggggcacaagccacgggaggaggggagcagcagaagcaaggccagaaggaccgagcgggcagcgaccag

SEQ ID NO: 199604 - RNA, 72 nt, Homo sapiens
acaaagacagaaggacccagcaagaaagccagccccaaaagaagcggagcgggagcgcggagggggcgggca

SEQ ID NO: 199605 - RNA, 77 nt, Homo sapiens
acagacaaccaaccagcgcccaggcaagcagcgcgcaggagcccagcaaagcagacaaaggagagacagcacaacca

SEQ ID NO: 199606 - RNA, 80 nt, Homo sapiens
gggaacgcgcaaagccggcaccgcccggcccgccagcgccagcggcacggcccgccgcccaagcggaacccaaagcccaa

SEQ ID NO: 199607 - RNA, 39 nt, Homo sapiens
cccagggggccagggacgcacgccgagaggagcgaagcc

SEQ ID NO: 199608 - RNA, 78 nt, Homo sapiens
gagacggaaacaggaacaccaaggaagcaaaagccccagaacaaaccaccagagaggacccgagacaaggcggcggga

SEQ ID NO: 199609 - RNA, 72 nt, Homo sapiens
gccagcggacgggcagggcccaggcagaaggcggcagggagcacgcaccaggagcccacggcccacccacag

SEQ ID NO: 199610 - RNA, 82 nt, Homo sapiens
gagcggggaagggggaaaggcaccaggacaagcaaagagccaaaagcggagaacgaacaagaaaagccaaaaagagagacga

SEQ ID NO: 199611 - RNA, 75 nt, Homo sapiens
aaaagcagaagacccgagaacaaccggaacagcacaaaggcacaaacaggccccggccgcgggagaggaggagga

SEQ ID NO: 199612 - RNA, 80 nt, Homo sapiens
ccagaaagagacgaccgcaagcagaccaaagggcagcggaggcccaccaggaggaaggcagggaccccacaggccggccg

SEQ ID NO: 199613 - RNA, 64 nt, Homo sapiens
gaccaaggacccaaagcacaggaaccaccgaaagcggcgcaacgaggaaaacccccgagccacg

SEQ ID NO: 199614 - RNA, 87 nt, Homo sapiens
gggcccggagacagccaacgagagacccaagaggagacgcagggcccgcgcgcggaggccggcccggagggagaacaccgacggagg

SEQ ID NO: 199615 - RNA, 83 nt, Homo sapiens
aaccgggaaggccccgccggcggcggcagggcaaccgcggggccgcacggccgggcacgggagaaccagccaaaaaagggcag

SEQ ID NO: 199616 - RNA, 65 nt, Homo sapiens
ggggaaacaaaggagagcgaccaagcggacacggacgacaccgagcccaaccgaccaaccacaac

SEQ ID NO: 199617 - RNA, 80 nt, Homo sapiens
aggagggagaacggacgccgacaaacggcagcgccccaaccccagaaccgcgcgggacggacaccgcgcaagaggggaag

SEQ ID NO: 199618 - RNA, 68 nt, Homo sapiens
gacggacccggaaaaccggcccccaacgacaaaaggggcaaaggaccggaagcggggccaggaggaaa

SEQ ID NO: 199619 - RNA, 81 nt, Homo sapiens
aacgccccccgggcggcggggagggagacaggacacagaacagagaagaagcagacgagacagaaaaagaaccagacagag

SEQ ID NO: 199620 - RNA, 77 nt, Homo sapiens
gcagcggacaggcacagacaaccaggagccgcccagcaaaacccaacgggaacccgccggaaaacggagagcaggca

SEQ ID NO: 199621 - RNA, 79 nt, Homo sapiens
ccagcccgcaagagaaggaagccagccaacgcgacggacggcacagaaaccccagagcagagcaaacggagcaccagga

SEQ ID NO: 199622 - RNA, 67 nt, Homo sapiens
aaacaggaagcgaggacggccgcgcggggcgcaggcgccccgcggagcgccccaggacggcagcccc

SEQ ID NO: 199623 - RNA, 70 nt, Homo sapiens
cccgacgcgagccgccggagcgaacggcaagggcagacgggggaggaggacgcaaagacaagccacagac

SEQ ID NO: 199624 - RNA, 71 nt, Homo sapiens
gaggaagccccacagaagagcgaaggggaggcgccaggcaagcggcaaccgacaggaaacgcagacccggg

SEQ ID NO: 199625 - RNA, 36 nt, Homo sapiens
aaaggaagcaccggaaggagcggaggaaggcacgac

SEQ ID NO: 199626 - RNA, 75 nt, Homo sapiens
cgcacggcgccaacaaaagcagacccgaaggagggacgaagggggacacagaagccggacacggccagaaagccc

SEQ ID NO: 199627 - RNA, 71 nt, Homo sapiens
ccgcgccccacacacagcccacccgggcggcgaccagggacgcccccaggcccgcccagcccacacggaac

SEQ ID NO: 199628 - RNA, 79 nt, Homo sapiens
gccccagccccacagaccagcccagcacaggaaggaagcagaacacaccggggagaacacagggaaaaccaaggaccca

SEQ ID NO: 199629 - RNA, 77 nt, Homo sapiens
caacaccccggccaccgacccacaaggcaaaagcagaccggaaaacccaccggcaagaccacacccgaggggagccc

SEQ ID NO: 199630 - RNA, 67 nt, Homo sapiens
accccaaccaggacgcaggcgacaagccgcccggcagcccgcagacggacgcaaagccagccgaggc

SEQ ID NO: 199631 - RNA, 75 nt, Homo sapiens
gccccgagcccgcggcggagccacccgcacacgcacccaggggcagccgcaaggaaaagggagacagcccggacg

SEQ ID NO: 199632 - RNA, 69 nt, Homo sapiens
gagccgccaaacagcaaaccgaaggaacccaaagggcgccggaacccaggaagcgccaaaaggaaaagc

SEQ ID NO: 199633 - RNA, 74 nt, Homo sapiens
acaggaacgaagagcaaggcaagagagagaagaagccggcagcccggcccaggccgagaaaaaagagacagacg

SEQ ID NO: 199634 - RNA, 71 nt, Homo sapiens
gacagcacgagagaaacagaaacccccgggcacaaaaggacccaaagaaaaaggccacagggaggagaaga

SEQ ID NO: 199635 - RNA, 53 nt, Homo sapiens
ggaacagggagaccaagggcagagcgagcccaacggaaaagaaacacagagaa

SEQ ID NO: 199636 - RNA, 50 nt, Homo sapiens
gagaaaccggacgcgacgggcagaagaccccggaacagagaaaccaaaac

SEQ ID NO: 199637 - RNA, 85 nt, Homo sapiens
ggggaggcgcggcggcgccgcgcgcgcagggccgccggcccgcagccgccaccacccaggaccagaaggcggaggcagggcacga

SEQ ID NO: 199638 - RNA, 77 nt, Homo sapiens
cacccacgagcccggcaaaagcgcacaaacgcccaaggcgggcacgaaaggaaagccgagaaggcacgacaagccgg

SEQ ID NO: 199639 - RNA, 102 nt, Homo sapiens
cgagcgggaagagaacaggacagagggcacaacggcaaagccccagggaacccgagaaggccaacaaaagagcgaggaaccaagaagaggagacaagaccag

SEQ ID NO: 199640 - RNA, 70 nt, Homo sapiens
aaaaagagccgagggcaggggaacccaggcaggaacgcagcaacgcggaagccgacgaaaaacaagaaac

SEQ ID NO: 199641 - RNA, 57 nt, Homo sapiens
cccacgacccaaggacacaacccggccgcagagcccaggcagccagcacgagccccc

SEQ ID NO: 199642 - RNA, 70 nt, Homo sapiens
gacgcagggcgcccccgcaccagcagcgcgcacccagggcacaggagacagagaggaggagccgcgggaa

SEQ ID NO: 199643 - RNA, 76 nt, Homo sapiens
cacacggggagacacagcggaagagaggaaggagacagagagagcaaagaaaccaggcgcggggccagccgaaccc

SEQ ID NO: 199644 - RNA, 63 nt, Homo sapiens
ggggcgggccagccacggcaccgcgccgacagggcagaagcacaggcgaaccgcaaaaggggg

SEQ ID NO: 199645 - RNA, 101 nt, Homo sapiens
cagaaacccacaaaggggaaccgaaaggcccaaccgcgcagagaggccccagaggagccccaagggggggcaggcagcagagaggcccccaagggcgggaa

SEQ ID NO: 199646 - RNA, 76 nt, Homo sapiens
cccgccccacacaggaaaccaaaccaggaagcacagcacagcagaagcacacgacagaaagacaagaagcgcgaag

SEQ ID NO: 199647 - RNA, 79 nt, Homo sapiens
gggggccgcacgagaaggagagccagccccgaggaacccagccacaggacagggcagaccgccagcagcacagcaagcc

SEQ ID NO: 199648 - RNA, 66 nt, Homo sapiens
aaaaagcaaacggaccagaccgaccaccaaaaccgaaggagaaagggcgcaagagagcgggccacg

SEQ ID NO: 199649 - RNA, 41 nt, Homo sapiens
gggacgcacacggcaccaaacaagacgaccccgacgcaggc

SEQ ID NO: 199650 - RNA, 73 nt, Homo sapiens
gacccgcgaacgagcaaacacggaacaggggcgagagaacggccagggcggagcacgaagggaaaaaccagag

SEQ ID NO: 199651 - RNA, 80 nt, Homo sapiens
agaggacgcccaccgggcaggagaaggcagagcggggcacccacccaagggacagagcaagagccccaagggcccaacag

SEQ ID NO: 199652 - RNA, 74 nt, Homo sapiens
ccgcaggagggagaacgggcgcagacggggaagcggagccaacagccagggcccggagcggggcgcaaaacagg

SEQ ID NO: 199653 - RNA, 70 nt, Homo sapiens
cccggggacccccgacgccaggcagcgcccccaaacgaaagaccacacagggaaacgaccagggagagac

SEQ ID NO: 199654 - RNA, 67 nt, Homo sapiens
acaccggcacgcaacagggcggagaacggaaaagcaccaggaagcagagaggaccgcagaagggaag

SEQ ID NO: 199655 - RNA, 83 nt, Homo sapiens
ggaccccagggccacgagccaagagaagagagaaagacagcaaagaaaaggagaagaaaggaaaaaaacaaccccgggcaccc

SEQ ID NO: 199656 - RNA, 40 nt, Homo sapiens
ccgccacacgccagggccccgggaccaaggacacgcagac

SEQ ID NO: 199657 - RNA, 58 nt, Homo sapiens
ggggcgaggggcgggggcggacggaacccgggcccacacgggagagaagcgccggccg

SEQ ID NO: 199658 - RNA, 70 nt, Homo sapiens
gaagcagaacgcaggaggagaacgacagcacgacagaacgccagggaagaaaaaggccgcagacggcaac

SEQ ID NO: 199659 - RNA, 76 nt, Homo sapiens
ccccgggcgcccaagcgacagcgcagaggggcaggagccgggagccaccgcgaagagacgagcacaacacacaaag

SEQ ID NO: 199660 - RNA, 71 nt, Homo sapiens
gaggagccacgaagaaaggaggcagggcccgagcagaaacaaaaaaggacgggacacggagaggcgcggga

SEQ ID NO: 199661 - RNA, 78 nt, Homo sapiens
gccaggcaccccaggcgacgagagcaagccaaagaccaaggggggggcacccccacaacggacccaagaggagcccag

SEQ ID NO: 199662 - RNA, 68 nt, Homo sapiens
aaaaaaggagaaaagcaagagacaagagaaaagcagaggacccccgccagcagggaacccaggagcag

SEQ ID NO: 199663 - RNA, 60 nt, Homo sapiens
ccgggcggcggagcggcggaagaagggaccggggagagccgcagccagcacacgcccaga

SEQ ID NO: 199664 - RNA, 64 nt, Homo sapiens
ccacaaggcacgaggagaaggaggaggagagagggaaggaggcgaggcaggagaacgcgaaccc

SEQ ID NO: 199665 - RNA, 84 nt, Homo sapiens
ggcggcggcagcggcggaggcgacggggcggcccggagccggcgcgaaccggcccccgcagcgggacccggaagaagagccgcc

SEQ ID NO: 199666 - RNA, 83 nt, Homo sapiens
gacggcgaagcgcgcgccgcgcccggaccccaggccccgagccccggccccaaagacccaaaacagagacaccccccagcccc

SEQ ID NO: 199667 - RNA, 78 nt, Homo sapiens
ggaaggcacgaggaagagacaacaccagagggccccagccggagcagacagcgaagaccccgggaacgggacacaaaa

SEQ ID NO: 199668 - RNA, 74 nt, Homo sapiens
accccacaggccgccccaacaccagggaagagacacacccaggaacaaggcacaaggagaggggaccaccagga

SEQ ID NO: 199669 - RNA, 52 nt, Homo sapiens
ggagaggggaagagacaagaccaggcacagcaaggcggggcgggcacagaga

SEQ ID NO: 199670 - RNA, 71 nt, Homo sapiens
gagacggaaacagcgggaaaacggaaagaaaaggacaacccccaaggaacaagggccaccacaggaagccc

SEQ ID NO: 199671 - RNA, 73 nt, Homo sapiens
cgccggggagacgcaggcgagagagcagggaagggggcacccggacaacgccagacccagagaagcagagccc

SEQ ID NO: 199672 - RNA, 75 nt, Homo sapiens
accggcccgagaggaaggcaggcacaagggacaagacagcccaggccgggaaaggaagggcccacaggccacccg

SEQ ID NO: 199673 - RNA, 113 nt, Homo sapiens
ggaaggcagagcccgaaggccagaagcagacaacggcgccccggagggcccgacccaggcaagcgagcaggcgagcaggagcccacagccgagcagcggcccagagcagcgga

SEQ ID NO: 199674 - RNA, 68 nt, Homo sapiens
aaggccaagggcaaggagacagcgacagaacaccaggagcgacaggcggaacggccgagacccagcac

SEQ ID NO: 199675 - RNA, 72 nt, Homo sapiens
gacggcgcggggcgggacagacggccggcgggagacgccgacaacggcaagcggagaagagcaaggccgaac

SEQ ID NO: 199676 - RNA, 72 nt, Homo sapiens
agccccacaggagcggaagaagggaaacccagacgacaaggaaggccaagggacccacgaccaaccaagaaa

SEQ ID NO: 199677 - RNA, 56 nt, Homo sapiens
agaacagcaaaacgagaacagagggggcggagacaacgaagagaggaaagaagcgg

SEQ ID NO: 199678 - RNA, 79 nt, Homo sapiens
gggcggaccgggcgccgaagcccgaggcagaggaaccggccccaggagaggagccaagcccaacgggacgggaaaacgg

SEQ ID NO: 199679 - RNA, 76 nt, Homo sapiens
ccacagcaccgaaaacaccaggaaagacaggagaccaaaaaggaaggagggccccggagcagccacaccaccgagg

SEQ ID NO: 199680 - RNA, 72 nt, Homo sapiens
ccaaacgccaacagaaacgcaccaccaaggccggggcacacacacgcggccagcgagaacgccaccgggcag

SEQ ID NO: 199681 - RNA, 70 nt, Homo sapiens
gcagcagaggggccaagcaggaaaccagggccagagccacagagcgccgccagccacgcgaggcgacccc

SEQ ID NO: 199682 - RNA, 70 nt, Homo sapiens
gaacaggcaaagacaagagcccagaggcccggaaggcgcaaaagggggagaacaacaccaccaaaccaga

SEQ ID NO: 199683 - RNA, 57 nt, Homo sapiens
aaaagcagcaaacacgggacaaaaaccagaccaggacggcccgacacccagccggag

SEQ ID NO: 199684 - RNA, 35 nt, Homo sapiens
aagcacaccagcacaggcgagagcgcgacgccaca

SEQ ID NO: 199685 - RNA, 110 nt, Homo sapiens
gaacaaaagagcgccagaggcccccgagccccccgagaagacccagaccacaggagcagcaacccagccccggaaccacgccaggggaagaaacgagaaggcacggcagg

SEQ ID NO: 199686 - RNA, 73 nt, Homo sapiens
gacacgccaagaccacacaacaaagagagcagggagagaagggggagaaaaggaacagaaaaggaagcgacac

SEQ ID NO: 199687 - RNA, 82 nt, Homo sapiens
cgcgaccagggccgcaggaagacgcaagacaggggacacgaacccgaaacaggaacaccggaccccagaaccagcaacacga

SEQ ID NO: 199688 - RNA, 77 nt, Homo sapiens
aggcccggccgccccggagggagacgcgcgccgaggagaacccagcgggaggaagcaccggcggggggaacaagggc

SEQ ID NO: 199689 - RNA, 74 nt, Homo sapiens
aacgacccgaagagaagggggacaaaggcggagaccaggccaaaaggagggaaaacccaccggacaaagaggag

SEQ ID NO: 199690 - RNA, 79 nt, Homo sapiens
agagaagggagccaagcggagggagaacgcaaggaaggaaggaaagaaggggggaaagaaacccgggacaagggagaaa

SEQ ID NO: 199691 - RNA, 67 nt, Homo sapiens
ccggcgccgaggagccgcccccggcgccgcggcccaggaagcccggggcggcgacggagcacgaccc

SEQ ID NO: 199692 - RNA, 53 nt, Homo sapiens
aggaaggaagacccggagggcaagaaggaccgaggccggagcccacccagcaa

SEQ ID NO: 199693 - RNA, 75 nt, Homo sapiens
ccggcccacgacacaggaagaagacagggcccaaaaaagggaaccgcacagcgagacaccccacacagagggacc

SEQ ID NO: 199694 - RNA, 56 nt, Homo sapiens
caggccgacaaaagcacagagaaggccagcccccagcggaggcagggcgcgaccgg

SEQ ID NO: 199695 - RNA, 76 nt, Homo sapiens
ccgcccaagagaggagccccggccgcccggacgagcgagaccgcaccagaggccgcccacgcagcgggaacccagc

SEQ ID NO: 199696 - RNA, 106 nt, Homo sapiens
acaccaggcgcacggaaacggagcagcaaggaaaaggaaaccgcccgcccccagagccggaggagccaccaacagaagcaggagccaggaaaccaaaacccacaga

SEQ ID NO: 199697 - RNA, 34 nt, Homo sapiens
aggaggccagagcggaggcaagaggcaaaaagca

SEQ ID NO: 199698 - RNA, 73 nt, Homo sapiens
cggagaacccagaaaaaggcaaagggaaggccacaggaagggacgggcgcaggaggcagaggagcaggagcac

SEQ ID NO: 199699 - RNA, 77 nt, Homo sapiens
cagaaggggagcaagaagcaggaaaggccggacaccagacgcaccacgacggggaagagaggcccggccaggcacac

SEQ ID NO: 199700 - RNA, 78 nt, Homo sapiens
acaggccacggggccccaagggcacgcccggagacgggacacaacgcacggacagcacaggcagaacaggagggaaaa

SEQ ID NO: 199701 - RNA, 63 nt, Homo sapiens
accccaaaaagcgagaggaaaccaaagccaagaaggacaagaaggggagaagaaaagaaacgg

SEQ ID NO: 199702 - RNA, 68 nt, Homo sapiens
gaacgccgcgaagcacccaaagcgggccaaggaaagcggagggagccccagaggacggccacagccag

SEQ ID NO: 199703 - RNA, 62 nt, Homo sapiens
gggcccggagagggggaagggcccaaagccagaagccaaaagcgagacaagacgaaaggacg

SEQ ID NO: 199704 - RNA, 75 nt, Homo sapiens
aggcggaccaggcccacacagagcaggcggagacacaggcccgacaaagcgggacaaagggggggggaggagaca

SEQ ID NO: 199705 - RNA, 77 nt, Homo sapiens
gaaaagagcagcgcccagccccagcagagcagcagaggaaccgcgggccccgaggggaagaaagacaccgaaagaaa

SEQ ID NO: 199706 - RNA, 67 nt, Homo sapiens
cagagaccgccgacgaaaagaggacgggccacgaggcaccggccgcgagcaccagcgccccagcacg

SEQ ID NO: 199707 - RNA, 77 nt, Homo sapiens
gagaagaagaggcggaaaagagggggaaaaagcagggaggagaggcaaaaagaagacgccgcccacaccgcgagcgc

SEQ ID NO: 199708 - RNA, 80 nt, Homo sapiens
acacccgaaggggacgaggaggcaccaccaccaccacagaacaggaggcccggacccccagcacaagcgcaggccagggg

SEQ ID NO: 199709 - RNA, 76 nt, Homo sapiens
ccgcccggggacgaaagcagagagggaaaaggacaggggcagaacggagagaacaggaagaagaaaagaacagaag

SEQ ID NO: 199710 - RNA, 73 nt, Homo sapiens
ggcgacaggacgggcggggagccccgggcggcggggaccgccagcccagcgaccagcagaccgcgaagcgaac

SEQ ID NO: 199711 - RNA, 81 nt, Homo sapiens
ccgcggggcggggcgcagccgcagccggggaagggagcgcccaccagaggagcgaaagagagagacagcgcgggagccagg

SEQ ID NO: 199712 - RNA, 79 nt, Homo sapiens
cgggagcgggccgacccggagagacgccagaccacgcgccagggccagagcagaggcggagaggggcagacccagggac

SEQ ID NO: 199713 - RNA, 75 nt, Homo sapiens
aggccagacggagccaaacagccacagaagaaacgaaaaaggcagaagaacgcagacagaagaaggaaacaagag

SEQ ID NO: 199714 - RNA, 98 nt, Homo sapiens
agccgcgggacaagaaaagcgggcaaccgaaagagacccccagaccaggaaagacaggggaaagggggcaggaaaaccgaaagcacaaagacccaagc

SEQ ID NO: 199715 - RNA, 76 nt, Homo sapiens
aacaacgggagcccagacggaaccagaacagaggaaccgcagaaacgcggacgggagaagcaacgcgaacagcaac

SEQ ID NO: 199716 - RNA, 81 nt, Homo sapiens
gcacgagaggccccagagagacacgggacgggaggacgaaggccaggccacagggcaccacaacacgcccacccaggaggc

SEQ ID NO: 199717 - RNA, 61 nt, Homo sapiens
gggccagcgacccgcgccagcgcccagggggggaaaccaccggcgaccggaacgcacacca

SEQ ID NO: 199718 - RNA, 72 nt, Homo sapiens
cggcccacaagaccgcggggagccccagagcaccgaccggaagccgaacgccaagaaaacaagggaagggca

SEQ ID NO: 199719 - RNA, 65 nt, Homo sapiens
agaccagccggaacaagagacccggccggcgcggaagaggccggcggcgggacggccccacggga

SEQ ID NO: 199720 - RNA, 80 nt, Homo sapiens
gcgacccacggcaacggcaagcccggaggagggcagagacgacgaaggaggggccggagcccagaacgcggaaccccaga

SEQ ID NO: 199721 - RNA, 84 nt, Homo sapiens
gagaagggccgggaccgaaaccagccccggacgagaagcgcagcaacggcgggggaccacgagagccaccacaaacacagcccg

SEQ ID NO: 199722 - RNA, 64 nt, Homo sapiens
gaaggaccaagaaccagagccccagcagcacaaagaggcggaaagccggcacaccaccccccca

SEQ ID NO: 199723 - RNA, 76 nt, Homo sapiens
ccgccgccgcgcgccaaagcgcgccgccccgggcaaaaggagaagacagaggagccagaccaagagacagcacagg

SEQ ID NO: 199724 - RNA, 75 nt, Homo sapiens
acaaaaggagagaaaaccagccgaaggacaagcccaaccagggaccaggccaaaaccagacgccacgccccacgg

SEQ ID NO: 199725 - RNA, 84 nt, Homo sapiens
ccgcaccagccgccgaccacacaaggcagggggcgcccacaggcacgaggacggcacgggcggcgggagcccggggcgccgcgg

SEQ ID NO: 199726 - RNA, 85 nt, Homo sapiens
agccccgggcagcaagaaaccacagcaacagaacagggggagagacaaccagagcggaaagggagaaaagcccccagaaaggagg

SEQ ID NO: 199727 - RNA, 78 nt, Homo sapiens
caggcacccgcaggagaggccccaacaaggccaaagaacgccaaccgaaagaaagacaaagagggccaaaagaaagag

SEQ ID NO: 199728 - RNA, 82 nt, Homo sapiens
caggacacaaccagagccccagagccccaaagccacagaggagaaggcagagcccccccaggcagaagcccgagcgggaacc

SEQ ID NO: 199729 - RNA, 81 nt, Homo sapiens
aacgccaagcaccacaaggaaaagccaggccccgaggacaaggcagagcaggccaagagcagcacccaaaggccaggagcg

SEQ ID NO: 199730 - RNA, 63 nt, Homo sapiens
acagacaaagaagaccgcacacaagccaacaacaagaacccaagaaggcagaagccagccccg

SEQ ID NO: 199731 - RNA, 56 nt, Homo sapiens
acaacaacgagaaaagcaaacaaaacaccaccgcagggggcagcacgccgaaggag

SEQ ID NO: 199732 - RNA, 75 nt, Homo sapiens
gccccacgaggggagggcgagccgccagggccaacggccgccaccaaaaagaagaagggaaagcgcgaagcgcaa

SEQ ID NO: 199733 - RNA, 76 nt, Homo sapiens
aggcgcggaggacgaagggacacaccgcagcagccagagcgcccaagcagggcgcagcagcagggcagccggccca

SEQ ID NO: 199734 - RNA, 31 nt, Homo sapiens
acggccccggggggccagagagggagggacc

SEQ ID NO: 199735 - RNA, 69 nt, Homo sapiens
agccagaaaaagacacaggagggaacagaaggacccccgccgaaggagccgaggggagaaaccgacccc

SEQ ID NO: 199736 - RNA, 67 nt, Homo sapiens
gcaccgccacacggcgggggacacgagaaaagaccgaagaggacacaggacgcacagaaaaaacaca

SEQ ID NO: 199737 - RNA, 80 nt, Homo sapiens
cagagaggcccgcccaccagcgcccgcccccgccccgcacaagccgacggggaaacagaccagaccaaggccacaagaag

SEQ ID NO: 199738 - RNA, 73 nt, Homo sapiens
cggaagccgggccaacccaaaagggccaaacgcaacgagaccacaggacagagcgggagccaccagcgccaaa

SEQ ID NO: 199739 - RNA, 84 nt, Homo sapiens
gggacagcccaaggccaccgagcccgcaaaaccagccaaaccaggaaaggacaggagaagcggaggcagacgcgcccggagaag

SEQ ID NO: 199740 - RNA, 78 nt, Homo sapiens
ccgccgacgcggggggccgcagcagccgagaccaagcgcccacccagagaaaagcagaaaagacaccaggaagaaaaa

SEQ ID NO: 199741 - RNA, 67 nt, Homo sapiens
ccggccggcagccagggcagcaggcgggcagaaagccagaacaaagaaaccacagaaaggagaaacc

SEQ ID NO: 199742 - RNA, 73 nt, Homo sapiens
aacaagacacggagcaaggaggaaaacacacgacaacaggcacaaagagagaaggaacacccacagggcagac

SEQ ID NO: 199743 - RNA, 82 nt, Homo sapiens
gggagcccaggacccggagccccacccggagcccgagggaggagaaagcggcagccgcggagggagaaaaccccaccccggg

SEQ ID NO: 199744 - RNA, 30 nt, Homo sapiens
caccggggacagacaggaagggcaaaaccc

SEQ ID NO: 199745 - RNA, 84 nt, Homo sapiens
aaacgcccgagggcagcaacagcaaaacccccaccggacgcccgggggaacgcaggagcagccagaaggagaaggaggaacgga

SEQ ID NO: 199746 - RNA, 39 nt, Homo sapiens
gaccgcccgccgcggcgcccggggcaacaacacggcacc

SEQ ID NO: 199747 - RNA, 66 nt, Homo sapiens
gaagcggcgagacgagaacagaagaaagaagacaaaaagccaggaacagggcaaaacagaggcaga

SEQ ID NO: 199748 - RNA, 94 nt, Homo sapiens
cacaccgcccgcgccaggcccgcccgagccgccgcacaccggccccacgcacgacgagagggacagcacggcccgagagggaggaaggcccaaa

SEQ ID NO: 199749 - RNA, 79 nt, Homo sapiens
ggggagccgacgccgaggcccaccgccaccgaacagagagaagggcgggagaaaccaaggaaagagaaaagcgggaggc

SEQ ID NO: 199750 - RNA, 60 nt, Homo sapiens
gagggaggaaaacaaccgagggcagagagcgaaccgagccgacagagagaaacgagacgg

SEQ ID NO: 199751 - RNA, 45 nt, Homo sapiens
acgaagaaaacacccaccggaagagggccagcgaggacggaagaa

SEQ ID NO: 199752 - RNA, 91 nt, Homo sapiens
ggcgaacccgcggcgcaaaacgaacggaccagaggaagacgaagaaccgaaggacgagggcccgcccaaggccccccagcccaaacgacgc

SEQ ID NO: 199753 - RNA, 68 nt, Homo sapiens
caaaacgcccggaccgaagccaaagccacccccaaaggcagaggaagaacgagcagggaaccaagaca

SEQ ID NO: 199754 - RNA, 43 nt, Homo sapiens
gcacaggaccaacaaaacaagcaacgaacaaaggccacgcagc

SEQ ID NO: 199755 - RNA, 77 nt, Homo sapiens
gccggcaaacccagcccaaacaggaaagcgcaggcaggagaaggacagcagagccacaagggacgcaaaaagaaggg

SEQ ID NO: 199756 - RNA, 75 nt, Homo sapiens
cggagcaggagcccggccaggcgcggggaaagaaagagcggcgccaccccgggagaaggcgaccgagacgcaagc

SEQ ID NO: 199757 - RNA, 72 nt, Homo sapiens
gccgagcgaacgcgcaacagggccgcacgcaaggagcaccaggccaagaaccccaaaaacagcagcagaaac

SEQ ID NO: 199758 - RNA, 81 nt, Homo sapiens
ccgccggcggagggggcgggcacccgaccggagcgggccaggcgcggagagaaccgagcggccggagcagaaacgagcgga

SEQ ID NO: 199759 - RNA, 62 nt, Homo sapiens
agacaagaggagacacgagggaacaaacaccggagcaccgaacagagacgcaggcaagagcg

SEQ ID NO: 199760 - RNA, 36 nt, Homo sapiens
ccccgggggaaaagaacgagggggaggggggcgaaa

SEQ ID NO: 199761 - RNA, 69 nt, Homo sapiens
cagaaagcaccagacccaccgaaaagaagaagggaaaaaacggccaccccaagagacagaaagcgagga

SEQ ID NO: 199762 - RNA, 83 nt, Homo sapiens
gggcgcgcggcgccggcggcgcgcgacccccgcgcagggcggagggggcagggcagaaggaccaggggcgacgaggcccagag

SEQ ID NO: 199763 - RNA, 69 nt, Homo sapiens
gccaaagccgcaacagaaagcaagaggaacccagcccgacggagcagcagcgccgggaaggaaagcaca

SEQ ID NO: 199764 - RNA, 85 nt, Homo sapiens
gcgcgcgaagcgagcgagaaggcacggagcgccgcggagcgcagggcacaaggcaaaggggcagggaagaaagggaagggagggg

SEQ ID NO: 199765 - RNA, 86 nt, Homo sapiens
cccacccagcagccgacgccagcagaagagaagcagcagcagcccaccagggagcccgcaggggagggcgaaacccagcaggcgca

SEQ ID NO: 199766 - RNA, 80 nt, Homo sapiens
gcgagagaggcaggcggagccgaccgggccaggaaggggccggaaccaagaaggacgccacaaccaaaagcagaacagag

SEQ ID NO: 199767 - RNA, 72 nt, Homo sapiens
ccgcaggcgagcagaaccagcggcagaggacacccccacacgagccccaaccccccagaccaaacacaccgc

SEQ ID NO: 199768 - RNA, 90 nt, Homo sapiens
cgccagggagcccccgcgcgcccggccggcccggagcaccgagccgcggcacggaggaggaagcccggggcggcgacggagcacgaccca

SEQ ID NO: 199769 - RNA, 71 nt, Homo sapiens
gacacgggccaagggagcgaaaagaacccccaaaaggggagagaaggcgcgcaggagagcgcagagacccg

SEQ ID NO: 199770 - RNA, 77 nt, Homo sapiens
ccacggccaggcggagcaacggacccgcgcggggccaggaccgaggaagcggacccccaggaggagggggccccgag

SEQ ID NO: 199771 - RNA, 55 nt, Homo sapiens
gaccgggagagaaggccagcgacagccgggaggacccaaagacaggaccacgcac

SEQ ID NO: 199772 - RNA, 74 nt, Homo sapiens
aacagaccgaagagcagagcacaaggcagaaaaacggaaggaggccggggggggcacagagccccggaagacag

SEQ ID NO: 199773 - RNA, 69 nt, Homo sapiens
accgcggcccccaaaggcaccccaagggacccggacaccaaaaacagccaaacaagaagaagagaaggg

SEQ ID NO: 199774 - RNA, 68 nt, Homo sapiens
cagccagggaaacgcaacccaagcaggcacaacaccgggaaaagccgcccccagacagcgcccgaaag

SEQ ID NO: 199775 - RNA, 110 nt, Homo sapiens
gaggaggccggcgcagccccaagacagagcgcacccggcaggcgcaacagagcgccggcggacaaaccggcgaccacacacggggacgacggggaagccggacagcaagc

SEQ ID NO: 199776 - RNA, 63 nt, Homo sapiens
cagccgccgcagacccagcagccaagagggaagcagacgagagcaagaaggcacgcaaagcag

SEQ ID NO: 199777 - RNA, 72 nt, Homo sapiens
gggccccccgccaccaaaggcccaggagagagggaaagcaagccacacccagaaccagcagcccgcagaaga

SEQ ID NO: 199778 - RNA, 104 nt, Homo sapiens
ccgccagcgagcggccgcccccagggacgcgagcccgcaacccccaagcagcaaccgaccccaaacgccgaccgacccggacagcaaaaccggcagaagccggc

SEQ ID NO: 199779 - RNA, 79 nt, Homo sapiens
ggaaggaccgccagggaagggagaccggcccccaacccagaacaaccgcagcagaaccaccaccaccaaaaccccaaaa

SEQ ID NO: 199780 - RNA, 73 nt, Homo sapiens
gaaaacacacggaagagcgcggccagcaccccaacgggccaaaggacgcacaaggaccggcacggcagaagcc

SEQ ID NO: 199781 - RNA, 70 nt, Homo sapiens
caaagccggcacaagggcccaacggaaccacacggggacggaaaaggcgcacacgacccggagaacccca

SEQ ID NO: 199782 - RNA, 54 nt, Homo sapiens
ccgagggcccgcaaggccacagcacgggaaggaagcgcccggggaagaagaaaa

SEQ ID NO: 199783 - RNA, 87 nt, Homo sapiens
ggcgccggcacccgacgcgaacgccacgagcccccaggggacggcgaacgcagaaaggccagcagaaaaagggggaagagcggacaa

SEQ ID NO: 199784 - RNA, 125 nt, Homo sapiens
ggcgggggaagcagcggagcagccggaggacgcggagcccaagaaacgggcagccaggcccccacagcccgcagagggaacccccgcagaccccggaccaggccccaagcagcggacacagccgg

SEQ ID NO: 199785 - RNA, 90 nt, Homo sapiens
gaggcgacgaggccggacggggcggacggcgacgcagcccgcggcagaagacagagaaagagcggacccagagggcgaagaaggagcaga

SEQ ID NO: 199786 - RNA, 78 nt, Homo sapiens
aagaaaaggaagcaacaacaaagcccagagggagccaaaaaccaggaaaggagcaagaagaaaagaagagcgaagagg

SEQ ID NO: 199787 - RNA, 66 nt, Homo sapiens
cgccgaacccgaaaggagaaccaaaggcaagaaccggagcaggagaaaagccggaaagaaaacgca

SEQ ID NO: 199788 - RNA, 52 nt, Homo sapiens
ggagaaggaccaagaaccaggggaaaaagaaaagggcgaagacccgaagcag

SEQ ID NO: 199789 - RNA, 74 nt, Homo sapiens
cacccgaagaaggcagcccacgaacaccgcaggccgcagccaagccggaacaggagcggcgagcccaaacgcaa

SEQ ID NO: 199790 - RNA, 80 nt, Homo sapiens
cacaagcagaagccgacaagcccgggagacacaggcagaaacaagaccagccgaaaggcacgagcaaacaagccacacag

SEQ ID NO: 199791 - RNA, 76 nt, Homo sapiens
ggcaggagcggcggccaggccagacccgaaggccaggagacccgaccccaagcacacgccgaggagccaagccgcg

SEQ ID NO: 199792 - RNA, 41 nt, Homo sapiens
gggggggcaaacccgagagaacggacgcaagaggcgcccca

SEQ ID NO: 199793 - RNA, 72 nt, Homo sapiens
gacggaggcgaggcaaacggggggcgcggagggaccagcgagcgggaggcaaggaaaacagcagaccagagc

SEQ ID NO: 199794 - RNA, 78 nt, Homo sapiens
cgacagccgcggccgggcccgaggcccggaagcaggagacgccaggccaccaaccgagagcccccacccagccagaag

SEQ ID NO: 199795 - RNA, 86 nt, Homo sapiens
acaaggaggccggcggcagcgacgggccccgagggccccccacacggggccccacacgcgaggaggacccacgaaggccacagaga

SEQ ID NO: 199796 - RNA, 69 nt, Homo sapiens
accaccaccgaaacaaggaaaaccagccaacagaaaccccacagggcacggagagcaacgagaaccagg

SEQ ID NO: 199797 - RNA, 76 nt, Homo sapiens
gcaaggcccaaccagacgcagagccggggcaccacaacgacacacccagcccagaaccagcaggcgaagacgcagg

SEQ ID NO: 199798 - RNA, 73 nt, Homo sapiens
ggaccaccagaaagcaccccacagggaggaaggcgaccaagccacggacaacgaaacaaaaaggaaaaggcag

SEQ ID NO: 199799 - RNA, 75 nt, Homo sapiens
gccgcccgggccagcggccgcgcacccccggccggaggcaccagcgcgcacaagagcagggaccccaggcgcggc

SEQ ID NO: 199800 - RNA, 80 nt, Homo sapiens
cccccaccgcccgcccggagcggagcagccccagcgccacggaagggaccacagaccagcacgccggcgccacgaaccga

SEQ ID NO: 199801 - RNA, 74 nt, Homo sapiens
ccgagccagccgcggccggaggagcccccaggccgaagaccgcaggaaagcaggaaggcaagaaagccaaggac

SEQ ID NO: 199802 - RNA, 69 nt, Homo sapiens
ccaccaccaccaccacagagcgggaagaggggcgagacagacagaaagcgcccaggacaggaccaggag

SEQ ID NO: 199803 - RNA, 86 nt, Homo sapiens
gcagccccgacggcaccgcaccgaggcgccgcgcacagcaagaagggcagcaggagcggagggcccccgcccaggggaaggacgag

SEQ ID NO: 199804 - RNA, 73 nt, Homo sapiens
ccggcacaccgcggggccgaaaacaacgacaacgagcacaggaaagacgaggccggaagccacaggagaaagg

SEQ ID NO: 199805 - RNA, 77 nt, Homo sapiens
aaaggagaaaagagaaaggagcaaaaacaccaccacaacaaaaggcggagaagggcagacaagacacgcagcccaaa

SEQ ID NO: 199806 - RNA, 80 nt, Homo sapiens
cccaccaagcacccaacagaagaagagcaccaggaagaagaggcggaagaaacaacaagcgcaaggagcgcccaaaccac

SEQ ID NO: 199807 - RNA, 77 nt, Homo sapiens
ccagcaggccaacaccacagaagacaggacacaaagcacgcgacaggaaccagaacagcaacccgccaggaccacgc

SEQ ID NO: 199808 - RNA, 54 nt, Homo sapiens
cggaaagcagccaaagggagaccgagcagccaaaaagggcgacaagagaaaaag

SEQ ID NO: 199809 - RNA, 78 nt, Homo sapiens
caagagaaagaaaaacaagaacgaggaacacgaacaggaacccgcaggcccaggaacaagcaccccgagcagcacgga

SEQ ID NO: 199810 - RNA, 74 nt, Homo sapiens
gcggcccagcgagggcggcccggggcacccgcacgggaagcaggcccgccacagacaggcagccagcgacccca

SEQ ID NO: 199811 - RNA, 85 nt, Homo sapiens
cggacaccgacgcgccacgcggagcccgccgcagggacacccgcggccagcacccgcagcggcagcgaggagggacagcgcagga

SEQ ID NO: 199812 - RNA, 62 nt, Homo sapiens
aacgggcaggcggagggggagcggaagggcagcgccaacaggcaccaacggacaaccaggca

SEQ ID NO: 199813 - RNA, 80 nt, Homo sapiens
cggccgccaaccggcgccgggggacggcgcggaagaagcgcgcggagcgcgggagcaacagaaccggaagaccggaaggc

SEQ ID NO: 199814 - RNA, 79 nt, Homo sapiens
cgcaggagacagaaacggcagaggacgccaccaggaagggcccgcccgagaggacgaaggcagggacaaacaaccaccc

SEQ ID NO: 199815 - RNA, 65 nt, Homo sapiens
ccacccccccccggaagggcgaaagcaggcgggacggaccaaagaagccaaccgacacaacagca

SEQ ID NO: 199816 - RNA, 75 nt, Homo sapiens
cgagaagcagacgaagacccgccgcgaaccaggcaccagccccgagagaggcggccccaggggggaccaacaagg

SEQ ID NO: 199817 - RNA, 95 nt, Homo sapiens
gcgacagagaggaccaccccgaaacccccggcggcgccggggcccgccgcagggagaagcaggagaccccggcgccgaggcaagaggggagaggg

SEQ ID NO: 199818 - RNA, 75 nt, Homo sapiens
agaagggacaggaaacagcaaaaaggaaaccacaaccaaggagaacaccagaagaaaagaacacgcagaaggccg

SEQ ID NO: 199819 - RNA, 78 nt, Homo sapiens
gacccaaggcacgggagaaagccccaggaacaagcacacagagacggggacggcaacaacaacaagaaacgggccagg

SEQ ID NO: 199820 - RNA, 71 nt, Homo sapiens
ccgcggccccgccgcggacagggacaagcgcacagcggagaaagcagcgcggccaggaggcgggaaagcgc

SEQ ID NO: 199821 - RNA, 46 nt, Homo sapiens
ggaccggagaggcgcccaccgccagcagaggagaacaagcggagaa

SEQ ID NO: 199822 - RNA, 74 nt, Homo sapiens
gccgggaacccccacgcggccagcgaaaacgcccaggacccgcccgcagccagaaccggcggccggaacgcggg

SEQ ID NO: 199823 - RNA, 37 nt, Homo sapiens
cccgccaggagcaaaggagccgaccgcgagaggagag

SEQ ID NO: 199824 - RNA, 81 nt, Homo sapiens
aaccagccaaaccaggaaaggacagcccacaccgcggacagagcaaacagcaacaaggagcggggggaccaggagcagagg

SEQ ID NO: 199825 - RNA, 61 nt, Homo sapiens
acaacaagagacaacaccgcgcggaccacaaaccgcgccagaaaaacccgggagagggccc

SEQ ID NO: 199826 - RNA, 109 nt, Homo sapiens
cacaaaacgcccagcaaaccaagagggagaagacggaagaaagcagccaaggcgccggcggcagagcggggagacgagacaaccgccccgccgccgggaaacaagaggg

SEQ ID NO: 199827 - RNA, 72 nt, Homo sapiens
gcacgggaaccgaagagagccgggcacaggaccagcagagcaaggagacccagccgacagcagcgcagcagc

SEQ ID NO: 199828 - RNA, 91 nt, Homo sapiens
caaggaccgcggcacccacgccgcaccggccacccggcccgacaccagccgcaccggaacagaacagcagacgcccccccgacagggacgc

SEQ ID NO: 199829 - RNA, 79 nt, Homo sapiens
cggcggaaggagagcggaacagccggagagagagagagcccgcagcggaaagagcgggcagagagacggggcgccggag

SEQ ID NO: 199830 - RNA, 55 nt, Homo sapiens
cccggcaaccgcaccggcgaccagaggacacaagagcaaaccagccagcacgggg

SEQ ID NO: 199831 - RNA, 70 nt, Homo sapiens
gggacgggcccagaggcccagggaggcaggggcagaaacagagaaggaacaggacacacagcaacgaagc

SEQ ID NO: 199832 - RNA, 72 nt, Homo sapiens
cggggcgagaaggcggcgcacaaggagaagaaagaagaaagagcaggaacaccggacccagaagagagaaac

SEQ ID NO: 199833 - RNA, 60 nt, Homo sapiens
caaaaccagggcggcaaaacgagcgggccagaagacgaccccgacgcaggccaggagccg

SEQ ID NO: 199834 - RNA, 76 nt, Homo sapiens
ccgccgaaacacacacggcgcggcacggggacggaaagagagccgcagcgcagaacaagggaaaaaagggcaaaaa

SEQ ID NO: 199835 - RNA, 77 nt, Homo sapiens
cggccaggggggaccccaccccgccgcagaggagcccgcgggggagcccccagaaccaggccgagcccgcgcggaga

SEQ ID NO: 199836 - RNA, 39 nt, Homo sapiens
ccgaagagaacgaaaggacaaagaaccaagagggagaca

SEQ ID NO: 199837 - RNA, 82 nt, Homo sapiens
ggccaaagacccccaggggaagaggcaggccccgaggagccgggagcgcaagaaaagaaggcaacaggccaggggcgcccgc

SEQ ID NO: 199838 - RNA, 65 nt, Homo sapiens
ggcaaaacaaccagaaggggagaaggcaggcaccacaaaaaggacagggagaaaggcaacaaaag

SEQ ID NO: 199839 - RNA, 80 nt, Homo sapiens
ccgaagcccgaggacccagaacagcaccagcagaacagacaaaccaagagggacaggggacgcgaggacaagggcgcagc

SEQ ID NO: 199840 - RNA, 82 nt, Homo sapiens
ggaaaaaagagcaggggaaaaggaaagagagaggccgcagaagggcagaagaacaggccgggcacaaaaagccaaccaaccg

SEQ ID NO: 199841 - RNA, 49 nt, Homo sapiens
ggcccccaacgacaaaaggaagaccgcccccgacaaagaagacgcccca

SEQ ID NO: 199842 - RNA, 79 nt, Homo sapiens
accaggaggcgagcaacagggaccaagaaaggcccagggaccaaagcccggacaaggcccgagcaccaggaccgcagaa

SEQ ID NO: 199843 - RNA, 64 nt, Homo sapiens
ggaggccgggaagccaacgaccacacgcaccaccaggagagaacgccgcgccgcgcgacaacgg

SEQ ID NO: 199844 - RNA, 80 nt, Homo sapiens
gcagaacccgagcaagagaaaggagagagggccagagggggcgaccgggacaaacggcggaggcagaagaggcaaaccag

SEQ ID NO: 199845 - RNA, 108 nt, Homo sapiens
cggagcggagccgcaccaagaccaggccggcgacagcaccaagaacccacgcaggcccgagccggcaaacgagagcaaaagggaccgaggcaagaagggacgaacggg

SEQ ID NO: 199846 - RNA, 60 nt, Homo sapiens
gaagggaggcccaagacccacaacaaaaggacaacaccgggaggccagaacacaggcccc

SEQ ID NO: 199847 - RNA, 66 nt, Homo sapiens
ccccccccaggaccccgagcaggagagcgcaccacccaggcagggggggccgcccgcccaaggcag

SEQ ID NO: 199848 - RNA, 81 nt, Homo sapiens
ggcaggacgcgcggaggaaacacccaggacacggccacaacaccaagaggggccagaagagaccaagaggaccccagacca

SEQ ID NO: 199849 - RNA, 75 nt, Homo sapiens
ggaagaaagagaaagaaggaagaaccaggcgcaggagacacaggaagaagaaccgcagagaggaaaggcgccaca

SEQ ID NO: 199850 - RNA, 80 nt, Homo sapiens
agaccaagcgcacaggaggaaagcccacagcgaagccaagcaaaaggagaagcggcaggcagccccacgaccgaagagga

SEQ ID NO: 199851 - RNA, 36 nt, Homo sapiens
gcagcaaaggcagcccccaagacggcacaggagagg

SEQ ID NO: 199852 - RNA, 71 nt, Homo sapiens
ggacgagaaaccggaggagcaggaaagaaaccccagaaagcggaggggaagggccgaaacagacaaccgag

SEQ ID NO: 199853 - RNA, 61 nt, Homo sapiens
gaaaagcccgcaaagcaagagaggcaggccaccagccaaagaggggaggaacaacgggagc

SEQ ID NO: 199854 - RNA, 83 nt, Homo sapiens
ggacccggccaaccacacaaagcaaggaaaagaaagccgagggaaaaaccggagaagagaaacaaaaggacagagaaaaggcc

SEQ ID NO: 199855 - RNA, 80 nt, Homo sapiens
cacaaccaacacaacgaagggagccgagaagaaggaaacccacgccaagcgcacgggcagccaggagaggaaaccggcgc

SEQ ID NO: 199856 - RNA, 77 nt, Homo sapiens
acagaagacgcagaaaaggagagaccaagacacccaggagaaagacagcggggaaaagaaaaaggagggggcaaaag

SEQ ID NO: 199857 - RNA, 80 nt, Homo sapiens
gcggaacgccagccccggcacgcacccgacccaaagcaggaaacggagcacccaccaacgagagagccgcagggcaggac

SEQ ID NO: 199858 - RNA, 40 nt, Homo sapiens
cccccccgggaaacaaagggagcggaagcgagcaccccag

SEQ ID NO: 199859 - RNA, 74 nt, Homo sapiens
cgagcacgggcggagcgaacgggacagcgaaacagcaaccgagcagcacggccccaccccaacgaggaggagaa

SEQ ID NO: 199860 - RNA, 81 nt, Homo sapiens
aagaagaccaacccaacgcacagcacgagacccgcagaccacgccagccccaggaggggagcaacgagaagaagacaacag

SEQ ID NO: 199861 - RNA, 66 nt, Homo sapiens
agagacggaggaacgaacaacacgcccccaacggcgagagagcagcacaaaccaacagaggagcaa

SEQ ID NO: 199862 - RNA, 70 nt, Homo sapiens
aacggaagcgagcagcagagagagaaagggccacagcagcccagcagcgagagccagacaagccagacac

SEQ ID NO: 199863 - RNA, 81 nt, Homo sapiens
gagaggaccacccagaggagcaacaggcgagcaccgcaggagcgcagagacggcccacagagcagagaccccgcagagcgc

SEQ ID NO: 199864 - RNA, 61 nt, Homo sapiens
ggaaccaaggggacaaaccaacagaagggcaaccagggaaaaagaacgaagacgaagagga

SEQ ID NO: 199865 - RNA, 53 nt, Homo sapiens
gaaccccagaacagggcgcggggcaggcacccaagaaaccaaagacaccgacg

SEQ ID NO: 199866 - RNA, 88 nt, Homo sapiens
acccaggccccgggccgcgaagcgcagcgccagacccaaggcccccgaggagcgcgggcgccgagcaggaggcaaagggaccccaaga

SEQ ID NO: 199867 - RNA, 53 nt, Homo sapiens
gagaagacaaaaaaacaggaacgcacagacccgcccagaaaccaacagaagaa

SEQ ID NO: 199868 - RNA, 70 nt, Homo sapiens
aaccaagacagcccaaacgccccacgaccaggcgggaaaaccgccacaaagcccccaagccacaagcaac

SEQ ID NO: 199869 - RNA, 79 nt, Homo sapiens
aacaggggcaagacaagccagaacgagaagcgcaccacagaaacagccaacccgcaacaacggcagaagaaaagcccgg

SEQ ID NO: 199870 - RNA, 88 nt, Homo sapiens
cggaaaccgccccagcacgccggcacgccccccagaagggagagaacgccgagccgcgccgcagccccgccgccgagaagcccgcccg

SEQ ID NO: 199871 - RNA, 77 nt, Homo sapiens
gaagccggcccgcccggagggaaaggccgcaaggagaacgcaggaacgccacacagaccagaccccaacagcagaca

SEQ ID NO: 199872 - RNA, 60 nt, Homo sapiens
gagaaaggggaggcggcaagcgcaccgagggacagagcgaagaaccccccaagaagacga

SEQ ID NO: 199873 - RNA, 106 nt, Homo sapiens
agacagccaggaaggaacaagccaagaggacccgaagccacagccccaagggaaagaagacaccagggagcgcagacacggccacggcgcaaaggacgcacagaaa

SEQ ID NO: 199874 - RNA, 80 nt, Homo sapiens
aagaaacgggggaagcagagcgcacaaagggaaaggggccgacgccaccgccgagcccagaccggaacagacggggggcc

SEQ ID NO: 199875 - RNA, 81 nt, Homo sapiens
ccagaggagggggagagagcccacaagggaaggaggagacacgacgagcaagaacgaggccaaggaggagggacacagaga

SEQ ID NO: 199876 - RNA, 81 nt, Homo sapiens
ccaagggagcgaaaagaacccccaaaagggagaaaaaggcagccccggagacgaaaagacaaagcaccaccaacagacgag

SEQ ID NO: 199877 - RNA, 57 nt, Homo sapiens
ggagcgggccaggcgcgcccgggcaccgccgaccgaaaccgcaaacacacgacagag

SEQ ID NO: 199878 - RNA, 80 nt, Homo sapiens
cgcggcgaagcaaaggaacgcgccggaagaaaaggccaagggagaggaagaaagaccaaacgagagacaaaagagaacaa

SEQ ID NO: 199879 - RNA, 59 nt, Homo sapiens
aacccgagagcgggagcgggcgggccagacagaggcgggcgagcggacgaaacagacgg

SEQ ID NO: 199880 - RNA, 73 nt, Homo sapiens
ggggaccgggagggaaagaaaacaacccgccgcagccgcaggaaggccagaagacagaacgaagaagaagagc

SEQ ID NO: 199881 - RNA, 69 nt, Homo sapiens
gagcaccaccggaacgccgacgaggggacaacgaaggaggcaagcaacaaagggacaaaaacgacaagc

SEQ ID NO: 199882 - RNA, 71 nt, Homo sapiens
gaccgcaggacccaggccagaccggagcagcggggacagaccggagaagaacaagccgacccaaagccgcc

SEQ ID NO: 199883 - RNA, 63 nt, Homo sapiens
acaccgccggagcgccaagaagccagagaagaagcgccaaggagaaggagaagcccaaggaag

SEQ ID NO: 199884 - RNA, 69 nt, Homo sapiens
ggccgcccagcgcagcggaggcaccagaggacgccaggaacaaggagggagcgcacccacccggggcgc

SEQ ID NO: 199885 - RNA, 77 nt, Homo sapiens
acgcagcaaaccacaggagaggaggaaagaccacagcaagaccacgcccccagccgggggaccaggccgaacgaccc

SEQ ID NO: 199886 - RNA, 35 nt, Homo sapiens
caagcaccagaggaccggcagccccccccccagag

SEQ ID NO: 199887 - RNA, 54 nt, Homo sapiens
gaaggcagcgcccagcagcgcagccgcgcagagacaagagaacagaaccagaaa

SEQ ID NO: 199888 - RNA, 82 nt, Homo sapiens
ccaaagcagcgagaacggcggggcgccgagccggaccgcgagagcacaaacgggccacggagcaggccgggcccgccagggc

SEQ ID NO: 199889 - RNA, 82 nt, Homo sapiens
gggcggccgcgacccccggcaacccggagaaggcacagagcggccgcgccagcgaggcccggggacacgagcggccccagcg

SEQ ID NO: 199890 - RNA, 49 nt, Homo sapiens
gaggcgcagaacgcgaaacaaagaaaccggacacaagagggcaagaaag

SEQ ID NO: 199891 - RNA, 77 nt, Homo sapiens
gaagcgcagaaagcaggcgaacccgcggcgcaaaacgacccgacagggacagcggcaccacccaaaagaaaaggccc

SEQ ID NO: 199892 - RNA, 68 nt, Homo sapiens
acccggccccaagccggaagaaccgcagccgagcggggccggccacaggcaaacccagcaggaagcca

SEQ ID NO: 199893 - RNA, 58 nt, Homo sapiens
ccaagacgggagagccacgggcccccggcaacgaacggacacccggaagcaggcgaac

SEQ ID NO: 199894 - RNA, 64 nt, Homo sapiens
cagacaagccccagggaagccacagcaccccagcacccaggggaaagagggaccagcgcagcag

SEQ ID NO: 199895 - RNA, 68 nt, Homo sapiens
ggcgcgcaggagccaagggcccaccggaccgggccacagaggcagaaaccagcagggcggcgcacagg

SEQ ID NO: 199896 - RNA, 57 nt, Homo sapiens
cggcacgcacaccaggagagagagcggagacaaggccacagcaggccacggcggggg

SEQ ID NO: 199897 - RNA, 84 nt, Homo sapiens
cgccacagcgcccagcgaaagccaaggagagcgccggcgcggaaggcgggcccccgcgcaaggcccgccgcgcgcgcccaaccc

SEQ ID NO: 199898 - RNA, 77 nt, Homo sapiens
gggcccgacgcacacgggggcggacaccacaagaagggcgccagggcaggaaaaggaggacgagccacgggagacca

SEQ ID NO: 199899 - RNA, 39 nt, Homo sapiens
gcgagacccgcgccccacagagcggagcggaggcagaca

SEQ ID NO: 199900 - RNA, 108 nt, Homo sapiens
gcaaccggcccgaacacgcagcccccaggaggccgccgggccggaaggaacagaccccgagcgggacccagagagggaccagggccaaagaagagccggggggcaggc

SEQ ID NO: 199901 - RNA, 82 nt, Homo sapiens
cgggccacccggaaccgcggcgggcaagaagcgacgagcccccaccaaccaccacaggaacgacaccaaaacacacaaccca

SEQ ID NO: 199902 - RNA, 77 nt, Homo sapiens
gagacaccaaagagagacggaccacggccggcccccccagcgcgagccagaagaacgaccaagcgcccaggagcccg

SEQ ID NO: 199903 - RNA, 86 nt, Homo sapiens
gcaggcagaaggggggccacccccgggcgccaggggggacacaaccgcaacccccagccacaacgcgaaccgggcggacgaaggag

SEQ ID NO: 199904 - RNA, 60 nt, Homo sapiens
caagaccagagccgggaccccagccaggaaaagcccggaaaagcagccaagcggaagaca

SEQ ID NO: 199905 - RNA, 78 nt, Homo sapiens
cggaaagacaggaagcaccccggaaccgcagcgggcgcagagacggggccggaaagagggcgggcccgcacggagcgc

SEQ ID NO: 199906 - RNA, 52 nt, Homo sapiens
caaaacaggacacaccaagccaagaaggacggcaaaccagccggcgggcgcc

SEQ ID NO: 199907 - RNA, 74 nt, Homo sapiens
ggcaccggggacgccaccggagaagggaggaaaaccaacaaggcgcgaagaggccagaaagcaccaacaaccgg

SEQ ID NO: 199908 - RNA, 72 nt, Homo sapiens
acgcgagaacaacacaacagagaaagccgagggaaagacagacggaaagccaacacaggaagacagcgccag

SEQ ID NO: 199909 - RNA, 79 nt, Homo sapiens
cacaagcaaaagccggagaggaggagaagacaagacggggacagagagcgcagggcaccccagcacccagcaagaaccc

SEQ ID NO: 199910 - RNA, 72 nt, Homo sapiens
aaacaacggagcccagaagagagcgccccagaaagagggggaggcccaagaagagcacaggagaccaacgcc

SEQ ID NO: 199911 - RNA, 36 nt, Homo sapiens
caggagaggccaacaagaaacacacgaccagaggaa

SEQ ID NO: 199912 - RNA, 65 nt, Homo sapiens
cgccggagcccgggacacgggaacaacccggcagcagacgacaggggcaccccccgggaagaagc

SEQ ID NO: 199913 - RNA, 64 nt, Homo sapiens
gacggagcaggcagcagcccagcagcgggcccaggccaggagggcaagaacacgcagaagaccc

SEQ ID NO: 199914 - RNA, 87 nt, Homo sapiens
ggccagcgccgcgacgggaggagcgccggaacgccgaggcccaggcccgagcgcggaagaaaccgccgagagaccggcaagcgggag

SEQ ID NO: 199915 - RNA, 78 nt, Homo sapiens
agagggcggcgacgggggggacgagcggagcccgggacaggagaggggcgagaaggagcgcagacacagacacaccaa

SEQ ID NO: 199916 - RNA, 79 nt, Homo sapiens
gcccccagcagcaggaggacgacgacaaggcaaagcccgagaggggcccgagacagcccccgcccgaacaaaccccgca

SEQ ID NO: 199917 - RNA, 80 nt, Homo sapiens
gcgcgaagacggaagacgcgcccgcgccggagccaaggaggccgcgcggcccggagacggaccaaggagggccgcggaca

SEQ ID NO: 199918 - RNA, 76 nt, Homo sapiens
agaagcacgacagacgcacagggcaggaccggaacaagaggagaccaagaaaacgaagaaagaaaagaaaagaaca

SEQ ID NO: 199919 - RNA, 79 nt, Homo sapiens
acagccaggccgggaggcccgggggggagccacaccaagaaccaaaggacgcagacacaccaaggaaagcaagaagccg

SEQ ID NO: 199920 - RNA, 82 nt, Homo sapiens
ggagacagagcaagaaaagcccgggagcagaagggaggcccaagacccacaacaaaagcaacagccagacgccgcacgccag

SEQ ID NO: 199921 - RNA, 69 nt, Homo sapiens
ccgcccccaccggacgaggccccccaaccaggcaaacggaagagaaggaccggaacagacaacaccgaa

SEQ ID NO: 199922 - RNA, 77 nt, Homo sapiens
cacgcacgccggaaagaagggcagaaaccagggaggaaagcgaacgcgaaaagaaaagccgagagcagccagaccgg

SEQ ID NO: 199923 - RNA, 61 nt, Homo sapiens
caccggccccaacgcacagccagggagccaagcgccgcccggccagcggggcccggcgcac

SEQ ID NO: 199924 - RNA, 80 nt, Homo sapiens
gcgccaaggaaaaggggagcggaagggagagcccgcccggcccggagaagaaaaggaagcacccgcgagaaagaagggca

SEQ ID NO: 199925 - RNA, 78 nt, Homo sapiens
cagaagaaaaagccgaaacaggcagcgaagaaggaaccagcaaagcgccacgaagcacaagcaagaggaccagccaaa

SEQ ID NO: 199926 - RNA, 82 nt, Homo sapiens
gggcgcagagccaggcagcgcaggccggcaaagcaccaggcacagcaagcgccgaaagaccagggaaaaaaccacaacaacc

SEQ ID NO: 199927 - RNA, 74 nt, Homo sapiens
cggaaggaacagcccccacgacggcgaggaacgcgggaaccgcccgggggaaggacccgagcgaccagaaagcc

SEQ ID NO: 199928 - RNA, 102 nt, Homo sapiens
aaaaaaccgcccaggcccacacccacacaggaaaacacaaaggaacagaggaccagcgagaaagccaccacccacaagcggcgaaacaccaaacgggcaagg

SEQ ID NO: 199929 - RNA, 74 nt, Homo sapiens
ggggggaggaagcccccccggcacgacaccgccccaacccacgagaggacagcccagggcccccggccccggaa

SEQ ID NO: 199930 - RNA, 73 nt, Homo sapiens
gaaacccagaccaaccccagggcacggacacggcaggcgccagaagaaaaggaaagcccggcgaagccacaga

SEQ ID NO: 199931 - RNA, 57 nt, Homo sapiens
cacgacgcggggcacggccgaccgcgccgagcagggagcccacaggagacaaaagcc

SEQ ID NO: 199932 - RNA, 39 nt, Homo sapiens
ccacacagggcagaaggaagcacggcacaaaccccagag

SEQ ID NO: 199933 - RNA, 76 nt, Homo sapiens
gcggccgcaagaacaagacccggcaggagccccaggcgccacacagaaacacggaggcccagaacacgacaagcca

SEQ ID NO: 199934 - RNA, 76 nt, Homo sapiens
ccaaaaacgagacaaagaaaagggcaagaggcgcaaagacaccgcgaagaacggaccgggggccaaagggcgaggg

SEQ ID NO: 199935 - RNA, 75 nt, Homo sapiens
ggccgaccgagacgggcggagaggagaagaggccccacagacaaaaccgccggcggaagagagcgcaccacgcac

SEQ ID NO: 199936 - RNA, 79 nt, Homo sapiens
cggccagccgcaccgggacgacaccggggaccggacagggaagcagccgagaggcgagaaagaagaaagaaaggaaaga

SEQ ID NO: 199937 - RNA, 39 nt, Homo sapiens
gagagggggcgcgagcgggggccagcggggaaacagagc

SEQ ID NO: 199938 - RNA, 70 nt, Homo sapiens
ggacagcgggacaaggagaggaggaccacgcccgaaaggcgcgcaaacgaaggaaaaggaaaaccaacag

SEQ ID NO: 199939 - RNA, 78 nt, Homo sapiens
cccggaccgcgcagaaccagggcggcggccagcgccacgccagaagaccgaagaagcagccgaacacggagcagaaac

SEQ ID NO: 199940 - RNA, 73 nt, Homo sapiens
cgggaggacaaggacaccggccagggaaagagggaccagcgcagcagaagcagggagacggcgccccgggaag

SEQ ID NO: 199941 - RNA, 76 nt, Homo sapiens
ggacggaccgagaccggaccgagagcggaccgagagcgcgaaacgcacgagaagccgggccccgaggaccgagaca

SEQ ID NO: 199942 - RNA, 75 nt, Homo sapiens
agaccaacccacagccaagcgcaccagaacaaagccaggccggggccagggcaaggaaccccaaacgcagagaag

SEQ ID NO: 199943 - RNA, 80 nt, Homo sapiens
gacgccaccgccgcagcggcgcagcccacgccagacgaccccacccgcgccgcgacccggccgcgggagagcgggggcgg

SEQ ID NO: 199944 - RNA, 73 nt, Homo sapiens
cccagcaggaaggccaccgagggaacccgaccggacccagccccagaaggaagaaagagggccacggacagag

SEQ ID NO: 199945 - RNA, 79 nt, Homo sapiens
cgccaggacgacgaggaggagacgaccggccggaaaaccgcaagaccacagcagccgaaacagaggcaccagagaaagc

SEQ ID NO: 199946 - RNA, 69 nt, Homo sapiens
gaaccacacccagaagacgacggcacagcgcacaagaaacccaagcgcgaggcgaaacaagcacccagc

SEQ ID NO: 199947 - RNA, 80 nt, Homo sapiens
cccgcggccgccgcgccccgagggcagccgcacgccaacaagggccgccgcgccaggcggcgaagagagcaggccgccca

SEQ ID NO: 199948 - RNA, 69 nt, Homo sapiens
cagaaaggaagccgagcgagaaaagcagaaaaaacacggaacaaaaaagagaagaagagacaacccagg

SEQ ID NO: 199949 - RNA, 74 nt, Homo sapiens
aacaggaaggaaccagccaaaaagcaagggcagcccgccgcgggaacagacagaggaagacggggcagagacgg

SEQ ID NO: 199950 - RNA, 59 nt, Homo sapiens
ggggaagagcgccaccggcggcccgcaagaagaccgagaaggcgccaacggccgacaag

SEQ ID NO: 199951 - RNA, 76 nt, Homo sapiens
gccagaggagccgcccgcccagaacggcggaccggagcaaacgaacacaagagacagggaacaccagaccggagca

SEQ ID NO: 199952 - RNA, 63 nt, Homo sapiens
gccgggaggggacggccgccggagccgcgaggccaagcacccgcgggcgaggcccccgcacag

SEQ ID NO: 199953 - RNA, 74 nt, Homo sapiens
acagcagcagcccgggaacgaagcagaggcgccggccgagcccgggaaaacgacagcagcagcagggccggaag

SEQ ID NO: 199954 - RNA, 69 nt, Homo sapiens
ggaccaagaaccaggcaggcagagacaccaagcgcccccacgacacgaagaccacccaaacacaccagc

SEQ ID NO: 199955 - RNA, 79 nt, Homo sapiens
caggagccagcacgccaccagacccagcggagggaggggacgcagagagagcgcagaccggagagggggcacgcaccag

SEQ ID NO: 199956 - RNA, 76 nt, Homo sapiens
aggcggcgcgaggagcagcgaaaacggggagagccggaccccagagcgcggcgcccaggcggagacaaggcacacc

SEQ ID NO: 199957 - RNA, 73 nt, Homo sapiens
gggaacaaaaccagcacccaaggcagccggaaacgaggaaaaggcggacgcaaccgccaaacgaacagaagag

SEQ ID NO: 199958 - RNA, 76 nt, Homo sapiens
cggcggcgcgagaccacgcacgggccaccgcgacgaccgccgccaacaacaggggaagaccagacgaccagccaaa

SEQ ID NO: 199959 - RNA, 82 nt, Homo sapiens
agacaaccggacagagccccacacacgggcgggacccaggcgagagcgcccagagcaacagggcaccccagggggcaggagc

SEQ ID NO: 199960 - RNA, 42 nt, Homo sapiens
ccacccagcggcggcggcggccagcaggaaagccgcagcggg

SEQ ID NO: 199961 - RNA, 77 nt, Homo sapiens
ccgggcggcgccgaccggccacgggcgagcgcggcagagggaaggagagaaggagagagacccagcccaccaaagga

SEQ ID NO: 199962 - RNA, 81 nt, Homo sapiens
agaaaggaaacgcagagaagaaacacggcaaaaagaaaaaccagcgaagcacagccccgaggcgagacgagcgccgagcgc

SEQ ID NO: 199963 - RNA, 76 nt, Homo sapiens
ggaggagcgccgagccagaccgcaagccgccacccgagaccgcgcgccccaccggccgcagaagacaagggcccgc

SEQ ID NO: 199964 - RNA, 70 nt, Homo sapiens
cgcgaggggcaggcaggacagggccggaccccccggaagggagaaacaggaggacaacgggcagcccaca

SEQ ID NO: 199965 - RNA, 67 nt, Homo sapiens
aaacaggcggaccacacgaagcccgagggaggacggaacagcacaccggacacgacacgggcaccgg

SEQ ID NO: 199966 - RNA, 53 nt, Homo sapiens
ggaaagcaggcagcgagagacagggcgggaaggcgcaacaagagacacggagg

SEQ ID NO: 199967 - RNA, 76 nt, Homo sapiens
gccagacccaggaggagcaagggcacgccggagacagaagagaggggagaagaagcccgggaagggcaaagggaca

SEQ ID NO: 199968 - RNA, 81 nt, Homo sapiens
cggaggccagagcggcacgaccacaccgcgagaagacaaggaccacagggcgcaagagccaaaggcagcgaccggaggcga

SEQ ID NO: 199969 - RNA, 84 nt, Homo sapiens
aacggggacggagccggcaaacagggcccggcagccaacaacagccaggacgagagaagcccacaaaggaggaaacagaaacca

SEQ ID NO: 199970 - RNA, 78 nt, Homo sapiens
gccccggcgcggccagccggggcaggacgcaaggaaagaaagagagggccacacccgcaaaaaggagccaccgcagac

SEQ ID NO: 199971 - RNA, 79 nt, Homo sapiens
cccgcaggaagcccccgaccccaacggaagccaacacagcgagcgcaggaccaaccaggaagaagagagggcgaaggag

SEQ ID NO: 199972 - RNA, 81 nt, Homo sapiens
ccccgcgacaagcggacggcaacgaacggaccgagcccagcgaccgaagaggcccgggaaggagcgggaagaacagccgga

SEQ ID NO: 199973 - RNA, 72 nt, Homo sapiens
gggggcgcgcggggccggcccaggggacgccgacagggcacccggcgcgcacacaaagaaccgcagaagaga

SEQ ID NO: 199974 - RNA, 75 nt, Homo sapiens
agagaagggagaccgagccaggccaggagagaagaaccgcagaccacgaccggacagaagacagaccgacagacg

SEQ ID NO: 199975 - RNA, 77 nt, Homo sapiens
cagcccagcacccaagaaggaccgcgaggggacccaacaccggcagaccgcccagagagccagcacccccgccaccc

SEQ ID NO: 199976 - RNA, 64 nt, Homo sapiens
accgcccagcgcagcgggaaagagaacagagagccggggacaggaaacagaacgacagcccgca

SEQ ID NO: 199977 - RNA, 75 nt, Homo sapiens
cagaagcgaaagcaacagacaagccagagcagccacacaagaggcggacaacacgaaaacagaggacagcagcag

SEQ ID NO: 199978 - RNA, 75 nt, Homo sapiens
cggaccacgcgccacgccgccacacccgccgccacagggaagccgcgaagggcgccagcccccaggaggaccgac

SEQ ID NO: 199979 - RNA, 98 nt, Homo sapiens
cacgcgacgggaggccaagacaggagcccaaaggacgaggagggccgcggcagaccggacgcagggagggccaagaaccccggaggagggaaagccgg

SEQ ID NO: 199980 - RNA, 69 nt, Homo sapiens
ggaacgcgcaaggcaaagcaccgcccccggaaagagccgcccgagagacaaacccccaccccgaaaacc

SEQ ID NO: 199981 - RNA, 65 nt, Homo sapiens
gggcccaacaggcggagagagaggggagccggcccccgaaagaggaaacagccagaggccacaca

SEQ ID NO: 199982 - RNA, 62 nt, Homo sapiens
gggccaccgcagcgcccggcaggcaggggaggcgccgcggagaaggaaacagccccgacagg

SEQ ID NO: 199983 - RNA, 74 nt, Homo sapiens
aggcgcgaggcccggcagacgggccggggcgcagaggaccgagcgaaaaaaaacgaaagagaaaaaaacagagc

SEQ ID NO: 199984 - RNA, 80 nt, Homo sapiens
ggaaaaaaaccacggaaaagaaacccaaaagcaagggacgaagcagccaagccagaggggagccaaagacccaaagaagg

SEQ ID NO: 199985 - RNA, 71 nt, Homo sapiens
aacggacgccgcccccgcggaacaggacggcccgcgggccagagaacacagaagagaacccgaacacagca

SEQ ID NO: 199986 - RNA, 83 nt, Homo sapiens
gcgccgggccccggacgccgcgcggaaaaggaaaaccagcgccccacaggaaagccccaagagacacgcaaagaagagacagg

SEQ ID NO: 199987 - RNA, 70 nt, Homo sapiens
aacaccaaaaacaaaacgaaccaggacggcaaggaggaacaacaaagagaagcaacagacggaaaaggac

SEQ ID NO: 199988 - RNA, 72 nt, Homo sapiens
gaggaacacaaacggcgcacaggagagggaagaaacgagcaagcagaaccgcaaaggcagaagaggcaacag

SEQ ID NO: 199989 - RNA, 78 nt, Homo sapiens
gaaacccaaagaaccaaaagccaaagaagcgggaaacccacggacagcggagaccaggggagaagaaccaaggacaaa

SEQ ID NO: 199990 - RNA, 56 nt, Homo sapiens
gggaaccagcgagaaggggggccaccccaacgccagacagcagaggcacacaaacg

SEQ ID NO: 199991 - RNA, 58 nt, Homo sapiens
gacccacgcagagggcggagcggcagcaaagcagacaaaggagagacagcacaaccag

SEQ ID NO: 199992 - RNA, 80 nt, Homo sapiens
ccaagcaaccaccagcagcccccagagcggaacacaggccccgggggcccgggaaggccaccgcccccacccccagacca

SEQ ID NO: 199993 - RNA, 79 nt, Homo sapiens
ggaggcagcgcgggacccagcccaggcggcgcggacggggcggggcaggcagggccaaagacccagggacaggacgggc

SEQ ID NO: 199994 - RNA, 76 nt, Homo sapiens
gcccgggagaggccgcggcggccaggccccagacacagacgagcaggggaagaaggccgggacagcagaaaacagc

SEQ ID NO: 199995 - RNA, 72 nt, Homo sapiens
cccccacaaagggacaacgggcccggagagcccgaacggggcaaaaaggcggagagcgaagccgcaccaggc

SEQ ID NO: 199996 - RNA, 84 nt, Homo sapiens
gggcaaggaggggaggcgagaacacgaggagggaacgaagcccaaaaggcagagacggaccgagacaggagagcaggggcccag

SEQ ID NO: 199997 - RNA, 86 nt, Homo sapiens
gggaggacccccagccacagggaccccagccggggccccccagacccagccgaggccaagggcgcacggcgggggccacggcacca

SEQ ID NO: 199998 - RNA, 51 nt, Homo sapiens
gagaggagggcacacaggaagagagccaagagggggaaaagacaaaaagca

SEQ ID NO: 199999 - RNA, 74 nt, Homo sapiens
acgggccagaaaagcggacagagcagagggaagagaaagaagggggagaaacagaagcggagagacagggacaa

SEQ ID NO: 200000 - RNA, 78 nt, Homo sapiens
ggcggacgacagggaggccgagaggccggaggaaggcgccccccgagacgggcccgggacacccagacagagagagcg

SEQ ID NO: 200001 - RNA, 75 nt, Homo sapiens
ccagaggaaagccagaaggcaccagagagaggccgaacggagcagacaaagaaccggaaagaagacggaaaagcc

SEQ ID NO: 200002 - RNA, 103 nt, Homo sapiens
ccacaggcccggaaacggacgcgggggaagggacggcgcgagcaaacgccggaccgaacacgcccccgacgaccagagagacccggccccagcccacgagggc

SEQ ID NO: 200003 - RNA, 66 nt, Homo sapiens
ggaccccaagcgacgcacccgaagagcagccaagaaagcaaggacaggagggcaacgacaccaagg

SEQ ID NO: 200004 - RNA, 83 nt, Homo sapiens
cgccaccacacggcaccggggacccggcaaagagagaggcacacgccgccgaaggccaggagcagaggccaacgccccaagcg

SEQ ID NO: 200005 - RNA, 63 nt, Homo sapiens
ggagaccgcgggccaccccggcgggagcgcaggggcccgcgacggaaggccacacaaaagaac

SEQ ID NO: 200006 - RNA, 58 nt, Homo sapiens
gggcggcggaaaaagccgccacacgccaaaggggacggaagacacgcaacccggcagc

SEQ ID NO: 200007 - RNA, 62 nt, Homo sapiens
aacgccaacaagaagccccaccggaaagaccaggcgcgagccggcacgaaacaaaggagcga

SEQ ID NO: 200008 - RNA, 70 nt, Homo sapiens
cgaagaagggccagcggaaacaccagagcccggagggacaggaagggcaacccaggaaccccgcccacca

SEQ ID NO: 200009 - RNA, 77 nt, Homo sapiens
aagaaccaccggcgcaccacacaggaacagaaggccgcaagcaaagagaccccccaaagaaagaacggagaaaaaga

SEQ ID NO: 200010 - RNA, 82 nt, Homo sapiens
acagccccccagagcccgcgaggagggccagggcagaaaagaggaaaaaaggacaggcaccgccccaaagagcgaaaaagcc

SEQ ID NO: 200011 - RNA, 77 nt, Homo sapiens
gaaaggaagagaacacgccaggaggcccagaagaaacaaggccaagccaggcggaggcacccaaaccagggagaaaa

SEQ ID NO: 200012 - RNA, 76 nt, Homo sapiens
acccgacgcgacgagggagcgaaccggagaaaggaggccggcgaggaaagggcaccacacagaaacgccaacgcga

SEQ ID NO: 200013 - RNA, 80 nt, Homo sapiens
cagccgcagcccccgcccggaggcgggcaggcggcggccggggcagcgccgcgagccagcaacgggggaaggccacaaca

SEQ ID NO: 200014 - RNA, 40 nt, Homo sapiens
cgggcccccggagcggaccgacggccccacccaggggaga

SEQ ID NO: 200015 - RNA, 76 nt, Homo sapiens
gaaagggagagcacagaggggaacagacaggccccagccgcagggggagaggcaccagcaacagaccaaccgcagc

SEQ ID NO: 200016 - RNA, 69 nt, Homo sapiens
cacgccggaaagcggaaacccggcggcacaccccaaagggcgcggagcccgccggccgccagggagcgc

SEQ ID NO: 200017 - RNA, 78 nt, Homo sapiens
agaggcgcccaccacagagaagcagaaggcacaggcccgaccagcacgcgaaagaaggaagaaaccaaacgaaacaca

SEQ ID NO: 200018 - RNA, 72 nt, Homo sapiens
agacgagagaacacgccggagagcagaagaggagccaggaaggacagggacaagcgcacagcggagaaagca

SEQ ID NO: 200019 - RNA, 70 nt, Homo sapiens
acaggagcaagaaacaacaacagcagagaagaccaagagacagaagggacgggacgaggacccggggaag

SEQ ID NO: 200020 - RNA, 78 nt, Homo sapiens
ggccggggaagggccaggccgggcagccgccgacgagcaggaaaacaaaaggagaagacaaaagagagaaaagaaagg

SEQ ID NO: 200021 - RNA, 41 nt, Homo sapiens
gagagagggaccagaaaaaggagaacgccgacagacaacca

SEQ ID NO: 200022 - RNA, 66 nt, Homo sapiens
gggcccgccaacgaaccacaggcgagaccgagacaaggaacgagcaaaaagacgacagcaaaggac

SEQ ID NO: 200023 - RNA, 89 nt, Homo sapiens
ggccgcggaggccgcagcagcagaagcagcagaaaggccgcggcagggcggcgcggccgagaaagagccgcagacgcacagcaaccacc

SEQ ID NO: 200024 - RNA, 73 nt, Homo sapiens
ggaaaggccaacaggccgggcacccacagaaggagaacaagcagagcaccggacacgaggagaaacagcagaa

SEQ ID NO: 200025 - RNA, 85 nt, Homo sapiens
ggagcaaggaaaagagcccggaaagaagagacacgagaggcagccaaacccccaggaggccaaagccagacccacacccacggag

SEQ ID NO: 200026 - RNA, 72 nt, Homo sapiens
gcagcaccgggcagcgagacgaaaaacacaaaggagagaggcaccaccagaccaaagagagcgagaaccaaa

SEQ ID NO: 200027 - RNA, 80 nt, Homo sapiens
ccacgcagagggcggagcggcagacagaaggacagagaagaacccagaaaaaagcaaggccgaaaaacgagagaggagga

SEQ ID NO: 200028 - RNA, 80 nt, Homo sapiens
cacggcggacaggcaccaccagcgcgccaccgcaaaaccacaccgaccaaggacaagggaagaccacaacaagcaagcag

SEQ ID NO: 200029 - RNA, 44 nt, Homo sapiens
gcaagagcgccggagagaaagaagcgggacaccaagagggagga

SEQ ID NO: 200030 - RNA, 58 nt, Homo sapiens
caacagaagagaccgccgacaaaggacaggaaacaagaagaggaagaaagccaacaac

SEQ ID NO: 200031 - RNA, 78 nt, Homo sapiens
cagcgaggcccacagaaaagccacaacccaggcccgcagcccccggaagccaaagacccccagggacccggccccagc

SEQ ID NO: 200032 - RNA, 79 nt, Homo sapiens
ccacagggaccaccgggggccccagcagaagcccagcggcaacaggagcggggggcggccagagacagaggccacagcg

SEQ ID NO: 200033 - RNA, 77 nt, Homo sapiens
cacccgccaaagacccacaggcagagccgaggagaaaccccgagggaagaaagcagagaacgggaagggccacacca

SEQ ID NO: 200034 - RNA, 61 nt, Homo sapiens
cagccgacgcccgcccccccccccccgcagccgcccggcagcaaaaccccagaagaggcga

SEQ ID NO: 200035 - RNA, 81 nt, Homo sapiens
cgccgcggcagccaccccggccgccaaaccccagcggaacccggccacagccagcagcagagaaacacgcagaacagacca

SEQ ID NO: 200036 - RNA, 83 nt, Homo sapiens
gaagaaccgagcgacagagacaagcgagcgccgcacaaaaagcagagaggaccggaggcggcaccaccgcaggacacacacag

SEQ ID NO: 200037 - RNA, 76 nt, Homo sapiens
aaagcgcaacagaaacagagagaagccagaaccagaaaagcagcgaacaagaacccacaagagagaagaaaacggg

SEQ ID NO: 200038 - RNA, 71 nt, Homo sapiens
aaagggggaaggaaacccgcggcggggcggagcaccgaggagcagggcgggcccgccaccaccggaggccc

SEQ ID NO: 200039 - RNA, 73 nt, Homo sapiens
aggccaagaccacggagagaaccccgaccccgaaaccgacagcccaggagagacagggaaggcccgcgaagaa

SEQ ID NO: 200040 - RNA, 39 nt, Homo sapiens
acccagccgggaggccaagagaggacagagacgaggcgg

SEQ ID NO: 200041 - RNA, 76 nt, Homo sapiens
caaaccagcacgggaagagagaaccgaggaacgaagaaacagacacaacagagcagaaaacgcggcagaacggagg

SEQ ID NO: 200042 - RNA, 78 nt, Homo sapiens
cggcgagggggcggccggaagggcggagcccgaacgagcggcggagaaaccaccacaaacacgaggccagcaacgacc

SEQ ID NO: 200043 - RNA, 61 nt, Homo sapiens
ccagaaccacgccacaaaccaccccccgacccgaagaacgggaccacaccacggagccagg

SEQ ID NO: 200044 - RNA, 88 nt, Homo sapiens
gacacagggagccaccccgggcgcagaggccacacccacagagaacccagacaacaggacgccgccaaggcaccccggcaaaccgcag

SEQ ID NO: 200045 - RNA, 55 nt, Homo sapiens
ggggcaaaaggcaaaggggagagaaggaagagagaagacagcagcgaacaagaag

SEQ ID NO: 200046 - RNA, 85 nt, Homo sapiens
ggaggcagcggggccgccgccgagcccgggggcacacccccagcagccccacaccccgacgaggaaaccgagccccccagaggag

SEQ ID NO: 200047 - RNA, 72 nt, Homo sapiens
gagaagggggccgcagaaagcaccggagagcagcacaccgacagagaacccaggccaacacacagacagagg

SEQ ID NO: 200048 - RNA, 55 nt, Homo sapiens
agccgccagggccacaaggggcgggacccagcaacccaggaacagacagccccgg

SEQ ID NO: 200049 - RNA, 76 nt, Homo sapiens
aacggggaggccaacggaagaaggaacaacaacgggacacccccgaaggaggccagcaccccagggccccccagcc

SEQ ID NO: 200050 - RNA, 36 nt, Homo sapiens
agaccaacgggagccccaagacgccgcccaggaaca

SEQ ID NO: 200051 - RNA, 71 nt, Homo sapiens
ccgagcaccgcgacacacaccccgaaaaagaacgaccaggacacagagcggcccaagagacaaaaagcggg

SEQ ID NO: 200052 - RNA, 76 nt, Homo sapiens
aagccccagccccggcagagggacggacacgcggacgcagcggagcccccccgccccgaaccccggcagcgcccgg

SEQ ID NO: 200053 - RNA, 67 nt, Homo sapiens
gaaaaagcagaggaaagaagacgagacaaaacgaccgcccaacacgggcgggacgcgggggaaaggc

SEQ ID NO: 200054 - RNA, 65 nt, Homo sapiens
gcgaaacccgaaggagcaaggaacagagacagacccgggggcccccaaggagagggaagaagcca

SEQ ID NO: 200055 - RNA, 79 nt, Homo sapiens
caacgcccagcggaccagggccacccgcaggcccacaaccggccaggagacgacaaggcgggcagggggagcggcgcgg

SEQ ID NO: 200056 - RNA, 70 nt, Homo sapiens
aggagacgcagaacgggcagagaccgcaggaagaagcgaagagggacaagagaaaaaaagggcgggcgaa

SEQ ID NO: 200057 - RNA, 73 nt, Homo sapiens
caaagggggaccccacgaccgcagcgcccagcgaccggcccacgacccggagaagccaccgaagggcgaacgc

SEQ ID NO: 200058 - RNA, 81 nt, Homo sapiens
cggcggggccggggagcccaggcgacagcaaggaggcggcaaaaaaaaagcgcacacacgacggaggggccacggggccgg

SEQ ID NO: 200059 - RNA, 53 nt, Homo sapiens
ggaacccccacgcggccagcgaaaacgcccaggcggagggcgaacgaacgccc

SEQ ID NO: 200060 - RNA, 71 nt, Homo sapiens
ccacccacaaagagaacgacagccagacgcaaggcgaggaggaagaacagaaaaccagaaggcaccgacag

SEQ ID NO: 200061 - RNA, 79 nt, Homo sapiens
gcaagaacgaggaggacgcggggaggcagcacggcaggagacgaggagaggacagcaggacacccggaccccaccgcgg

SEQ ID NO: 200062 - RNA, 65 nt, Homo sapiens
cccggcccccggcgccgccagcgaggcacagaggcaaggaagaccggagcacccgggacggccac

SEQ ID NO: 200063 - RNA, 73 nt, Homo sapiens
caggcgggaaggaaaaacagaacagcgcccgcgaaagcaccgaggagcaacacccccagggagcccagaccga

SEQ ID NO: 200064 - RNA, 78 nt, Homo sapiens
aagacagggaagggaagcgcagccgggggaagaaggcacagaaagcaccagaggaagaccaagacacccaggagaaag

SEQ ID NO: 200065 - RNA, 88 nt, Homo sapiens
ccggagcggagacggcaaaggcggaccgacaccacgacgacgggccacagcagccggcggcggcagaggagagaagcgcagaggccaa

SEQ ID NO: 200066 - RNA, 62 nt, Homo sapiens
cggggccacagcagagggcacgccagccaaaacggccgcggaaacgaaaacggaagacaccg

SEQ ID NO: 200067 - RNA, 63 nt, Homo sapiens
cgcccggcgccggcccgggccgccagggcaggaacaaccaaagaggaggaaaggacgagcacg

SEQ ID NO: 200068 - RNA, 68 nt, Homo sapiens
agccccgaacggggcgcccaggccgcccgacccaaagggaaaacagaaacagcggggggagaagaacg

SEQ ID NO: 200069 - RNA, 60 nt, Homo sapiens
aaacaaagaaaagagaaacaacaggcgcacagaaacagcgcgggccaggcacgacaccgc

SEQ ID NO: 200070 - RNA, 59 nt, Homo sapiens
aagaaagagaggacagagaagaagcggggggacagggagcaagaggcagacagaccgag

SEQ ID NO: 200071 - RNA, 75 nt, Homo sapiens
ccgcgccggcccagcaccccgagaaccgcaggagccagagggaacaagccacaagcccaccgacgggagaaccac

SEQ ID NO: 200072 - RNA, 81 nt, Homo sapiens
gcaacccgagaacaacggggccacacacggcaacccagcaagcaaccacgagagcacaaggacaaccaacaacccccagaa

SEQ ID NO: 200073 - RNA, 73 nt, Homo sapiens
cggccaaggccccagccacggaaagagaggacaaaccggcgaccacacacggggacgacggggaagccggaca

SEQ ID NO: 200074 - RNA, 85 nt, Homo sapiens
ggcgagccccaaaaggcacaccgggaacacccccaggggccccgccgagacgaagggcgggccaaacgcagaacgacgaaggaga

SEQ ID NO: 200075 - RNA, 83 nt, Homo sapiens
ggcggggacaggacggcggggcgagccagggaacaggcaggaaaacgacccaaaacagccaccaacgacgacccagaaagagc

SEQ ID NO: 200076 - RNA, 59 nt, Homo sapiens
cacacgacccacccaagcccacgaggcgaaaccccaaggcgcagacaccgacggagcgg

SEQ ID NO: 200077 - RNA, 81 nt, Homo sapiens
ccgccccgcgagcacagagcccgccgccgaccgccgcccgccacacccgccgccaggagcagggccgccccgaggagagcg

SEQ ID NO: 200078 - RNA, 57 nt, Homo sapiens
aggaggagggggcaaccagaggggccaacggacgacagggaggaaaaagcggccaac

SEQ ID NO: 200079 - RNA, 69 nt, Homo sapiens
gagcgaagcccagcgggccggacggggcggggggaacgaggagggaaagacaccgcagggacgccgcac

SEQ ID NO: 200080 - RNA, 69 nt, Homo sapiens
gggggcaccaaacagaggagaccggcaggaagaacacggaaaggaagacgaaaaaagaaaaggcaggcg

SEQ ID NO: 200081 - RNA, 80 nt, Homo sapiens
gcagccgcaacagccggcaagaccgcaggccccacaccacccccggacccaaaagggggaaacagccggacccacagacg

SEQ ID NO: 200082 - RNA, 80 nt, Homo sapiens
cagagcgccaagcagcaaaggagagcccgggcgcgccaggcacagccaagagcggaccggcagcggccagcgcagcggcc

SEQ ID NO: 200083 - RNA, 78 nt, Homo sapiens
gaagcaacaagagcgcaacaagagcacaggaaaagcagaggggcgaaaccaagaggaaccacccagacgagacggacc

SEQ ID NO: 200084 - RNA, 70 nt, Homo sapiens
gacccagacaaggaaagacaaccgcagcaaagggggacaggagccaggccaagagaaagaaacacagaag

SEQ ID NO: 200085 - RNA, 79 nt, Homo sapiens
cgcggcgggggaacgcggagcggacggacgacaacggggccggaccgcgcgcgcaggagcagaaccggagcgggaaaaa

SEQ ID NO: 200086 - RNA, 53 nt, Homo sapiens
cccgcggcgcgccacagggcgggcccggcaccggaaccggagaggacacagca

SEQ ID NO: 200087 - RNA, 80 nt, Homo sapiens
agaagcaccgcgacgaggcgcacagggcgggcggaggcgccagacaacgaagagaggaaagaagcggaaaggagggagca

SEQ ID NO: 200088 - RNA, 110 nt, Homo sapiens
gaaccccggaaacgacagccagacaacgagacacccgcacggacccgggcgcagggccgggagacaaggaaaacacacagaaaacaacaggggagcggaccaccaggcaa

SEQ ID NO: 200089 - RNA, 68 nt, Homo sapiens
cagccggcacccgccagccgcccacgccgggaggcagaagaagagggccacgaaaagcaagacggaac

SEQ ID NO: 200090 - RNA, 77 nt, Homo sapiens
cggcgcccggacaacccgaccgacagaacaagcgcaaaaaaagaagagcagaaacgccaacaaaaagaccaaagaag

SEQ ID NO: 200091 - RNA, 91 nt, Homo sapiens
ggagggccgcaagacccaagaagaagaaggcgaaggaccccaacggggaggccaacggaagaagccacgcaggcgcgggggacgacggcgg

SEQ ID NO: 200092 - RNA, 79 nt, Homo sapiens
gcgaagaagaagacaacaagagaccaggcgaggaagaaggagcgacaaagcaaagagaacagacccccaagagcgaccc

SEQ ID NO: 200093 - RNA, 78 nt, Homo sapiens
cagcggccaggcggcggaggagaaggacccacgaggaagcggccgcggcgaaccccagagccagcgggcagacgaaca

SEQ ID NO: 200094 - RNA, 62 nt, Homo sapiens
aaaaagggacggcagcggagcggaagcacaaagccgagcagggagaggaggaagaagcgaga

SEQ ID NO: 200095 - RNA, 68 nt, Homo sapiens
accggcaaccacaaaggacgagggcggcgcggcggcccgcccccaggaaggaacaacacccagcccac

SEQ ID NO: 200096 - RNA, 71 nt, Homo sapiens
gcccgagaaagcccgccagcagggccacgagcagggaggcaagaaccacaacaaccagccaaacgcacaaa

SEQ ID NO: 200097 - RNA, 84 nt, Homo sapiens
gaccccggaccgagcgcgagggcgccgccgccgcccgccggacccccggaccccccgaccgcaccgcacgcaccggcagaacgg

SEQ ID NO: 200098 - RNA, 69 nt, Homo sapiens
acccgcaccgccaaccacgggcgaggaggcgccgcgcagccggagcaggaagcgcacacgccaaaggag

SEQ ID NO: 200099 - RNA, 90 nt, Homo sapiens
gcgggggacaggcgcccaggaggacaacagcaaacagcaccaaccacgacaaacaagaaccacccacgaacacagaagaaagaaggaaaa

SEQ ID NO: 200100 - RNA, 76 nt, Homo sapiens
gagaccggagcagccggggcggagcgggggaacggcgagggaacccaggaaggagggcgacaaacaccagccggca

SEQ ID NO: 200101 - RNA, 73 nt, Homo sapiens
accgaaagaagaaagcaccacggaggacgggcaggcagcgaacaagaccgccccaccaaacagggaaaacaca

SEQ ID NO: 200102 - RNA, 74 nt, Homo sapiens
gccaccgccgcagcggcgcagcccacgccagacgaccccacccgcgccgcgacccgagaagagcaaccacagga

SEQ ID NO: 200103 - RNA, 77 nt, Homo sapiens
ggggcgccggcagaggaccaggcaccaccggccccggaaggccgggcgaggcgaggccacccgggccgccggcggcc

SEQ ID NO: 200104 - RNA, 83 nt, Homo sapiens
cgacagacgggcacaggaaggcgccgggcccccccggaaaaagaaccaagagggagacaagggaaaaggaagacaaaaaacac

SEQ ID NO: 200105 - RNA, 74 nt, Homo sapiens
cagccagaccagcaagcagacaccccccccgagaagaccggagacccgaaagaggaagagcgccgcaacccaaa

SEQ ID NO: 200106 - RNA, 84 nt, Homo sapiens
ccgcacgacgcgccccgcccccgcgcgacgggacccggaaacggaaccggagccaaggccgccggacaaaaggaagaggagaaa

SEQ ID NO: 200107 - RNA, 89 nt, Homo sapiens
gccaccccccccaaacccgggagacccgccgaaccgggagccggaccgggaccaggaccgggccccacccagcagaaacagaaacgcag

SEQ ID NO: 200108 - RNA, 78 nt, Homo sapiens
gacacacacacgcccacggcaagagaaacaagcagggccacagaagaagagacgcagaacgggagggccacagcaaga

SEQ ID NO: 200109 - RNA, 87 nt, Homo sapiens
cggcgaagaaagaagggggagcggagagcgcaggcgggccaggcagagcagcccaccagggaggggagggggggaggcgcaccccgc

SEQ ID NO: 200110 - RNA, 62 nt, Homo sapiens
acaccgccggaggggaccagcagccgaggccgccggagccccagacaccccccacacaccac

SEQ ID NO: 200111 - RNA, 82 nt, Homo sapiens
caggcggcgacacgccaaccccgagaaggacaagggcaggacacgaaggagagcagagacgcagggaggacaccaggacccc

SEQ ID NO: 200112 - RNA, 67 nt, Homo sapiens
gaggcgaagaaagaccacgcccaggaggcaagagcgagaagagcgcaagacagaaagcgaaagccca

SEQ ID NO: 200113 - RNA, 61 nt, Homo sapiens
gaaacacaagcacccagcagcaccgacaggggacgcagacacgagcagggcgacaccagcc

SEQ ID NO: 200114 - RNA, 60 nt, Homo sapiens
cgcccaccaggaggggcccaggacagggcagaccgccagcagcacagcaagccacagaga

SEQ ID NO: 200115 - RNA, 81 nt, Homo sapiens
accacagccaagagccgggaccccagaagccagaaagacaagcagaccggaagaccgacggaagaccacaccccgagggag

SEQ ID NO: 200116 - RNA, 73 nt, Homo sapiens
aaaacagacagaacagaacccaaaagccgacaaccccagaaacaggagcgcaagagcgcccagaagaaaagaa

SEQ ID NO: 200117 - RNA, 75 nt, Homo sapiens
gggcagggacagcgcaggcagcaggccaggaaaggcgaacaccccaggccgcgaggcccccgagccagcaagcag

SEQ ID NO: 200118 - RNA, 38 nt, Homo sapiens
ccaacccacgccgaaagggggacagaggagccaaaggc

SEQ ID NO: 200119 - RNA, 67 nt, Homo sapiens
gaagacccaggcacgggacggacaaggcaacacccgaagaaacaagcacaggacgcaaggaccaaaa

SEQ ID NO: 200120 - RNA, 51 nt, Homo sapiens
gggcgggggaggccgggggcgcgccaggccggccggcccggacaggcagaa

SEQ ID NO: 200121 - RNA, 61 nt, Homo sapiens
cgcaaggggacagagaccggcagcggaacccaggaccacaagagcgggacaaagaaggaca

SEQ ID NO: 200122 - RNA, 61 nt, Homo sapiens
accgcaacccagcgagagaaagagagcgccgccgcggcccccgggagacgacccccaaaaa

SEQ ID NO: 200123 - RNA, 61 nt, Homo sapiens
aagagagaaaccaggagagcaaagaagaacggcaggaacagacaggcggaacgcgacaaac

SEQ ID NO: 200124 - RNA, 73 nt, Homo sapiens
ggccaaaagaaagggaagaaagagggccacggacagaggcgcagcagaggaaccgcagaagaacgccgaccca

SEQ ID NO: 200125 - RNA, 61 nt, Homo sapiens
ggcggcccaccggggaccgaggccgggggcgccccgggagacgcggcccagggaggagcgg

SEQ ID NO: 200126 - RNA, 78 nt, Homo sapiens
ccccccggccggcagggggacgggggccaacggccgagcgaccaggagaggagcccccgcccgaagaccggggagggc

SEQ ID NO: 200127 - RNA, 40 nt, Homo sapiens
accggagcgcgcagcagaagcccaccagaggcgaggggag

SEQ ID NO: 200128 - RNA, 72 nt, Homo sapiens
ggcaacccacacaagcgaaggcgcgcaccggaagcaccagcgaggaagggccaggcccggggccggacccaa

SEQ ID NO: 200129 - RNA, 56 nt, Homo sapiens
cccacgagcacagagggccccagagggcaggcaccggcccgaccagccacgacacc

SEQ ID NO: 200130 - RNA, 74 nt, Homo sapiens
agaggcaccacagcagcgggaggaaaccggagcgaaacagagggaggaccaagccacagggggcccaagcccac

SEQ ID NO: 200131 - RNA, 75 nt, Homo sapiens
ccgacagccgcgacggcgagcccgggccgcgcccgaggaaccgcaaaggcgaacaaagagaaaagagagagcgag

SEQ ID NO: 200132 - RNA, 68 nt, Homo sapiens
gcccgcccccagaaaccagggagaaaacgggccggaggaaaagggcggcaggggaccaccacacaaac

SEQ ID NO: 200133 - RNA, 79 nt, Homo sapiens
acacgacaagacgaccgggaaagccagggaggccgcgaaggggacaccagaaaacagaaaacagaaaaagaagcacggg

SEQ ID NO: 200134 - RNA, 70 nt, Homo sapiens
acagcagcggggaaaaacaagagagccagagcacagagcaccacgaacaaacagaaagcgcgaagagggg

SEQ ID NO: 200135 - RNA, 76 nt, Homo sapiens
gcagagggccaaagaagaccgacaccgcgagccgaagagagaaacccccaaagaagagccccccaaagcacaagga

SEQ ID NO: 200136 - RNA, 68 nt, Homo sapiens
aaggaccaagaaccagccagcgggaagaaagaagcacaacaggcacaacgcaacaaaaacccggacaa

SEQ ID NO: 200137 - RNA, 81 nt, Homo sapiens
ccggccagcggccagagcgagcagagcccagaccccacagccagccgagggcgagaagcacagaaacccgcagacacccca

SEQ ID NO: 200138 - RNA, 69 nt, Homo sapiens
agcgcagaagaaagacgcaagacaacgaagagaggaaagaagcggaaaggagggagcacacaacaagga

SEQ ID NO: 200139 - RNA, 76 nt, Homo sapiens
gcggggcgaaggggaggcgccgcggacgcccgggccacccccccgcgccgccggcacgcggggaagacacacaaaa

SEQ ID NO: 200140 - RNA, 53 nt, Homo sapiens
accccaaccccccgaacccccagaggggcagagacaagaagcacaacaaccaa

SEQ ID NO: 200141 - RNA, 56 nt, Homo sapiens
ggcgaccgagaggcgcggagccggggacgcgcacggagcaggggaccgggaaaggc

SEQ ID NO: 200142 - RNA, 66 nt, Homo sapiens
aaaggagggaagccagaggccaaaggcaggagaacacagcgccgaggccaccacagaagaaacgac

SEQ ID NO: 200143 - RNA, 81 nt, Homo sapiens
cgggaccccggaagccaaaaaggaaagaccacagcaagaccacgcccccagccgggggaccaggccgaacgacccggacac

SEQ ID NO: 200144 - RNA, 85 nt, Homo sapiens
aaacccggcccgcccgggcaccggggagcacagggagcaagcagacaagaagaccagaggccacaggggccaaaccgagcgccgc

SEQ ID NO: 200145 - RNA, 74 nt, Homo sapiens
gaacaccaaggccaaaaacacagcaacccagcacgaacaagcagccaccaagaaaacaccagaaagaaacgaac

SEQ ID NO: 200146 - RNA, 71 nt, Homo sapiens
gcagaagacgaggacacgcagccggccgaggaccccccagaaaggagaaacagaaagccacaccccaaggc

SEQ ID NO: 200147 - RNA, 75 nt, Homo sapiens
gcaagagcaacaccccaccccaaggaagaacgaagcgcgcagaaaacacagaaggcaaaagcgcaaaaacaaaac

SEQ ID NO: 200148 - RNA, 72 nt, Homo sapiens
ggacagccgacccgggcccaccccagcggccgacggaggcagaacaaccgggagggcggagcaggggagcga

SEQ ID NO: 200149 - RNA, 75 nt, Homo sapiens
aaacgcaagccagacacgcgagaaaagaagcgggcaaaggaaggcaaaagacacgcaagaaggcacagaacacag

SEQ ID NO: 200150 - RNA, 57 nt, Homo sapiens
agagacacgccaagcagccagcccaggagaggcgagaacgcggacaagcaaacaaag

SEQ ID NO: 200151 - RNA, 80 nt, Homo sapiens
aggaccgggccggggaacagggcggaagggcaagaaagaaggaaagcccaagagggagcgcccgacacgcccacgaacga

SEQ ID NO: 200152 - RNA, 73 nt, Homo sapiens
ccacagagggagggccagcaaaacacccaggaaaaagagcgagacagaaacagacgagaccggaaaggcacgc

SEQ ID NO: 200153 - RNA, 82 nt, Homo sapiens
gaaagaacgagagaagcagcggggagagacaagcagcccagcggcccccggaccgacaccagacccccgccggcgaggggcg

SEQ ID NO: 200154 - RNA, 57 nt, Homo sapiens
gggggccgcagcgagccccggcagccgccgcgccaggcggagccaagcgcgacggac

SEQ ID NO: 200155 - RNA, 79 nt, Homo sapiens
ggaagacaagccaggccagacgacgccggccacccagaagccggagcacaaggcgggaggaaccaggaaccagggggga

SEQ ID NO: 200156 - RNA, 73 nt, Homo sapiens
acaaacggaccagcgaccgggcaggaggagaacaccaaacagaggaacaggcggacagccaaggagacaaaga

SEQ ID NO: 200157 - RNA, 63 nt, Homo sapiens
cagagacggcggagaccccgaaggcgcaaacgacaccacccgaccgacccccagggcagccag

SEQ ID NO: 200158 - RNA, 75 nt, Homo sapiens
gcacggacacaagaggaagcggaaaccagggccacagcacgcagccccaggcagacggaagacggcagcgggggg

SEQ ID NO: 200159 - RNA, 85 nt, Homo sapiens
cagagacacccgacggggaagcaccgggaaaacgcagaggaacgagggggagccacgaggagaaggccacgcgggcgccccacac

SEQ ID NO: 200160 - RNA, 106 nt, Homo sapiens
ccacagccggaccgcacccgcaccgccaaccacgggcgaggaggcgccgcgcaggagcccccaggacaggcacacccgggaaaaccgaacacccagcccagacaca

SEQ ID NO: 200161 - RNA, 72 nt, Homo sapiens
acgagaacaggcgaagaaagaaggaaacagccaaagggaagaggaggagagaagagaggaagcgagcagcac

SEQ ID NO: 200162 - RNA, 75 nt, Homo sapiens
acacgggaaaaggagaaggcaagacagcgccagggacaagaacagcaaagcagcccgaggaggcacgcaaaacaa

SEQ ID NO: 200163 - RNA, 47 nt, Homo sapiens
gccaagcggcccagccccggccggggagaccgaaggagcagacgagg

SEQ ID NO: 200164 - RNA, 56 nt, Homo sapiens
cccgggaacggacggaggggcccgggcgagggccccggccgcggagccacagggac

SEQ ID NO: 200165 - RNA, 68 nt, Homo sapiens
gggccccgagggaggagaaagacccgcacaaacaagcagggagaccacgagcaaggcaaaacccgagg

SEQ ID NO: 200166 - RNA, 78 nt, Homo sapiens
agggaaaaccccacaaaaccagaggaagagaaaggcaggaacacacggacagagcgcaccgcccccgggaacacccac

SEQ ID NO: 200167 - RNA, 44 nt, Homo sapiens
gcgaaaacaggggaggaacggcgggaaaacggcacaaggcgacg

SEQ ID NO: 200168 - RNA, 74 nt, Homo sapiens
acgcacgaaaccggcaagccagcggaggggaggcccaaaacgacagacgcgaaaggggacgacgaagaggaaca

SEQ ID NO: 200169 - RNA, 78 nt, Homo sapiens
gcagaccaaccagaacccaggagaggaaaaaacccagaaaggcaaaggggaaaaagacgaggaggggaaaaggaccag

SEQ ID NO: 200170 - RNA, 72 nt, Homo sapiens
gcccagcagccgccaccgagaggagcacaaggggccaggcggaagggggcggccacgaccaagaagaagccg

SEQ ID NO: 200171 - RNA, 75 nt, Homo sapiens
ccaagagggacccacccggcgaacccaggagaaacgagagggacagcaaggaagacgccagagagcggcacaccg

SEQ ID NO: 200172 - RNA, 52 nt, Homo sapiens
gaaggaccaagaaccaggggagagcccggaaaaccaaaagggacaaagggga

SEQ ID NO: 200173 - RNA, 71 nt, Homo sapiens
ggaagaagccccagcaagaaagcagaagagcgccagcacacacaagcaccgccgccacccggcgcgagggg

SEQ ID NO: 200174 - RNA, 64 nt, Homo sapiens
cacgcccaggccgcagaagccgaacaaccccagaaccccacggcaggggaacagaggagcagcg

SEQ ID NO: 200175 - RNA, 45 nt, Homo sapiens
gccaccaagcccacgacccgcccacagaagaagaagcaccaaagg

SEQ ID NO: 200176 - RNA, 62 nt, Homo sapiens
ggaggcggaggcgaaagcggaacgaggcgagagcggccgggccgcagaccagcgggcgcaga

SEQ ID NO: 200177 - RNA, 78 nt, Homo sapiens
ccgcccgcccgggacccgcggccccgccgcgacacaggacagggggaagcccccaagacaccaaaggcagggaagaag

SEQ ID NO: 200178 - RNA, 57 nt, Homo sapiens
aaaccagccagagcggaggagaaggacgggccccgagccccggccccaaagacccaa

SEQ ID NO: 200179 - RNA, 79 nt, Homo sapiens
cggggccgccaggcccgggcgcagccgcgcgacgccgagcgcgccgcgagaccccgccccccaggccacagccaggcgg

SEQ ID NO: 200180 - RNA, 69 nt, Homo sapiens
gcccgaggaaacaggcacacggagcagacagaccggacaagcggagaaagaagacccggagaagagggc

SEQ ID NO: 200181 - RNA, 56 nt, Homo sapiens
gcacgcaaccacgggcccccgcgcgcaggaagccaagaggggcaacaagacaccag

SEQ ID NO: 200182 - RNA, 85 nt, Homo sapiens
gaaggaggagacgaagaaaggaggaagaagaccaaaggacaaaaaagacggagagagaacaggccaacgggagcagggcaagaag

SEQ ID NO: 200183 - RNA, 69 nt, Homo sapiens
agaggagccaaagcaggaggacaagcgccggcacgcgaccgaacgcaaagggaacgcaagaagagagcc

SEQ ID NO: 200184 - RNA, 83 nt, Homo sapiens
gaccgaccaaggagggaggggagacaggcagcacaagcaggcagaaaaaaacgccaagaagccaaaaggcagccggaaggaaa

SEQ ID NO: 200185 - RNA, 73 nt, Homo sapiens
ggcgggggagcccaccgcggaccggaaaaccgaggagaggagaaggaggaaggaccaggacacaaggaaaaca

SEQ ID NO: 200186 - RNA, 58 nt, Homo sapiens
caagcagcagcacgcgaaagcagcagcggcgaaaaaggagaagggagaagcacacacc

SEQ ID NO: 200187 - RNA, 80 nt, Homo sapiens
aaagggacggacaaaggaacaggaccagagagcaccagccaggacgcccacccggcccgcagacaagacgaaccgaaaca

SEQ ID NO: 200188 - RNA, 77 nt, Homo sapiens
cggacgacgccgggcgcccagccaaacaacccgagcccagccagcccgggaaggggaacggcgagggaacccaggaa

SEQ ID NO: 200189 - RNA, 82 nt, Homo sapiens
gcccagaagcacagccccgaaggcaccaggggccacaacacggacaccagccgaaagccggaaagcggccggagacagacca

SEQ ID NO: 200190 - RNA, 53 nt, Homo sapiens
gcaccgccccccgcccagacaccagcgcagcccggacgaggggcaggaccggg

SEQ ID NO: 200191 - RNA, 83 nt, Homo sapiens
cacagcaccccgaggcccgacccagaagccacggccccggagccgggcgaacaaacaaggcggggaacgcaagaagcagcaca

SEQ ID NO: 200192 - RNA, 85 nt, Homo sapiens
agggccaacaaaggaacaccaagcggaaaagagcagcgcccagccccagcagggggaggaaaaaggcaacagcaaggagaagacc

SEQ ID NO: 200193 - RNA, 83 nt, Homo sapiens
gcggcgcgcccgacggggcggccgggggccagagaccaaggcgcgcccggcgggccggaccaaggggaaaggcagggccccga

SEQ ID NO: 200194 - RNA, 81 nt, Homo sapiens
gaaccaaaggggaaagcaaggccaaagacagggagaaggacacgaggaggggacggcccgccacaggcacagacgaggagg

SEQ ID NO: 200195 - RNA, 69 nt, Homo sapiens
gccacagccgccccaagcacaagaacccgagcgaccaggcgggacgacaggcggaagcagggcgcgacc

SEQ ID NO: 200196 - RNA, 75 nt, Homo sapiens
gagaagaagcaaaaagagaggagaagcgcacgccccgagccaagaaccgccggcgcagcaccaccaaccggaagc

SEQ ID NO: 200197 - RNA, 73 nt, Homo sapiens
aagaaaacgaacaagaacaagccagaacagccccagcagacaaaccagacgccgcagaaagccgcaacaccga

SEQ ID NO: 200198 - RNA, 81 nt, Homo sapiens
gcaaccaggcgaagaacaaccgcaggcgaagcggaagagaccgcggccaggagccaagaagaccagaccgcgggaggagcc

SEQ ID NO: 200199 - RNA, 73 nt, Homo sapiens
gaggcccaaggcccagcccccggaagaccagccccgcccagcagagggcagagacaagcggaggcaaggggac

SEQ ID NO: 200200 - RNA, 50 nt, Homo sapiens
gagcagagcaacgccccgccccggcgcaggaacacaggacggccgaacac

SEQ ID NO: 200201 - RNA, 67 nt, Homo sapiens
agcccgcgcccgccgcgggagagaggacccccccccccccccaaggcacggggccaaaaaggcacga

SEQ ID NO: 200202 - RNA, 77 nt, Homo sapiens
aaaaaccggagaagagaaacaaaaggacagagaaaaggcccaggcaaaggcgggccaacacgcgggggacagacagc

SEQ ID NO: 200203 - RNA, 36 nt, Homo sapiens
ggcaagaacggcccgggagaaccggggcaagagacg

SEQ ID NO: 200204 - RNA, 78 nt, Homo sapiens
ggacaacccccacagaagggagacagggagaccaccaaaaagccaaggagaaggccaagacaagaacccagaaaggcc

SEQ ID NO: 200205 - RNA, 78 nt, Homo sapiens
aaacgcacaacaagacccaaggacaagcgccacccgggaaagaccaggacgcagggagcgagccacacaagacacggc

SEQ ID NO: 200206 - RNA, 77 nt, Homo sapiens
ggggcagaccaaacggcaagacaagggaggcgaggacggacaaaaggaaacggacgggaggccagccagcagaagga

SEQ ID NO: 200207 - RNA, 78 nt, Homo sapiens
cgcgagcgaggcggagaagggacacggcaggcgccaggccggaagcgagaggaaaagccagcaacggcaaaggggaag

SEQ ID NO: 200208 - RNA, 98 nt, Homo sapiens
cgggagcaggcggaaggggaccacggaaagcggcgcgcagggccccacccaaccagaagccggaacaaccggagaaaaagccgcagcgacccgcagca

SEQ ID NO: 200209 - RNA, 90 nt, Homo sapiens
agccgcccagcgccgccgcgcccggccaagagccaggccccggggccccagcggcaccagcggagaccacgggagccgcgccggagccag

SEQ ID NO: 200210 - RNA, 73 nt, Homo sapiens
cacccgagcagccagagcggaccggggcagaccaaacggcaaggaacgaccagcgcggagcggagcggcccac

SEQ ID NO: 200211 - RNA, 68 nt, Homo sapiens
gacgacgcaccgcaggcagacaaaagggccaaagaagggagagagggcagcggaacgcgccgacgccg

SEQ ID NO: 200212 - RNA, 58 nt, Homo sapiens
cgcccgccaccgacacacgccacccaaacagagccaggccgagacaaagaagcggaca

SEQ ID NO: 200213 - RNA, 58 nt, Homo sapiens
gagaagggacacggcaggcgccagagccacgccgccaggagcccgaacacagccacgc

SEQ ID NO: 200214 - RNA, 74 nt, Homo sapiens
cggcagagcaggccgcggcgacccagcgagagcgaagaaggaagaagcaaccaggccggaacagcaagcaccaa

SEQ ID NO: 200215 - RNA, 78 nt, Homo sapiens
agaggaggagcggcaggggcggagagcaaagaccaggggacgaaggccgcagacgaaggggaaagggaagcaagagcc

SEQ ID NO: 200216 - RNA, 69 nt, Homo sapiens
aaggaccaagaaccagacaggagacacgcagcgccagaagagaggcccacccagggagaagcaggaggg

SEQ ID NO: 200217 - RNA, 81 nt, Homo sapiens
gcacacacaaaacgcccggggggaagaggaacagccaggggcccacggaggaccccccagggggcccgagcccaccccagg

SEQ ID NO: 200218 - RNA, 79 nt, Homo sapiens
ggacgcgcaggcgcgagggggggccgaagaagccagggggaggaaagcagacagacccaccaagagggcgggagaacca

SEQ ID NO: 200219 - RNA, 36 nt, Homo sapiens
ggacgaggaagagaacgagaggagcaaacagggaac

SEQ ID NO: 200220 - RNA, 77 nt, Homo sapiens
cccgggaggccgaaggcaggacaccgaggggaaaggagcgacagggggcagcacgccgaaggagagaccagacaaca

SEQ ID NO: 200221 - RNA, 47 nt, Homo sapiens
agacgaacaaaccgaagcaggccaccggcacaagaagaaaagaaagg

SEQ ID NO: 200222 - RNA, 71 nt, Homo sapiens
caaacaagagaccccagcaaaacaaaggagaccacagggggggagacagcgacaaccaggacccaagagag

SEQ ID NO: 200223 - RNA, 59 nt, Homo sapiens
cgacagaagcaccgagacccaagaaagagccgaaaccagcgaaacaaaacaaagagcag

SEQ ID NO: 200224 - RNA, 82 nt, Homo sapiens
agggaaacccacgccgcagcagccaggacacacagcaggagaacgcggagcacagcggagccccaccccaaacagccagcca

SEQ ID NO: 200225 - RNA, 55 nt, Homo sapiens
aaaagcccaaaaaaaaagacggcaccacgaacagcacgcacggaggggcagcaca

SEQ ID NO: 200226 - RNA, 75 nt, Homo sapiens
aagaagcaaccaaggggaacagacaagagggacacaggcgaaacagagaggaagacaagccaagcgaggagacgg

SEQ ID NO: 200227 - RNA, 57 nt, Homo sapiens
cgaccccgaggcagggacaaccagagggaaaaaacaaaggcagcacggccgagacag

SEQ ID NO: 200228 - RNA, 75 nt, Homo sapiens
aggcgacccccaccgagacgaagcgggcggcgaagagagccaccaaagaagaccagacaggggaaggagagacag

SEQ ID NO: 200229 - RNA, 75 nt, Homo sapiens
gacgaaaaaagggcaagaagccagaagaccagaggaacccgagcaggaacaccccagcccgggccacaggaagga

SEQ ID NO: 200230 - RNA, 66 nt, Homo sapiens
ccagaccacagccgaaacaaccaacgacaacaaggcagaaggccagagccagaggccacgcgaccg

SEQ ID NO: 200231 - RNA, 81 nt, Homo sapiens
aaacaaaaccaagacaacaacgaagacaaggagccagacacccgcaaaagagagacgcagaaggaccaccgggcaaagccc

SEQ ID NO: 200232 - RNA, 80 nt, Homo sapiens
caaggaggaagaaaaagacccaaacaagcaaagccgaagaggagagcaaacaagggagcacaggacaggaccaccagcca

SEQ ID NO: 200233 - RNA, 39 nt, Homo sapiens
aacacgacaggagggcaagaccgccacggacaagcccag

SEQ ID NO: 200234 - RNA, 74 nt, Homo sapiens
gaaggaagaccagagaacagccgggaagccaaaccagcaagcagcgcgacaggaaaggaagaaaagaagcgcaa

SEQ ID NO: 200235 - RNA, 83 nt, Homo sapiens
ccggaggcgccggcggggcgccgcggaccaacagcccagcgcaccccccggaggcggccgagcccacgcgacgaagaacagga

SEQ ID NO: 200236 - RNA, 63 nt, Homo sapiens
cgcaggacgggcgcaccggccaaacaggcagcgggaaaacccggagcacgccaccacaagggc

SEQ ID NO: 200237 - RNA, 71 nt, Homo sapiens
ccggacaccgggagagacaaaggggcaagaccaggaaaagagcacgggccaggacccagaggacacgcggg

SEQ ID NO: 200238 - RNA, 78 nt, Homo sapiens
gcagagaggagaacaagagagagaggaaagaaagaagagaagcagaacaaccccaggggggagccacacaacgcaaaa

SEQ ID NO: 200239 - RNA, 55 nt, Homo sapiens
cagagagccaccagaaaagaaaaacccccaacccagcacagacacgagagcacag

SEQ ID NO: 200240 - RNA, 77 nt, Homo sapiens
gaagaggaaggagcgggcccaagaaaagcagaccacccacgaacacgggcccgccaaccccagaccccggcagcacc

SEQ ID NO: 200241 - RNA, 81 nt, Homo sapiens
cgggcccgacaggagcgcacaagcgcggacaaggacccgaccgccgcgcgggggccaacaagcagagaaaccaggcgggga

SEQ ID NO: 200242 - RNA, 73 nt, Homo sapiens
aagacgagaggcgaagcaaggacgaacggaaaacagccccaaagcagcagaccgaagaaagaagacccgcaac

SEQ ID NO: 200243 - RNA, 68 nt, Homo sapiens
aagacacacaacccaacagagcgcgaggagggaaacgcgagggcaccagaacagccagcaaagacaag

SEQ ID NO: 200244 - RNA, 74 nt, Homo sapiens
gccaggagcagagcgacagcggcgagcagaacacggcgagcggccaaccaggaaaccgccagacggccgcacca

SEQ ID NO: 200245 - RNA, 77 nt, Homo sapiens
aggcagcgaaaggacacgggagaaagggagccgagcgagaccacgcaccacgggcgaccaacaagagacgagaaaac

SEQ ID NO: 200246 - RNA, 78 nt, Homo sapiens
agagggggccgccgcggcagcaagaacagagagagaggggacagacgagagaacgaggccaccgggccccgacacgca

SEQ ID NO: 200247 - RNA, 82 nt, Homo sapiens
gcaggccacgaccaccgcacacccgacacagcggagcgcccagaggcgagcccggggaggaagagagccgcccccaggaccg

SEQ ID NO: 200248 - RNA, 80 nt, Homo sapiens
ggcaccggaccaggaccaggaaggcaagcgggaaggccgcccgccccccaagaaaggccagccgaagaaaagcgaaaggg

SEQ ID NO: 200249 - RNA, 76 nt, Homo sapiens
aagcagcaggagcgccgcccacgcggagcaacaagggccaggggaagaaggaagaagaacaggaagaaggaaagac

SEQ ID NO: 200250 - RNA, 72 nt, Homo sapiens
cgacgccaaaagcagaaagaggcaggcaccccccaggaggagacgcccaggccacacaaagaccccccgcca

SEQ ID NO: 200251 - RNA, 77 nt, Homo sapiens
gggccggagcaggcgaaggagaaagggagccacggggaaaggacaaccccacagggagaaccggagacaaagcagga

SEQ ID NO: 200252 - RNA, 73 nt, Homo sapiens
ggccagaaaccacccaggccagagaggaccgagaggacccaaagacaggaccacgcaccagcagagaaggaaa

SEQ ID NO: 200253 - RNA, 60 nt, Homo sapiens
ccgcgcaggagcccccggagcggagaagcaggaaggaaaaaaaccagaagaggaccagca

SEQ ID NO: 200254 - RNA, 81 nt, Homo sapiens
cggggccggacagccgcgcgcgagggccggggcgggcgccgcgggacccccgggccagggggccagaagagaccaagagga

SEQ ID NO: 200255 - RNA, 79 nt, Homo sapiens
gggggacgagcagcagcggccccaacacccccgaagggagccacgccccaggggagccaacgccagcagccgcaccagg

SEQ ID NO: 200256 - RNA, 87 nt, Homo sapiens
ccgcccaccaggacaagcgcggcagacagcaagacggccaggcgggcagggcgggcagcggccgagccagcggacgccacccggagg

SEQ ID NO: 200257 - RNA, 82 nt, Homo sapiens
gggggacgagccggagcagcagccaggaaggccaccagagacaggaagaaaagaggggcaaaggcgacacgggacgcacggg

SEQ ID NO: 200258 - RNA, 79 nt, Homo sapiens
ggcccggcagagccgcaccgcgccgcgcggcgcgggcacggagcaggcgccgccggcgccaaagcgcgggcccaggcgg

SEQ ID NO: 200259 - RNA, 82 nt, Homo sapiens
cgccgcagcccagccagccgccaagaacgcagcagcagccgccaagacggagacagcacgcccgaagagaccggcacggcac

SEQ ID NO: 200260 - RNA, 83 nt, Homo sapiens
gagcggagccggcgccgggcccgggccaggcggggggagcggacccgacaagccaggaaaacaaagagggaaaacggagaaaa

SEQ ID NO: 200261 - RNA, 72 nt, Homo sapiens
gggcgcagcacccacaagcaggaggaggagcacagccccgagcggaagagaggccaacccacccgccaccgc

SEQ ID NO: 200262 - RNA, 56 nt, Homo sapiens
cgggacaaaaagccaaagacagagccgcgcacccagccggggcagggcaagccacc

SEQ ID NO: 200263 - RNA, 78 nt, Homo sapiens
gaccccaccgagcccaaggaaacacacgcaaaccaggaagaaacgggaacggagcaaacacagcggaagacgcccgcc

SEQ ID NO: 200264 - RNA, 85 nt, Homo sapiens
gagagaggagggggccggccgggacgcggcccggagccgggaccggcaagaacggaagcacgggcggaggaaagcacaagcagag

SEQ ID NO: 200265 - RNA, 79 nt, Homo sapiens
cagaccgccgacgacgcaagcagcgggaggagcaacgagggagcaacaacaaggagcaagcacagcgcgagccagcccg

SEQ ID NO: 200266 - RNA, 73 nt, Homo sapiens
agacgggcggagaggagaagagagcgaccaaacccccacaacaaggacaaagggacccaaggaccagcagcac

SEQ ID NO: 200267 - RNA, 67 nt, Homo sapiens
gcaaaaccaacagaaaccagaagaccacaaacaacagaccccaaaggagcccgagaacaccccagac

SEQ ID NO: 200268 - RNA, 58 nt, Homo sapiens
gcccaaagaccagcccaggggacccaccacacagaggacacaagaaccacacgagcca

SEQ ID NO: 200269 - RNA, 65 nt, Homo sapiens
ggggaacaaggagagagggagcggcacagaggaaaccccccaggcaagaggcgcaggaccgggaa

SEQ ID NO: 200270 - RNA, 87 nt, Homo sapiens
ggagacggcgagacgcgcagcgccggcgcccgggagacccaggaggagcccgcagaccacaggagcagcaacccagccccggaacca

SEQ ID NO: 200271 - RNA, 82 nt, Homo sapiens
ggaggagcggaagagacgacgaggacgccagacccacggaaagcagccagcagcacccagacggaaagcacaaaccacaaaa

SEQ ID NO: 200272 - RNA, 83 nt, Homo sapiens
ggccggcaggcggccgagggaaagggaggcagcgagccgaaacgagcaagaaacacgagcaagaagccaaaccgacccagagg

SEQ ID NO: 200273 - RNA, 65 nt, Homo sapiens
agcacaccagaaaagacacgcagacagaacaacaagagagaaccagggggaaggccccgggcagc

SEQ ID NO: 200274 - RNA, 77 nt, Homo sapiens
gccccgccgggggagacgacccccgccaggaaggagggccccggagcagccacaccaccgaggccccacccagcacg

SEQ ID NO: 200275 - RNA, 78 nt, Homo sapiens
cccacccggcccggccgaccccggcggcccgcccgcccccccccaggaggggcggccgcccagggccgcccaacgcag

SEQ ID NO: 200276 - RNA, 80 nt, Homo sapiens
cggacgcccgcagcagaacccccagcccccacccacaggagagcgaaggcggagcgccgcggcgccgccggagacgccgg

SEQ ID NO: 200277 - RNA, 68 nt, Homo sapiens
agaagaaaccggcggccaaaaaaaaaaaaggaagcacaccaaggggagagaccccagaagaccggagg

SEQ ID NO: 200278 - RNA, 80 nt, Homo sapiens
aagagagaaggcccagcgaaaaagacacccaagccagcccgaggaaagaaccgaaaaacacggacccaaaaaagcagaag

SEQ ID NO: 200279 - RNA, 71 nt, Homo sapiens
acggcacagcgccacaggaaaccgaaagcaaaccccacgagaacaaagcacggcagaaacggaaaaaaacc

SEQ ID NO: 200280 - RNA, 73 nt, Homo sapiens
aagaacagaagaaaagacaaaaagggagaaaaggacagccccccaggcaggacagaaacggaggaacgcgaga

SEQ ID NO: 200281 - RNA, 114 nt, Homo sapiens
cgacacaccgcacccacacgggcgagaagcccacgaggcaacacgcaaggccgccaccagccccaggcgggggaggaggaggggacgaggcagaaacgcacgaagccggaagaa

SEQ ID NO: 200282 - RNA, 69 nt, Homo sapiens
gaaacggaggagcccgccgaagcagggaggaccaggcgcagagccgaagaagacgaaagcaaaggggag

SEQ ID NO: 200283 - RNA, 76 nt, Homo sapiens
gacggagggccgcgccacaagcagcaggccaagagcaaaggcagcgcgagggcggggggccaagcccccagccccg

SEQ ID NO: 200284 - RNA, 87 nt, Homo sapiens
cgcggggacccggagggagcccggcggccggggacaccacaccgcccaccgggaacagggcaacacacaagcccaacaacaaggcca

SEQ ID NO: 200285 - RNA, 71 nt, Homo sapiens
ggacagaagcaccacggagacaggaccgccccgcaggaaagaaaggggagacccagcagacagcgccccga

SEQ ID NO: 200286 - RNA, 80 nt, Homo sapiens
ccaagagaggcaggcagcgacagccacacaacggacaggcagaagcaacaaaacccaccgcagagaggaaagggaaagaa

SEQ ID NO: 200287 - RNA, 76 nt, Homo sapiens
gcccaccgccaagacacagaggacaagaaaagcgaaccccagcacgccgcagcaccggagagcagaaacagaacca

SEQ ID NO: 200288 - RNA, 67 nt, Homo sapiens
cccaccccccgaacccagccgcaccggagaggaagacgaggaagcagaagaacaccaagcccaccaa

SEQ ID NO: 200289 - RNA, 71 nt, Homo sapiens
gcagggaacaggcggagcggaagggccgaccaagcagaacccgagaagagccgagaaacacccgacaaagc

SEQ ID NO: 200290 - RNA, 78 nt, Homo sapiens
cagcacccgcagggggcagggggggagggaagaaaacgccagagaagcagagcagcccggagcgaggggagaccgggg

SEQ ID NO: 200291 - RNA, 68 nt, Homo sapiens
acacacacggcgcaccccccgagacccccggacccggccgcccagaagaagcggaacaccccagcccc

SEQ ID NO: 200292 - RNA, 83 nt, Homo sapiens
ggcggacaacgagaaacggacaaccaacggccaagaacaagaacaaaggccgcgacggagcgcaccaagcccgaggaaacaaa

SEQ ID NO: 200293 - RNA, 71 nt, Homo sapiens
caagagcggcagccacaccggcagagcaggggaaaagggaggaggaggcaggcccagaaaccgaggcgccc

SEQ ID NO: 200294 - RNA, 73 nt, Homo sapiens
caacaccagaccccgagccgacacaagccacccggggaaacgacaacagcgcaagcagaaaacccaaacccag

SEQ ID NO: 200295 - RNA, 83 nt, Homo sapiens
aacagaagcaaaaacaaaacaaccgggaccccagccagaacgcagggaaacagccacagaggagacgacaccaagaggaaaaa

SEQ ID NO: 200296 - RNA, 50 nt, Homo sapiens
cgaggcccccagaagcgaaggaaaccagccaccaccccgcggaggccagc

SEQ ID NO: 200297 - RNA, 79 nt, Homo sapiens
ccccccccccacccaccaaaccggagggggaaaaaacccaaggcgcaaagagggcaacagcaccgacccggaagcgaga

SEQ ID NO: 200298 - RNA, 61 nt, Homo sapiens
agccaggaaaaccccgaaaacgcaagaagcggccccacacaggaaggaggaggaccacaaa

SEQ ID NO: 200299 - RNA, 82 nt, Homo sapiens
caagcccagcccggcgaagagcccgacacagcggcacagcccagaagaaagaggagagacgcgaagacggagggacaaagaa

SEQ ID NO: 200300 - RNA, 69 nt, Homo sapiens
ggagaacagaacgccggagggcggccacgcgggaccaccggcaccaccaaaggacaccacgccaccagc

SEQ ID NO: 200301 - RNA, 84 nt, Homo sapiens
aagaggaccacaaacgccgcgcggaaggcagccaaaagggggcacaacaccaaaaaacagccaaaaccgacaaagaagacaaaa

SEQ ID NO: 200302 - RNA, 80 nt, Homo sapiens
aggggagccggcaggacggaaggggaagaggcccacccggagaaccccacggagaaccagagaccaaaaagagccaagcg

SEQ ID NO: 200303 - RNA, 64 nt, Homo sapiens
accgggccaacagagaccaaccagaagacaaaaacaaggccgcgcagacggagcgacggcagac

SEQ ID NO: 200304 - RNA, 74 nt, Homo sapiens
gcagacaaaagggccaaagaagggagagaggcgagaacaccgagcaaagccaccaacaagcgacagcaagcgag

SEQ ID NO: 200305 - RNA, 77 nt, Homo sapiens
caggcagcaccccaaagaaggccaagagaggccaacagaggaacaaggcccgcagaacccaagagcaaaagcagccc

SEQ ID NO: 200306 - RNA, 54 nt, Homo sapiens
agcgcaacgcccaggagcaggagaggcacacccagaagccacaggagaagcaag

SEQ ID NO: 200307 - RNA, 81 nt, Homo sapiens
cgaggccaaggacaggacccagccacaagcgaacaggacggaaagcgccaggggagaggaggcagaaggagaccgcgggac

SEQ ID NO: 200308 - RNA, 80 nt, Homo sapiens
ggagccacaagagaggacaaaagaggaagcagacccacagagaaggccagacgcagggaagcaggggcgaaagaagagga

SEQ ID NO: 200309 - RNA, 74 nt, Homo sapiens
cccacgaggcggcgccgcgaaaggggacagaggcgccaacgaagcaaagaagaaagacaagcgaccaagcccga

SEQ ID NO: 200310 - RNA, 53 nt, Homo sapiens
gggagagagacgcgggaaccgccagcaaaccacacaggaagcccggggcggcg

SEQ ID NO: 200311 - RNA, 78 nt, Homo sapiens
gggcgcaggggaccgggccacccaagcaccggcagacaagagcagagcaacgcaacagggaacgacggaagagacgcg

SEQ ID NO: 200312 - RNA, 71 nt, Homo sapiens
gggaaggcacggccgcccacagcacaacaaggggaggcaggccagcgaggcacaacaccaaaacgaagcgg

SEQ ID NO: 200313 - RNA, 77 nt, Homo sapiens
cggccgccggcgggcgggccgggcaagcccgcgggcgcaagaaccgcggcaggggccaacccgaaaaggccaaaacg

SEQ ID NO: 200314 - RNA, 80 nt, Homo sapiens
gcgacccaagaagcagcccacgaaaggcagccgcggacgccgcgccagcgacaaacaacagcaggaggccaggcacgaca

SEQ ID NO: 200315 - RNA, 89 nt, Homo sapiens
caagggccggacaggcaccacgcaccgacagcgccgccaccgagccgggcccaccccccaccaaggaagggagaagaaaggggaccggg

SEQ ID NO: 200316 - RNA, 85 nt, Homo sapiens
agcacagcaagagccaggaccaccggaagccagaaagggaagccccgcccacggcccccaccaccaccagcgcaccccgcgcccc

SEQ ID NO: 200317 - RNA, 84 nt, Homo sapiens
gcccgccgcgcggagcgcccccgcgccccgcaccagagcggggcaccgagccggccaccaggagagaacgccgcgccgcgcgac

SEQ ID NO: 200318 - RNA, 82 nt, Homo sapiens
gcaaaaacacaggggaccgcacagaaaagaccaccgcccacgaagcccgacgaggcccgagagaagagcagaaacgggagaa

SEQ ID NO: 200319 - RNA, 81 nt, Homo sapiens
agcgcggcgcccgcggccgggcggcgcggccgcccgggccgggccccaccggacggggcaacaggaaaacaacccagagaa

SEQ ID NO: 200320 - RNA, 81 nt, Homo sapiens
caccgggacggaccgagaccggaccgagagcggaccgagagcgcgaaacgcacgagaagggcagcgacacccagacccacc

SEQ ID NO: 200321 - RNA, 72 nt, Homo sapiens
ccggggggccagcaacgacagagaggaaagacgcccaagaagacaacgaaacgagagaaccagccaaaaaag

SEQ ID NO: 200322 - RNA, 48 nt, Homo sapiens
gagaccaccaaacaggcgacaacggcaagcggagaagagcaaggccga

SEQ ID NO: 200323 - RNA, 77 nt, Homo sapiens
cagaggccaggcagggagcagggaccagcgacgcacccggcggcggcagcacaggagcggaccagcccggggagagc

SEQ ID NO: 200324 - RNA, 71 nt, Homo sapiens
agcaacaaccgccgagcgggccacgccgcaggacacagccgacagggccagcaacaccgggcaccgaacgg

SEQ ID NO: 200325 - RNA, 83 nt, Homo sapiens
ccaagggccccaagagggcacacagcacacaccgacagccgaacacaaccccagagccggcagcgggccccccgccgcggccc

SEQ ID NO: 200326 - RNA, 61 nt, Homo sapiens
aacacccaggaaaccccccagcggcaaagccaggccccccaggcgagaggccagcgaacga

SEQ ID NO: 200327 - RNA, 44 nt, Homo sapiens
ggagcaggaggaggagcagcccgcagagcgacacgcgcgacgga

SEQ ID NO: 200328 - RNA, 74 nt, Homo sapiens
gaacacaagacggaggaacaggaagggacaggaaacgggcaccgcccagaagaacaggcggcgggcagagcgag

SEQ ID NO: 200329 - RNA, 74 nt, Homo sapiens
ggcgcccccggcgaccacggagagcccggccccccacaggacgggaaggaggcagcacggcaggagacgaggag

SEQ ID NO: 200330 - RNA, 74 nt, Homo sapiens
ccccagcacaggccaacaccagaacaacgcaaacgcccacacagcaagcacgggcagaagaaggaacggaaaaa

SEQ ID NO: 200331 - RNA, 80 nt, Homo sapiens
caagcgaagcacgagagaagaagaaggaggccgcggccagaaacccaagaaaaagcgaaggaacgcagagcgaagacaag

SEQ ID NO: 200332 - RNA, 77 nt, Homo sapiens
cggccacggccaacgccgcgcccgcggagggaaaaggaccaaagcagcagaccacagccaacgaaaccaagcgccag

SEQ ID NO: 200333 - RNA, 58 nt, Homo sapiens
cacagcaagacgacaggaagccaacaagcgacagcggagcgggacccggggcaccaga

SEQ ID NO: 200334 - RNA, 76 nt, Homo sapiens
gaggacggggcccaggaacggaaaagggcagccgcacggggagaccaccaacacaccagccagacaggagagaagc

SEQ ID NO: 200335 - RNA, 36 nt, Homo sapiens
gaaagacccgcgacgaagaagcaacagcagcaagaa

SEQ ID NO: 200336 - RNA, 81 nt, Homo sapiens
gaacccggggcgggggcccggccacccgcaggaggagaaagcaaggacccagagccacacgaacgccccgaccacagggcc

SEQ ID NO: 200337 - RNA, 79 nt, Homo sapiens
cggaggagccccggcggagaccacgcaaggccacagacgacgagcagaacagcccaaaggaaggcaccggccgggaagc

SEQ ID NO: 200338 - RNA, 70 nt, Homo sapiens
gagcagcggaaaaagcggaaaaagggagggacaagagcagcaccaagcgcagcgacacacagacagcccc

SEQ ID NO: 200339 - RNA, 74 nt, Homo sapiens
accgcggcgcaggacgccgacacgggccgcgccagcccaggaggcacacacgaaggaaccaggaagacagagga

SEQ ID NO: 200340 - RNA, 69 nt, Homo sapiens
gaagacggccccacggagacggccagaacaccacagcccacaaaggacagccagacaagaccccaacga

SEQ ID NO: 200341 - RNA, 84 nt, Homo sapiens
ccacggcacccccgcagcgcgaggacgcccggagcccggcgaccgcggaccgcgcgccacaacaggcgaaaccaaaagcaagcc

SEQ ID NO: 200342 - RNA, 67 nt, Homo sapiens
gcgaagcaggggcaggaaccacaagccaacagccccaagaccccacagcaagccaccacgggcgccc

SEQ ID NO: 200343 - RNA, 70 nt, Homo sapiens
cccgcgcccgccccaacccagccacaggggaccggccggggaagcacagccaggggcggacgagccggga

SEQ ID NO: 200344 - RNA, 85 nt, Homo sapiens
gagccggacccagcgccggcccccaggcgaagaagcgcagccgcaccggccaaggccggcacggagaaggcgaggcaaggcccaa

SEQ ID NO: 200345 - RNA, 87 nt, Homo sapiens
ccagacgcagggagacgcacagccaggacaccggaaccgggaaaggggagaccccacgcagggcagagcgcggcggcagcagagggc

SEQ ID NO: 200346 - RNA, 95 nt, Homo sapiens
gaaccaccagggagaaccacaacaacaggagcggagccccaacaaaaacagagagaagggcgggagaaaccaaggaaagagaaaagcgggaggcg

SEQ ID NO: 200347 - RNA, 76 nt, Homo sapiens
cacaccgcggaggcgcccagagcagcggggccccggggcggaaccccagagcgacggcgcagggcgcaggagggcg

SEQ ID NO: 200348 - RNA, 78 nt, Homo sapiens
cgccggcgggaaaacaacagccgcaaggccagcagagcccaagggcgccagccaccacccagacgaccagacgagagc

SEQ ID NO: 200349 - RNA, 74 nt, Homo sapiens
cagcccgccaccgcccaagggggaaaccgcagaaaccccaaccgagcccgcgacaccaaaggaaccacgcaaga

SEQ ID NO: 200350 - RNA, 54 nt, Homo sapiens
accaagaaccagacacgaagacgagagaagaagaagggaaaacaaaggaaccac

SEQ ID NO: 200351 - RNA, 77 nt, Homo sapiens
agggcaaccggacgagggacaaccggaaccaggaccaccagggccgaacggccaaggcccacgagagggccccacgg

SEQ ID NO: 200352 - RNA, 108 nt, Homo sapiens
gcgagggaggccgcggcccgggccgcaccagagcgcccggcccacgacacaggaagaagacagaggagccgaccccccagggaggccgcagggacgaggacagaaaaa

SEQ ID NO: 200353 - RNA, 83 nt, Homo sapiens
ccaccggccccccacccccacacacaggcgcaaagaaagcagagggaagaaaacagcggagcaaaacagaaaaagaaaaggcg

SEQ ID NO: 200354 - RNA, 75 nt, Homo sapiens
ccacacagggaaggcacacagcagagcccagaggcccggaaggcgcaaaagggggagaacaacaccaccaaacca

SEQ ID NO: 200355 - RNA, 47 nt, Homo sapiens
caaccggcgaaaggcccccagccgcagacagggaggacccgagcccg

SEQ ID NO: 200356 - RNA, 77 nt, Homo sapiens
gaggccgaggacccggggccgaggagcgggaagaggcgggccaccgccggcaccggccggaggggccgccggcacgg

SEQ ID NO: 200357 - RNA, 76 nt, Homo sapiens
gacagggacacaacggcaagggagcccaccagaaacacagccagacacgggcggagaacggaaaagcaccaggaag

SEQ ID NO: 200358 - RNA, 87 nt, Homo sapiens
cgcgggagagaggacccccccccccccccaagggcggagaacggaaaagcaccaggaagcagagaggaccgcagaagggaaggagag

SEQ ID NO: 200359 - RNA, 65 nt, Homo sapiens
acgagggaacgggaaagaacagagaagggcgggagagagaagaaaaaacaacccagaacggaaac

SEQ ID NO: 200360 - RNA, 80 nt, Homo sapiens
gacgggcgccacaccaacaccacggaaccaaacggccgagcgaccaggagaggagcccccgcccgaagaccggggagggc

SEQ ID NO: 200361 - RNA, 76 nt, Homo sapiens
gccggaacagccagaccagcaagcagacaccccccccgagaacagccggagccccaaaccccaggaccagcaacca

SEQ ID NO: 200362 - RNA, 80 nt, Homo sapiens
gcaagagcaggccgagacgcgcgcagcaccccgagcagaaggcagaccggaggaacaaaccgcccccaaagacaacaccc

SEQ ID NO: 200363 - RNA, 56 nt, Homo sapiens
agcagacaagacgagcccaccacggacagcaaacagagagaacaacaggggggaga

SEQ ID NO: 200364 - RNA, 76 nt, Homo sapiens
gaaagcaccgaccaacacccaggagaagagcgccaggcgccgcggggggaagacagccgccaccaggcgccccccc

SEQ ID NO: 200365 - RNA, 67 nt, Homo sapiens
agaaggaccccccggaaagcaccaacaccagagcgaggcccaaagcccagccaaggacccgaaaaac

SEQ ID NO: 200366 - RNA, 88 nt, Homo sapiens
gcgcggcgcagaagaaacccgcggcgaccacagccaaagcgggccgggccgacaagaaagccgaggcggggcgggcagcaaccgaacc

SEQ ID NO: 200367 - RNA, 85 nt, Homo sapiens
ccgaagcccccgcaggaaccacaacccaaccagcggagcaaacaggacgaaccagccgacaccaggaaagagagcagcgccaagg

SEQ ID NO: 200368 - RNA, 76 nt, Homo sapiens
ggagacagcccaaaacccggaagagcgccccaggagaaacaaagcccaggaagacaggaacagcagcaacgcggaa

SEQ ID NO: 200369 - RNA, 51 nt, Homo sapiens
gcagcgcacgacagcaaaagcgacaacggcacacaaacaaaaacgaacccc

SEQ ID NO: 200370 - RNA, 73 nt, Homo sapiens
aagaaggaagacacacgaacaacacacgaggggaaaagaaacaaacaacaagaagaaggacaaggaacgaagg

SEQ ID NO: 200371 - RNA, 58 nt, Homo sapiens
gcgaggggagcaccaggaccgggccggaacgagacgcacgcgcaacaggagacgaacc

SEQ ID NO: 200372 - RNA, 75 nt, Homo sapiens
ggagaaacaaggcgccggagcagcaaggcgccaccggaagaaacgggaggggaggagccgggaaagacagcgcca

SEQ ID NO: 200373 - RNA, 83 nt, Homo sapiens
ggcccgggaagccgcgggcggggcgcggccgcggggcggaggcaccgcgcggggggagcgacaggacccaaacccgggccgcc

SEQ ID NO: 200374 - RNA, 73 nt, Homo sapiens
ccccaggcgcacaaccaaaccagaccgcagcaggaacaaggagggagcgcacccacccggggcgcgagaccgg

SEQ ID NO: 200375 - RNA, 75 nt, Homo sapiens
ggccaggaagcggaggagccccggaggcagagcggcgccagggggaccggagagaaaaaagagagcgcaagggac

SEQ ID NO: 200376 - RNA, 37 nt, Homo sapiens
gacccggggccgagaagacacgcaccagaagcggcga

SEQ ID NO: 200377 - RNA, 75 nt, Homo sapiens
gaaaccccggagaagaaacacagacagcgccaacgagcacagacgacaagaagccaaagacgggagagagaaggc

SEQ ID NO: 200378 - RNA, 78 nt, Homo sapiens
gaagcgcaaacagcacaggccacaaagcagaacacaagaccaacccgccaaaaggcgccagcgaccaaggcccaaggg

SEQ ID NO: 200379 - RNA, 99 nt, Homo sapiens
aacagggaagaaagaaacagagcggagaaacgcaggaaacagcagcgaggaggggaagagagaagccaagacaagaagcggagaagcgagagaaacaca

SEQ ID NO: 200380 - RNA, 76 nt, Homo sapiens
gacacagcacaaaggaagacccaacgaaaggggcgacaccagggccgcagagacgaaagcgcgcgcgcagggagca

SEQ ID NO: 200381 - RNA, 74 nt, Homo sapiens
gacgggaccgcaaggccgcgagcaggaagcggagcggagcgacagaggaagggaaggaagacaagaaccagcag

SEQ ID NO: 200382 - RNA, 69 nt, Homo sapiens
agaccacacccacagaaggagagcaaaggagacagcaccagagagcgaccgcagccgaagcacccgaga

SEQ ID NO: 200383 - RNA, 74 nt, Homo sapiens
ccaagccgacaccacaacaaagaagaccacacacgggaaacacaaaacccggccccaccagaggcgagcaacgg

SEQ ID NO: 200384 - RNA, 68 nt, Homo sapiens
cagaacccaagccaggcacccaaaaaaaccagaacaaggccagagaggagcaccaaacaaggaaaagc

SEQ ID NO: 200385 - RNA, 87 nt, Homo sapiens
gcgggacgccacgccaagcaaaccgggaaaggagaggacccggagccggaacacagcacccacccacacccacacccgcgacgggag

SEQ ID NO: 200386 - RNA, 82 nt, Homo sapiens
ggaaagacccaggagaagccgcccaaagaacggcaaaagcagaccggaaaacccaccggcaagaccacacccgaggggagcc

SEQ ID NO: 200387 - RNA, 86 nt, Homo sapiens
gccgcaggacggcgcggcagagccccgacgccacagaacgccgcccaccggccccggagcgggccgaggacggggaccaggcggcc

SEQ ID NO: 200388 - RNA, 32 nt, Homo sapiens
cagggccgggggccagggcaagcggcccacgc

SEQ ID NO: 200389 - RNA, 81 nt, Homo sapiens
ccgccccaccaccgcgaggggcgggcgaggcaccggagacccgagcaccccaacgggcaggcagcgcagaagaagcgaggg

SEQ ID NO: 200390 - RNA, 81 nt, Homo sapiens
acgaggaccgagaccgcggccgggaccgagggggaacaaaggccgacaaagaacacaaggggaaagagaaaagagcaccag

SEQ ID NO: 200391 - RNA, 71 nt, Homo sapiens
cgcacaaggagccgggcgcggaggaaagagaagggagggcgacgagagccgaagcagaggccaagaccaac

SEQ ID NO: 200392 - RNA, 86 nt, Homo sapiens
cgcggacccaggcacggaaacaacgcaccacgcaggagcccagcaagggcccccagagccgacggcccccaccccccacaagacgc

SEQ ID NO: 200393 - RNA, 79 nt, Homo sapiens
ggaaaggaagaaggcagaagagacaggagaggccgagcccgaacagggcccccagccccagccgacccaccgacaacga

SEQ ID NO: 200394 - RNA, 80 nt, Homo sapiens
cgcgaggaggaaaggaggacgagggggacggccgggccgcgccggcaccccgagcaccggcggaggcgccaccgcccggg

SEQ ID NO: 200395 - RNA, 65 nt, Homo sapiens
cccacagaaggaagagagacagagaagacgcaggaccacgacgcgaaaccaagccaaaagcagga

SEQ ID NO: 200396 - RNA, 76 nt, Homo sapiens
gccccccagccagggaacgaccagggccacagggcgccaagagcccagggcaccgcccggcccgccggggaaccgg

SEQ ID NO: 200397 - RNA, 81 nt, Homo sapiens
ccgcagccggcccgcccagccccaccccacagacgcgaagccgacgagcccgaacagacgcaccagcgggaggaagaggga

SEQ ID NO: 200398 - RNA, 62 nt, Homo sapiens
aaaggcacgaggggggaagggagccaagacacacaagcaggagcagcagaacggagagaaac

SEQ ID NO: 200399 - RNA, 58 nt, Homo sapiens
ggccgcgcgcccgggacgacggaccggccggcggcaaacagcgaagagaagacgaaca

SEQ ID NO: 200400 - RNA, 78 nt, Homo sapiens
gaaccaccgcgacagcaccacagaaacaagcggagccacgcccaaccaggagacagaccacgccagcacgaaagcacc

SEQ ID NO: 200401 - RNA, 77 nt, Homo sapiens
ccgccgaaaaagagaagacgcacccgaccgggccgaccacgaacaagcagaaagcacgaacaacgagaacaagacac

SEQ ID NO: 200402 - RNA, 84 nt, Homo sapiens
gaagaacagaaggcgacaaggccaagaccgccagcaaaggaagacgagggaaaagcaccgggaggaaagagagccacacgaaga

SEQ ID NO: 200403 - RNA, 73 nt, Homo sapiens
ggacaaacacgagaggagagacgaaacaaagaagcaaggaccgggaaacaaagagaagcgaaggacccgggcg

SEQ ID NO: 200404 - RNA, 58 nt, Homo sapiens
agaaacggagaccggaaggagagcagaccccacagagacagaaagaaggacgaaccga

SEQ ID NO: 200405 - RNA, 69 nt, Homo sapiens
cacgcgccacgcacacacaggaggagccaggaggagagaacaagaaaagcgcggaaacgcaacaaaaga

SEQ ID NO: 200406 - RNA, 71 nt, Homo sapiens
aacacgagcacgccggacaggaggaacccgcagaaaagcaccgacgaccggggcgcgccagcccgacggcg

SEQ ID NO: 200407 - RNA, 69 nt, Homo sapiens
gaaccgcgcaggacgccaaaccaagccgcagggggaaggaacggaaccaaccaagaccacaccgcaaag

SEQ ID NO: 200408 - RNA, 79 nt, Homo sapiens
agagaaagggcaacacagagacaaaaacaggagaaggaacacgaaacagacagcgcccacaggcagccgaagaaccccc

SEQ ID NO: 200409 - RNA, 78 nt, Homo sapiens
caggcgccggccggcgcgaagacgcgggggccgccccccggggacgaagagccagcgaggcgcacaacggggaagcag

SEQ ID NO: 200410 - RNA, 76 nt, Homo sapiens
ggagccccccccacaggcaaggaagacgccgagccaagcacaagaagaaacaccccgccccccacaacaggagaaa

SEQ ID NO: 200411 - RNA, 72 nt, Homo sapiens
agcagccgcgcgccgagaagcacccgcgacccagaaggccagcacaacacgcgccaaagacacaccgagggg

SEQ ID NO: 200412 - RNA, 74 nt, Homo sapiens
caagccacaggcccagcccagagagggccccacagccccggcgccccaaccccgagcaaggacacccccggccc

SEQ ID NO: 200413 - RNA, 99 nt, Homo sapiens
caaaaacccggcagaacaagagcaccccagaagacagagagccgcgccaagggagcaagaggcagacagaccgagacgggcaaccaacaagaaacagac

SEQ ID NO: 200414 - RNA, 78 nt, Homo sapiens
gagggcgggagagccggcgagcggagcggagcgcggaagaaagacgcgccagcaggcaacaaaaccaaggggaccaaa

SEQ ID NO: 200415 - RNA, 87 nt, Homo sapiens
gcgcgcccggccaagaggcaaaggggaggacgcagcaaaccaccagaagacaagcagaccggaagaccgacggaagaccacaccccg

SEQ ID NO: 200416 - RNA, 83 nt, Homo sapiens
ccggggcacgaggcagagggcgcaccgcccgggacggccacagacccacagaggcaccccagacacagccccgggggcgccga

SEQ ID NO: 200417 - RNA, 57 nt, Homo sapiens
agcccgcagacagaggggcgacgaccgcacaacagaaaaaccgggagaagccggcca

SEQ ID NO: 200418 - RNA, 82 nt, Homo sapiens
cggcgcgagccagccgggacggacagcgcgggagggcgccgcggggcagccgccgcccccgggcgaggagaccgcagccgag

SEQ ID NO: 200419 - RNA, 62 nt, Homo sapiens
gacgcaggagcccccccggcagcaacccccacacccagcaccagcaccggccacacacagga

SEQ ID NO: 200420 - RNA, 63 nt, Homo sapiens
ccacccacggagccaaccagaccaaggcagaagaccagggaaccgggcagcagccgcagccgc

SEQ ID NO: 200421 - RNA, 54 nt, Homo sapiens
gagccagccacggggccccccaacggggccagacgagcaccaagacgacacgca

SEQ ID NO: 200422 - RNA, 86 nt, Homo sapiens
gcggaacaccccaacgggagacaagaagacgccaacgagcggcgcggacggcgcgcggacaccagcaaacggggacagcgccgacc

SEQ ID NO: 200423 - RNA, 34 nt, Homo sapiens
gccgggagcacacccgaaccaccacgaacggggc

SEQ ID NO: 200424 - RNA, 74 nt, Homo sapiens
aaccccgccccccacaacccggaccacccaccaccgcaaggcagacacgccaggggcgggacgagcaggccccg

SEQ ID NO: 200425 - RNA, 35 nt, Homo sapiens
acgccacgcccagcagagagcccgagggaaaagac

SEQ ID NO: 200426 - RNA, 82 nt, Homo sapiens
gcccaccccggggaggcacagcacggcgggcacagcagccccccgccccaaagcaggcgccaccagcaaaaccagagaaaca

SEQ ID NO: 200427 - RNA, 75 nt, Homo sapiens
accaggccaccgccacgggccgagacacgcagcggcggccagggaccagagaagaagcagaagaagacaaagcag

SEQ ID NO: 200428 - RNA, 93 nt, Homo sapiens
cggaggcggaagcaccaggcggagggcggcagcccagacgggcgggcagggccgggcccgcagagaaagccagcacaccccaagagcccacca

SEQ ID NO: 200429 - RNA, 93 nt, Homo sapiens
cgggaagcgacacaaacaaaccgaaagaagaagaggagaagaaaagaccagacgggagacaacaggaggacacggaagagggaagaaagaagc

SEQ ID NO: 200430 - RNA, 57 nt, Homo sapiens
gggccggcaagggaggaaaccccccaggcaagaggcgcaggaccgggaagaccaaca

SEQ ID NO: 200431 - RNA, 83 nt, Homo sapiens
caagcgggcaaggacaagaagcgaagcacagagaagcaacccagcagcagcagcccaagacaaaacgagcccacaaagaggag

SEQ ID NO: 200432 - RNA, 42 nt, Homo sapiens
caaaaaacgcgggaacagggccaacagggcaaacaggaaccc

SEQ ID NO: 200433 - RNA, 73 nt, Homo sapiens
gcgaggacggccgccagaaaagcaggacggaccagccaaggaagcaacacagcagcgagagaagcagaaaaag

SEQ ID NO: 200434 - RNA, 82 nt, Homo sapiens
ccgagcaagcgccacagaagcccgcccggaggaaaagccaaagacaccggcacgaggagaaggacccagagaaaagacaccg

SEQ ID NO: 200435 - RNA, 81 nt, Homo sapiens
aagaacccacgccgacacgacgccgcgggcaggcgcgcgcacccgcccgacagagaaaggcacaacccagaccagagaagc

SEQ ID NO: 200436 - RNA, 80 nt, Homo sapiens
cgggaggagccacgagcgggcaccagaggggaaggggcccgagcggaaaacgccagcggacaaaagggacgcgcggagac

SEQ ID NO: 200437 - RNA, 44 nt, Homo sapiens
ggaacggcccggaaacaggaggacggagcacgccggaggaacag

SEQ ID NO: 200438 - RNA, 67 nt, Homo sapiens
accccgggcccccgacgcagcccagcggcacggagaaaggggaccaaaagaacccagccaacccgca

SEQ ID NO: 200439 - RNA, 57 nt, Homo sapiens
gagacaacacgaagagccacaccagcaaaaagagaacacgagcgacccgaagacagc

SEQ ID NO: 200440 - RNA, 50 nt, Homo sapiens
aaagagcaacagcagggcaacagaagggaagaaagcggaggcggcggcgc

SEQ ID NO: 200441 - RNA, 66 nt, Homo sapiens
cacccaccgagccgagaggggaaggaaaggagaagccaggacgaacgaagaggcagacccagcgag

SEQ ID NO: 200442 - RNA, 89 nt, Homo sapiens
agaccacacgccgacagcgggccaagcgccggagcacaaagacgaagccgaagccaaaacagagggagacgagaaaagggccgagcaca

SEQ ID NO: 200443 - RNA, 57 nt, Homo sapiens
gccgaccgagacgggcggagaggagaaggcccaggcggccgagccgcgagaacaacg

SEQ ID NO: 200444 - RNA, 76 nt, Homo sapiens
ggagagcgaggcacggcaaggggccggagggccggcccagaacgcagcgagacgacgggaccgaaggaccccgcca

SEQ ID NO: 200445 - RNA, 73 nt, Homo sapiens
cgcaccgacggaccgcacaccgccggagcccgcagcaggcacgcgcacagcaggacagaaagaaggaaaaaac

SEQ ID NO: 200446 - RNA, 74 nt, Homo sapiens
gaaaaggaaaaggagagagccagagcaagagcggaccgcccagaaacaaccacgagcaaccgccagcaaaacag

SEQ ID NO: 200447 - RNA, 75 nt, Homo sapiens
cggcagcggcagcggaagaggggcgagaggaacgccccccgggcggcggggagggagcagaccgaaaagggcgga

SEQ ID NO: 200448 - RNA, 57 nt, Homo sapiens
ggaccaggggaggaggagcagaggacacagagaaaggaaaaggaagggaaaacaaga

SEQ ID NO: 200449 - RNA, 73 nt, Homo sapiens
cccggcgcgcgcccccaggggcggccgcggcgccgggcgccgaggagaccaaagaccagacggaggaagcagc

SEQ ID NO: 200450 - RNA, 86 nt, Homo sapiens
ccgccacaacgaggggcagcgcccagcagggggaagaaggagaaagggccaaccccgaagaagcaaacagaaacgaaggagacaga

SEQ ID NO: 200451 - RNA, 77 nt, Homo sapiens
gcccccaacgccccggagccgccggccgcagcgcagcgccagccagacgccaggaagccggacgcgcagggaaaacg

SEQ ID NO: 200452 - RNA, 74 nt, Homo sapiens
gagcgacccgggagacacgacggaaaaccacaaagcaggcaacaggagcgaacagcggaagccccacaggacag

SEQ ID NO: 200453 - RNA, 78 nt, Homo sapiens
gggacccgcaccggaaggccacgccaagggggacggaagcggcagcgggcagccggcccagcacagggagcagaaccc

SEQ ID NO: 200454 - RNA, 74 nt, Homo sapiens
accgagagcggaccgagagcgcgaaacgcacgagaaggccaaagagcaacagaaaagcagacccaagaggagga

SEQ ID NO: 200455 - RNA, 89 nt, Homo sapiens
caggcaccggggggcaacacccgagaacggcgggaagagaagacacgagcacaaacggcacgcagaagccagcggacgcccgcaacggg

SEQ ID NO: 200456 - RNA, 73 nt, Homo sapiens
acgcgccacggaccgcgggacaagaaaacagcggaagcgaaagggggcagacagaagagagacgagcaaccca

SEQ ID NO: 200457 - RNA, 69 nt, Homo sapiens
caccccaagccacagcgacagcccccgacacagagaggacacccaaaacgaggcgcaggaagggcaaca

SEQ ID NO: 200458 - RNA, 78 nt, Homo sapiens
aaccaaaacggacaacagacaacacaaaaccagccaaaggggggcaggagaccggaaacgagagaaacgaagacgaag

SEQ ID NO: 200459 - RNA, 73 nt, Homo sapiens
aagaaggcaaacaaagcaaagaaacaaccaagcagcagcaggcaagccagcacccaggccacggacccccagc

SEQ ID NO: 200460 - RNA, 63 nt, Homo sapiens
acgcgaaggaacggcaaaggaccaaggcccaacaccaccaccgccaagaggaaccgcaaaaag

SEQ ID NO: 200461 - RNA, 75 nt, Homo sapiens
aggaagccgagccacaggagaggcccaggccgaccggcgcgcggagagacaaaaccaaggaggacacaaccgcga

SEQ ID NO: 200462 - RNA, 86 nt, Homo sapiens
gcaaggcacccgagaaccagaagcgcagccccagccccaccggagagacgggccagggacaccagcccagcagcaggaggagccgg

SEQ ID NO: 200463 - RNA, 72 nt, Homo sapiens
gaaagaagagaagaccagcaaaaggagaccccccggggcaaaagaacagggaccaacaagagcagacaaaac

SEQ ID NO: 200464 - RNA, 74 nt, Homo sapiens
gcaagaagaacagagacagcagccaaacccccagggaccccgggagggcccagcaaccggccagcgaaccggag

SEQ ID NO: 200465 - RNA, 76 nt, Homo sapiens
aaaaaagcacccgaagaagggagacgggaaggacggcgaaaccagaacaggccacacggcacacagcccaccaggc

SEQ ID NO: 200466 - RNA, 55 nt, Homo sapiens
ggagcccaccggcccaaaggcccggacccaaaacaggaaagaagaaaaccgcgaa

SEQ ID NO: 200467 - RNA, 69 nt, Homo sapiens
gcagcgggagccacaggggcccaaagcaaagaggacggggacgggccccaggacgaggaagacaaggcc

SEQ ID NO: 200468 - RNA, 69 nt, Homo sapiens
gcgggcaggaccgggccgggacccgacccgcacggcggagggcgaacgaacgcccgccagaagccccga

SEQ ID NO: 200469 - RNA, 71 nt, Homo sapiens
gacacggaggcgcccggaacaggaggagaagagagaggcacaggaagcggagcgagacccagagcggcaaa

SEQ ID NO: 200470 - RNA, 71 nt, Homo sapiens
gagcagcacacccaaaaacacacaaagaagaacgcaaacaacaaaggcaccgacagcacagcagaaaggcc

SEQ ID NO: 200471 - RNA, 75 nt, Homo sapiens
gaagggcaggagaaagcaaaagacccgagccccaaagacagaaaagccccgagacggaagagaagagaagagaac

SEQ ID NO: 200472 - RNA, 76 nt, Homo sapiens
agccgccaaagccagacggaaacacaggggacaaaacccaaaacaaacaaaaaggagaggaacccagccacgaaga

SEQ ID NO: 200473 - RNA, 57 nt, Homo sapiens
acaccggaagcgggaaaggaggaaaaggacacaccacaacccgcaacacaaaaaacg

SEQ ID NO: 200474 - RNA, 81 nt, Homo sapiens
gaacagcaggcccgagcccaccgcgccgggccccggacgccgcgcggaaaagcagaaaagagacacacaaaggaagcaaag

SEQ ID NO: 200475 - RNA, 75 nt, Homo sapiens
ggcgaacgccaccgcagagacacagcgcagagggacgagcagggggaggaacaaagcgaggaagggaagggaagg

SEQ ID NO: 200476 - RNA, 72 nt, Homo sapiens
gacaaccagcccgcccgccgacgcccgcgccggcgccccggaccagagacaaggccccgagggaggagcccg

SEQ ID NO: 200477 - RNA, 85 nt, Homo sapiens
gggccccccgggaacgcagcgcgcaggaccacggggaaagccaagagcagaacgggaaaaaaaagcacggacagggaaggagaag

SEQ ID NO: 200478 - RNA, 71 nt, Homo sapiens
gaacgaggacgagagacaaagagagagaggcacgcaaaaggacaacgaagagaggaaagaagcggaaagga

SEQ ID NO: 200479 - RNA, 83 nt, Homo sapiens
ggcgccgaccaccccagcaccagcccagagggaaagcacaccaccccagccaggaaagggagcagcaccggccacacccacag

SEQ ID NO: 200480 - RNA, 77 nt, Homo sapiens
ggcggggggcgggggaggcgagcgcgccgcccggagccgcgcacacgggcggagaacggaaaagcaccaggaagcag

SEQ ID NO: 200481 - RNA, 80 nt, Homo sapiens
gcggggcgcgggggacagccacacaaggacaaagagagacaagccccagcccacggcagacacagcaggccaacccagaa

SEQ ID NO: 200482 - RNA, 74 nt, Homo sapiens
cggaggggaaccgaaaagagaaccgccgcgcccgggaaaggaggaaagaaagagaagaagagcaaccaagcaaa

SEQ ID NO: 200483 - RNA, 85 nt, Homo sapiens
gcacgggccccggcgccaccggagagaggccgcgccgggcagaggaccggcagacagagagggccgagagcacgaagggggggac

SEQ ID NO: 200484 - RNA, 59 nt, Homo sapiens
caaggcgggccggacccggggccggcaacaggcgcacacaacccgccagacaaaccaac

SEQ ID NO: 200485 - RNA, 92 nt, Homo sapiens
agagagcagccaggcagaggcccaacaaccggggaaacaaaccgacccaacacacccaagacacgcggaaaacacagcaaaacaaggcgcgg

SEQ ID NO: 200486 - RNA, 77 nt, Homo sapiens
ggcggccggaggaggagagggcggggaagaggcggcagccgaggccgcgaacgcacaggagaggccgggaagaagga

SEQ ID NO: 200487 - RNA, 85 nt, Homo sapiens
cgcagacaccaacgcgggcgcgaccgggagcggaccccggggaaaaagagagccacacccggcacacagggagaagcccgaggga

SEQ ID NO: 200488 - RNA, 53 nt, Homo sapiens
acaccaagccaagaaggacgggaacagagccgacaggcacgaagaaaaggaaa

SEQ ID NO: 200489 - RNA, 95 nt, Homo sapiens
gcaacgaagcagcaaaaagcggaaaaaaacaacgggggcaaacagaagacgggcaaaagagcggaagaaccaacgacagaagacggagccgaggg

SEQ ID NO: 200490 - RNA, 63 nt, Homo sapiens
cggcccgcagaccggcggaaaaaagccccgcaggaacggagaaggcgcagccacagccacgcg

SEQ ID NO: 200491 - RNA, 85 nt, Homo sapiens
cccggccggcccgcgcggcagacgggccccccgggagacacaggagacgcagagccccagcggggaggcgcaacacgaggcgccg

SEQ ID NO: 200492 - RNA, 57 nt, Homo sapiens
aagaggagaagaagcgaacgagcaaacaagaaccagagggggccgggggaggcagcg

SEQ ID NO: 200493 - RNA, 54 nt, Homo sapiens
ggacaccaagcaaaggggaagaagcgaccgccgaaaagaaaaaaaacagaaaac

SEQ ID NO: 200494 - RNA, 77 nt, Homo sapiens
caccgagacccggaggaggcgaagcgagaggacagagaagagggcagaaagccgcggcggcgacaagacggcggaga

SEQ ID NO: 200495 - RNA, 82 nt, Homo sapiens
ggcaagggagcaccaggagagaaagcaccgcacccacaaagccaagagacaagcgacccgcagggaggacagcgcaccggga

SEQ ID NO: 200496 - RNA, 68 nt, Homo sapiens
ccaagaacgcgaaggcggaaaggcaagcagcggcgaggacaacacacagaagaggcggccacccacga

SEQ ID NO: 200497 - RNA, 79 nt, Homo sapiens
gcccgaggccagggacagcccacaggcgaagccgacgagcccgaacagacgcaccagcgggaggaagagggacggccca

SEQ ID NO: 200498 - RNA, 57 nt, Homo sapiens
gccaacagcagcgagcggaagcagggggcagggcggagaacggaaaagcaccaggaa

SEQ ID NO: 200499 - RNA, 49 nt, Homo sapiens
cacaccaagccaagaaggacgggcaaccagacacacaaccaccagaagg

SEQ ID NO: 200500 - RNA, 77 nt, Homo sapiens
gggcggcgcggccagaacggagccccaaccgcgcgccgaacaaagaagccacagacaaagagggaggaacaaacaac

SEQ ID NO: 200501 - RNA, 35 nt, Homo sapiens
cgccgacacgagaggagcgcagaagagagccgccc

SEQ ID NO: 200502 - RNA, 37 nt, Homo sapiens
gaacaagggaaccagccaaaaagcccgagacacccac

SEQ ID NO: 200503 - RNA, 66 nt, Homo sapiens
acaagggaacaacacagggaggccaaagaagaccacgcagggcaggaagagaagaaacacaagagc

SEQ ID NO: 200504 - RNA, 80 nt, Homo sapiens
ggggagacccgccggaccaaacagaggaagcaacaaagcgaagggccaaccagagcggcaggcggggcagaagagaccga

SEQ ID NO: 200505 - RNA, 81 nt, Homo sapiens
ccgccgggagccgccccgccagcgcggccccagggcagccaaccccgcggcaggcacggccaccggaacagccggagagca

SEQ ID NO: 200506 - RNA, 59 nt, Homo sapiens
ggaggccgaggagaagcggaggagcggcgaagcgcggcgcagaccagagagggaccccc

SEQ ID NO: 200507 - RNA, 64 nt, Homo sapiens
gcaaaaagaggccaagaacaagaacgacggagcccagaagaaaaggagcccaggaaggaacagc

SEQ ID NO: 200508 - RNA, 51 nt, Homo sapiens
agcacacccacccacaggaaacagcgagacaggccagcaaaaaacagaaga

SEQ ID NO: 200509 - RNA, 88 nt, Homo sapiens
cgggcgccccgcagccccccaacaccgcccgccaggacgacgaacccaagacagaccaggagaggagcagccggaaagcaacgagacg

SEQ ID NO: 200510 - RNA, 66 nt, Homo sapiens
agagggagaggcaaacaacgggccaagagcaggacagcacgagcagacagacaagcaccagggcaa

SEQ ID NO: 200511 - RNA, 77 nt, Homo sapiens
gaaggcaacgccaggacaaaaacaaagcgcgcagaaagggcgaccaccaaaaaaacgacccgggcccaaagccgaag

SEQ ID NO: 200512 - RNA, 77 nt, Homo sapiens
accacagaaggaaaagcacgacccgaaggcaccggagacgcgggcagaaaaaggaaaggaaggcggcgggggagcac

SEQ ID NO: 200513 - RNA, 79 nt, Homo sapiens
cgggagcaccggaggaggagaccgacagaccgccgacgacgcaagcagcgggaggagcaacggcaacagggcagcggcc

SEQ ID NO: 200514 - RNA, 76 nt, Homo sapiens
gcaccaggagcacgcgacagcgaggaagcgcaccacagcacaaaagggaaagacgaagcggcggagagggggggag

SEQ ID NO: 200515 - RNA, 77 nt, Homo sapiens
agaggggagacacgccaaagccccaagccgcacggggaagacgaggccaacgcggcgaacacccagagacaccgcag

SEQ ID NO: 200516 - RNA, 77 nt, Homo sapiens
cggcaaggaccagcaggacagccagcccagagaggaaggaggcgaaaaccaagagacacggcccgcccaaggaagaa

SEQ ID NO: 200517 - RNA, 84 nt, Homo sapiens
gcgggggggcgccggaagagcccaggcgcgggcgagaaaacacccgccggacgacccacaaagaccccaaaccaagcccccaaa

SEQ ID NO: 200518 - RNA, 66 nt, Homo sapiens
cacacggcaaggaggacacccggacaccggaagcgggaaagacaccgaaaacgagaaacgaaagag

SEQ ID NO: 200519 - RNA, 62 nt, Homo sapiens
ccaccacgacacgggaggacggggacccaagggagagagggaacggcgaaagggcagcccgg

SEQ ID NO: 200520 - RNA, 87 nt, Homo sapiens
cccaccacgcagagaaccagccgcgcgagagaagaaaggaagaaacacacagcagcagcggacacgacaagacgcaaagaccagggc

SEQ ID NO: 200521 - RNA, 76 nt, Homo sapiens
ccacaaggacgcgcgcacgagagggcacccagcaccaggcacgcaaaagaaaggaggaaaccagaagaaacaggcc

SEQ ID NO: 200522 - RNA, 79 nt, Homo sapiens
cagaaacagggagggacccccgcagcgacgcggcggcaagacggggcgggggccggaccaaggcagcgggccggcaaca

SEQ ID NO: 200523 - RNA, 89 nt, Homo sapiens
cagaagcacccgccaccaagagaaagcgggacagaggagcgggcagcaagcggaaacggaaagggagcagcaccggccacacccacagc

SEQ ID NO: 200524 - RNA, 58 nt, Homo sapiens
ggaacccggcaccgccccaggggaaaaagaaaagggcgaagacccgaagcagcgcagg

SEQ ID NO: 200525 - RNA, 76 nt, Homo sapiens
acacaagaccgggaaggggaacggggccccaggaccccacaacaccagaacaaaaggcaggccacgaacgacggca

SEQ ID NO: 200526 - RNA, 58 nt, Homo sapiens
cccaagggaaaccaaggggggaacggcgagggaacccaggaaggagggcgacaaacac

SEQ ID NO: 200527 - RNA, 87 nt, Homo sapiens
gcgcccgccccaacccagccacaggacagacaagcagacggggccgccacacgcccaaccagggcaccgcaagcgggaagaaaggcg

SEQ ID NO: 200528 - RNA, 73 nt, Homo sapiens
gcagaaccccccgcaaggaaaaaggccacgccgggccagaaaaggggaagaaagacaacacaccccgcaaaga

SEQ ID NO: 200529 - RNA, 79 nt, Homo sapiens
agcagaagccaagacaccagccaaggccggggaagaggccaggcggcccacaagacaccagaggacgcccggcagaagg

SEQ ID NO: 200530 - RNA, 64 nt, Homo sapiens
agaaacacggcggaggccaggggacaaccgcacacgaccgaaaaggcccacaggccacccgcca

SEQ ID NO: 200531 - RNA, 66 nt, Homo sapiens
gcgaacgaccagccaacaacgggaccaggaccgggggcccgcgcacagaccaaacgggcccgagga

SEQ ID NO: 200532 - RNA, 93 nt, Homo sapiens
gaagcggcgccgggccaagggagagcgcggacccggcaaaggcccggggcgcagggcaccggcccaggccccggggccgcggcaaacaggaaa

SEQ ID NO: 200533 - RNA, 99 nt, Homo sapiens
cgcgcggagcacaaaagagcccgcggggaggcgcggccgccccgcgggggacggggaaaagaaacaaacaacaagaagaaggacaaggaacgaaggcaa

SEQ ID NO: 200534 - RNA, 40 nt, Homo sapiens
gcagggcgcccccggccccccgaaaaagccgaggaggaga

SEQ ID NO: 200535 - RNA, 83 nt, Homo sapiens
gagcggcggccgagcccagccgcgcgcaggaaaaaggcaaacccaccggggaaggacaagaaagccacagcaagggaagggaa

SEQ ID NO: 200536 - RNA, 81 nt, Homo sapiens
aagggaaccgccgggcgccagcaacaggcacgggcaagccgggccgcgcgcgagacacgagacgagcggcgccgcaccagg

SEQ ID NO: 200537 - RNA, 69 nt, Homo sapiens
ggcgggcacgaggagaagcggagcgggacccggggcaccagaggaccgagagagaaaagagaagcacca

SEQ ID NO: 200538 - RNA, 75 nt, Homo sapiens
cacgccaccacgaagacacagggaccaagcgagagcccgaagcacagcagggccaccgcaaccaggcggaggcag

SEQ ID NO: 200539 - RNA, 74 nt, Homo sapiens
gggaccagggaaaacccaaaccaaccccagaccggagccagacagcagccaagagcccaagagcaggacgcaag

SEQ ID NO: 200540 - RNA, 73 nt, Homo sapiens
gagagcaaagcagaagagcgccgaacccccgcaagccaagcacccgaagcggggacaaccagacagaccacag

SEQ ID NO: 200541 - RNA, 76 nt, Homo sapiens
cgcgaggccgggacaaagcggcgagaccaacaacccagcagaaggaaaaaccgcacacagagaacacgcggaggaa

SEQ ID NO: 200542 - RNA, 96 nt, Homo sapiens
aaacagcacagccagcagaccagggacacccggagagggggagcaggcaacccaaagaacaagacacaagaacggaacggaagccaaaccaaacga

SEQ ID NO: 200543 - RNA, 80 nt, Homo sapiens
gaagcggccccgggcggaagacgcaggagcaaagagagagcggggcccggcgcacccaccaccgccgcccacggcagccc

SEQ ID NO: 200544 - RNA, 42 nt, Homo sapiens
accacaaaccgcgccagaaaaggcccggaagaccagcaaggg

SEQ ID NO: 200545 - RNA, 67 nt, Homo sapiens
aaacacccgccaccagcgacaagaaggaccagagaaaaggcacagaacagaaaagacaggcagggag

SEQ ID NO: 200546 - RNA, 61 nt, Homo sapiens
cccagcggcaggagagacgaacaaaggaggagaaccgcaagagaaaagacaggcacaaaca

SEQ ID NO: 200547 - RNA, 78 nt, Homo sapiens
cacaaagaggcagccggggcagggacagagagaggcagaagaaaaagcacccccaagcgagagagcggcccaaaaagg

SEQ ID NO: 200548 - RNA, 68 nt, Homo sapiens
aaagagcagaggagacaaaccggagaaggagccaagaaagagaagacagagcgcgaaaagaaagccga

SEQ ID NO: 200549 - RNA, 78 nt, Homo sapiens
caggcagccggggcagagacaccgggagaagcccggacggaaaacggcacgaaggaggaagagcaaccgccgcaagcc

SEQ ID NO: 200550 - RNA, 54 nt, Homo sapiens
accgggagcacaccacaggcaagccgaagaagacccaggaccacaacccagaag

SEQ ID NO: 200551 - RNA, 65 nt, Homo sapiens
aggcagggaaaaggaagagaagccgcgacccaaaggcgggaaaacggcacaaggcgacgagggag

SEQ ID NO: 200552 - RNA, 72 nt, Homo sapiens
aacgaagaaggcaaaaccaagaggaaaagaggaggagagaaagaacccacgcaggacgacagaagaggccgg

SEQ ID NO: 200553 - RNA, 75 nt, Homo sapiens
cccccgcaccacacaccccgaagacagagagcaaagcgggccagacacgaagaggccggcgaaggaagaaggacc

SEQ ID NO: 200554 - RNA, 82 nt, Homo sapiens
agcggcaaaggggaaaaaaaagggagaaacagaccaaggggcagcaaaaccccagaagaggcgaaccgcaggaaaccagagc

SEQ ID NO: 200555 - RNA, 80 nt, Homo sapiens
ggagcgcgcccgccgagcgcaacagcggcgggcggggcaccccagagccagaaggggggagaacgaggagagcagacaga

SEQ ID NO: 200556 - RNA, 74 nt, Homo sapiens
aagcagccgcagagccccccagcagacgagcccagaccgacagcagcgaaagaccagaagaagagcgaggacag

SEQ ID NO: 200557 - RNA, 89 nt, Homo sapiens
cagccgcggggccccgagggcagcacgggaggccgagccggcgggccgggacgccgggggaagagccccacgaccgcagaagacaccca

SEQ ID NO: 200558 - RNA, 71 nt, Homo sapiens
gcgcccgagaaggggacggcgggcgagggaggggaccgccgcgaacagccagcaaagacaagagcagacca

SEQ ID NO: 200559 - RNA, 68 nt, Homo sapiens
caacagcccgacaaccaggccagagagaaggcgcgagggcgccacaccaaagcacgcagcacaagccc

SEQ ID NO: 200560 - RNA, 58 nt, Homo sapiens
ccggaacaaagagggacacccaaggcacgagaccagagaagggccgggagacgaccac

SEQ ID NO: 200561 - RNA, 73 nt, Homo sapiens
ccaagcgcccaaggcccggcccgcacagaaaacgaacgagaaacgagggagaagaagcagaaaaagggggaag

SEQ ID NO: 200562 - RNA, 62 nt, Homo sapiens
cagaagaacaagaaggagaccgagaagggaaacaggggaacacaagcccaaacccagaacgc

SEQ ID NO: 200563 - RNA, 74 nt, Homo sapiens
gaaaaccagagaagggaaacgacacgagcaaaaacggggacccaaagacaggaccacgcaccagcagagaagga

SEQ ID NO: 200564 - RNA, 66 nt, Homo sapiens
aaaccaaggacggggaccgcacacccaagacaacggcaagcggagaagagcaaggccgaaccgaga

SEQ ID NO: 200565 - RNA, 71 nt, Homo sapiens
gcccacagagaaaacaaaaaccaggccccaaggaccccagaaaggggaccccaaccaagagccccgggaga

SEQ ID NO: 200566 - RNA, 69 nt, Homo sapiens
ggggcacacagaaagaggacgcccaaaagaaacagcaaaacacacacaaagccgccgcaacagccaacg

SEQ ID NO: 200567 - RNA, 67 nt, Homo sapiens
aagaccagaagaccgacaggaggccccggaagacgggaagaagacggcacgggacccccagcacagg

SEQ ID NO: 200568 - RNA, 52 nt, Homo sapiens
ccgcagccggggacgcagacgaagaggcgcggccagcgaagaagacgcagcc

SEQ ID NO: 200569 - RNA, 74 nt, Homo sapiens
gggagacgcgaagcgaacccgcgcaggagaacgcaacgcggaggcgaccgaaggaccgaggaaaccagacgagc

SEQ ID NO: 200570 - RNA, 63 nt, Homo sapiens
gcaaggaaagcagcaagagaagagaagccgccgagaaagggcaaagaaaaaggagagaaaaag

SEQ ID NO: 200571 - RNA, 79 nt, Homo sapiens
ccaaagggcccagcggcaccaggcccacacccaaggcagaagccccagaggagcccgaaacccccaggcgggcaggaag

SEQ ID NO: 200572 - RNA, 86 nt, Homo sapiens
aggagcggagacagagaggaccgagcgcgggcaggcgggaggcaacggagcaccagccgagaaaaggccaggaacagcagcaagga

SEQ ID NO: 200573 - RNA, 103 nt, Homo sapiens
ccacccaccagagacacagagaaggaggaaacaggccccaggcccgacggccggccggccagcgacgacagagacccaggaaaccaaagcaagacaagcgaag

SEQ ID NO: 200574 - RNA, 72 nt, Homo sapiens
aaaagcgggacacccacacaaaaagaaggagacagcgaccagagaaaggaacgagagcaagggccagcgaaa

SEQ ID NO: 200575 - RNA, 76 nt, Homo sapiens
cacgaaaacaacacagcagggaagcagaagggaaacaagccaggccagccaacacgagaccaccaaaggacgggca

SEQ ID NO: 200576 - RNA, 73 nt, Homo sapiens
ggaaaagagacaccgacaagacaccacggacgagagacaaacgccgaaggcgcagagacaaggaagggaagcg

SEQ ID NO: 200577 - RNA, 76 nt, Homo sapiens
agaggagacgaagagagaggagacgagacgagaggaagaggaaagagagacgacggaaacaggaccgaggccgcga

SEQ ID NO: 200578 - RNA, 80 nt, Homo sapiens
agggggagcggggccccggcgcgagccaccagggcaggggcacccagggagagagcaggggacccaagggagagagggaa

SEQ ID NO: 200579 - RNA, 67 nt, Homo sapiens
cacacacaccacaggaagccaagcagccggccagaagagccaaacagggcaaagcacagaaaaacaa

SEQ ID NO: 200580 - RNA, 76 nt, Homo sapiens
gcgagcagcaggagcgagcccgaggacaggagaggaagcgaacgaccggaccggggcggccagagcaccaggcggg

SEQ ID NO: 200581 - RNA, 49 nt, Homo sapiens
agcgaggcgaaagcaaccacagggccaaaccccaggacggcggcagaga

SEQ ID NO: 200582 - RNA, 49 nt, Homo sapiens
caagcacagaagaacaccgggggccccaggaagggaaccggagcaggaa

SEQ ID NO: 200583 - RNA, 54 nt, Homo sapiens
gcggccccggagacacaccgggggccggcccagagacccacagaaccgggcccc

SEQ ID NO: 200584 - RNA, 72 nt, Homo sapiens
aaccacaggcacagggaccgccagaaaccaaagacgagagggaagaaaagggaaccagcggagcgggacaac

SEQ ID NO: 200585 - RNA, 73 nt, Homo sapiens
ccaacgcacacgacaggaaggacagacacccacaccagaagagaaagcaaaacagagaaacaggaacagcaga

SEQ ID NO: 200586 - RNA, 78 nt, Homo sapiens
ccaaagcccaagaacgcaggacaaggcaaagcgaaggcggagcaggagaaagcggcacagaccccagaggaaaaaccc

SEQ ID NO: 200587 - RNA, 55 nt, Homo sapiens
cagagaccacccacacgaaagaccagcgaagcaggccccggcagcccacgaaccc

SEQ ID NO: 200588 - RNA, 81 nt, Homo sapiens
gccacgcagacggaaacaaggcaacagaaagagcaacagcagggcaacagccaagaagacgcggcaaacgcaggccaaggc

SEQ ID NO: 200589 - RNA, 39 nt, Homo sapiens
gaaaacgcgcaacacacgaacaacccagacggccacacg

SEQ ID NO: 200590 - RNA, 81 nt, Homo sapiens
gccacccaccgccgccgcccccagggagccggcccaggaggacagaccggaacacccagaagaaagcgcgcccccaaccag

SEQ ID NO: 200591 - RNA, 80 nt, Homo sapiens
gcgcacagccccggggagccgggcgggaccggcgcggcgccgggggcaccgcgccgccgagagaggacgaggcacagagc

SEQ ID NO: 200592 - RNA, 88 nt, Homo sapiens
gacccggcggcgggaggccacgccagccgccaggcggcgcaggccagcaccgcgaacgcaggcggccccaggcccccgacagaaggga

SEQ ID NO: 200593 - RNA, 68 nt, Homo sapiens
gacgccaggcagcgcccccaaacgggaaaagcacagggccaggaagcagagggacagccaggccagaa

SEQ ID NO: 200594 - RNA, 75 nt, Homo sapiens
gccgcgcaccgacccgacgcgccggcccacgcgcggccaaggccagcggaagccagaaagccacgcaggacccag

SEQ ID NO: 200595 - RNA, 76 nt, Homo sapiens
aacccggcccgcggaaggacaagaggccacccgagagcacaaggccccagcccgcaggaagaccgcaccacgcgcc

SEQ ID NO: 200596 - RNA, 70 nt, Homo sapiens
aaagcacagcagagaaaaagcaccaagaaagaccgaaaaagcgggaaccgccagcccggaaaacccaaac

SEQ ID NO: 200597 - RNA, 86 nt, Homo sapiens
ggaaagccccaagagggcggcggcagcgggccacgaggagggcgcagagcccaggagacggaaaagcagggaaccagggagaccag

SEQ ID NO: 200598 - RNA, 80 nt, Homo sapiens
agaagcagagacaccaggacagaaaagacaggcgccaggagcacagaagagcgaggagggcgaacacacacaaaagggac

SEQ ID NO: 200599 - RNA, 78 nt, Homo sapiens
gccacacaggccagaacgaggccggagcgggcagggcacacaaccgggcagcggacacggagcagggccgcccgggga

SEQ ID NO: 200600 - RNA, 48 nt, Homo sapiens
agcaagccgccgacagcacaggaaaggccacacccagcaagggacaag

SEQ ID NO: 200601 - RNA, 74 nt, Homo sapiens
ccacaccaaagaaggagaggaaaagccaaaggaagaaccaggaaggaaagccagggaagagcaaaacgaacaaa

SEQ ID NO: 200602 - RNA, 82 nt, Homo sapiens
gcaccaccggccccggaaggcccccccagcgccgccgcccagccagccccagggaagagacccggcccaggcggaaacagca

SEQ ID NO: 200603 - RNA, 80 nt, Homo sapiens
cccggaaccgggaccagggaaggaagggacggggcagaaacagaagaagagcacaaagcagggcacagaagccccgacaa

SEQ ID NO: 200604 - RNA, 75 nt, Homo sapiens
gaggaaaggaaacacgggcaaaccccaggaaggcagacaaacccagaaagagaaagaaaagcagcagaccaacgg

SEQ ID NO: 200605 - RNA, 76 nt, Homo sapiens
agaaacagggacacagaaggaagcccacagggcgccccacggaggccaagaaagccgcagagaggccaagagagag

SEQ ID NO: 200606 - RNA, 105 nt, Homo sapiens
ccccagccggacacgggggacccacaacaacgccagccccaggaaaacaaacggcaagagacagcacacccgaagacagagagagaagcaaaaacaggaaagcag

SEQ ID NO: 200607 - RNA, 81 nt, Homo sapiens
aagacgcagaaagaaccggaagacagaggcggagaaaaagcggggaaggggggcaaaaaaaagaagcaagcgaagcaccga

SEQ ID NO: 200608 - RNA, 80 nt, Homo sapiens
gcagcagcagcagccagacgggaaaggcagacaggagcagagaaaccaaaagggggaagagaaaagcacgagaaagagaa

SEQ ID NO: 200609 - RNA, 52 nt, Homo sapiens
agaccgaggaaaaggagagagacagaagaaagggagcccccaagaacagcga

SEQ ID NO: 200610 - RNA, 86 nt, Homo sapiens
gggaacccggggccagagggaagaaggagaaagggccaaccccgaagaagcaaacagaaacgaaggagacagagaagaacgacaag

SEQ ID NO: 200611 - RNA, 75 nt, Homo sapiens
gcagagccgggaggcaagaagagcaaaaaaacaagaaacaaagcagcacccacgaagaagacaacagcaaaccca

SEQ ID NO: 200612 - RNA, 65 nt, Homo sapiens
ggaagccgcggggcggggcggcggagcgagcagggcaaacacgaagaccgagggaaacgggagaa

SEQ ID NO: 200613 - RNA, 87 nt, Homo sapiens
gggagccccgcgggccgcccagcgaccaccgagacaagccggccaccggaaccagacaccgcgagcgcaggccgcacgaagcaaccg

SEQ ID NO: 200614 - RNA, 87 nt, Homo sapiens
gaagacacgcgacccggagacagcccaaaacccggaagagcgccccaggagaaacaaaaggcaacacacagagcccccgaaggaagg

SEQ ID NO: 200615 - RNA, 83 nt, Homo sapiens
caccaggggcgccacaaaggagccccacaccaccacacccgggccagcgagcaggccccgagccccggccccaaagacccaaa

SEQ ID NO: 200616 - RNA, 44 nt, Homo sapiens
gggacaagaaagaccgcaaggggaaggaccaccccgacccaagc

SEQ ID NO: 200617 - RNA, 68 nt, Homo sapiens
caaaaaaaaccgcacaaagagaaaaacaccaaaacagaaaaagcaaagcacaaggcagccaggggccc

SEQ ID NO: 200618 - RNA, 79 nt, Homo sapiens
gccgggaggcggcgggacaacgacggcgggggacgggcaccgggccgcgggcccggccagaccggagggccgggaggaa

SEQ ID NO: 200619 - RNA, 71 nt, Homo sapiens
ggcagagggaaaaaagagaggagcgaacgagacagaacaggaaaaaggacagaaccgcaaggccacaaacc

SEQ ID NO: 200620 - RNA, 70 nt, Homo sapiens
cgacgagccagaccgccaaaccagagaaagaaacacccgaacagcgaggcgcgccagaggacaccagacc

SEQ ID NO: 200621 - RNA, 120 nt, Homo sapiens
cgccagccacggaaacagaacacgccggaagagacacccaagcaggagagaagcacaaagggcccggaagaccagcaagggaaggaccagcacagaacagcagagaagaaaaggacgagc

SEQ ID NO: 200622 - RNA, 58 nt, Homo sapiens
acaggaccaaacaagacagaacgagagaccgccaccggagagccaccgcccacgggcc

SEQ ID NO: 200623 - RNA, 77 nt, Homo sapiens
acaagacagggcaggagaagacacagcccagaggagaagcaaaccaaggcaggcacgcaacaagcggacgagaaggg

SEQ ID NO: 200624 - RNA, 86 nt, Homo sapiens
gcgaggaagaagaggacgacgacgacgaggaagaggaggcgagaggcccacgcggaccggcagcgccaccggaccaccagacaagg

SEQ ID NO: 200625 - RNA, 94 nt, Homo sapiens
ccgccgccgccaacagccgggggacggcggggcggcgggcgacggcaccgggacccggcagcaaccccaacaaacgccagaggcagcccccccc

SEQ ID NO: 200626 - RNA, 113 nt, Homo sapiens
caggccgcaccgaacgacaggaccaaaacaccccaaggagcaccgccagcaagaccgagagccccccgcagccgggagacgggaggcccgaagcgaagaccacccaacccacg

SEQ ID NO: 200627 - RNA, 69 nt, Homo sapiens
ccagccgcagcagcgaggaaaagaagggggcggaaccgaaggcccggaccgcaaagccgggaaggaaga

SEQ ID NO: 200628 - RNA, 88 nt, Homo sapiens
caggccgcgcagagcgggaccacccgggcacagcaggcacggagagaggagcgggaaggccccgcacccggagaccgggggaagacaa

SEQ ID NO: 200629 - RNA, 43 nt, Homo sapiens
cggaaccacccaccgagggaccagaacagcgcgagccacaagg

SEQ ID NO: 200630 - RNA, 70 nt, Homo sapiens
gagcaaggggaaacacaccagcacacaaaggaccaaagggacggcagcagacagcaccacaaccgaaagg

SEQ ID NO: 200631 - RNA, 70 nt, Homo sapiens
gacgggaacggccccaggcaaacaaggggcagagaaccggagaacagcgagacgacgggaccgaaggacc

SEQ ID NO: 200632 - RNA, 72 nt, Homo sapiens
gaaggaccaagaaccagggacccaccacgacgaagaccggcaagcggggagcgcgggcaggagaagacccgc

SEQ ID NO: 200633 - RNA, 75 nt, Homo sapiens
caaaaccgaaaccaaggcaagaaaccccggacagaaggcacggcgaacaaagggcaacaacacaagaacgcaaaa

SEQ ID NO: 200634 - RNA, 82 nt, Homo sapiens
gaccggccgagcgcccagcgagacccggggccccagaggccgcggacaccgaccggagacaagcagaccggaagaccgacgg

SEQ ID NO: 200635 - RNA, 59 nt, Homo sapiens
ccagggacgcgacaaggcggagaccaaaccaggcaagaacgcagaacccagaacaggcc

SEQ ID NO: 200636 - RNA, 84 nt, Homo sapiens
cgcacacccagagaaaccgaggccggggaaccaggaggagaggggaggaggggcccagcgaggcagaacggacaccggacccca

SEQ ID NO: 200637 - RNA, 52 nt, Homo sapiens
gcgggacaagcgggcaagacaaagagaagaacggcacacaccccccagaacc

SEQ ID NO: 200638 - RNA, 75 nt, Homo sapiens
aaccacgaggccacagcacaggcaaccagcaacccagaccaacaagcagcaaagaggaccgcaggggggcgaacg

SEQ ID NO: 200639 - RNA, 72 nt, Homo sapiens
agaggcgggaaccgaagccaccgaggcagaacaacaacggaaaaggagaagccacaccagcggacagccacc

SEQ ID NO: 200640 - RNA, 34 nt, Homo sapiens
caaacccaacaagagagcacagcaacggagacca

SEQ ID NO: 200641 - RNA, 61 nt, Homo sapiens
cgagagccagagaccacgggcagcggaaaaaagccaccgaagagggcaacagcaccgaccc

SEQ ID NO: 200642 - RNA, 56 nt, Homo sapiens
gaaggcagaggcgggacgccaaaaaaagcacaagaagcgagaagagaagggggacg

SEQ ID NO: 200643 - RNA, 85 nt, Homo sapiens
cgggccggcgcgggagggcgggaggcccggagcgcccggagccggagggaccaagaaaggcccagggaccaaagcccggacaagg

SEQ ID NO: 200644 - RNA, 66 nt, Homo sapiens
cgccaaaagccgaacgaccacgcaagagacaagcaggacagccaaaccacaaggccagcagagccc

SEQ ID NO: 200645 - RNA, 81 nt, Homo sapiens
cagccgcagcggagcccacgagaggcagcgccaggcggagcagaccaccgggaaggcgccgggaaccaacaggaagaggac

SEQ ID NO: 200646 - RNA, 72 nt, Homo sapiens
gacaacaggaggacacggaagagggaagaaagaagcagcgccagggaccagacgggagagaaagaagaaaac

SEQ ID NO: 200647 - RNA, 72 nt, Homo sapiens
caaacagcgacggaggaggcagcggacagaggacggaaagaaaaaaggccgcccgaaaaggggaagaccggg

SEQ ID NO: 200648 - RNA, 82 nt, Homo sapiens
ggcagcgaacaagcgggagcaaggagggcgaagagcgaggaggaccaggccggaagacacccccgggaaccaccaggaccac

SEQ ID NO: 200649 - RNA, 57 nt, Homo sapiens
caaaacccgaagaaaaaacggaacaagccagcaaaagaagcagaagaaggaagcaag

SEQ ID NO: 200650 - RNA, 73 nt, Homo sapiens
caagacgcagggaagggcacagagaacaaccgcaacgaacaaacaggagacagagagcaagagcaccccaacg

SEQ ID NO: 200651 - RNA, 70 nt, Homo sapiens
caagaagacccgacagagcgacccgaagcgccgacaccgccgcccagccacaggaccgacaccgaaaaag

SEQ ID NO: 200652 - RNA, 71 nt, Homo sapiens
gggacaaggggggaagacaaaaggaaacaaaacagaagacaacaagcaaggaagaccgcccccgacaaaga

SEQ ID NO: 200653 - RNA, 78 nt, Homo sapiens
ggagagagagagagcccgcagcggaaagagcgggcaggggaacggcacagggaggggacagaccaaccggcagccaac

SEQ ID NO: 200654 - RNA, 72 nt, Homo sapiens
ggaaacagaccaaagaggcaagagagagaacaagggcccagccagcagagcacacaagacagcggacgcgac

SEQ ID NO: 200655 - RNA, 70 nt, Homo sapiens
gaggccacgacaaggaagagcagaagcgcccagcccgagaagaccgcacaaccgaggcggccaaagaaca

SEQ ID NO: 200656 - RNA, 74 nt, Homo sapiens
aaaagagccaaggacccaaaaaccagggcaaaccgacaccagcgacacaagcgcgagggaaccacagaggacag

SEQ ID NO: 200657 - RNA, 80 nt, Homo sapiens
accccagggagaaggaggcgcaaggccagcagcaacaccacaaggcaccacagaaaagcaaggcgaaggaggacaggaga

SEQ ID NO: 200658 - RNA, 75 nt, Homo sapiens
acgggaccgccccccacggcgcaacaaggcgcgcgaccaccacggagccgagggaggagaagaagaaacccaagc

SEQ ID NO: 200659 - RNA, 64 nt, Homo sapiens
agcagcagagaccagcggcggaagggaaaccacagaggccaccaggcaccggacagggaggaac

SEQ ID NO: 200660 - RNA, 85 nt, Homo sapiens
cccagccggcccgcgggggagccccgggagccgcacgaaggaaccaaggcagccccaaccagacggaacaaaccaagcagggcag

SEQ ID NO: 200661 - RNA, 40 nt, Homo sapiens
ggggaacagggccagccagccagcagcaagaaggaacgac

SEQ ID NO: 200662 - RNA, 59 nt, Homo sapiens
ccaccacccacacccaccaacaacaccacaaaaccacagccaagggcacccgcccaccc

SEQ ID NO: 200663 - RNA, 64 nt, Homo sapiens
gacgaaggccgaggcgaacaacagaaaaaagacacggccacaggacgggcgcacaacaccaaca

SEQ ID NO: 200664 - RNA, 54 nt, Homo sapiens
cccgccccccgaaggcgcgccccaaacaggcaccagccggcaaacaccaggcgc

SEQ ID NO: 200665 - RNA, 72 nt, Homo sapiens
gaagcccacccggaaacaaacgccaggggacccccagaccaccgacagcaccaaggggagcaccaggcacaa

SEQ ID NO: 200666 - RNA, 66 nt, Homo sapiens
ccgccgaggagaaaacacccaggacaggacaagccgccgcaagaaaaggagacaggaagagaaaaa

SEQ ID NO: 200667 - RNA, 77 nt, Homo sapiens
aggccgcagacacagcacggaggaggcgaacaagagaaagaggcaaccacgccccacccagagaagcaaaggaacca

SEQ ID NO: 200668 - RNA, 35 nt, Homo sapiens
cggaaggagacggagaagaagcccccagccggaga

SEQ ID NO: 200669 - RNA, 69 nt, Homo sapiens
cgacagcggacggcgcggcccagaacagcgaaaccagcacccgggagggacacaacccccggaaagcca

SEQ ID NO: 200670 - RNA, 68 nt, Homo sapiens
ggagcacaccacaaagccagaggacggaagcaaagggcagccaccgaagacagcgaccagacaacagc

SEQ ID NO: 200671 - RNA, 56 nt, Homo sapiens
gaagggaagcggccaaggcacggaggccgcgcgaggggcacagaggcaggcacaaa

SEQ ID NO: 200672 - RNA, 61 nt, Homo sapiens
cgggagaggcgcagcggaggcggaagcaggaccggggcacgggccgagaaacagacaaccc

SEQ ID NO: 200673 - RNA, 81 nt, Homo sapiens
ggcgaagggcaccggagcgacagaaaacggaacaagcggaggacaccgagaccagcagccccaggccgagcccaccacccg

SEQ ID NO: 200674 - RNA, 69 nt, Homo sapiens
ggacccggagcgacaagcgccccgacggagcgccaggacgcgccagaacacaaacaaaaccggaagagg

SEQ ID NO: 200675 - RNA, 78 nt, Homo sapiens
caggagaaggcagagcggggcacccacccaaggaaagccggcaccgacgaggaggcaacagagcacccccaaaaaccc

SEQ ID NO: 200676 - RNA, 55 nt, Homo sapiens
ggaccagaccgaccaccaaaagaaccccggccgggcgaagcggggaccaagcaag

SEQ ID NO: 200677 - RNA, 76 nt, Homo sapiens
ggccgaggacacccccgccagacggaacacgcgaacacgcaaaaggaagcggcaggcacgggacccaaggggcgaa

SEQ ID NO: 200678 - RNA, 68 nt, Homo sapiens
ccaccggacacggagccaaaaccgcccagcccgaggccaccaaggcgaacaagaggcgccagcgggcg

SEQ ID NO: 200679 - RNA, 75 nt, Homo sapiens
gaacgggccaggcaggaagaaacaacgaacgagcaaggaagggccaaggcagaccccacaccggagaacgcaacc

SEQ ID NO: 200680 - RNA, 62 nt, Homo sapiens
gcggcacggcgcccacccgggggacaggagcgcagcaggccacccaagcggaggcccggcga

SEQ ID NO: 200681 - RNA, 79 nt, Homo sapiens
gaaacgcagccagggggaacaccaggccaagcacccacagcaaagagagccccaggagaaggggggagccgcacgaccc

SEQ ID NO: 200682 - RNA, 78 nt, Homo sapiens
caggccaagagggacccacccggcgcaaccaaccagggcacccagccggaggggggacacccccgggggcagccaggc

SEQ ID NO: 200683 - RNA, 86 nt, Homo sapiens
agagcgaaggcgagagggacccagacaaggggcgaaaaagccggacagcaccaggcaccgacacgaggcccaggagagaggagccg

SEQ ID NO: 200684 - RNA, 68 nt, Homo sapiens
gaagcggagaaccacaaacgcacaagcagaggaaccagggaaccgccgccagcaaccaacaggcacga

SEQ ID NO: 200685 - RNA, 40 nt, Homo sapiens
aaaggaaggagagaagagaggcccgaaagccaacgccagg

SEQ ID NO: 200686 - RNA, 74 nt, Homo sapiens
gggacaggacagggggacccggcgcgcgccccaccaagggcgagacaccccgccaggccccggagccagcgggg

SEQ ID NO: 200687 - RNA, 71 nt, Homo sapiens
ggcgaccccagcacggcaaagcccggagacaagcacccagccccgggccggcggggagacccacaaccccc

SEQ ID NO: 200688 - RNA, 36 nt, Homo sapiens
aacgaggaaccgcaaaggaagaaagagggccacgga

SEQ ID NO: 200689 - RNA, 74 nt, Homo sapiens
gccgcccccggaaaagggcaccgcccgggggggcggagcgcgcgggcagcggcgccaaacaccaccgccaacgg

SEQ ID NO: 200690 - RNA, 72 nt, Homo sapiens
agcacaaaaccacacaggcaagcaggagggcaccccaaaagaaagaccgcaacccaccaaggagcacaggac

SEQ ID NO: 200691 - RNA, 59 nt, Homo sapiens
cgcccgccacgacagaccgacacgacgcagcacaggcaccgaaagcgaaggaagcccgc

SEQ ID NO: 200692 - RNA, 75 nt, Homo sapiens
gggaccaaaccagaagagccaaaccaggggaagagcaggcgcaaccaggcggaggcaaggacaagccacgcaacc

SEQ ID NO: 200693 - RNA, 101 nt, Homo sapiens
gaggcagcgcgggacccagcccaggcggcgcggacggggcgggaaaaaccagaagagaaaaaacaaaggggagaggcaccccgcgggacgaccggacagag

SEQ ID NO: 200694 - RNA, 49 nt, Homo sapiens
cagcaacccagagcccacaggcaaaggagcaccccaaccggcccggagc

SEQ ID NO: 200695 - RNA, 80 nt, Homo sapiens
gcagcccccacgcgcacagaggcagccggcgcaggagcagcagcgcaggaagcgaaaggggaaaagcgaagggaagacag

SEQ ID NO: 200696 - RNA, 81 nt, Homo sapiens
cccggcgggcggcccgcgggcagaccgaggccaaaagaaaggaagaaaacccccaaaaagccaaaaggccaagacaagaag

SEQ ID NO: 200697 - RNA, 76 nt, Homo sapiens
gcgacaggccaggcccagcccgggcccagcccaggcaaggagcagggcaacgagcacagacagaaagcaacccgag

SEQ ID NO: 200698 - RNA, 80 nt, Homo sapiens
gacccaggcggagccggagcgcgagcgaggcaggaaagggggcagggcagcagcagcgacaggcagaagcgggaacaacc

SEQ ID NO: 200699 - RNA, 78 nt, Homo sapiens
agggcagcaagaggcgcgcagagggcgcaggaaaaccagagacccagacacgcgaaggaacgaaaggccaaaaggcaa

SEQ ID NO: 200700 - RNA, 79 nt, Homo sapiens
acacagaaggcgaaacagaaggcggaggcagaacgaaagagcggccggagcgggacggaaggggacacaggcaagacca

SEQ ID NO: 200701 - RNA, 62 nt, Homo sapiens
cggcccgagaaagcccgccagcagggcggggaacagaccagggaaggggaggagaagagccg

SEQ ID NO: 200702 - RNA, 75 nt, Homo sapiens
caacagaccaaggaagagccagcggaccacaagcaaacaaaagccaacacgaaccccaagcccggccaagcgccc

SEQ ID NO: 200703 - RNA, 76 nt, Homo sapiens
agcgacgggcaggaaggagggggcgcacaaacgaggagaagacagaggagccagaccaagagacagcacaggcgag

SEQ ID NO: 200704 - RNA, 78 nt, Homo sapiens
cacagacagaaacaacgcccccgcccccaaaggaaagccgaccaagacggcaccccaacacacagagacaggggaaaa

SEQ ID NO: 200705 - RNA, 92 nt, Homo sapiens
aggcgaagaaacagcggagaaggagaagggagaagaaacagcagccgcagacaacggcaagcggagaagagcaaggccgaaccgagaggaag

SEQ ID NO: 200706 - RNA, 77 nt, Homo sapiens
caggacgacaaccagaagagggggggacgaggaccggagaccaagaagccgggcccagcacaagccgaggaccaaaa

SEQ ID NO: 200707 - RNA, 73 nt, Homo sapiens
aggaagggaacaagaggggcagcaagggccaagaacgagaggagcaacagagacaggcggaggccaccccacc

SEQ ID NO: 200708 - RNA, 68 nt, Homo sapiens
ccccagggaagacagcgcgagggccacaggcgaggcgaagagggagagaacaaggaagacggcagaca

SEQ ID NO: 200709 - RNA, 78 nt, Homo sapiens
agacgaaccagacagggcagagacagcggacgacggccacagggcaaggccagagaaggcgggagaaagacacgaacc

SEQ ID NO: 200710 - RNA, 64 nt, Homo sapiens
cagagaggaaaaacacaacccaagaaacggcgcccgagaccaaggcgcacaggaaggaaccggc

SEQ ID NO: 200711 - RNA, 75 nt, Homo sapiens
aggagcaggcgagaagagaagccaaccaccacaggagccccccacggcgacagaccccgcggcaggcggggaaca

SEQ ID NO: 200712 - RNA, 65 nt, Homo sapiens
aaacgggagaaaaacacaacgcggggaccacgagccaggacccagcgcccccccggggaagacag

SEQ ID NO: 200713 - RNA, 76 nt, Homo sapiens
ggagcgcagcggcacgcacgcgaagacagcggcagaacccagccggggcagggagccagaagcacgccagccacaa

SEQ ID NO: 200714 - RNA, 75 nt, Homo sapiens
acgggagaaagacacagcccacacccagaccacagagacaccgggcccagcagaggcccagcgagagaggacaga

SEQ ID NO: 200715 - RNA, 78 nt, Homo sapiens
aaaaagccaccaccgaaacgccaaaaagacaaagaaacagccggaaaagcacgagcacaagacgaaaacgacacgcca

SEQ ID NO: 200716 - RNA, 81 nt, Homo sapiens
caaggaccggaagcagagaaaaaagccaggcccaccagcagaaaggccagagaaagcaaggcaccaggcggacaaaaacgg

SEQ ID NO: 200717 - RNA, 72 nt, Homo sapiens
ccaccgggagccgcggccgggagacggaagggaaggggacaggcaacgggcaccccgggcggaaaagaggga

SEQ ID NO: 200718 - RNA, 76 nt, Homo sapiens
cagcccccgacagcgggaacagaggaccaaagcgaacagacaggaaaccagaacagcaaaaaagacaccccaaacc

SEQ ID NO: 200719 - RNA, 99 nt, Homo sapiens
caaccaaggacacgcagcaaacccaggacagccccaagacccagaaaagcagacagcagaccacagcccggcaggcccaaaaacccaaagggacagaag

SEQ ID NO: 200720 - RNA, 85 nt, Homo sapiens
caccaagggagccagcggaggagcaagaaggacccgagacagggaagaccgcgcgaaagccagccaaccgcacgacggacagaac

SEQ ID NO: 200721 - RNA, 53 nt, Homo sapiens
caacccgacccgacgaagagaacaacaggggggagaggagagaaccagaagag

SEQ ID NO: 200722 - RNA, 62 nt, Homo sapiens
gggagaggcaggaaaagagaggaaaaaagcagccgacagcgggaagacgagaacaaaagaag

SEQ ID NO: 200723 - RNA, 63 nt, Homo sapiens
aagcagggcaaaaggggagcagccgcaacagcgcaccgacacaagcccagaagccccacccca

SEQ ID NO: 200724 - RNA, 66 nt, Homo sapiens
cgcgcgcaggcgcccagcgcgaagggaccagacacaggagggggcccagagagagcaggggcccgg

SEQ ID NO: 200725 - RNA, 83 nt, Homo sapiens
gaccccggagggcagggccagccggccccgggcagcggacacccgaaggcccgggccacggacaggaccacgcacgaagaaga

SEQ ID NO: 200726 - RNA, 51 nt, Homo sapiens
aggaggaagaagaaggaagccaaagaaggcagaaccccaaagcagagaagg

SEQ ID NO: 200727 - RNA, 69 nt, Homo sapiens
cgggacaacaaaagagccacccaaggggagaaagaacccaagggccgggcgcgggccacgccgaaccca

SEQ ID NO: 200728 - RNA, 83 nt, Homo sapiens
caagacagcagcagcagccacagcaacaacacaaaacaagcccagcaacagaccaggagaacggaagccagagaaaaggaaga

SEQ ID NO: 200729 - RNA, 87 nt, Homo sapiens
ggcgcgaccccaacccagccccaaaggccggaaaaagaacccccccgagaaacggcaaggaaggcgagggccagaccggagccaagg

SEQ ID NO: 200730 - RNA, 71 nt, Homo sapiens
ccaaggacaaaaagagaacaaaacaggcccaaagcccagccaaggacccgaaaaacgagccacaccaaaag

SEQ ID NO: 200731 - RNA, 68 nt, Homo sapiens
ccgcaacgacgcagcacgcagcacggggaacgagccacgccaaaaaaagggccgcggaacaaaaaggg

SEQ ID NO: 200732 - RNA, 77 nt, Homo sapiens
acagaagcggcggagggagaagggaaggaacaaagcagagaaaccaaaaggccagacgaacacgagagggagcgaaa

SEQ ID NO: 200733 - RNA, 77 nt, Homo sapiens
aggcgaggcagggaggacccacccccgggggaaaagaacgagggcgacagcaagagggcgcccggaagaggaaagga

SEQ ID NO: 200734 - RNA, 85 nt, Homo sapiens
ggcgagagcagcccccggaaaaagcaagcgaagacacaagaagaccgagcaaagagaccccggaacgccgaaagaagaaaacccg

SEQ ID NO: 200735 - RNA, 54 nt, Homo sapiens
gaaccaccgggccaaccgaagcaacgacaaggacacgacaccaaaaaagaagac

SEQ ID NO: 200736 - RNA, 79 nt, Homo sapiens
cgacgggcccaccgccgccggaggcgcagacccgccagcgccgccagcgcccggcccggcccgaggaggacccaggaga

SEQ ID NO: 200737 - RNA, 105 nt, Homo sapiens
agacaagaccaaggcaacaaggacaacaagagacgggacaagacagggcaaaggacagaccagccaaacggaacaaaaccgaaccaacaccacacaaacccgacg

SEQ ID NO: 200738 - RNA, 70 nt, Homo sapiens
gccacggaaaaaggacagaaaaagaggacgaagagcacacgaccacaccaggcgagaaaaccaagcagga

SEQ ID NO: 200739 - RNA, 55 nt, Homo sapiens
cggagccacgccccacgaccgccagcacccgagacgcccgaccaggccgcggggg

SEQ ID NO: 200740 - RNA, 70 nt, Homo sapiens
gcaaccccccaggacgggcggaggcggggggaccggcgggcgggcggcacgaggcaagacgggcccccag

SEQ ID NO: 200741 - RNA, 39 nt, Homo sapiens
ccagaaccggcccacaggacagggcagaccgccagcagc

SEQ ID NO: 200742 - RNA, 79 nt, Homo sapiens
agccacagagagaaccaccagcagccaccaccaccaccaccaccacagagcgggaagaggggcgagacggaaaacacaa

SEQ ID NO: 200743 - RNA, 79 nt, Homo sapiens
aacaggccagaaaacagaaggccacgcggaaacaaggcgaccccagaaaggagaaggaaggccagaaaggagcacacgg

SEQ ID NO: 200744 - RNA, 63 nt, Homo sapiens
ccagcggcccggagccccgagccaagaccgaggaagggggccaggcgaccagaccggacccag

SEQ ID NO: 200745 - RNA, 69 nt, Homo sapiens
gccaccagcggggagagcccaagcccaggacaccgcgcaggaaacgagggaaaaagacacagcaaagcc

SEQ ID NO: 200746 - RNA, 79 nt, Homo sapiens
agaaaggagcacgcccaacgaaagggcagacagacggcaggaggcccagggaccgcaggagacacggacacgagaacaa

SEQ ID NO: 200747 - RNA, 66 nt, Homo sapiens
ggccacgcgggaccaccggcaccaccaaagaccagggagcagaaaaaaaagagaaaaaacggcgaa

SEQ ID NO: 200748 - RNA, 77 nt, Homo sapiens
cacgcaggaaaggcacggaaggagaggaagaaaggcccggccagacccgcccagaggaacccacagcccagaggaaa

SEQ ID NO: 200749 - RNA, 66 nt, Homo sapiens
cggggacccccgacgccaggcagcgcccccaaacgaacgacaaaacggaaggcagagaccccaagc

SEQ ID NO: 200750 - RNA, 71 nt, Homo sapiens
acacagagggacggaaccacaacaagaaggacagcaaaggagcagggagggcgaagggaagaagcagaaac

SEQ ID NO: 200751 - RNA, 59 nt, Homo sapiens
aggaccggccgacacgcggcccccgaccggccgaaccggggcagcgcgcaaggaggagc

SEQ ID NO: 200752 - RNA, 75 nt, Homo sapiens
agaggaggggccggggcgggccgcagaggccccaaagccggggaagaccagccgaaacccggggagccccaggaa

SEQ ID NO: 200753 - RNA, 108 nt, Homo sapiens
cggggagaccagaaccaacgagcagggaacgaagacgcaagagacacgaaaggcacaaagacggcgaagaaacaggaagaaaagagggaaacaaagcaaggacccgaa

SEQ ID NO: 200754 - RNA, 64 nt, Homo sapiens
cagccggggggcacagccggggcccccaagccggcaggggaacgaggagggagcgcggagcggc

SEQ ID NO: 200755 - RNA, 72 nt, Homo sapiens
caaagccagagacagagcacaaaggaaagacggcccacaaggaagaacgaggacggaaaggggcacagcagg

SEQ ID NO: 200756 - RNA, 65 nt, Homo sapiens
aagaaagaaaaccacgcggagaggggcaggaaggaaagaaaacaagccgacagaagaaagcagac

SEQ ID NO: 200757 - RNA, 87 nt, Homo sapiens
gccgggcccgcgcgcccggccaagaggcaaaggggaggacgcagcaaaccaccagaagggacgaacagcggggacgccccagcagac

SEQ ID NO: 200758 - RNA, 86 nt, Homo sapiens
ccgagcggccaggacgacgaggagcagggccgacgcgcagacgccaccccgccccaccgaggccggcgggccacagcaggcgcccc

SEQ ID NO: 200759 - RNA, 69 nt, Homo sapiens
ggcgcgacaggaacgggcaaacagaagacgggcaaaagagcggaagaaccaacgacagaagacggagcc

SEQ ID NO: 200760 - RNA, 54 nt, Homo sapiens
gagggggcccaggaaaaggagcaggcgagggaagacagaaggaagcaaagacag

SEQ ID NO: 200761 - RNA, 113 nt, Homo sapiens
acagaagcagagaaggcgaggaaagccgaagagagaggcggcagcagaagcaaagcaggccaacgcacaagaacgaagaagaaacaaagcccaaagaaccccgaccaaaggaa

SEQ ID NO: 200762 - RNA, 72 nt, Homo sapiens
gaaggggagacccggcgcgaccacgcccggcgccccaccccaggcggcgaacgcaagcagacggaagaagac

SEQ ID NO: 200763 - RNA, 57 nt, Homo sapiens
caaaaccaagccaaacacaagcagaaggagcgaagaagaggcacaggcgcgaacacc

SEQ ID NO: 200764 - RNA, 84 nt, Homo sapiens
gggaacggacagcccgacccaggcgccgggaccccaggccagacagggccgaggccccagagaggggaaagaaccagacgacag

SEQ ID NO: 200765 - RNA, 84 nt, Homo sapiens
acgcgaggggcggaggcgggagaggcgagccgcgagagggccggcaggcccgggaagggaccagccgcagaagccaggagaagg

SEQ ID NO: 200766 - RNA, 57 nt, Homo sapiens
cccacacagccacacagacaccgccacaggagagagcaaggcgaggaacagcagaaa

SEQ ID NO: 200767 - RNA, 74 nt, Homo sapiens
gcaccgccagagccaaggccagggggcaaggcggggggagaagagggagacccgaacgaagacgcagcccagac

SEQ ID NO: 200768 - RNA, 80 nt, Homo sapiens
ccagaacacagcaagccgaagaaggccggcccacagcccaaaaagaaacaggaccgaaagccagagcgaagccaaagccg

SEQ ID NO: 200769 - RNA, 75 nt, Homo sapiens
gagcagacgccccaggacgcggcagcgcgcgagcaccagagacacgacgcaaaggccaccaggcagccgcgagac

SEQ ID NO: 200770 - RNA, 73 nt, Homo sapiens
ggaccgagagccaggccaccgcaaaggacgcgcggccagccaggggagcgggagaagggacacacaggaagac

SEQ ID NO: 200771 - RNA, 75 nt, Homo sapiens
cggaggaagcggcgcacgagcccagaggacagaaccccagcccagagccaacaccccacaagaaaaccaaacaag

SEQ ID NO: 200772 - RNA, 62 nt, Homo sapiens
cgcagggcgcccccgggcacacgggcgaggggggggccaaccagcgacggaggggagccaaa

SEQ ID NO: 200773 - RNA, 59 nt, Homo sapiens
gcggcagcagcccagagcgcaaagagacacgacgccccacgccacccggacccccgcga

SEQ ID NO: 200774 - RNA, 75 nt, Homo sapiens
cccagcgcaaaaacagaggcaacaacacgcggcccgaggagcagggacggggggaaaagcgcacccgggcccggg

SEQ ID NO: 200775 - RNA, 71 nt, Homo sapiens
gggcgcccgagagaaaacccggacgaggggcaggaccggggacacacgacgcgggacgagcccgccgccag

SEQ ID NO: 200776 - RNA, 73 nt, Homo sapiens
cgggggggcacaagccgccgcaggacggagaagggccgacggcaggcgcaagggccccaaacggcgaaccggc

SEQ ID NO: 200777 - RNA, 56 nt, Homo sapiens
gaacgcccgcagcaccggaccccgggcagaggcaggacaagagcgcccaagcggac

SEQ ID NO: 200778 - RNA, 83 nt, Homo sapiens
agagccgccgacagaagaaagacggcggaccgcgggggagaacggcagcgaggcacaggccccaccgcgaggcgagccacccc

SEQ ID NO: 200779 - RNA, 60 nt, Homo sapiens
gaaaaggccaagaaggcagggacaaaaacgaacagaagaggacaggagagacgaacccag

SEQ ID NO: 200780 - RNA, 90 nt, Homo sapiens
gaacaaagcgccaaacccgcggaaccagcagaagaacaggagacgcgggcgggaggccacgaccgaggagcgaagcgagaggagaagcgg

SEQ ID NO: 200781 - RNA, 34 nt, Homo sapiens
cacaggggcaagcccgagcacaaagggaagagcg

SEQ ID NO: 200782 - RNA, 72 nt, Homo sapiens
ggaaccgggaaacccacaccacagacgagagggcggagaaggaacagggagagaaacaacgggaacagaaag

SEQ ID NO: 200783 - RNA, 79 nt, Homo sapiens
gggcccccagcacccccagccccacccaccgccaggagcccccccagaaggagcaacaggcgaaaaccgagacagcacc

SEQ ID NO: 200784 - RNA, 81 nt, Homo sapiens
gacaccccggccagggggacggcgccacgcaccggacgacgcccggcgccagcacacgcagagacgagcacaacacacaaa

SEQ ID NO: 200785 - RNA, 72 nt, Homo sapiens
agggggggcaagcgggggcgcggaacagcaacacccgcacaggccggagcaccagcggagagcggacccggc

SEQ ID NO: 200786 - RNA, 103 nt, Homo sapiens
gaggaagacgccgaggccgggccaggaacggcggacggggggcggcagccagccgcagggaacacagacggcagagcagaccagacagcgccagccccacccc

SEQ ID NO: 200787 - RNA, 77 nt, Homo sapiens
cgggacagagcagcagacgcagcgccagccgcaccccagcgccaaggaaggaagggaacacggacgacgagacacga

SEQ ID NO: 200788 - RNA, 74 nt, Homo sapiens
acaccgaccaacccacgagaggcaaagaaggccagaagggacaaccaggcagcagccccacgagagagagaagg

SEQ ID NO: 200789 - RNA, 84 nt, Homo sapiens
agagagcgacccggggggagcgcggggcgacgcggcgcagggacccgggacagcggagaggcaagaagaagaaagcaaagaaca

SEQ ID NO: 200790 - RNA, 58 nt, Homo sapiens
aagaagggccaccccacagacgggagaagaaaagcaacacagcgaccagaaaaaacag

SEQ ID NO: 200791 - RNA, 70 nt, Homo sapiens
ggcccaaccgaagaaaacaagcaacacccccagggagcgggggcggaaacacggaagagggggaggccag

SEQ ID NO: 200792 - RNA, 72 nt, Homo sapiens
acaagaagacaaaccagaaaacaagccgaggaacaagagacggaccagcagcacggcacaaggccgacgagg

SEQ ID NO: 200793 - RNA, 77 nt, Homo sapiens
gaaagagccaaacacccggaccagggccaagggccagccgagggggcaccggagcgcaagggggaacgccccgacca

SEQ ID NO: 200794 - RNA, 123 nt, Homo sapiens
cgcgaccgaggggacgccgcccgccgcccgccgcaggccacccgggaacggaggagggccaccaggagagaacgccgcgccgcgcgacaacggcccggcaggcaaggccggccgcgggcgacg

SEQ ID NO: 200795 - RNA, 70 nt, Homo sapiens
gaaacgcccgggacacccacaagaccccaccaaaacggacaaaagagcccccacgagaaggacagccggc

SEQ ID NO: 200796 - RNA, 52 nt, Homo sapiens
agccaacacaggggcaagcccgagggggacgaccaccagccaggccggggac

SEQ ID NO: 200797 - RNA, 85 nt, Homo sapiens
cccccaagggccaaagcacagccaagccagcagccgggcaaggaggggaggcgagaacacgaggaggaaccacaagcagcaaggc

SEQ ID NO: 200798 - RNA, 75 nt, Homo sapiens
aaaccaggccacgaacggaggaccgccgcacccaagcgacagccgcagacgccgggacccacgcagcaggccacg

SEQ ID NO: 200799 - RNA, 87 nt, Homo sapiens
gagccgggccccccccaggaacggcccggggccgacccggcccgaggggaagcagccaggaccggcggacgcgagaaagcaggacgg

SEQ ID NO: 200800 - RNA, 73 nt, Homo sapiens
gcaaacaccccacccaaacgcacacgaaaaccaaaagagcagaaggagcgagagaacagcaccaccgccgaaa

SEQ ID NO: 200801 - RNA, 72 nt, Homo sapiens
cccggcgccgggacgcccaaggggcggaggacaagaacggcgggcgagcaccaccccacagacgacacaaac

SEQ ID NO: 200802 - RNA, 65 nt, Homo sapiens
cagccgcagaggaggagcgcagcccggcccggaacccgcgcccagaagggaaggccacggacggg

SEQ ID NO: 200803 - RNA, 72 nt, Homo sapiens
gcgcccgccagcgagaggacaagacaaagaacccgagaggacggagaaggaaagccccgaagcgagggccac

SEQ ID NO: 200804 - RNA, 76 nt, Homo sapiens
ggcggaaagacgcccggcaagagagccgcacaagcgccggccaaggaagcgcggaacaaaggaaccacaaaagcac

SEQ ID NO: 200805 - RNA, 49 nt, Homo sapiens
cgaaccgggaaagagaggaaaaacagggaaaaacaagagcagggaagaa

SEQ ID NO: 200806 - RNA, 83 nt, Homo sapiens
agccaggaggaggcgggaacgaccaagagggagaagcacgcagggcccacagagagcgcaacaccaccacagaagagaggacc

SEQ ID NO: 200807 - RNA, 75 nt, Homo sapiens
acaggaagcccaggaggcaaaaggcagagaggagacaagagaagagcaaggcaagggaccaggaaaaaagcccgg

SEQ ID NO: 200808 - RNA, 78 nt, Homo sapiens
gagaaggcaggcccggggagggggacccggacccaggaagagccgacccaagagccaacacacagcacaacagagagg

SEQ ID NO: 200809 - RNA, 83 nt, Homo sapiens
cacgacaccggaaaaccaaagacagcacgagcacagaaaggacccgaaggcaccaagcaccgcccaaacccggcaccgcacac

SEQ ID NO: 200810 - RNA, 79 nt, Homo sapiens
cgcaagggccacgcgggcagaccgacagaagggcacaaggccaagacggccaagggagccacagggcccagagcacgga

SEQ ID NO: 200811 - RNA, 62 nt, Homo sapiens
cgaaacagcaagaacacacgaaccacagcgaaacaggacaggcagaagagggcgggccacca

SEQ ID NO: 200812 - RNA, 84 nt, Homo sapiens
gcaagagagccgcacaagcgccggccaaggggaagaacccaagacacacacagcggagcaacaaggagggaagccacaagcaga

SEQ ID NO: 200813 - RNA, 77 nt, Homo sapiens
aagaccacagcgcgcggcccccacaccacacagagagcgacaccggaaggaggagaagaaccgaacgggcagcgaag

SEQ ID NO: 200814 - RNA, 74 nt, Homo sapiens
ggccaccggccccacacgaccggcccccgcaccacgccagcgacccgagggagaaagaccaaccagaaagcgcc

SEQ ID NO: 200815 - RNA, 77 nt, Homo sapiens
ggaccacggcagaaggagcggaaggcggagcgaagagccggaccaagcgccaggacaggcaggagggcccagagaag

SEQ ID NO: 200816 - RNA, 67 nt, Homo sapiens
agaaggaccaagaaccagccacacacaaacgaggaccagaacagggggccaaaccccacggcaccgg

SEQ ID NO: 200817 - RNA, 65 nt, Homo sapiens
cggcaccgacgagacggaggcaacacaggcaccagccaaaccaaccaccacaaagaaccaaaaac

SEQ ID NO: 200818 - RNA, 64 nt, Homo sapiens
gcgcccgggcccgccccggagggccagcacagaggagcccaggaggaggaccccccgaccccag

SEQ ID NO: 200819 - RNA, 36 nt, Homo sapiens
cccagcaccaggaggcgagaggagcgcccggcccag

SEQ ID NO: 200820 - RNA, 70 nt, Homo sapiens
aagcagaagaggggaacccgcggacacgcaagcccgacccacaccagcaggacacacagcaacgaagcag

SEQ ID NO: 200821 - RNA, 75 nt, Homo sapiens
accggggaaacagcagcaccaaaacgaggacagacccccccccagaggaccccaaaacacgcagcacaacagaaa

SEQ ID NO: 200822 - RNA, 76 nt, Homo sapiens
cgcggggccgccgcgggcgccgccaccgccggggcccacagcgcgcacaagggcagccagggaagagagacaacca

SEQ ID NO: 200823 - RNA, 82 nt, Homo sapiens
gcgcggaccacaaaccgcgccagaaaaggacgccaacagccagcccaagcgaaccagaaagcaccacggaccggcccgaccc

SEQ ID NO: 200824 - RNA, 75 nt, Homo sapiens
caaagaggcaagagagagaacaagggcgagaaaggaccagcacagagaagcacgggagcacagaaggcaaggggg

SEQ ID NO: 200825 - RNA, 83 nt, Homo sapiens
ccgcccccgcaggaccagaaggcacacaccgggaaggggaagacggcagcgggccggaggcccaaaagaaacaagaaaccagg

SEQ ID NO: 200826 - RNA, 57 nt, Homo sapiens
ggcgccgccaacgcgcccccgagccaaaaccccacgcagaggaagcgccggccaaaa

SEQ ID NO: 200827 - RNA, 63 nt, Homo sapiens
cgggggagaggaggcgaagacaagagagccagcggagccccgggcccagcaggaggcggcccc

SEQ ID NO: 200828 - RNA, 61 nt, Homo sapiens
gagcagagaaccggcccaacccgcggccagggcacccccgagaggacaacaggcacggaag

SEQ ID NO: 200829 - RNA, 53 nt, Homo sapiens
cccaaacaaaaagacacgaagaggaggaagcccagagacagaaagagaaaagg

SEQ ID NO: 200830 - RNA, 88 nt, Homo sapiens
cggagcgcgaaggccgggacccggccccggcccacaggggggggcaaacccgagagaacggaccacagcaccgggaagccagcagcgg

SEQ ID NO: 200831 - RNA, 77 nt, Homo sapiens
gcccgcaggaaggacggaccaggggcaggcagccggcacccgcacaacccagggggccgaacccagaccaacaaaag

SEQ ID NO: 200832 - RNA, 68 nt, Homo sapiens
aaaaagagcgaaccgacccccaggcccgacaggcggagaaagagaccccagagcaagccaggaaaccg

SEQ ID NO: 200833 - RNA, 62 nt, Homo sapiens
caggggcgcgcagcgcggggagcgccagaggaaggaggcaggggaaccgagggagagagaaa

SEQ ID NO: 200834 - RNA, 93 nt, Homo sapiens
ggacaaccaagcacagaaacaaccccaaaaaaggaagggaaccaccagagccggaggagccaccaacagaagcaggagccaggaaaccaaaac

SEQ ID NO: 200835 - RNA, 78 nt, Homo sapiens
aaggcagaacgccaagccccgcgagcgcacgccaacgacgaggaccgacgcagaagacaaagaggcaccaaagcagca

SEQ ID NO: 200836 - RNA, 77 nt, Homo sapiens
acccaagagcagcggcaggaaggagacacagaaggcgggagacgcggaccaaaaccaacaccaaccaccccaaccga

SEQ ID NO: 200837 - RNA, 79 nt, Homo sapiens
ccgggggggccccagaaagcgacccagcccagcagccagggccaggaggccgagacgcaccagagccggaccggggacg

SEQ ID NO: 200838 - RNA, 75 nt, Homo sapiens
caggcccgggcgaagagcccccccccaaggcagaaagcaacagaagcagaagaaaggcggaccacaaggaaaaga

SEQ ID NO: 200839 - RNA, 82 nt, Homo sapiens
cgagagcagcaaggacagcgaagaaaagagccccagaaaccccagcccggagggccgcgagggcccggaacaggggcacgca

SEQ ID NO: 200840 - RNA, 75 nt, Homo sapiens
cggggagcggaccgggccaacgccccagggacaagcagaagcaagcaaacgcacgaggaggcaaggaccgcgcac

SEQ ID NO: 200841 - RNA, 74 nt, Homo sapiens
accggcgaagcgcccacgccggcaaaccggaaacagagacgaggacgcgcacaggaaaggacgcggaacaagca

SEQ ID NO: 200842 - RNA, 78 nt, Homo sapiens
acaaccgcagggaccacagcaccgaaaacaccaggaaagacaggagaccaaaaagggaagcgagaaacagagagacag

SEQ ID NO: 200843 - RNA, 102 nt, Homo sapiens
gaacagcaaaggcagaagagaaaaaacaaagacggaccgcaaggggaagaaaaccgagagccggccgaacgggggagcgggcaggcagaagaaggggaaccc

SEQ ID NO: 200844 - RNA, 79 nt, Homo sapiens
agaagaagaaacccagcaaaaggaaaaaagagaggcccaaagagcagaaccgaacacacagcaagcaaacccagagcaa

SEQ ID NO: 200845 - RNA, 74 nt, Homo sapiens
caacaggacgccccaggcgcaggagcacggagccgccgccgagcacagagaccgaaaagggaggagaagaagcg

SEQ ID NO: 200846 - RNA, 73 nt, Homo sapiens
ggaagaaacacaaaaagaacaaagccccacaaaggagaggaaagccaaagacgaagaacgaccagagaaaccc

SEQ ID NO: 200847 - RNA, 80 nt, Homo sapiens
accgggaagagaagaacagacaaggaaaaacaccaaggaggagcagaggccaacacggcccagccagccaagccgcgagg

SEQ ID NO: 200848 - RNA, 38 nt, Homo sapiens
acgaggaggagaaccagcaaagacaaggggacggcagc

SEQ ID NO: 200849 - RNA, 67 nt, Homo sapiens
ggagggggaccccggcccggcagcgcaacaccagcagcagagccacgacacaaaaaaggacaaggag

SEQ ID NO: 200850 - RNA, 81 nt, Homo sapiens
cgcgcgcgggcggcgcaggcgagcagaagaggcggagcaggaggcagaggccggggacccgagcgccgcagcgacccgaga

SEQ ID NO: 200851 - RNA, 78 nt, Homo sapiens
cagcaagacgccaggacccacggaagccagaaagcaccaggacaaaagaagggcagcacaaaggaaagccccaaaccc

SEQ ID NO: 200852 - RNA, 75 nt, Homo sapiens
ccaaccagaaagcacccagcagccgaagcaaaccaacacagaaaaggaagagagaaggccacgcccgaccccaag

SEQ ID NO: 200853 - RNA, 79 nt, Homo sapiens
gccgccccgcgcgcgcccgccacggcgccgagccgcggccgaggacgcgccaagaagcccgcgcgcggcgcggcacacg

SEQ ID NO: 200854 - RNA, 76 nt, Homo sapiens
aaccaacccgcaaaccagggacagagacaacgccaagacgagacaccccaagcggaggagagcccaaaagaccaag

SEQ ID NO: 200855 - RNA, 78 nt, Homo sapiens
aggaacagaaacaagagaggaacggagcaagaagcgacacaaggagaaaagccagccacagaccagccggggggcagc

SEQ ID NO: 200856 - RNA, 74 nt, Homo sapiens
acaagcacgcccggccggacggcaccccccgcaagggaccagcgcacagccaggacgggagcgacgccggcagc

SEQ ID NO: 200857 - RNA, 81 nt, Homo sapiens
aggcccggcagcccaacccagcaggacaagagaagacggcccagcagagcacccaaccagcgggaacacagcgccgccccc

SEQ ID NO: 200858 - RNA, 75 nt, Homo sapiens
aggaaggcccgaacgcgggacggagcgcagcgggggggaccaggaaacaggagaaggaagccgccagagcaaaag

SEQ ID NO: 200859 - RNA, 47 nt, Homo sapiens
aggccgggagaagcaagaaccggacagggacaagcgcacagcggaga

SEQ ID NO: 200860 - RNA, 80 nt, Homo sapiens
ccaggagagccaaccgagccggcgacacgccacgggccgagccagaagggaaaaaggccgcaggagggaagcgcacggaa

SEQ ID NO: 200861 - RNA, 70 nt, Homo sapiens
aaaaaacagcgggggaaacaaaagcagccccaacggaaagcagacaggcaaggaagagaaaaggaacccc

SEQ ID NO: 200862 - RNA, 74 nt, Homo sapiens
cccagccgcaccggacccacggcaaacggggaccgcaaaggaaaacaccggggcagggccggccggaccagcac

SEQ ID NO: 200863 - RNA, 49 nt, Homo sapiens
cacacacaccaccggcgggagagaagagacagggagaccggggaaacgc

SEQ ID NO: 200864 - RNA, 56 nt, Homo sapiens
ggagggaagaccccaaaacagcgagcgggaagggggaggagcaccaagggaaaagg

SEQ ID NO: 200865 - RNA, 83 nt, Homo sapiens
acggagaaggggaaacccccacaaagagaagccaagacccagggagaggacgcagacggaaccgaccgagcagggcacaagag

SEQ ID NO: 200866 - RNA, 78 nt, Homo sapiens
gaaaaagggggaagaaccgagcagagagcacgcaacacaacacagagagagcaggagacggagggcagaggcagggag

SEQ ID NO: 200867 - RNA, 52 nt, Homo sapiens
aggccagacggagccaaacagccacagaagggaaccaagcccaccggaggcc

SEQ ID NO: 200868 - RNA, 78 nt, Homo sapiens
caggagaggcagaaggaagggcccccagacaccaccgaacgcccccccaagggggggcaccacccacacccccccggg

SEQ ID NO: 200869 - RNA, 40 nt, Homo sapiens
acccgaagacagggaaaagacggacaacaggaagccaagc

SEQ ID NO: 200870 - RNA, 75 nt, Homo sapiens
ccaaaagaaagggcagaaccagaggcgcaacggaggcgggagggggggacccacggaagaggcgggcccgagagg

SEQ ID NO: 200871 - RNA, 73 nt, Homo sapiens
aaagccgagcacagacaaccaacgggaaaaaacacccaagaacacgacggaacaacaaagggagcggcagggg

SEQ ID NO: 200872 - RNA, 62 nt, Homo sapiens
cggcgagcgagcccgaggacggcgcgggggcggagaacggaaaagcaccaggaagcagagag

SEQ ID NO: 200873 - RNA, 77 nt, Homo sapiens
cgcaggcgcacggagacccgccggcacaagcacaaccaagcagaagagagaggagggcacaaaggaggggcaaccga

SEQ ID NO: 200874 - RNA, 81 nt, Homo sapiens
cgagccgggaaggacccaagacggccacaggcccagccaacgccacacacacgccacacgaggacacaccccgggggccag

SEQ ID NO: 200875 - RNA, 116 nt, Homo sapiens
gggcccggcggggggagaaaaaccagcgcaagacccggcccagccgcaaaagcacccaagaccgaagaaggagaaccagcccaagcgcgcacacccggaggagcgcagcaacagaa

SEQ ID NO: 200876 - RNA, 74 nt, Homo sapiens
gaagagggaagaaagaagcagcgccagcaaccagcaagaggagcagaggcggaaggcagaagaaaaagggaaag

SEQ ID NO: 200877 - RNA, 85 nt, Homo sapiens
gcccccagaccaccagaacacacccgagccgcgcaccacaggcaaggccgaacaagaaggaacacagaggggcgacagcccagac

SEQ ID NO: 200878 - RNA, 84 nt, Homo sapiens
gacggacgggggcgccgcccgcgcccgggaccgacccccgccgcggccgcgccgagcaagccacacccagaaccagcagcccgc

SEQ ID NO: 200879 - RNA, 67 nt, Homo sapiens
cacgggaacagcacagacgcagacccacggagagagacggcccaaagagccgagaaaaagcgaacaa

SEQ ID NO: 200880 - RNA, 76 nt, Homo sapiens
ccggcggccgaaggcacaagacggaagaagagggcggacgcacgagcgcaacccgcgccgggccgcaagacagccc

SEQ ID NO: 200881 - RNA, 59 nt, Homo sapiens
cggggaccagccagaaagcacgagaaaaaggagcccaagccccaccaccagcacacccc

SEQ ID NO: 200882 - RNA, 73 nt, Homo sapiens
ggagaggcagcgccagcaacccagccgccggccgcgggccccggggcagcccgaggccccggggggaaagcca

SEQ ID NO: 200883 - RNA, 79 nt, Homo sapiens
aaagaaacaaaaacgggaaagccggcaagagggagaaggacaccaggcagaggcaagaagagaagaaggggaaaagagg

SEQ ID NO: 200884 - RNA, 88 nt, Homo sapiens
cggggccgaggagcgggcacagggcaaggcggcggacggcgcgcgcccgaggcgaggaggagcgcggcgacgccccagggccaccgcc

SEQ ID NO: 200885 - RNA, 69 nt, Homo sapiens
cgccgcgcccaggagggcgggaagaagcgagagccaaagcccgggggagggagccacccccgaagccaa

SEQ ID NO: 200886 - RNA, 69 nt, Homo sapiens
gccgaccgggcggaggagcccccccgcaaccgaaggaggcacccagccacaccgcgaaaaacaggccaa

SEQ ID NO: 200887 - RNA, 73 nt, Homo sapiens
ggagcgagcagacgacaagccgggagcgggcggccaaccagggaccaggaggagaagcaaccagagaggaagc

SEQ ID NO: 200888 - RNA, 84 nt, Homo sapiens
aaagaacgacgaaacggaggcagagagggcagcgcccgagggcggagcgcgcgcccacggcgcggagcccaacgcgccgacccc

SEQ ID NO: 200889 - RNA, 61 nt, Homo sapiens
gacagagaacaggcccaaaccaggcccgaaaccaaccagccggccagaaaaggaagaaccc

SEQ ID NO: 200890 - RNA, 72 nt, Homo sapiens
cgccgggcagagccccaaccaccaggaggaaagcccaggagagagccaccagagggggcggccgcccgccca

SEQ ID NO: 200891 - RNA, 76 nt, Homo sapiens
ccaacacaacaaaaccaagaagagcgcagccgggagaggacgacaaaaggaacagcgcaaaccaagccgaaccaag

SEQ ID NO: 200892 - RNA, 72 nt, Homo sapiens
ggcaccgacgaccagagagggccaccaggagcaaagaacgccagaacaaacagcgagaaaaccgacccgccc

SEQ ID NO: 200893 - RNA, 75 nt, Homo sapiens
cgagaagacaaaacaaggaaacaggaacacgaaagaggaaaaacgcacaagaaaccgaagccaaggaggagagga

SEQ ID NO: 200894 - RNA, 68 nt, Homo sapiens
agagaaacaggagacaggagagagagaagaagagacgggccccagggacgacgagacaacagagaaac

SEQ ID NO: 200895 - RNA, 80 nt, Homo sapiens
agcccggcccaaccgggagcagcggccgggccgaacaccgaaacgcaagaggcaagaaaacacccggaaaaaaagaaaac

SEQ ID NO: 200896 - RNA, 64 nt, Homo sapiens
accaggcgccccaggagaaggaccgaagagccaaagaaccccacagcaagcacagcgcgcaaag

SEQ ID NO: 200897 - RNA, 89 nt, Homo sapiens
ccaaacgagagcagccaacggaaagccaggccagaagaaggaaggccggggaggggacaggaaagacacaccaccccaccgaacaagga

SEQ ID NO: 200898 - RNA, 82 nt, Homo sapiens
gaaccgccaggagcggcagacggcaggccagcgcagcggaccgccgcaccgaagccagcagcccgacagccgaggagagagg

SEQ ID NO: 200899 - RNA, 71 nt, Homo sapiens
gcgcagccagcaccaagccggggcacacagacccgcaggaagagacccgacccgaccaaaccaaaaggaag

SEQ ID NO: 200900 - RNA, 64 nt, Homo sapiens
gcacgagggcagggcggaagcccaaggaaaggcccaggcacagcagacgcacggaggcggggac

SEQ ID NO: 200901 - RNA, 84 nt, Homo sapiens
gacgaccaagacaggcagaagggaacagagaaacacgagccaaagcaaccccagaaaaaacccccgcccccccgcaccgcccac

SEQ ID NO: 200902 - RNA, 77 nt, Homo sapiens
agagaccggacgcagccgccaccgagacgaggggcaaaggagcagagaacgacaagccacacgaggacagcccgcaa

SEQ ID NO: 200903 - RNA, 73 nt, Homo sapiens
cgggcagaaggaccggggagagggccgaggcagacaagggaaaggccgcgcaggggaccaccccagacggacc

SEQ ID NO: 200904 - RNA, 83 nt, Homo sapiens
cacaccccgacccccgaacccccagcccaaacccggaaacccagcggcccagccggaaagccaacaggcagaccagagacagc

SEQ ID NO: 200905 - RNA, 98 nt, Homo sapiens
cacagacacacggagagggggcaccagaaaggcacagcagaagcagccaaaaggaccccaggaaagcgagccgaacaggaagcaaagggcagaaacag

SEQ ID NO: 200906 - RNA, 72 nt, Homo sapiens
aagccaagggcccaagacccagcggaacggcaggccgggcccccaaaccggcacgggcgaaggcccagaccc

SEQ ID NO: 200907 - RNA, 77 nt, Homo sapiens
ggaggaaggcagcccagggccagaagggaaggcaccacagcacaccaacgggaacgcccaaggagaggcccacacca

SEQ ID NO: 200908 - RNA, 73 nt, Homo sapiens
cagcccccccacaggcccccgccgagcaccgaggggaagcgaaccaggacagagagaggcagaagaaaaagca

SEQ ID NO: 200909 - RNA, 73 nt, Homo sapiens
agaaaggggacaggccgaaagaccgcaaagggagaagaccaaaccgaacgaagggacccaggagggcgcccaa

SEQ ID NO: 200910 - RNA, 74 nt, Homo sapiens
gccagcagccgccggagccagccaacgagcgagcccaccgaagaccgaaaaaaccacggaaggccccgaccgag

SEQ ID NO: 200911 - RNA, 73 nt, Homo sapiens
gcaggcggcaacccccagaccggcagccacccaacgacggagaccagacaggaggagggcagagccaagacgc

SEQ ID NO: 200912 - RNA, 80 nt, Homo sapiens
gcacccagcaaagacagcgccgggagccaaccggcgcccacaaggaggccccggggagccggaaggagaccagagaaaaa

SEQ ID NO: 200913 - RNA, 72 nt, Homo sapiens
ggggagcgacccagcaggggacccagccggaacgagaaaccggaacagagccccagcccgaaaaagacccgg

SEQ ID NO: 200914 - RNA, 60 nt, Homo sapiens
aggggaaagagaaaagagcaccagacaagaacgcgaacggcggaaacccagaggcagaca

SEQ ID NO: 200915 - RNA, 75 nt, Homo sapiens
cagcgcgcggcgccagccgcaccggcaccaccgccggcgcggacgggcacggccgagcagagaggacggggacga

SEQ ID NO: 200916 - RNA, 79 nt, Homo sapiens
aaagaaaaggagaaaagaagccaaagggacacgcaagagggacagggaggacccagaagaggccggcccggaccccaga

SEQ ID NO: 200917 - RNA, 59 nt, Homo sapiens
ccagggggaacaggagaaagccaggaagagggaccccgacggagagacaaagaagacgg

SEQ ID NO: 200918 - RNA, 109 nt, Homo sapiens
gcagcggaaaagggggaggcaaagagcaaagaagaggccgcaaagcgacaagagacagcaggacagcaagagcagccccggaacggaggaagggagccggagagaaaaa

SEQ ID NO: 200919 - RNA, 108 nt, Homo sapiens
gggccgggccgggcaagacggcgaagcgcgcgccgcgcccggaccccaggcggcggccggggcagcgccgcgagccagcaacgggggaaggccacaacaccacggaga

SEQ ID NO: 200920 - RNA, 86 nt, Homo sapiens
ggggggaagcgagcgcgggggagccggcgcgcgagcggcgcgagcggagccagccggccggagcgaccccacccccagaaagccga

SEQ ID NO: 200921 - RNA, 65 nt, Homo sapiens
ggggacgaagacgaagaaacggaagccaccaccagcccggccagacgggacccgaaccaggaacc

SEQ ID NO: 200922 - RNA, 87 nt, Homo sapiens
gaaaacccgcccccagcgggaggaaggacccggggaggccggccacgccccgcacgccccagaccggggggagggaaggaaaggcca

SEQ ID NO: 200923 - RNA, 76 nt, Homo sapiens
gggcccgggcccagacgaagacaaaggaaacagcacacacagcagaaggccgaccaagacgagagccgggggcaaa

SEQ ID NO: 200924 - RNA, 72 nt, Homo sapiens
gcgaccccagacgccgcaacggcggacagaaccagaagagccaggcaacagcaaaggagcaaagggacaggc

SEQ ID NO: 200925 - RNA, 77 nt, Homo sapiens
gcggaacggggagcgccggagcagcggacccaggcagaggcgaaagagggccagagacaagacaaaagacaagagcg

SEQ ID NO: 200926 - RNA, 86 nt, Homo sapiens
gggcgcagcgagccggagagcgggccaccacgggacccaccgcccggcgccccagccgccccgcgggaaggaagaaagaggaaagc

SEQ ID NO: 200927 - RNA, 60 nt, Homo sapiens
aagcggccagaggggagaagagcgacagagaacggcgaagcgggcagccgccacccgaac

SEQ ID NO: 200928 - RNA, 46 nt, Homo sapiens
cagccaggccaccccgggaacaccagagaggacaaccaaaagcacc

SEQ ID NO: 200929 - RNA, 87 nt, Homo sapiens
cgcaggcgaagggcgaaagcagacaccaagcaaacagagcaccagacgacggagaccagggacagcagagaaacgaagagagaaaca

SEQ ID NO: 200930 - RNA, 89 nt, Homo sapiens
aaggagcagcccaggaccgagaccggagcagccggggcggagcggacaagggaggcgaggacggacaaaaggaaacggacgggaggcca

SEQ ID NO: 200931 - RNA, 71 nt, Homo sapiens
acggcagagacacacagcaaggggcggagccaaggaacgaacagggcgggcggaggcgggaagacaagaga

SEQ ID NO: 200932 - RNA, 75 nt, Homo sapiens
cggaagaaagagcagaggaaagaaaagaaacaccgaaccgccacccaggcccaagaagacggcaccaggacaagc

SEQ ID NO: 200933 - RNA, 83 nt, Homo sapiens
gaacgcgagggcggcgcccggggacggagcgcgcgcaaaggggccagcggaggaagaccacggccggagcagaggcggcgcgc

SEQ ID NO: 200934 - RNA, 82 nt, Homo sapiens
acacagcgcgaggacaggacacacacagcggaggacagaaacaagaggcgccaggaacgcagagaacagagcacaggagaga

SEQ ID NO: 200935 - RNA, 118 nt, Homo sapiens
gggcccaacaagggccacaaaggaccaagaacggagcaagcccaggcacagccgacgccgcggggaccgccgacaccacaacaacacgcgaaaacaccgcgagaaaaaaagcacaaca

SEQ ID NO: 200936 - RNA, 70 nt, Homo sapiens
cggcgcggaccccgacggcgccgggcacacagagaaaaaaagggaacaaaacacagcaagcagacaaaag

SEQ ID NO: 200937 - RNA, 73 nt, Homo sapiens
ggaaggccaagaaaacaggaacgaggacaacaacaacgaaggagaaacaaaaaccacaaaggaagagaaagga

SEQ ID NO: 200938 - RNA, 52 nt, Homo sapiens
ggggcgaggaggccccaagggcgagcgggaccgagggccgcaagagacacca

SEQ ID NO: 200939 - RNA, 78 nt, Homo sapiens
aggcccgagcaaagaagagcccgaacaaacaaacacccagaaacaagaggagagacagcgcggagaccacccagccgg

SEQ ID NO: 200940 - RNA, 78 nt, Homo sapiens
agcaagcggacaaaagaagggaaagggaagggagccgaagggacaggcgcaggaagaagaagggacacccacagcaca

SEQ ID NO: 200941 - RNA, 51 nt, Homo sapiens
gccaggcacaagggcaccacaaagacacagacagaagacaaggaaagaccc

SEQ ID NO: 200942 - RNA, 75 nt, Homo sapiens
acgccgggggcaccgagcgggaacgcacggggcgcgccgggcggagcagcaccaggacaaaagaagggcagcaca

SEQ ID NO: 200943 - RNA, 75 nt, Homo sapiens
gacagacgggagacggcgggagcccagagagaacccgggagaaaggcggagaagagaaaagcagaccaaagccaa

SEQ ID NO: 200944 - RNA, 78 nt, Homo sapiens
cgaaagcgggcccgggagacccaggcgggacagagggagccaggcagagaaagggcaagcagaaaccgggaagggggc

SEQ ID NO: 200945 - RNA, 95 nt, Homo sapiens
cccggggagcgggcggaacaggaggaccccgggcgcaccgcgcggcgcccgcccggacagccaaacaaccaggggccccgaccaacgccaaccgg

SEQ ID NO: 200946 - RNA, 67 nt, Homo sapiens
ggccccggcggcgggagcgcccccgaccggacaaagaaacgagcgccggaggaaagcggacagaaga

SEQ ID NO: 200947 - RNA, 76 nt, Homo sapiens
gggcgcaggcaacacgaaggaaaacgaaacccaagaagaaacagacaaggaccagaagcgggagcggaaagggcca

SEQ ID NO: 200948 - RNA, 82 nt, Homo sapiens
ggaggaggcgcgggccgaggaggcagcacaacaagacgcagcgggaggggagccagcgaaggccaccccagaaggagacgag

SEQ ID NO: 200949 - RNA, 68 nt, Homo sapiens
aaaagcaaaccgaaagcggcgccaagagcagcaaggcgaaccggcgcggagcggccgggccacaggag

SEQ ID NO: 200950 - RNA, 81 nt, Homo sapiens
cggcgccccaaggagaaaagaaagaggggcggggaacaaccagaaacccaggaagacaaccaggaacgagggacccgcgcc

SEQ ID NO: 200951 - RNA, 73 nt, Homo sapiens
ggagccggacacgaaacgaaacaggaagcaacaccggagaaagacaccacagggacagcaaacggacagacac

SEQ ID NO: 200952 - RNA, 67 nt, Homo sapiens
gcacccggcgccggaccccgagaaacagcagccggacgggaaacacacggaccaagcaaagacccag

SEQ ID NO: 200953 - RNA, 70 nt, Homo sapiens
acggaagccgaggggcagagggcgaccgaccgagcagggcacacccgcgaggaaacgagaaaacagcgag

SEQ ID NO: 200954 - RNA, 75 nt, Homo sapiens
agaaggggccgggaaccgcacacagaaagcacacagccaagccagcgcgcagggacagcaggccagcaaacagga

SEQ ID NO: 200955 - RNA, 79 nt, Homo sapiens
gaagcccaaaccacaagccacaaaagacgggagagaagcgccggccggaaagaagacggggaggagcaggacgagccca

SEQ ID NO: 200956 - RNA, 77 nt, Homo sapiens
gcaaaccaaccagagaagagcggagaggaacagaaggcggaggaaacgcagggagaagaaaaagcagaaaggaacag

SEQ ID NO: 200957 - RNA, 86 nt, Homo sapiens
aagacgaacgaaacacgaaagggcagggacacgacacagggacgggccaagaacccaggaggagggaaagccggacccggcagaag

SEQ ID NO: 200958 - RNA, 49 nt, Homo sapiens
accaggagcggggaggcgggaccccggcacgacccaggcaaagcgccac

SEQ ID NO: 200959 - RNA, 79 nt, Homo sapiens
gcagccagcggccaggggggcccgcgggccagccaccgggccgaggggaccccaagcggaggcgccgcagaaacccgcg

SEQ ID NO: 200960 - RNA, 79 nt, Homo sapiens
ccccgcgggcgcagagggaacaggccagagggaggaggaccagaagcgaaagaggcgagcggccggaagaagaagaaca

SEQ ID NO: 200961 - RNA, 74 nt, Homo sapiens
gacagagaggagccaaacccccaggcacgcgagaaagacagaaaggcaaacgacagaacaagacgcagcagaga

SEQ ID NO: 200962 - RNA, 81 nt, Homo sapiens
cgaggaacgaccaagcaaaaaccagcagagagacgcaggaaaaccgcagacgaagaagcaggagggaagaaggagaacaag

SEQ ID NO: 200963 - RNA, 81 nt, Homo sapiens
gcaaagaagcccgaggcgcaagagacaaaccagcaccagacagcgaaaaagaggacccaaaaaagagagaaaaggccaaag

SEQ ID NO: 200964 - RNA, 77 nt, Homo sapiens
cgagaaggaaggggcccaagcacgggccagaacacagagacagcagcccaggcaagcaaaagcagaccggaaaaccc

SEQ ID NO: 200965 - RNA, 74 nt, Homo sapiens
aacaacaggaacaggcagccaacacaacaacaacagcggaaaacagccaaagaggacacagcaggggccagaca

SEQ ID NO: 200966 - RNA, 84 nt, Homo sapiens
gcgcggccgcgcgccacgcgccaggagcacgcacgggggcccgggccgaccgagcaccaggcggagaacgcgcacccaaggagc

SEQ ID NO: 200967 - RNA, 83 nt, Homo sapiens
acagcagaacaagcgaggccgggcagagggaccacggggagccccacgagggagagcacagaaggacagcaggaggacagaag

SEQ ID NO: 200968 - RNA, 76 nt, Homo sapiens
gacacagccaagagagaccacaggcagaacggagggcacaagccaaaaagcacaaagacagaaaagcaaggaccaa

SEQ ID NO: 200969 - RNA, 108 nt, Homo sapiens
gaccagggcagccaggacacaggcgggaggacagcggagaaaaaggggaccaggaccccaggagaagggcagggcccgacacagcgagaaggcccaaagaacaaggag

SEQ ID NO: 200970 - RNA, 75 nt, Homo sapiens
accgagcagccgagcgcgagcaccaggacaaaagaagggcagcacaaaggaaagccccaaaccccggaacgggaa

SEQ ID NO: 200971 - RNA, 59 nt, Homo sapiens
gcggaacggagagcaggaagacgcagaggaaacggcagcagaacccacgccgagcggca

SEQ ID NO: 200972 - RNA, 68 nt, Homo sapiens
acccagagacgccacgcacccagccaaacccaggcccgagaagaagaggaaaacccaccaccgaacca

SEQ ID NO: 200973 - RNA, 70 nt, Homo sapiens
gcccaagggaaacaggcaaaggaagaagccagcgagcggggcgcgcggccgaggaaggggagaagaaaaa

SEQ ID NO: 200974 - RNA, 70 nt, Homo sapiens
acaacccccgggccagaaaagcacagcagacgggcagcgaccgccagcccccggcgcggaaacaagcgga

SEQ ID NO: 200975 - RNA, 83 nt, Homo sapiens
aagaagcacaagacaagggccaaaacaggacagaaagaaggaaaaagcagaaagccagaggaagacagggccagcacagcaag

SEQ ID NO: 200976 - RNA, 74 nt, Homo sapiens
gaaccaccggcagaaaagagacggacgcggaggggagagggaggaggagcccccccaggagcacagcccacgaa

SEQ ID NO: 200977 - RNA, 64 nt, Homo sapiens
aaacgcaaacgaacgccagcgacgcgcacaaaacaaacagagggaaaagaggacgaggcgcgaa

SEQ ID NO: 200978 - RNA, 82 nt, Homo sapiens
cccgccccccccccacccccgaccgggcggcgcggcggccagaggaaccccgagggaggcggcagcgaagaagacgaaaaaa

SEQ ID NO: 200979 - RNA, 42 nt, Homo sapiens
cccaacccagagcccccccagagacccccgaaaaagcaggag

SEQ ID NO: 200980 - RNA, 54 nt, Homo sapiens
gacgccagaggaggaaaggaagacaagggggcggggccgacaaaacagacgggg

SEQ ID NO: 200981 - RNA, 82 nt, Homo sapiens
gcccgccgggaggagcgccggaccgcgggcggcggcgagcgccacaaggcccgacccggaacgccagggaaaagcaggaaca

SEQ ID NO: 200982 - RNA, 56 nt, Homo sapiens
aaaacaccagagaaacaccacccacagagcaggacagcggagcacacagagaacag

SEQ ID NO: 200983 - RNA, 74 nt, Homo sapiens
gaaaaacaaaagaaaggcaagagaaacacagaaagggaagccaccgcaaaaggggacgcaacggccacagccaa

SEQ ID NO: 200984 - RNA, 70 nt, Homo sapiens
ggacaagggaggcgggcacagcacgggaaaggggagagaagacacaagagaaccacagacacagcgacca

SEQ ID NO: 200985 - RNA, 75 nt, Homo sapiens
gcgcagaggcacaaaacgcccagcaaaccaagagggagaagacggaagaaagcagccaagggcagagacgcgcaa

SEQ ID NO: 200986 - RNA, 75 nt, Homo sapiens
cgaaaacggacaaaacaaagagggggaacccacccggccacgccgaaagagcccagaaccaccccgcacacacca

SEQ ID NO: 200987 - RNA, 81 nt, Homo sapiens
gaccggcgggccgcagcaccccaccaggggcgaagcccaagccccgccccacgccacagaggcggaccgggaagaccgggg

SEQ ID NO: 200988 - RNA, 78 nt, Homo sapiens
ccaccaccaggccccgcgccacacgcgagggcagcaccgcagaggacccaaagcagagggagaagagcacagcccagg

SEQ ID NO: 200989 - RNA, 54 nt, Homo sapiens
cgcaccaaggaacacgacgaagagcaaggagcaaaccaagacggccaaggggga

SEQ ID NO: 200990 - RNA, 48 nt, Homo sapiens
agggccaaagaagggagagagacaagagaagcaagaaggcacccccga

SEQ ID NO: 200991 - RNA, 113 nt, Homo sapiens
cggaggagcgggggcggaagcagaggcaacggcggccaggaacgcaccgggaggcaggccgggagggacaaggcccaggaggccaccagcacggccacgggcggcacggagga

SEQ ID NO: 200992 - RNA, 78 nt, Homo sapiens
agaacacgacggagacggggcgaaacacccaaaaggcagaggagcccaggaggcgagcaaggcacccgagggcgaggc

SEQ ID NO: 200993 - RNA, 35 nt, Homo sapiens
ccaagcaccagcccacagccggagaaagcgggaac

SEQ ID NO: 200994 - RNA, 77 nt, Homo sapiens
gaggaacagaacgcaagcaaaagcgaggaaaaggagcagccagggacacaaccagagggaagcacgcccgggcacag

SEQ ID NO: 200995 - RNA, 94 nt, Homo sapiens
ggcgacccggcggcgggaggccacgccagccgccaggcggcgcaggccagaaacggagcacacaagcaacagcacaggacagggccccggagcc

SEQ ID NO: 200996 - RNA, 75 nt, Homo sapiens
cgggcgcccgcgcccgccccaacccagccacagaaaggggagcaagaagaaagagcagggaggagggagcgacag

SEQ ID NO: 200997 - RNA, 81 nt, Homo sapiens
aaacgaggcgggagcagcacaggggcggggaggcgccgccagggaggccggcacagccagaccacagacccaccggcccca

SEQ ID NO: 200998 - RNA, 75 nt, Homo sapiens
aaacacaggggcgggcagccgcccaggaccagcaaaccccacacggagaaccagccaaaaaagggcagaaccgac

SEQ ID NO: 200999 - RNA, 73 nt, Homo sapiens
acaaccagaaggggagaaggcaggcaccacaaaaaggacaggggacagcccagaccaaaccccagacaaaaaa

SEQ ID NO: 201000 - RNA, 83 nt, Homo sapiens
gcacggacaagcgcacgggaccgagaaccaggcccgccgcagcaagagagagcaaggagcaggcgcagagcagagcagagcag

SEQ ID NO: 201001 - RNA, 72 nt, Homo sapiens
gagacaagcaccaaacgccccacgaccggggacagcagaggcaagacggaccaccagaggcagccaaggggg

SEQ ID NO: 201002 - RNA, 70 nt, Homo sapiens
caacaaaagccaaccacgaacaagaacgcggcagaacggaggcaggcagcacgagacacaccacaagagg

SEQ ID NO: 201003 - RNA, 76 nt, Homo sapiens
aaagaaaggccaagaccaggaaaggaaggaaccccaaacccaccagaaaagccccagcgagcggcacccccacggg

SEQ ID NO: 201004 - RNA, 87 nt, Homo sapiens
cgccgggcggacaacacggagaacgacccaaccagggaggcaccccacagcaacagcccccaggcacaacacagcaacacaaggccc

SEQ ID NO: 201005 - RNA, 88 nt, Homo sapiens
agagcggcacgaccacaccgcgagaagacaaggaccacagggcgcaaggcggaagcccggccgcgcaaaacgggcggcccgcgcggag

SEQ ID NO: 201006 - RNA, 69 nt, Homo sapiens
accgccggccagcgcacagcaaggccaagacaggggacagccggccgaacggcagccccgggacccaaa

SEQ ID NO: 201007 - RNA, 124 nt, Homo sapiens
gcccgccggaaggcgccgccggagaggggaggaaacgcgccggaaaggaagaccaggacgcacagcggcggagaaaccaccacaaacacgaggccagcaacgaccaacaagacagacccgccca

SEQ ID NO: 201008 - RNA, 54 nt, Homo sapiens
aggggaagaggaagcaaagccaagcccgcccgacgaaggagaagccgaaagaaa

SEQ ID NO: 201009 - RNA, 80 nt, Homo sapiens
ggaggagcgcaccgcgcaagccaacacgggggcggggccccgagcagacagcaggaaagaagaagccccggacacccagg

SEQ ID NO: 201010 - RNA, 79 nt, Homo sapiens
gcccggagaaggccccccggcggccagagggagcgaagaagaagcgcaaacgccggcgggggaacgggagcggcgcgag

SEQ ID NO: 201011 - RNA, 73 nt, Homo sapiens
gacgccaaggcacgaggaaggaaaaggagcccggagcccgcggccaggaaggaaggggaaggaagaagaaaaa

SEQ ID NO: 201012 - RNA, 74 nt, Homo sapiens
gcggggagcgcacgcggggcgggcggcgacagcggggacgagagccccggcacaaacggaccaccagaaagcac

SEQ ID NO: 201013 - RNA, 61 nt, Homo sapiens
cggacagaccaaccgcaggcgcaagaagggaccacagaccagcacgccggcgccacgaacc

SEQ ID NO: 201014 - RNA, 78 nt, Homo sapiens
ggcgccgccaagggcggccccgaggaagcaaggccgcggggggagaccccaccaccgaccacggggaacacagaacag

SEQ ID NO: 201015 - RNA, 54 nt, Homo sapiens
cccggcgccggccgagaaggcagaggcgacagcggcgggaggcaggagacccgc

SEQ ID NO: 201016 - RNA, 52 nt, Homo sapiens
ggcagacaaaagggccaaagaagggagagagaccaggcacagcaggacgcgg

SEQ ID NO: 201017 - RNA, 78 nt, Homo sapiens
aaccagccccgggaggcaaggaaaagccaagaaagacccaaaagaccccagaccagaaagaggcgccaagcgagaacg

SEQ ID NO: 201018 - RNA, 39 nt, Homo sapiens
accagagagcgcggccggaggacagaggccaacaccacg

SEQ ID NO: 201019 - RNA, 78 nt, Homo sapiens
cgcgccaagcccagggccccggacagcaagggaggggcagcagagcgagcgagacaggggcaggagagagacaggcgc

SEQ ID NO: 201020 - RNA, 77 nt, Homo sapiens
caaagcagcgagaacggcggggcgccgagccggaccgcgagagcacaaacgggccacgggcggggggaaaagcggcg

SEQ ID NO: 201021 - RNA, 78 nt, Homo sapiens
cccggggggaagagcgccaccggcggcccgcaagaagaccgagaaggacaggccgcgagcaaagcggcaggccaacac

SEQ ID NO: 201022 - RNA, 87 nt, Homo sapiens
gcgacggggcgcgccggcccaggcgcacacggaaggagcccgaaggaagcacaaacaggaaaggaacaaccggaccagccacgcaaa

SEQ ID NO: 201023 - RNA, 80 nt, Homo sapiens
gcagaccggcccgaccgcccacagacccaaacaaagacaagcagaccggaagaccgacggaagaccacaccccgagggag

SEQ ID NO: 201024 - RNA, 58 nt, Homo sapiens
agcagccccgccgggcagcagaggaggcagccagcaagcacgcccgggcccgacaaca

SEQ ID NO: 201025 - RNA, 77 nt, Homo sapiens
gcggggcacgacaaaagaaccagaaaaagagaaggaggcgcgagaaagcaaaaagcccgaagaaagcaaaaagaacc

SEQ ID NO: 201026 - RNA, 32 nt, Homo sapiens
ccgcagggccaggacgaaccaccacgaacggg

SEQ ID NO: 201027 - RNA, 74 nt, Homo sapiens
ggcagaggagcaaacagaaggaaccaaaggccaaacacacaggaacgccagaccccagccgagggaggcaacag

SEQ ID NO: 201028 - RNA, 78 nt, Homo sapiens
gccaagaacagcaccagggaaggagccccagaccggaaagccgcccccgccggaaccaagacccgacgaccggacggc

SEQ ID NO: 201029 - RNA, 69 nt, Homo sapiens
ggcgccaccgcccagcacggcgccggagacccaggcccaaggaaaaaagagaaaacacacacagcaggc

SEQ ID NO: 201030 - RNA, 72 nt, Homo sapiens
gcaggccgcgagcccggaggagaggacgaggggacccaaggacggaagcccgcgcagccgccagcgagggcc

SEQ ID NO: 201031 - RNA, 72 nt, Homo sapiens
ccggggccggggcgaacgcggccgcccaggggcgaggagagaaacagagcccagacgccagaggggagcaga

SEQ ID NO: 201032 - RNA, 78 nt, Homo sapiens
acaagaggcgacaagaggcgaaaacagcacagaaaacaacaccagcacggacgagaagcggccccaaaagggaaggaa

SEQ ID NO: 201033 - RNA, 89 nt, Homo sapiens
aagggacagggcagagcaccaggaaacggcgcccaccagacccaccacagcgagccaaagccgcaaagccgccggaagccaaagagaaa

SEQ ID NO: 201034 - RNA, 68 nt, Homo sapiens
gagccggcggccgacccacggaagcccagagggacgggggaagccacgaagggaaaggaagacaggac

SEQ ID NO: 201035 - RNA, 74 nt, Homo sapiens
gccgccaagcccggcccggcccgacaccgcgggccgccagacgggaaggacaagcagaccggaagaccgacgga

SEQ ID NO: 201036 - RNA, 72 nt, Homo sapiens
acggcggaccccgcggcgggaggagccgccccgagcagcgcgcagacaggacaaccagcggaggcacgacgc

SEQ ID NO: 201037 - RNA, 71 nt, Homo sapiens
gggagcaagagggcggaggccacgaacacgccggagccgccagacccacacacgcccccgggagccgcccg

SEQ ID NO: 201038 - RNA, 79 nt, Homo sapiens
cagaagcaccacggaaaccaggcagcggccccgcgaagcggagaacacccaccaaggcagacaccgcgcgggaggagga

SEQ ID NO: 201039 - RNA, 83 nt, Homo sapiens
gagcccgaggaccggacacggaggacgagggcccacagccgaggaggagcggggggccacggacggggccgagcacaaccacc

SEQ ID NO: 201040 - RNA, 66 nt, Homo sapiens
caccgcaaccccgcccccagagagaagcaaggccacagccgggcccgggcagcccggcaggggccc

SEQ ID NO: 201041 - RNA, 57 nt, Homo sapiens
gaacccggcaccgccccaggcgagcccacaccaaccggcccacccaccgacgcggca

SEQ ID NO: 201042 - RNA, 81 nt, Homo sapiens
aggaacccgaagaagaaaggacgacagccagagagccagcgacagcccaccacaggaggagcagggccagcgcagaaaaca

SEQ ID NO: 201043 - RNA, 79 nt, Homo sapiens
ccgacacaagcccgcaggaccagagcgccggagcccgaacagaccgcaagccaccgagcgcccgggcagcggggcgagg

SEQ ID NO: 201044 - RNA, 75 nt, Homo sapiens
aagggccacccggggccccaggcccggcccagcacccccaggccgcacccgaggagaggggcgacgagaaagagg

SEQ ID NO: 201045 - RNA, 38 nt, Homo sapiens
ggaaaaagcagccaaggaaaccgccgccaggagcaagg

SEQ ID NO: 201046 - RNA, 68 nt, Homo sapiens
caagaggccacaacgcaggcaggaagccacggacagacaccccgcaccagacccgagaggaacagcgc

SEQ ID NO: 201047 - RNA, 75 nt, Homo sapiens
ggcgaagaggaaaaaaaacagaacaggaggggagagggcaggaaccaccgcccaaagcgcaacggaccgaaccga

SEQ ID NO: 201048 - RNA, 78 nt, Homo sapiens
caaagagccacccccagcaggacggaacggggacagaacaaacgggaaacaggaaccaagccagaaaggaaagggaac

SEQ ID NO: 201049 - RNA, 75 nt, Homo sapiens
ccaccacggagggaaagaccaggcaggcacagcaaaggcccagaagaaccaaagaacagcaagcccccccagcca

SEQ ID NO: 201050 - RNA, 75 nt, Homo sapiens
aaaaaaaagaggagccgaacacgaccagaaacacaggccagggcaggggcccggaggacggcggggcgggcccga

SEQ ID NO: 201051 - RNA, 78 nt, Homo sapiens
caagaagggggcagacaggccggcgcggaagaggccggcggcgggacggccccacgggacccgccccgaccacagcag

SEQ ID NO: 201052 - RNA, 54 nt, Homo sapiens
cagcggaaaacccacagcggcggagaaaccaccacaaacacgaggccagcaacg

SEQ ID NO: 201053 - RNA, 67 nt, Homo sapiens
gagaaaaggccaagaaggcagcgagacgacgggaccgaaggaccccgccagagacaaccgagcgcca

SEQ ID NO: 201054 - RNA, 74 nt, Homo sapiens
ggcggccagccgcccccgcgcccagccaggcggcgaagagagcaggccgcccagaaggccagggcccagaaccg

SEQ ID NO: 201055 - RNA, 78 nt, Homo sapiens
agggcgagcgagaaccaggccgagcccgagggggcagcagcccccaggcagccccagggcagcagcagcagacagcag

SEQ ID NO: 201056 - RNA, 89 nt, Homo sapiens
cagccacggcagggcacaggcgcagaccccggcaacaacaaccccgcaagcccaagaggagggagggaaggacaccagcagaagcacca

SEQ ID NO: 201057 - RNA, 67 nt, Homo sapiens
gccgggcccacacccgggcgcggccacacgcgacgggggagccgcggccgagaaacgcggaaaagaa

SEQ ID NO: 201058 - RNA, 70 nt, Homo sapiens
gaggagcacccaaccccgcgggcggagaacggaaaagcaccaggaagcagagaggaccgcagaagggaag

SEQ ID NO: 201059 - RNA, 64 nt, Homo sapiens
gaggagacagagggccgagaaggacaggacagccccccacgaccgaaagaggacagcgcccaag

SEQ ID NO: 201060 - RNA, 83 nt, Homo sapiens
gccaaccggcccacccggagaaagggcccccgaaggaaagagaggccggggaaagccgggaacgggaagggcacaggaagaaa

SEQ ID NO: 201061 - RNA, 69 nt, Homo sapiens
agaccgcgacaaaaacccgaagaccgaagggaccagggcagacagcacaccacaggagaaaacagaacg

SEQ ID NO: 201062 - RNA, 75 nt, Homo sapiens
cccaaggaaaagaccaaccaggcccgacccacagggaaaaaggcacacggcacggacagggcgggacgcagaacc

SEQ ID NO: 201063 - RNA, 83 nt, Homo sapiens
ggcgaagcgacgagccgcgaggagaaaacccgcagcccaaagggcagaagaagaagaagacgcaagacggcagggggcccaca

SEQ ID NO: 201064 - RNA, 78 nt, Homo sapiens
gggacggcgaggccccagaccacacgggaacggcacaaaggaaccaagagccgcaggaaaagaaacacgaccaggcac

SEQ ID NO: 201065 - RNA, 54 nt, Homo sapiens
gaagaacagaccccagaaggacaagcgcccgggcaccgcagaaggccggcccac

SEQ ID NO: 201066 - RNA, 42 nt, Homo sapiens
gcccagacccccgccaaacagaccggggccccgggccgagcc

SEQ ID NO: 201067 - RNA, 84 nt, Homo sapiens
agcggagaaggccacaccacgcagaacgcaacaccaaggcacaccaccccagaaggaaccaaggcagccccaaccagacggaac

SEQ ID NO: 201068 - RNA, 80 nt, Homo sapiens
caggcaggaaaacgggagaacacgacaccggcgaggaacggcagaagagaagccagagcccaaggcccgcggaagccagc

SEQ ID NO: 201069 - RNA, 69 nt, Homo sapiens
gaggaggagaaaaaacccacgcagaacacaacagggcacccacaagccccacacaccaagcagagagag

SEQ ID NO: 201070 - RNA, 83 nt, Homo sapiens
cgaacggccacagcaccccgagaccgcagccccgccccacgccggcagccccacgagcacaaaacacacacagcaaaaaagac

SEQ ID NO: 201071 - RNA, 74 nt, Homo sapiens
gggaccacggcagcccgaaaggagagacacggaacacaaggaagcaaaagcccagaagaaacacgagccccacc

SEQ ID NO: 201072 - RNA, 73 nt, Homo sapiens
gagaaaacagaggcagccccccccccgcggccaccacagacagcggacagcaagaaacagacgcacgccgaaa

SEQ ID NO: 201073 - RNA, 76 nt, Homo sapiens
gagaaagagaaagaaaggcgggccagcaaaagcgcacagccagaagaaaccgggaggaccgagaacagcgccagaa

SEQ ID NO: 201074 - RNA, 76 nt, Homo sapiens
cggggcgaacccgagaggaggggaccagaacggaacaggccggcggccccaccccccaggcaaccaaacgggcgaa

SEQ ID NO: 201075 - RNA, 75 nt, Homo sapiens
cgagcgcccccagcacgagcgccccaggacagcaggaagagaacagcaaaaccagacgccgggaagagcgacggg

SEQ ID NO: 201076 - RNA, 59 nt, Homo sapiens
aagcggaggcacgggcggcccgcaggaccggaccgggggagcagaagcagcacacacaa

SEQ ID NO: 201077 - RNA, 72 nt, Homo sapiens
ggggcggcggcgggaagagagcggggggccgagcacgggcagagaaagcaacgcaccgggcccgcagcaaga

SEQ ID NO: 201078 - RNA, 83 nt, Homo sapiens
cggacaagagcgcggaacaggacgccccgagcgaccccgcacacacacccaccagccacggcagcccagcggggacccagccg

SEQ ID NO: 201079 - RNA, 82 nt, Homo sapiens
gaaaaacaggagaagaaggccgacacggagggggccaggcagcagagcgggagcgacagggagaagaagcgaaggagggggg

SEQ ID NO: 201080 - RNA, 77 nt, Homo sapiens
cggcgaacggaaggccacgcccccccgccgccccccagcccgggcgggggcagagccagggcgacccaccaacaggc

SEQ ID NO: 201081 - RNA, 61 nt, Homo sapiens
ggaccaaccaaagacgccaaggagaaggcagaccgggcgccgcgcccggggagacagaaac

SEQ ID NO: 201082 - RNA, 74 nt, Homo sapiens
ccaaagcccagccccaggcacagaccccagcgaggagacgagcgccaaagacagaagcaagcagaaaagagcaa

SEQ ID NO: 201083 - RNA, 82 nt, Homo sapiens
caagcagaagaccggcggaaggcgcgccaaggagaccaggaagcgagcaccagcagggcaagaaggaacagacaaaaacggc

SEQ ID NO: 201084 - RNA, 76 nt, Homo sapiens
aaaaaaggaaacacacaaacgcagggccaacgggccaacgccggcaggggacggcccacgcgaccggagcccggca

SEQ ID NO: 201085 - RNA, 74 nt, Homo sapiens
agggccccacgacacaaggcggccacaggccaggaaagggacaccccaggcgggggacgccgcaacgcgaacgg

SEQ ID NO: 201086 - RNA, 63 nt, Homo sapiens
cccaagccaaaacacagcgaggagaaacaggcgagcagacagagcaccagccggggacccgga

SEQ ID NO: 201087 - RNA, 32 nt, Homo sapiens
aacaggaaaaaggaggagccggcaagagcgag

SEQ ID NO: 201088 - RNA, 78 nt, Homo sapiens
acagcaacaaggaaaaaaagggcagagaaggggacgggaaagaaaagaggcccggaagagagccaccacgacggcagc

SEQ ID NO: 201089 - RNA, 77 nt, Homo sapiens
gacaggcggcgccaccgaacagacccggaaggacggcgagggagaggaacagggcgcaccacagaagagccaaagac

SEQ ID NO: 201090 - RNA, 85 nt, Homo sapiens
aaacgagggacaacacagacccaccagcagaacgggcggcagagaagagaagagcacagcgggaggaaagggagagacaagagag

SEQ ID NO: 201091 - RNA, 85 nt, Homo sapiens
cgaggccaccacgcgggggacccagcaacccgggaacacaaccaagcaacacaagcacccccggccccgggaccaaggacacgca

SEQ ID NO: 201092 - RNA, 69 nt, Homo sapiens
agaaacaggagacaggagagagagaagaagagacgcccaaaacccaagcaaaaaagagggggaccagca

SEQ ID NO: 201093 - RNA, 81 nt, Homo sapiens
agcaccagcaacagggcaagagaccagggaagcagcaccacggggagacaagcaagcccccggggcgccaccgagcccaga

SEQ ID NO: 201094 - RNA, 70 nt, Homo sapiens
ccgggggcgaacccgcgaaagcgcccgcgacccccagggaagaggagaggaggaacagggaggccacgcg

SEQ ID NO: 201095 - RNA, 53 nt, Homo sapiens
cacggagggacgcagaaaccgagccgaggaaggaaaggagcgggggacaggag

SEQ ID NO: 201096 - RNA, 76 nt, Homo sapiens
ccggaagccccaacaccagagcgcacaccggggcaaaagggacaaggaagggccagagaggggaagaggaaaccgg

SEQ ID NO: 201097 - RNA, 72 nt, Homo sapiens
agacgagaaaaggacgcgacacaagcacaaaagcggaggaaaaggaacgaaagcggcacggagaagaaggaa

SEQ ID NO: 201098 - RNA, 33 nt, Homo sapiens
gaaagaagaagaggcaagggaagaagaaggcaa

SEQ ID NO: 201099 - RNA, 72 nt, Homo sapiens
cggcccagcaccccgagaaccgcaggagccagaggaagagagaagagggggaagaagcccccacccccagga

SEQ ID NO: 201100 - RNA, 60 nt, Homo sapiens
gggggcagcgcaggacaacggcaggacggaaggcaggcggcaccaggacgccgaaaagcg

SEQ ID NO: 201101 - RNA, 81 nt, Homo sapiens
gccgccgaagcagcgcgcccgggccacccccggaccccggagaagcagaggaaaaggaggcgacaaagcgaaaggaaagga

SEQ ID NO: 201102 - RNA, 95 nt, Homo sapiens
gaacccagacacagaaaagcacaccaaaagaggagaccagcccgaaggggggcagaaagaagaggaggacaacaagccaacagagagagacgaag

SEQ ID NO: 201103 - RNA, 80 nt, Homo sapiens
cagggcgcccccggcgggaacgacccaccggaaacgaaccagacggagcccgggcaggaaacacaccagcaacacccgga

SEQ ID NO: 201104 - RNA, 60 nt, Homo sapiens
accagcgggcagaagggccccccaggcacccccgcacacccgaggccggccaggagggag

SEQ ID NO: 201105 - RNA, 64 nt, Homo sapiens
ggacggccgccggagccgcgaggccaaccaccggggaccgcaaggccgcggggcccaacaaggc

SEQ ID NO: 201106 - RNA, 42 nt, Homo sapiens
ggagagcacccggagcccaagacagggaggcccgggcaggcc

SEQ ID NO: 201107 - RNA, 67 nt, Homo sapiens
gggcgacgcgcgggaacaacgcgagcggcgcgcgggacgaagggcacgagaccgaagccgagaacac

SEQ ID NO: 201108 - RNA, 74 nt, Homo sapiens
aaacagggaccgagcaagcaggccacaacagaacggaaccaagaagaaacggacaccaacacaaacacaacaga

SEQ ID NO: 201109 - RNA, 72 nt, Homo sapiens
caaagacaaaagaaaagcaagaacgaggagcaccaggagacgcaaccacgggaaggggaggagcacagaacg

SEQ ID NO: 201110 - RNA, 76 nt, Homo sapiens
gaccggaagcggcgccggggcgagggagaagacccggcggagacccaagggccggaccacggagcggccgagaaac

SEQ ID NO: 201111 - RNA, 64 nt, Homo sapiens
cccgcagaccgcagaaggccggagacaccagcaggacagcccagagcaagcacacggaggcccg

SEQ ID NO: 201112 - RNA, 72 nt, Homo sapiens
cggccgaaggggcgcgcggccccgccgccccagcccgccccccgggccggccagcgaagacggaggaccaca

SEQ ID NO: 201113 - RNA, 72 nt, Homo sapiens
aagcggcgagcaagaacagggaacgcgccaaaccaaagcgccacccccaggcgagcggggacccaaaaccac

SEQ ID NO: 201114 - RNA, 80 nt, Homo sapiens
aaagacaggagggaggaacagacaccgagccagcaagcccccaacggagcaggacacgagacacaggccgcacgcacgcg

SEQ ID NO: 201115 - RNA, 70 nt, Homo sapiens
gacaaggacgaccaacaggaacagggagaagaaaagcaacacagcgaccagaaaaaacagggagccacca

SEQ ID NO: 201116 - RNA, 72 nt, Homo sapiens
ggggaacaccgacagccacagaaacaaggcagacccggaaaccagacgacagaaaggacggcaaagcggaga

SEQ ID NO: 201117 - RNA, 70 nt, Homo sapiens
ccccaggagaaacgaggagcgcggccaccccccggaacgaggaggggaaaaggaccagaacggaagcaac

SEQ ID NO: 201118 - RNA, 75 nt, Homo sapiens
ccaaggccccgacagcgcgccccgaccgggggccgccagcaaagccagagaaggacggcaccagaaacaagaccc

SEQ ID NO: 201119 - RNA, 71 nt, Homo sapiens
aaagaggcggcgccgcacaacccggggccgggccgcaagcacgaaaggcccgagacgccagcaagaaagga

SEQ ID NO: 201120 - RNA, 79 nt, Homo sapiens
cggaagcgagccggcggcgggaggagcagggcggagcccccagcccccgcgaagccagagacgcgcacgaaacgacgaa

SEQ ID NO: 201121 - RNA, 79 nt, Homo sapiens
cgcagggcccccacaccgcgccgccaaggcaagggagggagagagcaaaaccaggccggagcccaacagaaagcccagc

SEQ ID NO: 201122 - RNA, 75 nt, Homo sapiens
ggaaccagaggcaccgcaagcgggacagcaggggaaagcgcgagcgagcacccggagcagcagagcacccaacag

SEQ ID NO: 201123 - RNA, 70 nt, Homo sapiens
cgccccaggcgcaaaacccgagaaagggcaaccggacagcagagcagacgccggaagaagacgccggcag

SEQ ID NO: 201124 - RNA, 76 nt, Homo sapiens
accagagcccaggcaaggaggaaggaggaccccccgacgcgagaccccagggcccggaagaaaccccggagccagc

SEQ ID NO: 201125 - RNA, 80 nt, Homo sapiens
agagaaaagcagaaaccagagacaagagaaagacagcaaagaaaaggagaagaaaggaaaaaaacaaccccgggcacccc

SEQ ID NO: 201126 - RNA, 35 nt, Homo sapiens
gcagcaccggagcgccaagacagcaacgagccgag

SEQ ID NO: 201127 - RNA, 73 nt, Homo sapiens
agccaaggaaaaacggagagccacaaaaaaggaagcgaaaacgggaaaagccggcagcaaaagcacccgaccg

SEQ ID NO: 201128 - RNA, 102 nt, Homo sapiens
cgcgccgcccggcgccggcccgcccccgcagcagcgccagggacgaacagcggggacgccccagcagaccgcccaggagaggaaagcaggaggaaagaccac

SEQ ID NO: 201129 - RNA, 68 nt, Homo sapiens
cggcccggagcacagcccaagaacaaggaagggagcagcaggccccacaaccaccaacaccggccacc

SEQ ID NO: 201130 - RNA, 75 nt, Homo sapiens
accagggacgaagaagacaagagcaggaaaaaaccaagggcggaacaaaggaaacaggagcagacaagggcccac

SEQ ID NO: 201131 - RNA, 80 nt, Homo sapiens
caccaggccaagacaaaggagagagagcggggacagacaggcaagaacaaggcccgccaagggaggcgcccacagagggc

SEQ ID NO: 201132 - RNA, 79 nt, Homo sapiens
ccacccgaagacgaaggcgccagggcagaaccgcggcagcgagaggggaagccggaaagaggcaagccgggcaaagggg

SEQ ID NO: 201133 - RNA, 84 nt, Homo sapiens
acaaaaccagaaagggacagaccaagccaaggaggcggcaggaaccaaaagccacccaacaacagagggggaccagcggccacc

SEQ ID NO: 201134 - RNA, 72 nt, Homo sapiens
cacagacaaccagaagaaggccaagaagcgagagaagaaaaacagaaaaagccaagacagaaacaagaacca

SEQ ID NO: 201135 - RNA, 77 nt, Homo sapiens
gcggcgcggcggccagaggaaccccgagacccaacccggagccggggacggcacacgggcgggggcaacgggaggag

SEQ ID NO: 201136 - RNA, 88 nt, Homo sapiens
caaccagaaccggagcaggaggcgcacaacacccagcaccaccaagaagcgaagaaaaagagaaaccgagaaaacccaaacacggggc

SEQ ID NO: 201137 - RNA, 76 nt, Homo sapiens
aggaggagaaaaacaggacaggggggaagaacacacgagagaaggaaggcaccggaacaagccaggaaaacagcgg

SEQ ID NO: 201138 - RNA, 73 nt, Homo sapiens
cgcgcgcgcacagcgccgggcggcgcgcgccacccgccacggcacagcccagaaccgccccagacaaggcccg

SEQ ID NO: 201139 - RNA, 45 nt, Homo sapiens
cgccaccccgaccaagccgaagggagaaaccgaaacgaacccagc

SEQ ID NO: 201140 - RNA, 62 nt, Homo sapiens
cgggggggcgccggaagagcccaggcgcgggcgaggaagaccagggaaacagagcaaagcgg

SEQ ID NO: 201141 - RNA, 80 nt, Homo sapiens
ccaaaccgggcgccgaaaacagacagaacagaacccaaaagccgacaaccccagaaacagaacacgcccaggacgggaca

SEQ ID NO: 201142 - RNA, 77 nt, Homo sapiens
aaaaaccaggagacacaaacagaaaaggaagaaagggacaaagagaggagcaggaaccaacagaggcaaaacccgac

SEQ ID NO: 201143 - RNA, 59 nt, Homo sapiens
agagaggaccccggacacgaaagccgggaaagaagcaaaccagccccagaaaagaaaag

SEQ ID NO: 201144 - RNA, 81 nt, Homo sapiens
gaaaaccaaccagaagacgaacaaacagcaagaaagaccacaagaccaaaaagagaggaacagcacggaagaaccgaagaa

SEQ ID NO: 201145 - RNA, 78 nt, Homo sapiens
ccgccgccggccgcgggccccggaggacgcaggggagagagacggacaggcccagcggaggccgggcgccaccagcgg

SEQ ID NO: 201146 - RNA, 74 nt, Homo sapiens
cgagcccagagcggcgcggcgcgacaacagagaagcaaaggccagaaacagagaccaccaacgccaagaaaacg

SEQ ID NO: 201147 - RNA, 53 nt, Homo sapiens
ccgcccgccacagccggcagcgcgaagcagcaaccaggcaaaccgacaccagc

SEQ ID NO: 201148 - RNA, 50 nt, Homo sapiens
ccaccacagacgaaccggcaaggcacacaaggaacaaaaaacaacagagg

SEQ ID NO: 201149 - RNA, 72 nt, Homo sapiens
gcgggaggccaccgccagggagaccagcacgagccgggcgggacgccggaaggggcacaagacacgcacaag

SEQ ID NO: 201150 - RNA, 94 nt, Homo sapiens
gagcccaaaggaccagggagagacaagacgagcaccccaggagagacgccgcaggagcgcgccggagcgcccagcggcccggcgcggcgacggc

SEQ ID NO: 201151 - RNA, 84 nt, Homo sapiens
cagcgacggcagcggcggcggcggacaaacaggcaccgcaggcaggcagcggaagagaaagaccgaggcaaagaagcaggagca

SEQ ID NO: 201152 - RNA, 77 nt, Homo sapiens
agaggcgccgccccgggcccgagcaccggccggaggcaaagaacagagcagcaccagcaaaagaacgaagaagacca

SEQ ID NO: 201153 - RNA, 67 nt, Homo sapiens
acaccaacgggcaggacaaaaacagggcaggaggcggcagaaccggcacgacagaaaaacacaacag

SEQ ID NO: 201154 - RNA, 73 nt, Homo sapiens
ccacaccacccaccacgacggaggacggaggagagggcggcaggaaaggaagacagaccacagccccaccagc

SEQ ID NO: 201155 - RNA, 75 nt, Homo sapiens
ggagaaacaaagaccacaccaggcaccaaccagaagcgaacaaggagcgggaacagaaacacagagcaaggacag

SEQ ID NO: 201156 - RNA, 67 nt, Homo sapiens
cgaacacaggagccaccagaaaaacaaaaaggagggaaaacagacggcaccagagacgagccacggc

SEQ ID NO: 201157 - RNA, 74 nt, Homo sapiens
ccccagacaaaccgaaggcgacagagacagcacaacaacagcaacggaggcgggaccggaacaggcacacccca

SEQ ID NO: 201158 - RNA, 71 nt, Homo sapiens
acagcacagcgccccgccagaccagcccaggcccacaggggcccccccacgaaaaagacacaagcacaccc

SEQ ID NO: 201159 - RNA, 69 nt, Homo sapiens
aggccgggcccggaccgcccccgagcccggaggggggagaaaaggcgagaacgcggacaagcaaacaaa

SEQ ID NO: 201160 - RNA, 74 nt, Homo sapiens
cgacagaggagggaggaaaacaaccgagggcagaggaagcggacagcaagacaggccccggaacagcagaccga

SEQ ID NO: 201161 - RNA, 70 nt, Homo sapiens
caggaagaggaacccacgaaaaggagggagccaaagggggggaaagcaggccaccccgccacagagcccc

SEQ ID NO: 201162 - RNA, 77 nt, Homo sapiens
aagaaagagccaaacaacgccacagagacgaggacgcgcacaggaaaggacgcggaacaagcaggcagccaggcagc

SEQ ID NO: 201163 - RNA, 52 nt, Homo sapiens
aagaggagaaacgaggagagaacaagaagcagccaggaagacgagggagacc

SEQ ID NO: 201164 - RNA, 85 nt, Homo sapiens
gagggagccgggcacagaaacacagcagcgggagcagcaacaccagcacgccaacagggaaagaacccaacgcggagagccacaa

SEQ ID NO: 201165 - RNA, 76 nt, Homo sapiens
gcagggcagggccccgcccggcggggaagcacaagagggccagggaccaggggacgcccaagacggccacccgcga

SEQ ID NO: 201166 - RNA, 75 nt, Homo sapiens
cacgcaccccgcggcggggaaaggccgcaaccaagcgcggagccagcgcccggcaaggagcgagcgggagacacc

SEQ ID NO: 201167 - RNA, 81 nt, Homo sapiens
cccacaaaacaccagagcgaccaagaaggagagcgacagcccaagcaccagggaggcgggacagaacgaacaaaagggaaa

SEQ ID NO: 201168 - RNA, 70 nt, Homo sapiens
ggcgcccggacaacccggcgggagcagcggaagacaccaaggccagggagggccaccgcacggaagagac

SEQ ID NO: 201169 - RNA, 48 nt, Homo sapiens
gaccccggcacaacccgacgacacacacaggggcggcaaggaagcagg

SEQ ID NO: 201170 - RNA, 69 nt, Homo sapiens
gcccagcagggggaggagagggcagagaggcaacgaaccggccacgacccggaaaagcagaagcagagg

SEQ ID NO: 201171 - RNA, 76 nt, Homo sapiens
ccaaaaggaacagcggaaggcggggaggcacggccgggcggccgcacggcaccagcggccgaccgggaaggagcgg

SEQ ID NO: 201172 - RNA, 77 nt, Homo sapiens
ggcgcaaagaagcccaagccaggacggaccccaagcaagccgccggggacaaccagcaagccagggcgcagggagcg

SEQ ID NO: 201173 - RNA, 82 nt, Homo sapiens
cgagccggccgcgggccggggccggggcgccgcggcaggagcgcggggaccccaaggaaagcgaagccaacaaagaaaggac

SEQ ID NO: 201174 - RNA, 61 nt, Homo sapiens
gaagcggcggccaagccgaccccagggcaggcgaccacccgacgggaaagacccaacgcca

SEQ ID NO: 201175 - RNA, 76 nt, Homo sapiens
ccaagccaagcaagagagaagggaccaggaaaaaaaagccagaaaaagagcgcgaagagggccgccgcgcccaggc

SEQ ID NO: 201176 - RNA, 74 nt, Homo sapiens
aaagagaaaccaaggagagcaaacaggaaacgacgcccccgggccaaacggcagcaaaaacagacagaaaggga

SEQ ID NO: 201177 - RNA, 62 nt, Homo sapiens
cgccggccgaaagaccagcagcacaaaagcgacaagaaccacggcgggaaacgccagaagga

SEQ ID NO: 201178 - RNA, 85 nt, Homo sapiens
ggaacaggggcccgccagccccgcggcgcccgggcccgggcggcggcccaccgcccacggggaggccccgaaggagcaaggaaac

SEQ ID NO: 201179 - RNA, 55 nt, Homo sapiens
gccaagagggaagcagacgagagcaagcgacggcccacgccgaccacgccacccc

SEQ ID NO: 201180 - RNA, 48 nt, Homo sapiens
gcgccgggccgggcggcgggagagagcaccagaagaggcaggagacga

SEQ ID NO: 201181 - RNA, 72 nt, Homo sapiens
ccccgcacggcggcggcccgcaccccgccccccgaccacccagcgggccgcacaagagcgcaccagccccca

SEQ ID NO: 201182 - RNA, 66 nt, Homo sapiens
gacgcagaaaggcccaccagaaggaggaccggaagcgggcccacaaggacagaagcccgaagagga

SEQ ID NO: 201183 - RNA, 85 nt, Homo sapiens
cagaccccccgagccgcgaaggagcccgagaagcagccacgaggcgacgcaaaacaaaaggggccaaggacgcacacaccagaga

SEQ ID NO: 201184 - RNA, 115 nt, Homo sapiens
ccagaaaagcagcaccagcaaaacccagacccagaccagcagcaagaccccacaaagagccccaaggcagcgaaaccaaagaagaaggcagaagccagccaccacaaaaaggcag

SEQ ID NO: 201185 - RNA, 80 nt, Homo sapiens
gcaacacaccacaagcccccgccacgcgggcccaaacacgacggacaacgggcgaccgggaaggacagaggaggaccgga

SEQ ID NO: 201186 - RNA, 33 nt, Homo sapiens
cgccgcccaccccggcaggcgggcaacacaaca

SEQ ID NO: 201187 - RNA, 72 nt, Homo sapiens
acccccaggaggcccggcagagcaggaacgcaagccacgcagcaccccaccagcacgccaagcaaaaggggg

SEQ ID NO: 201188 - RNA, 73 nt, Homo sapiens
gaaagacaccacacagccaccgaaaaaggcaaagacaaagacaagcacgagaccggcaaagggcccggcggaa

SEQ ID NO: 201189 - RNA, 82 nt, Homo sapiens
cggccgaaggagccaccaggccgggaagcccacggcaacggagggcccggaggaggcgacaaccaaagaggaccagacaaga

SEQ ID NO: 201190 - RNA, 73 nt, Homo sapiens
ccgaaggcaccggccaggccccgccagaagcacagaaagacccagaagacccgaggaccgggaacgaaggggc

SEQ ID NO: 201191 - RNA, 72 nt, Homo sapiens
caaggggacaaaccaacagaagggcaaccagggggaccggccaagcagagccaagagcgggagaacgcagga

SEQ ID NO: 201192 - RNA, 79 nt, Homo sapiens
gacccagcccaagaccacagcacccagaaacaaggccggacgggcacccagaggcgccaggacggcgggaccccgccag

SEQ ID NO: 201193 - RNA, 69 nt, Homo sapiens
ccccgacagccgaaggagggcaagacagcgagggacgaaggagaccgcgcaggaaggggaaaaccgccg

SEQ ID NO: 201194 - RNA, 73 nt, Homo sapiens
aaaccccaaaaggacaaaggaggaccccccaaggacagcagcacaccgagccaaagagcgagacagccccaca

SEQ ID NO: 201195 - RNA, 37 nt, Homo sapiens
cacacacagagcagccacagaggggggcgggccgagc

SEQ ID NO: 201196 - RNA, 88 nt, Homo sapiens
ccgacacgacgccgccggcaggcccgcgcaccaggagccggcccaggagcagcagggaggcgggaacgcccagggagcccccgccccc

SEQ ID NO: 201197 - RNA, 72 nt, Homo sapiens
ggacacaacccaagaaacaacgccccaagcaaaaaagagcacgggacccccagaccagaggagcagcaaaca

SEQ ID NO: 201198 - RNA, 73 nt, Homo sapiens
gggaggcaccacagccggggcccacagccgcccgaccccggggcccggcacggggcagagcgggccgcacggg

SEQ ID NO: 201199 - RNA, 87 nt, Homo sapiens
acaccaaagaagagaaagacaaggagaccaggaagggaaagccccagggaagaaaacgccagagaagcagagcagcccggagcgagg

SEQ ID NO: 201200 - RNA, 91 nt, Homo sapiens
agagggacaggccccggaaggaacagaagcgggccagacagccgccaggaagcaacgcagcgcggaaaggcacaaccaaggacacgcagca

SEQ ID NO: 201201 - RNA, 82 nt, Homo sapiens
cacgcagaagggggaaagagaccgggacagaacagcccggcccaggccccgagcggagggaggaaaaccccgcagcacagcc

SEQ ID NO: 201202 - RNA, 84 nt, Homo sapiens
caggaacggaccgcacgacgggacacgccagcaagacaaagcccccgaacagcagcgcagcagccaggccccgcccggggcccg

SEQ ID NO: 201203 - RNA, 78 nt, Homo sapiens
acacaccgcacaacgcaaccagccggcacgggcagaacaagggacagagcaaggaaagaacaaagccgaaagagcaaa

SEQ ID NO: 201204 - RNA, 82 nt, Homo sapiens
gggcgcgcgcgcgggcgcgccaccgacagagacacggaagccggagcagggaagaaacccccagaccgacccggaggagcgg

SEQ ID NO: 201205 - RNA, 40 nt, Homo sapiens
agccgccaggccgcccgaggcgaagccgacgagcccgaac

SEQ ID NO: 201206 - RNA, 77 nt, Homo sapiens
gaacagcacccagaaaacgagcgccccacacaaggaaagcgaacgcgaaaagaaaagccgagagcagccagaccggc

SEQ ID NO: 201207 - RNA, 86 nt, Homo sapiens
cgcgcaccacccgcaggggcggcacccaccccccgagcccgcccgccggccccagcccccaccagcagccccgggccacaggcagg

SEQ ID NO: 201208 - RNA, 60 nt, Homo sapiens
ggccccgagggccggggacccaccccaccagcacgggaccggcccgggaggccggccgcg

SEQ ID NO: 201209 - RNA, 70 nt, Homo sapiens
ccgaaacacgcagaaagagaggcgggagggacaagaagaaaggggaccgagagccgggaaggccgacagg

SEQ ID NO: 201210 - RNA, 54 nt, Homo sapiens
gccgaaacaaaccggaggcaggcaggcccagccgcacaggaagacggaagagga

SEQ ID NO: 201211 - RNA, 79 nt, Homo sapiens
acacacacaagaaacgggcacacagagaacaagccaaggccgacggccagaaggagaaaaaagagcccccaagaggcgg

SEQ ID NO: 201212 - RNA, 89 nt, Homo sapiens
cggagcagagccgcgggcgccggagccgaggcgagcgccgcgcgcaccacggacacgagacagaaagccaaacgcagaccgagacaggg

SEQ ID NO: 201213 - RNA, 82 nt, Homo sapiens
cagagcgccggcaagagccgggcggagaaccggggccggaagaagacggcacgggacccccagcacaggcagcaggccggga

SEQ ID NO: 201214 - RNA, 54 nt, Homo sapiens
gggagcagcgggacgcaagagggaccccagggcaggagggcgcccccagcgccc

SEQ ID NO: 201215 - RNA, 90 nt, Homo sapiens
cgccggggaagaggagaaggcacccgcggaaccgacggccagggccggacgcggcggaggcgagcgaggccagcgcgcaggcccggagga

SEQ ID NO: 201216 - RNA, 98 nt, Homo sapiens
cgccaaggacggcgccggaccaacaccccccagccgcgcgaccgcgccggaaacgaagacccagaagaccccagacggggagcgcagcagagggagcg

SEQ ID NO: 201217 - RNA, 63 nt, Homo sapiens
aagaggggaagcgacagagaaccacagacggaggcggccacagacgaggacgcgcacaggaaa

SEQ ID NO: 201218 - RNA, 87 nt, Homo sapiens
cggaggccgccggcgagccgccaagaggcggcgcagccaccccgcgggaacgcccagcgcggcggaagcccggccgcgcaaaacggg

SEQ ID NO: 201219 - RNA, 68 nt, Homo sapiens
caaaagcaagaagaggagcgggagcaggggagaacggcgcagaaccggccgaaaagcacaaacagcaa

SEQ ID NO: 201220 - RNA, 74 nt, Homo sapiens
aggggccccccacccccagcagaagccaggcccagcagcggcgccacaccagcccaagggggcagcagcccacg

SEQ ID NO: 201221 - RNA, 84 nt, Homo sapiens
gcccaggagggagggacacagccccaaacaggacgaaggcggcgaagaccccccggcggaaggcacacgcacacaccgagacca

SEQ ID NO: 201222 - RNA, 84 nt, Homo sapiens
ccagccgggcccgcgcgcccggccaagaggcaaaggggaggacgcagcaaaccaccagaagaaaccgggagaagccggccaggc

SEQ ID NO: 201223 - RNA, 80 nt, Homo sapiens
caccgggaccccggaagccaaaaaggggacaccgaggaacagaagagaaccagacagcccacagggagcgaagcacagaa

SEQ ID NO: 201224 - RNA, 83 nt, Homo sapiens
cgccccggccgccaggagcagccgccggcgccaagaggccggggggggcacagagccccggaagacagcccccagcgaccaga

SEQ ID NO: 201225 - RNA, 71 nt, Homo sapiens
agaccgagagccgcccgaaaagcggggccggacgaaagcaccgggaggaaagagagccacacgaagaacac

SEQ ID NO: 201226 - RNA, 72 nt, Homo sapiens
agaggcgggcggcgccgggacaggggacgaagggaacccgccgggcggcccggcacccagccccccggcacc

SEQ ID NO: 201227 - RNA, 75 nt, Homo sapiens
cggagaagggcggcagaccgggcggcggacacaagcaggacgccccacacacggcgaaccacgggaacaaaggcg

SEQ ID NO: 201228 - RNA, 83 nt, Homo sapiens
ccagaacgggcaagcggggccgcaagcaggcaagacccaccccacggacccaccgcgcaggcacagaccccacaggccccgga

SEQ ID NO: 201229 - RNA, 70 nt, Homo sapiens
caccgacacagcccagccgagaaggacggagaagcgaaagccagaccggcaagagcggaagaaagcacca

SEQ ID NO: 201230 - RNA, 79 nt, Homo sapiens
cccgggccgcgggagcggagcccccgggaccaggggagaggccaccacacgggccgcccacgacggacacaagaggcca

SEQ ID NO: 201231 - RNA, 83 nt, Homo sapiens
agcgaaggggaggcgccgcaagcgcgagggaacgccgcagaaagaagaaggggcaagaacagccacagcagagacaaaaaacc

SEQ ID NO: 201232 - RNA, 68 nt, Homo sapiens
gggaaaacagcaagacccacgaacccagcaaaccagccagcacgggggcccagccagccagcagcgag

SEQ ID NO: 201233 - RNA, 31 nt, Homo sapiens
cggagcgccggaagaacccgaagacaagcca

SEQ ID NO: 201234 - RNA, 75 nt, Homo sapiens
ggacaccgcccagcccgagcaggccaacccaggccaggaggggcgcggccaggccggagaacagcacgccccgcg

SEQ ID NO: 201235 - RNA, 55 nt, Homo sapiens
ccccccgcacgagcagccccgccgggccacccaaccggcaacgacccagagacga

SEQ ID NO: 201236 - RNA, 71 nt, Homo sapiens
accgaacccagcacggcaaccgcgcggcaggccaggggaccgggaaagaaaggcaaagcgagcaagaggga

SEQ ID NO: 201237 - RNA, 80 nt, Homo sapiens
acgcgaacgagagggacacggagcagagccaacacccgaagcgaagggcggacagacccagagcagccgcaaaccccgaa

SEQ ID NO: 201238 - RNA, 80 nt, Homo sapiens
accaggccccgcgccacacgcgagggcagcaccgcagaggacccaaagcaggccgacagacagagccggacgggaggaag

SEQ ID NO: 201239 - RNA, 61 nt, Homo sapiens
aagaacccccaaacccaaaccgaggagcgcccgccccagggaggacccaaccgcggcacac

SEQ ID NO: 201240 - RNA, 59 nt, Homo sapiens
aagaccaggagagggcggccaagcccggaaagagcacaggacccgagccccaaagacag

SEQ ID NO: 201241 - RNA, 82 nt, Homo sapiens
acaggacagaaagaaggaaaaagcagaaagccagaggaagaggacaagaggaaaaacagcgagggaaaagcagcaaggaaac

SEQ ID NO: 201242 - RNA, 77 nt, Homo sapiens
accaacacggcacgccaagccgccaagggaacacagccccgagccacgacacaacgaggcaccccacaccagcgagc

SEQ ID NO: 201243 - RNA, 82 nt, Homo sapiens
cggggagccccaggcccgggcccggaccccgcgcacccggccagaccggcgggggcccagggccagcgcggcaccgagagaa

SEQ ID NO: 201244 - RNA, 77 nt, Homo sapiens
gggagcagccacagggcagaccccggccaaagagaaagggcgcaaaaagaaagaaaacaaaagccagccaaaaacag

SEQ ID NO: 201245 - RNA, 80 nt, Homo sapiens
ccacgggacacaacgcacagagggacaaggaaaccagccaagcaaccggaaagaggcagaacaccaaggaaagaagaaga

SEQ ID NO: 201246 - RNA, 55 nt, Homo sapiens
gagggagcaggaaaaaggcggagaggaaggggacaccagcagcgccgccggacca

SEQ ID NO: 201247 - RNA, 76 nt, Homo sapiens
ggaaacggagaagagccaaccgcaccgcgcaggagaacggacccacagacaaacacagagaagccaggcacccagc

SEQ ID NO: 201248 - RNA, 77 nt, Homo sapiens
ggggagcagcgccgggagaaggaccacgcagggcccccaacacgccgagccaagacgccgaggaaccgaaaccggca

SEQ ID NO: 201249 - RNA, 92 nt, Homo sapiens
gcggccgcagcgccacaaaccagccggaagcccgaccccaggagccagcccacaaccgaaccaacgccaccaagaagagcgggcggagagca

SEQ ID NO: 201250 - RNA, 83 nt, Homo sapiens
cacgggaggcgagcaggaccaagcggacggacaggaagacccccacagcaccagaggaagcgcaggccccacgggcccagccc

SEQ ID NO: 201251 - RNA, 95 nt, Homo sapiens
ccgccccgcagccccccgcagcacccagccggccacggccgaacgaggcggggggcccgagaccacaccacacccaccagggaggaccggagaag

SEQ ID NO: 201252 - RNA, 79 nt, Homo sapiens
gaagcgaaaccgagcaggcagagagcagaagaacacagacagcggaagaggcgaacggagaagagccaacaggaagaca

SEQ ID NO: 201253 - RNA, 71 nt, Homo sapiens
agccacccacaaacagagagaaggaaccacccacgcaggcagaagcagacccgaaagcagggccgaggcac

SEQ ID NO: 201254 - RNA, 76 nt, Homo sapiens
gaccagccgcggagccgggggcagaaagccaaggacacgcaggacgaagaaggaggagagcccagaagaaaccaaa

SEQ ID NO: 201255 - RNA, 53 nt, Homo sapiens
gccccagacggcaagcggcaccagcaccaaaaccagggggacaggcgagaagc

SEQ ID NO: 201256 - RNA, 80 nt, Homo sapiens
cgggggaggaaccagggggccgggcagccgcggacccgccaagaagcgcccacgcagcagccgaggaaacacgaaagcaa

SEQ ID NO: 201257 - RNA, 57 nt, Homo sapiens
gaagaagcgggccacccacaaagggcgggccgggacggagcaccaacaagccgccga

SEQ ID NO: 201258 - RNA, 57 nt, Homo sapiens
ggaagcgggcccacagaaaagcagcccaacgaaaaccgcgagaacaccaacaccagc

SEQ ID NO: 201259 - RNA, 70 nt, Homo sapiens
gccaacacaaccaaggggaaacagcaaaacacgaaagcaaaagggacgcaacaggagagagcgacgcaaa

SEQ ID NO: 201260 - RNA, 68 nt, Homo sapiens
cagcacgagaggaccccacgggacccagacgagagggagccgggcgggaacacgcagggccccagagg

SEQ ID NO: 201261 - RNA, 75 nt, Homo sapiens
cacccccggcgggcccgaggcggcgagagaggcaggcggagccgaccgggccaggcagagagggcagcgcccgag

SEQ ID NO: 201262 - RNA, 68 nt, Homo sapiens
cagaaagcgacgcagccgagaccccgaaaaaggccgaaggaaccagcaaagaggaggccaggagcaca

SEQ ID NO: 201263 - RNA, 67 nt, Homo sapiens
caaaacagaggaaaaccagcaaacgacaacaggagcaaagacacagcaacgagggaagaaccaggca

SEQ ID NO: 201264 - RNA, 87 nt, Homo sapiens
caggaaacagcccaaaaccgccgcgcgcgaccaaagaacaaaccaggggagggaaacgagaaaaacgacgccagcggcggcaagcgg

SEQ ID NO: 201265 - RNA, 78 nt, Homo sapiens
ggacacagaaaccgcaagagcaagagaccaagaaaaaggggacccagagccaccaagcaccaaaaaagcagcaaagag

SEQ ID NO: 201266 - RNA, 80 nt, Homo sapiens
caggcccgcgcgggaaccaggaacgaggaagcagaaaggcgaaggaacacacgacacagaaaccaagaggaagaacaagg

SEQ ID NO: 201267 - RNA, 73 nt, Homo sapiens
agaacagcaaaagagcacaagggacaaaggaaaaagaggaggaaaacagcagggacgaacaaaagcgagaggc

SEQ ID NO: 201268 - RNA, 60 nt, Homo sapiens
gcgaaaggccgaggcaccgggaacacagcgcagcagaaccgagggcaccggagggaagcg

SEQ ID NO: 201269 - RNA, 76 nt, Homo sapiens
cagaagggaggcccaagacccacaacaaaagagaagacaacagccaccgcgagaaaccacgagggaaagcgcaggc

SEQ ID NO: 201270 - RNA, 63 nt, Homo sapiens
ggggacgaccacaagaccgggaccacaggccgcggggcacaaccacaagaaccgcccacaccg

SEQ ID NO: 201271 - RNA, 72 nt, Homo sapiens
ccaccacacacaaaagcaccagagaagccaaggaggagccggacgcgagggcgccccagcccagacaagccc

SEQ ID NO: 201272 - RNA, 73 nt, Homo sapiens
caacccccaccccgcccaaggaggcccagcgcgagagaggaacgaggggcacagaaaccagaaaaacggagcg

SEQ ID NO: 201273 - RNA, 66 nt, Homo sapiens
accaagaaccaggccacaccaccacaggaggcaagaaccgcacccaccccagaccagccaggacac

SEQ ID NO: 201274 - RNA, 77 nt, Homo sapiens
gagcaagccaagaccgaaagaggaggaaaaacgagccaaaccggaaagagggaaacccccggaggacaggccaggca

SEQ ID NO: 201275 - RNA, 85 nt, Homo sapiens
gcgggcagaaggcaacgccgcaggcacaggccccgagccccggccccaaagacccaaaacagagacaccccccagcccccgcgcc

SEQ ID NO: 201276 - RNA, 79 nt, Homo sapiens
ggcaagaagggaggcaaaacgagcagagaagcccacggcacgaacacacagaaagaggccgaccgacaaagccagaccc

SEQ ID NO: 201277 - RNA, 59 nt, Homo sapiens
aagaacacagggggaagccaagcagaacaaaaccccggggccaacagcaccaccggcca

SEQ ID NO: 201278 - RNA, 77 nt, Homo sapiens
gacaaccccagaacaagcaggaaaggaaaaggcggagcacccgagagccaccaaaggaagccccaacagaagagaga

SEQ ID NO: 201279 - RNA, 95 nt, Homo sapiens
ccgagcccaggagcgccacgcgcggaaggcagcgcccagcagcgcaggaggagcaaaaaacagaagcagggccagaagggggcaaggcaaccgcc

SEQ ID NO: 201280 - RNA, 70 nt, Homo sapiens
ggcggcacagccaagccagccgggaaccagaggcaccgcaagcgggacaggcaagacccagagaaaggaa

SEQ ID NO: 201281 - RNA, 110 nt, Homo sapiens
gacgcccagccaaacaaaaaggaaaggagacaagcagagacgaaccaggcaaagagccggaggagccaccaacagaagcaggagccaggaaaccaaaacccacagagagg

SEQ ID NO: 201282 - RNA, 68 nt, Homo sapiens
ccagccaacagaggacgaaagagaggaacgaaacaccggacacagcgacgcacgagccagcgccgacc

SEQ ID NO: 201283 - RNA, 69 nt, Homo sapiens
cggccgaaggcgaacgccgcggccaaggagccgccaaagccagacgggccagcaggagggggcccagaa

SEQ ID NO: 201284 - RNA, 69 nt, Homo sapiens
gaggcccccgaggacgcgcaggcaccaacaggccagagaggcggcgacaaacaacagggaccaccagca

SEQ ID NO: 201285 - RNA, 78 nt, Homo sapiens
gggaaccgcaagcggccaagcacaaagagcgccccacgagagaacggcacacgcgagcgacaccggcccgggcgagca

SEQ ID NO: 201286 - RNA, 93 nt, Homo sapiens
cgccgggacgccaagcacccgccgcgggcggcgcgccgcagcgcccaggccggaccgggccgggcgcccgcagagacaccaggcgccgagaag

SEQ ID NO: 201287 - RNA, 39 nt, Homo sapiens
gagggagcgcaggggaagacggcgggccgggaggaaaga

SEQ ID NO: 201288 - RNA, 78 nt, Homo sapiens
aggaacgacaacccagccgcgggaaggggaaaccggaaggagggagacgcggcggcagcggagacgaaccagcggaca

SEQ ID NO: 201289 - RNA, 80 nt, Homo sapiens
gggagcgcaggaaccagacgggggcgagcgagcaccgagcaacacacgcagccccaaaagcacgcacgaaaccggcaagc

SEQ ID NO: 201290 - RNA, 79 nt, Homo sapiens
gggggcggcggccacgccaaggacggggaccaaaaacggaagacccagagaaggagaagagagccggcacaaacagcag

SEQ ID NO: 201291 - RNA, 75 nt, Homo sapiens
ggaaacgggcgaagcgacgagccgcgaggagaacccggacgcacaaggagcaaagaccgcaggagggcagccacc

SEQ ID NO: 201292 - RNA, 79 nt, Homo sapiens
gccccggaaggcccgccggcccgggcccaggaagcccgcagagaggggcagcggcaggaggccacgggccagcacagca

SEQ ID NO: 201293 - RNA, 102 nt, Homo sapiens
caagggaacaacaaagaacaagacacagggggaagcacacaacccagcccagaaacagacaaggaggacccgcccggagacagaggaggaaaggcagcagaa

SEQ ID NO: 201294 - RNA, 79 nt, Homo sapiens
cagccaccagcccagggaaccccaagccaacggaggagacaaccggccggagacaagccaggaggcaagaaaccggggg

SEQ ID NO: 201295 - RNA, 77 nt, Homo sapiens
ccccgagagcgggacgcagcaaaaaaagcacagcagccggaggcagcggccggaggagaaagccagaaacacggaga

SEQ ID NO: 201296 - RNA, 61 nt, Homo sapiens
ccggaacgggcgggcggcccccgaagaaaaggccaccccggagagcacgaaacccagaaac

SEQ ID NO: 201297 - RNA, 71 nt, Homo sapiens
gcaaaagcaaagaccagaaagaggccacccaagaaacgccaaaagcaggagggaccaaggaacagaagacg

SEQ ID NO: 201298 - RNA, 61 nt, Homo sapiens
cggaaggggccagcggagacagcaagcaggagcgaccgccggaccacgcagaaggagaccc

SEQ ID NO: 201299 - RNA, 77 nt, Homo sapiens
cgcagggcgcccccgaacgccaacgaagccaacgcaaagcaaagcgagcccccagaccaggacccagacccggacca

SEQ ID NO: 201300 - RNA, 74 nt, Homo sapiens
aggaagccgagcagagcaaaccaaaaaccagacgaacaagggaggaaggaacagccaaagaccacagcgagccc

SEQ ID NO: 201301 - RNA, 86 nt, Homo sapiens
gaaccaaccgaaaacagaaacaaacacaccaggcagccccgcaaagggaacaggaagcagccacggaggggacgcccagacccacc

SEQ ID NO: 201302 - RNA, 74 nt, Homo sapiens
ccgccagaacccgcgcagacaccagccacaaggagaggaccccccgcacaaggaggacccggaaagaccagccc

SEQ ID NO: 201303 - RNA, 80 nt, Homo sapiens
aaagcccacagccaaagccgggcggacgcgccacagaaagcccgccccagacagggccccggcccgcccggaagcgcagc

SEQ ID NO: 201304 - RNA, 85 nt, Homo sapiens
ggacaaacagcacaagagcggacaagagaggagaggcagcagcaggcgaggccgcccgacgccggaaagcggcccccgggagccc

SEQ ID NO: 201305 - RNA, 77 nt, Homo sapiens
ggagagcaggcagcgggggggcgagcccgaaacgaggcgggagcagcacagccagagccaagccggagaccgagaga

SEQ ID NO: 201306 - RNA, 98 nt, Homo sapiens
gcaaagcaacagagaccaagcaggagaggcgcaacaggcggagaagcagagccagggggagccagaagccccaaccaggccgaaaggaaaggagaaac

SEQ ID NO: 201307 - RNA, 77 nt, Homo sapiens
gggggggcacaacacaacagagcccagggaagcaggggccaaggaaaaggaacagagagagcagaaccgaaacgggg

SEQ ID NO: 201308 - RNA, 76 nt, Homo sapiens
gcgggccagcaagagggcaaacaagcgcgggcagagaagggagcacagaagggaccgacacaagaagcagccagaa

SEQ ID NO: 201309 - RNA, 76 nt, Homo sapiens
gagagagccggcacggaacaaaggccacgagggcaccgacaagaagggggcccagaagccggaaggcccgcggcgg

SEQ ID NO: 201310 - RNA, 77 nt, Homo sapiens
acgagagaacggcacacgcgagcggcaagccagaccgggagggagggccgaccgaggggaccagcaaggccccagcc

SEQ ID NO: 201311 - RNA, 75 nt, Homo sapiens
aagagagccgggcgcggaaacgaggaccccggcagccgcagccacccgcgccggccggaacgggaaaaccaacga

SEQ ID NO: 201312 - RNA, 35 nt, Homo sapiens
agcgcgccagccggccgcgacggcaccgacgaagc

SEQ ID NO: 201313 - RNA, 83 nt, Homo sapiens
cggggcgcgccaaaaaacccagcgggaggagcgggagcgcgcgggcagccgggggaccggaaagagacaccgccacgcagaca

SEQ ID NO: 201314 - RNA, 80 nt, Homo sapiens
ggaagcaggaaaagcagacggcacggaaagaccacagcaagaccacgcccccagccgggggaccaggccgaacgacccgg

SEQ ID NO: 201315 - RNA, 61 nt, Homo sapiens
aaacgaaccagccgaagacccaagcaccagccgccgccacacccccccccggccccccgcg

SEQ ID NO: 201316 - RNA, 47 nt, Homo sapiens
aggcgggccgaagcaacaaggaccagagaggacaaccaaaagcaccg

SEQ ID NO: 201317 - RNA, 76 nt, Homo sapiens
caacaaaggaggaacacgcagagaagcggaggccagaaggaaaacaaacacggaccaaaacaagggcacagggcgg

SEQ ID NO: 201318 - RNA, 73 nt, Homo sapiens
aaacacaccagggaccacaagcaagcgaaggaggccagaagaccagaagcgacaaagcgggaaggacgagcag

SEQ ID NO: 201319 - RNA, 70 nt, Homo sapiens
gaagaacggccacagaaccagaggaccggcaacaacccgaggacgaaccaccccgcgccagcagcacagc

SEQ ID NO: 201320 - RNA, 73 nt, Homo sapiens
cacagacacaccaaaagaggagccagaggaggcagaggaaacggagagggccaaagcacgggaagggggaaac

SEQ ID NO: 201321 - RNA, 77 nt, Homo sapiens
ccgagagcgggaacaggcgagagcggccgggccgcagaccagcgggcgcagaacggcagcgcagccaccgaggcaac

SEQ ID NO: 201322 - RNA, 58 nt, Homo sapiens
gcgagggaggcggccggagccaaaccgaagagcggaagagaaaaaaagacgaagggaa

SEQ ID NO: 201323 - RNA, 64 nt, Homo sapiens
gagaaggaccaagaaccaggagcagggcggggaaacaggaaagacagacccccaaaaggaaaaa

SEQ ID NO: 201324 - RNA, 78 nt, Homo sapiens
agaagcgccgcgcacggaccggcagagggaaggagaaacaacaagaaaacggcccggacggaggaaaagggaagcagc

SEQ ID NO: 201325 - RNA, 57 nt, Homo sapiens
cgggagccagaacgggcgaacggcaaagacacacaacaggagaagacagaacgacac

SEQ ID NO: 201326 - RNA, 54 nt, Homo sapiens
ggacaagcacagccggaaggaggagggagaggaaaacgggaaaccggcggccag

SEQ ID NO: 201327 - RNA, 76 nt, Homo sapiens
ccgggcaaccgccccagacccaacccgcaggaaccgacaaccgagccagacgggaagaccaggcgcagcagcagga

SEQ ID NO: 201328 - RNA, 77 nt, Homo sapiens
gaggaaggcagcccagaaaccaacgagagacacacaaaagagcaagaggacacagcagagaggccaaagacgagaag

SEQ ID NO: 201329 - RNA, 74 nt, Homo sapiens
accgaaagcgggcccgggagacccaggcgggacagagggagccaggcagaggggagggcagaacaacagcagca

SEQ ID NO: 201330 - RNA, 79 nt, Homo sapiens
ccaccgaggcaagcgcggccacaaggccaccaacaggagagcgcaagggccccaggccccacagccccccagcgcccag

SEQ ID NO: 201331 - RNA, 48 nt, Homo sapiens
cacacgcgcgccgaggacccgaccagcagacgaaacccccaacaaaca

SEQ ID NO: 201332 - RNA, 58 nt, Homo sapiens
ggacagaagacagcagcccagaaggcgcgagagcgcggagagccagagggccgccgaa

SEQ ID NO: 201333 - RNA, 83 nt, Homo sapiens
gggacaaggcagacgggagcgcaaggcgccccaaggccagacaaaacgcacggcgccaacgggagccagaggagccgccgcga

SEQ ID NO: 201334 - RNA, 67 nt, Homo sapiens
gaggggaagaggcgccgggacagggaagagagccagaaaacccagaaccagcacagagccgcaccca

SEQ ID NO: 201335 - RNA, 62 nt, Homo sapiens
aacggaccaccagaaagcaccccacagacaacggcaagcggagaagagcaaggccgaaccga

SEQ ID NO: 201336 - RNA, 117 nt, Homo sapiens
cgacgccccgccgccgccgaggaggcgagcagccgggagacaccgccaccgccaggcgaggcgaggggccccgaaccgaggaccagcgggaagaagagcggaccggccaggagcgcc

SEQ ID NO: 201337 - RNA, 78 nt, Homo sapiens
gaccaggccagccgcccaagaacaccgcagaaccagacccaaaagagcaaacaaccgacggagaaggaaaaaagccga

SEQ ID NO: 201338 - RNA, 81 nt, Homo sapiens
caacagcgagacaccgaacaagcagcaccgggggggggcagcggaagggggcccgaggccaccgcacaaaggaagagcgac

SEQ ID NO: 201339 - RNA, 74 nt, Homo sapiens
cgcgggggcggcacccggcaaaggaaggaacccagaaacacagaacagacgaaagaacagccaagagacacgac

SEQ ID NO: 201340 - RNA, 76 nt, Homo sapiens
agaaaacccaccgagacggccacagacaacggagagaaaggcgaggcaaggcaggaagacccacagcagacagaac

SEQ ID NO: 201341 - RNA, 62 nt, Homo sapiens
ccgagagcggaccgagagcgcgaaacgcacgagaaggcccccagggaggccgaacacacagc

SEQ ID NO: 201342 - RNA, 84 nt, Homo sapiens
gcgacgcgcgcgcccggcccgggaaacgaaggaggcccaaccacaaaaggagccgacggaacccagacggagaacaaaaggaag

SEQ ID NO: 201343 - RNA, 78 nt, Homo sapiens
cggacggaagacacggcggagcaggagacgccaccacagccgcgcagagggaggacgccaggcaagacggacgagacg

SEQ ID NO: 201344 - RNA, 86 nt, Homo sapiens
ccgggccggccggccgacgaggcgccgaagacaggggaggagggcgccccgaaccgcaccaggccaaacaccagagcacccagaag

SEQ ID NO: 201345 - RNA, 82 nt, Homo sapiens
gcccacgccagacacgacgcggcaggaacccggcccagagggccacccccaaccaggaccaaagacgaccaccaaagccagc

SEQ ID NO: 201346 - RNA, 71 nt, Homo sapiens
aaaaaccagacaccacaccagacgagagagaccgaggaggcaggggaagcacaaaagcgcacccgcgccag

SEQ ID NO: 201347 - RNA, 55 nt, Homo sapiens
caaccgacccaagcagcgagaggaagaagacacggaccgacggacgggaaaccca

SEQ ID NO: 201348 - RNA, 79 nt, Homo sapiens
gagagcccacagggcaaagagagcagacccgaggagcccgcagacggccaccaccgaccccggaggcccgcccccccca

SEQ ID NO: 201349 - RNA, 41 nt, Homo sapiens
aaaaagaacaggagaagcgaacacgacaggaggacaacccg

SEQ ID NO: 201350 - RNA, 70 nt, Homo sapiens
gcgcccgggagagcaaggcaaccacaggggcccaagcagagaccccccagaaaacaacccgcagcacgcc

SEQ ID NO: 201351 - RNA, 51 nt, Homo sapiens
aggccaacaggccggaaaagacaggcagggaggcagcggcaagcggaccgg

SEQ ID NO: 201352 - RNA, 63 nt, Homo sapiens
ccaacaagccgaccagacgagacccacaggaaagagaggagaggagcgccggggcgcacgcag

SEQ ID NO: 201353 - RNA, 68 nt, Homo sapiens
gggagagggcgggacgggaggacccggccggacaccaggaggaggacgagcagcgagggcccgggagg

SEQ ID NO: 201354 - RNA, 72 nt, Homo sapiens
gcaggaccggcgccgaaggcccgccagggacaggagacaaggcaaccgcgcccagaccgccaaacaagagag

SEQ ID NO: 201355 - RNA, 81 nt, Homo sapiens
gagaaaggccgccgcagcacccgccgcgcgccgaccgcccgcacaccgcggcggagcggaggcagacacacacggggggag

SEQ ID NO: 201356 - RNA, 80 nt, Homo sapiens
ggacaacaccgggacacccgcgaggccggaaaagggaaggaagagaaccgaagaagaaaaccaaaaacgaaaaagcaagg

SEQ ID NO: 201357 - RNA, 87 nt, Homo sapiens
caggcccagaggccggcggcagcagcccagagcgcaaagacaacacgcccaccagcgaggaagcagccgcgacgcccacacccggga

SEQ ID NO: 201358 - RNA, 74 nt, Homo sapiens
gacagcccccagaacagcaccagcggcacagccagggaccagacacagaggggggccagcgggagaagagaaac

SEQ ID NO: 201359 - RNA, 76 nt, Homo sapiens
ggcagcccggcggacgcaggagcgaggcagcgaccgaaagccgccagggcccacaagaccaggaaagcgaccggcc

SEQ ID NO: 201360 - RNA, 76 nt, Homo sapiens
ggaaaagccagaaaaaaggggacacaccggaagacgcaacacaggccgcgagggggcaccgaagagcggccagcgg

SEQ ID NO: 201361 - RNA, 56 nt, Homo sapiens
aaccggaaggggacagcgcacacggcaaggaagaagccaggaaaaaaagagaaaca

SEQ ID NO: 201362 - RNA, 108 nt, Homo sapiens
gagcgcgaaggccgggacccggccccggcccacaggggggggcaaacccgagagaacgggaaagagaaaggagaccacaagaccccgcgccaccaaagggagggcggc

SEQ ID NO: 201363 - RNA, 68 nt, Homo sapiens
aagcgacgggaggaccaacagggccccagaggagcagcgggaggcgggcgcggacggcaggggcgccg

SEQ ID NO: 201364 - RNA, 72 nt, Homo sapiens
ccaccaacgagaaaaagagcgcaacagaaccacgcgcggaggcggaggccacccagacccggccgggacacc

SEQ ID NO: 201365 - RNA, 75 nt, Homo sapiens
caagcccagggaccacgggccaggagcaggacagaccacacgcggacaccaaggcgccaggcgaggggaccaccg

SEQ ID NO: 201366 - RNA, 89 nt, Homo sapiens
gaccggccgagaggaagacgagccgggaggaacggcccggaaacaggaggacacggcccgccacgggccccgcagccgcgcccgagcgc

SEQ ID NO: 201367 - RNA, 67 nt, Homo sapiens
cgccgggcaggacgcagcacgcgcacagaagaaaggcccaccaagccgagaacaccaggaaacagcc

SEQ ID NO: 201368 - RNA, 82 nt, Homo sapiens
gcagcggcggcgagcgccgcgagcggcgcgggacgcgaggccgggggccccgcggcggacgcccccggggcacacacgcagg

SEQ ID NO: 201369 - RNA, 62 nt, Homo sapiens
aacacgcggcacaagacaccaggaggagcagagcccagcgccaaccggcagcccacaaccgc

SEQ ID NO: 201370 - RNA, 79 nt, Homo sapiens
gaggcgccgggacagggaaggacgagacgagaccgggacggaagacggcaaagacgagaccgagaacggaagaggagaa

SEQ ID NO: 201371 - RNA, 86 nt, Homo sapiens
aggaggcgcgaggagccggcgcggcgcagcccacggcgcaggcccacggagcgcagccgccgaggcggaggcagcggcggaccggc

SEQ ID NO: 201372 - RNA, 73 nt, Homo sapiens
gaaaggaggacaacgggacccagaagagaacgacagaacaacaaagagaccagggggacacacaaaaagcggc

SEQ ID NO: 201373 - RNA, 77 nt, Homo sapiens
acaaaagaagagaagaggacagcaggcaacagaaagcaaacaacccccagcgagaagaaagcgcccgccaggaaaag

SEQ ID NO: 201374 - RNA, 79 nt, Homo sapiens
cccaaggcccaccgccacccgccccgccaccacccgccacccgggcacccagccccacgccagggaaccccacgccacc

SEQ ID NO: 201375 - RNA, 73 nt, Homo sapiens
cagggcaacaaaaggagcgggagggggggaggagggacaacacacaacgcaggcgcacagccgccccaacaac

SEQ ID NO: 201376 - RNA, 76 nt, Homo sapiens
ccggccaaaccacccagcagcagcaggcgagaggcagaacccggaaagaaggaagggaccaccacaaggcacagga

SEQ ID NO: 201377 - RNA, 85 nt, Homo sapiens
ggacacacagcaccaaccccccaagggacggaagcaacagaagagaccaggcccaaagacaggggaagaagccagagcccagcgc

SEQ ID NO: 201378 - RNA, 51 nt, Homo sapiens
ccccggcgccgcgccggcggcgcgggcaccggggcccacagaacaagcagc

SEQ ID NO: 201379 - RNA, 50 nt, Homo sapiens
caggggagcgcgcggaccagaccccaggcggcacaccgaaccacccgggg

SEQ ID NO: 201380 - RNA, 78 nt, Homo sapiens
gccacggaagccgacagacaaccagaggacacgagcccagccaggcgagccagcgccaaagaaaaagaacaagaggag

SEQ ID NO: 201381 - RNA, 52 nt, Homo sapiens
ccgcggccaaggagccgccaaagccagacggcgagagagacagccggccacc

SEQ ID NO: 201382 - RNA, 96 nt, Homo sapiens
acaccaggcacccgggcccagccgggaacccccacgcggccagcgaaaacgcccaggcagaagagacaacacagaaaccagggcggaggcaggaac

SEQ ID NO: 201383 - RNA, 40 nt, Homo sapiens
accaggccgccaccgcggcaaagaaacaggaacacgaaag

SEQ ID NO: 201384 - RNA, 74 nt, Homo sapiens
gcggggcaagagccacaccagacgcccgggggcgaaaaacaccaccagggcaagggaaggggcagggccaggca

SEQ ID NO: 201385 - RNA, 79 nt, Homo sapiens
gggcagaggcggagcgcccgggccacgaggacgcaccaggagccgggggggcgagcccgccgagagcgccaaggaggag

SEQ ID NO: 201386 - RNA, 69 nt, Homo sapiens
ggacagcccacggaggcacagcggccccccaaaaccaaaaccacacaaggagagaagccagcagggccg

SEQ ID NO: 201387 - RNA, 107 nt, Homo sapiens
aagacccaagaagaagaaggcgaaggaccccaacggggaggccaacggaagaaggccaacgggccaacgccggcaggggacggcccacgcgaccggagcccggcacc

SEQ ID NO: 201388 - RNA, 80 nt, Homo sapiens
gaagccacagcaggccaccagccagaagacccaacagaggggacccccacaaccgaaccccacaggccaaacagaccgga

SEQ ID NO: 201389 - RNA, 78 nt, Homo sapiens
agaggagggaacgcggagcggagcaaacggagaccgggacagaccaaaagcgccgcacagcccaacccaccgaacagc

SEQ ID NO: 201390 - RNA, 56 nt, Homo sapiens
gcgcgaagaggcggaccggacggccgaggaacgccccgagcgggagccgccaagca

SEQ ID NO: 201391 - RNA, 74 nt, Homo sapiens
aggaggcaagccacccggaaggcgccagacacagaaaagaaagagagcaaccacccacaaggaccgagaagaag

SEQ ID NO: 201392 - RNA, 85 nt, Homo sapiens
gcagcggaaacgcacggggagacggcggaagaggagaaggggggcaaagggacacaaagacgcagacggaggcgagcccaggagg

SEQ ID NO: 201393 - RNA, 89 nt, Homo sapiens
ccggccggggccgaggagcgggcacagggcaaggcggcggacggcgcgcgcccgaggcgaggaggagcgcggcggcgagacgggaacaa

SEQ ID NO: 201394 - RNA, 79 nt, Homo sapiens
cggaaggaacggaggcgccaaaccaaacaggaagcacccaccagccaagagcaacagaacagcaagaggaaggggccag

SEQ ID NO: 201395 - RNA, 42 nt, Homo sapiens
gagccaacgcgaagcggccggaaaaaaaccgggaagaccgac

SEQ ID NO: 201396 - RNA, 109 nt, Homo sapiens
gagccagccaaggagaagaacgagaaaggagcggaagaggagagcaggggacgcggagggacgcgagcacggaggaaaacaagcggaacgccgccacggaaggggcccc

SEQ ID NO: 201397 - RNA, 103 nt, Homo sapiens
ggaggcaagagcggcccaccaaggaaaggggacagcaacagccggcgggcggaaggacaagagcaccaagagagaccaggacacaccacgggaacaaaaaagg

SEQ ID NO: 201398 - RNA, 76 nt, Homo sapiens
gccgaccacccagggaaacggccggggggaagccgagccacggcacgagagcaccagcaaggaaacgaagaccgag

SEQ ID NO: 201399 - RNA, 71 nt, Homo sapiens
aaacaaaccccgaaacacaaccaaggagcaccaaaaagaagaaccgcgccaaggaggacgcgcgaaagaaa

SEQ ID NO: 201400 - RNA, 63 nt, Homo sapiens
ccgagcacggccgcccggccacgagacgaagagaccgcagaagcgaaaaggagggaaagaaag

SEQ ID NO: 201401 - RNA, 85 nt, Homo sapiens
caaaccccacacaaaggcgcagcgccccccagagagagccccaacaggaaggcagcaggacacccaggccaggaagggacgggca

SEQ ID NO: 201402 - RNA, 76 nt, Homo sapiens
cagccaagcaggaccacccaccagccaccaggggaagagagaaaagacgaccggaaccgagagagaagacccggag

SEQ ID NO: 201403 - RNA, 83 nt, Homo sapiens
ggcgcgccgcacccggacggaccgccacgcgcccgggagacgcccgcgccgccgccacacccaccgcccgggcaggccacggc

SEQ ID NO: 201404 - RNA, 79 nt, Homo sapiens
ggccacgggcagacccacgagcaggagcagacagggaccgaaggaaacaaaagaaagggcagaagaaaagggaccacaa

SEQ ID NO: 201405 - RNA, 74 nt, Homo sapiens
ggagaacaccccacagggaagaggaagcagagacgcggggcaacaaggagaaagggaaccacagcgaccagaga

SEQ ID NO: 201406 - RNA, 73 nt, Homo sapiens
agaccagacaagaagggccaagcccccagagcccgcacgacaccgaacagcgagcacacggcagacacaagag

SEQ ID NO: 201407 - RNA, 83 nt, Homo sapiens
acagcagcagaacggggggaagggcaggacaagaagaaggcagccgggaaggggaagacggcagcgggccggaggcccaaaag

SEQ ID NO: 201408 - RNA, 66 nt, Homo sapiens
cccccaccgaagacaagaccacagagaagcaggcgaccaggcgcgcgggcaagaaagcagacgcga

SEQ ID NO: 201409 - RNA, 77 nt, Homo sapiens
cccaagggccccccgggaacgcagcgcgcaggaccacggggaaagccaagaacagaagcgaaggggacagggggaga

SEQ ID NO: 201410 - RNA, 77 nt, Homo sapiens
gacgagacagaggcccggagacggcaggccgaaagaagcaggagccaggaaaacagaaagggccccaccacccagca

SEQ ID NO: 201411 - RNA, 69 nt, Homo sapiens
cagggggagacaaacaaacagacaagcagcaaggaagaacagcagcagcgccacaggacaggcagaccc

SEQ ID NO: 201412 - RNA, 82 nt, Homo sapiens
cacaagacgccggagcaaacgacgagaaagcccacagccaaagccgggcggacgcgaaagagacaagcaggcccgacccagc

SEQ ID NO: 201413 - RNA, 36 nt, Homo sapiens
aaagacgggcaacagcgcagacgggacacggccggc

SEQ ID NO: 201414 - RNA, 36 nt, Homo sapiens
gagggggaagaagaaaagggaaaagcgagagcgacc

SEQ ID NO: 201415 - RNA, 78 nt, Homo sapiens
caaacacacgggaccgaaacaggccggggcacagcacagcgccggcgcaagaccaaacccgggaaagaaaaacccagc

SEQ ID NO: 201416 - RNA, 81 nt, Homo sapiens
gcacggaaggaaaagggacaagcaagagcaacaacaggggggacacagcgagccacgcgccaggaagcccggccaaggagc

SEQ ID NO: 201417 - RNA, 55 nt, Homo sapiens
ccgggagcacaccacaggcaagccagcgaggggggccggggcaaagaccggcaag

SEQ ID NO: 201418 - RNA, 47 nt, Homo sapiens
cgccggcccaacaccccaacaagaacagaccgaaacaaggacccccc

SEQ ID NO: 201419 - RNA, 81 nt, Homo sapiens
acggagcaagggaaagagccgcaggcaagggacgaccaggaggagggcccagggaccaagaaaggcccagggaccaaagcc

SEQ ID NO: 201420 - RNA, 76 nt, Homo sapiens
gcgggaaaaaagcacggcagcgcgcgccacgggccaacaggagcgagaacccgagcagcgccagagcaacacaccg

SEQ ID NO: 201421 - RNA, 79 nt, Homo sapiens
agagagaggagaagaacaccgggagcgcaacagacggggaacgggccgggaccagcccaagaggagaggggaccgccgg

SEQ ID NO: 201422 - RNA, 50 nt, Homo sapiens
ggagaaggaccaagaaccaggacaggagaaggcggggaaaaaaccagaga

SEQ ID NO: 201423 - RNA, 41 nt, Homo sapiens
cggccgggaaggcgcagccgggagacccgaccaccggaagc

SEQ ID NO: 201424 - RNA, 66 nt, Homo sapiens
gcagcagacgaccagggaaaacaagggacagaacacaggaaaaacaaacacgggccccaacgaaca

SEQ ID NO: 201425 - RNA, 67 nt, Homo sapiens
aagcgacacagggcgaaagggggaaagcgcgaaccccggccgcccccagcggggagcacgcgccaag

SEQ ID NO: 201426 - RNA, 76 nt, Homo sapiens
cgccccccgagcccgcccccgaggcgcagaagggagaggggaggcgggggagcgcgggcgagccaagcagcgggcg

SEQ ID NO: 201427 - RNA, 75 nt, Homo sapiens
cgcggcggcggggccaggcggcccgaggaccgcaagcaggccggcccccagacaagaccaaggaaagggaccaca

SEQ ID NO: 201428 - RNA, 76 nt, Homo sapiens
gcaggacagggggaccgcgagaccccacccgcagcagggcgacaggacccgcggagaccgaaaacggaaacaagaa

SEQ ID NO: 201429 - RNA, 84 nt, Homo sapiens
ccggccacgcggacccgaaaccaagagcacagcaagcgggagcaggcagaccaaaggaacagaagccagggccggaaaaccaga

SEQ ID NO: 201430 - RNA, 83 nt, Homo sapiens
gcgccgcgcggaacgcagccaagaacgagaagagccgcaggaggggcaggcggccaagcagcacccagccgccgaaaccaaag

SEQ ID NO: 201431 - RNA, 83 nt, Homo sapiens
agacagaccccgaggagacgagccaagaaaagagagcaagagagcccagaaaaacgcaaggaacggcacagagacagaccaac

SEQ ID NO: 201432 - RNA, 77 nt, Homo sapiens
caacagccggcagccagaagcagccaggcaaggccaaacacccggagaccggacagaggcgggaagcagcacacaac

SEQ ID NO: 201433 - RNA, 78 nt, Homo sapiens
aaggagcagcggaggagcagcgcgcccgcgccagcacacgacaccgagccgccgccgaccgaggggaccaaaaggacc

SEQ ID NO: 201434 - RNA, 80 nt, Homo sapiens
agggcccacaaggccaagggggaagcagaaacaaccagaggagaccccagccccacaaagggacaaaacaggagagcagg

SEQ ID NO: 201435 - RNA, 57 nt, Homo sapiens
ggaaaagggcacgaggccggaaccgcccagccccggaagagagaaggccacgcccga

SEQ ID NO: 201436 - RNA, 86 nt, Homo sapiens
gccccaaccacgcggcgcgagccccgcccccgccgccgcgcacaaccgcacggcagcacccacagcaggacccaggagggacccag

SEQ ID NO: 201437 - RNA, 52 nt, Homo sapiens
cagccagccacacggcagaaaaagaggcagcgacacccagacccaccggacc

SEQ ID NO: 201438 - RNA, 91 nt, Homo sapiens
cgcaccggcccaccccacccacagacggcccgcaaccgacccggccagcaacagcccaccaaggacccagaaacaaagcccaaccacaggc

SEQ ID NO: 201439 - RNA, 96 nt, Homo sapiens
ggaaaccggcccagcggcagggcaaaacggcaaaggcagagaccaaaccaacccaaaccggggggcggcgggagcgagcgagggcacacggagccg

SEQ ID NO: 201440 - RNA, 71 nt, Homo sapiens
ggacacggcagagaagagaagaggcgaaagagaggacgaacaggaggcagcccaagaccggaacaaaggag

SEQ ID NO: 201441 - RNA, 72 nt, Homo sapiens
accaaaaaaaaaaacaagaaccgcgaggaccaacggcggagcaaacaacccaaaggagagagaaggaggaac

SEQ ID NO: 201442 - RNA, 72 nt, Homo sapiens
cgaagcgccagaaaacggcaaggaagccccgcaaacccccaaacagacgaagacgaaaggaaggacggccag

SEQ ID NO: 201443 - RNA, 58 nt, Homo sapiens
gcaacccgcagcagaagaggacgggcaccacaagccgaacagccagccagcaaaagaa

SEQ ID NO: 201444 - RNA, 56 nt, Homo sapiens
gggaaggcagcacgggggcagggcaaaacacacagcgaggaaaaggcaccagaaga

SEQ ID NO: 201445 - RNA, 110 nt, Homo sapiens
acaggcacagaagcggcaggaaagccccgggcagcccacgagacgaacacgagcgagacagcaccccccaggaaggaacgccaaaaccaacgagcagccggagcagacag

SEQ ID NO: 201446 - RNA, 54 nt, Homo sapiens
gccggccgcagcgcagcgccagccaggccagggacgcggacgcagaagacgacc

SEQ ID NO: 201447 - RNA, 77 nt, Homo sapiens
gacacgggaaaagaggaaacagggaacggacacgagaagagcacgaaacaggacagacagagaccaaaccaagccag

SEQ ID NO: 201448 - RNA, 83 nt, Homo sapiens
agcaggccgaagaaccgagcgacagagacaagcgagcgccgcacaaaaagcagagagggaccgggcgccgcccggaagaacgg

SEQ ID NO: 201449 - RNA, 72 nt, Homo sapiens
agaccggagcagcagagacggaaaaaccagaagagaaaaaacaaaggggagaggcaccccgcgggacgaccg

SEQ ID NO: 201450 - RNA, 83 nt, Homo sapiens
agaccgaacccccgaggaagaaggcaaaggaccagaccgagccagagggagcgaacgcaggcaggcccaggggaagacaggga

SEQ ID NO: 201451 - RNA, 59 nt, Homo sapiens
aaggccgcaccaagacaccagcgcaagaaacaaggccccaaagccggggaagaccagcc

SEQ ID NO: 201452 - RNA, 75 nt, Homo sapiens
cagcaccacgagccagaagcagagccgggcaaacccacgagcgaggaggaaagccagccacgggcggacaaggcg

SEQ ID NO: 201453 - RNA, 74 nt, Homo sapiens
ggccccggacccagaggccaacgcaggggagaaaccaaagggaaggcagaccccggggcacccacgagcaggca

SEQ ID NO: 201454 - RNA, 78 nt, Homo sapiens
ggggccacaaaacccaggcgcggaagcaagggacaccccacaaaaccagccagaccagaaagggacgaagaagaaaaa

SEQ ID NO: 201455 - RNA, 92 nt, Homo sapiens
gaaaagcgagaagagagaagcacacacgaagccagaaaaacggcgaagggcggagaacggaaaagcaccaggaagcagagaggaccgcagaa

SEQ ID NO: 201456 - RNA, 35 nt, Homo sapiens
cagaaacgagccccaggaaacaaggagagaaccac

SEQ ID NO: 201457 - RNA, 51 nt, Homo sapiens
cgcgaaacgcacgagaagggcggagccgagcgaggccccagaaggacaagc

SEQ ID NO: 201458 - RNA, 35 nt, Homo sapiens
ccacaagaccgaccaggaaaagaggagcgccgcgc

SEQ ID NO: 201459 - RNA, 70 nt, Homo sapiens
caagagcccacgagcgagaagaaaagccaaggaacagaagaggcgccccccgggggagggcaggaaggag

SEQ ID NO: 201460 - RNA, 53 nt, Homo sapiens
cacagcgcggcaggcggacgccagccggaccaaagcagaccacaaaacgaccg

SEQ ID NO: 201461 - RNA, 86 nt, Homo sapiens
ggacccggcgccgaggcggccacccgagacgcggcgcgcacgcccggccgcggacgagaacccccgcgaaccagaggaacccagcg

SEQ ID NO: 201462 - RNA, 68 nt, Homo sapiens
acgaccccgccagcgcaggcgggaccaggacggaccaacacaagcacccaaaagaccgaagcaggcca

SEQ ID NO: 201463 - RNA, 80 nt, Homo sapiens
gggaaacagcccggaccggcagacccagcaaaagcgccacaggacaccaaccagaagacggagagagcacccgcaaaagg

SEQ ID NO: 201464 - RNA, 75 nt, Homo sapiens
gagcggagccgaaaccaagccggacccgaagaccaggccccggggcagaagagcggcgccgaggagaaggaaaaa

SEQ ID NO: 201465 - RNA, 71 nt, Homo sapiens
gaaggccggggcgcccggcgccggccgagaaggcagaggcgggaccgaggaacccgggagccaggaaggaa

SEQ ID NO: 201466 - RNA, 75 nt, Homo sapiens
gggcgcgcccgcagcgcccgccacaggcgcagccggaccgagagggcaggccgcccgcagcgaccccggcagcaa

SEQ ID NO: 201467 - RNA, 82 nt, Homo sapiens
cagcacaccgagaggccacggggagccccagagcaccgcccagaacccggaggcggggcgccgccagaacaaaggaccccga

SEQ ID NO: 201468 - RNA, 77 nt, Homo sapiens
cgagccgccaagacccgcaccggaggcagagaagaaaaaccggaacgggccgggcagggaaacagaccaaacggcag

SEQ ID NO: 201469 - RNA, 93 nt, Homo sapiens
gcagaagaccaaaacagggacagggcgaagcacagaaccagcacgaaaaccagagcgccaagagccacccaggaaggccgcaggagaaaggca

SEQ ID NO: 201470 - RNA, 70 nt, Homo sapiens
gaagggacgcgagagacgcaagacgaacaggaacagagaagcggaaaaaaccaggcagccaaacgcgcca

SEQ ID NO: 201471 - RNA, 78 nt, Homo sapiens
aacgacaaacagaacagaaccgcaaaagccgagaagacgacagcgaacacccgaaggagccagcaacagaggagaaca

SEQ ID NO: 201472 - RNA, 82 nt, Homo sapiens
agaggaaccggcccagagcacagaagagagcgacagaccagaagggcagagacaaaaccgggaaagaccaagaagaaggaga

SEQ ID NO: 201473 - RNA, 75 nt, Homo sapiens
cagcaggccgcggacagagaagaggacgcggagacaagagagagagaccccggagcacgaggagcccaccacccg

SEQ ID NO: 201474 - RNA, 80 nt, Homo sapiens
gagaaggaaagcaccagacgccaccacgggcacccgcgccgggcaccgaggaccagccaagacagaccaggagaagacga

SEQ ID NO: 201475 - RNA, 89 nt, Homo sapiens
ggcgaggcagccgggacccggcgagaggcggcgccgccccaagagcgcagacggccagccgaaaccacggaggacggaagaaagacccc

SEQ ID NO: 201476 - RNA, 79 nt, Homo sapiens
cacagccccgccgccaggccggccccggagggggcgaaccgaccaagaacaacacccagagggccaggagaaggcgaag

SEQ ID NO: 201477 - RNA, 68 nt, Homo sapiens
gaggcaaacaagcagcccaggagcggcacgggccggcccaacaacccggagccagggacccacccccg

SEQ ID NO: 201478 - RNA, 56 nt, Homo sapiens
gcaggggcggaggcggaggcagaggggaggcgcgaaagggggcggccaggcaggca

SEQ ID NO: 201479 - RNA, 85 nt, Homo sapiens
gccgccagggcccggaccggacgcggggcagaccacggccccggagaccgggcggaagaaaaagcaagagacgaagcgcccacaa

SEQ ID NO: 201480 - RNA, 79 nt, Homo sapiens
accgcagacgggggacgcagggaggagcgggacaccccggaagcgggaaagggccgcgcagaagacggcaacccaggcg

SEQ ID NO: 201481 - RNA, 82 nt, Homo sapiens
agccggcgggcagcagccggccgacccagaggggaaggcgcgagccccgcgcgggcagagcgccacagaccgaccagcgcga

SEQ ID NO: 201482 - RNA, 80 nt, Homo sapiens
ccaaccacgccaagcaagacgacgaccgagacagagaagaagaaagaaggagaagggggaaaaagcgacccagcggaggg

SEQ ID NO: 201483 - RNA, 53 nt, Homo sapiens
ccaccagccccaagagaagagggacaccccaaaacaggaacggggagggaggc

SEQ ID NO: 201484 - RNA, 53 nt, Homo sapiens
gcgggaagaggcggaacaggcaccaagccggcggggcggaaagcagcgagcca

SEQ ID NO: 201485 - RNA, 75 nt, Homo sapiens
ccgagaacaccagagaaaacaccaccaggccccggccccaggggaaccgcccaaaagcccgccagaagaaggacg

SEQ ID NO: 201486 - RNA, 72 nt, Homo sapiens
cagcagcgcgccgccgcccagagcccaaaaggcagagcgaggagagaagaaggagggaaagccaaacaacgg

SEQ ID NO: 201487 - RNA, 78 nt, Homo sapiens
acacagggcaagcagagggagaaccgcacaaagacccagaagccacccaggaccaaagaaaagcagaacgcaaacccc

SEQ ID NO: 201488 - RNA, 89 nt, Homo sapiens
gggggaccgccggcacgcgacccccccgggcccaaagagcgagcccagggcggggcgaaaggccacaaaccaagagcaggagagagcag

SEQ ID NO: 201489 - RNA, 87 nt, Homo sapiens
cagcaagacccgacagagggaaaagggacgaggaagaagggcaggaccgggcggaggccgccaagacggaggagagaaagaacccac

SEQ ID NO: 201490 - RNA, 88 nt, Homo sapiens
cgcaacacagccgcgaacagcacggcgggccgccccgcccgaagaccgaggagcaagggacaaagaggccaggagacacgccaccgcc

SEQ ID NO: 201491 - RNA, 81 nt, Homo sapiens
ccggggagacggacgcgggcaacagcgagggcaaagagcggggcccagggaaaaggagggccacggcgcgcccgcaagggc

SEQ ID NO: 201492 - RNA, 61 nt, Homo sapiens
ggcggacaggcggaacaaaggagcggagggcgcggagaaaccggccacgcacggcgccgaa

SEQ ID NO: 201493 - RNA, 75 nt, Homo sapiens
ggaagacggcagcggccccggagacacaccgggggaagggcccggagaacacagcgcaagaaagcaggggcgagg

SEQ ID NO: 201494 - RNA, 70 nt, Homo sapiens
gagacccgacgacggaccgcacacggagaaggaagcacaacgaagagaggaaagaagcggaaaggaggga

SEQ ID NO: 201495 - RNA, 71 nt, Homo sapiens
gccgggccagcacccggccgagacggcggcagcagcggcacagaaggagagagcacgaccaccgccgagag

SEQ ID NO: 201496 - RNA, 76 nt, Homo sapiens
gagcgcgcaagcggcgggggccggacaccacccgacagcgaccagccgccgcccgccagcggacccgcggcaccgc

SEQ ID NO: 201497 - RNA, 75 nt, Homo sapiens
ccaccccggcggaaccgcccccagaccacggcgcagccacaaaaacaagaaaaaaaggccccaaaacaccaaaga

SEQ ID NO: 201498 - RNA, 55 nt, Homo sapiens
agcgggaacgcaaacgaagaccaagggaacggaagccccagcccgcgcgagccag

SEQ ID NO: 201499 - RNA, 77 nt, Homo sapiens
agcccccagaacagcaccagggccaggcccggggccggacccaagcccacgggacgaagccaaaggaccccaggcac

SEQ ID NO: 201500 - RNA, 55 nt, Homo sapiens
gagggaaaaaacaaccccgccggagggccgcaaacaagaacgacccacacccgcc

SEQ ID NO: 201501 - RNA, 73 nt, Homo sapiens
ggccgggccaggaggacacgcgcagggcccacgacgagacaaggagggcagaacgacgaaagacggacaggac

SEQ ID NO: 201502 - RNA, 78 nt, Homo sapiens
gggacccggccccggcccacaggggggggcaaacccgagagaacggggccacagccgccaaggggcaaccgcccacca

SEQ ID NO: 201503 - RNA, 49 nt, Homo sapiens
cgacccgagcagcgcagaccccagcagcaagcggcaagagccacagaga

SEQ ID NO: 201504 - RNA, 74 nt, Homo sapiens
cgcccccgagcccggaggggggagaaaaggacagcagaccacagcccggcaggcccaaaaacccaaagggacag

SEQ ID NO: 201505 - RNA, 78 nt, Homo sapiens
agagcgacaacggaaaagccccggccggggcgccaccggagccgccagcgccggcgcggggaaagaaagggcgggcaa

SEQ ID NO: 201506 - RNA, 58 nt, Homo sapiens
ccgagagcggaaccacaagcaccagcacgccggcaagagggccagacaaggggaacac

SEQ ID NO: 201507 - RNA, 83 nt, Homo sapiens
ccggcgcagccccaagacagagcgcacccggcaggcgcaacagagcgccggcggagcacccacgggaacagcccagaaacgag

SEQ ID NO: 201508 - RNA, 68 nt, Homo sapiens
gaagaaacagaaaagaccaagaccaccaaggcaaaggccagaaaggaggcccacagccgaccgagcgg

SEQ ID NO: 201509 - RNA, 44 nt, Homo sapiens
gcaggagacggccccaagaaggcaggccccgccccccggggaag

SEQ ID NO: 201510 - RNA, 82 nt, Homo sapiens
gcccagaggcgccagcaccccagggacccagacggaccggggaccgagacccgacgagagagacgaggggaagagaggaagg

SEQ ID NO: 201511 - RNA, 65 nt, Homo sapiens
ggacggacaacaccaaccaagaagacagaaaacaagccgacagaagaaagcagacagagagaggg

SEQ ID NO: 201512 - RNA, 47 nt, Homo sapiens
acccgccgggccgaaccggaagggcaagggggcccaacaaaggcagc

SEQ ID NO: 201513 - RNA, 71 nt, Homo sapiens
aaccgcgcggcaggccaggggaccggcaaaagcagaccggaaaacccaccggcaagaccacacccgagggg

SEQ ID NO: 201514 - RNA, 59 nt, Homo sapiens
cggagcagcggcacagcgccacgcagagccccgccaggaagacacgccggggaacgaag

SEQ ID NO: 201515 - RNA, 85 nt, Homo sapiens
acgaggcgccccccgacacgccggagcagggagccagcgaggaaacggcccggggagagaccgacgccgcgcacaccccgcagac

SEQ ID NO: 201516 - RNA, 76 nt, Homo sapiens
gcacacgggcagcaacggaaagcacacaaccacaacggaagacagcaaaaaggacggcccaaacccccggaaaagg

SEQ ID NO: 201517 - RNA, 77 nt, Homo sapiens
ccagaaaaagccaagccaccgagacccggaggaggcgaagcgagaggacagcacagcgacgaacacacacaccagac

SEQ ID NO: 201518 - RNA, 91 nt, Homo sapiens
ggaggccggacccagcgagcgggcggcacgcacgcagaagacgaccccgacgcaggccaggagccgcggacagaagccgagcacggccgag

SEQ ID NO: 201519 - RNA, 70 nt, Homo sapiens
acacagggcggaaaaaaaagaaccgcggaaggaggaacaagcaacaggaaggcgaaaaaaacgacagaca

SEQ ID NO: 201520 - RNA, 81 nt, Homo sapiens
cacacgccagacggggagagccaccggccccagcagggaaagggagcagcaccggccacacccacagcacgaccggaaccc

SEQ ID NO: 201521 - RNA, 77 nt, Homo sapiens
cagcgcccaggccagagaaggggaaggaggggcagcgaccccaacaggaaccccccggcggcagagagcagaagggc

SEQ ID NO: 201522 - RNA, 34 nt, Homo sapiens
ccaaacccccccacccacagaggagcccccggcc

SEQ ID NO: 201523 - RNA, 77 nt, Homo sapiens
acgcgagcggcgcggaccaaaaccgcgaccaagacaggagaagcaaaagcagcggcaagaacgcggccggagcgaca

SEQ ID NO: 201524 - RNA, 87 nt, Homo sapiens
ccaggaccgggccggaacgagacgcacggccaaggcgaaccagacaagaaaagcagacgcggagaaagagaacgcagaccggccggg

SEQ ID NO: 201525 - RNA, 77 nt, Homo sapiens
gccgacgggagcagaggaagccgaggaccaccacagaaggaagaaggacggggggcccgggcgaaaccggaccgggc

SEQ ID NO: 201526 - RNA, 98 nt, Homo sapiens
gggaaaggccgcgggggcaacggagaaaacccggaaccgcgacggcggcagagagaaaccgaagaaggcccacacacacaggaaggcagaaagcacag

SEQ ID NO: 201527 - RNA, 71 nt, Homo sapiens
acgggacccgaccggaggcaccggcaaggacagacgagacacggggccgcaacgacagaggaggaagaaca

SEQ ID NO: 201528 - RNA, 72 nt, Homo sapiens
gaaggaccaagaaccaggaagcggaggaggaagaagcaaagggggccgcgcccacccgaagaagcaaccaaa

SEQ ID NO: 201529 - RNA, 75 nt, Homo sapiens
aacgacgaggaaggcaccaagcccccagacaaaccgaaggcgacagagacaggagaacaccaacaccagcagcag

SEQ ID NO: 201530 - RNA, 72 nt, Homo sapiens
ggcggaacggagcagcggcgccgggggagaccaggaaggaaagaagccgggacccaagggagagagggaacg

SEQ ID NO: 201531 - RNA, 78 nt, Homo sapiens
gacgcaacaggccagacccaacgaagcagcccagcgggacgaacagaggaagcaaaccagaaaccaggccacacgagg

SEQ ID NO: 201532 - RNA, 73 nt, Homo sapiens
gggacgcccgagggccggccggcacagccgggcacaggcacagcagaaacacacaaaccaagggagacaaagc

SEQ ID NO: 201533 - RNA, 73 nt, Homo sapiens
gagaagcaaaacccagagaagagagaagaacaccgaaaccagaaggggacaccgcgaccagcaccacccaaac

SEQ ID NO: 201534 - RNA, 77 nt, Homo sapiens
accaccccgacacaacaccaccaacagcacagagggccaagccagaacaggggaaagccaaggcgagcaggagccaa

SEQ ID NO: 201535 - RNA, 50 nt, Homo sapiens
aggcgcgcgccgccacgccccaacgccggggccgccgacgagccacgaag

SEQ ID NO: 201536 - RNA, 77 nt, Homo sapiens
agcgccccaagcaaggaagcgacagagccagagaagccacaccggcccaacaaccaaagagaagcacaaagcaacag

SEQ ID NO: 201537 - RNA, 82 nt, Homo sapiens
gaaaaaaacacggaagaagagaagaggaacaaaagcagcgccagacccggccacgaggaccagggggggagacggcagccca

SEQ ID NO: 201538 - RNA, 52 nt, Homo sapiens
agacggagacagcggacaccaggcagccaaggccgaaacaacgaacaaggac

SEQ ID NO: 201539 - RNA, 74 nt, Homo sapiens
caggagggcgaccacaagcaaacagcgaacccaaaaagagccggcgaggggaggagagagaccccggcacaaaa

SEQ ID NO: 201540 - RNA, 79 nt, Homo sapiens
ggaaacaggggcaaggacagaccacggaccgcagcgcaagacacgccaagaagagccaggccgcccagcacgccacaac

SEQ ID NO: 201541 - RNA, 78 nt, Homo sapiens
agaggccagcgggaacggggggcacagcccgcagaaaagagcaccggccagcagaaccagccggggccggcaagcccc

SEQ ID NO: 201542 - RNA, 69 nt, Homo sapiens
gaagacaccggggacagacaggagggagacccacaaaaccaagggcaccaggaagaagggaaggaaacg

SEQ ID NO: 201543 - RNA, 72 nt, Homo sapiens
agcaaccaagcgcagccaagaagcgaaaggccaggccaccacgggagagcgcgagagacacgaggccaagca

SEQ ID NO: 201544 - RNA, 44 nt, Homo sapiens
ccacagggggcggccccgggcagacccgaacaagagaaggaggc

SEQ ID NO: 201545 - RNA, 64 nt, Homo sapiens
acgacgacgaggaagaggaggcgagcaggaggcaaagggaccccaagaaaccaaagggcaagag

SEQ ID NO: 201546 - RNA, 70 nt, Homo sapiens
caggcgacccgacgggccaccgaaccaaaggcaagaaccggagcaggagaaaagccggaaagaaaacgca

SEQ ID NO: 201547 - RNA, 106 nt, Homo sapiens
cgaggacaagcacgcccaggcagagccggggcacgggaggagcagcagaccaagaaagcaccccacgaacaaccacaggaagagacacacaagaaacaaaacggca

SEQ ID NO: 201548 - RNA, 86 nt, Homo sapiens
ggggccccaagcagaccaccaagccagccagcggggacccaggagccgggggggcgagcccgccgagagcgccaaggaggagacaa

SEQ ID NO: 201549 - RNA, 73 nt, Homo sapiens
gcaaggaaaccgcaggcgaggcaccagaagagccagacagccacacggggggcccggaacgccaccacggaaa

SEQ ID NO: 201550 - RNA, 81 nt, Homo sapiens
cggcacagcagggcaccagaggggacggcagccccaggccgccaggacggcacagccagggcgaaagaagaccccgccacc

SEQ ID NO: 201551 - RNA, 77 nt, Homo sapiens
cgggaggcggcacggggcccgcgggcgagcagcagggagagggccagccgggcccagccccacaggcccgcccaaca

SEQ ID NO: 201552 - RNA, 87 nt, Homo sapiens
acccccgccagcagccgccggagccagccaacgagcggcaagaacccccggagcaggaaacaaccccccaaagaacaagcagccagg

SEQ ID NO: 201553 - RNA, 73 nt, Homo sapiens
ggagagcacgagagaaagggacgccggaaaaaagggaacgaaagcaaggagaaggaagccaacaccggagcca

SEQ ID NO: 201554 - RNA, 77 nt, Homo sapiens
ggaacacagaagagaggagacagacgcggagacagccagacacaacaacagggggcgagaggaaccaggaacaagaa

SEQ ID NO: 201555 - RNA, 55 nt, Homo sapiens
ggggaacagacagccccaggcggaggcagggcgagaccgaccacgcaggcccgac

SEQ ID NO: 201556 - RNA, 38 nt, Homo sapiens
aaaaaagcggagaagaggcgaccaacgacgaagagcag

SEQ ID NO: 201557 - RNA, 75 nt, Homo sapiens
cgaacagggaggagagacggcggcggaaaaccccaaaaggacaaagggggacgaacccaacagaggaggaagaaa

SEQ ID NO: 201558 - RNA, 33 nt, Homo sapiens
cgcaagaccagggcagggccccaagaaaggcag

SEQ ID NO: 201559 - RNA, 60 nt, Homo sapiens
agaacggacacacaggaggcgcagaagacgcaacccaacagaggaagccgcaagaaacgg

SEQ ID NO: 201560 - RNA, 78 nt, Homo sapiens
ccccgcccgcgggagcgggcagccaaagagaagcaggagaaggaacgggaaaagaccaaaaaaccaggccagagcagg

SEQ ID NO: 201561 - RNA, 49 nt, Homo sapiens
ggaagcccaccacaaaaacgaaggcggcggaaaaccggggaccaaagca

SEQ ID NO: 201562 - RNA, 61 nt, Homo sapiens
cccgccccacccaagcaggaggagcgggaaccgacgcgcagcaccacagcggagcccggca

SEQ ID NO: 201563 - RNA, 65 nt, Homo sapiens
agaaccaggaacaccacccgcagagacccaggaaaaaggaccagaaaaaaaggcacgcaaagggg

SEQ ID NO: 201564 - RNA, 72 nt, Homo sapiens
gagcgagggggggcgcgccggaaaccggagcgcgcagcaggaagaagaagcacggcaggcgggggcggggcg

SEQ ID NO: 201565 - RNA, 46 nt, Homo sapiens
gaaagcaccacggaggacgagggaggaaccgaaaggaaaccgagga

SEQ ID NO: 201566 - RNA, 73 nt, Homo sapiens
gagaccagagaggaaaaagaagcacaccgccaaccacccgggcaacacaggggcaaacaaggacgagcccgac

SEQ ID NO: 201567 - RNA, 66 nt, Homo sapiens
gcagacaaaagggccaaagaagggagagaggcggagaaaccagacagaccacagcccagccaaaaa

SEQ ID NO: 201568 - RNA, 66 nt, Homo sapiens
gccggaaaccaacaagagggagcagagaagagaaaaggaaaagaaaaaaagaggcgagaaagcccc

SEQ ID NO: 201569 - RNA, 87 nt, Homo sapiens
gaggcggggccgccggggccgccaggagcccgaccgggagaggacaagaccacgagccagaacagcagagaacacaacacaggacaa

SEQ ID NO: 201570 - RNA, 69 nt, Homo sapiens
cccggggcgaacacggacaccaacgagcgaagcagaccaaaacaagaaggcagacaggagggcaagaaa

SEQ ID NO: 201571 - RNA, 59 nt, Homo sapiens
aagaagcgcagccgcaccggccaaggccgaccacaaagccgagcccgccggcgcccccc

SEQ ID NO: 201572 - RNA, 68 nt, Homo sapiens
gcacaccgcccagcccaccaaggaagcacagaccacccaggacagaaagaccaccgaagagcagagaa

SEQ ID NO: 201573 - RNA, 89 nt, Homo sapiens
agcaccaggcggagcaggagcggcggcgacggccacaggggcggcgacggcgcaggcgaagcgaaacagggagaaagccgcgcccccag

SEQ ID NO: 201574 - RNA, 79 nt, Homo sapiens
gagggagcgacacccaagagcagcggcacgaaccaccgcgccaacaaggcccagggaaagacgggagaagggacagacc

SEQ ID NO: 201575 - RNA, 65 nt, Homo sapiens
ccagacagaagcacagggagcaacacgcacacgaaacccacgacccaagaacagaggagaaagaa

SEQ ID NO: 201576 - RNA, 81 nt, Homo sapiens
ccaaaccgagcacagaaagagaccgcccgcccaacggcggcacagggagaacacagggccccaccgcgccccacagaaaac

SEQ ID NO: 201577 - RNA, 82 nt, Homo sapiens
cggggcgcgagagcgagcgggcccgggaacggcgcgggggagaggaggagccgcgggccggggaaccagcccggccggacag

SEQ ID NO: 201578 - RNA, 39 nt, Homo sapiens
aaacgacggcgcaaggaaacacgcccgccgacagaaaca

SEQ ID NO: 201579 - RNA, 75 nt, Homo sapiens
agcacgacaagggcccgcggaccggcaaaacccaaggcggggcgcccggcccagagggaccgacgacaacccagg

SEQ ID NO: 201580 - RNA, 77 nt, Homo sapiens
cggcccccccagacacagcaccgggccacccacagccccaccacaggagccgcacagaaaccggaaggcaaaaagcc

SEQ ID NO: 201581 - RNA, 71 nt, Homo sapiens
gacccgggacgacgagacgacaccacaaagccaagcagagagaccgaaaaccagaacacgaacgaagggga

SEQ ID NO: 201582 - RNA, 70 nt, Homo sapiens
gacgaccacaagaccggggccaggcgaaccagccgaaaaaggagaaaccaaaaggaaaagcgaaccagac

SEQ ID NO: 201583 - RNA, 90 nt, Homo sapiens
ccagagccgaaccaaagagcagcaggagacaggcaccggaaaagacccggacgacaaaacgaacgaggcgacggccaccgcccgccagcc

SEQ ID NO: 201584 - RNA, 76 nt, Homo sapiens
gcagaagacagcggacagcaggacaagggaaaaggagaaccccagcgggaaccgcaccgcaaaccgccaacacggg

SEQ ID NO: 201585 - RNA, 30 nt, Homo sapiens
caccagcgagcccccgaacgcaaggaggga

SEQ ID NO: 201586 - RNA, 99 nt, Homo sapiens
cccaggcccccagcaggggaaccagcggccacggaagcccacgcggcccgacaggaccgaaaaaaagcggacagagggcgagagccagaagcagacggg

SEQ ID NO: 201587 - RNA, 78 nt, Homo sapiens
acacaggggaacaccaaggggcaacgggccagagagggaaggaaacaagccagagccccgcgacaagagaagcaccag

SEQ ID NO: 201588 - RNA, 66 nt, Homo sapiens
gggaaggcccacgggacgggagacccgacggagcagacagaagaagaagaccaggacaacgcaaag

SEQ ID NO: 201589 - RNA, 85 nt, Homo sapiens
agcccgccaggcgggagaagaaccccccgaaaggaccccccagggacaggcggggaagaaagccggagaaaagcaccggccccag

SEQ ID NO: 201590 - RNA, 72 nt, Homo sapiens
gcaccccagcacaccagggaaccaggggcaccaaccgaacccaccccacccaccggccaccaacacaagcac

SEQ ID NO: 201591 - RNA, 80 nt, Homo sapiens
gaacgccgcggacccggagccgcacaaaccagggccgccagaagccagcgcggagccagcgcccggcaaggagcgagcgg

SEQ ID NO: 201592 - RNA, 51 nt, Homo sapiens
cacgggcaggaaggcagcgcacgacagcaaaagaccaaacagaagaaggcg

SEQ ID NO: 201593 - RNA, 58 nt, Homo sapiens
cagcagcccggaggagcagccagcagggcaagccgcacgcagaggggcgggcacgcac

SEQ ID NO: 201594 - RNA, 73 nt, Homo sapiens
gcagcgcaaaaccaccgcaccagaagaagaaggccagaaaaaaccagagggggcacccgcacccgacagaagc

SEQ ID NO: 201595 - RNA, 73 nt, Homo sapiens
caagaggcgacgcgaaccgcgccaccccaagcaccggcacagcaaaagaagggaaagaggaaaacccggggaa

SEQ ID NO: 201596 - RNA, 46 nt, Homo sapiens
gcaggaccggaccgggggagggcaaacacggggaggaacgccacag

SEQ ID NO: 201597 - RNA, 66 nt, Homo sapiens
gacacgggggacgcacagcagagggagcggcaggggaggcgaagaagagcccggacagaaagacga

SEQ ID NO: 201598 - RNA, 72 nt, Homo sapiens
cgcccggcgccccagccgccccgggccggcacccgcgcaaggggccgagaacgccaccaagcccccacaccc

SEQ ID NO: 201599 - RNA, 40 nt, Homo sapiens
cacagacaacagccggggcagcgaccagccccaccagccc

SEQ ID NO: 201600 - RNA, 90 nt, Homo sapiens
gggcaccgaccccgcaacgacgcccgggcgcgggaggggaggagagcagagaacgccccagagaaagacgaccgccaaccagggagaaca

SEQ ID NO: 201601 - RNA, 84 nt, Homo sapiens
cggggcgcagcggcgccgcgcccaggagggagggacacagccccaaacaggacgaaggcggcgaagcaggacagcggccgaagc

SEQ ID NO: 201602 - RNA, 43 nt, Homo sapiens
cccagagccggcaggagcaggaccgggcaacgaaggcaaaccg

SEQ ID NO: 201603 - RNA, 72 nt, Homo sapiens
gcgacacacgagagcagaaaaaggcgggaggcgaccaggaacaggaccccagacgacgaggacgcagaagag

SEQ ID NO: 201604 - RNA, 69 nt, Homo sapiens
ccggacagaagccgaagcggagggaaaccccgcagacagacacaggagaaccacaaaaaaaagagaggg

SEQ ID NO: 201605 - RNA, 85 nt, Homo sapiens
gccccgggacagccacagcgcacgggagagcgagagccccagacagaccccagccagcggaggagcggcgccggcagagagagcc

SEQ ID NO: 201606 - RNA, 75 nt, Homo sapiens
cacgcagagaaccgagaaagcaacggaaacgaagaaggcccagcccaccaggaccacagaaaacacggacccccg

SEQ ID NO: 201607 - RNA, 76 nt, Homo sapiens
aagaacaccacaggagaggaaaaaacagaagaagaaggggagcggcaaagccaaagaggccagagacaacagaaga

SEQ ID NO: 201608 - RNA, 73 nt, Homo sapiens
aaaagaaccgggggaagagagaaagccaagcaaaaagagcagagaaccaaccacaagaacagaaaaagaaaac

SEQ ID NO: 201609 - RNA, 60 nt, Homo sapiens
caaggcccggccggaaggcccagacggagcggacagacggaagaagaagagcacagcgcc

SEQ ID NO: 201610 - RNA, 75 nt, Homo sapiens
ggaacccaggacgaagggacaccccaaaaggaaggcccacacagcgagccgcaaagcggagaacagcggagaacc

SEQ ID NO: 201611 - RNA, 74 nt, Homo sapiens
cggcagcaagcaccagcacccgcagcccggaaccacgcaccagacaacacaggagccgggaaccaccacccccg

SEQ ID NO: 201612 - RNA, 82 nt, Homo sapiens
gcgccgcgcccggcggccagggaccccccccgcgccgcacagccccgcgcccgagcccacacagccagaaccccgagcgccc

SEQ ID NO: 201613 - RNA, 66 nt, Homo sapiens
gaaaaggcagacggacagacccacaacaccaggcgccaggacaggcgcaacagccagacccgccga

SEQ ID NO: 201614 - RNA, 55 nt, Homo sapiens
gaaaagcagcgaacccagaccgccgaaacgagccagcggaggcagggcggaccgg

SEQ ID NO: 201615 - RNA, 55 nt, Homo sapiens
cggcgccgaaagaaggcaaaaggagcgcagggacacaacccgccacgcggagcac

SEQ ID NO: 201616 - RNA, 81 nt, Homo sapiens
ccagggaaccgggccgcaccacggggccaaaccaggcccgccaccccggcgcccccagagccgcccacccagccgaccaag

SEQ ID NO: 201617 - RNA, 54 nt, Homo sapiens
gcgccagagggccacgccaggccggccagcccagggggaggcggcgcaacgcgg

SEQ ID NO: 201618 - RNA, 72 nt, Homo sapiens
gggacggaagacgggagcgggcccggagaacaccgggaaagcgaagccaacaaagaaaggaccggggcaaaa

SEQ ID NO: 201619 - RNA, 48 nt, Homo sapiens
aggcgcgcgcaagcacgcgaggagccgggacagaccggagcggggagg

SEQ ID NO: 201620 - RNA, 80 nt, Homo sapiens
cgaacgccgcagcagaaagccaagaaccagcggaccagggacaacccgccacaacgacaaaggaccccaaagaccccgga

SEQ ID NO: 201621 - RNA, 109 nt, Homo sapiens
gcaagaccagaggaaaacgaaagccccccaaaccaggcggcaacaagggacccagacacggggagcccaggacaccacgaaaaggaaggccaagaccaagaaaagaagg

SEQ ID NO: 201622 - RNA, 78 nt, Homo sapiens
ggaaacaaagcacgaaaagccacacaggccgagcccgggacccggaagaacgggggcaggaaccacagagaacagccc

SEQ ID NO: 201623 - RNA, 84 nt, Homo sapiens
gcgcagcagcagcagcagcggcaccaggagcacgccggagcggagcgcgccacagacagaagcgaaggggacagggggagaacc

SEQ ID NO: 201624 - RNA, 67 nt, Homo sapiens
accgggggacacaaaccaaagccacaagacgagggcagcaacgaccgaaagagcaagaacaacccgg

SEQ ID NO: 201625 - RNA, 62 nt, Homo sapiens
ggacacgagcgggaagcaggcggcaaccacccgcacggaggaggacagcaagacgacccgca

SEQ ID NO: 201626 - RNA, 82 nt, Homo sapiens
cccaccaacaggaacagggcagacgagcggaggacacccaacccggaccccccccgcggcccgccaggcgacccacggacag

SEQ ID NO: 201627 - RNA, 77 nt, Homo sapiens
aagcaaccaccagcagcccccagagcggaacacaggagcaaagccaaaccgaacaaggaaacaaccaaagcggaaag

SEQ ID NO: 201628 - RNA, 88 nt, Homo sapiens
cccgaggggagacgccggacaaccgccccgagggaagggaggcggcggccccaaaaaccacgaccagaaagccaagccaagagacccc

SEQ ID NO: 201629 - RNA, 70 nt, Homo sapiens
acaccacacgacgggaaccccggaagggccaaagccccaagaacccagccacgcaaagcggggagaggac

SEQ ID NO: 201630 - RNA, 43 nt, Homo sapiens
agcaccaggggaagcgggacaacggggagaacgagaacaagaa

SEQ ID NO: 201631 - RNA, 94 nt, Homo sapiens
cggaggaggacaacgacaccaccgcagcgacgagcaggccccccccccggaggcagccggccccgggcccaggccagcggaccaagccagaacc

SEQ ID NO: 201632 - RNA, 83 nt, Homo sapiens
ggaagacggacccaacacggggagaaagcggaccagcggcaggagcggcccagaaacggggcgcgagcgcaaggcgaaagagg

SEQ ID NO: 201633 - RNA, 57 nt, Homo sapiens
cacaaaccagaggaggacggaaccaacccagagaaggaacacagcagagcacaggaa

SEQ ID NO: 201634 - RNA, 81 nt, Homo sapiens
cagaagaaaagcaaaaaaacaaggaaagccgcaacagaaggaaaacaagaagacgggccggggaagagaaaggaaaaggga

SEQ ID NO: 201635 - RNA, 57 nt, Homo sapiens
ccgagggcgaggcggacgcgcggcgcgcaggggaccagcggggacaaggggacggcg

SEQ ID NO: 201636 - RNA, 78 nt, Homo sapiens
cagcaagcgagggaccgggacgccacagccaggacccaccccgcaccagggggcgcaacacgaccaggccacgcagcc

SEQ ID NO: 201637 - RNA, 78 nt, Homo sapiens
cggaggacacagagggcaaagggggagaaggcacacaccgagcacggagccggggccaccgagacaaacacgggaaaa

SEQ ID NO: 201638 - RNA, 78 nt, Homo sapiens
aagaggacgccacaaacacccaccacagcagaggggcaaaagcagcgagagcaagcagaacggaacgcgaggaagaaa

SEQ ID NO: 201639 - RNA, 57 nt, Homo sapiens
acagcaaaacagggccaaaaaagccaccaagcaagacccccaccacgccaggaaaac

SEQ ID NO: 201640 - RNA, 56 nt, Homo sapiens
gggcgcgccacggaggccaaaacggcccccgaggaccgcacggagacaaaagcaac

SEQ ID NO: 201641 - RNA, 88 nt, Homo sapiens
gacacagcagaagaaggcgcagaaagagagagcacaggacaaccaccaccagcgagcaaaagaacaaagaccaagaccaagaagcgcc

SEQ ID NO: 201642 - RNA, 60 nt, Homo sapiens
gacacaaaggaggaggcaaaccagcggcgaaccaacagagccggacggagcagcggcaaa

SEQ ID NO: 201643 - RNA, 85 nt, Homo sapiens
cacggccaagagcgggcaccaggaagcgaaggcggcccagcccccggacacgggcggccggaaggcgaggccccgccagcccgcc

SEQ ID NO: 201644 - RNA, 81 nt, Homo sapiens
cgccacccgcggacacgcaaggggccaagaaggccgggcgccaccccaaaccaggaaagacaggcagaggagacgcaacac

SEQ ID NO: 201645 - RNA, 79 nt, Homo sapiens
ccgggaagagagcacaaggaagcagaacacagagagccagcagagacggcaccggagccaaaacaccgacaagagaaaa

SEQ ID NO: 201646 - RNA, 78 nt, Homo sapiens
cgacgccaaccacgacgaagcggaaggcagaaggcaacagcgagaagagcgagccagaaacaaggaaagaccaaccac

SEQ ID NO: 201647 - RNA, 77 nt, Homo sapiens
gaggagacccgaccccagaaggagaaggagcaagaagagaaaaacaaagcacacacggcaggaacggagaaaaaaag

SEQ ID NO: 201648 - RNA, 73 nt, Homo sapiens
ggcagcaggggagggagaccaggcgagcggcccacgggaggccaaccacgagcacaggagggagcaggaaaaa

SEQ ID NO: 201649 - RNA, 82 nt, Homo sapiens
cgaaccaagcaccgggagcccgccgccccgaaaccaccgcgagcgggacccaaagacaggaccacgcaccagcagagaagga

SEQ ID NO: 201650 - RNA, 70 nt, Homo sapiens
aagacggaaccacagacaaaaacccaaagcaagcccagaggcccggaaggcgcaaaagggggagaacaac

SEQ ID NO: 201651 - RNA, 73 nt, Homo sapiens
acagaagcagggcgaaccagagaaaacggcaaggaagcggcaaaaaaacagcacagcagagaacggagcagcc

SEQ ID NO: 201652 - RNA, 72 nt, Homo sapiens
cgggaccgcaaagaacaggagcccacagaaggcagaggcagaaccacaggggaggcaagcaggggggcaaag

SEQ ID NO: 201653 - RNA, 44 nt, Homo sapiens
gaccggacaggacggagcgcaggcagaggcgcggggccgagagg

SEQ ID NO: 201654 - RNA, 55 nt, Homo sapiens
ggagggcgaaaacgggcagcagagaggcaagcaaccccggggaagaggccaggca

SEQ ID NO: 201655 - RNA, 86 nt, Homo sapiens
gacgaacccaaccgggcccggcccgcagaggacagcagcggacggccggaccaagaggcgccgccccccagcaaacgagaaaaacc

SEQ ID NO: 201656 - RNA, 74 nt, Homo sapiens
cagacaaaaggaggcaagcagagagagacacagccgaaagcggacgcaagagcaagaccagccgcggagacgac

SEQ ID NO: 201657 - RNA, 76 nt, Homo sapiens
aagagaagaagacccaaaaaaaagaggagcagcaggcacagcacgggcagagccaggcaggagagccaacaaaggc

SEQ ID NO: 201658 - RNA, 76 nt, Homo sapiens
ccgaggcccgcgaccgccgagccgcagccgccccgcggccaacagagccggagcgacaggacccaaacccgggccg

SEQ ID NO: 201659 - RNA, 60 nt, Homo sapiens
ccgacgccaggcagcgcccccaaacggaacaggcaaggcgcaccacgagggcacgcagac

SEQ ID NO: 201660 - RNA, 56 nt, Homo sapiens
cggaggcagaggggaggcgcgaaaggccgccaggccaagagccccaaaggcggccc

SEQ ID NO: 201661 - RNA, 73 nt, Homo sapiens
agagacagagggaaccggcagggcaagcggcgacacacgacggaagcagaggcagcaggccggccgggggggc

SEQ ID NO: 201662 - RNA, 41 nt, Homo sapiens
ccggaaggagaagcacgcccggcgaacaaccaagcggaggg

SEQ ID NO: 201663 - RNA, 82 nt, Homo sapiens
ggagcaggggaaaaaggaccaaccggcaagggacaacggccaacgcaaagccgaaaaacagcagcagaggaaagaaaagacc

SEQ ID NO: 201664 - RNA, 52 nt, Homo sapiens
agaagagggaaaccaaacaggcagcccaaaccgaagacccacaggagaagcc

SEQ ID NO: 201665 - RNA, 75 nt, Homo sapiens
aggaaggccaccgagggaacccgaccggacccagccccagaaggccagccagggcagcagcaaggagaacaccag

SEQ ID NO: 201666 - RNA, 77 nt, Homo sapiens
ggcagcaggaggggggagcggccaacccaagggccccagcccgggcccccaacgagaacagcgcgagccacaaggca

SEQ ID NO: 201667 - RNA, 79 nt, Homo sapiens
aacaccggcccgaggcgaagccagcccacaggggcaaggagagaagagacgaggaggaggggagaccgcggcaggacac

SEQ ID NO: 201668 - RNA, 86 nt, Homo sapiens
cacccgcgggccgcggcgcccggggaaagccgggccccgagggcggaccgaggcaaaagaaggaccccagcaggaaaagcaaagca

SEQ ID NO: 201669 - RNA, 84 nt, Homo sapiens
acggacacccagcggggggccggggcccccagcccgccccagacccgagcagacaagcaggaggggagcccagcccaggagcag

SEQ ID NO: 201670 - RNA, 57 nt, Homo sapiens
cggacgcacccggacgcaaagcgcacggaaggcacagcaaggcggggcgggcacaga

SEQ ID NO: 201671 - RNA, 82 nt, Homo sapiens
cgggacaccccggaagcgggaaagaggcggagaagaacccaaccaaaaccaggcggcaaccccggggcgacaaaaagggaac

SEQ ID NO: 201672 - RNA, 76 nt, Homo sapiens
cagagcgcacaaagggaaaggcaaagccaggccaggggggacagaccggacagaaggcgcaggacgcaacaagaca

SEQ ID NO: 201673 - RNA, 74 nt, Homo sapiens
aaaaggcggcacagaaagaaacagaaccacacaaaagacaggaagcacaagaagaaaagacacaggaaaagagg

SEQ ID NO: 201674 - RNA, 81 nt, Homo sapiens
gagaagcggagaacccagaaaaaaaggaagaaaagaccagaggcaaaaagggagcaaggacaagacggacagaaacgaaca

SEQ ID NO: 201675 - RNA, 89 nt, Homo sapiens
gaaccccagacgcacgggccggcgcgcgccgggcacccccagaagcgaggcagcaagaaggaaaacagggacagcacgaccgagccaca

SEQ ID NO: 201676 - RNA, 79 nt, Homo sapiens
gggaccacgccgcgcccgcaagaacggccaagaaagcccgaaaaccaagaagagagagaagcagaggaaaccagaagga

SEQ ID NO: 201677 - RNA, 75 nt, Homo sapiens
gcacaaagcagaagcacaaagcccgaagcagggggaaggcggcaaggacacccgaaacccaagagacagagcaga

SEQ ID NO: 201678 - RNA, 75 nt, Homo sapiens
cccagccagggcgagccccaagcgggacaggaagggaccacagaccagcacgccggcgccacgaaccgagcgaca

SEQ ID NO: 201679 - RNA, 76 nt, Homo sapiens
gcacgggcaaggcggagaggacggagcggcgagcccccgcggcgacaggagacggcccaccgaaggaaacaccgac

SEQ ID NO: 201680 - RNA, 77 nt, Homo sapiens
gccgcggcgggggcccgcagagggaaaagaacgggagaaacagggagaggcgaaaaaaggggacaagccacaagaga

SEQ ID NO: 201681 - RNA, 79 nt, Homo sapiens
agaccccgaaaacggaagcgcagggagaaggaagaggggaaaaggccacggggcgccggccacgaggggcggaagacca

SEQ ID NO: 201682 - RNA, 62 nt, Homo sapiens
cagcccaccgggccggggggcggggcggcaacacaagagggggaacaggagcgaccaggaca

SEQ ID NO: 201683 - RNA, 89 nt, Homo sapiens
acgcggaaggcgggaccaagacgcgcgggagcccggcgccggagcccaagaacaaggcaaaggcaacgcagaacacaccagaagagcag

SEQ ID NO: 201684 - RNA, 75 nt, Homo sapiens
agagaggggaagaccaagagcacaggccaagaacccaaagcaaggcgagacaaggggccaaccagccagggccaa

SEQ ID NO: 201685 - RNA, 78 nt, Homo sapiens
cgggggccacggacccggcgacaacacccggccccgagacagaagccgaacccaccggcacaaccgcacgcaagcgac

SEQ ID NO: 201686 - RNA, 79 nt, Homo sapiens
ggcggccccaccagcagacgcagccgagacaccagcccgaaacaccaccaaggacaaggcacgaggcgcggcgaccacc

SEQ ID NO: 201687 - RNA, 83 nt, Homo sapiens
gcgggcggacggccacacagccggcagcccgggcgggcccgggggcgagcagcgcacccggcgccggcgaaagcaacgaaggg

SEQ ID NO: 201688 - RNA, 80 nt, Homo sapiens
ggagaagcgggcgcccgccgccgagccgcccgcagcggcccccgccggacggccagcccccaggaaagagaaaacagcag

SEQ ID NO: 201689 - RNA, 91 nt, Homo sapiens
agaaaagcccgggagcagaagggaggcccaagacccacaacaaaagaccagaaggaaaacacaccaggcacagaaaggccccccgccaagc

SEQ ID NO: 201690 - RNA, 81 nt, Homo sapiens
gagaggcgagccgcgagagggccggcaggcccgggaaggggcaccacaagccgaacagccagccagcaaaagaacagcagc

SEQ ID NO: 201691 - RNA, 84 nt, Homo sapiens
aaaacaaacacacgcaaaggagaaaggaaccgacaggcccggggcgcccgggagacgccacacggccgagcagcccaccagggc

SEQ ID NO: 201692 - RNA, 80 nt, Homo sapiens
aaacccccaccgggaaaaaggggaagcggaaagagaagaagggcaagaaaacagaggaaaagcgcggcaaacccagggcg

SEQ ID NO: 201693 - RNA, 76 nt, Homo sapiens
ccaacaacaggacggaagccccaacaacaagaacgagccagcaaacccgaggagccagagaccaaagccacaaaaa

SEQ ID NO: 201694 - RNA, 81 nt, Homo sapiens
caagacgccgcggacccgggcccaggcgcgcagggaccagacaccacgcaagcgaaaaaccgcggacgacccagagaaagg

SEQ ID NO: 201695 - RNA, 56 nt, Homo sapiens
agagaggagggggcaccgagcaacgagggcaggccaaaaagcaaaggaccaccgac

SEQ ID NO: 201696 - RNA, 82 nt, Homo sapiens
accagacagaaccaggaaggcggggaagggcgacagaaacggcgaggaaagagaggagccccggaaagaaaaggacagaccc

SEQ ID NO: 201697 - RNA, 82 nt, Homo sapiens
cagccaggcaaaagggaagcgaaaccaaccagaagccgagaaggccaggagggggccacaccgaacccagccgggaggccaa

SEQ ID NO: 201698 - RNA, 70 nt, Homo sapiens
cagccaagacaagggccgcacggcgcaggggacccaccgggcaggcagcaaagcacgcccaggcgccaca

SEQ ID NO: 201699 - RNA, 62 nt, Homo sapiens
gggccaaaggacgaagaacccacagaggaagagacccagacgaagagcgcacagaaagaggg

SEQ ID NO: 201700 - RNA, 82 nt, Homo sapiens
gggcacccaccggaccgagccaggaccgggcagccgcaagagcccccagcgccagcagccagcccagcagcaagcagcaggc

SEQ ID NO: 201701 - RNA, 82 nt, Homo sapiens
cagaacgagcaaaaagaagaaaaagcagccagaaaaagaaggaaaaagaggagacgaggggggccaaaggaaaaggagaaca

SEQ ID NO: 201702 - RNA, 74 nt, Homo sapiens
cggccgaaggcgaacgccgcggccaaggagccgccaaagccagacgcggcgcgagggcggcccgcagaagagca

SEQ ID NO: 201703 - RNA, 53 nt, Homo sapiens
agcagcgaaaaacccgaccccccaagcaggaagccacagaggacacaaccggc

SEQ ID NO: 201704 - RNA, 73 nt, Homo sapiens
agaagaggcccagacggcccacagcagcgcagcacggaggcgccaaggcgcccgggcacaggaacacaagaac

SEQ ID NO: 201705 - RNA, 89 nt, Homo sapiens
ccgcagggacacaacgccacaagccggacacgggcggggggacccgagggcaccaaagaaagaacaaagcccacagccacaggcccccc

SEQ ID NO: 201706 - RNA, 124 nt, Homo sapiens
gggcacacccccgccagacccacggccggcggaccagacgcccgcccgccccggccaagccaaaaagcaaaggaccaccgacaaaccgggaccaagaagcagaaacaaacagcggacggaagga

SEQ ID NO: 201707 - RNA, 85 nt, Homo sapiens
cggcggcggcggcaagcggagaccccgcgagcggcgcgagcggcagcaggacaccccggaccgcaggcgggacaagaaaagaaaa

SEQ ID NO: 201708 - RNA, 78 nt, Homo sapiens
ccccgcggagggagcggcggccgagcccagccgcgcgcaggaaaaaggcaaacccaccggaaaaagaagggaacggag

SEQ ID NO: 201709 - RNA, 74 nt, Homo sapiens
cccgcacccgaccgcccaccccgccggacacgaacgaagacaagcaacagcgcccggcagggaaagggagcgga

SEQ ID NO: 201710 - RNA, 86 nt, Homo sapiens
ccagggcccggcggggacgagcaggaagcgcggcgagcggaacacgacacagaccccggccggaacccagggagaccagccccccc

SEQ ID NO: 201711 - RNA, 78 nt, Homo sapiens
ccacgcgaccaaggacggagagcggaagaccggcccagacagcccaaggcggaaaagcgaaggaagccacaagcacag

SEQ ID NO: 201712 - RNA, 75 nt, Homo sapiens
ccaggaccaagaaaaagaaagggaaaagccgggaaacgaagaaaggagaacgggaaccccagaacagacagaggg

SEQ ID NO: 201713 - RNA, 79 nt, Homo sapiens
aggcggagccagccgaggggagaagagcccagagaaggccccccaggaagaaaggggaacaagaacgaagagacccgaa

SEQ ID NO: 201714 - RNA, 84 nt, Homo sapiens
ccccgaccgcccgccggcccccgaccagacgaccgccggcagacgggacgaggccaacgcacggggagagcccgggggaaaacg

SEQ ID NO: 201715 - RNA, 85 nt, Homo sapiens
gcagccgcaccggccaaggcaaaccagccagcacgggggcccagccagccagcagcgaggggggacggaggcggcacggggccag

SEQ ID NO: 201716 - RNA, 76 nt, Homo sapiens
cggaacaggccaaaagcaacgccagaccaaaacgaagaagacgagccaaacccaaaaaggaaggggggggagggcg

SEQ ID NO: 201717 - RNA, 74 nt, Homo sapiens
cagaccgcgaaaggccgagagaagcggccgccacgagagaaaaaggagacacgcgcagagcccagaagcaagga

SEQ ID NO: 201718 - RNA, 71 nt, Homo sapiens
cgacccacaggccagagagagaccccccggggcggcagcgcaggcacgacaagagcacgagcccagaaacc

SEQ ID NO: 201719 - RNA, 77 nt, Homo sapiens
ggcgagccagagccgcagcccacacggaagggggagcaacagacaagcccgaaaggaacagcagcaggaacgaaacc

SEQ ID NO: 201720 - RNA, 74 nt, Homo sapiens
aagcggagagagcgggcgggcggccgggagacccacaggagaaggaaagagcagcgaaacaaagagaacagcaa

SEQ ID NO: 201721 - RNA, 82 nt, Homo sapiens
gcggccgcagaacggcgagagcggagcgggacccgcggaagccaaaaaccccccacccggggccgagcaagagagggagcac

SEQ ID NO: 201722 - RNA, 81 nt, Homo sapiens
gggacagcagaggaaagacggaagcccagggaccaagaaaggcccagggaccaaagcccggacaaggcccgagcaccagga

SEQ ID NO: 201723 - RNA, 74 nt, Homo sapiens
ccccccggcgaagcaaaaaaagggccaggacacacggacgaaaagagcaagaacaaacaaacgcaagccaacac

SEQ ID NO: 201724 - RNA, 78 nt, Homo sapiens
ggaggacagacaaacagaacgagagccacagaaacaccaaccggccaaagaaaggaagaagaagaaaacgaaaaggag

SEQ ID NO: 201725 - RNA, 72 nt, Homo sapiens
agcccaacggaggccacccgggcaggcgagaaacagaaagcagagcccagaaccaacacagggcaaagcaca

SEQ ID NO: 201726 - RNA, 81 nt, Homo sapiens
ccgccgcggggcgcgcggcgccggcggcgcgcgacccccgcgcaggcggcacagcaaacacacaagagccagcaaagggag

SEQ ID NO: 201727 - RNA, 68 nt, Homo sapiens
caggcgaccgggacacaaccgagcaaagccaaccacggggaaaaggaaggccggaggaggcaacagcg

SEQ ID NO: 201728 - RNA, 79 nt, Homo sapiens
gcgggcgcgcacgcgcgcaacgcggggccaggacacgcaggaggcacggggccacacaggcgacccgcggcgagagccc

SEQ ID NO: 201729 - RNA, 70 nt, Homo sapiens
gaaggccagagcacgagcacgggaagaacaagcaacagacaaggccacacaccgcagacacagcagcaaa

SEQ ID NO: 201730 - RNA, 71 nt, Homo sapiens
cgcgggcacggccggaggccaaagagaagcaggagaaggaacgggaaaagaccaaaaaaccaggccagagc

SEQ ID NO: 201731 - RNA, 76 nt, Homo sapiens
ccacgggcaccgagcccgcccacgacggagaggagggccccgggcgcgggagccagccgaagaaaggaaaagagag

SEQ ID NO: 201732 - RNA, 82 nt, Homo sapiens
ggcgggcggggcggcggcgcgacaggcgccggaccgaaggcgcgaccacgacgagaagcgggggccgcagcggggcaccaac

SEQ ID NO: 201733 - RNA, 83 nt, Homo sapiens
cggccaaggcacggaggccgcgcgggaggccaccgccccaccagcaggcaacgccacagaccgccagcgccaggacacgggcc

SEQ ID NO: 201734 - RNA, 83 nt, Homo sapiens
cggccgcggccagcggagcccgggcggggcaggagccggaggaaacccggccggcgggcagacccggacaccaccaacaaggc

SEQ ID NO: 201735 - RNA, 81 nt, Homo sapiens
cccggaccggccgagaggaagacgagccgggaggaacggcccggaaacaggaggacgggacaccagcagcgccgccggacc

SEQ ID NO: 201736 - RNA, 77 nt, Homo sapiens
gagagaagaagacacacaaggggacaggcagaagggccaccaaggaggcacaagaaaaggaagcaaggaaaaggaca

SEQ ID NO: 201737 - RNA, 79 nt, Homo sapiens
gcagagacccgagaagagagaggcccagcccagggaccacacccaaaaacacccagccacccaggaggaagacgcaaag

SEQ ID NO: 201738 - RNA, 75 nt, Homo sapiens
cgagaggacccaacccggcacagagagcaaggggaaacacaccagcacacaaagaggaggcgcggaggaggagga

SEQ ID NO: 201739 - RNA, 67 nt, Homo sapiens
ccacgaacgaggggagacgagcacccagccaaacccaggcccgagaagaagaggaaaacccaccacc

SEQ ID NO: 201740 - RNA, 73 nt, Homo sapiens
gagagccacaaaaaaggaagcgaaaaaaagaagccgagcccaaaaaaacagaggggccccagaagagaccaga

SEQ ID NO: 201741 - RNA, 99 nt, Homo sapiens
cggaaggcgggcgacagcggcaggggccccgaaccagaagccgcgcccaagaacaaaccaccgggagaaccaccaaaagaaacggccagaaaaaccaac

SEQ ID NO: 201742 - RNA, 63 nt, Homo sapiens
gcgacgaaagcaacccaaacacaagagcaaaacagagcgccggagcaaacgcaaaaaccgagg

SEQ ID NO: 201743 - RNA, 84 nt, Homo sapiens
agagaggcgcagcccacccgggaagcccggcagaacccaggcgagggacagcccggacaggacgcccaagaagcgggacaccag

SEQ ID NO: 201744 - RNA, 54 nt, Homo sapiens
cggagcaggcgaaggagaaagggagccacgggggcgggcgccccgccaagccgc

SEQ ID NO: 201745 - RNA, 72 nt, Homo sapiens
agaacaaaggagaaaagcagagacagaaggagcaccaggcaaaagcaagaaccaaaaacaggaacaggaaag

SEQ ID NO: 201746 - RNA, 33 nt, Homo sapiens
cccgacaccagagaagggcggaaagcaggaagg

SEQ ID NO: 201747 - RNA, 79 nt, Homo sapiens
acgcgcagccacgcaggagaccagagaagccccccggaaaaccacacgagaggcaaaaaaccagcagaggagaaggacc

SEQ ID NO: 201748 - RNA, 78 nt, Homo sapiens
ccccacaggaccccagagcgacagcccgggacaccaagaaagaacgcagccaacagccgaccgagcacgagccaccga

SEQ ID NO: 201749 - RNA, 62 nt, Homo sapiens
ggacgaccagcgggaggccagaggaaggaggggcgcacccaacgcgcaccgagaagaacgag

SEQ ID NO: 201750 - RNA, 76 nt, Homo sapiens
agcccaggcggcagcgccaggaacccgcgacgccaacagaggagaagaggagaacagcaagcccaaaaaagagcac

SEQ ID NO: 201751 - RNA, 77 nt, Homo sapiens
cgcgccgcggagcggcgccgacaagaggaagaagacagaagagcccgcgaacggaagcggagcggacccagcagaga

SEQ ID NO: 201752 - RNA, 78 nt, Homo sapiens
caacggacagaggcccagagcccgggacaagaaagaccgcaaggggaagggcaacaccaccgagaacggggaaaaaga

SEQ ID NO: 201753 - RNA, 82 nt, Homo sapiens
gacgcgccgccgggcaaaacccggaaaaaagcaccccaacaaccaggggaagagcaagcgaggaaaaacaccaacaggcaca

SEQ ID NO: 201754 - RNA, 76 nt, Homo sapiens
aaaccaaaagcaaccggcaaacacggaagccaaggacaggagaagccagaggagcagcgcagaagagcaaaacgcg

SEQ ID NO: 201755 - RNA, 63 nt, Homo sapiens
agaggaccgaggaagcaaaccaccagaaggacccgggaacggacgcgggacacgacaagaaaa

SEQ ID NO: 201756 - RNA, 74 nt, Homo sapiens
accaggaccaaccccagcgcggaacgagacaacacggggaagagacgagaccacaaaggacaagaacaagcagg

SEQ ID NO: 201757 - RNA, 91 nt, Homo sapiens
caaagcagcgaagaagaggcccaacccccaccccgcccaaggaggcccagcgccagacgacaaacaagcaacaggcggacaaggggaacac

SEQ ID NO: 201758 - RNA, 91 nt, Homo sapiens
ccaagcggagagaccgccggccgagggggcccaggggcagcgagcaagacagcaagcaggacagacaagcagacggggccgccacacgccc

SEQ ID NO: 201759 - RNA, 71 nt, Homo sapiens
gaacgacaagaccaagagaggcaaagcacaaagccccaaaagcacgcacgaaaccggcaagccagcggagg

SEQ ID NO: 201760 - RNA, 73 nt, Homo sapiens
gaaagaggaggaaaaacgagccaaaccggaaagaggagacgaagaccaagaagggagagagcaaaagcaggga

SEQ ID NO: 201761 - RNA, 86 nt, Homo sapiens
gcagacggcgcccagcaacacagaagccgacaaggcgcaagcgaaaacagaccgcgagcccagagaacccaggagaaacgagaggg

SEQ ID NO: 201762 - RNA, 59 nt, Homo sapiens
ccccaaggccgcaccacccccggggggcagcaaagagacccgggacaagcaaggggcca

SEQ ID NO: 201763 - RNA, 70 nt, Homo sapiens
cgaggaacgccacccgcaccgccgaaaacgagacaagaaaaagaccgcagaagacccaccccgcagaaag

SEQ ID NO: 201764 - RNA, 79 nt, Homo sapiens
cccgaggcccccaggaccccaccccaagggagggcagcgacaccagggaggaccacccaccccagccgccccagaggga

SEQ ID NO: 201765 - RNA, 69 nt, Homo sapiens
agaaagggagcagaaggagacagcaaagggacaaacaccgagaaagacccaacgacgcaagacccgcga

SEQ ID NO: 201766 - RNA, 74 nt, Homo sapiens
cccgagccccgcaacaccgcggcccacgggacccccaggagggacccgcaggcgaagaaaagccacacggggag

SEQ ID NO: 201767 - RNA, 67 nt, Homo sapiens
ggggccccgagcagggggggggggaagccgcagcggaaagcaggagcacaggaggcgcacacacggg

SEQ ID NO: 201768 - RNA, 78 nt, Homo sapiens
gcaccaagaagggccacaagcccaccggacacacgggccgcaaaagagcaggaaggacaaggaaaaacgacagaaggg

SEQ ID NO: 201769 - RNA, 68 nt, Homo sapiens
cggccgaaccaaagagcccaaaagaccaagaaaccggaaccaaaagaagcaacagagaggaaaaagcc

SEQ ID NO: 201770 - RNA, 80 nt, Homo sapiens
ggccccaaggaaggagagaaagcacgaaggaaccaagagacccggagacacgcccgacgggcgcagcagccggccgcacc

SEQ ID NO: 201771 - RNA, 80 nt, Homo sapiens
aaacagcaaccaggagaccgggaaacgcagcagaggcaaaacaggaagaaggacgagggagagacaccagcagaggaagc

SEQ ID NO: 201772 - RNA, 66 nt, Homo sapiens
cacaaagccgcagaaagcagcaagaagacgcgcaagaccgagcaagacgccgcagccgagcacgag

SEQ ID NO: 201773 - RNA, 55 nt, Homo sapiens
gggagcaaacgagcgccaacggagaaaaaaaggagagaacaggagagaaaaccgg

SEQ ID NO: 201774 - RNA, 69 nt, Homo sapiens
cggaggcgcgcaggagccaagccaaaagaagcaagggaaagaccaggagccagaaaccaaccaaagagg

SEQ ID NO: 201775 - RNA, 70 nt, Homo sapiens
cgcgaggggcgagccagcccccgcacggaagacgaacacccccaccaggggcaaggagaggggaagcagc

SEQ ID NO: 201776 - RNA, 70 nt, Homo sapiens
aggccggggagggcccgggcgaagggcaaagaagacgagaccaacgcgcgggagcgccaaaagcaccacc

SEQ ID NO: 201777 - RNA, 63 nt, Homo sapiens
ccggaagcggggggaccgcacgggaccggcacggaagacaaaggaaaacgacggcagcagaca

SEQ ID NO: 201778 - RNA, 76 nt, Homo sapiens
ccaggcgagagaggcccgggccccggaccaggcgccccggcagacggccccgacgacccaagccggccccggccca

SEQ ID NO: 201779 - RNA, 75 nt, Homo sapiens
gaaccccggagaaaaggccaagaaggcaggaagagagagacgcaggcgccaccacagaccagagcccgcacggaa

SEQ ID NO: 201780 - RNA, 64 nt, Homo sapiens
cagggaacccaggggcccgcgagggaccaagaaaggcccagggaccaaagcccggacaaggccc

SEQ ID NO: 201781 - RNA, 77 nt, Homo sapiens
cgaccgagcccaggagcgccacgcgcggaaggcagcgcccagcagcgcagaaaaggcgacggcggagacagaagaga

SEQ ID NO: 201782 - RNA, 65 nt, Homo sapiens
gaagagagaaccaccccagccggaagccggaccgcccaaggggacggaccccggcacccaaacgc

SEQ ID NO: 201783 - RNA, 72 nt, Homo sapiens
acagcgaggagcaggcggagcacccaccacggagggaaagaccaggcagggcacggaaccagacccccgacg

SEQ ID NO: 201784 - RNA, 79 nt, Homo sapiens
gaaacagaagaaaagaagcgcagaagaaagacgcaaggccgggacccccgagacaaccacaaaacccaagaaacagaga

SEQ ID NO: 201785 - RNA, 75 nt, Homo sapiens
aacaaacaaacacccagaaacaagaggaaaccagggccgggaagcacacaggaggcgccacgggagcagcggaag

SEQ ID NO: 201786 - RNA, 74 nt, Homo sapiens
acggagagcgacaccaaagacgggcagaagcgaacagagacagacccgggggcccccaaggagagggaagaagc

SEQ ID NO: 201787 - RNA, 57 nt, Homo sapiens
gaagagaagcacaaaaagccgaggaagcacacggaaaagccgggacacgcccgcaca

SEQ ID NO: 201788 - RNA, 72 nt, Homo sapiens
gcaggaaggccaccgagggaacccgaccggacccagccccagaagagaggaaaccggcaacagacaagacca

SEQ ID NO: 201789 - RNA, 71 nt, Homo sapiens
ggaggggaacgagaaaacaggaccaagaagaagaaccagcaaaaccaaaggagccgaacccaaaaagagca

SEQ ID NO: 201790 - RNA, 74 nt, Homo sapiens
gaacgaagaagggcccaccccaagcccagaagccaggcgagccaaaccaagccaagaggagaaggcgcgcagca

SEQ ID NO: 201791 - RNA, 84 nt, Homo sapiens
ggcgggcagcagcacaacgggcgcaccaaggcccaccgaggacaccgcgccagcggggcgaggaggacacagaggacgaggagc

SEQ ID NO: 201792 - RNA, 71 nt, Homo sapiens
ccaagccggaagaaccgcagccgagcggggccggccacagccacgcaggagaagaaaaaggaccggcaaaa

SEQ ID NO: 201793 - RNA, 75 nt, Homo sapiens
ccgggacagggcaccaccagcagcagcggacgagagaagcccacaaaggaggaaacagaaaccagaccagaacgc

SEQ ID NO: 201794 - RNA, 72 nt, Homo sapiens
agcgcccagaagcaaccgcccacagcacggcggggccgcccagcgcaagagaaaggcccagaaaaggcaaag

SEQ ID NO: 201795 - RNA, 76 nt, Homo sapiens
ggacccccccgcggcaggaacgcacccggcggccccacgcagccacccaaaaacagaagaaggaaccagcaaagcg

SEQ ID NO: 201796 - RNA, 56 nt, Homo sapiens
gaggaaaggaaagaggcgggcagaacacggagggacgaggaaacaccaacaccaaa

SEQ ID NO: 201797 - RNA, 78 nt, Homo sapiens
ggagcgacgcgcggagcgagagaccaaggaaagcggcgcggggccacgggccccgagagagaccggaagcgaggaaag

SEQ ID NO: 201798 - RNA, 60 nt, Homo sapiens
gaacaaggcccaaaaaaacagcacaggagaaccagaggaagccggaagcgggcagcccac

SEQ ID NO: 201799 - RNA, 80 nt, Homo sapiens
gaaccacggacaacccagaggacaacgaaggcgcccggcccaggccccgagcggagggaggaaaaccccgcagcacagcc

SEQ ID NO: 201800 - RNA, 59 nt, Homo sapiens
gaaaagcaggggcccccggaacaccacccaaacgccggcgaccccaagaggaagcccaa

SEQ ID NO: 201801 - RNA, 79 nt, Homo sapiens
gaaggcgccccacccagcacgagaaaaaaccacgaggcggccccagcgcgggcgacaggccgacacccccagagagccg

SEQ ID NO: 201802 - RNA, 87 nt, Homo sapiens
ccgaggaagcaaggccgcggggggagaccccaccaccgggagagacaaaggcagcgcgccccgggggagaggcccggcggaacgcag

SEQ ID NO: 201803 - RNA, 70 nt, Homo sapiens
aaacaagagaccacagaaggcccaaagcccagccaaggacccgaaaaacgagccacaccaaaagggaaga

SEQ ID NO: 201804 - RNA, 73 nt, Homo sapiens
gcaaccagggaaacaggagagcaagcggaaaaggaaaccagaaaaacggagccgaaccgggaccccgaaacgg

SEQ ID NO: 201805 - RNA, 85 nt, Homo sapiens
cgcaaacaaccagagacggcgaaaaaccaaaaagccaggaccgaaggagaagaaggagaaggggaggagaaggcaagccggaaag

SEQ ID NO: 201806 - RNA, 83 nt, Homo sapiens
ggccgggggcgaaggacacccgcaggaaccggcagaggagaaacagacggccccgagggagacccaaagcaaagccaccagag

SEQ ID NO: 201807 - RNA, 81 nt, Homo sapiens
cagaccagaccacgaggccgaagcccagccccgccgaccagcccgcgggcggcccagccaccaccgaaaagcgcagccagc

SEQ ID NO: 201808 - RNA, 76 nt, Homo sapiens
caacacaagaacagaagaccagcacagccagaggggcggagaacggaaaagcaccaggaagcagagaggaccgcag

SEQ ID NO: 201809 - RNA, 73 nt, Homo sapiens
aacacgaaggaggccacgcagcaaaccacaggagaggagacggcaaacagaagggcgcaggaaaaggcgcaca

SEQ ID NO: 201810 - RNA, 80 nt, Homo sapiens
aaccgaaaaacaagaaggaaaaacgccacgcaccggagagagcacaggaggaagaacggcaaaacggaggagcagagcga

SEQ ID NO: 201811 - RNA, 62 nt, Homo sapiens
gaccagagggcaaaccggcaggcgcccggacacagaagaggacaggacgaaggacacaagga

SEQ ID NO: 201812 - RNA, 63 nt, Homo sapiens
aaaagcggacacaaagcaaaggagaagacaagggcgaagaggcgggccccaggcaccagagca

SEQ ID NO: 201813 - RNA, 78 nt, Homo sapiens
gagagcccaccaacgcagagaacggaaaacacaccgaggggcccagcggagaagagcccaggcccggaagagaggaaa

SEQ ID NO: 201814 - RNA, 76 nt, Homo sapiens
gccgacagacaaccaggaacgcaagcacaggaccagaaacgaaaggcagcagaagaggaaagccagaaagacgagc

SEQ ID NO: 201815 - RNA, 64 nt, Homo sapiens
ggcggagcgacagacccgcccaggagacaaggcggacggaagagggccaagggacacaaacgcg

SEQ ID NO: 201816 - RNA, 82 nt, Homo sapiens
ccgcagcggcgcagcccacgccagacgaccccacccgcgccgcgacccgggcggaggcagcaccagagaaagacacagggcg

SEQ ID NO: 201817 - RNA, 90 nt, Homo sapiens
ccgcccgcagccgccgcccgccgcagggcgcgacggcccgcacgcgccgcgccaccggcgcgcccgaaaagccaacaggcagaccagaga

SEQ ID NO: 201818 - RNA, 87 nt, Homo sapiens
acgaccggacaagcacaggaggccagcgggccgaggagggcgcacccacgacgcgcacaccaccggcagaccggcgccacagcacca

SEQ ID NO: 201819 - RNA, 62 nt, Homo sapiens
caggcccccacgcgaagcaccgagccagggcgcacaaaagagcacaaaagcaccaaggcgca

SEQ ID NO: 201820 - RNA, 76 nt, Homo sapiens
agcagacggagaggacaaggagagaagccaggcaccgcggaaccgagcagcaggagcggacggacggaagaagcca

SEQ ID NO: 201821 - RNA, 80 nt, Homo sapiens
cgaaacagcccagcaaacagacaagacagcaagcagacccgagaggaagacgcgacaggcagaacaaccgggagggcgga

SEQ ID NO: 201822 - RNA, 92 nt, Homo sapiens
gaaaggggggagagccacaggcaaaaggcccagcagggaaaaagccagcggggacaaggaggcaggccgcacaacccggcaggcaccggggg

SEQ ID NO: 201823 - RNA, 80 nt, Homo sapiens
aggcaaccgggaccaaaaacaccaggcagacgaggcaggaaaagggggccggggaggggacccgaagaggaacccgaagg

SEQ ID NO: 201824 - RNA, 57 nt, Homo sapiens
cccaaacggcgggcggcagggggacaccgcggaggggaccccacaccacaaaccgag

SEQ ID NO: 201825 - RNA, 79 nt, Homo sapiens
cggcccaacacaaccgcgaaaagccccacacgaaaaccggaggccccccccgagcccacacaaagcgaggggaagcggc

SEQ ID NO: 201826 - RNA, 80 nt, Homo sapiens
aaaggcccggggagaagggcgccagcagggagcccagaggagcgggcgaacagggaaagcggggccagccaacaggacag

SEQ ID NO: 201827 - RNA, 84 nt, Homo sapiens
ccgacgccggcaggcggggccgcgccacccgcaaacagggcaggagccagacagaagaaacccgaaaagggcaaaggagagggc

SEQ ID NO: 201828 - RNA, 68 nt, Homo sapiens
ggaggggcacgagcgccacaaccccaggcgaccggaacaccgaaaaaacaaacaacagcagaagcaca

SEQ ID NO: 201829 - RNA, 76 nt, Homo sapiens
gcgcagaaaccccggacaaggcacgccagacgaagaggccccaggaccggcgaggccccccccccagcagcaaagg

SEQ ID NO: 201830 - RNA, 98 nt, Homo sapiens
ccggcgcgcagggcgggggcgccccaggagccggacaggcgggaaaaccgccacaaagcccccaagccacaagcaacgcgcaggccggaagaccacgc

SEQ ID NO: 201831 - RNA, 61 nt, Homo sapiens
gcagaacacaaagcacgcagaggagacaggaaaaggccaaagggcggaagagcgcgggagg

SEQ ID NO: 201832 - RNA, 79 nt, Homo sapiens
gaggcgcccacccccaccaccgaccgcgcacaaaggagcagaagacagagggaggagggccacggacaaacacgggccc

SEQ ID NO: 201833 - RNA, 81 nt, Homo sapiens
cgagcggggggacgccggcggagacgcgggcgagaaagaagcccggcgaggccggagggccacccccggaagcaaaggccg

SEQ ID NO: 201834 - RNA, 36 nt, Homo sapiens
gaaggagcgaagaagaggcacacggaggccacacga

SEQ ID NO: 201835 - RNA, 61 nt, Homo sapiens
acacgcgggcacggccggagggagcgagaacccgagcagcgccagagcaacacaccgcgcc

SEQ ID NO: 201836 - RNA, 69 nt, Homo sapiens
ccggccccccggcggagaagaagcgcggccgcaccggccaagcgaaccccaagcccgacggggacccac

SEQ ID NO: 201837 - RNA, 66 nt, Homo sapiens
ccaaacccaagggggagagggagaagggaaacccagacgacaaggaaggccaagggacccacgacc

SEQ ID NO: 201838 - RNA, 78 nt, Homo sapiens
cccgccaggcgccgaccaccccagcaccagcccagagggaaagcacaccaccccagccagaacaaaaggccagacacc

SEQ ID NO: 201839 - RNA, 86 nt, Homo sapiens
ccgagaggaacccagccgacacgacgccgccggcaggcccgcgcaccagcacaacccccggcccagagaccgccccagcggacgcc

SEQ ID NO: 201840 - RNA, 62 nt, Homo sapiens
cgaggccagcacgggaacgcgaagcgccaaagccagacaaaaccgcgccgaagcaaggggag

SEQ ID NO: 201841 - RNA, 76 nt, Homo sapiens
ggcgggccgggcaggaccggacgggcgccggggcaagagagaaggagcacgagcaggaaggaaaagagagggcagg

SEQ ID NO: 201842 - RNA, 75 nt, Homo sapiens
gcacagagcgagaccaggaaagaagggggcagaagaggggaagagagaaggccacgcccgaccccaagcaacaac

SEQ ID NO: 201843 - RNA, 102 nt, Homo sapiens
gcgcccccaccggaggagcccaccggcccaaaggcccggacccaaaacaggaaagagcgcagaaaggagcaacgcgacagcacccgcacaacaaagaagaac

SEQ ID NO: 201844 - RNA, 74 nt, Homo sapiens
gcgaccaggggcgagagcgggcaccccccaaacgacgcagccacggagagcaaggagacagagccgaacagccg

SEQ ID NO: 201845 - RNA, 59 nt, Homo sapiens
ggagggcggaggaggagaacacagaaccaccaggagagcaaggacaagcaggccacgcc

SEQ ID NO: 201846 - RNA, 80 nt, Homo sapiens
cgagaccagaccccagagaggaggcacagaaggcgcagaacccaccagcgacacaggcggggcgagaagagacgggggca

SEQ ID NO: 201847 - RNA, 70 nt, Homo sapiens
cagcgaaagccagccagcccacacgcacacgagccagagaagaggacaacgaagagaggaaagaagcgga

SEQ ID NO: 201848 - RNA, 71 nt, Homo sapiens
cggcgccggcggcgcgagacggaagggaccagccagagagaagcaacaaccagggcacacaccaaccccaa

SEQ ID NO: 201849 - RNA, 38 nt, Homo sapiens
gcggagcgagaaagagaacaagacaggaaacaaagcaa

SEQ ID NO: 201850 - RNA, 74 nt, Homo sapiens
aggaagaagaaacccacgaaccaaaagggacggacaaaggaacaggaccagaacaccaccgaagccacaccgaa

SEQ ID NO: 201851 - RNA, 76 nt, Homo sapiens
cgaaacgaaggagacgaggcccagaagaacaaaggggacgggcagagaaaccaggcaacaggaagaagaacccaca

SEQ ID NO: 201852 - RNA, 79 nt, Homo sapiens
acgaagagcagcaaaaaagacgcaggcgacaaaagaaaacgacggaccagaggcccacgaaagcgaacaagaggcgcca

SEQ ID NO: 201853 - RNA, 84 nt, Homo sapiens
aacgaaaggcagaagaacaggcagaacagcagcaggagacgagaggaaaaagagcaaagcagcccgaggaggcacgcaaaacaa

SEQ ID NO: 201854 - RNA, 83 nt, Homo sapiens
gcgcgcgagcggagggaggcgggcgggaagcagggaacgcccgcgggaggaagagaagggagaagagggaacagaaggagaaa

SEQ ID NO: 201855 - RNA, 76 nt, Homo sapiens
gaaggaagagaccgcaccacgccgggaacggcgcaagccccggggcagagacacaggacacccacccgccggggac

SEQ ID NO: 201856 - RNA, 52 nt, Homo sapiens
aagaccagcgccagggaaagaaggcgacagaggaggcgaaacgaggaggaag

SEQ ID NO: 201857 - RNA, 59 nt, Homo sapiens
gacgaaagggaagcgggcgagagcgcccgcaaggccaagccggcgaagcccgcgcgcag

SEQ ID NO: 201858 - RNA, 80 nt, Homo sapiens
gcccagaaacgcacacaagaagggggagagacaaccagagcggaaagggagaaaagcccccagaaaggaggcaccaaaga

SEQ ID NO: 201859 - RNA, 80 nt, Homo sapiens
gcgagacaagggggaggaggggacgcagagcagcgaccaggaagccgcggagcgccggagcagaggaaggcaacgggacc

SEQ ID NO: 201860 - RNA, 80 nt, Homo sapiens
acccagacaaccacgagccgaagagaccgcaacccgggaaagagcgaaacacagacaacacaagggggaaagaaaggaag

SEQ ID NO: 201861 - RNA, 78 nt, Homo sapiens
caggaggggagcgcccagagaaggcccaccacaacaccccagggcacagcgggaagcgaggacgggggaagaccgcaa

SEQ ID NO: 201862 - RNA, 77 nt, Homo sapiens
ccgccccgccgcccgagccggcgccaagcacccgagggacccgaggagcccaccaagccgaccgcaggcaagggccg

SEQ ID NO: 201863 - RNA, 74 nt, Homo sapiens
ccggcgagaggcggcgccgccccaagagcgcagacggccagccgaaaccacggggcaggacgcaggcagccaga

SEQ ID NO: 201864 - RNA, 71 nt, Homo sapiens
gccaccgaggcgaggagaggagagccaggacaaggcacgaggcgcggcgaccaccacagcagagcccggcg

SEQ ID NO: 201865 - RNA, 61 nt, Homo sapiens
gacaggggaacagacagaaggagcaggaaccaaaggacacgcagaccccaccaagaggcgg

SEQ ID NO: 201866 - RNA, 77 nt, Homo sapiens
gcgcgacgagcggagggaggcagccagcggggggcagggaaaggccaacaggaggaaaccagaaccgggcaaggaaa

SEQ ID NO: 201867 - RNA, 76 nt, Homo sapiens
aaacaaacgccagaccagcgacccgagacaggaagaagccaagaggagaaagaagcgacacccacacgaaggccca

SEQ ID NO: 201868 - RNA, 83 nt, Homo sapiens
gccggggcccccgcggcgccgggaggaggccggggccgcgcgagggcgcccagcggcccgccagcaagaggaaaagcagagac

SEQ ID NO: 201869 - RNA, 80 nt, Homo sapiens
gaaacagccgagacaggggcgaacaccggggaggaggacgggcccagcgacgggaagcgggggacaccacccggaggagg

SEQ ID NO: 201870 - RNA, 79 nt, Homo sapiens
cccagccgcgcccacccaggcccagggggcgcagacaaaaacgccacccccagggcccaaggccggccaccagggcccg

SEQ ID NO: 201871 - RNA, 71 nt, Homo sapiens
ggaggacacagccggacccgggccaaggaagcacgggaagaacagaaaagagaagcaccacggaaaccacc

SEQ ID NO: 201872 - RNA, 76 nt, Homo sapiens
aaaaacaggaaagcaggagagcaggaagcaccaaagaaaacaccccaagaagcacacccgagaaagaaccagaccc

SEQ ID NO: 201873 - RNA, 117 nt, Homo sapiens
cccaccagccgcaccaaggagacaggacgaagcccaaaccacaagccacaaaagggccagaagcccccaggaggagaacgagcaacggaagccagaagaagcacccccagcaggcca

SEQ ID NO: 201874 - RNA, 70 nt, Homo sapiens
ccccagagaagacacccccacccaacacagaccaaaaacccagcagaagaagcacacaagccaggacaga

SEQ ID NO: 201875 - RNA, 78 nt, Homo sapiens
cgagaccccgccaccggagccaaacagacaccagagaagccagagacaagcaggggcacagagacaggcaagagacca

SEQ ID NO: 201876 - RNA, 79 nt, Homo sapiens
gaaggaccaagaaccaggcagccccagcgaagagagcggcaaaggcaaaagagaaaccgcgccgaccagcgcaggggcc

SEQ ID NO: 201877 - RNA, 73 nt, Homo sapiens
cggaggagaggaccggcgccgaacacgacggcacaggggggagcgacccacagggcccggcggccacccggcc

SEQ ID NO: 201878 - RNA, 78 nt, Homo sapiens
gggcggcgcaggaggagccgaggcgagccaacagcacggagcaagaggcagacagaccgagacgggcaaccaacaaga

SEQ ID NO: 201879 - RNA, 68 nt, Homo sapiens
cagagccagccagaaaaaacacagccgacagacgccaccaaaagcaccagccccgaaagaagaccgac

SEQ ID NO: 201880 - RNA, 62 nt, Homo sapiens
ccacggagcggcccggcacgcgccagcaggcaagaagggagcgcagccaggcgaccaggagc

SEQ ID NO: 201881 - RNA, 82 nt, Homo sapiens
aacgcggcgcggccggcgccggaaagaacaggacggacgagaagccaggacaggccaacaagaaggggacccgacaggcgag

SEQ ID NO: 201882 - RNA, 74 nt, Homo sapiens
accccacaggaaggcacacagcagcaagagcccaaacgccaaacccgaaacagcgcgaaggcaggaaaaaaagg

SEQ ID NO: 201883 - RNA, 69 nt, Homo sapiens
cgagaaacacaaacaaacaaggacggggacacacaaagcaaccggccccgggcaaggggagcagacaac

SEQ ID NO: 201884 - RNA, 84 nt, Homo sapiens
aagacagccaagaaaacaggaagagggggaggcaaagccgaaagggagaggcaacgggaggagaaccaggaccaaagcaccagc

SEQ ID NO: 201885 - RNA, 80 nt, Homo sapiens
gagacaacagcaagcgggagaaagaccaggaacggagaagaagcagcgcagacagaccccgcccagaacacacggggaga

SEQ ID NO: 201886 - RNA, 80 nt, Homo sapiens
gagaagaagaccgaaagcaccgcggcgcgccggaaaggccagggaacgaagcccaaaaggcagagacggaccgagacagg

SEQ ID NO: 201887 - RNA, 63 nt, Homo sapiens
accaagacagcgccgcagacgaaaaagaacccacggcaaccaacgccgaagcccgacacacag

SEQ ID NO: 201888 - RNA, 68 nt, Homo sapiens
acaaaaaccgacgagccagacacgaaaacacaaagagaagaccgaaggcggcgcaccgcgcaagcaag

SEQ ID NO: 201889 - RNA, 89 nt, Homo sapiens
gcagcggaggagcccgaccgacccgacaggacccagaccagccaaagagaagaagaaaggaagcaaaacaaagaaaaaaaaaaacccaa

SEQ ID NO: 201890 - RNA, 55 nt, Homo sapiens
ccgcagccacggaagcgacaccggaggaagacccacacacccacggcagggcaac

SEQ ID NO: 201891 - RNA, 87 nt, Homo sapiens
aagcggcgaccgccaccgggagggggaagagccgggagacaagcagaccggaagaccgacggaagaccacaccccgagggagcccag

SEQ ID NO: 201892 - RNA, 71 nt, Homo sapiens
caaaagcaacagaggcccaagaacaggcacagaacgaaagacagaaacacgaggacgaaaagaccggaccc

SEQ ID NO: 201893 - RNA, 83 nt, Homo sapiens
ggagagccgagcccaaggcaagacccaaggcgacgaccgacaggggggaaaggccggcaaagcaccaggcacagcaagcgccg

SEQ ID NO: 201894 - RNA, 73 nt, Homo sapiens
cagaggagaaacagacgcaccccccgagcccaaaaagaccaaaggcgccagggcagaaccgcggcagcgagag

SEQ ID NO: 201895 - RNA, 35 nt, Homo sapiens
ccgacagccgcagaacagggccaacggcgaccgcc

SEQ ID NO: 201896 - RNA, 119 nt, Homo sapiens
aggcaccgggacggaccgagaccggaccgagagcggaccgagagcgcgaaacgcacgagaagaaacaacgaacgagcaaggaagggccaaggcagaccccacaccggagaacgcaacca

SEQ ID NO: 201897 - RNA, 74 nt, Homo sapiens
cacgaagcggccgcacaaaaagggacgcaacaggagagagcgacgcaaaaacacagacaaagaggccagccacg

SEQ ID NO: 201898 - RNA, 75 nt, Homo sapiens
gcccggccgacccggcggcgcgggccagcggccgcgaggccgcagccccgaaaaaggcacaaacccagcacagag

SEQ ID NO: 201899 - RNA, 78 nt, Homo sapiens
ggcgcggcccgggcagccgcgccccagcgggaaaaccgccacaaagcccccaagccacaagcaacgcgcaggccggaa

SEQ ID NO: 201900 - RNA, 57 nt, Homo sapiens
agcaagcacaccgaaaacccccccagcaacacgcgcaagggaggaaggggggacacc

SEQ ID NO: 201901 - RNA, 71 nt, Homo sapiens
gcccccaagccccccggcgacgacgcccgagggcgaaaaaacgagaaagaaagcaggagaccaagaaggaa

SEQ ID NO: 201902 - RNA, 53 nt, Homo sapiens
caggggcgcacaccacaagacccccagcaccccgggcagcggagaggccggcc

SEQ ID NO: 201903 - RNA, 80 nt, Homo sapiens
ccccaaggaggacgagggccgggccgggcgcgggcgagaaaggccgacggaaagagcaaacagcaagcaacgccgcacca

SEQ ID NO: 201904 - RNA, 72 nt, Homo sapiens
ccgagcccagggcggaggacgggccccccggaagccagaggacgggaagccgcgggggggaaccccacccga

SEQ ID NO: 201905 - RNA, 32 nt, Homo sapiens
cccccagcgggcagcagaaccagagccgcaac

SEQ ID NO: 201906 - RNA, 84 nt, Homo sapiens
ggcgggggcaggcggagaaggagacaccggaggacgaagagggggagaggaaccagagaaggagaaacagcagggccaaaggca

SEQ ID NO: 201907 - RNA, 55 nt, Homo sapiens
cagcgcccagcagcgcaggaagcagccagccaccaagggaggagagaaggaccaa

SEQ ID NO: 201908 - RNA, 84 nt, Homo sapiens
acagcagcaaaggcaaagacgagacaccgccgggaggagggcacagagacgggcgccagacagaaggccaggcgagacgcaaca

SEQ ID NO: 201909 - RNA, 77 nt, Homo sapiens
accgaaaccacagcgaagggaaaagaaggggccggccgccaagacacccccggcccggcacagaaaacacgcaacac

SEQ ID NO: 201910 - RNA, 82 nt, Homo sapiens
cgcccgacgcgacacggacacggcgcggcgcggcgcgccggagcgcgacccggccggcgccggacagggaaagaccaggaga

SEQ ID NO: 201911 - RNA, 62 nt, Homo sapiens
gcaagaggcggcccacaccggcagaacacagcagggcggaggaaaggcagaaaaagggagcg

SEQ ID NO: 201912 - RNA, 69 nt, Homo sapiens
gaaaccgcgacgaggcccagaggcagaaaagcgggaaaccgaacgcagacgcaaggagcccgaggcaag

SEQ ID NO: 201913 - RNA, 76 nt, Homo sapiens
acgaaggaggccagcaaagaccgcaaaaaaagaagaccagcaacaggggacaaaaagaaggggagagacccaacaa

SEQ ID NO: 201914 - RNA, 71 nt, Homo sapiens
acaaacgggggacaacccaagagaagaagcgcgagagacagagccacgggcccaaggggcgaaaccgaccc

SEQ ID NO: 201915 - RNA, 59 nt, Homo sapiens
cgcgggggcacccggggcccccggccaccaccggccccacaccacacaccccccccggc

SEQ ID NO: 201916 - RNA, 62 nt, Homo sapiens
aggcggaacaccgcacagagcagccggacgccccgaccaagagccagacgcccaggcgccgc

SEQ ID NO: 201917 - RNA, 57 nt, Homo sapiens
cagagcagcacaagccagaaccgaccgcgcacaggaaagaccacagcaagaccacgc

SEQ ID NO: 201918 - RNA, 82 nt, Homo sapiens
ccggcgggagccccgcgacgcgcccggcccggagcccccagcgcagcggccgcggaggggccacggggccggggagccacca

SEQ ID NO: 201919 - RNA, 96 nt, Homo sapiens
gccccgaggaggaggaggaaacaggagcaggggcaccgcggccccgagaaacaagaaacgaggaaagaaccaaggaagacacccgccgacacacca

SEQ ID NO: 201920 - RNA, 73 nt, Homo sapiens
cacagcaaacccacccagcacaccccgcgaaaggaggaggcacagaggcacccaggacgcagacgaacccaag

SEQ ID NO: 201921 - RNA, 55 nt, Homo sapiens
cgacaagaccaagacacccaaggcaacagcagcgcaggagaaggagaaagaaaaa

SEQ ID NO: 201922 - RNA, 83 nt, Homo sapiens
cggcaagagagagaggaagcagagaacccgcacacccagggaacagggggagaggaagagagaagggcacagaccaagacaac

SEQ ID NO: 201923 - RNA, 67 nt, Homo sapiens
aaaccgagaacccgaccccgcggagacagcgagacccgccaggagcaaagacccagaaaccaaggcc

SEQ ID NO: 201924 - RNA, 74 nt, Homo sapiens
aaagacgaaaaccaccggaacggcgaagaggcaccaaaaagaaccgcagacaggcagcgagggccggaaagccc

SEQ ID NO: 201925 - RNA, 64 nt, Homo sapiens
gaaaaggcaacaccgcacaggccagccggcaaaaacgggcaccagcgggcacaccaagaagcgc

SEQ ID NO: 201926 - RNA, 73 nt, Homo sapiens
aggacagccacaccccaagagaaaaccagaaggcaccgacaggaaaggaaaaggagaaccaggcacccggggg

SEQ ID NO: 201927 - RNA, 70 nt, Homo sapiens
ggccagcggaagaggagcggcgaaccgggcgcagggagcgggcgagcgaccgaagccaggagggaacaga

SEQ ID NO: 201928 - RNA, 86 nt, Homo sapiens
ccaaggaccagaccacaaaaagcaaacgggcccagaacagggaacccgaaacgggacaaggaaaggaaaaaacgagaccgggggga

SEQ ID NO: 201929 - RNA, 74 nt, Homo sapiens
acccggccgcaagagaaccaagagaccgcgggccacccccgccgcagaacacaggaccagacacaagcaagcgc

SEQ ID NO: 201930 - RNA, 62 nt, Homo sapiens
cggccccacgcacgacgagagggacagcacggaggagcagcagaacggagccagcacaggcg

SEQ ID NO: 201931 - RNA, 102 nt, Homo sapiens
agagaacgcccgggaccgagcacccgccccgggcaccaacaagcgaaaccacaacacccaaaagcaaggaagaccacggacgaccgacggcacgcaggacag

SEQ ID NO: 201932 - RNA, 78 nt, Homo sapiens
caaccgggcggcaagcaccagcagggaaggagaagagagcaagggcggcagcgggcccggagggaccaagccgacgga

SEQ ID NO: 201933 - RNA, 67 nt, Homo sapiens
cacgcccggcgccaaccgaacgcaacaaccaagccagaacggaagaccaaccagaagacacacaaag

SEQ ID NO: 201934 - RNA, 72 nt, Homo sapiens
ccagaggccgacggccccaggggaccaggggacgaagggaacaggacgaaaggacaggaaacagaccacagc

SEQ ID NO: 201935 - RNA, 78 nt, Homo sapiens
cacgcggccaaacccggaggaggaggcaccggagacgcgggcagaaaaaggaaaggaaggcggcgggggagcacgagg

SEQ ID NO: 201936 - RNA, 70 nt, Homo sapiens
gcaaaaagacccaacagcacagcaaaaagagccgcagacgcacagcaaccaccggacccgaaggccacca

SEQ ID NO: 201937 - RNA, 83 nt, Homo sapiens
gggcccgggacgcccgagcccgacagcagcggagcggagacgcagccgccgcgggcgaaggcagacccacccacgggacagag

SEQ ID NO: 201938 - RNA, 78 nt, Homo sapiens
cagagcggaagccaaaggcaacgacccgccaacaccacaacccccgagaccagcgggaccaggagcggcggacggcgg

SEQ ID NO: 201939 - RNA, 78 nt, Homo sapiens
gagagagaagaggagagagaagacagaaaaagccaccggagcgaagcgaaggaagcgaggacaacaccgggagagcga

SEQ ID NO: 201940 - RNA, 69 nt, Homo sapiens
agaagaaagaaccagcagcggcaaagaaggcaaccaagcaacaccaggcaggaggagagcgacacgcgg

SEQ ID NO: 201941 - RNA, 77 nt, Homo sapiens
cggccacccggcccccggcaccaggccgaaaacgaagcagaggaacaacaagcgggcacagagagacccagcgacga

SEQ ID NO: 201942 - RNA, 80 nt, Homo sapiens
cgaaaccaaccaccaaggaagccaacggaccaaaaacaccacgcaaggaaggaagcagccgacacgagcggcaaaaacag

SEQ ID NO: 201943 - RNA, 77 nt, Homo sapiens
ggaagcagccgccacggaggcaaagcagccggcaagaacgccccggcaaggacggaggcaggcaccaccaacagcgg

SEQ ID NO: 201944 - RNA, 61 nt, Homo sapiens
gacgaacaccgagacagaaaaagaagaagcgacaggcagaaaggaagcacgcgcgcggaca

SEQ ID NO: 201945 - RNA, 77 nt, Homo sapiens
aaggcaacacagaccgcacaaggaaaagaagcccaacccagaaacagcaaaggaggaaacaccacacgaaacacaga

SEQ ID NO: 201946 - RNA, 75 nt, Homo sapiens
caccccagcaccgcccagacgcagaccggccagcggaccaaagggagccacagcacagcagaggggaaagaagca

SEQ ID NO: 201947 - RNA, 70 nt, Homo sapiens
acaggcggcaacagaggagccaacaccacagcgaccgggcaacacagggggcaggggaacagccaccgcc

SEQ ID NO: 201948 - RNA, 58 nt, Homo sapiens
agcgggaagagacagccaaggccggacacccaacagcacgcagacaaggcaccaacag

SEQ ID NO: 201949 - RNA, 73 nt, Homo sapiens
cgaaaaacagagcaaggagagaggaaaaaagccgcaagagaggagaacagaaaacaaacaaagaaaggaaaga

SEQ ID NO: 201950 - RNA, 73 nt, Homo sapiens
cggccacgccgggcaccccgagccaggccgccgcaaagcagaaaaccagggcacaaggccgagagcccccagc

SEQ ID NO: 201951 - RNA, 72 nt, Homo sapiens
gacggacgaggagggccccgaaggaaccacggggggagaagagggagacccgaacgaagacgcagcccagac

SEQ ID NO: 201952 - RNA, 41 nt, Homo sapiens
ccccagccagggaacagacggggcaccacgggccaggcggc

SEQ ID NO: 201953 - RNA, 86 nt, Homo sapiens
cggccgggggcggccacgggagagccgggccggcggacgcggcgccacgcagcagagcccgcaggaagcacacccaggcggcagac

SEQ ID NO: 201954 - RNA, 61 nt, Homo sapiens
gcgaaccgcccgcggaaccacagcccagcacggcagaccagccagccccaagcagccgcac

SEQ ID NO: 201955 - RNA, 71 nt, Homo sapiens
ccaggaaccacgaagaaaagggaaaacaccaaagcgagcaacgaacgaggaagggagcgggccagagacaa

SEQ ID NO: 201956 - RNA, 80 nt, Homo sapiens
caccccggggcccaggaagggcggcccaggacccaaagacaggaccacgcaccagcagagaaggaaagcaaaccgaagca

SEQ ID NO: 201957 - RNA, 73 nt, Homo sapiens
cacgaccaccgccaacaggccccgcccccacggaccacggagaaccaggacaaggaaaggaaacagacagcgc

SEQ ID NO: 201958 - RNA, 75 nt, Homo sapiens
ggggaagcgcaaaaacaagacggggcgccccacagaggggcgacgggacggaacccgagcagcagaagcagcaga

SEQ ID NO: 201959 - RNA, 72 nt, Homo sapiens
aacggaggaagcagaaccaaccaccaaagaccaagggaaaaaaccaggcagccaaacgcgccagagaaccag

SEQ ID NO: 201960 - RNA, 78 nt, Homo sapiens
acccgcggggccgccgcaacgggcaccacgccggccacccacgcccacggccaccgaagaggcagagagacgaagaga

SEQ ID NO: 201961 - RNA, 71 nt, Homo sapiens
agcgaggccacacccgaaagcaagcccagaaggggacaaaggaaaaagaggaggaaaacagcagggacgaa

SEQ ID NO: 201962 - RNA, 87 nt, Homo sapiens
gagaaagaggaagaaaagaaggcggcgaagcaaggagaaaaggcagagaacgcagaagcaacacaagaagacaaaggcaaggccgag

SEQ ID NO: 201963 - RNA, 67 nt, Homo sapiens
ggggggagacgccgagggacccacacaaccaccagcgaaccagccaagaaaaaaagagcagaacgac

SEQ ID NO: 201964 - RNA, 50 nt, Homo sapiens
gggaccggccgggcaccagccagcaaaccagagcaccgccggccaggagg

SEQ ID NO: 201965 - RNA, 77 nt, Homo sapiens
gcacacagcagagagccgaaagaggccaaccaaggccaaagaaaggagacaccgaacacccccaccagaggagagac

SEQ ID NO: 201966 - RNA, 57 nt, Homo sapiens
cgcgccggagcggagcgcgggcgccggggagccaggagccagacagaagaaacccga

SEQ ID NO: 201967 - RNA, 66 nt, Homo sapiens
acgcggagcccaagaaacgggcagccaggcccccacagcccgcagaacgccaaaagacgaacacaa

SEQ ID NO: 201968 - RNA, 70 nt, Homo sapiens
gccaaaagcgcccaggggaaccacaaagaagacaaagcacgcgggaagaaagcacgggaaaaggccgggc

SEQ ID NO: 201969 - RNA, 66 nt, Homo sapiens
caaaggaagacacaacagagcccaaaaggcagagcgaggagagaagaaggagggaaagccaaacaa

SEQ ID NO: 201970 - RNA, 83 nt, Homo sapiens
cgccgagcccagcgagcgacaacccccagggcccagccgcacaagagcagaagcaggggcaggaggagcgagacaggaccaac

SEQ ID NO: 201971 - RNA, 70 nt, Homo sapiens
ggaaaagaagaagaagaccacaaaaaagagacccacagccagcaacaccgacacaggcggagaccgggag

SEQ ID NO: 201972 - RNA, 76 nt, Homo sapiens
ccagaagggccgaccagaaaggaaccccaagcgacgcaggcagaagcgagacggcaagccaagaggcgaaaacagc

SEQ ID NO: 201973 - RNA, 72 nt, Homo sapiens
gcgggggagggcggagcggcgcggccccagcccccgggggggcccgaggacccggccagaccccaacagaca

SEQ ID NO: 201974 - RNA, 80 nt, Homo sapiens
aaaccccaggccaagcagccaccagcagcccccagagcgggaccacagaccagaaccgaccacagaccacgaagaccagc

SEQ ID NO: 201975 - RNA, 66 nt, Homo sapiens
cacccgaccggaggagccaccccagggggaaggggggaagaggaagaagcaaacgacagggaacca

SEQ ID NO: 201976 - RNA, 89 nt, Homo sapiens
agaggcggccaaggggacgagcaaaggaagcgcgaacagcagcgcagggggacagaggagccaaaggccaaaccaccagcagacagcga

SEQ ID NO: 201977 - RNA, 67 nt, Homo sapiens
aaaacaggcccggcgagccccgcagcccgacaaagggaaccgacagaacggagaagcagaaacagag

SEQ ID NO: 201978 - RNA, 84 nt, Homo sapiens
aaagcgccgcgaagcgccgccggccccgccgccaagaggagcgagcggacccgcgagggcgggaaaacggcacaaggcgacgag

SEQ ID NO: 201979 - RNA, 103 nt, Homo sapiens
cgcaaacagcccgccagacacggcaggccaagaagcaccgagcgcccaggaggggcaggagaggaagggaaacaaggaagagccaggagagcccaaggaagca

SEQ ID NO: 201980 - RNA, 81 nt, Homo sapiens
gggaggacaggccagcgcggccaagacccgccgcaaggaagcagaggggaaaagcagggaccgcgccgcccaggggagcgc

SEQ ID NO: 201981 - RNA, 76 nt, Homo sapiens
cagagcccacccaacgccccaccggggaaaacggaaggagccagaagccccagggaccgcgcccccaaccacgacc

SEQ ID NO: 201982 - RNA, 111 nt, Homo sapiens
aggcgccagagagagcgcggaacagcacagcccagagagccgacgagacgagaaagacgccggggccagcaggccccagagcagacacaagcccccaggagaagcaggcgg

SEQ ID NO: 201983 - RNA, 76 nt, Homo sapiens
gccaagaggcggccaaggggacgagcaaaggaagcgcgaacagcagcgcaggaaagaccacagcaagaccacgccc

SEQ ID NO: 201984 - RNA, 56 nt, Homo sapiens
ggaaacagcccgcaaaggacagcggagacagccggaagaaacgccaaaagaaaccg

SEQ ID NO: 201985 - RNA, 91 nt, Homo sapiens
gaaggaacacgaggcagggggccacacgcaaggggaacaggccccaccccaccggcaccccgagaagcaagaccaaccccccccccccagc

SEQ ID NO: 201986 - RNA, 89 nt, Homo sapiens
agcgcagaccgcgcccgccgagccggcaagagcgggaaggagggcgcacagcgcaaggggcagcgcgaaggagaagcggggccacagga

SEQ ID NO: 201987 - RNA, 69 nt, Homo sapiens
cagcgaaccaaggacggccagccgaagcccgcccaggaagaacccaagggggccaaacaaccagaaaag

SEQ ID NO: 201988 - RNA, 76 nt, Homo sapiens
agaagccacccaccgacgccgacaggcagagccgcaacccgagagaggaccaaacgcccccggcgcgccgaaacgg

SEQ ID NO: 201989 - RNA, 75 nt, Homo sapiens
ggcagaagagggaacagaggaagacacacggcccccagccaggaacagagccggcggcacgacagcaaaagccag

SEQ ID NO: 201990 - RNA, 65 nt, Homo sapiens
ccccgaacccagccacgacagccgagggggccaggccgagggaacaccaccgcacagcaccggag

SEQ ID NO: 201991 - RNA, 70 nt, Homo sapiens
gcaggaacaacacaaaggaacccagcaaggaaagagaggaaggagaccggcgcgcccagaccgcggaagg

SEQ ID NO: 201992 - RNA, 77 nt, Homo sapiens
gcggcacccgggacaaggcagacgggagcgcaaggcgccccaaggccagacaaaacggggcacccggggcccacgcc

SEQ ID NO: 201993 - RNA, 74 nt, Homo sapiens
ggaaagccggacccgcccagcagaagaagagaggagggagaacacagaaaccggccccagaagggagaagagcc

SEQ ID NO: 201994 - RNA, 73 nt, Homo sapiens
ggggagacccggggacccccgacgccaggcagcgcccccaaacgacgcaaaacgaagaagcaaggccgacaac

SEQ ID NO: 201995 - RNA, 80 nt, Homo sapiens
cagcagcggcccacgcagaacccgggagaggagaccagaacgaacccccccccccgccggaggacggaggagagaagaga

SEQ ID NO: 201996 - RNA, 85 nt, Homo sapiens
cgcgccacggggcggccaccgggcggcggggagcgggagcgcgcagcaggacgggcccagggaacacgggagccccggaccaccg

SEQ ID NO: 201997 - RNA, 77 nt, Homo sapiens
gaaaaaagccacacccaaaaggcaacagagcaagagggacagcccaagaaggggaaagacgacgcaaccaaaggggg

SEQ ID NO: 201998 - RNA, 51 nt, Homo sapiens
agaagacgggaaacacgggccacagagggaacagccaaggccacagacaac

SEQ ID NO: 201999 - RNA, 69 nt, Homo sapiens
gcgcgccgggagagagcgagccaaaaacagacggagaagagcaaagaggagagacaccggagaggaggg

SEQ ID NO: 202000 - RNA, 73 nt, Homo sapiens
caagaagggcgcagcggaggaggaagaaagccagggggaggccgcccacagaacagcaccgaagggcacaaac

SEQ ID NO: 202001 - RNA, 79 nt, Homo sapiens
cggggggccagggggccgcgaggagccccggcgcagcgcaccccccacgggcagcagggggagaagcagagaacggggg

SEQ ID NO: 202002 - RNA, 75 nt, Homo sapiens
gaggccaaagaagcagcaaccgaaaggcgagggaaaaagacggagaaagaaggacagcgggaagccaaagggaca

SEQ ID NO: 202003 - RNA, 84 nt, Homo sapiens
agcgggagggcgccaaacaggccacagcaccgggaccaagaagccaggcccagggccacaggaccgccaccgagcaggaaagcg

SEQ ID NO: 202004 - RNA, 62 nt, Homo sapiens
cagaagggaggcccaagacccacaacaaaagggaaagcaacggcgcaagcggcggcggcggg

SEQ ID NO: 202005 - RNA, 82 nt, Homo sapiens
ggggaaaccaggcgcccggaagggaagggaagggagccgggcgcgcgggcaggaagcccggggcggcgacggagcacgaccc

SEQ ID NO: 202006 - RNA, 81 nt, Homo sapiens
agagcgacagcggcgagcagaacacggcgagcggaaaaagcggggaaggggggcaaaaaaaagaagcaagcgaagcaccga

SEQ ID NO: 202007 - RNA, 73 nt, Homo sapiens
gcccggaaagcgccgcccagcagccgcagagaaggaacagaacagacaccaccgaaacgcgccaagcagacag

SEQ ID NO: 202008 - RNA, 69 nt, Homo sapiens
ccgcggcggcgcggagcacgggcagaaaggagccggagccccagggagaaaaccccaccccgggcaaag

SEQ ID NO: 202009 - RNA, 112 nt, Homo sapiens
gccccggcccacagcacccagcagggcgccagcgacaggcgcacacgcccaccggaagcagaggaacccaacgacaccccgcacaaccacgcgcgaccaggcgcgacgcccg

SEQ ID NO: 202010 - RNA, 74 nt, Homo sapiens
aacgcacggacagacgcgcagaaacagaaggaaacgaaggcagcaaaaagaagagcagaaacgaaggaaaaggc

SEQ ID NO: 202011 - RNA, 80 nt, Homo sapiens
cggaccgcccccgccaacgaagaccgagaccagggaccgccagcaagaagaaggaacacccggagccccgagacagaaag

SEQ ID NO: 202012 - RNA, 53 nt, Homo sapiens
gcggagcgagaagacagggccgcggacacgcgggcccgccgagcgcgagcccc

SEQ ID NO: 202013 - RNA, 75 nt, Homo sapiens
gagagacccgggggcgagcacaaacggggcggggccggggaacacacaggacccaaagacaggaccacgcaccag

SEQ ID NO: 202014 - RNA, 69 nt, Homo sapiens
cacgcgggccggcgaaagcgcgggcgcccgcacacacccgccacccgggcgagaaccccagccaccccc

SEQ ID NO: 202015 - RNA, 83 nt, Homo sapiens
acagaccgagacaacacggaccagcaacagcagaaaaggaagcgcacaggggagaagacgacggggcgagccgcgggaagcgg

SEQ ID NO: 202016 - RNA, 86 nt, Homo sapiens
accagaaagaggaagccaggacagggcacacaacaacgacagaacgcggccaaggggcggaacaacccacccgccaagagccgcag

SEQ ID NO: 202017 - RNA, 80 nt, Homo sapiens
ccaggagcaagggaaagaacccggcggggaaaagggaaggaaaagagacgcagccacagaccggcccacaaaaagccgcc

SEQ ID NO: 202018 - RNA, 88 nt, Homo sapiens
caggagcccgagcgacccacacgaggccacccagcccaccaaacacgccggaaaccccgcccacagcacgaggccggcagaggccgcc

SEQ ID NO: 202019 - RNA, 117 nt, Homo sapiens
gccgcgggcgcagcgggacgagcacccccggaggcacggaaaggaggaggagcccaggaggacagaaggcaaagcaacaaccccagaaaaacagagaggacaaaagaggagaaacag

SEQ ID NO: 202020 - RNA, 77 nt, Homo sapiens
cagaaagcaggcgaacccgcggcgcaaaacgaaaaggggaagaaggccaaccgggggccaagggggaagggaggcag

SEQ ID NO: 202021 - RNA, 80 nt, Homo sapiens
aggacccgggccagggaaggaaaaaggaagaaagggcaggcgagagagggggaacaggaccaacggaacaacacagggac

SEQ ID NO: 202022 - RNA, 86 nt, Homo sapiens
aggaacagacccaacaaagcgagaaaaggcaacagcagcagaaaaagcaaagcggagaacaaaagcgcaaggagcagcagcgccca

SEQ ID NO: 202023 - RNA, 79 nt, Homo sapiens
ccgcccggggccccgcggcgcaggaggcggggagcgcagagcgggcgagcgcgagcaaacgagacggaagaaaaaaccg

SEQ ID NO: 202024 - RNA, 78 nt, Homo sapiens
gcagcaaccagcaagccccccaggagccaacgaaaccaggcacccggacacgaccaaaacccccaaagccaccagaaa

SEQ ID NO: 202025 - RNA, 70 nt, Homo sapiens
gaccaaaaacgcaacaacagacggccggcccggccgaaggagaaaccaacagaacgcaccccacgaacaa

SEQ ID NO: 202026 - RNA, 59 nt, Homo sapiens
agcaaccaaacagacaaccgcacccacaaaggagaccgaggagcccaggaggaggaacc

SEQ ID NO: 202027 - RNA, 64 nt, Homo sapiens
acgacgggggggaggcggcagcgcaaccacgagacggccccaagaaggccgggacagcagaaaa

SEQ ID NO: 202028 - RNA, 76 nt, Homo sapiens
gcggccgcaggagaagacaacagcagagccgcggccccagggaaagacaaagagagacggaaagcccggccagaag

SEQ ID NO: 202029 - RNA, 73 nt, Homo sapiens
caaaccaaaaccacaaccaaagacaaggccaacacccagagacgcgcccacacaccagcccacgccaccggcg

SEQ ID NO: 202030 - RNA, 58 nt, Homo sapiens
ggcagacccggggaccgggaagacaagcagaccggaagaccgacggaagaccacaccc

SEQ ID NO: 202031 - RNA, 77 nt, Homo sapiens
gacaacacaccggaggcagggggacacagccacccagagccaaagcagacccccaagcgagcggagcggaaggagcg

SEQ ID NO: 202032 - RNA, 71 nt, Homo sapiens
ggaaaggaaccaaccccaagggagacggaacaccaaggaccgggggcgcagacggcggaggcccccagagc

SEQ ID NO: 202033 - RNA, 42 nt, Homo sapiens
gcggaggacacggacgggcaagcagagagaagcccgcggaaa

SEQ ID NO: 202034 - RNA, 83 nt, Homo sapiens
gacccccccgccggggagggcccagcgcaccgacaggcccgcagcccccggaagccaaagacccccagggacccggccccagc

SEQ ID NO: 202035 - RNA, 75 nt, Homo sapiens
aggcgagccgcgagagggccggcaggcccgggaaggccgccaggagcaaggcagcgacccagggcacagcggggc

SEQ ID NO: 202036 - RNA, 83 nt, Homo sapiens
gcgcccggcggaaaaccgaagggaaggccagcagcgcgcggagaagaacggggagccagggccaagagggcgcgcccagccaa

SEQ ID NO: 202037 - RNA, 71 nt, Homo sapiens
gcgggggcagccgcagaggcgcggacaagcagaccaggaccggagaaaacgggacaacaccgaccagaaaa

SEQ ID NO: 202038 - RNA, 79 nt, Homo sapiens
agcagcacccacagccaaggcgggagccacgaagacccgaggaccgggaacgaaggggccccgaggaagcagaagccga

SEQ ID NO: 202039 - RNA, 59 nt, Homo sapiens
aaaaccggaagggccgaagccgccacggcaggccgggcgaggcgaggccacccgggccg

SEQ ID NO: 202040 - RNA, 68 nt, Homo sapiens
agggcgaagagacaaacaaaacccaccgagaaggggcgaagggaccgcagaaaagcgcggaagcagag

SEQ ID NO: 202041 - RNA, 57 nt, Homo sapiens
caggcccgacggccggccggccacggcgcggcacaggcgccggaggcgccccggaac

SEQ ID NO: 202042 - RNA, 71 nt, Homo sapiens
cgggccgagagccgcccgggccagcggccgcgcacccccggccggaggcaccagcgggcccccggagggcc

SEQ ID NO: 202043 - RNA, 79 nt, Homo sapiens
ggcgaacccacccggcagacgacaacccagcggcacaggaccagaagaagcaagacgaaaacacacaggagggaaaacc

SEQ ID NO: 202044 - RNA, 71 nt, Homo sapiens
aagccccgccaggcccaaccacaccaggcaagggaaggaaaacgaaaaggaaaggaggccagacacaaaac

SEQ ID NO: 202045 - RNA, 70 nt, Homo sapiens
agaccccgacccagaaaacgaagacagcaaagccgggacgggaaaaaaaggcgccacaagggaaggacac

SEQ ID NO: 202046 - RNA, 78 nt, Homo sapiens
caaccaacaaccacgggaagccgcggccccaagcaccagcccacgcgagagcagcaggaagaagaggaagaaaaacca

SEQ ID NO: 202047 - RNA, 61 nt, Homo sapiens
agccaccaggagcccgagagagaagggaggaagaaaagaaccacaagagaacacggagaga

SEQ ID NO: 202048 - RNA, 78 nt, Homo sapiens
gcccaggaggaagccacgcaccgcgggggggggccccacccgaggcgcgccgagcagcaaagaagaagaagggaggga

SEQ ID NO: 202049 - RNA, 33 nt, Homo sapiens
aaaaaaaaacgcgaggaaaggaggcacaggagg

SEQ ID NO: 202050 - RNA, 67 nt, Homo sapiens
aaagccaggaagaaacgaaacaacagcagaccaggaaggaagacgacccggagacgcggaggcaggc

SEQ ID NO: 202051 - RNA, 67 nt, Homo sapiens
agaaaagcgcagaaaagccaagggacaaaacccaggaaaggaaacagacggacccccaggcaggaca

SEQ ID NO: 202052 - RNA, 51 nt, Homo sapiens
cgcagccccgcgcgggcaccagccgggccccgaggaccgagacaggagcac

SEQ ID NO: 202053 - RNA, 38 nt, Homo sapiens
ccgcccacagacccaaacaaagaaaacaagccaagcag

SEQ ID NO: 202054 - RNA, 83 nt, Homo sapiens
gaaaaaagaccaaaaaggagccaaggaaaaggggagccaggaaggggacggaaaggacaccccagacccacaacaggaaaaga

SEQ ID NO: 202055 - RNA, 71 nt, Homo sapiens
gagcagccagacccaagggacagaaggacagagaagaacccagaaaaaagcaaggccgaaaaacgagagag

SEQ ID NO: 202056 - RNA, 80 nt, Homo sapiens
gcggagccccagcggaggaaggggagcggaggccagagaccgcacgaggcccgcggggcgaagcagcaaaacacacagcc

SEQ ID NO: 202057 - RNA, 81 nt, Homo sapiens
aaaggggagcgcggagaggaggcggaagaggaagagccagcacagacccgaggagcccaccggaggggaacccacaccgcc

SEQ ID NO: 202058 - RNA, 80 nt, Homo sapiens
aaacaaaagaggcgaaggcagaagagaacaaaggaaggagaaagaacgggaagggagaaagaccaggggacagcacaagg

SEQ ID NO: 202059 - RNA, 84 nt, Homo sapiens
gcgacgggggccgcgcacaccaaccccgacacggcgagggcgccacggcagggggcccagacgcccggagacaacccggaaaca

SEQ ID NO: 202060 - RNA, 55 nt, Homo sapiens
cgccgcgggcaaagacgaggcgccgcccgcggccgcccccgcaccggcagcgcgc

SEQ ID NO: 202061 - RNA, 71 nt, Homo sapiens
ggaggagcgcgaagcgggaccacgcggaggacgggcaacaggagccccacgccacggagaccaaaggacaa

SEQ ID NO: 202062 - RNA, 75 nt, Homo sapiens
aacagcgggacacgaggcaccaccagcaggagccgagaacaagccagccagaggagaagaaggagccggacagag

SEQ ID NO: 202063 - RNA, 84 nt, Homo sapiens
cccccgcgccaggcagggcggaccgggacacagaaagaaacgaagaggagcgcggaagaaaacaggccgagagcacagaagcag

SEQ ID NO: 202064 - RNA, 71 nt, Homo sapiens
cgcagcacacccaacgagcagaaaacagaggccaggagaagcgaaggcggaaggcccggcacaagggaaac

SEQ ID NO: 202065 - RNA, 89 nt, Homo sapiens
caccagcccgaaacaccaccaagggagcaccgcggacgccccagggcacaccgcgcaccagcgagaggaggagaaccggccaaccgcag

SEQ ID NO: 202066 - RNA, 72 nt, Homo sapiens
acgaccccagcccccccccagcaggcgccccaaaccgcccaggccgagagggaccaggaggagaagcaacca

SEQ ID NO: 202067 - RNA, 73 nt, Homo sapiens
cggggggccgaggccgggacaagcagcaaggcgcggggggccacgcgaggccgagggcgggggcggagggcaa

SEQ ID NO: 202068 - RNA, 56 nt, Homo sapiens
ggcgggaacaagggagcccaaaccagagcaggaagacacccacgaggacaacccca

SEQ ID NO: 202069 - RNA, 73 nt, Homo sapiens
caccgaggcaaaacggaaggccaggagcaagcagcagggaaaccggcccgaaacagggcccaccagcccccga

SEQ ID NO: 202070 - RNA, 74 nt, Homo sapiens
ccaggcagggagcagggaccagcgacgcacccaagcggcaccagacacagacggccacccccccgcaggaagag

SEQ ID NO: 202071 - RNA, 41 nt, Homo sapiens
agaggcagccagcagggggaggcggagaggacaggggccgg

SEQ ID NO: 202072 - RNA, 91 nt, Homo sapiens
cgagaagccacaaaaagcaaaaagcagacccccagcccccaaagaggcagagacccacaaagcgagccgaccacggagcggaacccagagg

SEQ ID NO: 202073 - RNA, 66 nt, Homo sapiens
gcggcccccccacagccccgcgccgccgaccccccggcgccgcgccggcggcgccgcagaaagcaa

SEQ ID NO: 202074 - RNA, 72 nt, Homo sapiens
cagcagccccgaagagaaacacacggacaacaaacgaaggaaacccaggaacagacagcgaggacagaaaag

SEQ ID NO: 202075 - RNA, 65 nt, Homo sapiens
accggagacgacagaccggacagcgcagcaaagcgcagcgcggaggagagaaagaacccacgcag

SEQ ID NO: 202076 - RNA, 73 nt, Homo sapiens
acacccaaggagcacaagagcgccccaagcaaggaagcgacagggacggcaagaaaccacaccgaaaaaaaga

SEQ ID NO: 202077 - RNA, 76 nt, Homo sapiens
cgaggccagagaaagagaagcggcacccccaggaagcgcgaaaagggacacagacgccaggcagccggggcagagg

SEQ ID NO: 202078 - RNA, 58 nt, Homo sapiens
gcgcagcgggccaggggacaggcacgagcagcacccgagacccccaaaaggacccggg

SEQ ID NO: 202079 - RNA, 52 nt, Homo sapiens
cgcgccgccaagccggcgagaccccagcccccaggccgcaggaggccaggcc

SEQ ID NO: 202080 - RNA, 78 nt, Homo sapiens
ccagagcggcccccagcaccacagcccgcagccccgccagccacccccaggaagggaccacagaccagcacgccggcg

SEQ ID NO: 202081 - RNA, 86 nt, Homo sapiens
ggaacaggagccgacgacccggaccaagaaggggaggcccgcggcagaacgccaaaagacgaacacaaagggaaagaggagaggca

SEQ ID NO: 202082 - RNA, 53 nt, Homo sapiens
caccagaggagcgaaagagagagacgcccaacgcaagccaaacggagaacgcc

SEQ ID NO: 202083 - RNA, 86 nt, Homo sapiens
cgccgcacccggacggaccgccacgcgcccgggagacgcccgcgccgccggaacccaagacagaccaggagaggagcagccggaaa

SEQ ID NO: 202084 - RNA, 73 nt, Homo sapiens
acagagcacaagcccgacaaggagcaccaagaaccgacccagaacgcaaacagaccaaggcgggcacgggacg

SEQ ID NO: 202085 - RNA, 74 nt, Homo sapiens
cgagacggaggcgaggcaaacggggggcgcggagggaccagcgagcggggaacccacgacaccacgaacaagaa

SEQ ID NO: 202086 - RNA, 98 nt, Homo sapiens
cacagccccaccaggcccagggccggcccccccaggacaacccagaggcaacaaaggcgagaagccgacccgagaaggagagggagcgggcgaaacga

SEQ ID NO: 202087 - RNA, 55 nt, Homo sapiens
gaaccgcgagcggggagaagaggaaaaagaggcgacaacccagccggcaggacga

SEQ ID NO: 202088 - RNA, 81 nt, Homo sapiens
gacaccaccgccgccgccacccccccaagaaaaccgcacaaacgccgaagagagccacagcgaaacaacacaaacaaaaag

SEQ ID NO: 202089 - RNA, 80 nt, Homo sapiens
ccggccgcagcgcagcgccagccagcgccacagaccgggccaaacaacccaggaggaagagacacgcggagggaggaccc

SEQ ID NO: 202090 - RNA, 74 nt, Homo sapiens
acaacagcagaaacaaagagcgcaagagaagccaggcaacagaaaaccagcaggacaaaagcacaccaacaaaa

SEQ ID NO: 202091 - RNA, 122 nt, Homo sapiens
cgagggcagcagccaggaccccgggccccccaaaacgcagccaccgccgcaccaaccacaaagacaccagggcgcccgaggcaacccagcacgggagcgccagcagacgaggagcggccagc

SEQ ID NO: 202092 - RNA, 82 nt, Homo sapiens
cggaacagcagcagcgcgggcccacaagacaggaggccccggccaagagccaccgcagcgcccaacccccgcccagggcccg

SEQ ID NO: 202093 - RNA, 77 nt, Homo sapiens
caaaccggagcaacagaagagcagagggaccaccccagaacccgaccgaagaccgaccacgaggcgggggcggaaga

SEQ ID NO: 202094 - RNA, 60 nt, Homo sapiens
ccgccccacaaacaaccggaccgggacgcggaggaaggaaaggccacggcccgccggcag

SEQ ID NO: 202095 - RNA, 70 nt, Homo sapiens
gagggaagacgcacaggggcgaagccaaggcaagcaagagccgggaccaaaggcgaccaggagagaaaac

SEQ ID NO: 202096 - RNA, 73 nt, Homo sapiens
acaagacaagaccggcggggaagcgcggaaagcaaagacagcggaagccaaagccaccaaggccgaggagaag

SEQ ID NO: 202097 - RNA, 82 nt, Homo sapiens
ccccgggacacccggaagccaggaaagggacaacacagccaaggaggggacagcaagccaggaaccggggcggggacacgcg

SEQ ID NO: 202098 - RNA, 60 nt, Homo sapiens
gagaaggggccaggaagaccaccgagaccagagaccaaagcgaggcgcaaccagagcagg

SEQ ID NO: 202099 - RNA, 75 nt, Homo sapiens
aagcaccaggcccacgccgccagcaaggaggagacggcggcgacgccaaaccaccggccaggaggcacaggacgc

SEQ ID NO: 202100 - RNA, 71 nt, Homo sapiens
ggccgccacagaaaccagggaggcagggggcggcggccggcgggcaaaggacgccaggaggaagggacaaa

SEQ ID NO: 202101 - RNA, 84 nt, Homo sapiens
gcagcgcagccgcagccgccccgaagagggggacacgacccggagcacccgaccccgacaccccggagacggaccccaaggaac

SEQ ID NO: 202102 - RNA, 64 nt, Homo sapiens
cacagcccaggcacaggaaaggggggaggggaacagcagcggagaacacggcagagacaaaacg

SEQ ID NO: 202103 - RNA, 83 nt, Homo sapiens
caccaggcacccggggaggaggcccagcccagaagacgcgcggagaccgccagcccggggcaaaacacgaagccagacccagc

SEQ ID NO: 202104 - RNA, 80 nt, Homo sapiens
cccagcccgccgcgcgcccgacgccccgcgggaccccccgccggaccccacagcaacaagaaggaagagcacaggggaag

SEQ ID NO: 202105 - RNA, 60 nt, Homo sapiens
gccagagcgaggacgccggcaggcagcggaggaggaaaggcaggccaacaaccgcacgcc

SEQ ID NO: 202106 - RNA, 67 nt, Homo sapiens
agggcacgccacagcaggcgccggcgaaagcaacgaagggacgccagaacaagagaaggagagcaga

SEQ ID NO: 202107 - RNA, 78 nt, Homo sapiens
acgcgaggagggcaacgagacgggggcgaacaaagccggacccggagaccacccagagaggaaggaagcacaagaaga

SEQ ID NO: 202108 - RNA, 79 nt, Homo sapiens
cccagacaagcaccccgcccagaaggaggaacccaaccggccaggacagcaacaaaccaccggaacacaggcccagcac

SEQ ID NO: 202109 - RNA, 64 nt, Homo sapiens
gccacgcagaacagccaccaagagagacagcaaagccccacccagacggcaggggaagacaaac

SEQ ID NO: 202110 - RNA, 78 nt, Homo sapiens
ccacgggcacggaaaagccacggaaggagcccggagcggggccgcaacgggagcgcccgccaagaggagggcaaaaga

SEQ ID NO: 202111 - RNA, 104 nt, Homo sapiens
gccgaagacagaacagggccacagcagccaggcagcgggaccagaggcagcgagaaggaagaaggggaggaagaaacgcagggaccacgagagagagaacgaaa

SEQ ID NO: 202112 - RNA, 77 nt, Homo sapiens
ccccaccgccccagaaagccccagacggaaagagcacgcgagcccggccaacgcaacagggagcccacgcaagaggg

SEQ ID NO: 202113 - RNA, 72 nt, Homo sapiens
gcaccagacgaaagcaaccaacgcagagcaccagaagcaaacgggagagggcaacaacaagcagagacgcga

SEQ ID NO: 202114 - RNA, 78 nt, Homo sapiens
ggccgagccaccgcaaaggcgccccgccccggccacagccaggagccccggagccaacggccagccggaagacacagc

SEQ ID NO: 202115 - RNA, 78 nt, Homo sapiens
aagccaccaggccagggaggacggaggaggacagagacgccgccaccagcacaggccagccagaagagacacgagaca

SEQ ID NO: 202116 - RNA, 70 nt, Homo sapiens
accaagaaccaggaacggacagagagggccaacggaacaagaggggagaccggagaagggcagaagcaaa

SEQ ID NO: 202117 - RNA, 80 nt, Homo sapiens
aggaacccccaccacagcccaaaacgggacacaggaaaccccagaagcgcacaggaggaaagcaggacaaagaaagaagg

SEQ ID NO: 202118 - RNA, 79 nt, Homo sapiens
ccaagaagcaaaaaagggacgcaagaagaaccaccaggaccgagagcagaacaagacgcccaggagaggaacgcgacca

SEQ ID NO: 202119 - RNA, 77 nt, Homo sapiens
ccgccgccagggccccgcaaagcgcgagacccgggcgggggcaccgagggcaccacgcgcgggggagagaagaaccg

SEQ ID NO: 202120 - RNA, 65 nt, Homo sapiens
aggccacggaccgcagcccagaagaccagcaccggaaggaggcccccgccggacgggagcaagcg

SEQ ID NO: 202121 - RNA, 76 nt, Homo sapiens
ccccaagagccgaggcagcggcgcgccgaggcgcccgaccagaagagggccacccggggccagagggaaggaagga

SEQ ID NO: 202122 - RNA, 79 nt, Homo sapiens
gaaggcgcgcaccggaagcaccagcgaggaagaggagcgacacgcagaccggcgagccggaaccccgaggagagaccgc

SEQ ID NO: 202123 - RNA, 84 nt, Homo sapiens
aaaggagaaacaccaaaaggaaccgcagggaaaagccaccgaccacacgccacaaacccaccgcaagcgccaccaccacagagc

SEQ ID NO: 202124 - RNA, 87 nt, Homo sapiens
gccggggcgaggaggccgccaagagccgcagccaagcccggaagacgcgaccgggcaccggcggggggagccgccaccaaaagcaga

SEQ ID NO: 202125 - RNA, 79 nt, Homo sapiens
ggacagaagaaagcggaaagaacgcaccgaagggaacaggcacgccaaacaacgcggcagccaccggcgagcgacaggc

SEQ ID NO: 202126 - RNA, 78 nt, Homo sapiens
ggagagccgcaggacggcgcggcagagccccgacgccacagaacggcgcgagaccgcacagcaaggaaagcacccaga

SEQ ID NO: 202127 - RNA, 79 nt, Homo sapiens
gcggccaaggccaacgaaaggcacccgcaggagcgcgggcgcggagacacagcggccagagcagcgaccgcgggcacga

SEQ ID NO: 202128 - RNA, 75 nt, Homo sapiens
gcagagccggcaccacaggaagccgagcagaccagggcaaagcaccccagagcaaaaaacggggagaacaaagaa

SEQ ID NO: 202129 - RNA, 77 nt, Homo sapiens
gaagccgacagacaaccagaaaaggccagaggaaccaagaaccaacacagacagagaccaggaacacacaaaccacc

SEQ ID NO: 202130 - RNA, 101 nt, Homo sapiens
agccggacgaaccccacgcgggcgcggacgaccggagcagagagcggcgagcaaggaccgggaccggcgggccgggggcgaaggagaagccccggggacga

SEQ ID NO: 202131 - RNA, 55 nt, Homo sapiens
gacaacaagagaacagggcagggcagggccaaagaccgaccaagagcacagagga

SEQ ID NO: 202132 - RNA, 75 nt, Homo sapiens
cggcagccggcaggcagggcaggaaaaggaagagcaaaaacaaaaacccagcagacaaaagacagaagcaagaaa

SEQ ID NO: 202133 - RNA, 77 nt, Homo sapiens
caggcacaccaaccccagccaccgaaagggaccaagcgaacagcccaaagagcaaaaagcgcaaaaacagccgaaag

SEQ ID NO: 202134 - RNA, 85 nt, Homo sapiens
ggggccgcgcgcgcgcgcgcccggcccccgccgccccgccggcacagcgggaagagcggaacgcacaccagcaccagcccaccaa

SEQ ID NO: 202135 - RNA, 67 nt, Homo sapiens
ccccagcccgccccaaaagccgagccagaggaccagcgccaacgagaaggaggacgcagagagcaga

SEQ ID NO: 202136 - RNA, 74 nt, Homo sapiens
aaaccaaggggccgaaggcagcacaacgcccagcccggccccagaaccacacgacgccaccagaaggcaccaga

SEQ ID NO: 202137 - RNA, 80 nt, Homo sapiens
aaacgggcaaaagaccaaagaaggcaaggagagaagagaagaacagcacaggacagacagagggaaaaggaagaaacgcg

SEQ ID NO: 202138 - RNA, 78 nt, Homo sapiens
gacaacagccggaacgccccaaaaaaggcgaggaaaaccaccacacaggggaaacacccagacaacacacacaacagg

SEQ ID NO: 202139 - RNA, 49 nt, Homo sapiens
agggccagagaagaccacccggggcccccacgagcaagaaagaacaggc

SEQ ID NO: 202140 - RNA, 62 nt, Homo sapiens
ggcaggacagacagcagcagcggggagggccagcagccgagccgcagagggagaccgggccc

SEQ ID NO: 202141 - RNA, 81 nt, Homo sapiens
acaccaggccggcgcacccaggagaaggagcagacaagaccccaacaacaaggcccccaagacaagagcggggcccggcgc

SEQ ID NO: 202142 - RNA, 58 nt, Homo sapiens
aggacggcgcggaccaaagcgggagaaacggacaacacccggagcagaaggcacgcaa

SEQ ID NO: 202143 - RNA, 116 nt, Homo sapiens
gacagcccaacacaacgggaaccgcggcacaggggcagcgaggcgcaccggcgggaacaaagacaaccccacgaggacaaaggaccgaaccgggggacgagagaacgagaaccccg

SEQ ID NO: 202144 - RNA, 85 nt, Homo sapiens
gagaggcaggagggccgggacgggagaggggccgaaccggaagggcggaggccccggcggcagagcccgaacccagccccacccg

SEQ ID NO: 202145 - RNA, 77 nt, Homo sapiens
ggccgaccccggaagcgagcgcggacgccacccgggggcacagcaaggagccgagagcgccggaggaccacacccgg

SEQ ID NO: 202146 - RNA, 80 nt, Homo sapiens
gaagagcgaggaggaacgcgcaaggcaaagcaccggccccgccaagacagccacacgaacacggacccccccaggcagag

SEQ ID NO: 202147 - RNA, 53 nt, Homo sapiens
ccagccaccaggggagagaacccagccggggcagggagccagaagcacgccag

SEQ ID NO: 202148 - RNA, 76 nt, Homo sapiens
gccagacgaccccacccgcgccgcgacccgcagggccggaaagagggcgggcccgcacggagcgcggggagaaacc

SEQ ID NO: 202149 - RNA, 81 nt, Homo sapiens
cgggaggaggagcgcccgccaggcgcgaccccgcgggagagccgagggccagggagcgcggaaggaccacggagccggcag

SEQ ID NO: 202150 - RNA, 79 nt, Homo sapiens
ccgcccagaccggccaaggacccagcaggaagcaagccagaaagccagggacgcagaacgcagggcagacagaagaaaa

SEQ ID NO: 202151 - RNA, 73 nt, Homo sapiens
aaggaacgggcggaccagggcgagcacgagcacccgccccaacgaggcaggaagcggggcacacaaaccccgc

SEQ ID NO: 202152 - RNA, 79 nt, Homo sapiens
aagcagagcccaggagaaaccggacgcgacgggccagacaacacagggacacaacaaacacaaccgccacagaagcaca

SEQ ID NO: 202153 - RNA, 76 nt, Homo sapiens
ggagcgagggaccaggacagccacacgcgccaagcaggaggggccgaacagcaagccacccaacaccgcgccacaa

SEQ ID NO: 202154 - RNA, 81 nt, Homo sapiens
cccaggaaaggagggggccagccagcccagccaccaggaaccggaacccgcagggggggccccagcccggccgaacgggcg

SEQ ID NO: 202155 - RNA, 78 nt, Homo sapiens
aaaacagcccgcaacccagaggccgaagacaagccccggcacaggaggagagaaaccagccgaggcagccgaacacca

SEQ ID NO: 202156 - RNA, 73 nt, Homo sapiens
aggcaggggccccaaaaccggaaaggacgcgaggacagcgcaaacgccaaggcgccggggagcaggagaagaa

SEQ ID NO: 202157 - RNA, 76 nt, Homo sapiens
gagggaccggaagaccgcgcccacaacggagaaaaagaagaaaagcacagacaacgcacaaaagaaaaaaaaagca

SEQ ID NO: 202158 - RNA, 89 nt, Homo sapiens
gcagaaggcggagaggggccacccgaaaggagagcagaggaacccaggcaaggacacaggaacgccacaagaaacaacagcaaggcgag

SEQ ID NO: 202159 - RNA, 44 nt, Homo sapiens
agcccaccgggcgggccggccaagggcgacccagcaacgcggcc

SEQ ID NO: 202160 - RNA, 77 nt, Homo sapiens
cacacaaccgcccagccggcgagggacgccgcagggcggaaaacaccccaaaagccaaaagggaaaggaaaagacca

SEQ ID NO: 202161 - RNA, 39 nt, Homo sapiens
ggaagccgggaagcacacaaacaaacgaacacaagagac

SEQ ID NO: 202162 - RNA, 72 nt, Homo sapiens
agacgaggaggggaccccaaagcagccgacaggagacaaggcccccgagcgcgccccaagagcaaaagaagc

SEQ ID NO: 202163 - RNA, 61 nt, Homo sapiens
gagaagccgagcccgcgcccagcaggaggaagaagcgaaaagcaagaacccagaagacacc

SEQ ID NO: 202164 - RNA, 73 nt, Homo sapiens
gccgccaggcccgcaggaccgccggagacagggcaaaggcgcggccagcgaagaagacgcagccagacccggc

SEQ ID NO: 202165 - RNA, 94 nt, Homo sapiens
cacgccacgcaaaaggagaccgcaaggagaacggcagaacaccacaggaaggccacagagacaggcagcgagaagaaagggggaacccccacgc

SEQ ID NO: 202166 - RNA, 64 nt, Homo sapiens
gaccacaccccgccacacgccgcagccagccccaaccggacgagaagacgaaagcagagggaga

SEQ ID NO: 202167 - RNA, 94 nt, Homo sapiens
acaaaagccaagaggaggacagcgcacacagcaagcacgagggcaaggccagagaaggcgggagaaagacacgaaccacagaacgcaacaggac

SEQ ID NO: 202168 - RNA, 78 nt, Homo sapiens
cggaacaaaaagccccagaccagagacagaagcagaggacgccagaaagagacaaccaaccgggcaagcgcccaccgg

SEQ ID NO: 202169 - RNA, 55 nt, Homo sapiens
agggcgagaaagcgccaaacggccgcggaagcccaggaggggggacgacgagacc

SEQ ID NO: 202170 - RNA, 61 nt, Homo sapiens
gcggcaggcggcggcgcgggaaggaaggagcagagcggccaggggccgcaaggccaggcgc

SEQ ID NO: 202171 - RNA, 71 nt, Homo sapiens
gaagagaagaccaggacccccgcacgcgcaaccgaccggaacaagcaggccaggcccccagacgcacagac

SEQ ID NO: 202172 - RNA, 78 nt, Homo sapiens
cggaaacaccacaagccgacaaggggcggaggaagggaggagacccgaccccagaagcgaggagccagaggaaagcgg

SEQ ID NO: 202173 - RNA, 69 nt, Homo sapiens
accaaccgaggccccccgcggacccagaggagcgcgggagagagcgcaagcagaacaaggggagagccc

SEQ ID NO: 202174 - RNA, 80 nt, Homo sapiens
cggccgcggaacgaaaggaacaggagccgccaggcgacacaccggaagcaggggaccgggaggagggcgccaggagcacc

SEQ ID NO: 202175 - RNA, 70 nt, Homo sapiens
gggcaccaaggaggagcagccggaagagacaggaagaagaaagcccaacgcagaacaaaacggcgcaaac

SEQ ID NO: 202176 - RNA, 54 nt, Homo sapiens
aaaaccgggagggacacaagaaggacggaacccgagacgaagaggccgagcaag

SEQ ID NO: 202177 - RNA, 75 nt, Homo sapiens
caggccaggaggacaccccggggccgcgaggaagcaccaaccgcccccaggggcagcggggagcgggggccgcag

SEQ ID NO: 202178 - RNA, 62 nt, Homo sapiens
ggagccaccaacaccaaaaagaccagaggaacccgagcaggaacaccccagcccgggccaca

SEQ ID NO: 202179 - RNA, 68 nt, Homo sapiens
cgcaagagaagcagagggggacgcggagacgcccagaagagcacaaagaaccaacgccaaggcagcgc

SEQ ID NO: 202180 - RNA, 70 nt, Homo sapiens
caggacgagaacagcaacaggcccgagccgccaggggggagaacaccccccccccagcagccgaagaaaa

SEQ ID NO: 202181 - RNA, 87 nt, Homo sapiens
cggagaccccgaaaacggaagcgcagggagaaggaagaggggaaaagaaaggaggagaaggggaggagcgaaggaaccaagcagaga

SEQ ID NO: 202182 - RNA, 42 nt, Homo sapiens
gcacaggcgcaggagcgcggcagaacgccggaaagccacaag

SEQ ID NO: 202183 - RNA, 79 nt, Homo sapiens
cggggcagcgccaggaacgagggagcagaccgacagaacaagcgcaaaaaaagaagagcagaaacgccaacaaaaagac

SEQ ID NO: 202184 - RNA, 77 nt, Homo sapiens
cccaacccaccgggccaccagcgcccaaagcagacaaagaaggagaaaggcagaggagggcgacagcaagaaaccaa

SEQ ID NO: 202185 - RNA, 75 nt, Homo sapiens
gcggccacgacgaaggggcaagccgcccaacgagccacaaggcggccccaagaaacagggcaaggagcggagcgg

SEQ ID NO: 202186 - RNA, 87 nt, Homo sapiens
cgcggagcgcaccaccagagccagcagccacccccgcccagccaacaccccccaggcccaagggggacgcggcccgaagagcgggcg

SEQ ID NO: 202187 - RNA, 75 nt, Homo sapiens
agaagccaacaccggccacgcacacagccgggcgacagggcccgcagcaccgcccacgcgcacccaccgcggccc

SEQ ID NO: 202188 - RNA, 80 nt, Homo sapiens
ggccacacgccggcggcggccaggccccaggacagggaggacgaaagaccacacagggaaacgaccagggagagaccaac

SEQ ID NO: 202189 - RNA, 72 nt, Homo sapiens
aaaaacaaagaaaacgcacacacagggacccgaaagacaaaaagggacgcgagagcccacgaagagcgacgg

SEQ ID NO: 202190 - RNA, 85 nt, Homo sapiens
cggagaccggaccccaggaggaagcgcacggcaagccggccggcgggacagggcagaccgccagcagcacagcaagccacagaga

SEQ ID NO: 202191 - RNA, 77 nt, Homo sapiens
gggcggggggaagacaaggaggaagaggccagacaggacaagggcggaccagaagcaggccgacagaaagaaggagg

SEQ ID NO: 202192 - RNA, 81 nt, Homo sapiens
aaggggagcaggccgagcccgagccgcagcacgagccaaaccgagcgcgagaccgaggcacgggcaggcacagcagaccag

SEQ ID NO: 202193 - RNA, 77 nt, Homo sapiens
aggccccggagggcagcagcagcagcagcaacaacagcggcgcagagaaggaacccaggaagagccagaagggagac

SEQ ID NO: 202194 - RNA, 79 nt, Homo sapiens
ggagccaaagcaccacacaaaggcgcggcccgcagcagaacacgaaggcaccccaaggggcggccagggggcggaccag

SEQ ID NO: 202195 - RNA, 54 nt, Homo sapiens
gggaagcgcgggaagggaaaaaaaaaagcagggaggagaagcgggccagaacaa

SEQ ID NO: 202196 - RNA, 85 nt, Homo sapiens
cccgaccccgcccgaggcccccacaagaagcagcggacgcgcccccaagaaaggcccacccgggcaggagaggccgaccacccgg

SEQ ID NO: 202197 - RNA, 73 nt, Homo sapiens
cgaaacagagaggggaaggagcccagcgacccagaaagcgagcgacggaacacaaacaggcggaaagaaacaa

SEQ ID NO: 202198 - RNA, 86 nt, Homo sapiens
ccggccccgcgggcgccggccccgagcccccccccccacccgccggccggacaggagcgggaaggagaccacgccacacgacaaga

SEQ ID NO: 202199 - RNA, 100 nt, Homo sapiens
acaggcccacagcaaaccccggagagggccaggacagcggcacccaggcagcacaagccgaggccgaaggacaggaggaaacagcggggcggccaccaac

SEQ ID NO: 202200 - RNA, 85 nt, Homo sapiens
cgcggcagcaagaacagagagagaggggacagacgagagaacgaggaacagacaacgcaagcggggacgaaacgcaggaccaggg

SEQ ID NO: 202201 - RNA, 109 nt, Homo sapiens
gcagcccgccgcgcccagaaggccgcagcagacccccccccccacccccgggggaggagagcagaagccgaggaaaagggagggcccgaaaaaaccagggccagcaccc

SEQ ID NO: 202202 - RNA, 79 nt, Homo sapiens
gcagcccccgaaggcccacaggacaggagagaaagacggggaagcagcaagagaaccccaggaccacaggagggaggcg

SEQ ID NO: 202203 - RNA, 34 nt, Homo sapiens
gaaaggcgaaaaggaagcggaagccaagcgcaca

SEQ ID NO: 202204 - RNA, 77 nt, Homo sapiens
gaccgagaaggccccagggaaggcaaaccacgcaagaacgaccccgaaacgagccgagaccaccaggaggaggagcg

SEQ ID NO: 202205 - RNA, 72 nt, Homo sapiens
caggaccaccaggcggggaagacaacgcacagcaagcgggggccaaacccacccacggaaacaaacgggaga

SEQ ID NO: 202206 - RNA, 55 nt, Homo sapiens
cagaagccacgaggagccagagaagagaaacagcagggacgcaccaaaacggaca

SEQ ID NO: 202207 - RNA, 90 nt, Homo sapiens
gcggccaccgacacgcagcagcggccagagaggaaaaaagccgcaagagaggagaacagaaaacaaacaaagaaaggaaagaagaaagga

SEQ ID NO: 202208 - RNA, 58 nt, Homo sapiens
cgacaggacgggggcggccggcccccaggagcggaccccgggcacacaaaacagccac

SEQ ID NO: 202209 - RNA, 75 nt, Homo sapiens
ccggagggggaaaaaacccaaggcgcaaagaggccgggaagaaggagggacacagcagcgcggagagcggcccgg

SEQ ID NO: 202210 - RNA, 74 nt, Homo sapiens
cggcaaccccaagcgacccggcccacggacaacacgcacccagacaagcagaccggaagaccgacggaagacca

SEQ ID NO: 202211 - RNA, 83 nt, Homo sapiens
cggacaacccgacgaggaacgaagggacaagacccgccagaacagggaagcgggagaggccacccgcccacgagcggaagaac

SEQ ID NO: 202212 - RNA, 71 nt, Homo sapiens
ggcccagacgcgagaacgggcacggagcgcccgccggaggagcagccagaaacgcgaagacgacgagcgca

SEQ ID NO: 202213 - RNA, 64 nt, Homo sapiens
cgaggggagcaccaggaccgggccggaacgagacgcacgaacaccgcccagccaagggggaggg

SEQ ID NO: 202214 - RNA, 71 nt, Homo sapiens
cgacggcggaacggggaacgacggcccagcaggcggggaagagaaaggcacaacccgcaacaggcaacgac

SEQ ID NO: 202215 - RNA, 38 nt, Homo sapiens
agagaccaccacaaaggccaacgccaccacggaagccg

SEQ ID NO: 202216 - RNA, 50 nt, Homo sapiens
accacagcagcggggagccacgaaagaaaacacaagaaggaaagacccac

SEQ ID NO: 202217 - RNA, 88 nt, Homo sapiens
gaacgccgcgcgcgcacccaacagcgaccgagcgggacgaacagcggggacgccccagcagaccgcccaggagaggaaagcaggagga

SEQ ID NO: 202218 - RNA, 79 nt, Homo sapiens
aggcagagggcgcaccgcccgggacggccacagacccacagaggcaccccagacacagaccacaaccagaacggaaggc

SEQ ID NO: 202219 - RNA, 78 nt, Homo sapiens
cccagaagcaggcccccagccgcagccacaacaccggcaggaaccaccaggacagaggcagcagaccgcgcgccagac

SEQ ID NO: 202220 - RNA, 84 nt, Homo sapiens
accgcggggccgaaaacaacgacaacgagcacaggcgccaaacaagggaaccgacccagagaggaaagaaacaaggcagaaaga

SEQ ID NO: 202221 - RNA, 50 nt, Homo sapiens
gcggccgaaacagaaaacaagagaccacagaaggaagaagacggcacggg

SEQ ID NO: 202222 - RNA, 64 nt, Homo sapiens
gacggcacacgcagcagaagcccggagaagaaacaacgggacacaggaccaggagacgccaacg

SEQ ID NO: 202223 - RNA, 75 nt, Homo sapiens
gccccggaaccagcgagagacaccaagagaaaaaggcagccccggagacgaaaagacaaagcaccaccaacagac

SEQ ID NO: 202224 - RNA, 82 nt, Homo sapiens
aagagaccaacagaggggcgagaaaaagaaagacagagaaaggcaagacgggccaaggcagggaagcaccaacgagaacccg

SEQ ID NO: 202225 - RNA, 73 nt, Homo sapiens
gcaggcagagcaacccaggggaacgaggaaagaaaggcagaaaaacgcaaaaacgaaaaccggggaacagacc

SEQ ID NO: 202226 - RNA, 75 nt, Homo sapiens
cgacacaacggaagggggggaaccaaaaaaggggacaaagcccagaaaggccaacaaaggggacacaaagacacc

SEQ ID NO: 202227 - RNA, 77 nt, Homo sapiens
ggcacacgccaagacgacggggcgagcccggagcgagagcgagagaagggaccagccagaagaaacaaccgacaacc

SEQ ID NO: 202228 - RNA, 75 nt, Homo sapiens
gaaggaggggggaggagcggaggacggaccccaacaggaaccccaagaccccaacgcagacgcggccggagcccc

SEQ ID NO: 202229 - RNA, 86 nt, Homo sapiens
ggcgggccggggcgccggggcgacgcggcgcgggcggcgcgcgaggccagagccagggcagcggccagcagaagaggcggccaccc

SEQ ID NO: 202230 - RNA, 80 nt, Homo sapiens
gagaaggcacggcaccagacagaagacacggcccagaacaaaccacgagggacagcacaaaagaacaaaaagagaaaaac

SEQ ID NO: 202231 - RNA, 77 nt, Homo sapiens
gggcaccgccccccgccaaggcgacccccaccgagacgaagcgggcggcgaagggggaagagaccgaaaccaagggg

SEQ ID NO: 202232 - RNA, 79 nt, Homo sapiens
ggcaccgggacggaccgagaccggaccgagagcggaccgagagcgcgaaacgcacgagaaggaaaggcccgagccaaaa

SEQ ID NO: 202233 - RNA, 80 nt, Homo sapiens
gaggcgcggggagagaggggcgggcgagcagaggggaagcggcggagcaggaggagggcggaagcgccccgcgacagccc

SEQ ID NO: 202234 - RNA, 68 nt, Homo sapiens
cgacgcgccggcccacgcgcggccaaggcaagaacaccagaaccacaaccgagcggaaacagcaagag

SEQ ID NO: 202235 - RNA, 59 nt, Homo sapiens
gcaccagggggcggcggggccccccgccagcggaccccccaggcagcggcagcagggcc

SEQ ID NO: 202236 - RNA, 93 nt, Homo sapiens
cggagcaagcggagccccccaagagccggaaagaggacagcagcggacggccggaccaagaggcgccgccccccagcaaacgagaaaaaccca

SEQ ID NO: 202237 - RNA, 75 nt, Homo sapiens
aaggaccaagaaccaggcaaagaaagcgccagcccaggggcgaggaaagggaagaggaggagcaacacacgcaaa

SEQ ID NO: 202238 - RNA, 58 nt, Homo sapiens
acgcccgggaagccggccacaggagaacgccgggaccaagggcacccgcccacccacc

SEQ ID NO: 202239 - RNA, 57 nt, Homo sapiens
agcagcacgagagcgggacgccgccagggagaaaagacgaggaagcccaaaaaccgc

SEQ ID NO: 202240 - RNA, 79 nt, Homo sapiens
cgcaacagaccacgcgccgcgacggccggccgcgccaccgcaccgccaccggcccgacccagaggagagaagagaaagc

SEQ ID NO: 202241 - RNA, 78 nt, Homo sapiens
cgcagggccgggccgccgcgcaccgcagcgccggggcacgacacaaaaacagcgaaccaagccaacggaaaggcaccg

SEQ ID NO: 202242 - RNA, 71 nt, Homo sapiens
aaagcacggcgaaacccggacgagaagaccacaggacagaggaaaaagggagacaacaagaaacaggagaa

SEQ ID NO: 202243 - RNA, 74 nt, Homo sapiens
aggcggacgcgcggcgcgcagaacggcacgacacaaaccccagaaaaggagaaggaaaccacgagagaaaagac

SEQ ID NO: 202244 - RNA, 108 nt, Homo sapiens
aaaagaggaagaggccaggcggagacgggaagccaagaacaggcacgcacggccaagggagccaaggaggcgcagccaagacaggaaagcaaggaggcacgaagagga

SEQ ID NO: 202245 - RNA, 87 nt, Homo sapiens
gccggaaggggcccgaagcccccgcaggaaccacaacccaaccaggaaccgcgggagcgacggaggccacaccggaggaaaggaaag

SEQ ID NO: 202246 - RNA, 76 nt, Homo sapiens
aacgcccccgcccccgagcacagccgcgcgccagcccaccaaggagagaccgcacgcagggccacagcagcacgag

SEQ ID NO: 202247 - RNA, 83 nt, Homo sapiens
gcggagccgcgggacggcggcggggcgccgaggcagccgggacaggcaagagggagaagacagcgaccagggaggcaacaaca

SEQ ID NO: 202248 - RNA, 70 nt, Homo sapiens
gaaggaccaagaaccagaagaaaaggccaaagccccgccacccaacgcccgcacggggcagagcgcgcgg

SEQ ID NO: 202249 - RNA, 81 nt, Homo sapiens
gagcgacggccagagagaaggacgcgacggagaagcgcgggcgcccggacgggccgcacgacagcccgagagcagggacac

SEQ ID NO: 202250 - RNA, 78 nt, Homo sapiens
caggacacagaccgcggggccgcgccccaggggggggggggcagacccaacagaggaagccgcaagaaacgggacgac

SEQ ID NO: 202251 - RNA, 79 nt, Homo sapiens
ggaaggacgggagacacagacacaccgcggaggcacccaccacgggccaggcgggccagaggcaagccgcgggagccac

SEQ ID NO: 202252 - RNA, 87 nt, Homo sapiens
ccgccacagccggcagcgcgaagcagcaaccaggaaagggccgagaaagaagagaggaagaagaggaggaggaggaagaggaggaag

SEQ ID NO: 202253 - RNA, 89 nt, Homo sapiens
ccagacagagacacacggcacgcagcgaagccgcgccccgcacagaggaaaacgcgagagagacgcaaccagcacaaagaaaaaagaaa

SEQ ID NO: 202254 - RNA, 80 nt, Homo sapiens
gagcgggcccggccaggaacagggacagcacccaccccggagggggaccacaagacccacgacaggacaggagagacaac

SEQ ID NO: 202255 - RNA, 80 nt, Homo sapiens
ggagcccccacccccccgccaggccccagagacaccaggcaagaaagcgcaaggggaacgcacaacacagcaaaggaacc

SEQ ID NO: 202256 - RNA, 74 nt, Homo sapiens
ggggagacgaagaaggcagaaggagccacgcgaaaacgcaaacaagagagcggggcagggaaccagcagacgag

SEQ ID NO: 202257 - RNA, 84 nt, Homo sapiens
acccggggacggcacccagaggaccaggcggcggaaccacggaaggagggggcgacacacaagcaggggggaccgacgagcagg

SEQ ID NO: 202258 - RNA, 72 nt, Homo sapiens
gcgcgggcccgcccgacgcggaaggcagacaccacagccaccaaagcccggccaaaggaggaggacgccgcc

SEQ ID NO: 202259 - RNA, 62 nt, Homo sapiens
gaaaccagacaggaacgccgaagaggaaccaggcacggcaagggggccgccagacggggaac

SEQ ID NO: 202260 - RNA, 82 nt, Homo sapiens
caaaaggcagcgaaacagccaacaagccgaggagaggcccacccgccaagcgcacaacccccaggcaccaagggccgcgacc

SEQ ID NO: 202261 - RNA, 51 nt, Homo sapiens
cgggggaccgaacaaggcaaaaggggaaaggcccgagccaaaagacccaga

SEQ ID NO: 202262 - RNA, 73 nt, Homo sapiens
ccagaagaagggaaggcgcgaggaggaaaggaggacgagcaacgagaagacgacccggccggaggcaccaaga

SEQ ID NO: 202263 - RNA, 83 nt, Homo sapiens
gccgcgaagccccccagccaccagccgaccacagcaagcccggggccggccagcagccccgagggcgggcggagccaccacag

SEQ ID NO: 202264 - RNA, 82 nt, Homo sapiens
ggaccgcaggggcgcgcgaaggagcggaagaaggcaggccaaaccaccgaccaggaaacaagagggaagcagcgcccagcga

SEQ ID NO: 202265 - RNA, 77 nt, Homo sapiens
agcccaaggcagaaggaaagggacagaggggcgcggcagggccgacccgggacggaggggaaaaggggcccgggcag

SEQ ID NO: 202266 - RNA, 75 nt, Homo sapiens
ccaggcgcgcgaacaagggcgaccagccggacccccacgagcccaagagccgaagcaaagcgaaagcacccgaag

SEQ ID NO: 202267 - RNA, 75 nt, Homo sapiens
cagcaacccagccgccggccgcgggccccggcaaagccgcagcgcaaaaccagcacagcacacaaggcggacccc

SEQ ID NO: 202268 - RNA, 82 nt, Homo sapiens
acaccccggccagggggacggcgccacgcaccggacgacgcccggcgccagcacacgcagggcacacaggccccgagaacca

SEQ ID NO: 202269 - RNA, 78 nt, Homo sapiens
gagccagaccgccaaaccagagaaagaaacacccgaacagcgagccggggggggcacagagccccggaagacagcccc

SEQ ID NO: 202270 - RNA, 83 nt, Homo sapiens
acgcagcagagggccagaccagacagaagaacacacgagccgggcggccaccgagacccggcgaggacccgaacaggcgcgag

SEQ ID NO: 202271 - RNA, 87 nt, Homo sapiens
ggcaccaccgcgcaagagccggcccgggcgcgccaggcacagccaagagcggaccggcagcggccagcgcagcggccggagcagaca

SEQ ID NO: 202272 - RNA, 73 nt, Homo sapiens
aaagacgcaaaaccaagaccgacgcgcaggcggccccggagaaggcccggaggagggccaccccacaagaccg

SEQ ID NO: 202273 - RNA, 62 nt, Homo sapiens
agggaacccggcaccgccccaggggagccgccaccaaaagcagacggaaaacccacggggaa

SEQ ID NO: 202274 - RNA, 76 nt, Homo sapiens
aaagccacacacaagagacaggccacgcgggcaccgcagcgcccgcagacagcaaccggaaagggccaaccggcgc

SEQ ID NO: 202275 - RNA, 77 nt, Homo sapiens
cggagccgccaaggcggcgcagcggacaaggcacgaggcgcggcgaccaccacagcagagcccggcgaaggaggagc

SEQ ID NO: 202276 - RNA, 81 nt, Homo sapiens
gaggaagagcgcacaaccaagagggcaaaaacgaaagcaacggagccaggcccccccaaggcccaccacacaacgcacaca

SEQ ID NO: 202277 - RNA, 72 nt, Homo sapiens
ccaggccaccacagaaacaaaagcaacaaagagggccccgacggcagcccaccccgagcgcggaaccgcagg

SEQ ID NO: 202278 - RNA, 77 nt, Homo sapiens
ggcgaggcgagccagggcccgcagcgagggggagaggcaccagcaacagaccaaccgcagcaagcacagagacagga

SEQ ID NO: 202279 - RNA, 65 nt, Homo sapiens
gaccaagagagaggagcggaggaacaagggacccaccgcgaggcgggggaagcccgcaaaccccc

SEQ ID NO: 202280 - RNA, 91 nt, Homo sapiens
agagggagacacccagagaagaagggcaacgaacaagggcaagcaagaaggccccaccagagccagcaccgacaggacccagccccagaaa

SEQ ID NO: 202281 - RNA, 74 nt, Homo sapiens
ggcggaggaggcagcgggggccgcgcgggaggcaagcaggggggcaaaggaaagaaggcagaaagggaggccag

SEQ ID NO: 202282 - RNA, 65 nt, Homo sapiens
gcaacaagggcccccgacgggcgcggccgaggcaagaaccggaggaccaagacaagacgagggag

SEQ ID NO: 202283 - RNA, 73 nt, Homo sapiens
ggacaggcacgccacacacaggagcggaccacgacccgggaagggacggccggagagccacggacaacacacc

SEQ ID NO: 202284 - RNA, 67 nt, Homo sapiens
acgggaccggagacggcaggacgagccgccgccaagaagacgagagaggcagagcaagcgcgggagc

SEQ ID NO: 202285 - RNA, 84 nt, Homo sapiens
gaggcgccgcccggggccccgcggcgcaggaggcggggagcgcagagcgggcgagcgcgccacaagggcgcagaagccggcaga

SEQ ID NO: 202286 - RNA, 80 nt, Homo sapiens
ccaaggcccgggccagcggcgcccagaggccacgccaagcacaacagaacgcaaggagggacaggacggaaggagcggag

SEQ ID NO: 202287 - RNA, 65 nt, Homo sapiens
ccagaggcccagcccacggaaggccaggaccacccggcggacggcgggagccgcggggaccccag

SEQ ID NO: 202288 - RNA, 84 nt, Homo sapiens
cgacacaagcccacgcgcccgcagcaagacgggacgaccagggaaccgggcagcagccgcagccgcccccgggacggccggccc

SEQ ID NO: 202289 - RNA, 70 nt, Homo sapiens
cagggaaaaccgacgaccggaagaggccagcggggcacaggaagaacgcgagaagacaagcagcaaacga

SEQ ID NO: 202290 - RNA, 70 nt, Homo sapiens
cacgcggacgggccaagggcgagagaggaacgaggggcacagaaaccagaaaaacggagcgcgcaagacg

SEQ ID NO: 202291 - RNA, 67 nt, Homo sapiens
ggaagcccacaacaggcgcgccccggggcgcagcaggcggacgagggccgcaggccgggcagggccg

SEQ ID NO: 202292 - RNA, 78 nt, Homo sapiens
cgggccgcgagcggggcgacccgagaaccagcacggagcaacagccagaggaaaaacaagacaaggccgaaaccaaga

SEQ ID NO: 202293 - RNA, 77 nt, Homo sapiens
ccccgacagcccgggaagaagcagacacaagaggagggaggagaggaaagggaagaggcaccgcgccagcccacagg

SEQ ID NO: 202294 - RNA, 66 nt, Homo sapiens
gaccgcgaccacccacagacaccagcccccagaacgaccaaaaagaagaaaaaaggacaggacacc

SEQ ID NO: 202295 - RNA, 82 nt, Homo sapiens
ggagaagagcgaccagccacaagaacaggaagcacaagccagcagacgacaacaggcgcaggagacacagcaaagacgcaag

SEQ ID NO: 202296 - RNA, 66 nt, Homo sapiens
gagcacccacagccacaaaacggagaggagcaggaagaagaccacgcccccagaaggcaaaaccag

SEQ ID NO: 202297 - RNA, 85 nt, Homo sapiens
aaagaagccacccgaccacgacaaggaggaccggagacccgcaagcggagggagcaccagcgcgggcgaggagcgcagccggagg

SEQ ID NO: 202298 - RNA, 78 nt, Homo sapiens
agggggagccggccgggaaggcagcacagagaaaggggaacccaccgccgcagagcaaaggacaagccggaacgcgag

SEQ ID NO: 202299 - RNA, 93 nt, Homo sapiens
cagacccagccaccagcaccaagcaaaccccccaccacgagcagcgcccgggagccccacgagcccggacacgaggaggggacggcccgccac

SEQ ID NO: 202300 - RNA, 82 nt, Homo sapiens
gcagaaagagcacaagggcacgacggcaacaagaagagccagacacaaagagcaacagggaaaagaaggaaaacgggcccag

SEQ ID NO: 202301 - RNA, 78 nt, Homo sapiens
cgagagccaagacaggacgaggccccgagccccggccccaaagacccaaaacagagacaccccccagcccccgcgccc

SEQ ID NO: 202302 - RNA, 68 nt, Homo sapiens
gacccagccggggggcacagccggggccaaaggcggagcacacaaaaaacagcgccgcccggagcaag

SEQ ID NO: 202303 - RNA, 68 nt, Homo sapiens
caacaccccggaaacacgacaagccaaagcaacccagggcgggaaaagaaacagcggaaggggagccc

SEQ ID NO: 202304 - RNA, 42 nt, Homo sapiens
agacggaccgaaagggcaaaccagccgcaggggcgcgaggga

SEQ ID NO: 202305 - RNA, 72 nt, Homo sapiens
agaggaagccacagagacaggccagacccgcccccgaaagcaaacggggacagcgccgaccggaacagggac

SEQ ID NO: 202306 - RNA, 76 nt, Homo sapiens
cggacggccaggagaacaaggcacacagagacagacaaagcagccacccaggagcacccccgcaggcgccagcccc

SEQ ID NO: 202307 - RNA, 83 nt, Homo sapiens
gaaacgaggaggagcgcggaagggaaaagcagcccggccggggcccgcccaggcccagcacagaggaagagcacgaggggagc

SEQ ID NO: 202308 - RNA, 72 nt, Homo sapiens
agagagggagagccaaagaagacggcggaaaacccgaagcagaagcccgacacaggcacaagaccgagcagg

SEQ ID NO: 202309 - RNA, 62 nt, Homo sapiens
ccgaaaaacaaccacacgccgaccggacaggagcaggcagagcccgggggacaagacccgac

SEQ ID NO: 202310 - RNA, 73 nt, Homo sapiens
gaccccagcgccgggcagcgagaaacccgaccgccccaggggcacagcaggaccagcagggccccacacagca

SEQ ID NO: 202311 - RNA, 73 nt, Homo sapiens
gacggaccagaggaaggcagcaccaggaagacaggggaacacccccagagagagccagaaggccagggaaacc

SEQ ID NO: 202312 - RNA, 88 nt, Homo sapiens
gcgagacgccgccgccaccagacgccgagccaacccccagaaaaccgaaaagccgaggcgggcacagaagagagaaaaaaaggaaagg

SEQ ID NO: 202313 - RNA, 74 nt, Homo sapiens
agcaccaacgcaagacaccagcacaaggcccagcgaaccagggcccacccggcggaaaccaaaaacacagaccc

SEQ ID NO: 202314 - RNA, 75 nt, Homo sapiens
aaggaacgcacgcccggccggacaggagccacaagagcagacaaagccagggaagagcaggcggcagcaggacgg

SEQ ID NO: 202315 - RNA, 54 nt, Homo sapiens
gcggagcagggaagacggagcggcggcccgaagacgacgcaccaaacccccacg

SEQ ID NO: 202316 - RNA, 83 nt, Homo sapiens
cgcagagcacccaacggcgccggagaagacagacaaggagaagccgagaagaacgagccaccaggaagccaccaacaagaaaa

SEQ ID NO: 202317 - RNA, 63 nt, Homo sapiens
gcaccccaggagagaagcagaagaggacaagggaggcgaggacggacaaaaggaaacggacgg

SEQ ID NO: 202318 - RNA, 80 nt, Homo sapiens
gcccccaagagcgggaacagaccgagaccaagcggaaagaggcaggccgcagcaaccgcccacaagaaagaggacgaccc

SEQ ID NO: 202319 - RNA, 92 nt, Homo sapiens
ccccacagcggaacacacaacacacaggggcacgacaccagaccacccgagaaaggcgggggagaaacgcagacacaagcagcaggaggaga

SEQ ID NO: 202320 - RNA, 42 nt, Homo sapiens
gaccgcccaaccgcgacgccgagcagaagaagccaccccagg

SEQ ID NO: 202321 - RNA, 69 nt, Homo sapiens
cagggagagaacaaaaagaagccagaggacggacgagcaaaggacagaccagacgaaccagcaagggac

SEQ ID NO: 202322 - RNA, 79 nt, Homo sapiens
agacgggacaagggcacacggcaccagacagccgcgaagccagaggacggaagagaagggcaaacgaagaaaacgaccc

SEQ ID NO: 202323 - RNA, 72 nt, Homo sapiens
cagaaacgcaccaccaagcccagcaaggagggacggaggccccagcgcggagggaaaacagcccccgggaag

SEQ ID NO: 202324 - RNA, 75 nt, Homo sapiens
ccgccgccgggaccccgcccagcaggaccccagggcagggaccaacaaaagaaggaccaaaaacccggagaaagg

SEQ ID NO: 202325 - RNA, 112 nt, Homo sapiens
cgccccacggggaggccaaggaccccaagcccgagaagaccggcggccaacacagccacggacaggcagccggcgaggggggagcccagcaggagcgggaaaaccgagcgcg

SEQ ID NO: 202326 - RNA, 69 nt, Homo sapiens
gccaggacacgggagaaccccacccggacccggaggcgcaccagacaacgaagagaggaaagaagcgga

SEQ ID NO: 202327 - RNA, 78 nt, Homo sapiens
gcccgcggaggccgcggagcgccagccaagaaacaagcagaccggaagaccgacggaagaccacaccccgagggagcc

SEQ ID NO: 202328 - RNA, 79 nt, Homo sapiens
gagggcccaacccaaaagaccgaagagaaacaacgcccgagaaaggaggagaaacaagcagcaccgcaggaggcagcag

SEQ ID NO: 202329 - RNA, 41 nt, Homo sapiens
cccagcgggccggaccggcccgagcgggaagaagccgcagc

SEQ ID NO: 202330 - RNA, 70 nt, Homo sapiens
cagaagaagacagagccacaccgccaaaaggacaaaagcggcaagagaagacaaccccccaagaaaaacg

SEQ ID NO: 202331 - RNA, 80 nt, Homo sapiens
cccccaccgccccgcccgccggggagcggcggcggccggacgcgccccgcggagacagcgccacgggacagccaacacca

SEQ ID NO: 202332 - RNA, 54 nt, Homo sapiens
cagcagcagccaggaggacgagagcccaagaccacggaggacccgccaccagaa

SEQ ID NO: 202333 - RNA, 97 nt, Homo sapiens
ggagaagcggcgcggccggacaagcggaccccggcccaggcggcccgagaaaagcaggagaagcggggccacgccggaacaccgggcgacgggacag

SEQ ID NO: 202334 - RNA, 84 nt, Homo sapiens
gaaaaggaaagaaaacaccggagaccgcggggggggaagcagagagcaaccaagcaccaccaagcccacagcagcaggaacaag

SEQ ID NO: 202335 - RNA, 72 nt, Homo sapiens
ggagcggacggaaaggggagcccggggagcaagaagggaccacaggaccacaccagaaaccgcaaagagaca

SEQ ID NO: 202336 - RNA, 64 nt, Homo sapiens
ggggaaaaaagaccagaaagaaaacaccgaaaagaggcaaaaggagaggcgcaaggagcgaaac

SEQ ID NO: 202337 - RNA, 79 nt, Homo sapiens
ccaagagaggcgagagaccagcagaagacgacagcgaacacccgaaggagccagcaacagaggagaacacaagcccgaa

SEQ ID NO: 202338 - RNA, 71 nt, Homo sapiens
ccccggccgcgcgggaacagccccagcaaagacgcggaagaggaaaaaggcgggcgagaggggaagggcgc

SEQ ID NO: 202339 - RNA, 69 nt, Homo sapiens
cacacgcacacagcccggaggcagcggaccggcagagcggaagcgcagcacccacccgggggccacggc

SEQ ID NO: 202340 - RNA, 81 nt, Homo sapiens
acccggagagccccggaggagcggagagcgagcggcaacccggagcacgccaacgaaaaggaacgagaaaaagaacagcca

SEQ ID NO: 202341 - RNA, 61 nt, Homo sapiens
accccggaaacacgacaagccaaagcaaagaagagagaccacggccagcgagaggagaaga

SEQ ID NO: 202342 - RNA, 77 nt, Homo sapiens
gggggaccggacgcaggaagacgcagccggccgcgcccccagaaccgggaaaacagaagcacaaaaaaacagaccag

SEQ ID NO: 202343 - RNA, 69 nt, Homo sapiens
cccggggcaaagagcacgagaccaaaaaagggcgaccaacacccaccagcaagaggaggaccagccagc

SEQ ID NO: 202344 - RNA, 75 nt, Homo sapiens
gccagggcaccaggagcggaaaaaggcgcaggcacacaggacggcccacccccacgacagggaaagaggacagcc

SEQ ID NO: 202345 - RNA, 76 nt, Homo sapiens
ccgccgcccggaaaaaccgccaagacgaacgcaagagcccccagccaaacggagggaggagaagacagagcgaaca

SEQ ID NO: 202346 - RNA, 59 nt, Homo sapiens
agggagaaagggccccaagagacagaacgaccgcccggccagcccaccccccgacgaag

SEQ ID NO: 202347 - RNA, 70 nt, Homo sapiens
gggacgggcaagacgagagggcccgacggaggggaggaaaccgggagaagacaggaagaccggaaggcca

SEQ ID NO: 202348 - RNA, 80 nt, Homo sapiens
agaagcccggaagcacggggaccaggggagggggggacaggagaacgcagcagcgcacgaaacggagcaacacacagccg

SEQ ID NO: 202349 - RNA, 75 nt, Homo sapiens
gagagccagggcgcgcaccccagaaaagagaggagaagcagcgaggcacaagagcacgcgagcaagggcgacgaa

SEQ ID NO: 202350 - RNA, 71 nt, Homo sapiens
accagcgggaaggcagacagcgagggcgacgagacgaacgaaccacggcaacagccggggagggcggacgg

SEQ ID NO: 202351 - RNA, 74 nt, Homo sapiens
ggaggaaagggagagacaagagaggagacccaacagacggacccggaaccccacaggccgaggcacgaacccaa

SEQ ID NO: 202352 - RNA, 80 nt, Homo sapiens
cggcgcagggccggccgggcacagcagaggccgcgcagcagcaaaggagagcggaaccggaaaagaaccacggcgggcag

SEQ ID NO: 202353 - RNA, 71 nt, Homo sapiens
agcgcaaagaacacagaaaacaccagaggaaaggaccaaccaggaaagagagacgggacgacaaaaaccaa

SEQ ID NO: 202354 - RNA, 96 nt, Homo sapiens
cccaccacgacaggacaccggagaagaaagacccgaaggccaggcggccccccccagagccagaggagcagggacccagccacgccgggcaaggag

SEQ ID NO: 202355 - RNA, 73 nt, Homo sapiens
cgggcagcaaacaagacacacgaaagaggcaaaacagggaggacagcacaagccccaagaacaacccaacaca

SEQ ID NO: 202356 - RNA, 76 nt, Homo sapiens
acccagcgaggccacccgcaccgaaggaaggaaaggcagacgaaacaaacaggaaaaacagcccaggagccacaaa

SEQ ID NO: 202357 - RNA, 85 nt, Homo sapiens
cgcaaggggagcgcccgcggggcggccacgggcgcaggaccgcgcgggaggagaagaggagcaggcccgcacaggacacagaaca

SEQ ID NO: 202358 - RNA, 78 nt, Homo sapiens
ccggcagaggaggcgagcgggggggaacacaccaccaccagccccgaccgcggcccgagaggagcgcgaggcgggaac

SEQ ID NO: 202359 - RNA, 70 nt, Homo sapiens
gcacacaaccgagaaggcaaagaaaagcagagcagacagacagcgaacacggaagccacgaaaagcaaaa

SEQ ID NO: 202360 - RNA, 72 nt, Homo sapiens
gaaagcacccacaagcagagcggcgaagacgggcccagcggcccagagacgaaaggccacagagacagccaa

SEQ ID NO: 202361 - RNA, 75 nt, Homo sapiens
cgcggcagaagaaagcaagacccaggacaccccgaagccgagaaagaagaaaaagcagcacgaaggcgaggaacc

SEQ ID NO: 202362 - RNA, 75 nt, Homo sapiens
ggcaccgaggagacgccaccccacgaacccaccgcgacccggccacgccgccccaaggcagagacccagagaacc

SEQ ID NO: 202363 - RNA, 53 nt, Homo sapiens
ccaaagagagaaccggagagcacccaacagccggaacgggcggacccagagcc

SEQ ID NO: 202364 - RNA, 81 nt, Homo sapiens
accaacaagaaccgaacgaggacacgaccccgccccacgcccaggagcagacagccagcacaacaaccaagacaggacccc

SEQ ID NO: 202365 - RNA, 114 nt, Homo sapiens
ggacgccgaaggaacgcacaaccggccggcacgaaaaccgggggaacccagcagcagaacgcagcgagcaagaacaagccaggaggcggagaaaacggcacaggcacaaaacgc

SEQ ID NO: 202366 - RNA, 74 nt, Homo sapiens
caagagggagacaaagagagagcaggacaggaaaacaggaggcagaggaacaaaaaaagacaccacgagaaaca

SEQ ID NO: 202367 - RNA, 68 nt, Homo sapiens
cccagggcagccccccaggcccccagaggacacagcccccaccgcggcgccgagagaaaggaccagag

SEQ ID NO: 202368 - RNA, 77 nt, Homo sapiens
cagagcgcacggcgacgccccaggggaaaacccccgggaccaggcgcagcgggaagaggcacacccccggaaggacc

SEQ ID NO: 202369 - RNA, 74 nt, Homo sapiens
gagacaagagcaaccagaaagagagggacaagggcccccaagccggcaggggaacgaggagggagcgcggagcg

SEQ ID NO: 202370 - RNA, 43 nt, Homo sapiens
ccccgcgggcaggcccccgcccaggggcgggaagaagcccgcc

SEQ ID NO: 202371 - RNA, 85 nt, Homo sapiens
ggcacgccaccacaggacaaagcggcaaacgccacagcggggaccgacaagacggaaaccgggagggggaaaagcgagaaaaaga

SEQ ID NO: 202372 - RNA, 73 nt, Homo sapiens
caacccacccacagcaccaagcagcaaggcccaccaagccgagaacaccaggaaacagcccaggggaaggcca

SEQ ID NO: 202373 - RNA, 80 nt, Homo sapiens
ggcagacgggccgcgcggcccagcccgacgggcagggcggagacccaggccgcccagggcgccgcacaaacacgcagagg

SEQ ID NO: 202374 - RNA, 57 nt, Homo sapiens
gaaggaaaagcacaggcacaagcagaggaaccagggaaccgccgccagcaaccaaca

SEQ ID NO: 202375 - RNA, 35 nt, Homo sapiens
gcccgaaggccccgcgggacaggcccagggagggc

SEQ ID NO: 202376 - RNA, 64 nt, Homo sapiens
agccacggacccgccagaccacagagaagcaggcgaccaggcgcgcgggcaagaaagcagacgc

SEQ ID NO: 202377 - RNA, 62 nt, Homo sapiens
ccacgagcagacagacagggcgcgccaccagagcagagccgaggaaggcaccaggagaggag

SEQ ID NO: 202378 - RNA, 81 nt, Homo sapiens
gcccccacgaggcgggcccagagagcacacaaaacagggcagccacacccgaacgaaaacaaacggaagagagggcagcaa

SEQ ID NO: 202379 - RNA, 79 nt, Homo sapiens
gaagcgcaaaaacaagacggggcgccccacagaggggcgacggcagagaccacaagaaccaggagagacccagagccag

SEQ ID NO: 202380 - RNA, 80 nt, Homo sapiens
caggagggggaaaggccggacggcccaaagaggagggcgcacagcgcccgaggacagccccggcccgacccaacaccaaa

SEQ ID NO: 202381 - RNA, 81 nt, Homo sapiens
acggggccagggaacccggcaccgccccaggccggggggggcacagagccccggaagacagcccccagcgaccagacccag

SEQ ID NO: 202382 - RNA, 69 nt, Homo sapiens
gagcaaagagaccccggaacgcaggaaggaacggcaccgaggcacgggggcccggcaaaccacagaaca

SEQ ID NO: 202383 - RNA, 58 nt, Homo sapiens
agaagaagggaagaagcggagaggccggaaaggaaaaacaccagaacggaaacagaag

SEQ ID NO: 202384 - RNA, 68 nt, Homo sapiens
aaaacgcaagaccgaaaaaaaacggcagcagaaaacacagagaaaacacggagaaacagcaacaggag

SEQ ID NO: 202385 - RNA, 80 nt, Homo sapiens
cgcggggccgcggcgcgcccggcccggcagcaggcgagaggcagaacccggaaagaaggaagggaccaccacaaggcaca

SEQ ID NO: 202386 - RNA, 78 nt, Homo sapiens
gggccaagcagcgaggccacggagccccagagcaagccgaaggcaacccaccaaagaagaaaagacaaggagccacca

SEQ ID NO: 202387 - RNA, 77 nt, Homo sapiens
agggcaacacccgacaaagggacagagcagccaggccacgagccagaaccgagacacacacaggaccccaaaacaac

SEQ ID NO: 202388 - RNA, 40 nt, Homo sapiens
cgggcgcaggcggcaaaaggaagacacccccggaccccca

SEQ ID NO: 202389 - RNA, 71 nt, Homo sapiens
aagagcccagaacgccgacccccggcccgaaacagcagacgacggggaagcacacaggcagacacagggag

SEQ ID NO: 202390 - RNA, 88 nt, Homo sapiens
acccaacgcggagcgagagaggagccacccgaaggcgaacgcagagcaccggccagaacaagccaaggagccaagacgagagggacac

SEQ ID NO: 202391 - RNA, 85 nt, Homo sapiens
ggagagcagcagccgcccgccaaccccaggggaccagaggaaccagcccgagcgggaggcggacagaccgcagaagcagggacaa

SEQ ID NO: 202392 - RNA, 51 nt, Homo sapiens
agcagcggaaaacccacagggcacccaacaccgccgaaagccgggccgaac

SEQ ID NO: 202393 - RNA, 89 nt, Homo sapiens
agcacgagcgaagaaagcccgagaagacgggcgcagaagaaagaccaggacaagcacccccaggcagaggcgggcccgggagaagcgga

SEQ ID NO: 202394 - RNA, 88 nt, Homo sapiens
ggagagccgcaggacggcgcggcagagccccgacgccacagaacgccgcgccaggcccagacacgcagaggagacccgaaccggcaac

SEQ ID NO: 202395 - RNA, 83 nt, Homo sapiens
agggcaccccagacggcaggcacaggaggacgggcaccccacaccggaagcacagggcagaacggcagcgcaaaaacagccgg

SEQ ID NO: 202396 - RNA, 73 nt, Homo sapiens
gaggcaaacggggggcgcggagggaccagcgagcgggcaagaagcccggcgccaaggaaaaagacgccaaaag

SEQ ID NO: 202397 - RNA, 81 nt, Homo sapiens
ccccaaagaagccacagaacaggggaggcagccagcaaggagcagggacaagacaggaagcccaagcagcaaccaaaagag

SEQ ID NO: 202398 - RNA, 73 nt, Homo sapiens
gacagagaaagagaaccgaaagaagagaaaagaggaagaaaaggaaaaggggaagagggaaagacagggacga

SEQ ID NO: 202399 - RNA, 81 nt, Homo sapiens
cagggacagccgggagagaccagggaccagagaggacggggacgggccccaggacgaggaagacaaggccagccacggaag

SEQ ID NO: 202400 - RNA, 80 nt, Homo sapiens
acaagacgaggaagagaaggagcggagcgccaagcccggccaaaaacaaaagaggcggcaaggcagcccaggcaaagaag

SEQ ID NO: 202401 - RNA, 75 nt, Homo sapiens
gaagacaaaggcaaaagggacgaagggaacaaacacaggccaacaaaaccacacgaaacggaccaaagaaccgag

SEQ ID NO: 202402 - RNA, 72 nt, Homo sapiens
cacgggagacacacccgcacacgccagcgaagcaggggccaggcaccgcaagggccagcaagagaggaccgg

SEQ ID NO: 202403 - RNA, 64 nt, Homo sapiens
gaaaccacaaggacccagggcgcgaggacggcgagacagagaccagccccaggccccagcgcga

SEQ ID NO: 202404 - RNA, 76 nt, Homo sapiens
ccgaggccccccagccagcagaacgaccgggagcagagccagcccaggcaacgggaaaccaggagaggaccggaca

SEQ ID NO: 202405 - RNA, 80 nt, Homo sapiens
gcccgaacgcgaggccaacagccccgcggcaaaccgacaacagagccgaagaagccccacagcacggggggcaggcaaaa

SEQ ID NO: 202406 - RNA, 44 nt, Homo sapiens
ggcgaggcggacgcgcggcgcgcagagccaaagccggcggacag

SEQ ID NO: 202407 - RNA, 75 nt, Homo sapiens
gcggaggcacggacaccacacacacacagcggaagcgggacggaaaaggaccacacgagagacgcaaagaagcga

SEQ ID NO: 202408 - RNA, 59 nt, Homo sapiens
gcgcggaacaggcagggcacagaaacacgaaagggacacagcgagagaggcagggacga

SEQ ID NO: 202409 - RNA, 83 nt, Homo sapiens
ccaagcagccaaccagccaaccgggccccccagcagacgcggacagggccaaagcggcaggagaaggaagggaccggaaacga

SEQ ID NO: 202410 - RNA, 73 nt, Homo sapiens
aaagcagggaggagaggcaaaaagaaggggaacaccaggaaaaggagaccccaaggccggacagaagaaagcg

SEQ ID NO: 202411 - RNA, 59 nt, Homo sapiens
agaggcccgaggaccacggcgacaggaggacgggacaccgagacaagaggccgcaagcc

SEQ ID NO: 202412 - RNA, 60 nt, Homo sapiens
cagacccaaccaggccgagaaacgaacagaggcccgggcggcgacggcggcgcgaggacc

SEQ ID NO: 202413 - RNA, 77 nt, Homo sapiens
gcggaggaggagaacacagaaccaccaggagagcaaggaaagcagaacaccagagaggaccaaaacaaccacaccga

SEQ ID NO: 202414 - RNA, 43 nt, Homo sapiens
cgagggaccgagaccacgaggcccggcacaagacgcgcacggg

SEQ ID NO: 202415 - RNA, 76 nt, Homo sapiens
cccgcaagaaacgggggaagcagagcgcacaaagggaaaggggcaaaggcaaaccaaacgcaagaccagggcggag

SEQ ID NO: 202416 - RNA, 82 nt, Homo sapiens
cgacacgcggccgcggagaccaccgcggcgcggcagcgcgcccgagcccgggcgagagcagcagcgcagaagacccggcccc

SEQ ID NO: 202417 - RNA, 78 nt, Homo sapiens
caggcagcagaccagccaccggccaggcagcaaggggccgcccagagccggaggagcgggaggaggagaaggccggac

SEQ ID NO: 202418 - RNA, 86 nt, Homo sapiens
gaagcaggagaacgaaacggagccagagaaggcagaaggcagcgcacagcccagcggaggacacgccggggcagggcagccgagac

SEQ ID NO: 202419 - RNA, 78 nt, Homo sapiens
agggcacaggcccacaacgcaacgggacaggggaaaggcagcgcaaaaagcggcagggggggccccagcccggccgaa

SEQ ID NO: 202420 - RNA, 71 nt, Homo sapiens
aagacacccagaaagcgcagagcaaacaccaaaggaaacggagcggagaaaacagcaaccacaaaaacgac

SEQ ID NO: 202421 - RNA, 76 nt, Homo sapiens
gacaaaggcaggggcgccagggcaccagacgggcgggaaagagaggcccgggccaacaagacacacagagggcccc

SEQ ID NO: 202422 - RNA, 82 nt, Homo sapiens
cacgacgggcggggaagacggacacacggcgggcgacacgcgggcgcggcacccggcaaaggaagaggagcggaaccccacg

SEQ ID NO: 202423 - RNA, 34 nt, Homo sapiens
cgaagacagacgcaagggggcggggccgacaaaa

SEQ ID NO: 202424 - RNA, 50 nt, Homo sapiens
cgggacagacagccgcacgaaccggaccaggaggacgcacgaagcaaaac

SEQ ID NO: 202425 - RNA, 74 nt, Homo sapiens
agcgcggccgccgcggcacggggaacgcagggcaggagacagacccagcacggaccccccccccagccgggcga

SEQ ID NO: 202426 - RNA, 71 nt, Homo sapiens
gagccaaagaggggcgcgccaggaagcacccaaagagggcaaaacggcaaaggcagagaccaaaccaaccc

SEQ ID NO: 202427 - RNA, 76 nt, Homo sapiens
ccgcagccgggcccgcgccggcaggccggcccggggcgagccccaggcgccggcgaaagcaacgaagggacgccag

SEQ ID NO: 202428 - RNA, 78 nt, Homo sapiens
gggccccggaccccgaggagagacagccgggcgagccggaccaacagcgagcgcgaaaggacccccccgcggcggcga

SEQ ID NO: 202429 - RNA, 77 nt, Homo sapiens
aagagcccgacggacagaagcaagcaagggcaaaacgaaaaagccaagcccagaaacagccagagaaaaccgcggac

SEQ ID NO: 202430 - RNA, 57 nt, Homo sapiens
aggagcggacaagaagacaaccggcgaacggcgcagggagggacagcgaccaccagg

SEQ ID NO: 202431 - RNA, 66 nt, Homo sapiens
ccaaaaggagcgaaggaccggaggccgaagccagaagagccgaggcagcagaacaaagggaacacg

SEQ ID NO: 202432 - RNA, 81 nt, Homo sapiens
cccccgaagcccaccggccccaacgcacagccagggagccaagcgccgcccggccggccaggacggggggcccggagcgag

SEQ ID NO: 202433 - RNA, 75 nt, Homo sapiens
gccgggagcgcggaacaccgcaaggcaaggccagagaaggcgggagaaagacacgaaccacagaacgcaacagga

SEQ ID NO: 202434 - RNA, 73 nt, Homo sapiens
aaggaggcgacaagcaacaacaacaagcggagaggagccaagcccaacgggacgggaaaacggccacagccaa

SEQ ID NO: 202435 - RNA, 82 nt, Homo sapiens
cccccgccgcgccagggccagaacgaccgagggcacggccgaggaccgccgaccagggggggccccagcccggccgaacggg

SEQ ID NO: 202436 - RNA, 72 nt, Homo sapiens
ggcgcgcgagggagggagccaaagaagaaggagaggcagcaagacaaggagccgacccaaaccagccagcca

SEQ ID NO: 202437 - RNA, 71 nt, Homo sapiens
cgcacagccacaggaggcccacccccacacacaacggggcggcacacaaggagcgaagggcagggagaacg

SEQ ID NO: 202438 - RNA, 76 nt, Homo sapiens
ggggagagagcaagagcgggagcaggaccccacacagggaacagcaaaccaagccagagaaagcaaaagaaaacag

SEQ ID NO: 202439 - RNA, 67 nt, Homo sapiens
cccgagaggcggccgcagcaaagccagccaaagaaacgacgccacaggcacacggacacccacggcc

SEQ ID NO: 202440 - RNA, 71 nt, Homo sapiens
aacacgggacaaaaaccagaccaggaaccccgacagcagagacgacgcggcaagcagcggaagaggacgac

SEQ ID NO: 202441 - RNA, 63 nt, Homo sapiens
gaggaccggccaaaccaccaagaaagggcgaaagaaggacaccggcagaagaaagcgggacaa

SEQ ID NO: 202442 - RNA, 89 nt, Homo sapiens
aagcccggacaggaggcggccacacaggagacaggcgcggccccggaagaaaaaagcgggcacgggcagcacaaagccggagggcgccg

SEQ ID NO: 202443 - RNA, 90 nt, Homo sapiens
caaggaaaaaaagcagagaggagcggggagcaagcagcgccagcagcccgggggcgacgacgaggaccaggagccaggggcgggggaacg

SEQ ID NO: 202444 - RNA, 83 nt, Homo sapiens
gccagcaagcgcgccgcgccgcagcggcgccgcggacaagcacgagggcgcgccgagacgcccgaggaaagcagagccaaaga

SEQ ID NO: 202445 - RNA, 81 nt, Homo sapiens
gcacccgcccgccccagccacccaggccccgccgcccgggggcgccgcccaccgcgcccgccgggcggagggggcagggca

SEQ ID NO: 202446 - RNA, 54 nt, Homo sapiens
ccaccacagggaagacacagcccggccacccccagacgccgaggaaggagacag

SEQ ID NO: 202447 - RNA, 84 nt, Homo sapiens
ccccagggaagccacagcaccccagcacccagaccgaggaggagaaggggcggcccggaggccgagaggagcggagagacaaga

SEQ ID NO: 202448 - RNA, 77 nt, Homo sapiens
agaaccgggggacaggaaaacgacgcaaagacgaacaaaccgaagcagaccagcggacccaaaaacaaggaacaccc

SEQ ID NO: 202449 - RNA, 73 nt, Homo sapiens
cccgggcgcggcgggcgcgcccgccagcgcccggagaacgacaacggcaagcggagaagagcaaggccgaacc

SEQ ID NO: 202450 - RNA, 70 nt, Homo sapiens
cgacccgaggacacgcggaaacagcccaggggcccggaggggcccaggggcgagcacgcaccggcacgga

SEQ ID NO: 202451 - RNA, 81 nt, Homo sapiens
cgcggggacggggggcgcccggcagcacggccggcagagaccgaaggagcagacgaggcacgagcgccagcgcgagacaga

SEQ ID NO: 202452 - RNA, 82 nt, Homo sapiens
cacgaaggcaccgacgcacagcgaccaccaacagaccgaagagaaggagggggcagagcacggcaggcagaaggggccaacc

SEQ ID NO: 202453 - RNA, 87 nt, Homo sapiens
gaaaaagcaagcgaagacacaagaagaccgagcaaagagaccccggaacgaccgcgaagccacacccgggaccacccagacgccgcc

SEQ ID NO: 202454 - RNA, 83 nt, Homo sapiens
gaaaaaggacaaaagccaagaggaggacagcgcacacagcaagcacgagccagacagacacagcacagcagccacgaagagca

SEQ ID NO: 202455 - RNA, 78 nt, Homo sapiens
acacccagcccacacacggaaagggagagaagcccaaaggccggcgcaaggaggggacgaccagggaggggccacaga

SEQ ID NO: 202456 - RNA, 61 nt, Homo sapiens
aaggaccaagaaccaggggacacgagcaaaaacgacaacacaccagcgggccagggaaaaa

SEQ ID NO: 202457 - RNA, 86 nt, Homo sapiens
ggaccgcgagaccccccggagcgggcagccagagcagccccccagcgcccgccgcaccgggccagcagggcagaccccgcagcgag

SEQ ID NO: 202458 - RNA, 84 nt, Homo sapiens
agagagaaaaaggacaaaagccaagaggaggacagcgcacacagcaagcacgaggcaaaagaaaccggaagagcaacggccgag

SEQ ID NO: 202459 - RNA, 76 nt, Homo sapiens
ccccccagcagaccgcacgggagaaaacaagccaaggagaacccagcccgacgggcagcgcgccagaaaggagggc

SEQ ID NO: 202460 - RNA, 72 nt, Homo sapiens
aacagagggaaaaaaaaggagggcaaggagaaacgaaggccaaagcaacccccaggacaaacgaggggcagg

SEQ ID NO: 202461 - RNA, 55 nt, Homo sapiens
acgcaagagccaggggacaggggagccccagagggccaagccccgagaaaggcgc

SEQ ID NO: 202462 - RNA, 72 nt, Homo sapiens
ccaaagaaaagcccccaaggaagacagaaggccggcacaaacagaccacacccacgggcaaaggacaggagc

SEQ ID NO: 202463 - RNA, 67 nt, Homo sapiens
cgcaggcaaagggcgggcagaccagaagaaggggacccaaagcaggcacacagagcaagacgaagcc

SEQ ID NO: 202464 - RNA, 76 nt, Homo sapiens
gcccaccaaggaaagggcgacagcaacagccgccggcggaaggcaccggcccgaccagccacgacacccacgaaag

SEQ ID NO: 202465 - RNA, 66 nt, Homo sapiens
caggacgcaccaccagcaacaacgccagccagcagcaaggaaggcaggacccaaagacaggaccac

SEQ ID NO: 202466 - RNA, 76 nt, Homo sapiens
ccagaccagccgccggagagggcggagccgcggcccgggaccacacagaccaggcagaagaagcggggcgcggggg

SEQ ID NO: 202467 - RNA, 84 nt, Homo sapiens
gcagaaacaaaaagaggagcagaagaaaccgaggagcaaaagcgaaggccgcggggaaggggcccggccagggccccccacgcg

SEQ ID NO: 202468 - RNA, 39 nt, Homo sapiens
aaagagggggaaccgaggagggcagccgacggccaagaa

SEQ ID NO: 202469 - RNA, 67 nt, Homo sapiens
gaacacccagcaggcaaggcccgccagcagcccccccggcaggcaaaggaacagagcacacagacca

SEQ ID NO: 202470 - RNA, 65 nt, Homo sapiens
gaccacaggagcgagagcaaacaggcacagggaaaaaaggaaaacgacagaagcagcgcaggccc

SEQ ID NO: 202471 - RNA, 73 nt, Homo sapiens
agcccacaagcagggaggcggcggagaaaagccaccggcgggagggcagcaaaagacgggcccccccaaggga

SEQ ID NO: 202472 - RNA, 73 nt, Homo sapiens
ggcagaggggaggcgcgaaagcaggagagagccaaaacgacaggccagggaagaaaacaagaaggccaaagaa

SEQ ID NO: 202473 - RNA, 76 nt, Homo sapiens
cccgaggaaaaaacaaaaagaaaaacccagccccaaaagacgaggggacaacgaaggaggcaagcaacaaagggac

SEQ ID NO: 202474 - RNA, 83 nt, Homo sapiens
aacacagaagccgacaaggcgcaagcgaaaacagaccgcgagcccagaggaggaaaccgacaagcccaaacggaagaagagga

SEQ ID NO: 202475 - RNA, 63 nt, Homo sapiens
accaggaccccaggccgcgcaggaccgagcacacaaacccagccgccccggcccaccgcaccc

SEQ ID NO: 202476 - RNA, 38 nt, Homo sapiens
aggaaaagagccccgaaaacaacgaacgagcaaggaag

SEQ ID NO: 202477 - RNA, 84 nt, Homo sapiens
ggaggcccacgccagccaggagggaacaaagaagcggagagcagccgaagaggaccacgggcgcacgcccccagcccagccagc

SEQ ID NO: 202478 - RNA, 82 nt, Homo sapiens
cagaagcaggagcgcaacaagaagagcagcccaggacgcaaaagggcaggaggacgcaacagaggaggggggacgaagagga

SEQ ID NO: 202479 - RNA, 76 nt, Homo sapiens
ggagagacagaagcggacccagaaagacaaggggccgcaaggccaggcgcgcagaggcacccaacggcacagaccc

SEQ ID NO: 202480 - RNA, 69 nt, Homo sapiens
cgggcaaagacggagcaccggaggaaaacggggcacgcgagcagcaaccggccaagaaggaacaggggg

SEQ ID NO: 202481 - RNA, 79 nt, Homo sapiens
cagccaagaagaaaaacggaggaccgaagaagcagaaccaaggcgaggagcgacgcagccagcacggaacacagaacca

SEQ ID NO: 202482 - RNA, 32 nt, Homo sapiens
cgacagcaccgagagggcgaagccggccacag

SEQ ID NO: 202483 - RNA, 72 nt, Homo sapiens
accacaaacgcgcacccaacaccaggaggccccgcggggcaaacgcccagggaggcacgcccccacagaaag

SEQ ID NO: 202484 - RNA, 81 nt, Homo sapiens
gacaacgccccgggaccggagcagaacccccgcagagaaagacaggaaaaaaccccacagccccgaaagccagccggagac

SEQ ID NO: 202485 - RNA, 75 nt, Homo sapiens
gcggagcggagcggagcccggaggggggagaacccacaaggcccagaccagaagagacgaaaaaacccaggcaac

SEQ ID NO: 202486 - RNA, 87 nt, Homo sapiens
cgcggccgcgacccagccagccagcaaccggaccggcccccgggcggggcgagcaagccccggaggaccgggggacagcggcccagg

SEQ ID NO: 202487 - RNA, 40 nt, Homo sapiens
gagcgcagagagaagcagagacaacggcaagcggagaaga

SEQ ID NO: 202488 - RNA, 71 nt, Homo sapiens
cagaagggagaccagcagaacccaccagaaccaggccagggcagcaagccggcgggcggacgggcggcacc

SEQ ID NO: 202489 - RNA, 76 nt, Homo sapiens
aggagaaaagaacagggcggaagaaaaccaaaaagcagggaaggaaggcccaccgcggccccgaggagaggggacc

SEQ ID NO: 202490 - RNA, 71 nt, Homo sapiens
cgacagccgcgacggcgagcccgggccgcgcccgagcgccccccccggacagaaggccggccgggacccga

SEQ ID NO: 202491 - RNA, 116 nt, Homo sapiens
cagaagaccagacccgccgccggaacgcgccgagcggccgcccgcgggagacacaaacacagacagagcgccagcccaggcgcaacggggaccggccacacaacccgccccgggca

SEQ ID NO: 202492 - RNA, 103 nt, Homo sapiens
agaaccaaggaccaaggacccaaagcacaggaaccaccgaaagcggcgcaacgagggaagcaaaaaaagccaacggaccccacaaaagagagagcgaccaaaa

SEQ ID NO: 202493 - RNA, 56 nt, Homo sapiens
ccgcgggagccgaagggaaggagaaacaacaagaaaacggcccggacggaggaaaa

SEQ ID NO: 202494 - RNA, 56 nt, Homo sapiens
aaacaaagcgcgcagaaagggcgaccaccaaaaaaacggggcaaaagcagcgagag

SEQ ID NO: 202495 - RNA, 88 nt, Homo sapiens
gaagcccccggcgccgacggcccgccccgcgggggggggcgcagccgcgcgcccgcacaaagaacgggaagggcacaggaagaaagga

SEQ ID NO: 202496 - RNA, 35 nt, Homo sapiens
cgggagcggcccccgagggacgggacagcagacca

SEQ ID NO: 202497 - RNA, 84 nt, Homo sapiens
agaggaggcggcgaggcgccgcggggcggccgccagcacaagcgcacccgcacagggagcaacagcgagcaacaggcaacgaaa

SEQ ID NO: 202498 - RNA, 75 nt, Homo sapiens
cggcggcggcggggggacgcacgagcccggcgccggcaggccccgggccgggggccgccccgggggcccagacaa

SEQ ID NO: 202499 - RNA, 61 nt, Homo sapiens
accaagggcaaaggcacaaaggggcgccccacgcccccaccaaagcccagaaggagcgagc

SEQ ID NO: 202500 - RNA, 73 nt, Homo sapiens
cccagccggaagccgcggacagccgggccgaacgcggaaaccagaccccagcgccccccgcccacggacggac

SEQ ID NO: 202501 - RNA, 73 nt, Homo sapiens
agcgggacagcaggcaaccccagggagccacgccccaggggagccaacgccagcagccgcaccagggccaggg

SEQ ID NO: 202502 - RNA, 72 nt, Homo sapiens
ccccgggcccacgacccagcggccccggaaaagacagaggcaacacaccgaaaaaagggaagcggagaggag

SEQ ID NO: 202503 - RNA, 71 nt, Homo sapiens
cggggcacacagccaagacacaaggcagacgcaacaaaaaaagcaaagagccggagcaacaccgggaaggg

SEQ ID NO: 202504 - RNA, 79 nt, Homo sapiens
agacaccaccaagccccccaggagaggaagaacaaacacccagagaagccgagaagagaacacgccaaaaagaccaggg

SEQ ID NO: 202505 - RNA, 64 nt, Homo sapiens
cccgccgccgcgagaagcaaccacagaacgacaaaacccgccagcacaacccaagcgcacagcc

SEQ ID NO: 202506 - RNA, 85 nt, Homo sapiens
gaggcgggggccgacagcggcaccagcagcgcgccccgaagaaccgagcggccagaagccgagggggagcgaacacagcaaagac

SEQ ID NO: 202507 - RNA, 85 nt, Homo sapiens
cccaagacaacgaccccacagaaacaagccaccaggagaagcaaaagaggcccagacggagcggacagacggaagaagaagagca

SEQ ID NO: 202508 - RNA, 58 nt, Homo sapiens
gagagccacaagcgccaagaacagaaagccgagggaacaaaacccagcgaagcggcga

SEQ ID NO: 202509 - RNA, 71 nt, Homo sapiens
gccacgcacagcagccaaaaccagagacaagcaacacaccacagcagcgaagcagggggaggacaagcggc

SEQ ID NO: 202510 - RNA, 75 nt, Homo sapiens
aggcaccaacgggcaaaaaagccagaaagccaaggaagaaggggggccgggcggggccagggcggacgccccggc

SEQ ID NO: 202511 - RNA, 56 nt, Homo sapiens
gacaaggcggccccagcgcaggaaggggagccgcacggcccggccaacgcaacagg

SEQ ID NO: 202512 - RNA, 77 nt, Homo sapiens
aacacgaacaacagggcaagagaacagcacccggacaaccaggcgccggcgaaagcaacgaagggacgccagaacaa

SEQ ID NO: 202513 - RNA, 58 nt, Homo sapiens
gcgggcagcgcgcggcccgggcagcagcccgccggagaacgaggaaaggcggagcagc

SEQ ID NO: 202514 - RNA, 67 nt, Homo sapiens
aaaccaacgcaaaaacgaaacgacagaacacaccccagaacaggcggccggccagaacggccacggg

SEQ ID NO: 202515 - RNA, 72 nt, Homo sapiens
cgccggcccgcggaaaggccaaagcccagccccaggcacagaccccagcgaggcgggacaagggcgcaccgg

SEQ ID NO: 202516 - RNA, 57 nt, Homo sapiens
gggaaacggggcgagaagcgaccggagaagagaaaagggaaggcacggaggaagccc

SEQ ID NO: 202517 - RNA, 76 nt, Homo sapiens
ggcgaccaaccaacaaccacgggaagccgcggccccaagcaccagcccacgaaacgcagcagaggcagaacggaag

SEQ ID NO: 202518 - RNA, 70 nt, Homo sapiens
gccgcaggaaacgcaagcccggaagcagaagcaacgaagaggagaagcaggaccaagacacgcagacacc

SEQ ID NO: 202519 - RNA, 78 nt, Homo sapiens
aaggaagagccacggagcgagaacgagagaccgaaaaagaaggacgagccacaagaagagagaagaacacgaagaaaa

SEQ ID NO: 202520 - RNA, 76 nt, Homo sapiens
agcagcccgcagagccgcacaccccggccggggccgccacgccgggaaggaagccgcccccaacgcagacgccacc

SEQ ID NO: 202521 - RNA, 76 nt, Homo sapiens
gcgggacagcaaaaagacccaccaaggaagcagcggccacgccagggaaccaggaagaaagaagacggcaagaaca

SEQ ID NO: 202522 - RNA, 119 nt, Homo sapiens
cggcccgcccggggggaccccaccagaggacagccagccggaccccagcccaagaacagacacggaccaccgggggccgggcaccacggcgcccccgcggcaccccagccacgaagcca

SEQ ID NO: 202523 - RNA, 71 nt, Homo sapiens
gaggaacaaaggcggaaacgaaggggaggacacagaagggggaggaacagagggacgcaagaacaggaagg

SEQ ID NO: 202524 - RNA, 81 nt, Homo sapiens
ggagaggccacagaaaggaaccaggccccagaagagcggaaggcggaggcccgggaggcgcggacagacagaacagagaga

SEQ ID NO: 202525 - RNA, 73 nt, Homo sapiens
aacaagcacgcagacgcccacccggccagcgacacaggagagcacaaaaggcagcacaagggaggaagcccgc

SEQ ID NO: 202526 - RNA, 77 nt, Homo sapiens
gggacaggcgagggccagaaacgaaggccagaagaggagaaaagaaaagaaagaccgaagaaagccaaagacagccg

SEQ ID NO: 202527 - RNA, 76 nt, Homo sapiens
cccccccccccaccccggcgggggacacgcccccggcagcaggaacgcacaccagcaccagcccaccaaaccagca

SEQ ID NO: 202528 - RNA, 71 nt, Homo sapiens
gggaccaacaaccaccaagaaacagaggcgagccccaacagaccgggaggaacggggggcgggcacagggg

SEQ ID NO: 202529 - RNA, 73 nt, Homo sapiens
cgcgcaggcggagacagcgggccgcgcgccggaaccaaaggcaagaaccggagcaggagaaaagccggaaaga

SEQ ID NO: 202530 - RNA, 71 nt, Homo sapiens
agaaacgcagggcaggaggcggccaaaggaaacacagcgcgaacggagaaggaaaaagaaacggaacccca

SEQ ID NO: 202531 - RNA, 82 nt, Homo sapiens
cggggccggccggggaaggcgggggcaaaggcaagaaggagagaccacgaggaggggcaggaggggacagaccagagcagga

SEQ ID NO: 202532 - RNA, 81 nt, Homo sapiens
caccacaaagagacagagaccagggcccgggcccgcgggccgcgcgagaagcggaccaaacgcacccaacccggcagccac

SEQ ID NO: 202533 - RNA, 34 nt, Homo sapiens
gaagggacgaaaaccgaggcagcacaagggaaac

SEQ ID NO: 202534 - RNA, 73 nt, Homo sapiens
cgcgccagaaaaaacgcagaacggcaaaaagggaaagcagaagagaacgaaagaacagaagagaaacaaaaaa

SEQ ID NO: 202535 - RNA, 73 nt, Homo sapiens
caccccagccggaagccggaccgcccaagaaacgaaggaggcccaaccacaaaaggagccgacggaacccaga

SEQ ID NO: 202536 - RNA, 74 nt, Homo sapiens
gcggcgggccgggcagcccggccgacaaccacggagccaagccgccaggccaccacagcccggggagcccacag

SEQ ID NO: 202537 - RNA, 40 nt, Homo sapiens
gacgagaccaccggccaacaggacccgccggcggcccgcc

SEQ ID NO: 202538 - RNA, 50 nt, Homo sapiens
gacaccagcacagcacgcgaaaagaaaggcagaccgaaaagggcggaaaa

SEQ ID NO: 202539 - RNA, 53 nt, Homo sapiens
ggaccaagaaccagcgccacgggacagccaacaccagaccgagcccacgcgcg

SEQ ID NO: 202540 - RNA, 75 nt, Homo sapiens
gcggggccgcggccgcgcgagcagcgccgcggggacccaaagaacaagccacacgcccacaaggaagaaggaaac

SEQ ID NO: 202541 - RNA, 56 nt, Homo sapiens
cgggaccgggggcgcagcaccgaaccggaacaccaggaacgacacaggagcccgag

SEQ ID NO: 202542 - RNA, 76 nt, Homo sapiens
aacacacaccaaaaacagaaggagacagaggacaggcaacacccgacacccccaaggaaaccagagaccagaagag

SEQ ID NO: 202543 - RNA, 74 nt, Homo sapiens
caggagccccgccgccgcgcaccgcccgccccgcaccgacaacggcaagcggagaagagcaaggccgaaccgag

SEQ ID NO: 202544 - RNA, 95 nt, Homo sapiens
gaggaaagcaggaggaggggcggcggcgggaagaacaagcagaccggaagaccgacggaagaccacaccccgagggagcccaggacaccacgaga

SEQ ID NO: 202545 - RNA, 79 nt, Homo sapiens
aacgggaagcaaggaacaagggcaaggaagaagagaagcgcagggacagcaaaggccgggaaggcgcccggcgaggccc

SEQ ID NO: 202546 - RNA, 75 nt, Homo sapiens
ccagaaggcagaggaggcgcaagacgcgaccaaagccgacggggcaaggggagcgagagacacggagaggacagc

SEQ ID NO: 202547 - RNA, 77 nt, Homo sapiens
aaggaacaaaccgaagaacagcgggaaagaaggcaaaacacggggccggagcgagggagagcaggaacacagagagg

SEQ ID NO: 202548 - RNA, 79 nt, Homo sapiens
ccaccacaggaggcgagaaccagagaaagaccgaccacaaacgggcaggaccaggacgccccacagggccaagaccaca

SEQ ID NO: 202549 - RNA, 36 nt, Homo sapiens
gcaaccaggaggacaaaaacgggcccgaggacgaga

SEQ ID NO: 202550 - RNA, 76 nt, Homo sapiens
gcgaggacccccccgggggcgacgacagcgggaacgaagaaccacaaagccaaaggaaacaaaagagaagaagaag

SEQ ID NO: 202551 - RNA, 79 nt, Homo sapiens
gaccccagaacccggacaccaggaaaaccagcacgagggacaggcgcgccccgagggcagaaggaaggcaaccacacca

SEQ ID NO: 202552 - RNA, 72 nt, Homo sapiens
gcaacccccagcagcacggggaaggaccggacccggcccgggagcaaagagggaaggggaacaggaccggcc

SEQ ID NO: 202553 - RNA, 74 nt, Homo sapiens
caggcaccaccggccccggaaggacccaaagacaggaccacgcaccagcagagaaggaaagcaaaccgaagcag

SEQ ID NO: 202554 - RNA, 70 nt, Homo sapiens
agagagcgaaggaccaagggaaacacagcagaaaggagagaggagagagaggaacagggagcggggcgcg

SEQ ID NO: 202555 - RNA, 86 nt, Homo sapiens
agcacccaccccggagggggaccacaagacccacgacagagaaggcaccggccaaagggggcgaccgggacaggacgacgacagcg

SEQ ID NO: 202556 - RNA, 64 nt, Homo sapiens
ggcagaacaacgaacagaagcacaaccagagccggccccgagccacaaagaagaacagaacacg

SEQ ID NO: 202557 - RNA, 93 nt, Homo sapiens
ccggggaccccggccgggggcggcggccgggggcccagcccgggcggcgcggccagcgggcacagagagacccagcgacgagcaaaaggccaa

SEQ ID NO: 202558 - RNA, 74 nt, Homo sapiens
gcgcagaccaccaaacccaggaggagacccccggaaaaccccccccggcacaccggcagcaccacaaaccgaca

SEQ ID NO: 202559 - RNA, 79 nt, Homo sapiens
agcgcgaggaggagccgaagcccaaaaagcgaaggggaggcgccgcaagcgcgagacagaagaaagggagcccccaaga

SEQ ID NO: 202560 - RNA, 71 nt, Homo sapiens
caaaggacagggaacaccaccgcaccagaagagcgagccgaccgaagcaaaacagaaccaccgcgaagaag

SEQ ID NO: 202561 - RNA, 74 nt, Homo sapiens
gaggcggggcgccaagaccagcagcaccaggagccccccgcccagacaagaggagacaaacaagaagcgacccc

SEQ ID NO: 202562 - RNA, 34 nt, Homo sapiens
gagaacaggagacgggaagggcgaagcaacaaga

SEQ ID NO: 202563 - RNA, 70 nt, Homo sapiens
gaaaaccaccacaacccaggaaggaaaccaaggggcagacccaaaaaacgggaggaagaggaggagagaa

SEQ ID NO: 202564 - RNA, 95 nt, Homo sapiens
cagcgggcgagaagcgcccggccagccggcggagcccacgacgagcggaaaagggaaaagcacagggccaggaagcagagggacagccaggccag

SEQ ID NO: 202565 - RNA, 36 nt, Homo sapiens
acagaagcggggaacaagaagaccaaagcagggaaa

SEQ ID NO: 202566 - RNA, 113 nt, Homo sapiens
cagggcccaggaggaagggagcggcaggcccccagaccccgagggcggaagcggggggacaggcagacggagcgagcggcgccccggcccggccaccaaggaacagagccagg

SEQ ID NO: 202567 - RNA, 81 nt, Homo sapiens
acaaaggacaaaaccaccaaaaccaaggcacacagaaagcccaagcagacccccaggaaaaaaagcccagaaaaagaaaga

SEQ ID NO: 202568 - RNA, 80 nt, Homo sapiens
gcccgcagaaacgaggcggaggaagaaggaagacagcgagaagccacgcccaggaagaaaggaccccagaccgagagggg

SEQ ID NO: 202569 - RNA, 105 nt, Homo sapiens
gccccagcgccaggagcacccgagaggaagagcggcccccggggggaccacaggaccccagacacagcacagagaaaccaggagccaacgccccagcacacaggg

SEQ ID NO: 202570 - RNA, 54 nt, Homo sapiens
ggcccagccggaagaagaacgaacccaacgccccaccagccaggacgcagggcg

SEQ ID NO: 202571 - RNA, 67 nt, Homo sapiens
aacagcagcacagagaggggagaaccaaaccggacgaacgcagccggacaggacaaaaggacacaac

SEQ ID NO: 202572 - RNA, 78 nt, Homo sapiens
cacaggaggcaaaagcacagagaaaagccaggaagggaagagaaaacccagggagacagcaccccagcgacgcggcca

SEQ ID NO: 202573 - RNA, 53 nt, Homo sapiens
gggccgaggagacaggagaagggaaagaccacagcaagaccacgcccccagcc

SEQ ID NO: 202574 - RNA, 76 nt, Homo sapiens
gagacgagaagccgaaaagcgcagcgagcggagccgccggaggacacggcgcagcaacaaacagcggcgacaaacc

SEQ ID NO: 202575 - RNA, 76 nt, Homo sapiens
gagcgcccccggccacggcccaggcacggcccccagcgcagccgcagccagccggagggacccccccacaagccac

SEQ ID NO: 202576 - RNA, 78 nt, Homo sapiens
acaagacgggcacgccaccaccaacagagcgcgccggagggacgaaggccgcagggcggcccagggcccaggcgccca

SEQ ID NO: 202577 - RNA, 73 nt, Homo sapiens
ggcgcaggacacacgaagccgagagaccagaggacaagacaaagggagcaagacaagccaaagaggaaaagca

SEQ ID NO: 202578 - RNA, 109 nt, Homo sapiens
gccgagcacagacaaccaacgggaaaaaacacccaagaacacgacggaacaacaaagggaaaagggaagccccgccaaagacggcccagggagaaacagaagaaaaaga

SEQ ID NO: 202579 - RNA, 83 nt, Homo sapiens
aaaggccccgaggacggagaggcagaggaggccgaggcgagggcagcggaacgcgccgacgccgcaaccagcaccccgaggag

SEQ ID NO: 202580 - RNA, 80 nt, Homo sapiens
caaagaagagagggaagaccagaagcacacaagggggcccgagcccagcagcgaccggcccgccgcgaggcagcccccgc

SEQ ID NO: 202581 - RNA, 82 nt, Homo sapiens
cccaggcccgggcgccccccacagagaaaggggggaagccagccaggacaaagagcaaccgaaggaaggaaaagaaggagca

SEQ ID NO: 202582 - RNA, 87 nt, Homo sapiens
ccgggcccaaggccgcgccgaccgcacgcgcacggaacagcagcaaccccaggggggaggcagcaaaggaaggacaaaaccgaaaga

SEQ ID NO: 202583 - RNA, 61 nt, Homo sapiens
gagcagggcgagagggcaccgcggacggggccgcccagggcggagaacggaaaagcaccag

SEQ ID NO: 202584 - RNA, 85 nt, Homo sapiens
cagcggccgcgcacccccggccggaggcaccagcgcgccggcgaaagcaacgaagggacgccagaacaagagaaggagagcagaa

SEQ ID NO: 202585 - RNA, 52 nt, Homo sapiens
agacacgacaccaccaccccaccccggggaaacccagacgacaaggaaggcc

SEQ ID NO: 202586 - RNA, 75 nt, Homo sapiens
gccaagagagggacaaacgggaaaaagcacaggggaccagcagcagccgcgaggcgaggagacacagggacggcc

SEQ ID NO: 202587 - RNA, 76 nt, Homo sapiens
gaaacgaaacagaacagagagaagcccaggcggagaacggaaaagcaccaggaagcagagaggaccgcagaaggga

SEQ ID NO: 202588 - RNA, 76 nt, Homo sapiens
agcgggcaccggcgagaggccacaaggcacgggggccagcaaccaccaagggaacagcacagagcccaaaaggcag

SEQ ID NO: 202589 - RNA, 82 nt, Homo sapiens
agacaccaacaaaaccaacacaaaagacacacgaaacagaaacagggaaagcgaacgcgaaaagaaaagccgagagcagcca

SEQ ID NO: 202590 - RNA, 30 nt, Homo sapiens
ggagaagccggaagccaggaaggagaccga

SEQ ID NO: 202591 - RNA, 80 nt, Homo sapiens
ggcccaacgaggcgagggcgccccaggagacgcagccagcggaaacggagggaaagaagaagaggagggacacccgagag

SEQ ID NO: 202592 - RNA, 67 nt, Homo sapiens
ggcaagccgcgcgccaggggcacccgaggggggacagaggccaggaagcaggccgggcacgcagaga

SEQ ID NO: 202593 - RNA, 78 nt, Homo sapiens
aaacacggcggccagggccgcggggaccgaaaggacagaacaggaccggaaaggaacaaaacaggaagcggaaaacag

SEQ ID NO: 202594 - RNA, 80 nt, Homo sapiens
ggaagcgcgggaagggaaaggcaaaccgaacgccgccagaggccacgcgccgccagccgcggagacaccccacccaaggc

SEQ ID NO: 202595 - RNA, 69 nt, Homo sapiens
gcgaccagagaaaacagagggcagacgaggagcagcgcggccacgaaacagcgaaacccaagcacgccg

SEQ ID NO: 202596 - RNA, 55 nt, Homo sapiens
aggaccaaaggagcacagagccggaagcaacgaggccgaaaaagagagcgaaaac

SEQ ID NO: 202597 - RNA, 59 nt, Homo sapiens
ggcgaagaggcaccaaaaagaaccgcagacagcgcacggaacgcagaaggaccaacgcc

SEQ ID NO: 202598 - RNA, 74 nt, Homo sapiens
acggagacacggggaaagagaaggacccgaaaggcacccaggaggcgcagccacaagcccgaggcgagggacca

SEQ ID NO: 202599 - RNA, 79 nt, Homo sapiens
gagccggaccaggcacacgccgcaagcgacggcgccagagcgacccagccagcgacgaggcacaaaaagggcaagaaag

SEQ ID NO: 202600 - RNA, 72 nt, Homo sapiens
gaccacaagacgccaaagaggggggccccccacgccaacgaccgcccggcagaagcagacccaagagcgggc

SEQ ID NO: 202601 - RNA, 82 nt, Homo sapiens
cggcccgggcccggccgagcgggcacgagcggaccccgcccaggccgggagcgcacaagggcccaacgaaccgaagagaaaa

SEQ ID NO: 202602 - RNA, 66 nt, Homo sapiens
aggaaacgaacaacaccaacaggagagacaccaggagacagcaaaaacaaagaagaccggcacgag

SEQ ID NO: 202603 - RNA, 80 nt, Homo sapiens
cgaagcgagggcgaagcacgacacagaaggggaggggagggaaaggcccaggaaaaaggaccaagggaaacaggcaccca

SEQ ID NO: 202604 - RNA, 75 nt, Homo sapiens
accagcaagcgaaggaggaccagacaagaaggcgagacaaagaggcacccccacggcggaccagcacagaacaga

SEQ ID NO: 202605 - RNA, 76 nt, Homo sapiens
agccgggagcaagaagaacacccagagcggaggcgagaagccaagacaaggcaccaacagacaggcgagaaggcgc

SEQ ID NO: 202606 - RNA, 75 nt, Homo sapiens
cacagggcaacaacaacgccccgagcagaagacagaaggcgggcacacaacccagccacaggcaacgaaaacaac

SEQ ID NO: 202607 - RNA, 83 nt, Homo sapiens
gaaaggcgaccggaggaaggaaggcggagccagccgaggggagaagagcccagagagccccgacagcccaagacagaagccgg

SEQ ID NO: 202608 - RNA, 82 nt, Homo sapiens
ggaggcggcccgcccggaaggcaagcgcagcaacaacagagagcacgggacggcggacgaacccaaccccagagacagaccc

SEQ ID NO: 202609 - RNA, 72 nt, Homo sapiens
cgcgccacaggagccgggggggcgcagccggcggaaggagcccaaaagaaacagggcgcaggaaaagacgag

SEQ ID NO: 202610 - RNA, 73 nt, Homo sapiens
ccccgagagcgggacgcagggaccagaggcgggccgcagagagcggaagacggagaacgaggaaacgcccaga

SEQ ID NO: 202611 - RNA, 75 nt, Homo sapiens
acgggcagaccacggaggaaaccccccaggcaagaggcgcaggaccgggaagaccaacaaacgcaccgcggccag

SEQ ID NO: 202612 - RNA, 71 nt, Homo sapiens
aaaccaccaccacaaagccaagagaagccaccggaggcacagggcggaggcaagggcaaccggccacgcaa

SEQ ID NO: 202613 - RNA, 82 nt, Homo sapiens
acagaaccggaccggaggcaggcacacacccaggcagccacgccacacaccaaggaccccaggacaggaccaggagccccac

SEQ ID NO: 202614 - RNA, 75 nt, Homo sapiens
caacccagcggcaagggcggacgcccagagggagacgaaggagacagcagggcaaaacagaggggaagacagcaa

SEQ ID NO: 202615 - RNA, 76 nt, Homo sapiens
gccaacccagaagagccaaggcaacacagagcgaccgaaagaacaaggggaacaacagcaggagaagcgacaacac

SEQ ID NO: 202616 - RNA, 82 nt, Homo sapiens
gcggggagcggcgaagccgcgggcgagagcgcacagcgaggaggggggcgcgcagcccggggaccccccgccccagcaggca

SEQ ID NO: 202617 - RNA, 83 nt, Homo sapiens
ccaagggagcgccccccaagagaccccacaggccaaagaagaaaggaggagaaaggggagaccaggcgagccaggagcggggg

SEQ ID NO: 202618 - RNA, 51 nt, Homo sapiens
agcagcccccagagcggaacacagcccaaacacagaacaggaaggaggcgc

SEQ ID NO: 202619 - RNA, 72 nt, Homo sapiens
ggaaggacgcaaaggcaaacgcgacacaagggcggaccgcaggcaaaacaaggcagagcaacagggacacaa

SEQ ID NO: 202620 - RNA, 47 nt, Homo sapiens
ggaaccacacacaccacaggaagccaggaccagcgggacaaggagaa

SEQ ID NO: 202621 - RNA, 75 nt, Homo sapiens
acacgcacaaaaaagggcagaagagaagcaggaaggaggcagaggcacaccgaaagagcgcgacagagggagagc

SEQ ID NO: 202622 - RNA, 66 nt, Homo sapiens
agcaaacagccggccacggcccaaacacacccaggcccaggaagaagaggaaaggcaagggcagaa

SEQ ID NO: 202623 - RNA, 77 nt, Homo sapiens
gccaccccacgccaccagaacccaagagcagggacccaggccccacgagcggggccagagagagccccggggcccgc

SEQ ID NO: 202624 - RNA, 96 nt, Homo sapiens
ggcagcggagcacgaggcgggcagcagcagccccggggcccggagagggcaggaggacgcggcggcggcgaggagaccccggccccggaggccccg

SEQ ID NO: 202625 - RNA, 77 nt, Homo sapiens
cgcgccgcgcccggaccccaggccccgggggcgccgagggcacaagggcaacgacagaagggcgaagccaacgccag

SEQ ID NO: 202626 - RNA, 64 nt, Homo sapiens
gacagcaccagacaccccggcccacacccccgccacgcccgccacggaacccacacacaccacc

SEQ ID NO: 202627 - RNA, 77 nt, Homo sapiens
aggggaccaggaccccaggggccggcagagacgcaacggcggggaccgagccacagcagaggcagaggaagccccga

SEQ ID NO: 202628 - RNA, 79 nt, Homo sapiens
gcccgacagggagacggcagccagggcaaaaaccggacccgcccaggggaaagggcacgacacggcgaagagagagaaa

SEQ ID NO: 202629 - RNA, 80 nt, Homo sapiens
cgcacgcacccccgccaggcccgcgggagcaccgggagccgagggcggaggcgacacccagaagcgaaaccgggaggaga

SEQ ID NO: 202630 - RNA, 55 nt, Homo sapiens
cgggcgcgcggagaggccgggccaacacccgccgcagacagccgcgggcccgcag

SEQ ID NO: 202631 - RNA, 85 nt, Homo sapiens
aggagaaagaccccgccaggcagcaaaaacaagcagcgcgcagggaccagcggcggagaccgcgagcggccccacagaggaccag

SEQ ID NO: 202632 - RNA, 72 nt, Homo sapiens
gacggaacaggcagaaaagcacaacagccaagcggcccaaagcacaagcgaccgccgaaggagcccccgaac

SEQ ID NO: 202633 - RNA, 74 nt, Homo sapiens
ccaggccaaaccaaacggagcgggcagcaggaagggacggcgcgcgcgcgacgcggagaagagcgaggaccaga

SEQ ID NO: 202634 - RNA, 78 nt, Homo sapiens
ggagaaggcgcaacgcggcgccaggacccaaggggccggcagagaaggggaagccggggcaggggcgcacagagccag

SEQ ID NO: 202635 - RNA, 68 nt, Homo sapiens
gaaggcaggaggacgacgcaggcccagggagggaggggcaaaaggaaaaaggaaaccgggcggggcag

SEQ ID NO: 202636 - RNA, 81 nt, Homo sapiens
ccaagccagggcagccaccggcaccaggccaggagggcccaccgcggagccccgcagaggggggaccacaggccacccacc

SEQ ID NO: 202637 - RNA, 78 nt, Homo sapiens
gaaggccaaagagcacacgccaaagaacagagggcgccacccagacgagagaacgagaacaagaaaagaggccacaag

SEQ ID NO: 202638 - RNA, 77 nt, Homo sapiens
caagacaagaccaggcacacgaccaagaagcaggacccaggccaagccaccaagcgacagaagggcccgagaacacc

SEQ ID NO: 202639 - RNA, 76 nt, Homo sapiens
gaaaagagaagagggagacgagacggaggaggcgagaaaggcgggaacacggcccccagaggagccgccggcccag

SEQ ID NO: 202640 - RNA, 69 nt, Homo sapiens
agggcacaaacggcccgggcgcggcggacacggggcagcaggcgaacaccccagggccgaagggggccc

SEQ ID NO: 202641 - RNA, 81 nt, Homo sapiens
acggccagcggcaccacccccagcaccaccccagccccgcgcccgacagggaagaagaccgcaacacagcaacccagacca

SEQ ID NO: 202642 - RNA, 87 nt, Homo sapiens
gcgaggccggagaaacaggcgccgcgggcccgcgcccggccggacccgggcccgaggacccgacaaacggacagcaggaccagaaca

SEQ ID NO: 202643 - RNA, 76 nt, Homo sapiens
aggacccaagccgacaccacaacaaagaagaccacacacgggaaacacaaaacgcccaacacaacgagcaaagaag

SEQ ID NO: 202644 - RNA, 64 nt, Homo sapiens
cggcgggaggccaccgccaggggaagaacacggaaaccggacagggacaggaaagaacaccccg

SEQ ID NO: 202645 - RNA, 84 nt, Homo sapiens
cccagaccgacagcagcgaaagaccaggaaagcaccaacggagggaagcagcagaaggaagagccgcgggcagcggcagaacgc

SEQ ID NO: 202646 - RNA, 83 nt, Homo sapiens
aggaacgcaggggcgccaccagagcgggacaaaacccggagaaacacaaacaggggagaacccaaagccaagcccacagaccg

SEQ ID NO: 202647 - RNA, 72 nt, Homo sapiens
accagaagcagcccaacgagcgccagcccggggaggaccgaagcaaccaacgcggcagccaagacagagaaa

SEQ ID NO: 202648 - RNA, 78 nt, Homo sapiens
ggagccggggcgggagcccgagggaagaggagggagaggggggacgcggcggcggcggacaagggggccaggacggga

SEQ ID NO: 202649 - RNA, 78 nt, Homo sapiens
gcagaagcacagcgcggagaacacgaaaaaagaaaacacggaaagaagggggagacaaccagggcgagggcgaaccac

SEQ ID NO: 202650 - RNA, 61 nt, Homo sapiens
cagccccgcaccgggcaccagcccaccacaacccgcaaaccagccggcgggcgccacaacg

SEQ ID NO: 202651 - RNA, 111 nt, Homo sapiens
gggggagcgcccgcccgcgccccgccgggaggaggagcgcccccggccgccccgcgagaacaggggaaagcgcgagcgagcacccggagcagcagagcacccaacagggga

SEQ ID NO: 202652 - RNA, 72 nt, Homo sapiens
ccaggaaggagccaaagcacaagaagaagacgagggagcccacaagcccggagggcacgagccacacgccac

SEQ ID NO: 202653 - RNA, 77 nt, Homo sapiens
gggcgcacgcacggaggaagagcaagcaggcccgagggacaaagaaggcagaccagcggagaacggagagcagggcg

SEQ ID NO: 202654 - RNA, 73 nt, Homo sapiens
caagcggagcagccccaccagaaaggaagcacgcgcgcggacaagaccagaaagaaaagaaccaaggagcgga

SEQ ID NO: 202655 - RNA, 69 nt, Homo sapiens
caggaaccaagcaccaaaaagcggacacgcaacagagagggaaaaaagaagccggagaggacacccaaa

SEQ ID NO: 202656 - RNA, 78 nt, Homo sapiens
gccgcccggccaagcacccgcagcaggaacagcgggaggagggacgacggaaggagacggggaaccacgcgagggagg

SEQ ID NO: 202657 - RNA, 81 nt, Homo sapiens
gaagccgccgggccaggccaaggagggacagggcgccggggaagcggaccgccgggcgaagggggggcagagccgggcccc

SEQ ID NO: 202658 - RNA, 76 nt, Homo sapiens
aggaagaaagcacagggacgagacagaacaacgagagagagcaaaaacaccagacaagaggcagacggccaaagag

SEQ ID NO: 202659 - RNA, 81 nt, Homo sapiens
ggccaacacggcgcgaaagccagggaaggaccaggacaaaaccccagaggaacggacaaagaaaccagaagaaggcaaacg

SEQ ID NO: 202660 - RNA, 80 nt, Homo sapiens
caagaaagccaaacgaggagaggaaacaagggaggcgaggacggacaaaaggaaacggacgggaggccagccagcagaag

SEQ ID NO: 202661 - RNA, 81 nt, Homo sapiens
gaggagaccgacagaccgccgacgacgcaagcagcgggaggagcaacaccaaacagcgggggaaagaccagaaaaagagcg

SEQ ID NO: 202662 - RNA, 58 nt, Homo sapiens
ggaggacagggaaaggagcggggagccccgcgccacagggaaaggacagcaggaaacc

SEQ ID NO: 202663 - RNA, 114 nt, Homo sapiens
aagacaggccagcagagcaacacccagcaaaagaaacgagccaacagcagagcccaggcgaggaagagacaagcaagagagaacacacgcagcagaagcgaagagcagcagagg

SEQ ID NO: 202664 - RNA, 63 nt, Homo sapiens
cgacacgccacgcaccccccgccggccgcgcccgcgaccagcacaaacggcagaacgaagccc

SEQ ID NO: 202665 - RNA, 49 nt, Homo sapiens
agaaggaccaagaaccaggaaaccccacagcaacagggagagaaaagcc

SEQ ID NO: 202666 - RNA, 55 nt, Homo sapiens
gaacgggggccgaacgcgagaacaacacaacagagagcaaaagacccggaagaga

SEQ ID NO: 202667 - RNA, 38 nt, Homo sapiens
cacagggcgggagaagcaggggccggacaccccagaca

SEQ ID NO: 202668 - RNA, 89 nt, Homo sapiens
ggcagccgcagaagcggcagcggcggcggcgcggcgcaggcaccggcccggggagaggcaccagagcgggaagaagagggcgggcgggc

SEQ ID NO: 202669 - RNA, 72 nt, Homo sapiens
ccagaggccgccaacgccgaagggaaaacaggaacaagagcaaacggcgaaaccggcacagaagcacgggac

SEQ ID NO: 202670 - RNA, 55 nt, Homo sapiens
gaaaacgggcagggcagccacaaagaggagcacgagggcagccaaagcaggcaca

SEQ ID NO: 202671 - RNA, 76 nt, Homo sapiens
acaaggcgcaagcgaaaacagaccgcgagcccagaggaagagaaacgggcacaaggacgccggagaggaccgggaa

SEQ ID NO: 202672 - RNA, 79 nt, Homo sapiens
ggcaaccgggcggccacgcccgcgcagaacccaggagaaacgagagggacagcaaggaagacgccagagagcggcacac

SEQ ID NO: 202673 - RNA, 38 nt, Homo sapiens
cccaaaggcgagaacagccaggagacaagaagcaaaaa

SEQ ID NO: 202674 - RNA, 67 nt, Homo sapiens
cgccggagcaggcgccggagcgacccgaaaacgaggcgcgacaggaacggcggaggacccacaggag

SEQ ID NO: 202675 - RNA, 78 nt, Homo sapiens
cgcggcgccgccaacgcgcccccgagcggagcagccagcagaggcgcgccggagggaggaacacccaggagggaccag

SEQ ID NO: 202676 - RNA, 83 nt, Homo sapiens
cggaagagcgaaaccagagcaggagcgagaagcccaggacaagggggaaccccaaagcggcacagggacacacgcgcgaagga

SEQ ID NO: 202677 - RNA, 38 nt, Homo sapiens
acccagcacgagaggcgagccaggaggccgacccgacc

SEQ ID NO: 202678 - RNA, 78 nt, Homo sapiens
acaagcagccaaaagcgcccaggggaaccacaaagaagacaaagcacgcggaaagcgaacgcgaaaagaaaagccgag

SEQ ID NO: 202679 - RNA, 86 nt, Homo sapiens
gagagggaccggaaaagagccccaaacgccccaggagagagagaacccacaggaagcaggacacccgccgggcaggagacagcgaa

SEQ ID NO: 202680 - RNA, 77 nt, Homo sapiens
ggggcagccaccgccaggaccccagaaaggcggagaacggaaaagcaccaggaagcagagaggaccgcagaagggaa

SEQ ID NO: 202681 - RNA, 82 nt, Homo sapiens
cagcagcgaagcgacggagcggcaggcgagcaggcgacgcggacccgagggcgaggacaacacggcggggaagacgacggcc

SEQ ID NO: 202682 - RNA, 70 nt, Homo sapiens
agaaggggcgccagggaagaagaagcagggcgagcgcgagcagccgggaacgaggccaacaagggagccc

SEQ ID NO: 202683 - RNA, 66 nt, Homo sapiens
agaaggaccaagaaccagggagaaaccccgccagggggacccaccagaagggcggcccacagagag

SEQ ID NO: 202684 - RNA, 86 nt, Homo sapiens
cggcaacccacaaggccaagcacccccgcaccagccacacaccagaggcgggccaggccagcgggccggggagcgccagccgagag

SEQ ID NO: 202685 - RNA, 97 nt, Homo sapiens
gccgagccagccgcggccggaggagcccccaggccgccaaaacagaagaggcaaagcccagccacagcagcagcccagcagcaaacaaccaaagaga

SEQ ID NO: 202686 - RNA, 38 nt, Homo sapiens
gaccgaggaaaagaagagaggacgagagcacagccccc

SEQ ID NO: 202687 - RNA, 76 nt, Homo sapiens
gaaggagccaaccccagcaaaagccaaggaccccgcgcgaaccaacaagacagggaaaggacccggccaaggcgca

SEQ ID NO: 202688 - RNA, 70 nt, Homo sapiens
gaggagcggagacccagaaccggcccagaggacacagggcgaagacggggggacacgcggaggaggggcc

SEQ ID NO: 202689 - RNA, 65 nt, Homo sapiens
gagcggggaagggggaaaggcaccaggacaagcaaaggaacaggaaaaagggcaagaagcaccaa

SEQ ID NO: 202690 - RNA, 63 nt, Homo sapiens
agcgaagagcggggacagagcacacgccagcaacgcaggcacagccgagagcagccgggccga

SEQ ID NO: 202691 - RNA, 90 nt, Homo sapiens
agaagacgacgcaccgcaggcagacaaaagggccaaagaagggagagaggacagggcagaccgccagcagcacagcaagccacagagagg

SEQ ID NO: 202692 - RNA, 67 nt, Homo sapiens
ggaagacccagaagaggcagccagagaaagaaggggaagcagcgaccgagaggaggagggacgagga

SEQ ID NO: 202693 - RNA, 76 nt, Homo sapiens
acgggcaaaagaccaaagaaggcaaggagagaagagaagaacagcacaggacagagccggacgagcgggagaggac

SEQ ID NO: 202694 - RNA, 87 nt, Homo sapiens
cccggcccgggccgcacccgccggccccagaggagggacggaacggaggaccaagagcagggagaaaacagcacaggaaacacagaa

SEQ ID NO: 202695 - RNA, 74 nt, Homo sapiens
gaagaaaacgagccaggaacaaagagcaagagggcgaaccaaagaaggaaggcgacccaaaaccacgaagcaca

SEQ ID NO: 202696 - RNA, 85 nt, Homo sapiens
cggccaggcgcgaggaacccaccgccgcccccaccgccagcccggccgcgagcgcggccgcaggagcgccaaggggccaagggag

SEQ ID NO: 202697 - RNA, 79 nt, Homo sapiens
cgcaacgacaaaaccaggggggacaagaacggcggacccgggggaaaccgcaaaagaccaggaaacaggccgacagcgg

SEQ ID NO: 202698 - RNA, 66 nt, Homo sapiens
caaggaaagccccaagccagaggaagaagcaacagcaggaaccccagaacagacagaggggacagc

SEQ ID NO: 202699 - RNA, 51 nt, Homo sapiens
gcggacacgcaaaccacacaagcaccagcagcgcgcacccagggcacagga

SEQ ID NO: 202700 - RNA, 78 nt, Homo sapiens
gcagcggcacgagggaggcggggagcgccgcgcaacaagcggcggggaagaggcggagacaaggacccaggagacaag

SEQ ID NO: 202701 - RNA, 60 nt, Homo sapiens
acgagcagagaacagcaaaagagcacaaggacacaaggcacgaggacgaagaggaaaggg

SEQ ID NO: 202702 - RNA, 78 nt, Homo sapiens
gaggaaagggcacccagagaggccccagcacccaagcccccagccacgaggagggcaccgcccaggcacaccaccccc

SEQ ID NO: 202703 - RNA, 78 nt, Homo sapiens
ggaagccccaggcccgcgcaccacagcccaccccagaagaccggccccgcaaccacgaaaagaggagcacccacggga

SEQ ID NO: 202704 - RNA, 111 nt, Homo sapiens
cgccgccaccgaaggcaggccgcgagcagccgggagccgccccgcgccgccgcagagccgcccacagagagcagagcgacacgaaaagacagaccgacaacagcccagaag

SEQ ID NO: 202705 - RNA, 69 nt, Homo sapiens
ggcgggagacagggcccgagaaaaacgccagacggaacgggcacaaagaaggcgcaggcaagacgcaga

SEQ ID NO: 202706 - RNA, 78 nt, Homo sapiens
gaggagccagggcgagcaccaaggcaaaagcagaccggaaaacccaccggcaagaccacacccgaggggagcccagga

SEQ ID NO: 202707 - RNA, 65 nt, Homo sapiens
caggggcgaaaaagcccgaaacgggggaagaaggagaggcaaccaagggcagaccgcacaagcag

SEQ ID NO: 202708 - RNA, 76 nt, Homo sapiens
ggaagcggccaccgacacgcagcagcggccagcagaaaacacagagaaaacacggagaaacagcaacaggagaaaa

SEQ ID NO: 202709 - RNA, 55 nt, Homo sapiens
cagcaaccagaccccggagacgagaaagaaaaaccggaagggaaacccgcgacac

SEQ ID NO: 202710 - RNA, 83 nt, Homo sapiens
cgccaacgacacgcacgaggaccaggagagacagggccacgaacccgggaaagcaacgagcggagcagaggcagcacaggagg

SEQ ID NO: 202711 - RNA, 78 nt, Homo sapiens
ccggaagcaaaaaagcgggccacacaccagagcccacccaccgggccgggacacgaggaggcggcggggccacagagg

SEQ ID NO: 202712 - RNA, 77 nt, Homo sapiens
aaacccagcggcccagccggggcgccagggaaggaccgcacacaagccgcaccggacacgcgcggagcgggaggacc

SEQ ID NO: 202713 - RNA, 47 nt, Homo sapiens
gcaggcacagcgcggcccggaagccaaaacggccagcagaaggacca

SEQ ID NO: 202714 - RNA, 59 nt, Homo sapiens
agccacggaggcacagcgccgcgggaagcccgcaccccaacaaggcgccaagaggacaa

SEQ ID NO: 202715 - RNA, 79 nt, Homo sapiens
ggacagaaggcaagagaaagaagacacagaaaaagagagacgccgccggccggggagaagagcacccccaggcaccagc

SEQ ID NO: 202716 - RNA, 68 nt, Homo sapiens
gacagcacggccaagcagagcaaggacaaaccggcgaccacacacggggacgacggggaagccggaca

SEQ ID NO: 202717 - RNA, 80 nt, Homo sapiens
gccccgccgcgccgccagccggccggaggcgggcgggggcgacagggccgaccggagggggaaagaggcaaaaccgagaa

SEQ ID NO: 202718 - RNA, 40 nt, Homo sapiens
acaaacccacgaagccaacgcccaggaacagaaggagccg

SEQ ID NO: 202719 - RNA, 33 nt, Homo sapiens
gccgaggcacagaagaaagaacagcaagaagag

SEQ ID NO: 202720 - RNA, 73 nt, Homo sapiens
gacccgggagcagacgagaccaggggaaacggacgagcacaaggacgaaaaaaggaaggacaagaggagaaac

SEQ ID NO: 202721 - RNA, 78 nt, Homo sapiens
ccccaaagaaaagaaacaagccgcgaaggagagcgcggggaggggagaggcacacgaaaggacccacacacagacacc

SEQ ID NO: 202722 - RNA, 78 nt, Homo sapiens
gaaaggcgaggcagaggggcagccggggggggcacagagccccggaagacagcccccagcgaccagacccagggccag

SEQ ID NO: 202723 - RNA, 58 nt, Homo sapiens
cccccgaaggcccacaggacaggagagaaagacgaaccggaacaccaggaacgacaca

SEQ ID NO: 202724 - RNA, 77 nt, Homo sapiens
ggcggaggcggggggaccggcgggcgggacgagaacccccgcgaaccagaggaacccagcgagcgagagcggaccag

SEQ ID NO: 202725 - RNA, 73 nt, Homo sapiens
ccccaagagaagagggacaccccaaaacagggagccgaaaggaggggcagcccgggacagcccgggaaaagga

SEQ ID NO: 202726 - RNA, 70 nt, Homo sapiens
ggagcagccgaggacgggaccccagggcagcgaagcagacaacggcaagcggagaagagcaaggccgaac

SEQ ID NO: 202727 - RNA, 81 nt, Homo sapiens
ccaaccccaccgaggaggacagagacgcaaaagaagaagaggacaggcccaggaaagggaagaacaaaggaagagagcagg

SEQ ID NO: 202728 - RNA, 87 nt, Homo sapiens
gcacaaggagccgggcgcggaggaccgaaggagaagaaggagaaggggaggagaaggcaagccggaaagagcgaaagaaagaagggg

SEQ ID NO: 202729 - RNA, 78 nt, Homo sapiens
gcgcggggaccagcagcggagggggccggcgccgacggcggcacggcgagagcgccgccgcggcccccgggagacgac

SEQ ID NO: 202730 - RNA, 75 nt, Homo sapiens
agcgaggaggacgccaaaaaggagagggccaggaacagaagccggaaggcagaacgggacgccagagcagacaca

SEQ ID NO: 202731 - RNA, 77 nt, Homo sapiens
ggccccgaaaaaagagagggggggaccgaccgcaacagaacggacccggcacaggccaacgcgccacggcagaacga

SEQ ID NO: 202732 - RNA, 76 nt, Homo sapiens
cgaaacccaaagaaccccgacccgccaacagagccaggaagcagcagccagaggacaaaacccagccggcacaaac

SEQ ID NO: 202733 - RNA, 44 nt, Homo sapiens
caggcaccacaaaaaggacaggaagcagcaaaagaccaaaccag

SEQ ID NO: 202734 - RNA, 69 nt, Homo sapiens
cgccccccccggccccagaccccccagccgcggcaacggcaccgacagcacagcagaaaggccgccccg

SEQ ID NO: 202735 - RNA, 77 nt, Homo sapiens
aacccccggcgggcccgaggccccggccagacaaggcgaccagccagcccgggagacagagggagccagcagacgcg

SEQ ID NO: 202736 - RNA, 80 nt, Homo sapiens
gggcaaacgcgagacgaaacgggagcaccgcgcgaagcccaccagggggccacacagccagcagccccccaaggcccagc

SEQ ID NO: 202737 - RNA, 80 nt, Homo sapiens
cgcgccgcagagcggcaccgaaggacaggaggccgggagaaggggcaaggcgagacacagcccgggccagccacggaccg

SEQ ID NO: 202738 - RNA, 55 nt, Homo sapiens
cggaggagacccacacgaccagcgccggagggggccgcaaggccaggcgcgcaga

SEQ ID NO: 202739 - RNA, 43 nt, Homo sapiens
aaacaggcgagcagaacgggcagaagaaaaccccagccaagcc

SEQ ID NO: 202740 - RNA, 90 nt, Homo sapiens
caaggcaaggcccagaaaaaggaagaaaacaaccaggcaaagacacagcgcacgaagaaggacaggggagggaagcgccccagacaagga

SEQ ID NO: 202741 - RNA, 77 nt, Homo sapiens
cccacgggcccaaacaagcggagcggacccaggaaaccgaaggaaggaaggcagaaagcgaaacccagaggaacccc

SEQ ID NO: 202742 - RNA, 54 nt, Homo sapiens
acgaaaaaagaaaccgagaacggaaggcagaaaggcagggcgcaagagaaaaca

SEQ ID NO: 202743 - RNA, 57 nt, Homo sapiens
agagcgcggccaagaacagaggaaggggagaacaaggagcggcccagagcaaaacag

SEQ ID NO: 202744 - RNA, 84 nt, Homo sapiens
ggcaagcgagggcaaaagccacagacaccgagagccggaagagaagacggcccagcagagcacccaaccagcgggaacacagcg

SEQ ID NO: 202745 - RNA, 80 nt, Homo sapiens
agccggaccacggagagcaggcagcgggggggcgagcccgaaacgaggcgggagcagcacagacaagcagaccggaagac

SEQ ID NO: 202746 - RNA, 63 nt, Homo sapiens
agagcgccccaggagaaacaaccaaggccaccgagccacaagaccacagcaccgacccccgac

SEQ ID NO: 202747 - RNA, 76 nt, Homo sapiens
aaaagaaagaaagaacacccacaaggaaaaggacagggaagaccacaagaggggcagcagagccccagaagaaccc

SEQ ID NO: 202748 - RNA, 43 nt, Homo sapiens
gccaaagccgcagaggccaaggaaacggcaacaagcccccaga

SEQ ID NO: 202749 - RNA, 55 nt, Homo sapiens
acaagggaaacacgaagggaaaggccgagagaaagacagcaaagaaaaggagaag

SEQ ID NO: 202750 - RNA, 79 nt, Homo sapiens
agcaggagggagagggccaagaagcagcggacacgcagaaccagagaccacagaagaaggaagggccacccaggacagg

SEQ ID NO: 202751 - RNA, 74 nt, Homo sapiens
cgccaaacccggacaacgacaacaggcacaaagagagaaggaacacccacagggcagacagagaaagaacacaa

SEQ ID NO: 202752 - RNA, 50 nt, Homo sapiens
agcgccgaaaaaaagaggccgccgcgcgccacagggaagaaagcacggga

SEQ ID NO: 202753 - RNA, 71 nt, Homo sapiens
aaccgggcggagccagccgggccagccccgcgacggcccacgagccaagcccagggagaacggcagaacca

SEQ ID NO: 202754 - RNA, 81 nt, Homo sapiens
aggcacccgggcccagccgggaacccccacgcggccagcgaaaacgcccaggacccccccgcggcggcgaggcccgagcca

SEQ ID NO: 202755 - RNA, 74 nt, Homo sapiens
ccgggccagcagcccccccgcccccagcggcggagccacgaaaccaggaccgaaaagccagccgcacagagcag

SEQ ID NO: 202756 - RNA, 74 nt, Homo sapiens
cccgaagcccggacgacgagcggagagagagcggagacaaggccacagcaggccacggcgggggcagccagcca

SEQ ID NO: 202757 - RNA, 72 nt, Homo sapiens
gcgggaggaaagggagagacaagagaggagacccaacagacgaagaagacgcaaaacgggcggcaaaggcac

SEQ ID NO: 202758 - RNA, 59 nt, Homo sapiens
gacccggggaagaggaggcggcggagagacaccgaggcccggcacgagccgccagcccg

SEQ ID NO: 202759 - RNA, 54 nt, Homo sapiens
aaggcacaacgccgaggcgcaacgcacgcgacggagccgcagacaagaagaggg

SEQ ID NO: 202760 - RNA, 71 nt, Homo sapiens
ccgggcaaacaggggcaagacacgcggcacaggagaaggaagcagagccaaagccgcaacgcgcagccaac

SEQ ID NO: 202761 - RNA, 73 nt, Homo sapiens
ccaaaacaaagcagcgaaacgcggagaaaagagaccagcccaggcccacaggggcccccccacgaaaaagaca

SEQ ID NO: 202762 - RNA, 82 nt, Homo sapiens
cgaacacccaccggccacagaacagcaagcccaaagagaagagaagcaaggaaagaagacaagaagaagccaaagcaaaaac

SEQ ID NO: 202763 - RNA, 77 nt, Homo sapiens
cacccgcgacccagaaggccacaggaacgcgccgaaacacgcaccaccacccccccccaaggccacagcccccacag

SEQ ID NO: 202764 - RNA, 60 nt, Homo sapiens
gccggcccagacacgcgcaggcccaacacggagccggggagaaagaaaacacgaaacagg

SEQ ID NO: 202765 - RNA, 95 nt, Homo sapiens
caggaggggaccaggaagacgcggccgacccagaacaaaggggaccggaccagagagaacacaggggccaaaggggcggaccaagccggaaagca

SEQ ID NO: 202766 - RNA, 66 nt, Homo sapiens
gacaacggaccaaaaacacgagagccgggacagggccagaagcgagcaccaaagcaaagaccacca

SEQ ID NO: 202767 - RNA, 90 nt, Homo sapiens
cagaccaagaacaaccgcggacacggagaggaagggagagagagagggcccaagagccccaagaaacggagacaccaagaaggaacccca

SEQ ID NO: 202768 - RNA, 81 nt, Homo sapiens
cggcggcgcgcggccgggcggcgaggaagaggaaggaaggagcgcagcgaacagcgaaaaagagagcagcgaggaaggagc

SEQ ID NO: 202769 - RNA, 75 nt, Homo sapiens
ccagcccgcagcaccggggccaggaacggcgaccaacaaagccacacaaaagacccaccaccggcccgagaaccc

SEQ ID NO: 202770 - RNA, 57 nt, Homo sapiens
gccgagcaacgaaaaagacaagggggagcgcacgccacgaggagcagggggggcgcc

SEQ ID NO: 202771 - RNA, 81 nt, Homo sapiens
ccgaggaggcgcgggggggcgcgcagcgaagcgcacggaaggaagcagggccgagaaagggagaaggccagggcgaggaac

SEQ ID NO: 202772 - RNA, 59 nt, Homo sapiens
gcacccacgaacgcccaccccccgaacccagccgcaccggccccgggaccaaggacacg

SEQ ID NO: 202773 - RNA, 83 nt, Homo sapiens
ggcaccgggacggaccgagaccggaccgagagcggaccgagagcgcgaaacgcacgagaagggagacaaggcagcaaagagca

SEQ ID NO: 202774 - RNA, 71 nt, Homo sapiens
caggaaagaaaccacaccaagaagggacacacccgacagggaagaaaagggaaccagcggagcgggacaac

SEQ ID NO: 202775 - RNA, 73 nt, Homo sapiens
gacaaaagggccaaagaagggagaccacagcagccgaagagagaggaagaggaagggagggaaaaagaaagca

SEQ ID NO: 202776 - RNA, 72 nt, Homo sapiens
ccaggccggcagcgccacacacagcagacagacagcagccagaaccagagcggcccagggcagacacgaacc

SEQ ID NO: 202777 - RNA, 111 nt, Homo sapiens
gacccaggaaccagcaaaaaccagagaagaggggccccaccccacgggcgccagagagaaacccaaacacagagaagacaaaaggagaacaaagaccaccagaaaggggaa

SEQ ID NO: 202778 - RNA, 78 nt, Homo sapiens
cgcggcgcgggcagccgggaggagacaacaacaagggccgcaagccacagggaccacagccgcaaagagcccaggaga

SEQ ID NO: 202779 - RNA, 74 nt, Homo sapiens
cgccccccggaagggcaccgcgacgacaccccggggaggcgaggagagagagcaaaagaagagcccaaaccagg

SEQ ID NO: 202780 - RNA, 76 nt, Homo sapiens
ccaccagccagaagacccaacagaggaaagcagccgaagccacggagaagccgccgcagcggccggagacaaggaa

SEQ ID NO: 202781 - RNA, 74 nt, Homo sapiens
ccaggacagcgaacccggagcccggggggacgaggcggagaaaggcgccacgaggaacacgaggacccaaagaa

SEQ ID NO: 202782 - RNA, 79 nt, Homo sapiens
ggcgggcaagagcaccgggacccacgcgaccccggggccacccaaggcagcggccagcaaaccgcaaacaccaagccca

SEQ ID NO: 202783 - RNA, 75 nt, Homo sapiens
acagcaacagcggccgggaacgaccgaaacaccagaaagagccgcagacgcacagcaaccaccggacccgaaggc

SEQ ID NO: 202784 - RNA, 87 nt, Homo sapiens
acccagaggccggggaccgccaaccccccaagaagcagagaggcgagacccccaccaggacgcgggacagaccaggacccaggggag

SEQ ID NO: 202785 - RNA, 62 nt, Homo sapiens
acgccaggacagaacgggcggaaagaggaaaagcagggccccggaagacccagacaagacca

SEQ ID NO: 202786 - RNA, 39 nt, Homo sapiens
ccgagcagagaaagagcagcgaacagagcagagcacgcc

SEQ ID NO: 202787 - RNA, 54 nt, Homo sapiens
gggacccggacaaccagaggcagccagcagggggagcacagggaacaccagagg

SEQ ID NO: 202788 - RNA, 63 nt, Homo sapiens
gagagagccaagcaaccaagccaggggggaacagcgccaggaggcaggaaagcagcacaaaag

SEQ ID NO: 202789 - RNA, 69 nt, Homo sapiens
ggcccggggggaggaggggcaggcccggcggcaccgaccgcacgagcaacccggaagagcccgcacaaa

SEQ ID NO: 202790 - RNA, 91 nt, Homo sapiens
ccaccaggccgggaagcccacggaggagcaggagcggccgcggagcaggagcgagagcaggaacagaagaaggccaaagccggccaggcgg

SEQ ID NO: 202791 - RNA, 66 nt, Homo sapiens
agcaagcaccccggcgccgacaaagacggcaggggaacacaagacgaaagagacggaagcgaaaga

SEQ ID NO: 202792 - RNA, 77 nt, Homo sapiens
ccgagagccgggggagcggggccccacacccccccgggggggacggagccaagaccgaagaaaacacggaaaaacga

SEQ ID NO: 202793 - RNA, 87 nt, Homo sapiens
acaaaaggagacccaaccaggggaccgagggaagggccaaaccaggaacggagaggaagaaggaagaagaggagaaggagaaggagc

SEQ ID NO: 202794 - RNA, 86 nt, Homo sapiens
ggacaccccgaaagccggaaaacgccaggagccagcaaagaaccggggaaaaaagagacaccagaggaaagacaccaccacccaca

SEQ ID NO: 202795 - RNA, 69 nt, Homo sapiens
gagcacagagggccccagagggcagaaaaacgcgaagaaggagaagagggaccaccgaacagcaaccag

SEQ ID NO: 202796 - RNA, 58 nt, Homo sapiens
cccccaggcgaagaagcgcagccgcaccggccaagggcgaagccaggaaaaaacaggg

SEQ ID NO: 202797 - RNA, 66 nt, Homo sapiens
cagccaacaaagagaagagaaaccaagcccgcaagcgacaaccagggccggcgggagcacggccac

SEQ ID NO: 202798 - RNA, 53 nt, Homo sapiens
ggccccccaaccaggcaagcaagaggcgcccccccgaaaagacaacgaccacg

SEQ ID NO: 202799 - RNA, 72 nt, Homo sapiens
cggaccacaaggaaaagagacaaacagcaaaagcaaggagacccacacgccagaaacaaagggcacccagaa

SEQ ID NO: 202800 - RNA, 79 nt, Homo sapiens
acgggacacaccccaccccacaggacgccccagagaaagcccgccgcaccagcaagcgcgggaggaacagaaaacggca

SEQ ID NO: 202801 - RNA, 85 nt, Homo sapiens
agaggccccgaacaggagaaagaaggcggaacaccacaaggcaccgcaaggccacagcagaagggggaacaaacaaaagcccacc

SEQ ID NO: 202802 - RNA, 65 nt, Homo sapiens
cagcaccaacagcccaagaagaacagggagcccacaggaccacccccaccaggacagaggcccca

SEQ ID NO: 202803 - RNA, 78 nt, Homo sapiens
gcggcagcggcccccccccacccgaacacagggcccccagaccaggcgccccaacacacggcggcccccacacacggc

SEQ ID NO: 202804 - RNA, 61 nt, Homo sapiens
gggcacaggggaccgcgcacacagcacccaacagaacagcgcgagccacaaggcaaggaag

SEQ ID NO: 202805 - RNA, 65 nt, Homo sapiens
cccccagagaacaacaggagggaagggggaaggccacaccccaaaagaaccccccgaccccaaaa

SEQ ID NO: 202806 - RNA, 91 nt, Homo sapiens
ggcacccccggaccagaacggcacggccacgggcgggcaggcaaggccggaaagcaaagacagccaaaaacaacaagcggggaagacaaga

SEQ ID NO: 202807 - RNA, 69 nt, Homo sapiens
ggaaacgaagaaggcccagcccaccaggaccggagaggcccagaacaacgcaccgggagaacccaagga

SEQ ID NO: 202808 - RNA, 71 nt, Homo sapiens
ccgggcgccgccccagcggagggcagccccgagccaggcccgccgccgagcgagcgcggagccagcgcccg

SEQ ID NO: 202809 - RNA, 77 nt, Homo sapiens
acagaaagaacgaggggccacggaccaaccgagagcaccaggaaccagccaagaaccacggccacaccccaacacaa

SEQ ID NO: 202810 - RNA, 79 nt, Homo sapiens
caaaaccggggaagcccacaaaacaccagagcgaccaagaaggagagcgacagcccaagcaccagggaacccgcccgca

SEQ ID NO: 202811 - RNA, 82 nt, Homo sapiens
accaaggaagaagacccagagacacagacgaaaaccaggaagggagggacagagcccgaccgccgcccagcagcaagacggc

SEQ ID NO: 202812 - RNA, 69 nt, Homo sapiens
ggaaaaacggagccgagaccaaggaaagcgacaacccacacaagcgaaccgcccgagccgcagcaccac

SEQ ID NO: 202813 - RNA, 79 nt, Homo sapiens
gccaaaacagacgaagaccggaaagaaccccgccacaaagacagcagggcgcggaagagggagcgcgaaggagcgcacc

SEQ ID NO: 202814 - RNA, 70 nt, Homo sapiens
acccaaagagaaggagggcagaggaaagccggagaaagaagaagagcaggcgccggggcggagagagggg

SEQ ID NO: 202815 - RNA, 79 nt, Homo sapiens
gcaacccagccggccaaggagcagcagcaggacgcggagccccggaggccgcggcggacggacaccggaggccaccaca

SEQ ID NO: 202816 - RNA, 82 nt, Homo sapiens
gccggccgggacgcggcccggagccgggaccggagacaaaggacaggcagaaaccagaacaggcaaagggcccccagaccgg

SEQ ID NO: 202817 - RNA, 75 nt, Homo sapiens
aagaaagacacccagacagagaggacccagggcaccgccgggaaaaaagaggcgacaaaaagcaggaaaacagag

SEQ ID NO: 202818 - RNA, 84 nt, Homo sapiens
ccagcacaaaggccccgggaccaaggacacgcagacccggcccccaaaaaggccacaaagacagccccaccgcccgccacagga

SEQ ID NO: 202819 - RNA, 73 nt, Homo sapiens
accagaaccaacgagcagggaacgaagacgcaagagacacgaaagagaacacgagcgacccgaagacagcccc

SEQ ID NO: 202820 - RNA, 72 nt, Homo sapiens
gccccgagagcggcacacagggccagccaccaggcccagccggagcgcaccacccaagcaaggcaggagaac

SEQ ID NO: 202821 - RNA, 79 nt, Homo sapiens
gagacccaaaggcaccgcacacgaggaccgcacgaacaagcgcacgggacccgagaacccggccaacgggaaaccggga

SEQ ID NO: 202822 - RNA, 72 nt, Homo sapiens
aaaaagaaagaaaccaagaggaagaaccacaagcaaagggcgagcgagaaccaggaacacagacaaccaggg

SEQ ID NO: 202823 - RNA, 70 nt, Homo sapiens
cgcccccggcccgaccagggcggccaccgagaggcgggccaaaggagaaacaagaaggagacaacaacgg

SEQ ID NO: 202824 - RNA, 71 nt, Homo sapiens
acagaaacgacaggaggaccaggagaccaccacagccgacccaggacccggccaggaccgcaggggaaccg

SEQ ID NO: 202825 - RNA, 61 nt, Homo sapiens
cccaagccccacaggagcggaagaaggacaggcgacacaacagggaagaccgggagaccag

SEQ ID NO: 202826 - RNA, 78 nt, Homo sapiens
gggggccggaggagagcagaggaggccggggaagagagacccgagagccaaggacacgcacagcacagaaacccacgg

SEQ ID NO: 202827 - RNA, 88 nt, Homo sapiens
gacagcgcaaggaggccgcacccaaggccgcagacaagggcccgagagcacaacaaaaaaagaacccacacacagcaggcggagaagg

SEQ ID NO: 202828 - RNA, 75 nt, Homo sapiens
ggggcaggaaaggaaccaggagagagcagccagaggcggcccagcgaagccaggacacagcgcgggggaacagag

SEQ ID NO: 202829 - RNA, 89 nt, Homo sapiens
cgggcggcgaccggggccgggccacgccgagggcaggacgaaccaccagcagacggacggacgagcccggccaggggcggccaccccac

SEQ ID NO: 202830 - RNA, 77 nt, Homo sapiens
aaaagaaggggaacccggaccgcgaaggcgggggagacgaaaaccacacacaagaccgccaagcaaagacccgggag

SEQ ID NO: 202831 - RNA, 72 nt, Homo sapiens
gaggagaaggcgaggccacagaaccagccacagcggggcggagaggagccaaggaccaagagaacgaaccag

SEQ ID NO: 202832 - RNA, 66 nt, Homo sapiens
agaaggaccaagaaccagaacacgcgcagacccgcgcacaagagcagcacaagggaagacagcaag

SEQ ID NO: 202833 - RNA, 87 nt, Homo sapiens
gaccgccgcggggaaaggcaggaggggcgaggaggaggaggaagaggagaaccacccagccggagacacgccaccaccagaaaagcg

SEQ ID NO: 202834 - RNA, 73 nt, Homo sapiens
agagaccgaggccaaaggaaaaggggagaggcgagaaggcgccacaggagggagcaggaaaaaggcggagagg

SEQ ID NO: 202835 - RNA, 77 nt, Homo sapiens
gcccgccgcccgccccagggaggcccagagcagagaaacgcacacaagcaagccacccacacccagccgacacccac

SEQ ID NO: 202836 - RNA, 57 nt, Homo sapiens
ggaagaccgcgccgccagccgcgcagcccggagcgcgaggagcagcgcgagccgacc

SEQ ID NO: 202837 - RNA, 55 nt, Homo sapiens
cccgggagccccgacacgacagagcaggcaccaagacgccaggcggacggcgccc

SEQ ID NO: 202838 - RNA, 100 nt, Homo sapiens
gcgaccggcggggcccagggagaaaggcccaccggccgggagggcccagggcggggcccgagacgcccgaagagcagagcaacaggaagaaaaggcgaag

SEQ ID NO: 202839 - RNA, 88 nt, Homo sapiens
cggagaccacagaacgggacaaggccgcagcccggaaagccgagcagggaggagaagcagaaaaagccagagcacaggcgggaagaag

SEQ ID NO: 202840 - RNA, 79 nt, Homo sapiens
aagggagggcacgcaggaagaaggcacccggaagagagaaagaaaagagcggcaaagaccaaaaagagccaagcgagaa

SEQ ID NO: 202841 - RNA, 62 nt, Homo sapiens
cccccgcagcccagcccagagaacgccgcgccaagccggccgacccccagggcacaacgggg

SEQ ID NO: 202842 - RNA, 69 nt, Homo sapiens
cgccaacccgccgcgcaccgacccgacgcgccggcccacgcgcggccaagaggccccaaagccggggaa

SEQ ID NO: 202843 - RNA, 80 nt, Homo sapiens
gccaagggccagaagagggccggcagacccccacaggcacccagacagcaaggccacgggagggaaccgaagcgaccggg

SEQ ID NO: 202844 - RNA, 79 nt, Homo sapiens
ggaccgaaggcgcaagagggaggcgcacacacagcagggaggagagagcgaggccacccagaaggccagccccagcggc

SEQ ID NO: 202845 - RNA, 66 nt, Homo sapiens
gagcgagcaacgacaaacaccagccgcaacagcaaggaagccgccaaagacagaccggccgcaccc

SEQ ID NO: 202846 - RNA, 78 nt, Homo sapiens
gccccggaagaacccagacaccaggcaagaccaaccacacgggaagaccaacaaaggcacacccaggcggagaaagcc

SEQ ID NO: 202847 - RNA, 73 nt, Homo sapiens
aaaacggaaagaacaggaaacaggagagaaagcgaacaggaggagaagaaaaagaaacgagccggacagccca

SEQ ID NO: 202848 - RNA, 81 nt, Homo sapiens
ccggaggagcgaaggcggcggcagagaacgccgggccagcgaggccggcaagaagccaacggagaaccaaggccaagacca

SEQ ID NO: 202849 - RNA, 84 nt, Homo sapiens
cggggagcacccagcaaagagcccacacaggggaaccgcccaccgcgcccccagaacaggccccgggaccaaggacacgcagac

SEQ ID NO: 202850 - RNA, 58 nt, Homo sapiens
agccgaccagccgcggagccgggggcagcacacggcggcggcgaagccaagacacggg

SEQ ID NO: 202851 - RNA, 75 nt, Homo sapiens
gcacccaccgggagagccagcggcagccagggaccacacggcaagaacaggacagagccacgaccaggggacacc

SEQ ID NO: 202852 - RNA, 81 nt, Homo sapiens
ccgcgagaagcagcgggggggcaggcgacgaagaaggcagaacgccaaccaggaaccgaacccccagaggacgaaaccgca

SEQ ID NO: 202853 - RNA, 79 nt, Homo sapiens
caagaggcggcggagcggggaggccaaagggccaaggggacccgaggccacccaggcgcgggacgcaccccggagggaa

SEQ ID NO: 202854 - RNA, 79 nt, Homo sapiens
ggcagacccaagccggccgcaacggccaaagaagagacgccaggccacagggcaccacaacacgcccacccaggaggcg

SEQ ID NO: 202855 - RNA, 71 nt, Homo sapiens
caacccgccgcgcaccgacccgacgcgccggcccacgcgcggccaagagccaaaccccagccaccggaaga

SEQ ID NO: 202856 - RNA, 53 nt, Homo sapiens
accccaaaagcgcccggggggaagggaaggacacaccaaagaaacgaagacca

SEQ ID NO: 202857 - RNA, 71 nt, Homo sapiens
cggacacgaggagaaacagcagaaacgcaccaggccaaagaaagagaaaccacgccaccgggcaagagaag

SEQ ID NO: 202858 - RNA, 73 nt, Homo sapiens
aagcacgaagggacgcgagagacgcaagacgaacaggaacagagaagcacaccgggaagcccacgggacccca

SEQ ID NO: 202859 - RNA, 76 nt, Homo sapiens
gccagcgccagcggcacggcccgccgcccaaggggcacgagggagaggccgagaagaaacagggaacggagcccgc

SEQ ID NO: 202860 - RNA, 81 nt, Homo sapiens
cgggaccacaagacaacgcggagcggcgaagagcaaccagaggagagcgggggcgggggagacaggacagccggcaccagc

SEQ ID NO: 202861 - RNA, 37 nt, Homo sapiens
gccagggccagagcaaaggccgggcgaggcgaggcca

SEQ ID NO: 202862 - RNA, 75 nt, Homo sapiens
acagcggacaacaaggaccaaaccaaccggcaagacacagcagaggagaggagaaaaccaggggcggaaggaccg

SEQ ID NO: 202863 - RNA, 88 nt, Homo sapiens
caggacgggcacagcagagaccaaaggcagggcaaggaaacggccacaaagcaagacggaggaagaaaagaagaacacgaaccagcgc

SEQ ID NO: 202864 - RNA, 68 nt, Homo sapiens
cgccggcgcccaaagagaccagcgccaccgacccgaggggggagcgaaaaggacaaagccgggccaac

SEQ ID NO: 202865 - RNA, 80 nt, Homo sapiens
aaagacgagccacggaccccacacaccagggagacacaaagacgcacaggagaacaaggaagagaaagcaaagcagccac

SEQ ID NO: 202866 - RNA, 78 nt, Homo sapiens
accgcgacaccccaacaaacaccagcgcgggggaggcagggagcccagaaagaagagaaaaagagagagaagccaccg

SEQ ID NO: 202867 - RNA, 82 nt, Homo sapiens
gccggaccgcaggacgacagaccgagggaggacaccggaccccggacgcgggaaagacggcggaaaacccgaagcagaagcc

SEQ ID NO: 202868 - RNA, 81 nt, Homo sapiens
cggaggggagcggagcccggagcgcgggaaagacaccgaacacccgggaaccccagggcgacgaggaggcgaagaggcgcg

SEQ ID NO: 202869 - RNA, 80 nt, Homo sapiens
ggcaccgcgcgaagcggccaaagccgcccagacggccaccggcgggaggaacaaaagagcggaggagaagaagggaaaca

SEQ ID NO: 202870 - RNA, 78 nt, Homo sapiens
ggcggccgccccaccgccccaggacagcaccagcgggccggaggagccagagcgcagaaagagaacacaaggaacgaa

SEQ ID NO: 202871 - RNA, 79 nt, Homo sapiens
gggccccgggcacacggaaagaggcccccaacagaagagggggaccccggaagggcccaacacgccgaagggccagaac

SEQ ID NO: 202872 - RNA, 84 nt, Homo sapiens
gcccagagcaggcaccgcgccgaggccccgccgcggagcgcgaggacaggggacccagagaaaaagcgcgacccagcaacaccc

SEQ ID NO: 202873 - RNA, 76 nt, Homo sapiens
cagccccagggaaccgggccgcaccacgcaaaccagccggcgggcgccacaacggacgacgaaaacacagcccagg

SEQ ID NO: 202874 - RNA, 78 nt, Homo sapiens
gcacaggaaccccggggaagaagcgcccgagaaaaagcgcgagggcagaaagggcccagccggcagagggaccggaga

SEQ ID NO: 202875 - RNA, 64 nt, Homo sapiens
ccgggccccgcgcacagccccagcgcagcacaaaagaccccacagcgagagagagcaaacgaaa

SEQ ID NO: 202876 - RNA, 77 nt, Homo sapiens
acagacagccacgcagacggaaacaaggcaacagaaagagcaacagcagggcaacaggcaccgcccgcgccaggaag

SEQ ID NO: 202877 - RNA, 78 nt, Homo sapiens
aaaaacacagagacagacggcggcaggcagagacagggggaacaagcacgcacacccagagggccaaggccaaaagaa

SEQ ID NO: 202878 - RNA, 81 nt, Homo sapiens
cccgcgagcacagagcccgccgccgaccgccgcccgccacacccgccgccaggcgacagggggaccgcggcgcgagggacg

SEQ ID NO: 202879 - RNA, 69 nt, Homo sapiens
gcacggagccggacacgaaacggaggagggacagccaagagcaaacaccagaacacgggacacggaggg

SEQ ID NO: 202880 - RNA, 79 nt, Homo sapiens
cgcccccccagggccggccgggagggcggccgcagcagggaaaacaaaggcagagaagccagacggcaaaagcagcggg

SEQ ID NO: 202881 - RNA, 76 nt, Homo sapiens
aaacccggaaacccagcggcccagccggcaaaagacggaagagagagcagcccagccaccggacgcggcagcccag

SEQ ID NO: 202882 - RNA, 59 nt, Homo sapiens
cggcgccaccgaacagacccggaaggacggcgaggagagcacaggagcacgggagcagg

SEQ ID NO: 202883 - RNA, 51 nt, Homo sapiens
ccgcccccggcccgaccagggcggccaccgagagcccagggccgaaaagaa

SEQ ID NO: 202884 - RNA, 78 nt, Homo sapiens
ccgccgccgcgcgggaaacgaacgaggccgagagagaagggaaggaagacaccacgcgccacaaagaaggcaagcgaa

SEQ ID NO: 202885 - RNA, 77 nt, Homo sapiens
ccgagcccccggagcgaaggagcagagcgggacgccgggcagacccaaagagaagagaagggcgccccacccaaagc

SEQ ID NO: 202886 - RNA, 48 nt, Homo sapiens
cagaggcgaagaaggacagcagaccacagcccggcaggcccaaaaacc

SEQ ID NO: 202887 - RNA, 82 nt, Homo sapiens
ggaacgcaccgaagcacaccgagaccccaaaccccagggaccagaccgggccccccaggaaaggcccgagcgcgaggccggg

SEQ ID NO: 202888 - RNA, 75 nt, Homo sapiens
caagacacggggcgacgccacagagaaaggagagcaccaccgacaccgagaagcagagagggcgcggccccaaag

SEQ ID NO: 202889 - RNA, 56 nt, Homo sapiens
gaagggaagcgaagggcgggagacagcagcacccagcagcgaagagcaaaggaccc

SEQ ID NO: 202890 - RNA, 84 nt, Homo sapiens
ccggccccgcagccggcgcgcggccagaaaagagaggaacagcacggaagaaccgaagaaagcaagaacaaccggacaagccaa

SEQ ID NO: 202891 - RNA, 69 nt, Homo sapiens
gaaaaccaggacaggacacgggggacgcacagcagaggggaccagccccacagcacccacgagaacacc

SEQ ID NO: 202892 - RNA, 85 nt, Homo sapiens
ggggcagccgcgagacggcacaaggcaggccggaaggaccaggcagggagcaggacaggaagcagaaggccaggaaacccaccag

SEQ ID NO: 202893 - RNA, 82 nt, Homo sapiens
ccgcagggaggagggggcgcgacaggcgcagcgcggccccggagcccgcgcccgggcggccgccgggagccgcccagcaaaa

SEQ ID NO: 202894 - RNA, 82 nt, Homo sapiens
ggagagaagggccaggggcgaaaggaaccgggcgcaaaagccacagaaacagacacccaggccccagaaccgaacccaagaa

SEQ ID NO: 202895 - RNA, 54 nt, Homo sapiens
aggaggcagggccagcggagaaaaccggaagagaaaggccgggaagcaggaaag

SEQ ID NO: 202896 - RNA, 61 nt, Homo sapiens
gcggccggagaagggcgcgggagggggccggcgcccgcggcaggcgggggagccaagggag

SEQ ID NO: 202897 - RNA, 74 nt, Homo sapiens
agaaggacagcaagaggacggaagcaggcgaagcgagaacaggaaggggcgaggcaggagagacaagggaacca

SEQ ID NO: 202898 - RNA, 90 nt, Homo sapiens
caagcggaggggacgccacgcaacgccgacacagccgccagcccaaacagcagcggcagggcagcgccagcccgggcgagcagcgacccc

SEQ ID NO: 202899 - RNA, 77 nt, Homo sapiens
gcaggaagagcgaaaaaacaggaggacacaagacaaaaggacagcgacagacagcaaacacagccagaacagaggac

SEQ ID NO: 202900 - RNA, 84 nt, Homo sapiens
acccgcgcggagcgcgcgggaccggcaccggccccgcaggccgggagcagagaaacaccaagccgccccagacgacagcccggc

SEQ ID NO: 202901 - RNA, 73 nt, Homo sapiens
cgaaacgaccccaacaaaaaagccacagcaggagcacaaggcaagcccacccgacccagacacaccgcgaaca

SEQ ID NO: 202902 - RNA, 81 nt, Homo sapiens
gaagaccccgaaggaccaagggcagcgggcccacggcggccagaagaaggggacgggggacaagggggcacaaggagagga

SEQ ID NO: 202903 - RNA, 82 nt, Homo sapiens
aaaaaagagagagaaaaaggacaaaagccaagaggaggacagcgcacacagcaagcacgagcggagcaacaccccgcaccgg

SEQ ID NO: 202904 - RNA, 81 nt, Homo sapiens
ggagaagacgccaagcgacgagcgcacgccacccggcagccggcgacgcacacaccacgcagaaagcacagcggagagaga

SEQ ID NO: 202905 - RNA, 97 nt, Homo sapiens
cgccgggggggggggccacgcaggggaggcgccgagacgcagaaagaggcagagcgggccgaacgggccaaggagcgggagaagcggcgaaaggagc

SEQ ID NO: 202906 - RNA, 77 nt, Homo sapiens
cggagggacgccgccggggacagagagcaaagaccacacgaaggggcagaagagcacaagacggaagagaggagcga

SEQ ID NO: 202907 - RNA, 67 nt, Homo sapiens
gggaagcaaagcagccaacaccagaagaagggacaaaagggccgccgcggacgcacgccagaaagcc

SEQ ID NO: 202908 - RNA, 74 nt, Homo sapiens
acggcacagaaaggaagaaacggaagacaccgagaccggccaccaaaccacaaccgaaggcagcgcgcaaggcc

SEQ ID NO: 202909 - RNA, 73 nt, Homo sapiens
gcgcgcagaaagggcgaccaccaaaaaaacggggacgcacagaaaagacaaaacaaagacgcgccacaggaag

SEQ ID NO: 202910 - RNA, 71 nt, Homo sapiens
gccggggcgcccggcgccggccgagaaggcagaggcggcccgggcccccgcggaggacagccaccaaggcg

SEQ ID NO: 202911 - RNA, 66 nt, Homo sapiens
aacccgaggacagcaccaaacaacaccaaaggagggggccgcacagagccagagagcacgaccagc

SEQ ID NO: 202912 - RNA, 78 nt, Homo sapiens
cagaaacacgcagcaaaaaggaccagccacaagaagacagacacgaggaaggaaaagaccaccacaagcgggaaccac

SEQ ID NO: 202913 - RNA, 74 nt, Homo sapiens
cgcccagcgccgcccccggagggcccacgcagcgccggacaacccaaggaaaggcccaggcacagcagacgcac

SEQ ID NO: 202914 - RNA, 63 nt, Homo sapiens
gaaaaaccagccgcacgccaaggaaacaggacaagggagagacagagcgacagagagaaaaca

SEQ ID NO: 202915 - RNA, 65 nt, Homo sapiens
gagcagaggacgacaggccgggaggacaaaccggcgaccacacacggggacgacggggaagccgg

SEQ ID NO: 202916 - RNA, 73 nt, Homo sapiens
cgggagcagccggacaagagaccacacccaggaagccaggcacgcacagcaaaggcgaaaagcgaagacagcc

SEQ ID NO: 202917 - RNA, 75 nt, Homo sapiens
gagaccaaggcgcgcccggcgggccggaccaaggggcaacagaaaaggggaccgcaacagaagcaggaaacggag

SEQ ID NO: 202918 - RNA, 82 nt, Homo sapiens
caaaagaaagcagcaaaggaaaaagggacaccgggaaaagcggagcaaaccccgaccaccaagggcaagcacaaccgagcaa

SEQ ID NO: 202919 - RNA, 77 nt, Homo sapiens
caagccaccccaacggaccaccagcacgcaggagaccgacgaacgccgggaccagggcagggaccccggaaccgaag

SEQ ID NO: 202920 - RNA, 59 nt, Homo sapiens
cgagaacaaggccgccagccaaaggaaagacaggcagaaagcagagagcgagcccaaaa

SEQ ID NO: 202921 - RNA, 70 nt, Homo sapiens
caaaagcgcagcaagacggccgcgcggcccgcaggggagaaaacgggccggaggaaaagggcggcagggg

SEQ ID NO: 202922 - RNA, 54 nt, Homo sapiens
gaggaacgaaagccaccgaaggcaaagacccagccaggaacaaacacccaaagc

SEQ ID NO: 202923 - RNA, 72 nt, Homo sapiens
cggagaagcccacccccgcggcgccgcgccccagaccagagcgggccaaggaaagcggagggagccccagag

SEQ ID NO: 202924 - RNA, 65 nt, Homo sapiens
gcggacgccggcccgcgcgcgcaccccgcggacgccacagcgcggccaaccgccccccagcagca

SEQ ID NO: 202925 - RNA, 88 nt, Homo sapiens
cggggcgggcgcgcggccccggccggccggagcggcggcggggcggcgcgaggcggcagagggagccgccggagaagaggaaaacggc

SEQ ID NO: 202926 - RNA, 59 nt, Homo sapiens
agagaaacgcaccacacccggaaccgcagaaggccggcccacagcccaaaaagaaacag

SEQ ID NO: 202927 - RNA, 69 nt, Homo sapiens
cccgacccggcccaccaggggcggaaacgcggggacgccacaaggcccggggcgaaaggagcaaaagga

SEQ ID NO: 202928 - RNA, 76 nt, Homo sapiens
ccaagccaacgaggccccgcagcgacgacggacagcaaggaaccccggccccgggaccaaggacacgcagacccgg

SEQ ID NO: 202929 - RNA, 66 nt, Homo sapiens
gaagacgacgcaccgcaggcagacaaaagggccaaagaagggagagagagaggaagaagacacgga

SEQ ID NO: 202930 - RNA, 105 nt, Homo sapiens
cccgggccgggcgccccacaagaagcggaagaagcgccccgaggaaggccaaggcccagaggagccacacaaccaccaccagccggcacgcgcccagacgaaggg

SEQ ID NO: 202931 - RNA, 74 nt, Homo sapiens
gcccaacccgagaaaaggaaggaaaacgcccacacaggggggggcggaacccccagagccaggaggaggaaaaa

SEQ ID NO: 202932 - RNA, 81 nt, Homo sapiens
gccccaggcccgcgcaccacagcccaccccagaagaccggccccgcaaccacgaaaagagggacggaccggacccagacac

SEQ ID NO: 202933 - RNA, 77 nt, Homo sapiens
ggggaggccagcgacgccaggaagaaaacgagacggcaagcaggaaacggaggacggggaaaaaggaccacaagcca

SEQ ID NO: 202934 - RNA, 66 nt, Homo sapiens
ccgaagacagcagcgcaagagggaccccgacggacaccccccaggcaggaacagaaccggagcagg

SEQ ID NO: 202935 - RNA, 80 nt, Homo sapiens
ccgggcaggggagggcagccaaccacagaccaccaagcgacccagcggaggacagccaccggcccaggcggccgaaagca

SEQ ID NO: 202936 - RNA, 72 nt, Homo sapiens
agaaccggccaccggccccacacgaccggcaggccagcaggcagcgcacgggcccacggaacagcaggggag

SEQ ID NO: 202937 - RNA, 39 nt, Homo sapiens
cgcccaggggccggcgccagagcggaaaacgccagcgga

SEQ ID NO: 202938 - RNA, 57 nt, Homo sapiens
cgaagaaaaccgaaaccagcaaagcagaaaaaccccccaccgacccaccacgccagg

SEQ ID NO: 202939 - RNA, 74 nt, Homo sapiens
gagacccgcgcgccaggcgcgcccggaggggaaagaaaaagagcccaccaaaaggaacagacggccccaggcgg

SEQ ID NO: 202940 - RNA, 81 nt, Homo sapiens
cacagaagagacgcaggccgggggcagcgccacgggcaggccacccagcccgcaacaagaagcagacagaggggaaagcca

SEQ ID NO: 202941 - RNA, 35 nt, Homo sapiens
accaggaacggccagggcggagggaccacagaacc

SEQ ID NO: 202942 - RNA, 68 nt, Homo sapiens
aggaaaaacagagagaaaggccgagcaacaaacacgggcagcgggagcacgacagcgggagaagcaac

SEQ ID NO: 202943 - RNA, 71 nt, Homo sapiens
aggagcgaaggcggcggcagagaacgccgggccagcgagagcccaaaaggcagagcgaggagagaagaagg

SEQ ID NO: 202944 - RNA, 74 nt, Homo sapiens
ggagcggaagcagccagggggacccccaccaaccaggaaaaggagcgccacaggacagcgcggacgccaccacg

SEQ ID NO: 202945 - RNA, 66 nt, Homo sapiens
cagggagggaggggaaagacccacaccaagagggcgaaaaaacgagaaagaaagcaggagaccaag

SEQ ID NO: 202946 - RNA, 65 nt, Homo sapiens
caagcagaaaggaacagaacgcggccccagccacaccaagcagaacgaaaacaaacggaagagag

SEQ ID NO: 202947 - RNA, 71 nt, Homo sapiens
gcacgcaagagacacagaccgagaaagaagacgaaaaccccaaaaaaccagccagcagaagcgcgacagga

SEQ ID NO: 202948 - RNA, 77 nt, Homo sapiens
accagaaggaccaggcacaggcgcaaaacagggcaagcaggggaaaacaggccgcacacccagaagcgacgacccag

SEQ ID NO: 202949 - RNA, 58 nt, Homo sapiens
cggcgacgccccaggggaaaacccccgggaccaggaagcaagaccagagagcaaaggg

SEQ ID NO: 202950 - RNA, 84 nt, Homo sapiens
ggccggcggcggcggccaggcccgcgaacacacgccgccaccgggaggcccagggaagggacacagcagggcaaggaagaagaa

SEQ ID NO: 202951 - RNA, 66 nt, Homo sapiens
cgaagcacagcaacccagaaggaggcggcgagacagcggccaaagaaagcaaaaagcccgaagaaa

SEQ ID NO: 202952 - RNA, 55 nt, Homo sapiens
gacggccaaggagagaagacggcaccacggaccaaaccgaggcgcggagcacaca

SEQ ID NO: 202953 - RNA, 54 nt, Homo sapiens
ccggccgggccggccagcgccggaaaccaacaaggcgccgaaaaaaacagcaag

SEQ ID NO: 202954 - RNA, 47 nt, Homo sapiens
gccaaccaaaccgacagccaaaaaggacaccagccaacccgcccagg

SEQ ID NO: 202955 - RNA, 71 nt, Homo sapiens
gccagggagcccggaagggaaagagagggacgaaaccccagacacaagaaaaccagcaaacaggggaaggc

SEQ ID NO: 202956 - RNA, 83 nt, Homo sapiens
gaaagagagcgaggagacggcgaccgacaacgacgagagaggaacgaggggcacagaaaccagaaaaacggagcgcgcaagac

SEQ ID NO: 202957 - RNA, 66 nt, Homo sapiens
gacgacaaaagaccccgaagaggaagacaaggggaagaacacggaaaccggacagggacaggaaag

SEQ ID NO: 202958 - RNA, 84 nt, Homo sapiens
gcccggccacccgagaagggagacgacgcgcgggccgcgagcggggcgacccgagaaaaagcggggaaaacaaaaaaaagaagg

SEQ ID NO: 202959 - RNA, 81 nt, Homo sapiens
cagagccccaggacacagagacacaaaaacagaacagggacaccaggagccgaagcagcacaggggaagcggcagaagcca

SEQ ID NO: 202960 - RNA, 69 nt, Homo sapiens
ccccacagaggggcgacggggagaagcagaccgcaccaggcgggaccccgaaaaagcccaaacagacag

SEQ ID NO: 202961 - RNA, 65 nt, Homo sapiens
caaaaccaacgccggccggagcagcagcccgagggaaagggagcagcaccggccacacccacagc

SEQ ID NO: 202962 - RNA, 82 nt, Homo sapiens
aaaaacgagaccaagagaaggcagccgagcaccgagccagcccaggaaaaggagagcacacccacagaggcagaccgaaaac

SEQ ID NO: 202963 - RNA, 80 nt, Homo sapiens
gaaacaaaaaaagcacaaaacagagcaaggcaagaagggggaaaggaaggaaaaacgggaaaagaaccggagcagaagac

SEQ ID NO: 202964 - RNA, 99 nt, Homo sapiens
agaggaagagaggaggcgcgagagcgggaagaggcggcagacagcgggacaacccagccagacccagccaggcacaggcgggccagcgaccgagcacgg

SEQ ID NO: 202965 - RNA, 71 nt, Homo sapiens
acgcggggagaaaagagaagaaccgaaggcgcaaggagcgaccccaaccagcagccccggccggggcccca

SEQ ID NO: 202966 - RNA, 43 nt, Homo sapiens
ggacaagggccacacccccaggaagagaagacaaggggcccca

SEQ ID NO: 202967 - RNA, 106 nt, Homo sapiens
ggcggaagaccccaaagaagggagccgaagcgaggcggaaaacgaagacagcagaaagcaagagccacccaagaaacaccggcgaggagcgcgggaaagaaagggg

SEQ ID NO: 202968 - RNA, 64 nt, Homo sapiens
ggaaagacagcagcaccaaaaaagggaacggcgccaccgagcacagaagagcgcaggcacaacc

SEQ ID NO: 202969 - RNA, 50 nt, Homo sapiens
cccggcaacgcggccccccacgagcccccgaggcccaaccagagccgaac

SEQ ID NO: 202970 - RNA, 77 nt, Homo sapiens
cccaccaggcgccgcgcccggcccggcggggaacgcagagaagcgggacacaagagaacggaacgggagcggccgca

SEQ ID NO: 202971 - RNA, 70 nt, Homo sapiens
cgccacgaaccaaagggagaggacggagcgccagaaccgggggccagcagagaaaaaaacagacaccagc

SEQ ID NO: 202972 - RNA, 87 nt, Homo sapiens
gggcgcccccaggagaggacggcggccggacgccggcggcggcggcggggacagcgacaggggcgcgaggcggaggcaagacgcgac

SEQ ID NO: 202973 - RNA, 83 nt, Homo sapiens
ggcaggaggccaggccggcagagacagacagacgacaacggaccgccacacaggcacgcgcaccagcgcccacgcgagccggc

SEQ ID NO: 202974 - RNA, 77 nt, Homo sapiens
cgcgacaggggcaggcggcacaggagagacaaaggcagaggaaagccacccagaaaaagaacacagaagacgaaccc

SEQ ID NO: 202975 - RNA, 73 nt, Homo sapiens
aaaccagacaaggccaggagaggaacaggggagcgaacgaagaaaggccaagagggagagacaaggagaaccc

SEQ ID NO: 202976 - RNA, 83 nt, Homo sapiens
gcgcagacgaggcgcaaagggggagaagccgccagggaggagggcgcgaccggcgccgccaacagcagcgacaggaagaagca

SEQ ID NO: 202977 - RNA, 79 nt, Homo sapiens
acaaaagaaagccacaagccagagcggagaccagggcacgaagaacacaaagcaaaaaggaaaagaagagaagaagagg

SEQ ID NO: 202978 - RNA, 82 nt, Homo sapiens
agggcagcggaaaagcaaagacaagccgggaagagaaagcggccaagaacccaaagcaaggcgagacaaggggccaaccagc

SEQ ID NO: 202979 - RNA, 80 nt, Homo sapiens
cccgagacagcagccgccaccggacacagcagcaacacggggaaaggaccaggaaacaggccgacagcggaaaagaacga

SEQ ID NO: 202980 - RNA, 112 nt, Homo sapiens
cgcaaggaacaggcgaaggggagcaggccgagcccgagccgcagcacgagccaaaccgagggcggagaacggaaaagcaccaggaagcagagaggaccgcagaagggaagga

SEQ ID NO: 202981 - RNA, 102 nt, Homo sapiens
aggcgccggcccagccaaccgccgggcgcccccggacagaccaacgcggcgcacaacaaggaaagaaccccacccaccgcccccccgcaggggcgagaacca

SEQ ID NO: 202982 - RNA, 84 nt, Homo sapiens
gggggccgcggccggcaggaccagcgcgaaagagaccggacgcagccgccaccgagacgagggggacccaagcggggaagaggg

SEQ ID NO: 202983 - RNA, 69 nt, Homo sapiens
gccggccgggggcccgcagacaacaaaaggcgacggccaaaggaagaagggaaaaaccggacaaccagc

SEQ ID NO: 202984 - RNA, 42 nt, Homo sapiens
ccagagggcccggccaaggccgagcagccagcaacgagcggc

SEQ ID NO: 202985 - RNA, 75 nt, Homo sapiens
ccgggggagaaggccgagggccgggagcccgcaccgggccggcaggccccagaagaagggacacgagaaacgaag

SEQ ID NO: 202986 - RNA, 80 nt, Homo sapiens
gccaggcaggaaggagcagaaacggacgagcaagagaaggcagagccagaaggagagccaagcgccagagaacaggagga

SEQ ID NO: 202987 - RNA, 71 nt, Homo sapiens
acacgcaccgcaacaaaacacgaaagacacggaagcacacgacgacacagcaagcaaaagacaacagaaca

SEQ ID NO: 202988 - RNA, 80 nt, Homo sapiens
cgaggaccagacggacaacgaccacgcccaaaagagcgcaccaacccccacgaggggggaaggcaggcaggcaaacccac

SEQ ID NO: 202989 - RNA, 72 nt, Homo sapiens
cgaggggcgaggaccccggcggcagacgcaggcgggaccagagcggacccgagacagaaggccaaagagaca

SEQ ID NO: 202990 - RNA, 74 nt, Homo sapiens
ggcccaaccgaagaaaacaagccgaacacccaacaagaaggcaacgacaaacagccaagcaagccccagggccc

SEQ ID NO: 202991 - RNA, 86 nt, Homo sapiens
gcagccgccaccggcagcagcagcaccaccggacgggaggggcagagcaaacacgaagcgggccaccaaggagagagccagagaaa

SEQ ID NO: 202992 - RNA, 73 nt, Homo sapiens
agccccgggagaagcagcgccgcccggggcagaccaggcagaacaggaccccggcccggcagggcggcgccgg

SEQ ID NO: 202993 - RNA, 72 nt, Homo sapiens
aaagccccacccgccgcagcaagcagagaaaaaggcacaaacccagcacagagaagacggcgacaagcaaaa

SEQ ID NO: 202994 - RNA, 73 nt, Homo sapiens
ggccaccaggcacgacccaccgcaacaccaccaacccaccggcaggggaaaggaagggagcagcgaagccagg

SEQ ID NO: 202995 - RNA, 77 nt, Homo sapiens
cgaaaaggcaaaggaacccccacggcaggacaacccgaaacaccaaagaaagggccccaaaagaagagaggcgcaag

SEQ ID NO: 202996 - RNA, 72 nt, Homo sapiens
caaaaagccagagccaaaaaaacggcggaaaaaagcggagaagagcaagcagagagacaggaaggccagaac

SEQ ID NO: 202997 - RNA, 82 nt, Homo sapiens
accaagagacaaaagaagagaaagccccaagcgacaggggagggacccagggagaagggcggagaggaaaggaaacacccga

SEQ ID NO: 202998 - RNA, 79 nt, Homo sapiens
gggacgcacacaaagcccgaacagcaaggaaaaaggagcaagaggggggggcccccccgaagaaaggaaccggggagcg

SEQ ID NO: 202999 - RNA, 91 nt, Homo sapiens
caagacagacacacgcccacaaagcccagaagaagggcaccagcgaagcacgcgcagacggaaaagaagcagaagagacagaaaacaggaa

SEQ ID NO: 203000 - RNA, 80 nt, Homo sapiens
cggcggccgaacgaggcgagaacgcgcagaccggggagggaaagaaagagaaggagcaagaagagaaaaacaaagcacac

SEQ ID NO: 203001 - RNA, 59 nt, Homo sapiens
gcgcgcgcagggggaggcgacaacaaaagagccgcaaaggaccccaccccccagaagag

SEQ ID NO: 203002 - RNA, 72 nt, Homo sapiens
cccccgggcacaggcaggaacaacccaagccggaaaacaccgcgaaacggggcgaggagaggagacagcaga

SEQ ID NO: 203003 - RNA, 79 nt, Homo sapiens
aagggcccaaaccaggcagagaaagacagcaaagaaaaggagaagaaaggaaaaaaacaaccccgggcaccccgccagc

SEQ ID NO: 203004 - RNA, 76 nt, Homo sapiens
agcgacaggaggagggagaaaagcggacgccggggaggccaaaaaggccccagcggagggacccagccagcccggc

SEQ ID NO: 203005 - RNA, 38 nt, Homo sapiens
cccaagccccccaagagcaagagaaagaaggacccaaa

SEQ ID NO: 203006 - RNA, 67 nt, Homo sapiens
ggacgccggcacagaacgagcacagaccaacagaaaacagacgacgggcacgacaagaacgaggaaa

SEQ ID NO: 203007 - RNA, 82 nt, Homo sapiens
ggccccgcggggagcgcccccggcgcgagccccaggaaaggggaggcacaggagagcagggagaccccacggcagaccagga

SEQ ID NO: 203008 - RNA, 73 nt, Homo sapiens
cgaaccacaagaaaacaagaaaggaaaagagccccgagcggaacccacacagggacccgcagggaaaagaaaa

SEQ ID NO: 203009 - RNA, 79 nt, Homo sapiens
ccaccggccgaggagccggcagccaacaggacacccaccggccacagaccggagaaagaaggggcaagaggaagaagca

SEQ ID NO: 203010 - RNA, 72 nt, Homo sapiens
caggcgggaaacaggcacaaccagccggaagcaaagagcccaggcagacagagacggagaccgccggccagg

SEQ ID NO: 203011 - RNA, 79 nt, Homo sapiens
aaaagacgaaagaaaggcaaacaaaacgggaagcgcgagaaacaccacgcaacggcccaggacacaaggagcgccgagc

SEQ ID NO: 203012 - RNA, 69 nt, Homo sapiens
gacagcggacgccccagcacccccagcgggcagagccgccgcagggcgaaggcgaggacccccagcccc

SEQ ID NO: 203013 - RNA, 72 nt, Homo sapiens
gggagaagagaaagagacgcagaaaggaagcacgcgcgcggacaagaccagaaagaaaagaaccaaggagcg

SEQ ID NO: 203014 - RNA, 78 nt, Homo sapiens
cggcgccccgcacgcccgggaagcgcgcaccgccaagcagagaggcccggcacacgcccaggacaacaagcagcaggg

SEQ ID NO: 203015 - RNA, 73 nt, Homo sapiens
acggaggacccgcccacagggcacccccagaacacacaccaccggaccgccgcgccccccaacgaccaggccc

SEQ ID NO: 203016 - RNA, 78 nt, Homo sapiens
gaaagacaagagcagcacccaaaagaccaggagccacaaaggaggagccccggcacaaaggaagaagaaagaagggag

SEQ ID NO: 203017 - RNA, 83 nt, Homo sapiens
cagcggaccaggagcccagagaagccgggcaccagagcaaggaccgaaggagaagaaggagaaggggaggagaaggcaagccg

SEQ ID NO: 203018 - RNA, 78 nt, Homo sapiens
gcaacaggcaccccccagagaaaggagagcggccgcaaggagcgggacgggcccggccagaaccacggcacagcgcag

SEQ ID NO: 203019 - RNA, 78 nt, Homo sapiens
gcggccagacagggcccaagccgaaccaagcgcagggcgacaagcgcgagacggacaggggcaaggccgaggggaaca

SEQ ID NO: 203020 - RNA, 62 nt, Homo sapiens
caaaaacaacagacagcccagcgcaggaaagcagaaagcaccgggaggaaagagagccacac

SEQ ID NO: 203021 - RNA, 68 nt, Homo sapiens
gcgggcacggacccccacccgggcaggaaaggagggcgaaacacaagcaccacccccggaagcaccag

SEQ ID NO: 203022 - RNA, 74 nt, Homo sapiens
cgggcgggccgggcgacgccggggggggcggcccgcagcgaaggaccgggcggagaacggaaaagcaccaggaa

SEQ ID NO: 203023 - RNA, 73 nt, Homo sapiens
accagagacggggacaagccccgagcgcggcccggacaacaggaggcaacaagccagaagcgcaaagggggcc

SEQ ID NO: 203024 - RNA, 55 nt, Homo sapiens
aaggagggggagaacggagcaagcacaccggcaggacccggaacgcccaaaggag

SEQ ID NO: 203025 - RNA, 77 nt, Homo sapiens
aggcggacaagagaagccgccaggcagagaaaaccgaaggagcaagagcggcggccacaaaaccccgaccggcggag

SEQ ID NO: 203026 - RNA, 39 nt, Homo sapiens
accaaaacgcaacagaaacaacagcccgagaaaagcaca

SEQ ID NO: 203027 - RNA, 80 nt, Homo sapiens
aaccaaaacggcgcgagagcggggacccgcgggacccgcagccccgcgcgggcaccaggcccgcccgggagaagcccgcc

SEQ ID NO: 203028 - RNA, 70 nt, Homo sapiens
cccccccaaggacagaacacaccgcaagaggagccaccaaagccccaggcccaaaccagggagaaaacag

SEQ ID NO: 203029 - RNA, 78 nt, Homo sapiens
agaggaagacccccgccaaaaggaaagcacagcagaaacacaaagcagcccaaccaaaggggagcgggaaacgcacaa

SEQ ID NO: 203030 - RNA, 68 nt, Homo sapiens
cccagcgggcggcccgggcacgcgcccgcagcccagaagaagcaaacaggggcaggaaaacccaaaac

SEQ ID NO: 203031 - RNA, 78 nt, Homo sapiens
gcggggcacccgcaggggcagacagcacaaccagcggcagagagggcagcgcccgagggcggagcgcgcgcccacggc

SEQ ID NO: 203032 - RNA, 75 nt, Homo sapiens
gcaaaacccccaggaccgccagagacagggcagaccgccagcagcacagcaagccacagagagggccggcagggc

SEQ ID NO: 203033 - RNA, 78 nt, Homo sapiens
acggccggcggcacccgcacccggggacaagcgcgggaacggcgcggaaggagacgagcgccaaagacagaagcaagc

SEQ ID NO: 203034 - RNA, 49 nt, Homo sapiens
agcccacggaaccgcgaagaccaagaggggcaaaaggaaaaaggaaacc

SEQ ID NO: 203035 - RNA, 74 nt, Homo sapiens
gggaggcggcggcgggaacgagggcgagcagaggacgacaggccgggagcgcagcaggggccacaaagacaggc

SEQ ID NO: 203036 - RNA, 69 nt, Homo sapiens
gagccagacgccggggaaggcggcagggggcagcacgccgaaggagagaccagacaacaggccagggaa

SEQ ID NO: 203037 - RNA, 63 nt, Homo sapiens
gagccgggaggaacggcccggaaacaggaggaccggagaggagcgaagagcgaagccagccag

SEQ ID NO: 203038 - RNA, 66 nt, Homo sapiens
accgagacggcgaggagcaccccagacagaacgcggcagaacggaggcaggcagcacgagacacac

SEQ ID NO: 203039 - RNA, 76 nt, Homo sapiens
ggagcccaccggcccaaaggcccggacccaaaacaggaacaaggcgccaccggaagaaacgggaggggaggagccg

SEQ ID NO: 203040 - RNA, 39 nt, Homo sapiens
agccgaaccagcacggccagaggaacgagcagagagagg

SEQ ID NO: 203041 - RNA, 89 nt, Homo sapiens
gaaagcgaaggggaaggcgccgaagaggacgaagacccacccccacagaggccgaggagacccgcccagggaccgccagcgcggagcga

SEQ ID NO: 203042 - RNA, 72 nt, Homo sapiens
gcggagcgcgggacagccgcgacacacagggggaaagcaggggagaaaagaaaagaaagacgggaaagaagc

SEQ ID NO: 203043 - RNA, 73 nt, Homo sapiens
cacagacagcagcgcagaccaccccagagacgcacgcggacgccgccaaaagccgaccaaggagaccaaaaag

SEQ ID NO: 203044 - RNA, 55 nt, Homo sapiens
gcgcaccgacccgacgcgccggcccacgcgcggccaagggaaccaaaacaggccc

SEQ ID NO: 203045 - RNA, 38 nt, Homo sapiens
caacgaaagaaggggggaaggaaagaaaggggggcgac

SEQ ID NO: 203046 - RNA, 74 nt, Homo sapiens
gcggcccaccccgacccgggagagcggaggccaacaccagaccccagggaccaagaggcggagagagacacccc

SEQ ID NO: 203047 - RNA, 69 nt, Homo sapiens
cacaagaaacagggagcgcgaaccaccaagcaaaacgggcaccggaaacaccgagaagggccagcgaag

SEQ ID NO: 203048 - RNA, 49 nt, Homo sapiens
gaagagcgaaaaagagaaagcccaccagaaggacccgggaacggacgcg

SEQ ID NO: 203049 - RNA, 79 nt, Homo sapiens
aaaccccgcccgcagcgacacaccaagcggaggggacgccacgcaacgccggacaggcaaccacagagagagcagcccc

SEQ ID NO: 203050 - RNA, 71 nt, Homo sapiens
gcccggcgccggccgagaaggcagaggcgggagagaggagagccgagcaaagagagagaaaaaagaggaga

SEQ ID NO: 203051 - RNA, 80 nt, Homo sapiens
acaccaaacggaggagccagacccggggaggcgcacacacaccaaagagagaggcgcccaaagagcaacggggagccaag

SEQ ID NO: 203052 - RNA, 53 nt, Homo sapiens
ggagcaggacgcagaaccaccaaaagccaagaaacgagacgacgcaaccaaag

SEQ ID NO: 203053 - RNA, 80 nt, Homo sapiens
gaacgaggcgaaggggacggccgggcaggagcaggcagaaacccaacacaagggcccaaaacgacagacgcgaaagggga

SEQ ID NO: 203054 - RNA, 88 nt, Homo sapiens
gcgggagccagcgagccacgggagcgagccagcggccacgaccgggcacgggacccaggacgagcgaccagacccggaggagcaaagc

SEQ ID NO: 203055 - RNA, 72 nt, Homo sapiens
gcaggaaaagacccaccccaaggcaaaggccgacagacagagaacccagggggagaaagaccagaacacaga

SEQ ID NO: 203056 - RNA, 87 nt, Homo sapiens
aagcgcagaaagcaggcgaacccgcggcgcaaaacgaaccaagaaggagcgagggaggagcagcgagacagcaagagacgaccacag

SEQ ID NO: 203057 - RNA, 52 nt, Homo sapiens
acccccagagaaagagggcacacaggcagagagacgaagagagaagcagggc

SEQ ID NO: 203058 - RNA, 88 nt, Homo sapiens
ccgacgcggaggcggcagcggcgggccgaggcgaaggagcggccgggagcccgccgcgcggagcgaaagaccccacccaacccccgag

SEQ ID NO: 203059 - RNA, 86 nt, Homo sapiens
cacgcggcgaaggaagaggagggcaagaagggcaagaagagagaaccgagccaccgcaacggaggcgaaccggcaggagaaaggag

SEQ ID NO: 203060 - RNA, 70 nt, Homo sapiens
aagacccagagaaaggagcacgaaggaacaaagccacgaaaaccaaaggaaagaacaggccgggcagcgg

SEQ ID NO: 203061 - RNA, 68 nt, Homo sapiens
ggggcgggcaggccggccacagacaagaaggagcccccaccgagaccaccggaagccaggacccgagg

SEQ ID NO: 203062 - RNA, 68 nt, Homo sapiens
cgccagccaccccgccacggaagcgccaccaggcggacagaaacaaaaaaagcaagaaaggcaggaac

SEQ ID NO: 203063 - RNA, 72 nt, Homo sapiens
cggcgcaaacggccgacccgcggagccaccagaaagcagccagcagaaacagccgcccagcgaacagcagca

SEQ ID NO: 203064 - RNA, 79 nt, Homo sapiens
gcagaaccacaccaaccgcagaggagagacaagaggcgccggagcaccaacgggcccaccaccggaagggcagcaacag

SEQ ID NO: 203065 - RNA, 71 nt, Homo sapiens
aaggcaaaggaaagcacaccgaaagaaaaaccggcagaagcagaggaaagacagagcgaacccaaagaaaa

SEQ ID NO: 203066 - RNA, 42 nt, Homo sapiens
ccccggaggggaggcacagagccgaggaaggacagggcggga

SEQ ID NO: 203067 - RNA, 75 nt, Homo sapiens
ccacggcccgggcagagggacgagaagccggacagggcccgcggacacggaaccgaaggaaaagcacagaaaaga

SEQ ID NO: 203068 - RNA, 82 nt, Homo sapiens
ggaggaggcgaggaggagaggacagagggccggggcaaccccaccgacggccagggaggacagagcccaggaccaagagcac

SEQ ID NO: 203069 - RNA, 58 nt, Homo sapiens
ggggagcaaaaccaacgccggccggagcagcagcccgagcggagcggcggacaccaga

SEQ ID NO: 203070 - RNA, 81 nt, Homo sapiens
ccgcgagccccgcaccccgagagcggagaagccccggcggagaaaccaccacaaacacgaggccagcaacgaccaacaaga

SEQ ID NO: 203071 - RNA, 88 nt, Homo sapiens
ggacccggagggggcaagggaccagcaaggcggcagagcaaggggcacgcagaaggaccggccacgggggaaaggaggccgagaagag

SEQ ID NO: 203072 - RNA, 72 nt, Homo sapiens
agaaaacaagagaccacagaagggcggagaacggaaaagcaccaggaagcagagaggaccgcagaagggaag

SEQ ID NO: 203073 - RNA, 82 nt, Homo sapiens
gcagcccggagccggaggagcgcgcggacgccaaccagcccgcgagcgcccgaggaaccccaaagaggcccggaggaaacag

SEQ ID NO: 203074 - RNA, 66 nt, Homo sapiens
acgaacaggaaacgggaaccggcaaacaacagaaagaaagccaagcacacacgaagacgcccgcca

SEQ ID NO: 203075 - RNA, 81 nt, Homo sapiens
gacagccaccagcggcaaggcgcaggaggggcaccagcaccgaaccccacccagaccggccaacacgggggacgacaccaa

SEQ ID NO: 203076 - RNA, 89 nt, Homo sapiens
cggcgcagaaaggggaggccgggaggacgaagagaaccaggagcggcagaccgccgccaggaggaggcacgcagcccgagaaggagcca

SEQ ID NO: 203077 - RNA, 74 nt, Homo sapiens
cagacaaccaccaaaggggaaacagaaacaagcaacgagagacagcagggaggaaacgagaaagggcccacaca

SEQ ID NO: 203078 - RNA, 72 nt, Homo sapiens
gcgccaacgcccagacaagaggacacgcggacaggacacagaagccaaacaagagcaaacggcgaaaccggc

SEQ ID NO: 203079 - RNA, 69 nt, Homo sapiens
agcccagagaggcccacaaccaagccacaaaagacacgccacaaccggagccagcacgagacaacaaga

SEQ ID NO: 203080 - RNA, 79 nt, Homo sapiens
aaagaacccccaaaaggcaacgaaaaacgcgagcagaaaccacgaagaagcgaaacgggcccacggcagcaccagccgg

SEQ ID NO: 203081 - RNA, 57 nt, Homo sapiens
caaggcccaggacccacggcgacacacgcgacacacggccagagagcacaagaagaa

SEQ ID NO: 203082 - RNA, 80 nt, Homo sapiens
gcgcccaggccagagaaggggaaggaggggcagcggccggcgcggaagaggccggcggcgggacggccccacgggacccg

SEQ ID NO: 203083 - RNA, 69 nt, Homo sapiens
acaagacccagcggcgggagagcagcggggcacaggcggccacaggcagccggacaagacagaaagccc

SEQ ID NO: 203084 - RNA, 79 nt, Homo sapiens
agggcagaccagcaacggggggccgagaacacccaacagcgggacagaaagggagaacgcagacaccgagccaaaaagc

SEQ ID NO: 203085 - RNA, 84 nt, Homo sapiens
aaaacaccaggacaaagaagggacacaccaagcaaaggcggaggacccacaggagaggcacaggaccagaccaagacacacaac

SEQ ID NO: 203086 - RNA, 87 nt, Homo sapiens
ggaagccgcagcggaaagcaggagcacaggcaaaagcagaccggaaaacccaccggcaagaccacacccgaggggagcccaggacac

SEQ ID NO: 203087 - RNA, 59 nt, Homo sapiens
gaccaggaccaggaagaacagaggaggacggaccgcgacacagagagagcaagaagagc

SEQ ID NO: 203088 - RNA, 82 nt, Homo sapiens
cagccccgccggggggcagggcccacgacacaaacggaacgccgcgcgaggacgcggggaccagcaaagagagggccaagaa

SEQ ID NO: 203089 - RNA, 81 nt, Homo sapiens
gcgggcacccacggagccccggggcgggaaacaacacgaggaggacggcacaaaaagcaccagcggggaggaacaacgaag

SEQ ID NO: 203090 - RNA, 56 nt, Homo sapiens
cgaaaagcacagaccccggaaacacccaccaccgaaccagacaggagacccaacac

SEQ ID NO: 203091 - RNA, 79 nt, Homo sapiens
agccgccgcagacccagcagccaagagggaagcagacgagagcaagcaagccccagccaagacccaccaggcaggggaa

SEQ ID NO: 203092 - RNA, 70 nt, Homo sapiens
cccccagcaggccagaggcacagcccccagacaagagaagccacggagcaagacaccgaggacgccgcgc

SEQ ID NO: 203093 - RNA, 66 nt, Homo sapiens
aaccccagccccccaaagccggaacagaggggacacggcgcggagagacgagccagacagacaagc

SEQ ID NO: 203094 - RNA, 71 nt, Homo sapiens
gggcccagaccaacaccaagaagccggcccagggcccgacaagagaggcggagccacccccacaacggacc

SEQ ID NO: 203095 - RNA, 86 nt, Homo sapiens
caagagcgacgccgccgggcccaacggcgggccccggcgaggcagcgcggccgcagcagcccgacaccagaggacgcccggcagaa

SEQ ID NO: 203096 - RNA, 71 nt, Homo sapiens
caccgccgcgagggggaaaaagaaggccgcgagaaaacacgacccgggccgcagccgacccggcggagcca

SEQ ID NO: 203097 - RNA, 75 nt, Homo sapiens
cacggacgaccaggacgaaggccggcggcaggagaaagacgcagaaagaggggcaaaaaagagcacaaagcgccg

SEQ ID NO: 203098 - RNA, 71 nt, Homo sapiens
cccgaacccagccacgacagccggcagaacacggcacgccgagcacagcagacgccaaagacacaaaaaga

SEQ ID NO: 203099 - RNA, 76 nt, Homo sapiens
ggggcaccgcagcgaccacccacacaaacccgggacgggccgagagaggccagcccaccagggcaagggcccgccg

SEQ ID NO: 203100 - RNA, 103 nt, Homo sapiens
aaagcgccgcgaagcgccgccggccccgccgccaagaggagcgagcggacccgcgaggggggagacaccgccgcagcgaagcgaccccgcaagacaagcccca

SEQ ID NO: 203101 - RNA, 76 nt, Homo sapiens
gaccagcagcgcgccgccgcccagggcgaagagagaacacgcacggaaggaaggagaccacgagaaagaaaaaaca

SEQ ID NO: 203102 - RNA, 72 nt, Homo sapiens
aaccagaagacaacaaagagggaggccggccccccgacagaccccgcacgaggccacccggagcaggggcca

SEQ ID NO: 203103 - RNA, 83 nt, Homo sapiens
cgacaagcgcagaacagcccaagccggacccagcagcgcgcaagaccgagaccagacccgggacaacccgccacaacgacaaa

SEQ ID NO: 203104 - RNA, 57 nt, Homo sapiens
ggcggcgggccggacgacaaccgagcaccaagggaagcggagcagggcgaaaggccc

SEQ ID NO: 203105 - RNA, 86 nt, Homo sapiens
cgcgccgccagggagcccccgcgcgcccggccggcccggagcaccgagccgcggcacggaggaggaccacaaaacaaaccacccaa

SEQ ID NO: 203106 - RNA, 81 nt, Homo sapiens
acgaggagagcacgacggaccaagacgagcccagcgcaaccccaagcgcccaaaggcagagcccgcccagaacgaggacgc

SEQ ID NO: 203107 - RNA, 68 nt, Homo sapiens
gccggaagagagccaagccaggcccagcagccgccaccggacaagcacgcagaccagcaccacaggca

SEQ ID NO: 203108 - RNA, 82 nt, Homo sapiens
gagccgccgccaagagccggccacagaggccggaaaagccccaaacgcgccaacgcaaacggagcagaagacagcaagagaa

SEQ ID NO: 203109 - RNA, 82 nt, Homo sapiens
cgggaggcagaccacgagaagccaggaggaagaagaagccagaacacaaaccaggacaggcaagacgaggaccagaaaacag

SEQ ID NO: 203110 - RNA, 58 nt, Homo sapiens
gaagacaagaaagaggcaccaacccaacggccacgaacgacgcacggaggccacaaca

SEQ ID NO: 203111 - RNA, 85 nt, Homo sapiens
aggcggaacgcaggagacacaagaagcggaccaggaaacagaagagagagggaaagaaaaaggaaacccagggagacaaacacgg

SEQ ID NO: 203112 - RNA, 68 nt, Homo sapiens
acaggaaaaccacacggccaggaaacggaaaagcaaggaagggccccacaccaaaccgccacgcaaca

SEQ ID NO: 203113 - RNA, 54 nt, Homo sapiens
agcgccgaacgacgggccacaggcaagaacaggggcaggacaacccgaggagcg

SEQ ID NO: 203114 - RNA, 78 nt, Homo sapiens
ccagcagcaaccggaaagcaagggagcggcacagccagaagaccgaagcgcgacggaagggacgaacagcggggacgc

SEQ ID NO: 203115 - RNA, 75 nt, Homo sapiens
cgcgccacggaccgcgggacaagaaaacagcggagagacagagagaggagaaagcggccaaccccagaagagaga

SEQ ID NO: 203116 - RNA, 73 nt, Homo sapiens
aaagaacgcagagcggagggggaccaccccaggaagaagacaacaggaaacagaacgacagcccgcaccgacg

SEQ ID NO: 203117 - RNA, 75 nt, Homo sapiens
ccacaccggggagggagacggacccaccacccacaagagccaaggaaagaagccgcaggcggaagaaccccagcc

SEQ ID NO: 203118 - RNA, 55 nt, Homo sapiens
gaaaacccgaaaaggagaaccaagaagaggcccgacggagcagcagcgccgggaa

SEQ ID NO: 203119 - RNA, 66 nt, Homo sapiens
acagcgggccggagcagccgcgggcgcccgaggggccgagcgaggaggcccaaggaacagcacagc

SEQ ID NO: 203120 - RNA, 77 nt, Homo sapiens
acccacgaccaaagcggaaggccgccggacacacagcagcggacgacgggagcagacggacgggccacggggaggag

SEQ ID NO: 203121 - RNA, 74 nt, Homo sapiens
cgcgaggaggaagacgaacgaacagccagaagaaaagggcagcgcaagggcagaccggagaagaggcgcgggga

SEQ ID NO: 203122 - RNA, 86 nt, Homo sapiens
ggggccccccagccccgccaacccagccggcaaggagggagacggcgagcagaggcgccccaccacgccacccccaacccgcggag

SEQ ID NO: 203123 - RNA, 111 nt, Homo sapiens
ccaccgagaccaagaaggaccagaaaaccgacaacccccagaaagccaagccggggcacaagacaagaaagacccagcggagaagaaaacgaagaagaccgggaagcaaaa

SEQ ID NO: 203124 - RNA, 70 nt, Homo sapiens
acagagccaacccagaagagccaagacggcaccaggacaagcgagggagacacgggcggaagccgagaag

SEQ ID NO: 203125 - RNA, 65 nt, Homo sapiens
caggaaccaccgcccaaagaaagccacaggacagggagaaaagaagggaagggaccaccgacagg

SEQ ID NO: 203126 - RNA, 82 nt, Homo sapiens
cgcgggcgaagcacgcacaccgggcagggccgagaggacgccagcggcgcgcaggagagaagccacaagcaccgcccaacag

SEQ ID NO: 203127 - RNA, 81 nt, Homo sapiens
gcgacgagcgacccgggagacacgacggcccgcggcaggcggggccaggcccgagccagaaggaggcccacagagcccccc

SEQ ID NO: 203128 - RNA, 61 nt, Homo sapiens
cggacaaaagccgaagaaacacagaaggcgcgcagggggagcagcccagaaacaggacagc

SEQ ID NO: 203129 - RNA, 76 nt, Homo sapiens
cagagcccggagcaggaaaaacacagagacagacggcggcaggagaggagccaagcccaacgggacgggaaaacgg

SEQ ID NO: 203130 - RNA, 74 nt, Homo sapiens
cgcccgagcccagcccacgccgagagaaccccccccgcagcaggagcaaaagagaaggcacaaagcggagcaga

SEQ ID NO: 203131 - RNA, 61 nt, Homo sapiens
cacgcagacgacgagcgagccaaaaggggggacacccaagggagaggcgccaccccagcgg

SEQ ID NO: 203132 - RNA, 76 nt, Homo sapiens
gcaaagaaaagaagacccaccaaggaagaaggagaaaaaagcagagggagaaaaccggcaccccggaaagccccgg

SEQ ID NO: 203133 - RNA, 74 nt, Homo sapiens
aggcggaaacggaggagagaacaaagaggaagcagagcaggaaggagggaaggagcagacgaccgaacaaaaag

SEQ ID NO: 203134 - RNA, 58 nt, Homo sapiens
ggaaaacaggcaggaaaccacgcaaaaccacccaggggagccgccaccaaaagcagac

SEQ ID NO: 203135 - RNA, 75 nt, Homo sapiens
ccccgagagcggaagacaggcccaggacacagccagcaaacaaaacagcggaagcaagacacacacaacccaaag

SEQ ID NO: 203136 - RNA, 82 nt, Homo sapiens
acacaacacagcaacagaccccgcagacccccaggaagccagagccacacacaccacaggccgaccagagaggaagcgagac

SEQ ID NO: 203137 - RNA, 75 nt, Homo sapiens
agcgcagcaagacggccgcgcggcccgcaggaagggccaaaggcaaagcgggacaagccaaaacagcggacaaag

SEQ ID NO: 203138 - RNA, 81 nt, Homo sapiens
aaagcccaagagaggcaggcagcgacagccacacaacggacaggaaagaagccagaacagaggaacagcggggaagcagga

SEQ ID NO: 203139 - RNA, 37 nt, Homo sapiens
agagcacaagcagagggcgaaaaacgggggagcgaag

SEQ ID NO: 203140 - RNA, 86 nt, Homo sapiens
cccgggggggcggagacgcacggagcggccgggggccggccgggccgcccggccgcgcagccgaggcgaagccgacgagcccgaac

SEQ ID NO: 203141 - RNA, 48 nt, Homo sapiens
ggcaccagaaaggacaggggccggcccgagaccacccccgggcgcacc

SEQ ID NO: 203142 - RNA, 89 nt, Homo sapiens
cgcaccggagaagaacggggaccgggacccaagaagaagcaggggaagcagaaggcagccagcgccgacagcacaaccgagggcacacc

SEQ ID NO: 203143 - RNA, 72 nt, Homo sapiens
gccgccccgagccgaccgcgccgcacgggagccagcggggacaacggcaagcggagaagagcaaggccgaac

SEQ ID NO: 203144 - RNA, 50 nt, Homo sapiens
cacaaaccggcccaacaaccacaagggcaggcacccgcccagaaaccgag

SEQ ID NO: 203145 - RNA, 41 nt, Homo sapiens
gggacagcgccacacgccgggccccacccggcaaccccgac

SEQ ID NO: 203146 - RNA, 75 nt, Homo sapiens
gacacaaggcgccacggcagcggaaggagggccccggagcagccacaccaccgaggccccacccagcacgagcac

SEQ ID NO: 203147 - RNA, 79 nt, Homo sapiens
agaggaggagccagaaacagaccagccccgggccccagcgcccacccaaggggggggcggcccgccgggcacccgcgac

SEQ ID NO: 203148 - RNA, 77 nt, Homo sapiens
gcaggaggcgccggcgcaggcccagggcgaagcgcagcagcgcgccggaggaaacacggggacaaagcgggagaaaa

SEQ ID NO: 203149 - RNA, 75 nt, Homo sapiens
gcaccccgggggacgggggcggcggggcgccggcggcgggacagcacaacacgaaaggagaagaggacgggagga

SEQ ID NO: 203150 - RNA, 80 nt, Homo sapiens
gggccgcccgcaagaaaacaagcagccgcacgacgcacggcccaggaccgcacaagaacccgcccagagccagcgccccc

SEQ ID NO: 203151 - RNA, 84 nt, Homo sapiens
cgcgggccggcgcccagcgcccagggcccaggccgagcaggaccgagcccgccaccgagcaggccggagggaaggggaaggaag

SEQ ID NO: 203152 - RNA, 63 nt, Homo sapiens
gaccgccacgcgacggaggacccaggagagggggagggaccccaccggggcaaagagaggaga

SEQ ID NO: 203153 - RNA, 54 nt, Homo sapiens
aggggagagggacacagaccgacggaccaccagaaagcccgccaagcgggcaaa

SEQ ID NO: 203154 - RNA, 73 nt, Homo sapiens
ggcgagacgaccagaaaaggcagccccgaaagccaacaggaaacagcaaacccagcaggaagccacgggcgaa

SEQ ID NO: 203155 - RNA, 35 nt, Homo sapiens
cagagaagccgcacccggaggagaagaaccaacaa

SEQ ID NO: 203156 - RNA, 65 nt, Homo sapiens
caaaacgcccaagaaaccaagccggaaaacaccgggaaaggcccaaaccggcgaaaacccccggg

SEQ ID NO: 203157 - RNA, 59 nt, Homo sapiens
aggggaggaggagcgcggaggcgaccgcagacccagagaaaggccacgcgagccaggca

SEQ ID NO: 203158 - RNA, 79 nt, Homo sapiens
ggcgccgacagagaccccgcaacagaaccaccaaggcggagggggcagggcagaaggaccaggggcgacgaggcccaga

SEQ ID NO: 203159 - RNA, 76 nt, Homo sapiens
gagaacaccccacagggaagagggcaagaaacaacagcgaccagagccgaagagaacgcgaagaagggccaacccc

SEQ ID NO: 203160 - RNA, 62 nt, Homo sapiens
agagaacacacggaccgagagagaaccaacagagcgggggcaaaagaaagggggggccagcc

SEQ ID NO: 203161 - RNA, 51 nt, Homo sapiens
caagcggggcacgcgagcagacgagccacccacacagaaagccagggccgg

SEQ ID NO: 203162 - RNA, 71 nt, Homo sapiens
cgagagcgcgaaacgcacgagaagggaccgacagcaagaaaaggagaaaacaaggccgcgggcacacagca

SEQ ID NO: 203163 - RNA, 57 nt, Homo sapiens
cgcgggacagccgcgacacacagggaagaaccaacgagagacagagccagagaagag

SEQ ID NO: 203164 - RNA, 60 nt, Homo sapiens
caggcccagaacaaggaaacagggaagcgggagaggccacccgcccacgagcggaagaac

SEQ ID NO: 203165 - RNA, 77 nt, Homo sapiens
agcgcaggcagcagcccacggaaaaaaagacgcccgccgacacagccaccaagaaggcacaagcagaacgggaaaag

SEQ ID NO: 203166 - RNA, 78 nt, Homo sapiens
cgcggccgcacacaccaggcccacacgacagggacgcccagcccgcgcccacagcagggcagcacaaggagaagggcg

SEQ ID NO: 203167 - RNA, 80 nt, Homo sapiens
ccggggcccgagcccggcgggaccagcaccagcaccggcccaggggccgcacccgcagacaaggcccagcaggggggggg

SEQ ID NO: 203168 - RNA, 77 nt, Homo sapiens
gaaggagcggcggacacacagacccccaccaagcagcggagccccgggcccagcaggaggcggcccccgcggaccgc

SEQ ID NO: 203169 - RNA, 90 nt, Homo sapiens
gcggaggacgcgcccggcgccccgagccggccgagcggcgacggaccgcgagggacacaggaagcgccagccccccagccaaggacagcg

SEQ ID NO: 203170 - RNA, 74 nt, Homo sapiens
aacgggcagcacgaccagaagagcgaaaagagggcccagagagaaagagacgggacaaggaggacaaccccgac

SEQ ID NO: 203171 - RNA, 82 nt, Homo sapiens
gacacaagaagagggcggagcggagacgggagaagaaaagacagcgccagcagaacggcccacacaccacgaccaccaagag

SEQ ID NO: 203172 - RNA, 53 nt, Homo sapiens
gcggaaagcacgcgcacagaggcgccacggccggaacgcacagcggaaggccg

SEQ ID NO: 203173 - RNA, 73 nt, Homo sapiens
cggacgcaaagcgcacggaaggcaccacagggagcagcagcggaggacgggaagggggcgcggcgcccgcaac

SEQ ID NO: 203174 - RNA, 76 nt, Homo sapiens
gccccagaagccccgggagcaccgagaagcggagaagagaggagccagccacacggaaagaagaaaagaaaagaga

SEQ ID NO: 203175 - RNA, 64 nt, Homo sapiens
gcaaaagaaacagaggagcaggcacaagcaagaaacgaagagcgcgcgcaagagcaaaaccaag

SEQ ID NO: 203176 - RNA, 71 nt, Homo sapiens
cgaaacgcacgagaagggaaggggaagccggcacaggacgggggcaaacccgaccagccacccgccccaac

SEQ ID NO: 203177 - RNA, 77 nt, Homo sapiens
accacggacgagagacaaacgccgaaggaaaacaggcggcaagggcccccgggcggcggacaaacagaccggaaaaa

SEQ ID NO: 203178 - RNA, 70 nt, Homo sapiens
gcccccaaagaaggcagggagccccccagaagcacaaaagaccggcaagcagacagcaggcggcaccacg

SEQ ID NO: 203179 - RNA, 70 nt, Homo sapiens
ccgcagcaaaaccggaaaacccaagggaaagaaaaagcccgcgcagaaagagaacagcggcagaaaaccc

SEQ ID NO: 203180 - RNA, 84 nt, Homo sapiens
cgcgccgcaggagacgagaggacgggaccaggcgaagcggccgagcaggcgagcgaacgacgggccagaagcccccaggaggag

SEQ ID NO: 203181 - RNA, 75 nt, Homo sapiens
cgcggagggccgagggagggccgagccagccgcggccggaggagcccccaggccggaaaaagaaaagggcagaca

SEQ ID NO: 203182 - RNA, 83 nt, Homo sapiens
cgcgcccgagcccccacccgcggccggcgccgcccggaccgccagggggggccccagcccggccgaacgggcgcacgacacaa

SEQ ID NO: 203183 - RNA, 70 nt, Homo sapiens
agagacgggagacgagagaacacgccggagagcagaagaggagccaggaagggcagaagcagcaagcacc

SEQ ID NO: 203184 - RNA, 80 nt, Homo sapiens
gcgggacgcgcgcgggcacccacggagccccggggcgccgagagcggcccaggaggaacaaccagcccacccggagaggg

SEQ ID NO: 203185 - RNA, 52 nt, Homo sapiens
gaccacaaggcaagagcagaccacaccgacccaagagaaccgagcaaccccc

SEQ ID NO: 203186 - RNA, 97 nt, Homo sapiens
ccagaagggccgaccagaaaggaaccccaagcgacgcaggcagaagcgagacggcaagccaaacagaggaaagagcggagcccgccagaaacagaca

SEQ ID NO: 203187 - RNA, 88 nt, Homo sapiens
ggagcggcggcgcggcggaaccagggccgacccgggccggaccgaccccaggcggcggcagacaaaccccgccagcagcgcgaccccc

SEQ ID NO: 203188 - RNA, 75 nt, Homo sapiens
ccaccagaagccagcccccaggcggaacgcccgccccgcagagaggaaaagagaaccgccagcaagagcgcgcac

SEQ ID NO: 203189 - RNA, 83 nt, Homo sapiens
aacccggaggccgaggaacgggccgcgaaggcgccgacagcccagggagagggaacacaggaaacagcagaccccgacgaacc

SEQ ID NO: 203190 - RNA, 79 nt, Homo sapiens
ccggggggacgccggagcaaggagccgggccacggggggcgggccaggggcccggacagcagagcggggccacggcgcg

SEQ ID NO: 203191 - RNA, 73 nt, Homo sapiens
cccccccggcgcgccgcggcccggagcgcggcccgaggcccgcccagagcaagaggagccaggagcacggggg

SEQ ID NO: 203192 - RNA, 73 nt, Homo sapiens
cgagcggccgaggggcacgcagggacaccaagcagagggccccacccagaagggacgccgaagaagaggccga

SEQ ID NO: 203193 - RNA, 56 nt, Homo sapiens
gcacggagacacacagcgaagaaaagcaaacacgaggaccaaaaagagccaagcga

SEQ ID NO: 203194 - RNA, 74 nt, Homo sapiens
gcgggccacgaggagggcgcagagcccaggagacgaaagccaagagacagagacgaaagagaaggcaaagaaaa

SEQ ID NO: 203195 - RNA, 69 nt, Homo sapiens
agcgccgcgggccgcaggccgcgagcagcggacgccggccgccgcaggagaccgggcagacaagaagcg

SEQ ID NO: 203196 - RNA, 74 nt, Homo sapiens
acagaaggagcaggaaccaaagggcaaaaaaggagaaggaaaccaaaccagcaaaaccggcaagacggacgggc

SEQ ID NO: 203197 - RNA, 72 nt, Homo sapiens
gacgaggccaccagccagggaaccaaaacgggaacagcggagaagaaggaacaaagccaaggaccgaagaga

SEQ ID NO: 203198 - RNA, 69 nt, Homo sapiens
ggaagcagccagaccaagaacaaccgcggacacggagaggaaggccgaagaaaaggagagaggcagacc

SEQ ID NO: 203199 - RNA, 80 nt, Homo sapiens
ccgacggcaaagggcgggggcaaagcggagaccggccagcgcagaagacgagaagccaggaggagaagcggcccggcaag

SEQ ID NO: 203200 - RNA, 67 nt, Homo sapiens
acaagagggccagaggaggacagcacaaaaaggagggagcgacgaagagggagagcacagaaaagga

SEQ ID NO: 203201 - RNA, 74 nt, Homo sapiens
acaacggccgcagggccgaggagacaggagaagggcgcacccgggaggaacccacccggcagcccacaacgccc

SEQ ID NO: 203202 - RNA, 78 nt, Homo sapiens
cacagggagaacagggcagaacgaggggaggaaagcaggggagagggccagcagaaggaaacaggcgccaaagggagc

SEQ ID NO: 203203 - RNA, 61 nt, Homo sapiens
gaaggaccaagaaccagcaaaccagcggaaggggacagaccgggaggcacgccagccaccc

SEQ ID NO: 203204 - RNA, 59 nt, Homo sapiens
caacaaagaggccagaacagagcgagcgagggcccgcagcccccggaagccaaagaccc

SEQ ID NO: 203205 - RNA, 83 nt, Homo sapiens
cgggaagcccagggagacgagcaggaaaccccgaagaagaagacgaagggccaagagggaaaggagagagaggaagagcagag

SEQ ID NO: 203206 - RNA, 61 nt, Homo sapiens
gggcgacacgagaacaaaaggggccagacccacgagaagcgccgaacaaggcaacggaaaa

SEQ ID NO: 203207 - RNA, 73 nt, Homo sapiens
ggacacaggcacaagcagcagcagggacgcaccaaaacggacagccgaagacaggcgacccaccaccaggacc

SEQ ID NO: 203208 - RNA, 70 nt, Homo sapiens
ggcaacacccgaagaaacaagcacagcccaagaagacggcagaacacccagcacgcccagaacgaccaga

SEQ ID NO: 203209 - RNA, 67 nt, Homo sapiens
ggaagaaacagacaacgccccaccagaggaaaaagagggaaccaagcgccaacccaaacgagcgaga

SEQ ID NO: 203210 - RNA, 83 nt, Homo sapiens
ggaagacagcacgcgacgagaagaagaagcagagagccaggaaaagaaagagaacccagccgccgacaggcagcgcccacacg

SEQ ID NO: 203211 - RNA, 71 nt, Homo sapiens
cagaaccaaggaccaaggacccaaagcacaggaaccaccgaaagcggcgcaacgaggaagaccgcaggaaa

SEQ ID NO: 203212 - RNA, 72 nt, Homo sapiens
acaaggcaacaaacgggagagaaagacggcgagaacacggaggagaagaaaccggaaagccggcaagaaaaa

SEQ ID NO: 203213 - RNA, 67 nt, Homo sapiens
gcggcgagcggcgaggcgcccccaccagggcacacaaaggaacagaaaacaacacgaggaggagaaa

SEQ ID NO: 203214 - RNA, 74 nt, Homo sapiens
caaagcgaacgaagagcaccgggagcggcgaagaggcaccggaggaggacaaggacacaccagcacacacccag

SEQ ID NO: 203215 - RNA, 55 nt, Homo sapiens
cccaacagacaggcaaaagaaacagggaagacaaaggcacagcgcaagccccggg

SEQ ID NO: 203216 - RNA, 62 nt, Homo sapiens
gacggcggcagcagcggcacagggaaagggagcagcaccggccacacccacagcacgaccgg

SEQ ID NO: 203217 - RNA, 66 nt, Homo sapiens
aaggggaaagaggagcacccacaggaccaaaccacagcaaaaacaccaggaaagacaacgaaacac

SEQ ID NO: 203218 - RNA, 71 nt, Homo sapiens
ggaccgcggcagaagaaagcaagacccaggacaccccgaagccgagaaagaggccggaagagcgggagcgg

SEQ ID NO: 203219 - RNA, 85 nt, Homo sapiens
gacgagaggacgggaccaggcgaagcggccgagcaggcgagcgaacgacggagaaggccggaacaacgaaggggaggcaccaagg

SEQ ID NO: 203220 - RNA, 76 nt, Homo sapiens
cagcaacacccacaggacacgaaggcggcccgccggcagagcgagccaggaaggaggagggcaacgaacaagccac

SEQ ID NO: 203221 - RNA, 75 nt, Homo sapiens
gacgaggaagcacgaaagcaccaacgagacccgccacacgacaagggagaacagagcaaccaccaaagagagagg

SEQ ID NO: 203222 - RNA, 76 nt, Homo sapiens
gccgggacccggccgcacgcgcgccagagggccacgccaggccggccaggcaggaaccggccaagcgaagcgccgg

SEQ ID NO: 203223 - RNA, 54 nt, Homo sapiens
gccccggcagcagacacagccacgcacgaccggccggccccacacaccaaaaag

SEQ ID NO: 203224 - RNA, 70 nt, Homo sapiens
aaggaccaagaaccaggcacccaaaagagaaaccacgagccccgaggccgagccccggcggaggcacagg

SEQ ID NO: 203225 - RNA, 80 nt, Homo sapiens
aggaaaggagggaagccagaggccaaaggcaggaggagaaggagcaagaagagaaaaacaaagcacacacggcaggaacg

SEQ ID NO: 203226 - RNA, 92 nt, Homo sapiens
aaggaggagacaaggacaccgcgcaaggccggcagaagagcccaccagggaggaccccccgagagacagaggagaggcaccgcggcgaaaag

SEQ ID NO: 203227 - RNA, 83 nt, Homo sapiens
acaccacagccccgacgaacacggggacaccaacaggacccggacaaccaccaccagcgagcaaaagaacaaagaccaagacc

SEQ ID NO: 203228 - RNA, 38 nt, Homo sapiens
aggacgcgccgcgccccaaggccgaggaagcaccacag

SEQ ID NO: 203229 - RNA, 53 nt, Homo sapiens
acaacaaaagagccacccaaggggagccacaaagaaacccccaagaagagcac

SEQ ID NO: 203230 - RNA, 66 nt, Homo sapiens
aacaaacagcccaaacgcacaagcaaaaccacccacagagcagcgcgcagacaggacaaccagcgg

SEQ ID NO: 203231 - RNA, 70 nt, Homo sapiens
ccagacccacacgccgggacagagcagcgacacggggggcccacacaagcccccacccgaagcaaccaca

SEQ ID NO: 203232 - RNA, 42 nt, Homo sapiens
gaaaaagggcagcgacaacagggagaaggaagggaaaacgaa

SEQ ID NO: 203233 - RNA, 80 nt, Homo sapiens
ccggaggccaacaacacaccagaccaggagggaagaaggagaaagggccaaccccgaagaagcaaacagaaacgaaggag

SEQ ID NO: 203234 - RNA, 78 nt, Homo sapiens
agaggggaggaaacacaagaaaacaccccaccagaccacccagcaagcccacaaaaaaggcacaagcagggacagccc

SEQ ID NO: 203235 - RNA, 83 nt, Homo sapiens
ggagaggcaggcggaagacaggagcgcgagcggaagcccaaagagccccccaagagaacccagggggagccacgccggagcgg

SEQ ID NO: 203236 - RNA, 77 nt, Homo sapiens
ccagcaacagcgaggacccagaaccaccgggcagcgacagaacgaccgcccggccagcccaccccccgacgaaggcc

SEQ ID NO: 203237 - RNA, 78 nt, Homo sapiens
ccgagacccccaaaggccagaaagagacaggggacacgaacccgaaacaggaacaccggaccccagaaccagcaacac

SEQ ID NO: 203238 - RNA, 75 nt, Homo sapiens
gcggagaccccaccgccggcgcgggaaacgggcgaagcgacgagccgcgaggaggggagaagcagaccgcaccag

SEQ ID NO: 203239 - RNA, 73 nt, Homo sapiens
gggagggggcccggcaggacgaggacgaaggccgagggagccacgccccaggggagccaacgccagcagccgc

SEQ ID NO: 203240 - RNA, 80 nt, Homo sapiens
ggagaacgcgaaccccggaggggaggcacaacagggagcgcagaaacggagaaagaggaaacagaagagcaaaacgggag

SEQ ID NO: 203241 - RNA, 70 nt, Homo sapiens
ccggcggaggaacggggcccgcccgcggcccccgcgcggaggacaccaggacagacgggaaacgaaagac

SEQ ID NO: 203242 - RNA, 48 nt, Homo sapiens
agaaggaggccggccgacacaaacagggcacccccgaagaagggcacc

SEQ ID NO: 203243 - RNA, 81 nt, Homo sapiens
ccaggcaggggacgcacaggaaacgagcagagaaagggaaaacgaagcgccggcacacggaaaagccacgagccaacccag

SEQ ID NO: 203244 - RNA, 54 nt, Homo sapiens
acagcaacaggccagagaaaggaacaccaccacccacgcagaccacaaagagcc

SEQ ID NO: 203245 - RNA, 71 nt, Homo sapiens
gcgggaagaagcaaacgaagggcaagaacaaaaaccgacaaccccggaacgcgggcaaaaggccccagggg

SEQ ID NO: 203246 - RNA, 85 nt, Homo sapiens
ggagaaggacacgggaagaagcgcaggaacagcggaaaaggcacccgaagaggaaggagaaggaaagagcagaaaggagcggcgg

SEQ ID NO: 203247 - RNA, 82 nt, Homo sapiens
gcccccgggcgggagagacccacggccacggccagaggaccccaagaaaaccaaggagaggacacgccagcagggggaagga

SEQ ID NO: 203248 - RNA, 67 nt, Homo sapiens
aaaacccaaaaaggagcagccggccgcgaaaacaccaagaagcaccaggagagccaggaaaggaaaa

SEQ ID NO: 203249 - RNA, 77 nt, Homo sapiens
ccaggaggacgaccagcaaaccgccagcccccccgcaagccgaggaccaaagcccgccaacccacgcggcgaccaag

SEQ ID NO: 203250 - RNA, 84 nt, Homo sapiens
gccggcgcggccgccggagaggacaccaggcagaaagagcccacaagacaaaaaagcagacggaaacaggcagaagaggaaaag

SEQ ID NO: 203251 - RNA, 81 nt, Homo sapiens
gaaacacaaggccagccccggagcacccacaaaagcgaaaagccagacaggaacaccagacagaagaacgccgggccacca

SEQ ID NO: 203252 - RNA, 66 nt, Homo sapiens
gagaacaccgacggcgagggccgcgggagacaagaaaggaaagcgcagaccaggccggaaaaaccc

SEQ ID NO: 203253 - RNA, 74 nt, Homo sapiens
gaaacaaggaccaacaggaacaaagaggacacaggccgcagaaggaacggcagccacacagcccggcaacacca

SEQ ID NO: 203254 - RNA, 78 nt, Homo sapiens
gagggaggagcccgggcccccggagaagagaggcgcagcaggaccaggaggcccagacccgagagccccgggagaaag

SEQ ID NO: 203255 - RNA, 75 nt, Homo sapiens
aggcagcgaacgggaaagagccaaggagcaccaggaagaggcaacgagacagcccgccccgcacccgcaggaacc

SEQ ID NO: 203256 - RNA, 98 nt, Homo sapiens
ccagaggggccacaaaggggggcccaggacaagggcccaggaaaggaacgggaaagagagagggagacagacgagccacccagcagaagaagagccag

SEQ ID NO: 203257 - RNA, 75 nt, Homo sapiens
accccgggcgcccaagcgacagcgcagaggggcaggagccgggagccaccgcgaagggaggcaccgccccaaccc

SEQ ID NO: 203258 - RNA, 57 nt, Homo sapiens
cgagacaccaaaaagcgagccaagggccagaccaaaggaaccagagcaggagaaaac

SEQ ID NO: 203259 - RNA, 84 nt, Homo sapiens
gcagaagcggcccggccgcccgccagcggccaagaagcccgcccaggccagaagcggacccagaagaggggagcagcaaggagg

SEQ ID NO: 203260 - RNA, 73 nt, Homo sapiens
gccgagcccgcgcacagcgccacaaagcccagcggccaaacaaccacaagcggaggaccgacaagacggaaac

SEQ ID NO: 203261 - RNA, 78 nt, Homo sapiens
ccgccagagcggggcacggagcggggggcgacagacaaaggcagaaaagcgagccaccccaggggaagaacacagacg

SEQ ID NO: 203262 - RNA, 69 nt, Homo sapiens
ccccacagaaagggcgcgggcaacacacaaaggccgccagacgggccggggcgcgagagaacgaacccg

SEQ ID NO: 203263 - RNA, 73 nt, Homo sapiens
aagccagccacggacaccaggcaggccagagcagcaccaggccagagccagaacacaaaaccgcacggagacg

SEQ ID NO: 203264 - RNA, 76 nt, Homo sapiens
ccagcgcccgggcccgaggaggcagccaagccaggccgccacgcggccagcaggcgcaaaaacgaacccacaaccg

SEQ ID NO: 203265 - RNA, 51 nt, Homo sapiens
agaaggcacacaacgggacgagcccggaccccaacaagaccagcagagggg

SEQ ID NO: 203266 - RNA, 69 nt, Homo sapiens
gcaccgccccgggcgccacgagccacagaacaggagccagggaacacacacccgagaacagccgccaag

SEQ ID NO: 203267 - RNA, 79 nt, Homo sapiens
ggagagccggagcggggacccaggagccggccagcgcgccggagccgccgagcacccgaaagagaacaaagaacgaagg

SEQ ID NO: 203268 - RNA, 77 nt, Homo sapiens
cacaggaggcgcggaggacgccccaccgccgacgcccccagccaccaggccggccgcgccagagcccagcgcgcccg

SEQ ID NO: 203269 - RNA, 61 nt, Homo sapiens
aagacagcggagaggagagcgggcggaggacgaggaaagaccacagcaagaccacgccccc

SEQ ID NO: 203270 - RNA, 70 nt, Homo sapiens
caggaagaacgcagagaacacccaccacagacagcaaggccggccgacaacaccgagcaaagaaaaaggg

SEQ ID NO: 203271 - RNA, 47 nt, Homo sapiens
gcaaaacaaagaccagccagcaacccacagaaggcagagcccgaacg

SEQ ID NO: 203272 - RNA, 52 nt, Homo sapiens
cccgccccgggggccggcgggcaacacaacaaggcgcggacacccagacaag

SEQ ID NO: 203273 - RNA, 70 nt, Homo sapiens
gagaacgccacggaccaaagcggagagagaggagaaaagggcccaaaaaagggaaccgcacagcgagaca

SEQ ID NO: 203274 - RNA, 73 nt, Homo sapiens
aaccacagaaagagagagaggagcgcagaacaaacagccggaagcagcgaaaagaggagaacacggaaagagc

SEQ ID NO: 203275 - RNA, 70 nt, Homo sapiens
cggagacacggggaaacgcagaaacgaagagagaagaagaacagggagaaacccgagggacaccagacca

SEQ ID NO: 203276 - RNA, 58 nt, Homo sapiens
ggcgcgagccccgcccccgccgccgcgcacaaccgcacggcaggaacggagaaaagca

SEQ ID NO: 203277 - RNA, 56 nt, Homo sapiens
acacagcagcccagccagcccgagcaagaaagagcgcccacagcagggcagcacaa

SEQ ID NO: 203278 - RNA, 62 nt, Homo sapiens
agacggcgagggcgccagccagacggcacaaaggacagcgcgaagcaccaccggaaccggag

SEQ ID NO: 203279 - RNA, 66 nt, Homo sapiens
cggcgaaggcagccacagcgcccagagaggaagaacgaagcgcgcagaaaacacagaaggcaaaag

SEQ ID NO: 203280 - RNA, 70 nt, Homo sapiens
aggcaaggcggaacacgaccagcgccccaacacaaggcggcccaccaagggaccagcgcagcacccgaac

SEQ ID NO: 203281 - RNA, 112 nt, Homo sapiens
cccacgagccccgcagcgcagccgccgaccacggcgacggacacgaggagcagaagcagggaaacaacacgaggaggacggcacaaaaagcaccagcggggaggaacaacga

SEQ ID NO: 203282 - RNA, 70 nt, Homo sapiens
ccacacagggagcggcagacgggacggccaacggaggagagaaaccggaccgacagcacgaggaggagag

SEQ ID NO: 203283 - RNA, 82 nt, Homo sapiens
gcaaagccaggaacccaggacaaggacgaccgaagacccgcccgggggcggcaagcacggacaggggagaccccacccacaa

SEQ ID NO: 203284 - RNA, 43 nt, Homo sapiens
agggcaccggccgagggacaaggaaaaaacccaggaccaaaac

SEQ ID NO: 203285 - RNA, 76 nt, Homo sapiens
cgcacaggggcagggaaccgaaagacaaggcacaggaaagagaaaagcaaagaggggacagcagagagaagaggag

SEQ ID NO: 203286 - RNA, 74 nt, Homo sapiens
gaaaccagggcagacaaccagaccaacaagaggaaaaagaggaagccaagaccccgcaaagcaacaacaggaaa

SEQ ID NO: 203287 - RNA, 70 nt, Homo sapiens
aaaagggaccccaccgaccccgaccgcaaccgaaggaggggaaagccagcgcagcgcgagaagcgacagc

SEQ ID NO: 203288 - RNA, 78 nt, Homo sapiens
gccggcgggagcggcggaagcccagcggcacaaaccgaagagcccggggcgggacgccacgaaagaaagggagacaga

SEQ ID NO: 203289 - RNA, 77 nt, Homo sapiens
ccacacccccccgggggggcccagagccgaccaccgcgaggcgcgggccgcgagacccgaaagggccgccagccacg

SEQ ID NO: 203290 - RNA, 61 nt, Homo sapiens
caggccaccacagaaacaaaagcaacaaagaggagaaagcagggaaggcaaccacagaacc

SEQ ID NO: 203291 - RNA, 79 nt, Homo sapiens
gggcacaccaacaagccacgaccggggagcaggaggaccccccccagaaaaccaagcgaaaccccaaagggaagagacg

SEQ ID NO: 203292 - RNA, 75 nt, Homo sapiens
gggcggcgcgagagggcacgggccccacgccggagagggaaaccagaacccacaggagggccagaggacaaagca

SEQ ID NO: 203293 - RNA, 73 nt, Homo sapiens
agagcgagcgagggggggcgcgccggaaaccggagcgcgcagcaggggaacacaagcccaaacccagaacgcc

SEQ ID NO: 203294 - RNA, 89 nt, Homo sapiens
cgagacagcagaagggaaagacccggagcgggcaggcggcggacccagcccccaaacgaacacagaagagaacccgaacacagcaggag

SEQ ID NO: 203295 - RNA, 76 nt, Homo sapiens
agaagacaccccggaggagccgaagcaagcccgggggccgggaccgaggggcccggccgcggggcacagcagaggg

SEQ ID NO: 203296 - RNA, 77 nt, Homo sapiens
ggcgcgggagcaacgggaggccggacccagcgagcgggcggcacgcacgcagggcggagaacggaaaagcaccagga

SEQ ID NO: 203297 - RNA, 64 nt, Homo sapiens
aaaaggccgacaacgagggagaagcacaagacagcacagagcccggccgaggccagcacaccaa

SEQ ID NO: 203298 - RNA, 75 nt, Homo sapiens
gagggaccaacggaggccccccaacaacccgggcgcaacgaggggagagcggaggggaaagagcgcaggcaccag

SEQ ID NO: 203299 - RNA, 45 nt, Homo sapiens
gcggaacaggacgccccgacgggcagaggggcaggagccgccgac

SEQ ID NO: 203300 - RNA, 75 nt, Homo sapiens
gagagaaggcgggaaaaaaagcggggaaggggggcaaaaaaaagaagcaagcgaagcaccgagcacccacccgag

SEQ ID NO: 203301 - RNA, 85 nt, Homo sapiens
cgccgagcggacccggaccggggcgccagcagaaggagacacacagagcccaccacgccaccacacccgggaccagcacacagca

SEQ ID NO: 203302 - RNA, 78 nt, Homo sapiens
ccggaccccgcgaaagagccccaagcacccccaggcccgacaagggccacagagggggcggagcccggacggaaagaa

SEQ ID NO: 203303 - RNA, 69 nt, Homo sapiens
caaagggagggcggccaaccgcacagacgaccacgcggcacgaagacccgaagaaacacacgggcaggc

SEQ ID NO: 203304 - RNA, 78 nt, Homo sapiens
acccaggaggagcgagccagggcccgaacggcagaagccggcaaacagagaaaagagaaaggagaacgggagaggagc

SEQ ID NO: 203305 - RNA, 83 nt, Homo sapiens
caccagcgacaaggacagcggagcaggccgcggcggagccggggagcggagacgcaggagcccagggggcggacggcagagcg

SEQ ID NO: 203306 - RNA, 80 nt, Homo sapiens
cgggaccacgcccacgggccggacccgcggccgcgcggggccaaccgccccccagcagcaggcacgggcgaaccccgagc

SEQ ID NO: 203307 - RNA, 79 nt, Homo sapiens
cggcggcgcgggcgagcggcgagccgaaaagcgagcgcgaggaaaaggcggcgggagggcacgcagaggcggagaaaac

SEQ ID NO: 203308 - RNA, 71 nt, Homo sapiens
gcaagagcggaggcgcccggcggagcagaggaaccacacgcgacagggaccaggaggagaagcaaccagag

SEQ ID NO: 203309 - RNA, 73 nt, Homo sapiens
cagaaggaaaacaagaagaaaagcagacaccaaaaaggcaaggacagaacccaagcaggccggagaaaagaag

SEQ ID NO: 203310 - RNA, 55 nt, Homo sapiens
ggcgaacggcgccacgcagggccagggaggcccgcgacgaacaaaagaaagcaac

SEQ ID NO: 203311 - RNA, 80 nt, Homo sapiens
cacagcgagcagccagacagccccccagacacacaccagcaggaaacaagggacacccaagccccagccagccagcaggg

SEQ ID NO: 203312 - RNA, 72 nt, Homo sapiens
cgcgccaaaacagcgcccagccagcgcacacaagcggagggcgacgccgagacaagagggacggggcaccag

SEQ ID NO: 203313 - RNA, 87 nt, Homo sapiens
caccgcgggcgccccgaggccaagccaccccggcggaaccgcccccaggggcaaacccaaaagacacagaaaccccaaaagccccgg

SEQ ID NO: 203314 - RNA, 67 nt, Homo sapiens
gaacgcgccagcgcggggcaacagggaggggaggagaagcggaccggcccaggaccgaaccccgcca

SEQ ID NO: 203315 - RNA, 71 nt, Homo sapiens
ccaacgagcagaccagaacaaggccgggaaaaagcgggagaacggagaaacgaggccggagaaagggcaga

SEQ ID NO: 203316 - RNA, 73 nt, Homo sapiens
aaacgaagagcaagacacccaccgccccaggaaacaaaccaagaaaaccaaaacagaccggaccaaaccagag

SEQ ID NO: 203317 - RNA, 61 nt, Homo sapiens
aaggacagcccagacgcccgcacaaggagcgagcccaaggaccaggaaagggggccgaggg

SEQ ID NO: 203318 - RNA, 62 nt, Homo sapiens
ggaaggaacgacagacagcaaagaaagggaagaaggagaaagacaaagccccgagaaagacc

SEQ ID NO: 203319 - RNA, 80 nt, Homo sapiens
gaagcgaaaaggcggaaaggccggggaaaagacgaaggagacgcaggagggagagcagccagaggaagaagaggaccacc

SEQ ID NO: 203320 - RNA, 72 nt, Homo sapiens
gagaaggaccaagaaccagggagaagaaaaagcagaaaggaacagaaaacaaaagaacaaggcacaacggac

SEQ ID NO: 203321 - RNA, 61 nt, Homo sapiens
ccgaccgaggcgccgccgcgagcgccacgccaaggaggggcaggccaccaacggcgggggg

SEQ ID NO: 203322 - RNA, 76 nt, Homo sapiens
ccggcaggaaggggaccgggcggcggagcggcggaagaagagccccgagagcgcggcaccccagcaggcccgccag

SEQ ID NO: 203323 - RNA, 71 nt, Homo sapiens
cccaaccccccgaacccccagagcagccagacgcgccaggcggggaaagaaaccaaagagagagacacagg

SEQ ID NO: 203324 - RNA, 78 nt, Homo sapiens
gacgagggccgaccggagcccaggcggccccagacgggggaaccccaagcggaagaagacggcacgggacccccagca

SEQ ID NO: 203325 - RNA, 72 nt, Homo sapiens
acaaagaacagagagaagccccaggaccacgagagccggacaaggggaacgcacggagcgagcaggaaccag

SEQ ID NO: 203326 - RNA, 81 nt, Homo sapiens
cccaaccacggggaaaaggcaaaaacccacaccgcaacccagcgagagaaagaaaccaagggagggaaccgggaacggcgc

SEQ ID NO: 203327 - RNA, 74 nt, Homo sapiens
acagccaggcccacgggaaaaggcaggaaagggcaaaggaaggagcggaggagaagaacgggggaacaaaccaa

SEQ ID NO: 203328 - RNA, 83 nt, Homo sapiens
aaaagcacacaaagaccccccccacaggggagacagagggaagaggagcggaaaaacaagcaaaagaaaaacagggaaagagg

SEQ ID NO: 203329 - RNA, 70 nt, Homo sapiens
ggcaccccacccgcaaccccccagaccgccccgcaagaccaggacggacccacgaggaagcggccgcggc

SEQ ID NO: 203330 - RNA, 80 nt, Homo sapiens
agcaacccaaacagggaccaaccaaagacgccaaggagaaggcagaccggggcgggaacggaaaagacaaggaagcagag

SEQ ID NO: 203331 - RNA, 69 nt, Homo sapiens
cgggaaagaaaggaaagcgacaggaagggaaggggcggagacgggcggaacgcaggaggccagaggaca

SEQ ID NO: 203332 - RNA, 79 nt, Homo sapiens
cgccgccaccaggccccccgccccggccgccaggagcagccgccggcgccaagagggcgaaccgaccaagaacaacacc

SEQ ID NO: 203333 - RNA, 63 nt, Homo sapiens
gacgcccagcaagggagcccagagggcgggaccccagccaggacacaaccagagggaagcacg

SEQ ID NO: 203334 - RNA, 77 nt, Homo sapiens
ggcgcgcagcgcggggagcgccagacacagcgagacagcccggcccaccacagaggaaaaccagggaaagcaagaga

SEQ ID NO: 203335 - RNA, 57 nt, Homo sapiens
gagaacgaacaccggaccgccaggcaagcgcgcccggaagcagggacccaaaaccag

SEQ ID NO: 203336 - RNA, 76 nt, Homo sapiens
gccgcgcgggcggcgggaccggggaagacgccggccgcagccgcagggaggagaagaagagaaccacagccgcagc

SEQ ID NO: 203337 - RNA, 72 nt, Homo sapiens
cgggagggccagacagcaaggaaagagcgcccaaaacagcccaagcaagggcagaagacaagaccccaagag

SEQ ID NO: 203338 - RNA, 77 nt, Homo sapiens
cgccgaaaagcaccggagccgccgcgcagaggaggagaagcgccggacagaggggccccccaagcaggggagaagaa

SEQ ID NO: 203339 - RNA, 72 nt, Homo sapiens
gcacaaaaaccgacgagccagggaaagacaaggagccgggccgagaaaccgaaccagagaccagagaagaaa

SEQ ID NO: 203340 - RNA, 71 nt, Homo sapiens
caaaagaacaaaccccagaccacgggaagcagagaaagcgaacgaagggccgagccgccacaccccgcacc

SEQ ID NO: 203341 - RNA, 43 nt, Homo sapiens
aacccacacccccagcccaagcgggggaacaggaaagaaaaag

SEQ ID NO: 203342 - RNA, 83 nt, Homo sapiens
gagcaaaggcacgggcagccggaaggacaccaagagcggaccgggccccgggaggcagacagaaaaagaaacgcaaggaacag

SEQ ID NO: 203343 - RNA, 76 nt, Homo sapiens
aggagcggcacaggccgaggagcggcaccagggaagggcgggaagaccagccagagcaggccgggcagccacaacc

SEQ ID NO: 203344 - RNA, 75 nt, Homo sapiens
aacagaaagaagcagaaaggagcgcagcacacagagaccccacagggagcacggcccaggcagccaagaaggcag

SEQ ID NO: 203345 - RNA, 80 nt, Homo sapiens
aaagaaggagcaaaaagagggaacagcggcccagggcaggcaagcaaaaagggaggacaccaggagaacgaagcaaaagc

SEQ ID NO: 203346 - RNA, 82 nt, Homo sapiens
cggccgggggcccgagaagcccccagggccccaccaccaaacgcaaagaccgccagagagaagccaaggacgccaaaagaaa

SEQ ID NO: 203347 - RNA, 78 nt, Homo sapiens
cgcagcggggacgcggacgcacggaccgagccgacgggcaagcggaaccgggcccccccagccccccgcacacgaccc

SEQ ID NO: 203348 - RNA, 112 nt, Homo sapiens
gcgccgggcccaggcccccacgccgagggccaccaggccgccgggggccgcgcgcccggccgggagaacaagacaagcacgcgaagcaggcacgacacacacgacgacaagc

SEQ ID NO: 203349 - RNA, 80 nt, Homo sapiens
ccgagaggaccgcacgccgccagccagcaggaaccaaagcggacagagagggcaccggaagaagggaaagaggcaagacc

SEQ ID NO: 203350 - RNA, 75 nt, Homo sapiens
aagaccgcgccgcgacgagggccaaagggaagccagccagccggaccacggaggcaggaggacaggaagaacgaa

SEQ ID NO: 203351 - RNA, 60 nt, Homo sapiens
gcgcgccgccgcgcgcgccccggccgccaccggaccaccccgacccaagccagagaccag

SEQ ID NO: 203352 - RNA, 77 nt, Homo sapiens
aaaaacacgagcaggcgcgagacgggggaacggacccccagggcggagaacggaaaagcaccaggaagcagagagga

SEQ ID NO: 203353 - RNA, 82 nt, Homo sapiens
gccgccccacggcgcggcgcccgacgcggggcgcgacgaccgaaggacagcaacagaaacccaagggccaaagccaaagccc

SEQ ID NO: 203354 - RNA, 71 nt, Homo sapiens
aggaccaagaaccagggacgcaggagcggcaaacgagggaacggcaaaaccagcacgggaaaggcagcagg

SEQ ID NO: 203355 - RNA, 76 nt, Homo sapiens
cagccagacacaaacaacgcagggcagggcccgcaccgcaggaggagccaggccgccaggcgagaaaacacagacg

SEQ ID NO: 203356 - RNA, 72 nt, Homo sapiens
caggccggccccaaggaaaaccacccgcagcgaaacacagcacaaaggagcccgcgccaagccgaacacccc

SEQ ID NO: 203357 - RNA, 81 nt, Homo sapiens
gggcccaggcgccggcgccgcgcggcgaccggggcgggcgcggcgaggaggagagaagaccgagcggaggagcgcagcaga

SEQ ID NO: 203358 - RNA, 71 nt, Homo sapiens
cgccaacgacgaggaccgacgcaggaagccagcacaacagacacccggccagaccagcccaaacgaccacc

SEQ ID NO: 203359 - RNA, 73 nt, Homo sapiens
agaaagccagcagacccccgagggccgagcaacaggagggcgaccacaagcaaacagcaagcacccaaaccga

SEQ ID NO: 203360 - RNA, 58 nt, Homo sapiens
gcaaaagagagaacgaacaccacgcagcagccccagaggggagcccaaaagcacgaag

SEQ ID NO: 203361 - RNA, 60 nt, Homo sapiens
ccaagaacccaccacccagcagcagggcacaagaacagcgcgagccacaaggcaaggaag

SEQ ID NO: 203362 - RNA, 82 nt, Homo sapiens
ggaagagcgaccccagcaaaacagaccaagccacccaagcggggccagcacacaacacagggagccgaggaccaggaggaag

SEQ ID NO: 203363 - RNA, 70 nt, Homo sapiens
aacgagggcgggaaagcagggagaagccccggggaaagaggaggaaaacaaaggcagcgaacaaaccaca

SEQ ID NO: 203364 - RNA, 50 nt, Homo sapiens
gcaagcgggggaccgaacaaggcaaaagggaacacacaagaagcccggac

SEQ ID NO: 203365 - RNA, 72 nt, Homo sapiens
gacgacgacgaggaagaggaggcgaggacgcaacaagcaaggcaaacagaagggcaagaccggaagaggagc

SEQ ID NO: 203366 - RNA, 82 nt, Homo sapiens
gagagcaagcagaaaaagccccaaaagcacccccccaccggccaggaacaggcagaacagaccaagagaggaaagagagagc

SEQ ID NO: 203367 - RNA, 72 nt, Homo sapiens
ccaacgaaaccagcgagacggcacaaacggagcggagcgcccaaacacacacgcgggggcacgggagggggg

SEQ ID NO: 203368 - RNA, 71 nt, Homo sapiens
cccgacccccaggcacaacggccgggccacgggcccgcaccacgccgcagccaaaagaagaacccggaccc

SEQ ID NO: 203369 - RNA, 75 nt, Homo sapiens
gaggagaaggcggaaggcccacaccccacccagggggccggaggacgcggggaaccagaccgggccagaccccac

SEQ ID NO: 203370 - RNA, 79 nt, Homo sapiens
gagaacccacaagaacgcgagagccgcaaaggcaggggaagaacagccaccaggggagaaggacggcagaaaacgagac

SEQ ID NO: 203371 - RNA, 81 nt, Homo sapiens
ccagagccccacgggaaggagagcagccagcagaggaagcagaccagcccacacagagccaggcaggccggacaggggaag

SEQ ID NO: 203372 - RNA, 56 nt, Homo sapiens
agcccccgaaggcgggaaaggagggggaagcacagagagaccaaccaccccgcccc

SEQ ID NO: 203373 - RNA, 75 nt, Homo sapiens
caaagcacccaccagaaagaggcacagccccaaaagaaaggcaggaggagaaaggcaggccagccacccccagga

SEQ ID NO: 203374 - RNA, 74 nt, Homo sapiens
ccgcccacccccccgacaagaccccgcggacgaaggcagacaacacagacgacaggcagcaaacaggaggaaag

SEQ ID NO: 203375 - RNA, 71 nt, Homo sapiens
gccagagcgcccaaggcccaggcgcccggagcaccgaaacgccgaaaacgagccggacaggagagacaacg

SEQ ID NO: 203376 - RNA, 63 nt, Homo sapiens
gcacgaaagcccaggccaaaaagagggaggcgaaaggccgcaagaagagacgacgcgagcagg

SEQ ID NO: 203377 - RNA, 71 nt, Homo sapiens
aaggcggagcacgacgaagacacgcacacacaggggaaaaccagagacccagacacgcgaaggaacgaaag

SEQ ID NO: 203378 - RNA, 72 nt, Homo sapiens
ccagaaagggaagagaccgaaggacaaaaacgcgaagaacaagggccggcaggggaagcgaggagaacgagc

SEQ ID NO: 203379 - RNA, 72 nt, Homo sapiens
gcaggcaaggcgggaaacgcagccgacgggcgcccgacaccgcgcccccggaagggcgcggggggccaccaa

SEQ ID NO: 203380 - RNA, 73 nt, Homo sapiens
cccgggccgcgcgcccgcgcccgcgccggcgggcccgccgcgcgccgcgcggaagcaacgaaggaagcgccac

SEQ ID NO: 203381 - RNA, 75 nt, Homo sapiens
aggccggacgcacccggggggcccagagccgagcccacccgaccagggcccggcacccagcagaaggacagaaaa

SEQ ID NO: 203382 - RNA, 69 nt, Homo sapiens
acaaaggagagaggaccacccagaggagcaacaagaaggaaccagcaaagcgccacgaagcacaagcaa

SEQ ID NO: 203383 - RNA, 56 nt, Homo sapiens
ggcggccggccaaagccaggagcaaaacacgagggcaacagacaagcagagaaagc

SEQ ID NO: 203384 - RNA, 75 nt, Homo sapiens
ggcgggggggcgggacgacaggcagcaaaagaccagaaagaccagaaggaacgacaaacaggaccgccaaaccca

SEQ ID NO: 203385 - RNA, 41 nt, Homo sapiens
ggggagcggcgcggcggcgcgggaggcacaggaagagggcg

SEQ ID NO: 203386 - RNA, 82 nt, Homo sapiens
agaaagaggacaggggaccagaagaccagaacgagccaagaggggaacgagaagccacacgcagccacaggaaccagccagg

SEQ ID NO: 203387 - RNA, 67 nt, Homo sapiens
aagaaagagaaagcaggaagccagccagagcagagcggacgggcccagggggaacaggagcggcgga

SEQ ID NO: 203388 - RNA, 75 nt, Homo sapiens
aggagaaggcaggaccagcgggggaaaagccacccggaacgaaccggagaagaaacagaaaaaaaaagaagagga

SEQ ID NO: 203389 - RNA, 80 nt, Homo sapiens
agagacgaggcggaacagagaaaagaaagcaaacggggacagcgccgaccggaacagggaccacggaagcccaggaccag

SEQ ID NO: 203390 - RNA, 79 nt, Homo sapiens
gcgacgcccagagccgcggccggggcgcgggaggaaagaccacagcaagaccacgcccccagccgggggaccaggccga

SEQ ID NO: 203391 - RNA, 70 nt, Homo sapiens
cagcgcaccacacacagagggaaacggaaagggccgaaccacagcagcgcagcaagaagggccggagagc

SEQ ID NO: 203392 - RNA, 62 nt, Homo sapiens
ggggccgccggagaccccgcgccgacggcgccaaacacaggggaaccgggacccaaggaggc

SEQ ID NO: 203393 - RNA, 71 nt, Homo sapiens
gaagaaacaaaagagaagccagaaacggaaacagaacaacgcaaagggaagagaaagccaaacccaccccc

SEQ ID NO: 203394 - RNA, 56 nt, Homo sapiens
cgaacccaggaagcagacacaagagggcccaccagaaaacacgaaggagaagcgca

SEQ ID NO: 203395 - RNA, 55 nt, Homo sapiens
gacagcggccccgcggcaaaaggcacacaagggcgggccagcaccggccacagac

SEQ ID NO: 203396 - RNA, 87 nt, Homo sapiens
gaagcggcgggcggggggagcagccagcgggccggggagcgccgccgccgcccgaggggaaagcggggaagcgaaggcagaaacacc

SEQ ID NO: 203397 - RNA, 84 nt, Homo sapiens
acagcccaaaccgcgcaccaggaagcccgggcccagagcgccccagccccccgccagcccgacgccggccgcggcccggacagc

SEQ ID NO: 203398 - RNA, 73 nt, Homo sapiens
ccaccaccgccggacaaggagccccgcgcgcagcagagaggacggggacgggccccaggacgaggaagacaag

SEQ ID NO: 203399 - RNA, 61 nt, Homo sapiens
aacaaggacacgggaaaagaggaaacaggaacccacagccagaacacagcagcaagccacc

SEQ ID NO: 203400 - RNA, 88 nt, Homo sapiens
acgggacgcacggcccggggggagacagccacgggaagccggaaccaaaaagaagccccagagccggggccaggagccccaagcgccc

SEQ ID NO: 203401 - RNA, 75 nt, Homo sapiens
aagaaaacaacccgccgcagccgcaggaaaaagacaagggcagagcagccggggaaaagggccaagaagcagaaa

SEQ ID NO: 203402 - RNA, 63 nt, Homo sapiens
ggcccagccggcccgcgggggagccccgggagccgcacggaggccaacaggaagaagcagcaa

SEQ ID NO: 203403 - RNA, 86 nt, Homo sapiens
cgcccccggcacggccggggcgggccgggggccaccggaaacggagccagcccaagaagccgaagcccgaagaccccaagcccggg

SEQ ID NO: 203404 - RNA, 72 nt, Homo sapiens
ggagggccaccaagggacaagcgaagggaggaggcagcgaaaacacaccaacgcaggacgagaaaacaaaca

SEQ ID NO: 203405 - RNA, 89 nt, Homo sapiens
cgggcgccgccgagccgggccgcggcgccgagcgaacggggagccgagcggagcgccgcggcgcagccagaaccgacagagaagcagga

SEQ ID NO: 203406 - RNA, 43 nt, Homo sapiens
gcaccccacgcagaaccgaggacgcgggagaaggagaagaaga

SEQ ID NO: 203407 - RNA, 93 nt, Homo sapiens
caaaagaaggggacacacgggcggagaaagaggaaacgaggaaagaggcgcagcgaggaaagcgggggccagcaaggaccacacaggagagca

SEQ ID NO: 203408 - RNA, 76 nt, Homo sapiens
cggaaacccacgccccgggaagagcccagcagcccaggcacgaaaaccagagcgccaagagccacccaggaaggcc

SEQ ID NO: 203409 - RNA, 112 nt, Homo sapiens
cgcgaaggccgggacccggccccggcccacaggggggggcaaacccgagagaacgggagccaaaaaccgaacacccggaaggggacaagggacggcgaacagaccccgcgcg

SEQ ID NO: 203410 - RNA, 80 nt, Homo sapiens
cgccgcggccggcccggccccccgcgcacggccagcgcagaagcaccagagaggccgaacaacaaaaacacaagccagaa

SEQ ID NO: 203411 - RNA, 83 nt, Homo sapiens
caaagccgaacaggcagggccagacccaggcaacaacggccagcccagggagaggcacacaaaccacgggggcccccaaagcg

SEQ ID NO: 203412 - RNA, 72 nt, Homo sapiens
gaaacaggcaaaacaaccagaaggggagaaggcaggcaccacaaaaaggacaggaagccccaacagaagaga

SEQ ID NO: 203413 - RNA, 81 nt, Homo sapiens
agggccggccgcagagcccaccggaaggagaaggaagaggagcgagacgaaggaaaaggaacaaagcaaggacaaacaccc

SEQ ID NO: 203414 - RNA, 76 nt, Homo sapiens
gcagcggccggagccagccgacaccgcgcccagaacccagcgcgcccagccccgggccagcccggcccagaggcac

SEQ ID NO: 203415 - RNA, 77 nt, Homo sapiens
caaagaggagcaggagaacacccaccgagcacccagcagagagacggacccgcgggaggccgcggccccggggccag

SEQ ID NO: 203416 - RNA, 70 nt, Homo sapiens
gcaaaaagcggcccgggagcccgcgcccccccggggacgagagcacgaagaacaccagccagccggccgc

SEQ ID NO: 203417 - RNA, 66 nt, Homo sapiens
gcccgggccagcggccgcgcacccccggccggaggcaccagcaccaaaccgaggcgcggagcacac

SEQ ID NO: 203418 - RNA, 74 nt, Homo sapiens
cccccgcaaggacaaaaaaccacggaaaaaaaaaagacacagagacagaccacgggggggccagcccacaaaac

SEQ ID NO: 203419 - RNA, 72 nt, Homo sapiens
ccaaagcgaacgaagagcaccgggagcggcgaagaggcaccggaggaggaacgaaagcggcacggagaagaa

SEQ ID NO: 203420 - RNA, 72 nt, Homo sapiens
aacgcgcggggagggcgggcccggaggacgagaaggaggggagaaagaagagaccggacacacgagccaggg

SEQ ID NO: 203421 - RNA, 55 nt, Homo sapiens
caaaacccacgcacagaggccacacacacgaggaggaaaccgaggaggagagacg

SEQ ID NO: 203422 - RNA, 82 nt, Homo sapiens
caaagcacgccagacggagaccgggcacgggacgcgggcggggcaccgggaaggagaagacagccaagcaccgccccaaggg

SEQ ID NO: 203423 - RNA, 73 nt, Homo sapiens
cccggcccggacccagcagcgggcccgcacacgcgcgccaaacagaggaaagagcggagcccgccagaaacag

SEQ ID NO: 203424 - RNA, 79 nt, Homo sapiens
cacagaaacaaaagcaacaaagaggacaccagaccagagcacgggcagcagcgccaagacaaggcagcgggccaagcac

SEQ ID NO: 203425 - RNA, 48 nt, Homo sapiens
caaggaaccaagacaaccacagagaggaagaggggcccaacggcggcg

SEQ ID NO: 203426 - RNA, 69 nt, Homo sapiens
aagcgccacgaggcacacgaaaacaggacccaccggcccaggggaacaagagaaggcaccccggaccac

SEQ ID NO: 203427 - RNA, 87 nt, Homo sapiens
ggcacaagcagacggcaaaggcaagagaacagcagcgccgcccgccgacagccaggcccgggagaagcagcccaaggccaaccccac

SEQ ID NO: 203428 - RNA, 77 nt, Homo sapiens
gcgcgggcgggcagccccgggccaggccgcggccggggcaggagcgcaggagccgggcagagaaaagaacgcgagga

SEQ ID NO: 203429 - RNA, 67 nt, Homo sapiens
cccagaagaagcaggggccacaggggcacgggaggaaagagaagggagggcgacgagagccgaagca

SEQ ID NO: 203430 - RNA, 86 nt, Homo sapiens
caccccgagagagaggagaagagcccagcacaacgaagggggcggcaccacgccccccccgccccgaggcccggaagccaggcgag

SEQ ID NO: 203431 - RNA, 85 nt, Homo sapiens
gaggcccgggggcgacaggcgcagcggccgcagcagcagcggcagcacaggcacacagcaaagaggaggaagaagaagccagaac

SEQ ID NO: 203432 - RNA, 78 nt, Homo sapiens
cccggcccacgcgcgcacggcagccagcgcaagaggcgggcagcacgcggaaaccgaaggcaccacggagagggcccc

SEQ ID NO: 203433 - RNA, 74 nt, Homo sapiens
gcagcacgagagcgggacgggacagcgaagaaagcacaacacaccaacacgggagcagaggcaaggggaaggaa

SEQ ID NO: 203434 - RNA, 80 nt, Homo sapiens
cagcgccaccgacccgggagaccaaagaggaaggggaccaacacagagggagaaagcagaaaacgccagaaaggaaaagg

SEQ ID NO: 203435 - RNA, 88 nt, Homo sapiens
gccccgacaccacaacccacacaggacagaagaccgaagggccgaaggccacacacgacggggaagacaagcgaaacccaagcggaag

SEQ ID NO: 203436 - RNA, 70 nt, Homo sapiens
aaacaaggcaaaaacaaagcaaaaccagaccacaacaagaagggcagcggagcagaaaaggaaacgaggc

SEQ ID NO: 203437 - RNA, 80 nt, Homo sapiens
cccacacagcaaggagaagagaaagcacaaagcaggagaccccccccagggcacaaaaccgccccagccaggaggcagca

SEQ ID NO: 203438 - RNA, 75 nt, Homo sapiens
aaaagcaacaaagagggaacccgccagcagaggcacgacccggcccaccacccaggccggcgcgggcaggcccag

SEQ ID NO: 203439 - RNA, 68 nt, Homo sapiens
agaccacacccagaaaagccacacggcaagccaaaccggagccaacccgggaagagccacacggaagg

SEQ ID NO: 203440 - RNA, 74 nt, Homo sapiens
ccaaagcgcagggccacgcaagcaaaagaacacgccaggagaagcaccgagaagcaaagcaggacaggaagagc

SEQ ID NO: 203441 - RNA, 52 nt, Homo sapiens
gaaaagggaaaacgcgcgggccaaggaccagaagggcgagcagaaaaacaag

SEQ ID NO: 203442 - RNA, 78 nt, Homo sapiens
gcgggcgccgcggagcagcccccccgcgcccccgcccgcccgggacccgcggccccgccgcggaacgaagcccgcagc

SEQ ID NO: 203443 - RNA, 69 nt, Homo sapiens
aacagaggggcagacagacagcggaacgggagcaagggacacaggacaaggagccaccggagaggaagc

SEQ ID NO: 203444 - RNA, 57 nt, Homo sapiens
agcccaggggacccagccccaaagcggagacggaggagaagccaccccaccacccac

SEQ ID NO: 203445 - RNA, 75 nt, Homo sapiens
agacaagccacgggccaaaggaaaacaccacaagaggacaaccggaaaggagcgccgcagaacggacagccaagc

SEQ ID NO: 203446 - RNA, 81 nt, Homo sapiens
agcccagcagcccgcgacagcacaacgaggggcaaggagcagagaggcggacccgggacccgaaaaaccgcccggacacgg

SEQ ID NO: 203447 - RNA, 77 nt, Homo sapiens
agagagaccgaaagaaagacaacccgaaagaacaccgaaccaggcaagaaagagagccggggcaaagaccggcccac

SEQ ID NO: 203448 - RNA, 74 nt, Homo sapiens
gagcggagaccgacacaacccccgggagagggaaagcggcggcggcacaccaacaaacgggcccagaagaccaa

SEQ ID NO: 203449 - RNA, 56 nt, Homo sapiens
ccccaaagagaccagcaagcgccagggaggggcaaacggaagaacagcacagggca

SEQ ID NO: 203450 - RNA, 76 nt, Homo sapiens
agcccgccgagcgcccgggggcggccggagagacacagggccgccagaagcgacagccccgacgagagggcaccag

SEQ ID NO: 203451 - RNA, 83 nt, Homo sapiens
aggaacaagggggagaggaagcggcggcggcggcgccgggcccggggggggacagcaggcgagggaaacacaaagaagacacc

SEQ ID NO: 203452 - RNA, 80 nt, Homo sapiens
acacggcaacacagagaaagggccaggagggggccacaccgaacccagccgggaggccaaggccagggagcgagcccagg

SEQ ID NO: 203453 - RNA, 83 nt, Homo sapiens
gccgaccgagagggaagcgagccacgggagaggaaccaaggagaaaccaaaaacaggcaaagcacccagcagcgaagagcaaa

SEQ ID NO: 203454 - RNA, 79 nt, Homo sapiens
cgagccagcgcagccgcgacggcgcccgccgcggcgccagggcaagggcgcagcacgcagacccgcaagccccaagcag

SEQ ID NO: 203455 - RNA, 75 nt, Homo sapiens
aggccggagacgaggggacccaagcggagacagcaccgacagaaggacaccagcacccccaggaggacccggaaa

SEQ ID NO: 203456 - RNA, 52 nt, Homo sapiens
cgaaaaaggacaaaagcagaaggagagaagcaagcacgcccggagaggaaac

SEQ ID NO: 203457 - RNA, 58 nt, Homo sapiens
ggagggaggaacgcaacaaaacgacacaaaaggagcagagacgcggaggcaaggggac

SEQ ID NO: 203458 - RNA, 79 nt, Homo sapiens
cccacgagcgaagcaccgcagccgggcagacacacgacgagaaccggagagagaggggcacaacccccacagaaaaacc

SEQ ID NO: 203459 - RNA, 74 nt, Homo sapiens
agaacagaaaacaagggaccagagaaaggccccaaaggcgagccacacggaaaagaaagcagacaccaggagaa

SEQ ID NO: 203460 - RNA, 67 nt, Homo sapiens
acggagggaaagaccaggcagacgcaagacagaaggagcaaaagagaagccgagagggccggcaacc

SEQ ID NO: 203461 - RNA, 84 nt, Homo sapiens
cacagcaccacacgcccccaagacaacgaagggggccgacgacgagccccgcgaggagcgcagcggagaggccagaacgcccgc

SEQ ID NO: 203462 - RNA, 56 nt, Homo sapiens
ccaggggccagggcaaaggcggacagggacaagcagaagcaagcaaacgcacgagg

SEQ ID NO: 203463 - RNA, 84 nt, Homo sapiens
ccccaccggccacgcccgcgcaccaacgcccaggaccagccgcgaagcaggagacacgagcccacccgagaccacgccggaccc

SEQ ID NO: 203464 - RNA, 65 nt, Homo sapiens
aaaagaaagaagccaaagagaaaggaccgggcaacaaagcgccagccgccaggaggaagaaagcg

SEQ ID NO: 203465 - RNA, 61 nt, Homo sapiens
cacacaaagcaacagccacaacacaaggagagaaggcgaggaagcccaagcacaaaggaga

SEQ ID NO: 203466 - RNA, 72 nt, Homo sapiens
gaccggcggagcgcgggggggaagacagccgccaccaggcgcccccccagcaaccacccacagacccgagac

SEQ ID NO: 203467 - RNA, 76 nt, Homo sapiens
ccacaaggaaccaagacagcgccgcagacgaaaaagggaggggggaagacagggcccagcaccacaggacgggccg

SEQ ID NO: 203468 - RNA, 68 nt, Homo sapiens
caaaaagagacaaggggagaaacgggagagaaggcgcgcaggagagcgcagagacccgcccggaagcg

SEQ ID NO: 203469 - RNA, 77 nt, Homo sapiens
gcgacccgggcacccagagcagggagggccacggagaagcacggcaaccgggggaagaggagcagacgaaacccggg

SEQ ID NO: 203470 - RNA, 77 nt, Homo sapiens
aaccgcaaccagacgccagcgggacgaggaccgagaccgcggccgggaccgaggaaggacacggaaacagagccccc

SEQ ID NO: 203471 - RNA, 79 nt, Homo sapiens
agagaccaacagaccaccggcgcaggagaggccaacaaggcacaggcacaggagaccaccaacacagcaaagcagccaa

SEQ ID NO: 203472 - RNA, 77 nt, Homo sapiens
aggccggcagcagggagggcggcgccacagacccgcgaagggggggccccagcccggccgaacgggcgcacgacaca

SEQ ID NO: 203473 - RNA, 53 nt, Homo sapiens
agagcaagcgggggaccgaacaaggcaaaagggggaaacacaaagaagacacc

SEQ ID NO: 203474 - RNA, 74 nt, Homo sapiens
gcagccagcgcgaaaaaggaaccccagacacagagggcacggggaccacaagcccaagcccacgcagcccagga

SEQ ID NO: 203475 - RNA, 60 nt, Homo sapiens
caaaaacgccaggccacaggaacaggcagaagagcacgacgacggccaccagagaggacg

SEQ ID NO: 203476 - RNA, 71 nt, Homo sapiens
gcaggagcaggaggaagcgggcccacagaaaagcagcccaacgaaaaccgcgggaaagccggggccccggg

SEQ ID NO: 203477 - RNA, 74 nt, Homo sapiens
caagcccggggcaaggagggcgggaacaaagaagaccgagggaagcacgaggaagaacggaccaggcaaaacag

SEQ ID NO: 203478 - RNA, 82 nt, Homo sapiens
ccccaggacgaaccaagacacccgaaggccgcggggccccgaccccgccccaaaagaaaccccccgaaggagaagaaaccag

SEQ ID NO: 203479 - RNA, 74 nt, Homo sapiens
caagaaaaacgggggccgccgccaagcaaggcgccaccggaagaaacgggaggggaggagccgggaaagacagc

SEQ ID NO: 203480 - RNA, 86 nt, Homo sapiens
caggacgccaccacccaagcccccccgccagcccagacacaccagccagcgccccagagcacacagcaggccccagcccaaacgac

SEQ ID NO: 203481 - RNA, 74 nt, Homo sapiens
ggaccaagccagacccaaggacccaaaagcccacgccgcagggggaaccaggagggaagaagagagggggaccc

SEQ ID NO: 203482 - RNA, 73 nt, Homo sapiens
acaagccgcggccgagggagaaaggaggccacacccaaaaaagggaggcaggggaaagcgcgagcgagcaccc

SEQ ID NO: 203483 - RNA, 69 nt, Homo sapiens
aacccagcaagagaggcacagaggccagggcgacagacaagaaggcacagaaagacggggagagaaaca

SEQ ID NO: 203484 - RNA, 65 nt, Homo sapiens
ggaaaacccaaggggggagacgagccgcagaaagccagcaacaggcagcaggcgcaaaaacgaac

SEQ ID NO: 203485 - RNA, 76 nt, Homo sapiens
cacggggagcgggagaccccgggcccagagaacaccaagaaaggagcgacgaggacgggggggggaggaggcgaga

SEQ ID NO: 203486 - RNA, 70 nt, Homo sapiens
cccgcagcagcaaccaaaggaggaccgcagagcacggacgcccgggagcgacggggaagacggacgccag

SEQ ID NO: 203487 - RNA, 82 nt, Homo sapiens
cggaagggagccggggggggcgcacccggccccacggggagcacccgcaccccaacagagaagagaagcaggaccggcaagc

SEQ ID NO: 203488 - RNA, 75 nt, Homo sapiens
gaacagcaccgggagaaacaacaacgcacacgggaggagccaacagcaggaaggcaggagcaccagacagcaaac

SEQ ID NO: 203489 - RNA, 57 nt, Homo sapiens
ggaaggacggccgcgcgccagagaaggacaagggcaggacacgaaggagagcagaga

SEQ ID NO: 203490 - RNA, 69 nt, Homo sapiens
gcgaggccggaaaaaccgagccacacgaaggagcacacaacaaaccggagggaggaccagccgcaagcc

SEQ ID NO: 203491 - RNA, 65 nt, Homo sapiens
caggggggaaagcgccccagggcaagaaggaaggcccgcccgccgcaggaaagaagcaaagacaa

SEQ ID NO: 203492 - RNA, 76 nt, Homo sapiens
acagccaaaggggacacccggaggcggcgcagcagcaccggcagccggcacccgcacaacccagggggccgaaccc

SEQ ID NO: 203493 - RNA, 60 nt, Homo sapiens
cggaggggagacgggaggcagagccaggacaaaaccaggcagaaccaacacgaacccaag

SEQ ID NO: 203494 - RNA, 75 nt, Homo sapiens
aacacagaaaccagggaaaaaagaaaagagagaccccacaggacccagcaggagaaggaccaggccccaaaagaa

SEQ ID NO: 203495 - RNA, 59 nt, Homo sapiens
aagcgccgcgccgcgaggaggaggcccgcggcggcggaaaaacaaccaccagcgagcaa

SEQ ID NO: 203496 - RNA, 81 nt, Homo sapiens
gcgacgaaccggagagaggagaacgaacaccggaccgccagggaccaagaaaggcccagggaccaaagcccggacaaggcc

SEQ ID NO: 203497 - RNA, 41 nt, Homo sapiens
agcacggaacccagaaccccaggaagccagaggccggcgcc

SEQ ID NO: 203498 - RNA, 85 nt, Homo sapiens
ggagcacgacacggacaaggacgaggcggaaaggaaccccaaggcggagcacacccacagaggcagaccgaaaacacccagcaag

SEQ ID NO: 203499 - RNA, 94 nt, Homo sapiens
caggaggcgcggaggacgccccaccgccgacgcccccagccaccagaaaaccagaaggcaccgacaggaaaggaaaaggagaaccaggcacccg

SEQ ID NO: 203500 - RNA, 73 nt, Homo sapiens
gaaccgcgcgccgcgagagccaagaaagaacaggcgacgcaacgaaagacgcgagaaggaagaagaacacaac

SEQ ID NO: 203501 - RNA, 69 nt, Homo sapiens
acccaccgggaaaaggcacgaaggaacccgggccgagaccaaccgacagggagaaccgcagaccagaag

SEQ ID NO: 203502 - RNA, 72 nt, Homo sapiens
cggcaagagaggcaccccgaagaggcgaggagcaacccaaacgacagagagacgcaaaagaagaccaccaac

SEQ ID NO: 203503 - RNA, 84 nt, Homo sapiens
cgggcgccccccgggacagcccgaagccgagcagggcggaaaacaccccaaaagccaaaagggaaaggaaaagaccaacaacag

SEQ ID NO: 203504 - RNA, 63 nt, Homo sapiens
caggcccgggcgaaggggccacgcgacagcgggaagcccgaaccgggaggcagaccacagcgg

SEQ ID NO: 203505 - RNA, 63 nt, Homo sapiens
cagcagccgcaagaaaagccacccacaaaccgagagagacaaaacagcggcacagccgaagcg

SEQ ID NO: 203506 - RNA, 80 nt, Homo sapiens
gccccgacccagcgacaggacccggcgccgggcacgagcaccgccaccaggggaaggggaggaacgcaaggaagaaaagg

SEQ ID NO: 203507 - RNA, 83 nt, Homo sapiens
gggcaaacgccccccgccgcaggcccggcacggaagcgaggcaaacacgagaagggcaccggcacagacagaagcgcggcccc

SEQ ID NO: 203508 - RNA, 66 nt, Homo sapiens
gggaaccagcggacgcggaggcccaaccgaagaaaacaagaacggaggccaccacgaaacagcaca

SEQ ID NO: 203509 - RNA, 74 nt, Homo sapiens
ggacagcaccagagaacagcagccaagaggccccccaccagggaccgagaaggcaaggcagaaggcagaaaaaa

SEQ ID NO: 203510 - RNA, 81 nt, Homo sapiens
ccgggcccgcgggggcaaccgggcgcagacgagccaaagcggacgccggccaccacgaaggcgacacagaagacgagcgac

SEQ ID NO: 203511 - RNA, 80 nt, Homo sapiens
caaaaacagacaagcccacgagacaaagacacagcccccccacaagcgcaagagagaagcagcccccggggcccgaacaa

SEQ ID NO: 203512 - RNA, 71 nt, Homo sapiens
gcgccgaaccaggaaggaaaacccacaccagagacagcccacacgggcccacagcgcaagccccggggcag

SEQ ID NO: 203513 - RNA, 82 nt, Homo sapiens
acggaagaccccggccaaagcgaaaggcagcccagcaagggccgggcaaaacccccgagccaccagaaaagggaagcaggaa

SEQ ID NO: 203514 - RNA, 83 nt, Homo sapiens
acaggcgcgaagaaagaagaacggggcaggaaccaggaccgaacccgccccccagacccccccagcgcccgccccagcacccg

SEQ ID NO: 203515 - RNA, 82 nt, Homo sapiens
cacccaacgccccaccggagagcgggaaaaggccacggccaaccacaggagcacagacacagcggaacacaccaagggggca

SEQ ID NO: 203516 - RNA, 63 nt, Homo sapiens
aaaccaaggacggggaccgcacacccaagccagccaggacggaacccgcaccaccacacaacc

SEQ ID NO: 203517 - RNA, 57 nt, Homo sapiens
gagggcacggccagcccgacgccaggaacgcacaccagcaccagcccaccaaaccag

SEQ ID NO: 203518 - RNA, 57 nt, Homo sapiens
gcgccccaccaggacacggagggccagaacggacccgagccccaaagacagaaaagc

SEQ ID NO: 203519 - RNA, 64 nt, Homo sapiens
agcagacgagaccaggggaaacggacgagcacaaggccagcgagcgccgacacccaacaagacc

SEQ ID NO: 203520 - RNA, 73 nt, Homo sapiens
ggggggaaacaaggcccaggccaagacaacaggcacaaagagagaaggaacacccacagggcagacagagaaa

SEQ ID NO: 203521 - RNA, 81 nt, Homo sapiens
aagccccacgcggccggacagggccgccgcgccggggagacggggggccccggcggaaaaaggcacagggccaggggggag

SEQ ID NO: 203522 - RNA, 71 nt, Homo sapiens
ccagacccaagaaaaccgggaccacagagggaccagcgggaggaaagagcagccgcaacagcgcaccgaca

SEQ ID NO: 203523 - RNA, 79 nt, Homo sapiens
caacacaggcaagagggcccgggaagggggaggcccaggaacacaccaccaggaaaagccgaaggaagcgacaggaagg

SEQ ID NO: 203524 - RNA, 72 nt, Homo sapiens
agaagcgcagccagaaacaacaggaggccggagcaagagccgccacaacaaacaccaaagagaaaacaggca

SEQ ID NO: 203525 - RNA, 79 nt, Homo sapiens
ccaggccgcacggacggggggggacaagcagaccggaagaccgacggaagaccacaccccgagggagcccaggacacca

SEQ ID NO: 203526 - RNA, 82 nt, Homo sapiens
acaccccagcccacagagagcaaaacacaagagagcagggaggaggggcaaggaggagccccggaggaggaggaagaggagg

SEQ ID NO: 203527 - RNA, 69 nt, Homo sapiens
accaggcgggagcgagggggcgggccacgggaaacaggcacagaggcgggaagaggccacaagggagaa

SEQ ID NO: 203528 - RNA, 64 nt, Homo sapiens
cgagcgccacaaccccagggagaacggcagaaccaagggaccaaagcgggacggcaggccacga

SEQ ID NO: 203529 - RNA, 45 nt, Homo sapiens
gccaccggcgggaggaacaaaaggaccgccgggagagccgcccac

SEQ ID NO: 203530 - RNA, 59 nt, Homo sapiens
cggagcgcagcggcacgcacgcgaagacagcggcaggacaaaccggcgaccacacacgg

SEQ ID NO: 203531 - RNA, 74 nt, Homo sapiens
agaggagcccaacacgcacggagacagagcaaggccagcagcgcagcgcccgcagccacgcaacacaagccaac

SEQ ID NO: 203532 - RNA, 72 nt, Homo sapiens
ccgagaagcggggcaccacgaaggaccgaagaggcccagcacgacagagacccggaaagcgagcagcaaaga

SEQ ID NO: 203533 - RNA, 76 nt, Homo sapiens
ggccacaggaacaagaaccagggagaagccgcccgaacaccagaaccgggggcggcggcagacaagaggacagcgc

SEQ ID NO: 203534 - RNA, 63 nt, Homo sapiens
ggccgcggagacccgcaccaagagagaagagcggcccgcgccagggcggaggcgacacaacgg

SEQ ID NO: 203535 - RNA, 79 nt, Homo sapiens
ccggaaggacggccccgagccggaagggagagaccagcagccgcgaaaccacccgaaagaacaaaaagaaaaggaaaac

SEQ ID NO: 203536 - RNA, 71 nt, Homo sapiens
cgagagaacaggagaacggagagaaaacccaccaaaccagcgacagaagaaggccggagaaaacccagcaa

SEQ ID NO: 203537 - RNA, 73 nt, Homo sapiens
ggccacggcccaaacacacccaggcccaggaagaaggacagccagccaaagaaccagccagcaagaacagcac

SEQ ID NO: 203538 - RNA, 63 nt, Homo sapiens
acagaggccccagcaaaggaaagggaggcgcaggaagggcaacaccaaaccagaagaaggacg

SEQ ID NO: 203539 - RNA, 76 nt, Homo sapiens
cagaccccaaggacccccgcggaagagcacccaaccgcaaaggagaagaggagacaacaaacgcacagcagccgag

SEQ ID NO: 203540 - RNA, 88 nt, Homo sapiens
agccaggcaggcccgaggcccggggagaacagaaaggcaggggaaaacgagccacagacagaagaagaaacggagccaccacaaacac

SEQ ID NO: 203541 - RNA, 74 nt, Homo sapiens
acacgggaaggcacggccgcccacagcacaacaagccaggcccagacagccgccgaagaaaagcccagggagcc

SEQ ID NO: 203542 - RNA, 78 nt, Homo sapiens
cgcgacagaggagggaggaaaacaaccgagggcagacagggcagaaaagaacagacccagaagaagcgaaaggggaga

SEQ ID NO: 203543 - RNA, 70 nt, Homo sapiens
cagggagacggaggaggaggagaagaagagagagcgaggaggcaaagaaagaagaacaacaccgagaccg

SEQ ID NO: 203544 - RNA, 60 nt, Homo sapiens
ggaagagacacaaccacacaaggaaaagaaggaggccagcgggacacacaaagaaagacg

SEQ ID NO: 203545 - RNA, 64 nt, Homo sapiens
caccacgccacaaacgccgcaccaggcgagcagcgcccccgaaaaagcggggaaggggggcaaa

SEQ ID NO: 203546 - RNA, 80 nt, Homo sapiens
aaacaacaagagaaggacagcggccaacaagaagcccgccccccaaagcgaagccaaagcgaaggcaaaggccaagaagg

SEQ ID NO: 203547 - RNA, 68 nt, Homo sapiens
gagaaggagacagccacggagcacaccaggaaaagaacaaaaaacagccgaccgcaaaaggcagaaaa

SEQ ID NO: 203548 - RNA, 74 nt, Homo sapiens
caggagagagaaaaaaggagacccccccgcccgaacgcccaaacaaacgacagaacaacaaagagaccaggggg

SEQ ID NO: 203549 - RNA, 77 nt, Homo sapiens
gggcccgagagccagagaagcgggagaagaaccaggaggccagcggacagaaagccaagacgggaccgaccagacag

SEQ ID NO: 203550 - RNA, 33 nt, Homo sapiens
agccaacagcagaaggacccacccagacgaaaa

SEQ ID NO: 203551 - RNA, 69 nt, Homo sapiens
gagccccaaagacagggaggaccacgccggagcaaggacccgaacacggaagaaagacacgcaggaggc

SEQ ID NO: 203552 - RNA, 58 nt, Homo sapiens
cgcgcgggaagcagcaccaagcacggccaacgccggcacaggaggccagcaaaggagg

SEQ ID NO: 203553 - RNA, 70 nt, Homo sapiens
aaaccaagaaggggcgcccgccccagcgacggaagggcggccacggcaggaccgcagcagccgggaagcc

SEQ ID NO: 203554 - RNA, 72 nt, Homo sapiens
gcgccgcagccgcagaaacaggccaaagacacccacccacaagcgagaaaggagcacagacaaaaaagagcc

SEQ ID NO: 203555 - RNA, 72 nt, Homo sapiens
cccaaagagcacccccacacccacacgaccagccaccagcaggaagacaagaggagaagaccagagaccacg

SEQ ID NO: 203556 - RNA, 71 nt, Homo sapiens
agaaacggggcgaccaaaagagagggacgaaagagaagacggagcccggaggcaggagaagcgaagccaca

SEQ ID NO: 203557 - RNA, 75 nt, Homo sapiens
gaagaggaaagaggaaagaggaagacgcaagagccagagaccaagagcccagagaacagagcgccccaccgaaga

SEQ ID NO: 203558 - RNA, 85 nt, Homo sapiens
cgcccccgccgggaccggcacccgaaccggccgccggccccgaaacagccccggagcaaccacagagcagggcggggcacggaag

SEQ ID NO: 203559 - RNA, 80 nt, Homo sapiens
acagcaacccagcaaacggcaaagcacggaggaggaccaggccaaggggaacaaggaccaaaccgcccggcgagcaagcc

SEQ ID NO: 203560 - RNA, 36 nt, Homo sapiens
agggccgagaaggacaggacagacagcgaacgggca

SEQ ID NO: 203561 - RNA, 72 nt, Homo sapiens
agcgcccgcaaccaccagcgagagagaaaccagcccagaagaccagcaccggaaggaggcccccgccggacg

SEQ ID NO: 203562 - RNA, 67 nt, Homo sapiens
gaacacaagcacgggaccccagacgaccgcgcgaagaagaccggaaccacaacgaggagcgccggcc

SEQ ID NO: 203563 - RNA, 66 nt, Homo sapiens
ggaagaagacaacaggcgccaacggccgacaagcccgacgaagaccggcggccacagcagcaagca

SEQ ID NO: 203564 - RNA, 81 nt, Homo sapiens
cgagacccggaggaggcgaagcgagaggacagcaccaagcaggagacccccaccaccgcgccccccaagaccgccacacag

SEQ ID NO: 203565 - RNA, 76 nt, Homo sapiens
cgggggaaccagcggaaagcacccgggaacaacccaagcgaagaacccaccggaaaagagcgacagcaggacggga

SEQ ID NO: 203566 - RNA, 79 nt, Homo sapiens
acaggagccagggacgccaggggaagggcaaaggagaagaagaagcgagaagggcggagccccccgggcggacagaaac

SEQ ID NO: 203567 - RNA, 74 nt, Homo sapiens
cgggcaaggacccgcccagccccccagagccgggaacaggaggcacccgcggcgagaagaggaaaaaccagaaa

SEQ ID NO: 203568 - RNA, 75 nt, Homo sapiens
aagcccccaaagagagaaccggagagcacccaacaggaagcagagagcaaccaagcaccaccaagcccacagcag

SEQ ID NO: 203569 - RNA, 66 nt, Homo sapiens
ggaggccccccagccagggaaccaacaggcgacaaggccaagccgccaaagcgccaacaggacgcc

SEQ ID NO: 203570 - RNA, 74 nt, Homo sapiens
ggcgagggcacagcagcccgagccccgccccaacccgcccggcacccacgcccagaccgagccccacggggaca

SEQ ID NO: 203571 - RNA, 77 nt, Homo sapiens
ccgcgcggcagcgccgagaaccaagaccggcagcgggggagaggggcggggccaacgggggcccccaaggaaacccc

SEQ ID NO: 203572 - RNA, 73 nt, Homo sapiens
agaggcaaaccgaaagaccccagaggagggaggaacgcccggaagaaccacaacgccgaagaagagaaagccc

SEQ ID NO: 203573 - RNA, 75 nt, Homo sapiens
acacggacagccagagacagcaaaaaagaaccccgccaaagccaaacgaaagggcaaagagcagacccagaaaga

SEQ ID NO: 203574 - RNA, 83 nt, Homo sapiens
gggagcaccagcgcgccacgacccgcagacaagaaaggagggagaagaccaaagaagagagagcaggaccaccaccgcccaca

SEQ ID NO: 203575 - RNA, 74 nt, Homo sapiens
ggagcggcagcaggcaagcgaaacccagggcacagcggggaggggcgcaaacgcagggaccagccggccggagc

SEQ ID NO: 203576 - RNA, 79 nt, Homo sapiens
cagacaagaggcagccaggcagaccacagggcggcgacggcggcgcgaggaccgaccgggcccgcggacgaagaaggca

SEQ ID NO: 203577 - RNA, 72 nt, Homo sapiens
ccggaggcccccaagccggacacaccgcacgagagccaggaaggcccgccgaaggagaagggcaggaagacc

SEQ ID NO: 203578 - RNA, 72 nt, Homo sapiens
gagaagcacaggcggagagcgcaggcccacccacagaacagaaaagggacagccgcaagagaagggcccaaa

SEQ ID NO: 203579 - RNA, 58 nt, Homo sapiens
gcaacggaggcacgggcagagccgcggcccgcggcccaccggacaaacccccaacccg

SEQ ID NO: 203580 - RNA, 71 nt, Homo sapiens
ccgccccacaaagagccaagaaaggccagggacaaaggcgagaacgcggacaagcaaacaaagaggaaaaa

SEQ ID NO: 203581 - RNA, 80 nt, Homo sapiens
cgggccccgcgcagggcgcgagcgcccggggcacgcccgcggccgccggacggccgggcgcggagaagcgacagcccggg

SEQ ID NO: 203582 - RNA, 76 nt, Homo sapiens
gggaaagaaagagcccggacggaagaggaggagaccaagcgcacagccagaacagagaaaaggaggccggacaaaa

SEQ ID NO: 203583 - RNA, 78 nt, Homo sapiens
accacggaacgccaaccggcggaccgcgagacagccagccgaccgagaaccagggggaaggccccgggcagccgagcg

SEQ ID NO: 203584 - RNA, 76 nt, Homo sapiens
cggcgggagagggcgaggacgggaccccaaaccagggcggaggaggaagaacacccaaaggagggcggacgggcca

SEQ ID NO: 203585 - RNA, 71 nt, Homo sapiens
gggagaaaggaggccacacccaaaaaagggaggagccccaaggcagcgaaaccaaagaagaaggcagaagc

SEQ ID NO: 203586 - RNA, 61 nt, Homo sapiens
cgaggcgcggccgcggcggccgcgccccagggcgcggggacgccggaaccaaaaagaagcc

SEQ ID NO: 203587 - RNA, 81 nt, Homo sapiens
ggcccgaccaggccaggggagggggcacggccccggccagcccaggacaagaacaaagggcggcccccacagagagcacac

SEQ ID NO: 203588 - RNA, 88 nt, Homo sapiens
gccagccgccggaccagcccggccggggccgcgggcgcccagagccgcgccgccgcgccgcccgcggcaaaagcagaccggaaaaccc

SEQ ID NO: 203589 - RNA, 77 nt, Homo sapiens
accgggccgccaggagcgagagccagagcccagaggggagcagagggaggggggaacggacaggacaggagaacacc

SEQ ID NO: 203590 - RNA, 83 nt, Homo sapiens
cgcgggccgacgggcgcggagccgcgcaaaacgggggaagaccacccccgagaccagccagaacgggcccacgaaggacacaa

SEQ ID NO: 203591 - RNA, 63 nt, Homo sapiens
gggcccgcacgagccaaaggacacagcaacacccgaaaggagcacccacgggaacagcccaga

SEQ ID NO: 203592 - RNA, 76 nt, Homo sapiens
gaaacaccaaaaggaaccgcagggaccccgggagggcccagcaaccggccagcgaaccggagacaaacaggcaggg

SEQ ID NO: 203593 - RNA, 87 nt, Homo sapiens
ccacgagccagagccggccggcggggccacgcccggggccacccccccaagccccaccaggagagagacccccggaagaagacccag

SEQ ID NO: 203594 - RNA, 71 nt, Homo sapiens
ccgggcgaggcgaggccacccgggccgccggcggccacgggcaaacaggacgcggagaagacacagaaaga

SEQ ID NO: 203595 - RNA, 62 nt, Homo sapiens
ccgggcccccgcccagacagaaccagggaaagaacggagaagcggcccaggccaggcgagcg

SEQ ID NO: 203596 - RNA, 80 nt, Homo sapiens
ccagccagaccagggacaaagagcaaacagacagggccgcagacgccagcgccaaacaaaaacacagacggaggaaaaca

SEQ ID NO: 203597 - RNA, 82 nt, Homo sapiens
agcccacccccaacgcgacggaaaggcacgaaagccaggccaagggaccggacaagcgcacaggcaagaccaagggcacggc

SEQ ID NO: 203598 - RNA, 79 nt, Homo sapiens
gaacaccaacgacgcacagaacgcaagaagaaacaggacgagaagaggccccccaaaggacacaggacagaccgagaac

SEQ ID NO: 203599 - RNA, 62 nt, Homo sapiens
gaaacaccacaacacacaagcgcaccaggagccgccaaccgcgagaaccgcagaaaaggcga

SEQ ID NO: 203600 - RNA, 64 nt, Homo sapiens
ggagagcccggcggcggagcgagcaaagagaaaggaccacagcggaaccgagagccacaccggg

SEQ ID NO: 203601 - RNA, 81 nt, Homo sapiens
gaacgacgccccgcacaccggagcgcccagcgcgaggaggaggaccgcgccaacaggacgaggagaccgaccaggagaccc

SEQ ID NO: 203602 - RNA, 72 nt, Homo sapiens
cggagcgccaagcccggccaaaaaggaaccagggcgggaacaaaagaccacaccgaaagaagaccaaacgag

SEQ ID NO: 203603 - RNA, 81 nt, Homo sapiens
aaagggccgaagacgcaaagcagaaacggaaaaccaccaaaggccgcaaagagacagcacccaagaaaacccaggccgcga

SEQ ID NO: 203604 - RNA, 78 nt, Homo sapiens
aagaacccgcccagagccaggccaagggaggggcaccgaaggacagacaaaagcggacggccaaggaggaggagcgca

SEQ ID NO: 203605 - RNA, 77 nt, Homo sapiens
gaaaacggagagacggggagaaggcacgagcaaaaaaaagccccgagcaacaaaccagggaacgacgcagcaaagaa

SEQ ID NO: 203606 - RNA, 83 nt, Homo sapiens
gccaccgcgagaggaagaacagcccaacgagagaccacgcgccaagcaggaacggcagccgcggagcggccaagcgccaggcc

SEQ ID NO: 203607 - RNA, 77 nt, Homo sapiens
cggaagcgcgagggaacaaaggggcagcagccccccaggcgccccgagacccacccgggcacaacacagaagaaggc

SEQ ID NO: 203608 - RNA, 61 nt, Homo sapiens
gcgacagcagaaggaaaaccacaccccgagaaccaagaacggaagaccagcccggacccaa

SEQ ID NO: 203609 - RNA, 35 nt, Homo sapiens
aaacccagccaaaagggcgggcagcagcggcgcac

SEQ ID NO: 203610 - RNA, 83 nt, Homo sapiens
ccagagccggagcgcgaaggccgggacccggccccggcccacaggggggggcaaacccgagagaacggacgcagaaggaggcg

SEQ ID NO: 203611 - RNA, 70 nt, Homo sapiens
ggggacgcggagaaaccaaccacagggcgcaaaggacagggaagaagccaaaacagaaggggcaagagaa

SEQ ID NO: 203612 - RNA, 72 nt, Homo sapiens
cgcccccaggagaaacgaggagcgcggccaccccccggagaagcgggcaccaacagacaaccagggcaagca

SEQ ID NO: 203613 - RNA, 73 nt, Homo sapiens
caggcgcaggaagggggcagcgcgggcgcgcggccggccggagccagcagcaggaccgcggcaagcgggagcg

SEQ ID NO: 203614 - RNA, 72 nt, Homo sapiens
gcggagagaccccgcggcgggcgcacaccacgccgacccgcagcacgagccaccagcacagaagaagacaga

SEQ ID NO: 203615 - RNA, 68 nt, Homo sapiens
ccgcgcccgcccagcgccgcagcacgcggaccagagcccaaaaggcagagcgaggagagaagaaggag

SEQ ID NO: 203616 - RNA, 96 nt, Homo sapiens
ggacccgcccagcagaagaagagaggagggagaacacagaaaccggccccaggaccaaaggcgaccaggagagaaaaccaaacacacagggggagc

SEQ ID NO: 203617 - RNA, 46 nt, Homo sapiens
cgccgggccgcgcccacgggcagcgaggaggccccaaacggggaca

SEQ ID NO: 203618 - RNA, 78 nt, Homo sapiens
ggacgggggaacccggggccagagacgcaaacagcagacggaagaccccacggcaaaaccacacccgaggcgagccca

SEQ ID NO: 203619 - RNA, 52 nt, Homo sapiens
cccggggagccagcgagcccccccgacacggccaaggccgggaacgggaaac

SEQ ID NO: 203620 - RNA, 70 nt, Homo sapiens
ggaccagcagccgggccagggccagagcaaagaagggaggcgggacccacgaggcgaacaagcacgcgcc

SEQ ID NO: 203621 - RNA, 64 nt, Homo sapiens
cagacagaaggagcaggaaccaaagggagccgaggccagagcagaaaccagcccaggaacccag

SEQ ID NO: 203622 - RNA, 82 nt, Homo sapiens
cccgcacgggaagcaggcccgccacagaccgaagaagaagcaggagacacaccagccaaaggaaagaaagcgcaaaaggccg

SEQ ID NO: 203623 - RNA, 75 nt, Homo sapiens
aaccacggggaaaaggcaaaaacccacaccgcaacccagcgagagaaagaccgcaacccaccaaggagcacagga

SEQ ID NO: 203624 - RNA, 59 nt, Homo sapiens
cccacgaccaaccccacagaccacacacccgacagagcaaaacccacgcgccacacacc

SEQ ID NO: 203625 - RNA, 73 nt, Homo sapiens
gaaaacagccgcgagggaggggggagccggcaaccaagaaaaagcacgccacgaagagaagggagaccacggg

SEQ ID NO: 203626 - RNA, 73 nt, Homo sapiens
ccccggggcgcacgccagacagaaagcagccagggagggaaaacacaaacaacccgagcccagggccaacccc

SEQ ID NO: 203627 - RNA, 43 nt, Homo sapiens
gcggaggacagccgagaggagaggcggcagaagcacacaagaa

SEQ ID NO: 203628 - RNA, 103 nt, Homo sapiens
agcacgaagcgaagacagagaacgaagcgaccaaagcgcacggcagcgagagggacaagcaaggggccaaggagccaaggaggaaacccacaacagaggacag

SEQ ID NO: 203629 - RNA, 72 nt, Homo sapiens
gaacccacgcgcccgggagcacgagagccaacggcacggggagacagacccagcacggaccccccccccagc

SEQ ID NO: 203630 - RNA, 79 nt, Homo sapiens
gacggaccagcgacccaagcgccgcggaaccacgccgccacgacccccaggggacccccgcagccgaagcaagccacac

SEQ ID NO: 203631 - RNA, 79 nt, Homo sapiens
acaacaaggggagccgccggacggggcggcagggggaccagccagcaacccgcccccggaccaagcaacccccacccag

SEQ ID NO: 203632 - RNA, 62 nt, Homo sapiens
ggcggccaggagcggccccggggccagccccaccccaaccaagacaaacgggagcgcacagc

SEQ ID NO: 203633 - RNA, 87 nt, Homo sapiens
cggagcaacgagcgcagcgccgacgaaagcaagaagacacaccggaaagccaggcacccgcccaggcggggacagcaggaccgagca

SEQ ID NO: 203634 - RNA, 82 nt, Homo sapiens
cagaggaacaagaaacagcggaccaaacaagagccagaaacgcaaagaaaccagcaggggacacacccagaagggcagaaaa

SEQ ID NO: 203635 - RNA, 104 nt, Homo sapiens
cccagccccaccagaccccggccgccgaccgcggccccgccggccgccggccgcgcggggggcgggggacagccggcgcggcccaagaagagacaccgggccga

SEQ ID NO: 203636 - RNA, 80 nt, Homo sapiens
cggagcacagaaaagaagaacagagcaaacagacggaagagaaaccaccaagaaagaaaaaggagaagaagaaagccccg

SEQ ID NO: 203637 - RNA, 76 nt, Homo sapiens
agagaagcaacccaacagacaggcaaaagaaacagggaagacaaaggcacaggacacgcccaccaagaaagaaccg

SEQ ID NO: 203638 - RNA, 69 nt, Homo sapiens
cagcagccccgaagagaaacacacggacaacaaacgacccccaggccaaggaaagcggccagaaggggg

SEQ ID NO: 203639 - RNA, 70 nt, Homo sapiens
ccaagcaccccacggacagaagccgaaacagcacaaagaagcgcaaacaccaacggaacgcccgagaagg

SEQ ID NO: 203640 - RNA, 79 nt, Homo sapiens
ccgcgggggcacacgaggcgcacaagagccaagaaacggcgaggaaagagaggagccccggaaagaaaaggacagaccc

SEQ ID NO: 203641 - RNA, 76 nt, Homo sapiens
cacagaaagagaccgcccgcccaacggaagggaccacagaccagcacgccggcgccacgaaccgagcgacaggacg

SEQ ID NO: 203642 - RNA, 51 nt, Homo sapiens
cgacaccagaccagcaagcgccggggcggcgaagccaaccacagcccggag

SEQ ID NO: 203643 - RNA, 55 nt, Homo sapiens
gaaaacgaggcagacccccccaagcccacggccgcgccgggcccacgccgcgcgc

SEQ ID NO: 203644 - RNA, 74 nt, Homo sapiens
aaagcaccgaaaaaacgaagaacgaaacggagaaggaacgagccagcagcggacaggaggaaacgcccagcagc

SEQ ID NO: 203645 - RNA, 78 nt, Homo sapiens
cgcccaagccgagacggaaggcaaagagcaaaacggcggagggggcacagcaaagaaagcccacaccagaaccaagga

SEQ ID NO: 203646 - RNA, 70 nt, Homo sapiens
cggccagccacgaagcagagagcagagaccagacgaaacccaacagagaagaaacgagccaaaagaaagg

SEQ ID NO: 203647 - RNA, 70 nt, Homo sapiens
agaacagagacaaaggaccaaagcgggcaggcaggagagcccgagcagcaccaaaggcaagagcggcggg

SEQ ID NO: 203648 - RNA, 83 nt, Homo sapiens
cagaagcaggaagggcaaggaccggcaaagccgaagagaggaaggcgggggagaaggagaggaacaggaagaggccgaccacg

SEQ ID NO: 203649 - RNA, 65 nt, Homo sapiens
gcggccaccgacacgcagcagcggccagggcagaccaggccaacgcacggcccaaggccggggag

SEQ ID NO: 203650 - RNA, 75 nt, Homo sapiens
gggagggccgagccagccgcggccggaggagcccccaggccgcggcggccggggcagcgccgcgagccagcaacg

SEQ ID NO: 203651 - RNA, 68 nt, Homo sapiens
gcagacaacaacaagcggaggaggaacgagcacacgcacagacaacgaagagaggaaagaagcggaaa

SEQ ID NO: 203652 - RNA, 80 nt, Homo sapiens
cgacaaggaaggaagaaggcgcacaccccagcgcgcaaagcgcgaggggcgagaggagaggagaaaaccaggggcggaag

SEQ ID NO: 203653 - RNA, 71 nt, Homo sapiens
accgagaagaaaagaaagcacaggaggcaggggccaggaccgcgcggagccagcgcccggcaaggagcgag

SEQ ID NO: 203654 - RNA, 73 nt, Homo sapiens
cagacgccaaacaagcaaacggcaccccaccaggaccaaagggacggcagcagacagcaccacaaccgaaagg

SEQ ID NO: 203655 - RNA, 54 nt, Homo sapiens
ccaggggacccccagaccaccgacagcaccaaggaaaacaaggaaggcgccacc

SEQ ID NO: 203656 - RNA, 60 nt, Homo sapiens
caccagacggcgccccaagaccaaccccaccaacaacgaacgcggcaggcgcacaaggaa

SEQ ID NO: 203657 - RNA, 55 nt, Homo sapiens
gcagagcaaggaaagccagacaccaaaccagaagccagggaccaccgcagcagga

SEQ ID NO: 203658 - RNA, 70 nt, Homo sapiens
accaggaagaacaaaacacgggccggaaagcacaagaaaagccacgggaaaccaagcacccaaaaggcca

SEQ ID NO: 203659 - RNA, 74 nt, Homo sapiens
cgagccccaggcgaccagaaagaggaaagagagccgggcgacccaaccaagggaccagcagaaaacacagagaa

SEQ ID NO: 203660 - RNA, 86 nt, Homo sapiens
cgccggagggcccgcgccgcaggaggccggcgaggagcgccgcgcccgcccggagccaaggaggccgcgcggcccggagacggacc

SEQ ID NO: 203661 - RNA, 79 nt, Homo sapiens
cgcggccccgcccccgccggcgcgcccgcgcggcgcggggaccgcggcccggagcagcagccggcccggcgccagcagg

SEQ ID NO: 203662 - RNA, 77 nt, Homo sapiens
acgaaagagaccagaggaacacagccgagggcgggccgaggagaacgggacccgcaccacgggagaaccagacgcgg

SEQ ID NO: 203663 - RNA, 72 nt, Homo sapiens
ccccaggaccagacacggccggacaggagaaaccagaggcaagcgacgggaaggaccaccaaacccagccag

SEQ ID NO: 203664 - RNA, 56 nt, Homo sapiens
aggagcacgaccaaacagggaacgccgcacaagcacacgacccgcccgacccacga

SEQ ID NO: 203665 - RNA, 82 nt, Homo sapiens
ggaaaggaagaggagacagagggccgagaaggacaggacaggcgaggcaaaccccacagaaggaaagaacaaagcgagcaac

SEQ ID NO: 203666 - RNA, 83 nt, Homo sapiens
ccccggcagcgggacccggcgaagacgcgaccgcggcgcgagcaccaggaggcagcacggcaggagacgaggagaggacagca

SEQ ID NO: 203667 - RNA, 67 nt, Homo sapiens
gacgcccacgaccccagcaggggaagacccagaagccacacccccgagaacacagcagccgcccaac

SEQ ID NO: 203668 - RNA, 72 nt, Homo sapiens
cgaacccccgacgcacaaggaacccggcaccagccgggcaaaaacccaaaccaacagaaccgcaccgagggc

SEQ ID NO: 203669 - RNA, 75 nt, Homo sapiens
cagccggggggcacagccgggaagaaggaccggggagacaggaacacgggcaagacagcgcgggcaccgccgcag

SEQ ID NO: 203670 - RNA, 71 nt, Homo sapiens
gagaaaggcacgagaacagagacaggggaggacacgggaacgaacaaggaagagggagcgccggagccccg

SEQ ID NO: 203671 - RNA, 79 nt, Homo sapiens
ccaaggccggaagaagggagagcagaagccgcgaaaaaggggggccgagccccgaaacagccccggagcaaccacagag

SEQ ID NO: 203672 - RNA, 40 nt, Homo sapiens
acagagagaccgagaccacaccacggagccaggaggaagc

SEQ ID NO: 203673 - RNA, 92 nt, Homo sapiens
ccagaagagggcaacaccaccaaccagcacccaacaccacagaagacacccgcgagcagcgccacgggccacacgcccgccacaccacagaa

SEQ ID NO: 203674 - RNA, 88 nt, Homo sapiens
gcggcagcggagggacggcagccgcgcggaacgcaccgaggacccaccagcagcccgacccacacagaaccgcagccaagaaaagcca

SEQ ID NO: 203675 - RNA, 38 nt, Homo sapiens
aagacaagcggcagcgagaggccccggaccaggccgcc

SEQ ID NO: 203676 - RNA, 72 nt, Homo sapiens
acggggacccgcgacccagccccccacccaacgcgcaggaaggaggaagaagcgaaagaccccggagaacac

SEQ ID NO: 203677 - RNA, 91 nt, Homo sapiens
ccgcccccaggaggggaggagcgggggccccccccgggcacggggccagacaacgggacgggcgccgacgccccggggcagcggcaccaac

SEQ ID NO: 203678 - RNA, 60 nt, Homo sapiens
gagaccccgaaggcgcaaacgacaccacccgaccggaagcagaggggaaaagcagggacc

SEQ ID NO: 203679 - RNA, 62 nt, Homo sapiens
agaagccaaggaagccaagaaggacaagagcgcagaaaagcaacagggaaagccagccgaca

SEQ ID NO: 203680 - RNA, 74 nt, Homo sapiens
cgcaagaggaaaaagaaaggggaagaacaggcaaggaaggcacagcaggaccagaccccagcagcggccgacgc

SEQ ID NO: 203681 - RNA, 79 nt, Homo sapiens
gacaacaaagacaaacggaggaaacccggacgaaaaccaaaccggagcgggcggaggacggaagaaagaccccaaaaaa

SEQ ID NO: 203682 - RNA, 83 nt, Homo sapiens
aaaggaagcaagcagcagaagagccaaggaaaaacagcaagaacccaaaaggaggaaagagggcaccgggagaagacaaaggc

SEQ ID NO: 203683 - RNA, 44 nt, Homo sapiens
cggccacaggagaacgccgaccaccacgggcagcaggaaaaaca

SEQ ID NO: 203684 - RNA, 77 nt, Homo sapiens
acgggacccagaaaaaaacaagcaaagaagcaaaggaacccaaaaaacagcaaaccgaccagaggcgcaaagaggag

SEQ ID NO: 203685 - RNA, 49 nt, Homo sapiens
agagcaagacacaggggcgcacaaggcacgcagaaggagcagaagccag

SEQ ID NO: 203686 - RNA, 67 nt, Homo sapiens
aaaaaacaaaagcagcacagcgggccacagggcaggaaggccgaagcagaagaaaacagaagacagc

SEQ ID NO: 203687 - RNA, 67 nt, Homo sapiens
aacggcggcgcggagccagcgcgcagaccagcgggaggaacagccggggagcagcaccacaggggcc

SEQ ID NO: 203688 - RNA, 89 nt, Homo sapiens
cggagaaaaggccaagagaagaaccaaggccccggcagacccaaaaaaccagaaggcaccgacaggaaaggaaaaggagaaccaggcac

SEQ ID NO: 203689 - RNA, 85 nt, Homo sapiens
caggcaggaagcagcccccagcccggacgccgggcccgggagagagggacgaacagcggggacgccccagcagaccgcccaggag

SEQ ID NO: 203690 - RNA, 81 nt, Homo sapiens
cccgccaagggggaccgcgcggcggccgcgagccgcggagcggagaaggaagccaacaccggagccagaaagccgaaccca

SEQ ID NO: 203691 - RNA, 71 nt, Homo sapiens
ggggaggaaaaccgacgaaggaaccggcaggagcacgagcacacacacggggaacagggcagggccccgcg

SEQ ID NO: 203692 - RNA, 93 nt, Homo sapiens
gcccagggaggaagacaaccacaggaacgaggcgcgacacaccagcggagcgggggaacccccccgggcagccacgcgcgcgcgcgcaggagg

SEQ ID NO: 203693 - RNA, 61 nt, Homo sapiens
agcccgaaaaagacgcgagaagccacacggagaaaacggggacaccgggagcagacaaacc

SEQ ID NO: 203694 - RNA, 82 nt, Homo sapiens
accacagcaagacgccgggaccccggaaaccagaaagaaggaaagaggcagaaggccagaagggcgaagaagaaggaaaaaa

SEQ ID NO: 203695 - RNA, 67 nt, Homo sapiens
gcccggaagcgcggaagaccccaccccggaaggcaaagcagaacagaaaaacaagaaaagccgagga

SEQ ID NO: 203696 - RNA, 82 nt, Homo sapiens
ggaagaacaaaacggccgaaaaaaagaacccacaaacaaagcaccagaaagcagccaaaaggcagagcccaccaaggccgga

SEQ ID NO: 203697 - RNA, 70 nt, Homo sapiens
cagaaaccggaaccacacacaccacaggaagccacagaagcaacaagagagacaagcccggggaggccac

SEQ ID NO: 203698 - RNA, 39 nt, Homo sapiens
gcgggacccggcccgcgacgggacccgcgcacaagcacg

SEQ ID NO: 203699 - RNA, 40 nt, Homo sapiens
cacgcaggcaccccggccccagggagagaaggcgcgcagg

SEQ ID NO: 203700 - RNA, 74 nt, Homo sapiens
gaaccaaaaggaaagaaggggggccaggaaacgccaaaacaccagaaccaaccggccccggccccaacaggccc

SEQ ID NO: 203701 - RNA, 67 nt, Homo sapiens
gaggcccacgcaccccggaagcccgggacccgaaccagggggcaccaggcaggagacccacagcagg

SEQ ID NO: 203702 - RNA, 78 nt, Homo sapiens
gccagggccccagacagagaaggagcagcgcagaaaaaagcccccagacaggccaacaagggccccaggcagagccgc

SEQ ID NO: 203703 - RNA, 70 nt, Homo sapiens
agaggcgggagagggaggagcccagaccgggcgacccgccaaagcgggaacccacaacgaaggaaggaac

SEQ ID NO: 203704 - RNA, 84 nt, Homo sapiens
cccagggggccccgcaagcggaggcggcagaaggcccggagccacaggccagcacgagccagggagccgccgggaccggcccgg

SEQ ID NO: 203705 - RNA, 83 nt, Homo sapiens
agacaacgggccacgcagccggcccggggaaggcgggggccagcccagccaggacaccgcggaccgaaaccgggggaacgcag

SEQ ID NO: 203706 - RNA, 53 nt, Homo sapiens
gccagcagggcaagccgacaacaggcacaaagagagaaggaacacccacaggg

SEQ ID NO: 203707 - RNA, 83 nt, Homo sapiens
agccccggccccggcgcaggcgcccgacgcccgggcagagggagccggaagagcgagcccggaaaagaggaaagcacgcaaaa

SEQ ID NO: 203708 - RNA, 75 nt, Homo sapiens
acgagaaggacagggaaagcaggggaaagaacccgaagacaaaaacccaacaggaagcacaaagcgggaagaaca

SEQ ID NO: 203709 - RNA, 83 nt, Homo sapiens
cgacccccgcaaggagccgaaggcggcgggagccagagcgccgccggcgcggcgccggagacggacaagggagggccaagaac

SEQ ID NO: 203710 - RNA, 73 nt, Homo sapiens
ggaggagccacgagcgggcaccagaggggaaggggcccgaaggcccggaggcgcccgcgggccagcgcgccga

SEQ ID NO: 203711 - RNA, 79 nt, Homo sapiens
ggcgccagggaccgggggaaccgccgccccggccggacccgacccgagccaccaggacacggggacgcccgccacggcc

SEQ ID NO: 203712 - RNA, 81 nt, Homo sapiens
cacgcagcagacagccccgggcaccaggcagcaacaggaccaggcccaaggacaaagccccagagcaggcgccagcccgcc

SEQ ID NO: 203713 - RNA, 79 nt, Homo sapiens
gcaccccaaccccaggaagccagcgggggcagccagccgagggccaccgggaaggacagaagccaccggggaccgcaag

SEQ ID NO: 203714 - RNA, 66 nt, Homo sapiens
gcaagaggagccaagcaaacagaagcgcggccaagaggccggaagagcgggagcgggagccaggca

SEQ ID NO: 203715 - RNA, 70 nt, Homo sapiens
cccaaacagaccacccccggcggcgggacaagggcgcaccggggcgcagcgagggaggacaacggggcgg

SEQ ID NO: 203716 - RNA, 77 nt, Homo sapiens
ccaccagagccaggccagccggagcgccgaggacgacgacagaacggagccggaccaggggccgcaaggccaggcgc

SEQ ID NO: 203717 - RNA, 79 nt, Homo sapiens
aacccaaaaccagggcggcaaaacgagcgggccagagacagaggcgagcggccgggccgacagacgccacgccgagcgc

SEQ ID NO: 203718 - RNA, 72 nt, Homo sapiens
aaggcggaccaagcaacggaccgaccgggcgaggggaggaggcgggacagcagaccacagcccggcaggccc

SEQ ID NO: 203719 - RNA, 84 nt, Homo sapiens
gagaaacacagcacaagaggggagaaaaccagagaggggggccggggcaccggccagggggcccggggcgaggggcgcggcaaa

SEQ ID NO: 203720 - RNA, 89 nt, Homo sapiens
cgaggcgcacagcacgagaagaaggaagaaggagggcccagcacggaaaggagcggcagccacgccccgacaagggaccgggcgggccc

SEQ ID NO: 203721 - RNA, 81 nt, Homo sapiens
gcccggcggcccggcccggccgacgccaaggaaacagacgagaccggaaaggcacgcccgccacaaggagcaccacaagga

SEQ ID NO: 203722 - RNA, 74 nt, Homo sapiens
gacccccaaccagggcagaagccgaacacgacagaaagaaaggccaaagcagcagagaaacaaagccaccggaa

SEQ ID NO: 203723 - RNA, 100 nt, Homo sapiens
cagcagagagccgggccagagccaggggccgggagggcgccaggcagcacgagaaggaaggaaagggaggacagaagcggccgagccacaacaggaacga

SEQ ID NO: 203724 - RNA, 60 nt, Homo sapiens
ggcgccggcggcgcgcgacccccgcgcagaaaagacccgcaaccgcgcccgggccgccgg

SEQ ID NO: 203725 - RNA, 85 nt, Homo sapiens
gagaggaccgagccgcccggcagcaacccccgagacccagcaaaggcgaaagaagaccagagcagagaaccagaaaacaaaggag

SEQ ID NO: 203726 - RNA, 83 nt, Homo sapiens
cgaggagcccaagaagacgccgagaaggcaaagaaaagcaccaaagcagcaacaaagcacacagcgcgccaaagcaagagcgc

SEQ ID NO: 203727 - RNA, 69 nt, Homo sapiens
agaggaccccggagagcaaggaagaaagcagcccagccaggggccagaagggagagcccggaaagacag

SEQ ID NO: 203728 - RNA, 72 nt, Homo sapiens
caagccacacacggcggggccccggaggacgagaggggacgccagaacaaaacaggaagcggaaaacagaac

SEQ ID NO: 203729 - RNA, 58 nt, Homo sapiens
ggcaaggagggcgcggaggcaccgaacaagaggagaaaggagccggaacaaacccggg

SEQ ID NO: 203730 - RNA, 88 nt, Homo sapiens
cacgggaagcacgcgaggcgcccggagccggaaagccgggcgggagcccccggccagggacaagaacccaagaaacaggaaaaaaccc

SEQ ID NO: 203731 - RNA, 52 nt, Homo sapiens
gaaagagagcagcgcaaccagcgagaaaggcgggagaagaggagcaccacaa

SEQ ID NO: 203732 - RNA, 106 nt, Homo sapiens
gggagcgagaagaacaacgaggcaccacaccgcacagcaagcgggcaggaaacaagaagacacacaaaagggaagaagaagaaacaggcagaagcagaaaaacgaa

SEQ ID NO: 203733 - RNA, 87 nt, Homo sapiens
gccggaaaacagaagaaggggcggaccggggcagagaacacaggaccaggccacccaaggccgaagacaacccgggaaggggcagag

SEQ ID NO: 203734 - RNA, 86 nt, Homo sapiens
gggagacgacggagcccggaagcgcagaagcgaacaccccaccagaccacccagcaagcccacaaaaaaggcacaagcagggacag

SEQ ID NO: 203735 - RNA, 71 nt, Homo sapiens
accaaagggcaaaaaggcagcgggcgaaccaaaacgccacggaggaggcaagcaaagggcgagaggaagga

SEQ ID NO: 203736 - RNA, 62 nt, Homo sapiens
ggaggaaaagaagccagaccgaggacccagagagggaccagggccaaagaagagccgggggg

SEQ ID NO: 203737 - RNA, 73 nt, Homo sapiens
caggaacacacagcgccacacgacgcgcaggagacggcccggagccggacacggggggcacacaacccagcca

SEQ ID NO: 203738 - RNA, 81 nt, Homo sapiens
cggacccgcggaaggccaaaccacaccaacgcgggcggcgagcgagggaacgaggaccagcggccccagaacccccggcgg

SEQ ID NO: 203739 - RNA, 61 nt, Homo sapiens
ggcggggcccgggacgaggcggacgggagaccaaaccgccagacacccgaaggaaccgagg

SEQ ID NO: 203740 - RNA, 58 nt, Homo sapiens
acgccgggcagaaggccgaaagagcacggacccggaaggaggccagagcccaggccga

SEQ ID NO: 203741 - RNA, 78 nt, Homo sapiens
cgaaaaaccccaaacccacaagagagaacccaccgcaagagaccaaaggccaagagcaccgcagccaccagcccggaa

SEQ ID NO: 203742 - RNA, 80 nt, Homo sapiens
gagcggcgagagcacggcaacagcaagaacgccggcggccggcgcaggcggcagcccgccccgggggccgaggcaggcgc

SEQ ID NO: 203743 - RNA, 50 nt, Homo sapiens
ggcaaaggaaccacccaggaaacagcgcaaggaggcagaagccacaggaa

SEQ ID NO: 203744 - RNA, 79 nt, Homo sapiens
cccggccgcccacgagccacagagcagaacagaaacaaacagaggcaccgcccggccgggcaaaacccccgagccacca

SEQ ID NO: 203745 - RNA, 69 nt, Homo sapiens
ccacccacaagagcagcacaaaaccagaccagaagggaaagacagcacacgacgccggggacacacaca

SEQ ID NO: 203746 - RNA, 84 nt, Homo sapiens
cccgggccgcgaggacgaggcggcgccgccgggcgggagccggaaccaaaaagaagccccagagccggggccaggagccccaag

SEQ ID NO: 203747 - RNA, 77 nt, Homo sapiens
ccccaggacagggcacagacaggaagggccacacaggaacggccccagaaacaacaaaacacaaaaggagaggacag

SEQ ID NO: 203748 - RNA, 51 nt, Homo sapiens
aacacaacagggcaaaggccccgacaggggaagcgagagaagcagcaacgc

SEQ ID NO: 203749 - RNA, 66 nt, Homo sapiens
acaccagaaccggaggaggaccgcggagggaacaccgcgagaaaaccgcacaagacgcaaacgaca

SEQ ID NO: 203750 - RNA, 74 nt, Homo sapiens
aggggcgcagagcgggccacgccgggggcggagcggagcacacggaggccggagaagagaaagggggacaccaa

SEQ ID NO: 203751 - RNA, 64 nt, Homo sapiens
agaggcgacggcagaggaccccggagagcaaggaagaaagcagcccagaacggcgcggcaggca

SEQ ID NO: 203752 - RNA, 81 nt, Homo sapiens
gccaaccgaaagaggccggagggaagagagggagaagaaggccagcacacggggaaggaagcgaaaccacagacagacgag

SEQ ID NO: 203753 - RNA, 40 nt, Homo sapiens
gggcacaccaaacccacggaacgggggacccacggggcag

SEQ ID NO: 203754 - RNA, 79 nt, Homo sapiens
gcaggcccaggccgccccgccccgagcggcagggcgagagaggcggcgaggacggaccagcaccaaaggagggaagggc

SEQ ID NO: 203755 - RNA, 76 nt, Homo sapiens
aaccagagaggcggacagcagcagagggaaggagcacacgggaaggggcgacaaaagcggcccgcaagcccgagag

SEQ ID NO: 203756 - RNA, 111 nt, Homo sapiens
gagaccgaacgcagaaagcagcccgagccccagaccagcccaggagacgcacaaaccgaagagcccggggcgggacgccacgaaagaaagggagacagaccgagaggcgac

SEQ ID NO: 203757 - RNA, 67 nt, Homo sapiens
ggacacgcaaaccacacaagggcggagaacggaaaagcaccaggaagcagagaggaccgcagaaggg

SEQ ID NO: 203758 - RNA, 78 nt, Homo sapiens
caggccaacaacacagcagaaccgccagagaagaggccagagcgagaagagagaggagagcaagaaaccggagcggag

SEQ ID NO: 203759 - RNA, 81 nt, Homo sapiens
ccgccgaggcggcggccggggcggcggaggcggaggcggccggcccggagggggacaggggagcacgacagccacggaagg

SEQ ID NO: 203760 - RNA, 89 nt, Homo sapiens
cagcgcgacgccccgcggccccagggcacagcccaaggcgcagcccccggcccagcaccacagagaagagcagaagaaacagacagacc

SEQ ID NO: 203761 - RNA, 75 nt, Homo sapiens
cggcggccggggggacgcagaggacgagaaaagaaggaaagcgaaaccggaccaagaaaaaacaaaagcaaaaaa

SEQ ID NO: 203762 - RNA, 76 nt, Homo sapiens
caagagccaggaaagaagaaccgcagacagaaaagagggaacaacccaaaacgcgggcccaaagcgaggaaacgcc

SEQ ID NO: 203763 - RNA, 44 nt, Homo sapiens
acaaaggacaacaaaagagaaggaggaggccagagaggagccca

SEQ ID NO: 203764 - RNA, 86 nt, Homo sapiens
aaggagcaaagcagcggcgcagcccggggcagaggaggagcgagaggacaggagaagggaagcggacaacaggcgcaccccaaccc

SEQ ID NO: 203765 - RNA, 83 nt, Homo sapiens
agcacccccgcggcggagccgagccgaggcccggcggcgcaccgggcggcagaaaggcacccgaaaggggaaggaaaagaagg

SEQ ID NO: 203766 - RNA, 66 nt, Homo sapiens
cgccggcgccggcccccgccgccccaaaggagcccaaacaaagccccagaaaagcaccaaagacag

SEQ ID NO: 203767 - RNA, 72 nt, Homo sapiens
ccgagccaccagcaagaccggaaacagagaaaaccggaggacaaggaggcgcaaggacagacgagaacggac

SEQ ID NO: 203768 - RNA, 76 nt, Homo sapiens
gccgccccgcgccacccagagcaacggaaggcagcccccaaccaggaaagcagaaaaacagcccgcagacacgccg

SEQ ID NO: 203769 - RNA, 71 nt, Homo sapiens
aaccaagcaccagcgagacccagggaagagccagaagacaccagaccgcggaccccagacccgcagagacc

SEQ ID NO: 203770 - RNA, 77 nt, Homo sapiens
gagaagaagaagcaggagaacgaaacggagccagagaaggcagaaggacagcagaccacagcccggcaggcccaaaa

SEQ ID NO: 203771 - RNA, 57 nt, Homo sapiens
gaaacaccacagcagcgacggcccaagcgaaaagacgaaggagcaagggcaacaccc

SEQ ID NO: 203772 - RNA, 58 nt, Homo sapiens
ccaacaacaggaaagcaccgccgcaacccaccagacacacccaacagaggaagccgca

SEQ ID NO: 203773 - RNA, 62 nt, Homo sapiens
acggcgggaagaagcaaacgaagggcaagaacaaaaagcgcagggccacggcgagcggccaa

SEQ ID NO: 203774 - RNA, 49 nt, Homo sapiens
ccgcgacgacagacaaaggccaacagacagacaaggcagaaaagcaaga

SEQ ID NO: 203775 - RNA, 71 nt, Homo sapiens
gaagaggcgccgggacagggagagacagcccagaagcccagccgcacgaagcaaggggggcaacaacaagc

SEQ ID NO: 203776 - RNA, 67 nt, Homo sapiens
gcccagaccaccagaaacccccaggagaggaagacaccccccccaccgaaagaacccgaacgggagc

SEQ ID NO: 203777 - RNA, 75 nt, Homo sapiens
cgaaacccccccccccacccaccaaaccggagggggaaaaaacccaaggcgcaaagggcgcgccagaggacacca

SEQ ID NO: 203778 - RNA, 36 nt, Homo sapiens
cgcccgaaaacagagcaaggagaacaagagcacacg

SEQ ID NO: 203779 - RNA, 71 nt, Homo sapiens
ccccgaccccaggccccccacagaaaaggaaagggcgcaacagacaacgacaacaggagccccagcgcgcg

SEQ ID NO: 203780 - RNA, 73 nt, Homo sapiens
gagaaggaccaagaaccagggaggggcggccacggcaaagccaggcaagcgcaaagacggaaaagagaagcca

SEQ ID NO: 203781 - RNA, 76 nt, Homo sapiens
ccagccccaacgcacggaaacagaggagccaccacacaggccacaaggcaaccagagaagccgaacgccagcaaga

SEQ ID NO: 203782 - RNA, 77 nt, Homo sapiens
cggcgagccagccaacagcagaagagaaagccagaccacggacggaagacaaaagagggcaggaaaagaagcaggag

SEQ ID NO: 203783 - RNA, 70 nt, Homo sapiens
gcaagagaggaagaagaacgacccgcccggggcagcaggggagaaaacgcaggccacaaagacaggacca

SEQ ID NO: 203784 - RNA, 89 nt, Homo sapiens
caccgccaccgaagacgggccccaacacccagagacgaaagggcgccaagccggcaagagaaagagaggccagaacagccggcaagagc

SEQ ID NO: 203785 - RNA, 88 nt, Homo sapiens
cgagcccgggacggcagcggccggggacccagcaaggagaaacgagaccagaaggaagcagaaacgcgcggagaggggacgggcgcaa

SEQ ID NO: 203786 - RNA, 76 nt, Homo sapiens
cggacgccaagcccccggcagcacgccacagcgccccccaccgggccggagcgagggagagcaggaacacagagag

SEQ ID NO: 203787 - RNA, 59 nt, Homo sapiens
cgcgaggacgggaagggccgggaccggggagcgccacgcagagccccgccaggaagaca

SEQ ID NO: 203788 - RNA, 95 nt, Homo sapiens
cccaggaagcagccagaccaagaacaaccgcggacacggagaggaaggacgcccaaggaggagagaacgggcccccaccggaggaagaagaaagc

SEQ ID NO: 203789 - RNA, 64 nt, Homo sapiens
aacaacgacaacgagcacaggaaaccccccaggcaagaggcgcaggaccgggaagaccaacaaa

SEQ ID NO: 203790 - RNA, 76 nt, Homo sapiens
aagaacaccagaagagaaggccaaggaaaaggaacagagagagcagaaccgaaacggggaaagaccgaagaaagaa

SEQ ID NO: 203791 - RNA, 70 nt, Homo sapiens
aaggaagaagcggggagaaaggagcaagccacccacgccaacaaaggacgaaaggggagagacgggagag

SEQ ID NO: 203792 - RNA, 75 nt, Homo sapiens
gcgccggccggggggacgggcacgggcccggccacccccagacgccgaggaaggagacagagccccaacgcaagg

SEQ ID NO: 203793 - RNA, 74 nt, Homo sapiens
gcaggccaacaaggagaagaagaccccgaagaaagggaaggaggccacgccacccgcgcgcccccgggaagacc

SEQ ID NO: 203794 - RNA, 74 nt, Homo sapiens
cgcagggcgcccccgaccgcagaagccggcggacagcgaaggaagagggaggaggacccagcccgaagagggcg

SEQ ID NO: 203795 - RNA, 84 nt, Homo sapiens
gcggccggcgcccggccccagagagcccggcagggcccccagccagagcccaccagccggcccccagccccgaagaagagcccc

SEQ ID NO: 203796 - RNA, 61 nt, Homo sapiens
gcagccggagggggccggagggcccgagggccggggacaaccacagcagcggggagaggcg

SEQ ID NO: 203797 - RNA, 73 nt, Homo sapiens
ggaaacagcggcaagccacagacgaggcccacgcggaccggcagcgccaccggaccaccagacaaggacacgg

SEQ ID NO: 203798 - RNA, 77 nt, Homo sapiens
gaggccggcgccgccgcgccccggccccccggccgcacagggcggcccaaaggcgaaacacagaaggagacaaccac

SEQ ID NO: 203799 - RNA, 81 nt, Homo sapiens
cccccgaaaagcaaggcggcaagccagaagcaccgaggacagaacaacagccagcagaagccagaaagaagagaagaaaag

SEQ ID NO: 203800 - RNA, 81 nt, Homo sapiens
accgggagaaacaccacacacgaagagagggcacagaccaggagggaggagaagaggagcaggcccgcacaggacacagaa

SEQ ID NO: 203801 - RNA, 86 nt, Homo sapiens
gggaagaccaccagaccacccgcgcccacggcggagaaagacagagagggaagaacaccaaacgcaaaacccagccacacgagacc

SEQ ID NO: 203802 - RNA, 74 nt, Homo sapiens
agaggaaacagaccgaaagacgcccagggacacagagccacaaaagaggaaacaaacaggaacgacaaccgcac

SEQ ID NO: 203803 - RNA, 74 nt, Homo sapiens
ccaggcgccgcacaagaggagcaagcgagggaacaaggaaaggaggacccccaaagaaggaggacagcccacgc

SEQ ID NO: 203804 - RNA, 85 nt, Homo sapiens
gcgcagagccaaggacaccgcggcgccccgggcggcgcggcgaccgggccccggagaggcccagcaacggccacccaaagaacac

SEQ ID NO: 203805 - RNA, 72 nt, Homo sapiens
agccaacggagcgaagcagagccaggcgggcggccgagccgggaagccaaccagggcgagacacagcacgcc

SEQ ID NO: 203806 - RNA, 74 nt, Homo sapiens
caagaaacagacagaagggaggcaaagaaaaggagaaaagaagccaaagggacacggagaccggaaacgagaga

SEQ ID NO: 203807 - RNA, 88 nt, Homo sapiens
ccggagggcgcgccgcaggcgaggagcggccggggcgggaggcccgcggagccgaggcgggaggagaccaggcccaggaaggaacgag

SEQ ID NO: 203808 - RNA, 86 nt, Homo sapiens
gcagaccgcgaaaggccgagagaagcggccgccacgagagaaaaaggagcgcccacagcagggcagcacaaggagaagggcgcaga

SEQ ID NO: 203809 - RNA, 90 nt, Homo sapiens
ccgcgcgggcgcgggggggacagccgcccagaagcccggaccgacaggaaagaaggagcccacaaagaaaagaacaccgccagcagccag

SEQ ID NO: 203810 - RNA, 72 nt, Homo sapiens
acaaagaaggacggagaggaggcgagcgagagcgacgccgacaaaggaggaaaagaagagaccagcgcagca

SEQ ID NO: 203811 - RNA, 69 nt, Homo sapiens
cagaacggcaagccacagaacccaacacagagccaaagggcaagcagccggggaagcacgaggccgcgc

SEQ ID NO: 203812 - RNA, 88 nt, Homo sapiens
cgcgcagcccccgccgagccgccccgagcccgccgccacacccgagggccacgaccgccccagggccaccgccagcgagccgcggggg

SEQ ID NO: 203813 - RNA, 76 nt, Homo sapiens
agagaaacaggcaaaagcggaacaagaaagcagcgccagcagcccgggggcgacgacgaggaccaggagccagggg

SEQ ID NO: 203814 - RNA, 74 nt, Homo sapiens
caggaccgggcaggagcgaaggacgaaaccccgacccccgagacacgcgcaagacgaggcgcccgggagaaggg

SEQ ID NO: 203815 - RNA, 68 nt, Homo sapiens
ccgcaagcccgcagggacgaggccccaaggaccgaccgggccgggcaaggaagaagaccagacaacca

SEQ ID NO: 203816 - RNA, 75 nt, Homo sapiens
ccgacaccaacccccgcggacccagggagaaaccccccaggggcgggcacaagggaagacagcgcccgggaccca

SEQ ID NO: 203817 - RNA, 78 nt, Homo sapiens
agggcagacgagcggaggacacccaacccgggcggaggacccacaggagaggcacaggaccagaccaagacacacaac

SEQ ID NO: 203818 - RNA, 82 nt, Homo sapiens
cgaggagcgggcgggaggccggcgcaacacgcgccaaggaccacgggcggagaggcacccggagaagagggagccaagagca

SEQ ID NO: 203819 - RNA, 77 nt, Homo sapiens
gcagagagccagacggagaaaacacgagaggcgcccaccacaacacagcagcccccaggagagcaggaaaagccgga

SEQ ID NO: 203820 - RNA, 107 nt, Homo sapiens
gccaggaaaccacccagagacagaagagcaaaaggaaccgaggaaaaaacggcagcccgccgcgaggaacgcaacgcagcgccggcagcgagaggacggggcgacgg

SEQ ID NO: 203821 - RNA, 65 nt, Homo sapiens
acccaacgccacggcccccgcggaggagccgccccggccgcaccacgaagcaaaacccgcaaacc

SEQ ID NO: 203822 - RNA, 82 nt, Homo sapiens
gcaaggaaccgggcacagagccgcgggggcggggagcgcggaccccggccgggacgcgcagaggcggccagcggcagcgggc

SEQ ID NO: 203823 - RNA, 69 nt, Homo sapiens
accgaccagggccagccaagcagcaggggccgaagccacaaaaagaccacccccaaacacagaggagaa

SEQ ID NO: 203824 - RNA, 76 nt, Homo sapiens
aaaaaccacggagggcccgaaacccgcagaggaaaacaggcaacgcccgcggggacaacccaaagacggccaccgc

SEQ ID NO: 203825 - RNA, 79 nt, Homo sapiens
gaaggaagaggcggacggaggagcaggcgagaagagaaggaccgacagcccccaggaaggaggcggcggccgcgagagc

SEQ ID NO: 203826 - RNA, 47 nt, Homo sapiens
caccgcaacaacgcccagcgagggcgcgcacagacggccacagaagc

SEQ ID NO: 203827 - RNA, 77 nt, Homo sapiens
cgacagaaagagggcccccagacccgcgcaaaccagcgaaggccgaagaaaaagaaacagcccggcgaggacccaag

SEQ ID NO: 203828 - RNA, 75 nt, Homo sapiens
aacagaagaccagaaaaagaaagcgacccaaaccgccgccggacgggacagcccaaggcggaaaagcgaaggaag

SEQ ID NO: 203829 - RNA, 65 nt, Homo sapiens
aagaagaaaaaacgcacagggggcagcaggacacaccggaacaaagaaaaccaaaacgcaacaga

SEQ ID NO: 203830 - RNA, 77 nt, Homo sapiens
ccccccccagcaaacacgacccgcagcacaccgccacgagaccaccaagcagccggaaacgaaacagcgcagccagg

SEQ ID NO: 203831 - RNA, 80 nt, Homo sapiens
gaaccggagcaggaggcgcacaacacccaggccccccaggccacccaggaccagcggcacacccccccgcggcccaaaaa

SEQ ID NO: 203832 - RNA, 45 nt, Homo sapiens
gagagaaaccaaaagggccagacaggaacgaccaacaccggaaag

SEQ ID NO: 203833 - RNA, 80 nt, Homo sapiens
gacccgaagaccgacccgagagcccacccccaacgcgacggaaaggcacgaaagccagaagccaaagaaacgccaaccgc

SEQ ID NO: 203834 - RNA, 59 nt, Homo sapiens
cgggcgacacacagcaaggcgagagagacacaaggcaacggcccggcacaccagcagag

SEQ ID NO: 203835 - RNA, 71 nt, Homo sapiens
cagcaaggcaccagccaaaacacacaccggccaaagagcggaaaggcaaaaggacaggggaaaaaagcaca

SEQ ID NO: 203836 - RNA, 67 nt, Homo sapiens
agaacgaggaacacgaacaggaacccgcaggcccaagcagacaaccgaacagaagggggcccaaagg

SEQ ID NO: 203837 - RNA, 70 nt, Homo sapiens
gggagaggagaccagaacgaacccccccccccgcaacggggcggcacacaaggagcgaagggcagggaga

SEQ ID NO: 203838 - RNA, 70 nt, Homo sapiens
acacagcggaggcaaggaagcagacaagcacccaacaaaccaagaggcgacggggcaagcaagggccaaa

SEQ ID NO: 203839 - RNA, 79 nt, Homo sapiens
aaaagacggacggaaccacaaacaaggcgcagaggagacacacagaagacgaaagacgaaagaagaacaaaagaaaaaa

SEQ ID NO: 203840 - RNA, 91 nt, Homo sapiens
cgggaggagccgggcgcagaaccagaccgggagcacgcacgccacgaaggggacggcaaaacagaacagaaaggcggagaaaaaagagggg

SEQ ID NO: 203841 - RNA, 89 nt, Homo sapiens
gagcgagaccagccgagcaacagcgagacaccgcccggagggcccgcggccaccagccacaggcaggccacacgcggaagacacgccca

SEQ ID NO: 203842 - RNA, 79 nt, Homo sapiens
gccaccgacgacacccgcgaggccgcaagccaccggggagagagagaacccggcgagaggaagagagagagacagaaga

SEQ ID NO: 203843 - RNA, 74 nt, Homo sapiens
gaggaggcgccagcagcccggagggacccagggcgagggcaacgaggcgccgccgaggacaagagaccgcacag

SEQ ID NO: 203844 - RNA, 70 nt, Homo sapiens
aaaggaagaacaaggagccagaagcagccagagaccaacagcaacggacaggacagaaccagagcccaag

SEQ ID NO: 203845 - RNA, 63 nt, Homo sapiens
agggaacccggcaccgccccagggcaccccagcaaacacgagaggaggaaggacccgcagcgg

SEQ ID NO: 203846 - RNA, 51 nt, Homo sapiens
aaaacaaccgagggcagagcgggcgcggacggcaggggcgccggggaaccc

SEQ ID NO: 203847 - RNA, 78 nt, Homo sapiens
gaagggcagcggccacacaccaaaaagggcccgccgagagaaaggaagacacacgaacaccgaagcccaaggcgagcc

SEQ ID NO: 203848 - RNA, 67 nt, Homo sapiens
aaagcaaacggaccagaccgaccaccaaaaacaagggaggcgaggacggacaaaaggaaacggacgg

SEQ ID NO: 203849 - RNA, 79 nt, Homo sapiens
gcggcacgacaaaagaagcagccaggaggcgaaacggcagaaggagaagacagccgaagaagagcagcgaggagcgcga

SEQ ID NO: 203850 - RNA, 53 nt, Homo sapiens
gagagccaaagaagaggaggaaggaccgagcgcaggaaccaggccagcgccca

SEQ ID NO: 203851 - RNA, 64 nt, Homo sapiens
caggggcgcggggcggggaggcgggaccagacgaggaacagcaaaaaggccgcaaccgggaaac

SEQ ID NO: 203852 - RNA, 80 nt, Homo sapiens
ccaaccaagcaagaaccccagcaccccacacacccggagcccccccccccagcaggccaggaagcccgaaagagagacaa

SEQ ID NO: 203853 - RNA, 66 nt, Homo sapiens
gaggacaggcacacacaggagaccccaaagaaggcccgcagaccgaagacagacagagggaaaccc

SEQ ID NO: 203854 - RNA, 54 nt, Homo sapiens
gaagcgacgcccagcaccacagcccgcggacaacaagcggaggcaagaggccca

SEQ ID NO: 203855 - RNA, 63 nt, Homo sapiens
cgcccacagaacaccggcacaggggaagaacacggaaaccggacagggacaggaaagaacacc

SEQ ID NO: 203856 - RNA, 78 nt, Homo sapiens
caaggaagacgaacgcaccccagagccgacccccaccgcaaggacacgaggaggggacggcccgccacaggcacagac

SEQ ID NO: 203857 - RNA, 36 nt, Homo sapiens
gcggccaccccagacagagcgcagggccacgccgaa

SEQ ID NO: 203858 - RNA, 81 nt, Homo sapiens
agcaggaggcgccagaaagaacaacccgaacgcaaaagaagagcaaaggcagacaagaccagccacaaaaagcggacaaag

SEQ ID NO: 203859 - RNA, 79 nt, Homo sapiens
cacacagcaagaagacggaaaccaaaggcagacagacgggcccccgccaaacccaccggcgagcaaggcaaccagcaag

SEQ ID NO: 203860 - RNA, 77 nt, Homo sapiens
gagcaccgcgccggcccagcaccccgagaaccgcaggagccagaggccgggaacccaacaagggagcaaacagagaa

SEQ ID NO: 203861 - RNA, 72 nt, Homo sapiens
accaaggacagagcagacacaccacccaacagagaggggcgaaaacgcggaagcggagacacaggcggcgcg

SEQ ID NO: 203862 - RNA, 82 nt, Homo sapiens
agaggcagacccagcaccagaccaggcggcacccgccccgaggaggggaccagacacagcgaggcccgggcagcgggccagc

SEQ ID NO: 203863 - RNA, 77 nt, Homo sapiens
ggaccagaacccgcgaaagagggaagcggcaaaccaaaagagcaacggcgagggcacaagcccgaggaagaagcccc

SEQ ID NO: 203864 - RNA, 59 nt, Homo sapiens
gcccacaggggggggcaaacccgagagaacggaagagagcaaaaaccgaccaggacccc

SEQ ID NO: 203865 - RNA, 82 nt, Homo sapiens
gacaggcggaggccccagggaagcgcagaaagcaggcgaacccgcggcgcaaaacgcgcaggcagcaagacccacggaccgg

SEQ ID NO: 203866 - RNA, 83 nt, Homo sapiens
ggccggggcccgggcggcgggcggagacggggcgcccccccgccaaggcccggcgagggagaacacagccgccccacaaccca

SEQ ID NO: 203867 - RNA, 85 nt, Homo sapiens
cgagagggagagacgccgaacgacgccccgcacaccggagcgcccagcgcgaggagggacgaccaaggccagcaccaacggcagc

SEQ ID NO: 203868 - RNA, 77 nt, Homo sapiens
gaccggacgagcccggaacaccacaagaaagccagacggaaggcacgagggccgacacgccccccaacgcagacacc

SEQ ID NO: 203869 - RNA, 76 nt, Homo sapiens
gcccacagagcccccggccccccgcggccgccacgcgcagacggagccgagagcagaacagaaaagagcaaaccga

SEQ ID NO: 203870 - RNA, 77 nt, Homo sapiens
acccccaacccaccgaacgaacacacgggacaaccagcgacgccggagcagcccaacccaggcacgggagcgcgggg

SEQ ID NO: 203871 - RNA, 75 nt, Homo sapiens
acgccggcgccgcacacgggcgcagggggccacagagcccgaccggcccacagccacccgacggccacaggaggg

SEQ ID NO: 203872 - RNA, 55 nt, Homo sapiens
gacaacaaaacacccaaaccagcccagccgcccacacaaggaaacaaccccgaag

SEQ ID NO: 203873 - RNA, 100 nt, Homo sapiens
gaccccgcgcgggaaggaagggcccacggcacccaccaacccacagcaacgggacagagcacaaagacaggggcggaaagcagggaaaacaccacaccaa

SEQ ID NO: 203874 - RNA, 88 nt, Homo sapiens
agaggaggcgcaagacgcgaccaaagccgacggggcaaggcagccggcacccgcacaacccagggggccgaacccagaccaacaaaag

SEQ ID NO: 203875 - RNA, 72 nt, Homo sapiens
ccgagaagccaaaccgaagagcagccccccgcccgaacgcagggggaaagggcggaccgaggagggcggaca

SEQ ID NO: 203876 - RNA, 77 nt, Homo sapiens
ggggcaagaacaccgaggggccgggaacggcgccggaggaccagacccaggaggaggaaccagacagcaccaggggc

SEQ ID NO: 203877 - RNA, 73 nt, Homo sapiens
agaaggccagaggaagggcggacgagaaacaagaggaagcagggggccagaggccgagggagaagcggaaggc

SEQ ID NO: 203878 - RNA, 76 nt, Homo sapiens
aaaaagacaccacacccacacccacacggcaaacacccccaccgcccaggcaacaaagcccaggaacacagaccac

SEQ ID NO: 203879 - RNA, 101 nt, Homo sapiens
gccagccccgcggcgcccgggcccgggcggcggcccaccgcccacggaccaggagagaagacgaaaaagaagaagcagcgaacagcgaaaagcccaaacgg

SEQ ID NO: 203880 - RNA, 77 nt, Homo sapiens
gaaaacaagcaagcgccacagagcagggggagaccagacccccaggccaaggaaagcggccagaagggggccacgac

SEQ ID NO: 203881 - RNA, 77 nt, Homo sapiens
gacccgaccaggagggagcggaaaacggggcccgggccggacggaaagcacccgaggagaaagggaacgaaaaagac

SEQ ID NO: 203882 - RNA, 76 nt, Homo sapiens
gcagacacaccccagagggcgcaagcagagaaaagacagaccacgaacacggacggggaggcgggaaggggaagac

SEQ ID NO: 203883 - RNA, 63 nt, Homo sapiens
aaacagcaagaacccaaaaggcaggcaggagaagggcaccggggaggaccgcgcgacgcgccg

SEQ ID NO: 203884 - RNA, 69 nt, Homo sapiens
ccggaccagcagaggacagagaaggagaacgggaaagagagacgcggagagcagcgggggagacagaag

SEQ ID NO: 203885 - RNA, 55 nt, Homo sapiens
cacaagcaacccggcaaccaaagagccggaagagcgcagaagccggaagagagcc

SEQ ID NO: 203886 - RNA, 57 nt, Homo sapiens
caacaagaaaaaagaaaaccagggaaaccaggaggaccagaacagagaagaaagcag

SEQ ID NO: 203887 - RNA, 75 nt, Homo sapiens
cagaagccaaaaagcagcggacgaaggaccaccaaccaaaggggaaagcaggggagaaaagaaaagaaagacggg

SEQ ID NO: 203888 - RNA, 81 nt, Homo sapiens
ggaagaggcggcgccgccacccccccccagcagccggcacagccacaccgagaagaccggcccaagaaccccaccgcccga

SEQ ID NO: 203889 - RNA, 43 nt, Homo sapiens
gcacggagcgcgcgccggccagaaccccagcacccagccaagg

SEQ ID NO: 203890 - RNA, 89 nt, Homo sapiens
cacgaaccaaggaggagacaggcaagacggcggcagaccggagaggcgcggcacaggaaaggagcagcagaggaaccgcgggccccgag

SEQ ID NO: 203891 - RNA, 81 nt, Homo sapiens
gccagccgcagcgccacggcgccgagggcacacagggaccaagaagccccggggacacgcgagaaaagacgccgaagggaa

SEQ ID NO: 203892 - RNA, 82 nt, Homo sapiens
gagcagagaaggagcgaacagaagaggaagaccgagaaacagcgcaggcggaggagcgcgggcgcggagacacagcggccag

SEQ ID NO: 203893 - RNA, 62 nt, Homo sapiens
gacggaaacaaggcaacagaaagagcaacagcagggcaacaggaaaaagacgggaggacaag

SEQ ID NO: 203894 - RNA, 74 nt, Homo sapiens
gggaacgggagcaaaaccgggaacagagggacagaggccacgacaggcacaggcacggcccgcaggccggaggg

SEQ ID NO: 203895 - RNA, 79 nt, Homo sapiens
cgagggccccgggcccagcccgagggcgccacccccccccacagcaggaaccaaggggaggcaagcaggggggcaaagg

SEQ ID NO: 203896 - RNA, 82 nt, Homo sapiens
cgcaggagaagcccaggagacgcgcgccccagaccaccggcagggaacagccgagcagaccgaggaggcccaccagcagacg

SEQ ID NO: 203897 - RNA, 57 nt, Homo sapiens
gacaacccccagaaagccaagccggaccaagggaacggaagccccagcccgcgcgag

SEQ ID NO: 203898 - RNA, 83 nt, Homo sapiens
gggcaggaaggagagccccagcgaggaagcacaccaccaaggaacgggcgcagcgagagagcaaggcccaagcacaagcagcg

SEQ ID NO: 203899 - RNA, 79 nt, Homo sapiens
ccgccggcgggagggcgacacgcgggccgcgggccgagccgagagcgccggaggaccacacccggccacagccgcagga

SEQ ID NO: 203900 - RNA, 77 nt, Homo sapiens
gcccccaaagggggaacaggcggagccaccgcgcccagccccccacaaggcagccacaacacagcagcccccaggag

SEQ ID NO: 203901 - RNA, 55 nt, Homo sapiens
gaaggacacaaaagaaagcgacaaggaacaagggaagagacagcaggaaaacgga

SEQ ID NO: 203902 - RNA, 40 nt, Homo sapiens
aaagcaagaggaaagcagccaggaggacggccagcccccg

SEQ ID NO: 203903 - RNA, 84 nt, Homo sapiens
caggaacggacgggagacacaggaagagcgggccaaccggggacgagccagacggggcaaagggaccaaaaagaccaagcggag

SEQ ID NO: 203904 - RNA, 67 nt, Homo sapiens
acgggcacacccaaaagacccagcccccgggagggccgaaaccgggcaagcgggaaccaacacgggg

SEQ ID NO: 203905 - RNA, 86 nt, Homo sapiens
gcgccaacaccgcgaggagggggaagcccacggcggacgcaagagcccgaggagagacaggaaggccgaaggagagaaaaaaaccg

SEQ ID NO: 203906 - RNA, 73 nt, Homo sapiens
acagacacagcgcaaaacagcaacagagcagaagaaacgggagaaagccaaccaacagaagaccgacccggga

SEQ ID NO: 203907 - RNA, 67 nt, Homo sapiens
caccgcaaaggcccaagccaccggaaggcaggaccaaaccgaaaccgccagagcaggcggacaacgg

SEQ ID NO: 203908 - RNA, 51 nt, Homo sapiens
acagaggagagcaaacagccggccagaacacacagaaaagggccaaaggaa

SEQ ID NO: 203909 - RNA, 90 nt, Homo sapiens
gaccgagaccggaccgagagcggaccgagagcgcgaaacgcacgagaagaacaaaccaggggagggaaacgagaaaaacgacgccagcgg

SEQ ID NO: 203910 - RNA, 84 nt, Homo sapiens
caccggcggccccaccagcagacgcagccgagacaccagcccgaaacaccaccaaggacgaaaaacggaaacgccggaccaaaa

SEQ ID NO: 203911 - RNA, 67 nt, Homo sapiens
ggaagaacagaaagcacaggcaaggccagggaacaggaaacggacacaagagagaagagccgacacc

SEQ ID NO: 203912 - RNA, 74 nt, Homo sapiens
cccacgacagaccacgacaagagcacaaccccgggagaagaaaaagcagaaaggaacagaaaacaaaagaacaa

SEQ ID NO: 203913 - RNA, 79 nt, Homo sapiens
gcgcacggcgaaagccacgggggcggcaccaggaaaaagaaagacggcacagaacaaggcccgacagggaagagcgaaa

SEQ ID NO: 203914 - RNA, 74 nt, Homo sapiens
cgaaacccccccccccacccaccaaaccggagggggaaaaaacccaaggcgcaaagggcccgacgggccaggag

SEQ ID NO: 203915 - RNA, 78 nt, Homo sapiens
acaccaccccaagaggcgagccagcagaagaaaaggagcgcagagcagaaaggcccccaagagcagcagagggaagca

SEQ ID NO: 203916 - RNA, 82 nt, Homo sapiens
acgggggagaaggagcgagcagacacccccaccgccccagggccaaccgacaaggagggccccacggcccggagaacgcggg

SEQ ID NO: 203917 - RNA, 78 nt, Homo sapiens
ccgcggcggccaggccccagacacagacgagcaggggaagcaaaccaagaaggaggggaccgaagcgccaggccggcg

SEQ ID NO: 203918 - RNA, 79 nt, Homo sapiens
cgaacccggaggagcaagggacaagccgacaaaacagaacacgagcgagaaaacagagcagacagagacaaaaaccagc

SEQ ID NO: 203919 - RNA, 40 nt, Homo sapiens
cgggcgccccgcaggacacaaggggccacagggggggaag

SEQ ID NO: 203920 - RNA, 104 nt, Homo sapiens
gagaagaggaaccccgccgggccgggcggccgccgcccgcggagggaagcgccccccacagggcacacaggccccgagaaccaagagaacccccaccaaccagg

SEQ ID NO: 203921 - RNA, 71 nt, Homo sapiens
caacggagagacaacaagggccacggacgggagcgggaaacgcacaacagagaacagaaaagacccgcaga

SEQ ID NO: 203922 - RNA, 71 nt, Homo sapiens
caagcaggcaagacccaccccacggacccaccgcgcagaaaagagcagggggaaacagacgggaaagaagg

SEQ ID NO: 203923 - RNA, 69 nt, Homo sapiens
cggcccccccccagcccgccccaaaaggagggacggagagaccggaggaaaccagaagaaaaacacagg

SEQ ID NO: 203924 - RNA, 77 nt, Homo sapiens
gccaggaccccaggaaggacaggagccccacaccggcaacaggaaagagaaagagccggggcaaccacgaacacccc

SEQ ID NO: 203925 - RNA, 69 nt, Homo sapiens
gcgggacaagaaaacagcgaagaaagaagaggcccgaaccaacgccacgaaggcaacaaaacagacgga

SEQ ID NO: 203926 - RNA, 57 nt, Homo sapiens
caaacgggagacaacccccgaaggagggagggaagcggacacacaggacgagaaacc

SEQ ID NO: 203927 - RNA, 51 nt, Homo sapiens
gcgccgccaagccggcgagaccccagcccccagacaagagcgagcaagccg

SEQ ID NO: 203928 - RNA, 74 nt, Homo sapiens
ggcagggggccacgcggacgcgcaaccacccgccagaacgacaaagaggagggaagcccaggcccaccaggccc

SEQ ID NO: 203929 - RNA, 83 nt, Homo sapiens
ggccgcaccgcgagacgagccaagaaccggcacggcccggccccgcccggcgccgaggacccccgacacggagagacgaggac

SEQ ID NO: 203930 - RNA, 77 nt, Homo sapiens
gggagaagggaaagacgaggagggcagcgaagagagcaccgaccagacggggccaaagaaggggccgccagcgaaaa

SEQ ID NO: 203931 - RNA, 53 nt, Homo sapiens
ccgccgaccgcggcagacggggacgaccacgaaaaaagagggaccaaaacgca

SEQ ID NO: 203932 - RNA, 70 nt, Homo sapiens
gaggcggcgccccccccaagaaacgcagagcgaccgacaccaccgaagcaagaaccgagcagacaaggag

SEQ ID NO: 203933 - RNA, 81 nt, Homo sapiens
gcccaaggaaggccaacgggaggcccacgcagcccacagacagccccagccgggcccaggacaagaaaggaccagcagaag

SEQ ID NO: 203934 - RNA, 77 nt, Homo sapiens
gcggaggccgcggagcgccagccaagaagcggaagcgggcgcgccaagaagcaccacgagaagaggagaggggaagg

SEQ ID NO: 203935 - RNA, 78 nt, Homo sapiens
ggacgaggagggagaagacgaggagagcggaaaaaccccaagaggcagcgagaagaaaaagaagagagagacacggac

SEQ ID NO: 203936 - RNA, 56 nt, Homo sapiens
agccaggcagcaaggccggaggacgccggcagcacggacacagcaggggccagaca

SEQ ID NO: 203937 - RNA, 77 nt, Homo sapiens
ccgggagcagcagagaggagcagcggaagccgggcgcgcccccccgcgggcgccgcccaggaagcggccccggagag

SEQ ID NO: 203938 - RNA, 84 nt, Homo sapiens
gcagaacaggagacgcccaaagccaaggcaaccggagaagaggccggaccggaagaccagagaagagcaccggagcaaggcgga

SEQ ID NO: 203939 - RNA, 83 nt, Homo sapiens
ggaaggacccgaaccagccgccggagcaccgcagcggcgcccgcagggggaagaggggacccaagccagcagaaccggacaac

SEQ ID NO: 203940 - RNA, 69 nt, Homo sapiens
cgcacaacaaaaggagcaacgaaagcccggaacgaagaaaccaaagaagacggcagcgaacgagaagag

SEQ ID NO: 203941 - RNA, 73 nt, Homo sapiens
caaaccgagcacagaaagagaccgcccgcccaacgaaccaggggcgaaaacaagaggggccaaaggccaaggc

SEQ ID NO: 203942 - RNA, 77 nt, Homo sapiens
aaaccccaggccaagcagccaccagcagcccccagagcgggaccacaggcccacacgggacaggaagggaaccggac

SEQ ID NO: 203943 - RNA, 70 nt, Homo sapiens
cgggcagccaccccgcccccgccccccccgccgcaccagcacgcaaaacaagcaaaaaaggaaacaaaaa

SEQ ID NO: 203944 - RNA, 60 nt, Homo sapiens
gccccccgcggcggcagccacagcccgcggcgccaggccacgcggccccgcaagcgccga

SEQ ID NO: 203945 - RNA, 79 nt, Homo sapiens
gaaggagcaccagggcaccacccccgcgagaaccacccagccggagacacgccaccaccagaaaagcggccaggagcgg

SEQ ID NO: 203946 - RNA, 83 nt, Homo sapiens
ccgaacccggaggaggcgaccgcggcgcagcgacccccgccaggcaaaaggaaggcagaagcacaaacaaccgaaaaaaagcc

SEQ ID NO: 203947 - RNA, 83 nt, Homo sapiens
cccggcggggcagcgcgagcgaggaggagccgagccgcgggcacagaggcggacccgaccaaagacgccccccggccccccca

SEQ ID NO: 203948 - RNA, 69 nt, Homo sapiens
gggcgaggcggacgcgcggcgcgccaggaagcggccagccccagggcagcacacagagacaccaggaac

SEQ ID NO: 203949 - RNA, 74 nt, Homo sapiens
gaagaacgacccgcccggggcagcagaggccggaagagcgggagcgggagccaggcagaaggccaaccaacccc

SEQ ID NO: 203950 - RNA, 75 nt, Homo sapiens
cggaggagcggagagcgagcggcaacccggagaagagccccgagccgagggggcagcgcacgcgggcagaccccc

SEQ ID NO: 203951 - RNA, 75 nt, Homo sapiens
gcaaccggaaagcaagggagcggcacagccagaagaccgaagcgcgacggaagaccccgccccccgaggcgcagc

SEQ ID NO: 203952 - RNA, 64 nt, Homo sapiens
gcccccgggggagccaggcagggagcacagccaacaacgcgccaagaaacgccgagacaggaag

SEQ ID NO: 203953 - RNA, 74 nt, Homo sapiens
ccggacccgcccagcagaagaagagaggagggagaacacagaaaccggccccagaggggcgcacccaacgcgca

SEQ ID NO: 203954 - RNA, 69 nt, Homo sapiens
accggcgaggcccaccaagccagacggcaaacagaagggcgcaggaaaaggcgcacagagaacgacaac

SEQ ID NO: 203955 - RNA, 71 nt, Homo sapiens
cacacgagggccgaaaacaagaccacagagaagcccacccggaaacaaacgccaggggacccccagaccac

SEQ ID NO: 203956 - RNA, 34 nt, Homo sapiens
ccaagaagcaaagcggaagacgcggaacgggagc

SEQ ID NO: 203957 - RNA, 61 nt, Homo sapiens
aaagccgacaaggcacggaaccagacgccgcaggcccacgcagcggaggcggggaaaggcc

SEQ ID NO: 203958 - RNA, 76 nt, Homo sapiens
caagccggagacccaagcaccggaagcaacagacacaagaaacagaccccgacagaagaaggaaggcaccagacca

SEQ ID NO: 203959 - RNA, 72 nt, Homo sapiens
agaacagcaaaagagcacaagggggaagaaggagccgcagccagaaaaggccagccacaaagagcggaggag

SEQ ID NO: 203960 - RNA, 72 nt, Homo sapiens
aagggaaaagacgggcaggcgagcccgacggacaacagacaggagagccagacaccaggaccaagccaacag

SEQ ID NO: 203961 - RNA, 63 nt, Homo sapiens
cgcccgcccgcacgggcgcgccaagggcacagagggagagggccccccgggccggccgccgga

SEQ ID NO: 203962 - RNA, 64 nt, Homo sapiens
ccggaaggcacgaccacagggagaaaggagaccgacaggcccacaagcggaaggcgagcgaaag

SEQ ID NO: 203963 - RNA, 69 nt, Homo sapiens
gagcccggaccgcccaccggcgagccgcaggggcggcgcgccgcggggcagggagcaacacgcgccaac

SEQ ID NO: 203964 - RNA, 53 nt, Homo sapiens
gaagcacaaagcccgaagcaggggagcgcggccacagacgcacaggcagagac

SEQ ID NO: 203965 - RNA, 75 nt, Homo sapiens
ggcacccaccgggaacggccagagaaggaggagagggcaggagagaaggaacccccaggcagaccaaacagccca

SEQ ID NO: 203966 - RNA, 77 nt, Homo sapiens
cggccagaggaccacgccggaggagagccgcaaacgaagcggagcggacacggagcagggggagagcaccggcccca

SEQ ID NO: 203967 - RNA, 68 nt, Homo sapiens
gcgcggcggacgcgcccgggacgcgcggcggcaccgggaggccgggccgagcgacaacggcaagcgga

SEQ ID NO: 203968 - RNA, 77 nt, Homo sapiens
gaccggccccccacgcagcggcggcagcagcgaaagagaagaaccagcagaaagcaaaacagagcggaggaaaagaa

SEQ ID NO: 203969 - RNA, 78 nt, Homo sapiens
gcgcgccgccgggggcgacccccccgcgcccccccccccgccagaagggaagaacaacgccgagagacgaagggaacg

SEQ ID NO: 203970 - RNA, 86 nt, Homo sapiens
caagccaaggagaacccagcccgacggacagcagcgcgccagcaggagaaagcagcgccagagccgaggagaacccccgccccgag

SEQ ID NO: 203971 - RNA, 75 nt, Homo sapiens
caacacaaagggaaacagccagaacggaaaccacggacaaacaccccaagggcccgccccaccgggggccacccc

SEQ ID NO: 203972 - RNA, 58 nt, Homo sapiens
gcaaaaagaacacaaaggacagacagagagagggaagaccacaacaagcaagcagcag

SEQ ID NO: 203973 - RNA, 65 nt, Homo sapiens
acaacggcagaaacgcacaaagagacgaacagaaagacaacggacaaggcaggaagaaaacccac

SEQ ID NO: 203974 - RNA, 84 nt, Homo sapiens
ccccccccacccccgaccgggcggcgcggcggccagaggaaccccgaggcgacaaaaccagacccccgacgccgggcagggcga

SEQ ID NO: 203975 - RNA, 71 nt, Homo sapiens
aaaacaacaaaaggaagaaaaccgcaggacagggaggccaagcaagaaaagagacacagaaggaaaaagaa

SEQ ID NO: 203976 - RNA, 74 nt, Homo sapiens
caagcggccaaaccccagccagcagaagcgaaggcagcaggcacgaaaagacagcagggggagcagcaaagaaa

SEQ ID NO: 203977 - RNA, 77 nt, Homo sapiens
aaaaccgcagcaggaagcgggacaaccaggacacaagggaccaacacgcagggcgcccgaggaagaacgccaccacc

SEQ ID NO: 203978 - RNA, 79 nt, Homo sapiens
cacggccgagccggacgcgagcggcgggccacacagaacgcgccgcgggacccgagggaggcgcgcggcccgccaccgg

SEQ ID NO: 203979 - RNA, 89 nt, Homo sapiens
gcccgccggagcaccgggccgggcggccccggggcgccagagcagcaggcggccggagcgggacggaaggggacacaggcaagaccaca

SEQ ID NO: 203980 - RNA, 53 nt, Homo sapiens
aaccccaggagccccgaaacagaagaacaggacaccaggccgagcacgaaccg

SEQ ID NO: 203981 - RNA, 54 nt, Homo sapiens
ccaccccaccagcaaagcgaaaggacaagggacgacagcaacaggcacaaagac

SEQ ID NO: 203982 - RNA, 77 nt, Homo sapiens
gccaccgcagccggggcacccaccgggcgcacgccccgaccccaagacagcgggcgcgaccaaggaaacaaaggaca

SEQ ID NO: 203983 - RNA, 78 nt, Homo sapiens
cccagagagcgggacacagcagagccacaagagaacaaaaaaagagaaaagacaagacaaagggaaggaccgaagacg

SEQ ID NO: 203984 - RNA, 99 nt, Homo sapiens
gcagcgacagcgagacaccagaccccgccaaacaaaagcagaacaaagcaggacacccccggcaccgaggaaaacaagcccaaggaggaaagcgaacgc

SEQ ID NO: 203985 - RNA, 118 nt, Homo sapiens
caggcggacaagacgggcccacaaacgacaggcagccagcggcagaggacgcacggcagggccagcccgcaacccccggcgaccacgggcccggcaacagcgcagcggggacaccggg

SEQ ID NO: 203986 - RNA, 69 nt, Homo sapiens
gaccaggaaacaagaacagcaacacgaaacacagaaaaaagaaggcgaaacggcaccaagccacaaaac

SEQ ID NO: 203987 - RNA, 68 nt, Homo sapiens
aaggaggccggacaggggcccaacaggagagggaacggagggaaagcgacaaacaaccaacccacaga

SEQ ID NO: 203988 - RNA, 53 nt, Homo sapiens
ccccaagcagggaggcagcccgacccagcggaacgggcacaaagaaggcgcag

SEQ ID NO: 203989 - RNA, 82 nt, Homo sapiens
ccgcaccaggacccaccggcacaggagcaagagcagccaccgaggcaggggggcccgccacccgagcagccgagcgccaggg

SEQ ID NO: 203990 - RNA, 75 nt, Homo sapiens
cacagggggaagggggaaggcagcacgcgcagaacaaaaaaggaaacaaaaaagggccaagacagcaacaaggac

SEQ ID NO: 203991 - RNA, 78 nt, Homo sapiens
cggaaccgcggcgggcaagaagcgacgagcccccaccaaccaccacaggcagcggaaaagagaagaagaagcggaaag

SEQ ID NO: 203992 - RNA, 70 nt, Homo sapiens
aagcaggagcacagacaagaccaggaagaggaaggacaacgggggaccaccgcaccagaggagaaagaca

SEQ ID NO: 203993 - RNA, 72 nt, Homo sapiens
cggacaaagcaaagaaaacaacaggaacagggagcaaaaggagaagccaaaccaagaggagagcgcgacgcc

SEQ ID NO: 203994 - RNA, 78 nt, Homo sapiens
gcagaggaaacaccaggcgcggcggcccagccccgacacaggcgcaccgcagcaggcaggaggcaagcggaggagcag

SEQ ID NO: 203995 - RNA, 71 nt, Homo sapiens
cgcagggacgaggccccaaggaaccccagaaacacaaagaagaaagcagcaagacagcaccgcaaggaagc

SEQ ID NO: 203996 - RNA, 77 nt, Homo sapiens
gccacggaggcagcggcacacaacccacgaaaaggaggagagacgacaccacaaaccaggagcgggagaccccagag

SEQ ID NO: 203997 - RNA, 73 nt, Homo sapiens
gcccggcccgggaaacgaacaaacgcacggagccaacacgcgcgcgccaggcggagaaacacgcagacgacca

SEQ ID NO: 203998 - RNA, 89 nt, Homo sapiens
agcaaggagcgcggaacggggagcgccggagcagcggacccaggcagggggaaacaaagcccagccgcagaaaaaaaggcaggacaaga

SEQ ID NO: 203999 - RNA, 68 nt, Homo sapiens
accaacgcgccaccgaccggcaccagcaagcaagaaaggggaggacggcaaccaaagcgaaagacggg

SEQ ID NO: 204000 - RNA, 78 nt, Homo sapiens
ccagagagcgcggcgggagcgaggccgccgcgcaagaagacccagacagacggcacgcccacagaggagcgggcgaac

SEQ ID NO: 204001 - RNA, 79 nt, Homo sapiens
aacgagagaggccagaagggaaagcaacacaacaagagagaaggaaagacagaacagagccaaacaaaaagaagggagc

SEQ ID NO: 204002 - RNA, 75 nt, Homo sapiens
gcggaggccaacaaaaccccgcagggacagcggggaaagaacaggggggaaaagaaagagcagacacagaacagg

SEQ ID NO: 204003 - RNA, 80 nt, Homo sapiens
caggcaaagagcgagcacaccagcagggaaacgaacccgaggcgcccagaaccaggcacagcgagccacgaagagaagag

SEQ ID NO: 204004 - RNA, 68 nt, Homo sapiens
gacgacgcaccgcaggcagacaaaagggccaaagaagggagagaggcagcgggccggcaacagcggag

SEQ ID NO: 204005 - RNA, 56 nt, Homo sapiens
aggggaagaggaagcaaagccaaggccccgaaacaacagaaccaccccggggcaca

SEQ ID NO: 204006 - RNA, 71 nt, Homo sapiens
gggaaggagaagagagcaagggcgggaagaggcaggcgacgggcagaacgaaaaggacagcgggaaacgcc

SEQ ID NO: 204007 - RNA, 67 nt, Homo sapiens
ccgagacagagaagggaggacggggcccacagcagagcaaacaggaccagaagccaaagaggcgagg

SEQ ID NO: 204008 - RNA, 58 nt, Homo sapiens
aagaaagcgccaggggcgagcgcagaagcaggcaagcaagaagcccccgaccacagga

SEQ ID NO: 204009 - RNA, 77 nt, Homo sapiens
ccccccacagggagagaacacacagagaaagaccagagcagccccgcgagccgcccagggggagggcagacaccccc

SEQ ID NO: 204010 - RNA, 78 nt, Homo sapiens
gagaaggccaccaccgccagggcgcaggccccccacggagaggagaaggcaccccagccgaagccacacaggcacaac

SEQ ID NO: 204011 - RNA, 82 nt, Homo sapiens
cgcaccggagcagccgggagcgcggaggccgcggcgccggcgccagcgagcagcgaggagagaacagacccccaagagcgac

SEQ ID NO: 204012 - RNA, 80 nt, Homo sapiens
ccaccgcccggccggcgcccgcaaccgcgacgaagaaaaaaagagcgacgaggcaaggggaaggagggcgaaacaaagga

SEQ ID NO: 204013 - RNA, 79 nt, Homo sapiens
caagcaaccccgcgcgacccaaagcgcggaaagggcggagccacggcccaggcaagcggcagccacacccggagaagga

SEQ ID NO: 204014 - RNA, 73 nt, Homo sapiens
aaaggagccggccggcggcaaagcggcggagaaaccaccacaaacacgaggccagcaacgaccaacaagacag

SEQ ID NO: 204015 - RNA, 68 nt, Homo sapiens
accccgagaggcacaggagaaagcaaccaaaacacagcccaacaggcgaaacagaaagcaggcagggg

SEQ ID NO: 204016 - RNA, 55 nt, Homo sapiens
gccggaacaagcagagacacgcgcgaaagcagaacaacaagaggagccgccggcc

SEQ ID NO: 204017 - RNA, 46 nt, Homo sapiens
cagagcaggggccggaagcaccaggacaggacggaaaacagggggg

SEQ ID NO: 204018 - RNA, 87 nt, Homo sapiens
cagcgggagcggcgcggggaagggggcgggccgcagagcagcccgaggaccaggcgagcggcacagacgagaccgacgaaggcgaga

SEQ ID NO: 204019 - RNA, 75 nt, Homo sapiens
acggagcaagagaaagacccggggaaaaaggagggagaacagaggccggcccaggggaggacggggggaaggggg

SEQ ID NO: 204020 - RNA, 72 nt, Homo sapiens
cggaacggcgccccgggcaccgggccgccaggagcgaggcccggaggccgggcagggcccacggaaggggcc

SEQ ID NO: 204021 - RNA, 76 nt, Homo sapiens
cggcggacaacccacaccaggccagccgggaaccgaacccaaaacgaggcgcgaccgcccagggagacggaaccca

SEQ ID NO: 204022 - RNA, 81 nt, Homo sapiens
aggcccccaagacaagggcggcggagcagcagaacaagcgcggagaccaagggacgcgcgcaggagcagaagcggccaaga

SEQ ID NO: 204023 - RNA, 74 nt, Homo sapiens
ccccgacagcgccaggcccagacgccaacgcaggagcacccagccgaaaagacgaggcgaggaggcgagacacc

SEQ ID NO: 204024 - RNA, 73 nt, Homo sapiens
gaaggggaagaaaacgaagagcagacaacaaagacaggcgaaagacacacagaagccaggaaaggaacaaaca

SEQ ID NO: 204025 - RNA, 83 nt, Homo sapiens
cggggaacagaggccgaaaggcgaaccggaaaggaccggcagaaaacccaccagggggagaacaagggcgcaacagaccggga

SEQ ID NO: 204026 - RNA, 70 nt, Homo sapiens
ccaccccccagccaggccacggaaaagcaagcccagaacacagaaacaaagagccccgggaaaagaaaaa

SEQ ID NO: 204027 - RNA, 80 nt, Homo sapiens
ggggccacaaggcaggggcagcccgggacccagacacgggggccgggagggacccccaccgcgcccgacaggcccacgca

SEQ ID NO: 204028 - RNA, 82 nt, Homo sapiens
ccgccaagccgccccccaccgcccgggcccgaggaggcagccaagccgggccgcccgcggcgacaggacaacagaaaaacac

SEQ ID NO: 204029 - RNA, 64 nt, Homo sapiens
cgcggcagcaagaacagagagagaggggacagacgagagaacgagaggcaaccagaacaagagc

SEQ ID NO: 204030 - RNA, 72 nt, Homo sapiens
gagagcacacgggccaggggagagagaagaaccgagcaggacgaaaggaacccgaaaagagccacgggaagg

SEQ ID NO: 204031 - RNA, 80 nt, Homo sapiens
ggcgcagggccggccgggcacagcagaggccgcgcagcagcaaaggagagcggaaccggaaaagaaaaggcaagcacagg

SEQ ID NO: 204032 - RNA, 73 nt, Homo sapiens
gagacagcggaagggaggcgcgcggcagcaggggcgacgaggcgggacgcaggaagaagacccaaccccacaa

SEQ ID NO: 204033 - RNA, 70 nt, Homo sapiens
ggaccaagcccaaagaggagaaagagccaagggaggagggagacaggggcaaaaaacggcagggaagagg

SEQ ID NO: 204034 - RNA, 69 nt, Homo sapiens
gccaaaggacggacgagcgcgggcaacaagcagcacagaaacggaccagacccagaaaaagaaggagaa

SEQ ID NO: 204035 - RNA, 72 nt, Homo sapiens
gaaaagccccagggccaccagcccaaagaagcccaggacaggagaagcgagccacggcgaagcaaagccaca

SEQ ID NO: 204036 - RNA, 71 nt, Homo sapiens
ccccacaaagagaagccaagacccagaggcaccagaaaaaaaaagacagagaaaagaaacagaacaaagaa

SEQ ID NO: 204037 - RNA, 68 nt, Homo sapiens
gcggccgggaaaaaaaggaaaagcagcagcaacgggaacgaagagagaaagcaaacacgggaccaaga

SEQ ID NO: 204038 - RNA, 74 nt, Homo sapiens
gaggagaagaagcacaggaggagaggcaaagcaagcagacaacaaacggaggggcagcagaggaaggaaccaga

SEQ ID NO: 204039 - RNA, 57 nt, Homo sapiens
aggcagacggggcaggcaggccgggcacggcgcccaggaggcggcccagggaccgga

SEQ ID NO: 204040 - RNA, 80 nt, Homo sapiens
gaaccgaagcgggcgggcccccccacccagagacccaacagaggaagccgcaagaaacgggacgacaggaaggccagaga

SEQ ID NO: 204041 - RNA, 84 nt, Homo sapiens
cccgggcagagaccagagggaagcccggagaaggggcggcgaaccacggcggcgccacgagaggaaacccaccacccgcgccgc

SEQ ID NO: 204042 - RNA, 80 nt, Homo sapiens
gggggggagagccacgacgccgggaccgggaccgccgccgccgccgccaccaggaagaagagagggcgaaggaggccaca

SEQ ID NO: 204043 - RNA, 76 nt, Homo sapiens
caccaggcgcgacggagccgaaaagaagcgcgcgagccggcggggcacaggaaccgccagaacccaacaaagccaa

SEQ ID NO: 204044 - RNA, 77 nt, Homo sapiens
cggcccggaccgaaggcgcaagagggaggcgcacacacaggagagacagagagaggagaaagcggccaaccccagaa

SEQ ID NO: 204045 - RNA, 85 nt, Homo sapiens
cccggggcgcgcccaccgcgccgcaccagcgaagacgccccacaaccgcccgggcgcggacggggcccggcgaaccccggcgcgg

SEQ ID NO: 204046 - RNA, 78 nt, Homo sapiens
gagaggggacgacagagccagcgagcgaaccagaccaaaaacgcaacaacagacggaagaggaggcgcaaaagggccc

SEQ ID NO: 204047 - RNA, 81 nt, Homo sapiens
cgcggggaaaggcccgaaaacaccaggcaccgagagaccagcagcgggcaaagcgagcccgaccagacacacggacacgaa

SEQ ID NO: 204048 - RNA, 76 nt, Homo sapiens
gcgccgagcccacaaacaggcccgagacacccagcccgcgcacgagaggagagaaagggaccccgacggagagaca

SEQ ID NO: 204049 - RNA, 63 nt, Homo sapiens
aaaagcacagggagcgacgcacccccaaggccaaccaaggcgcccgagaccaccaggaagaac

SEQ ID NO: 204050 - RNA, 75 nt, Homo sapiens
agccggcgccccaaccggccagcagcgggaaaagaacacaagggagcagacagaccagcgcggccgaagaagaag

SEQ ID NO: 204051 - RNA, 76 nt, Homo sapiens
gcacacagcaaaagagacagacggacaacagcccaacaacacccacacaaagcaagccagaagaacacacacacag

SEQ ID NO: 204052 - RNA, 43 nt, Homo sapiens
cgcggacgcacgaaaaagccggcgcggaagaggccggcggcgg

SEQ ID NO: 204053 - RNA, 76 nt, Homo sapiens
aaaccccagcgaaacaccaagaggggcgcacccccgagagagccacggaagggcgccaaggagccaccgccaccac

SEQ ID NO: 204054 - RNA, 76 nt, Homo sapiens
agacgacacgcaagcaggcaaccgaaacagaaacacgggagaagggagcgaagcgggacaggcgccaacaccaaga

SEQ ID NO: 204055 - RNA, 63 nt, Homo sapiens
cggaccaccccaaggggaagcggggagacgacaggcacgcaagcagaagcagacaggccacac

SEQ ID NO: 204056 - RNA, 75 nt, Homo sapiens
agaaacgcacaaagaaagaagggaaaaggaccaacccaaccaaaaacaacgaacgagcaaggaagggccaaggca

SEQ ID NO: 204057 - RNA, 74 nt, Homo sapiens
ggcccgaagccccacgccagggaagcgagaacgcggcgacaacgggacgcccgcgaagaaagaagagaggcccc

SEQ ID NO: 204058 - RNA, 81 nt, Homo sapiens
ggcgcggcgcgcggaccccgccgagccagcgccggccgcgcgccgcgcccgcgccacagcggagcggagcgcccaaacaca

SEQ ID NO: 204059 - RNA, 76 nt, Homo sapiens
gcgaggaggaagcgcccggccggagccagggacaagagccgcgcaagaccgcagagaagaacacggagaaacacga

SEQ ID NO: 204060 - RNA, 79 nt, Homo sapiens
gcgcggggggcgggccggagcggcccgcgccgggcgccggcaccgcggcagaagacgaccccgacgcaggccaggagcc

SEQ ID NO: 204061 - RNA, 79 nt, Homo sapiens
cgacccgccccacccgcagcagaacaagacaaagcggccagaagaaaagagaggggcccccgggaacaaaggaagaaac

SEQ ID NO: 204062 - RNA, 74 nt, Homo sapiens
gacggccggaacccgcaaacgagagcgagaggacggcagaccgagagaccaggcaggcaagcgcagacaaccga

SEQ ID NO: 204063 - RNA, 78 nt, Homo sapiens
cagcccgagagcgggaacagaccccaggcacccccccagcgcggggcccacagcgccggggccagccgggccaccggc

SEQ ID NO: 204064 - RNA, 72 nt, Homo sapiens
aaagcgaaaaacagcgaccagaaaagcaccgcaaggcagagggcagacagacacaggagccgaaaccgagga

SEQ ID NO: 204065 - RNA, 48 nt, Homo sapiens
gaccaagaaccaggggccgggaacagcgcgagcagaggcaagacaccg

SEQ ID NO: 204066 - RNA, 78 nt, Homo sapiens
gccccggcggcacggcgccgaccagcaccaggggaagcgggacaacgggggaggaaaaggaggccaccgcaagagaga

SEQ ID NO: 204067 - RNA, 77 nt, Homo sapiens
aaggccaaaaaggcaaccacagagagagagagggaggggacacaggaaagggaagcgcccaacaccacaaaacacga

SEQ ID NO: 204068 - RNA, 56 nt, Homo sapiens
gcgcagcaagcccggcccgcagggcgaagagccaagaaaccgacaggcaggagcga

SEQ ID NO: 204069 - RNA, 111 nt, Homo sapiens
gcagcggccccggcggggcaagagcgggggcgggaccccgccgcggcgggagggacccacagaaaggagcgagagcgagggagcagcaggagagccagggagagaagcagg

SEQ ID NO: 204070 - RNA, 70 nt, Homo sapiens
aaagcgaggagggccgcggcagcggagagcggccgggaggaagcagagggaaccaggacagagcgaaacg

SEQ ID NO: 204071 - RNA, 73 nt, Homo sapiens
agaagacagggcggcgggccggacgacaaggcgacaggccggccgcaaacggccgcaaaaccaccggagaagc

SEQ ID NO: 204072 - RNA, 90 nt, Homo sapiens
gacaccgaggaacccagaggaaacgacggagacgcagagggacgaaagaagcgcagcggaggaaggcgaggccaggggagccaacaggaa

SEQ ID NO: 204073 - RNA, 85 nt, Homo sapiens
acaagaaaaggaacggccaagacaagcaaaaagcccacagaagccaacggacaagcggcccaagggagcagacaggagaaaacga

SEQ ID NO: 204074 - RNA, 82 nt, Homo sapiens
cgggccccgggaaaaggaacccaggcaaacacaaaccagccagcacgggggcccagccagccagcagcgaggggggacggag

SEQ ID NO: 204075 - RNA, 79 nt, Homo sapiens
accccgggccaccccaaagccaagccaccaccgccgggaggccaggcgcgaggaagcagaggcacgagcggggggagac

SEQ ID NO: 204076 - RNA, 74 nt, Homo sapiens
caacgcagagccccacccccaaaaaacagaaggagcaaggaagaaagccaaagcaaacagagcagaccaaccag

SEQ ID NO: 204077 - RNA, 33 nt, Homo sapiens
aaggaccaagaaccagaagcgacgggcgcccag

SEQ ID NO: 204078 - RNA, 67 nt, Homo sapiens
agcgcaggcaaaaaacagaagaagagaacgagccaaaaggacaaaccagacgaagaaagccaacgaa

SEQ ID NO: 204079 - RNA, 77 nt, Homo sapiens
acacccaggaaaaagagcgagacaggccccaggccacgagaccggagcccagccagcacacccagagggccagaagg

SEQ ID NO: 204080 - RNA, 77 nt, Homo sapiens
aaagaggcgacgcacaggcgcaagacacaccggaggcgacggccaggccacagggcaggagaagagaagggggacag

SEQ ID NO: 204081 - RNA, 73 nt, Homo sapiens
cacccgggagagaggggggccaccagaagcacccaagccagggagcggcaaaagcaaaagggccagaaaacga

SEQ ID NO: 204082 - RNA, 69 nt, Homo sapiens
aaacagcccagagcccaaggaccagcagcaggaaacaaccacggaacaacagacagccacgacggggca

SEQ ID NO: 204083 - RNA, 69 nt, Homo sapiens
gcagagaaaacagaaggagaccagggaagggccagaagcacagagccagccaccccacccaacccgagc

SEQ ID NO: 204084 - RNA, 55 nt, Homo sapiens
gaacaaagaaggccgcggcaaagagagagcagaggggagggacaggcgcgcgaag

SEQ ID NO: 204085 - RNA, 58 nt, Homo sapiens
cacagccgggaaggggagccaccagccccccggggccaccacagagcccgcagggaca

SEQ ID NO: 204086 - RNA, 76 nt, Homo sapiens
gggagcccgggagacaagcagaagcccggacccagaacgcacaacaacgaggcaggccgaaaggggccaacacgcg

SEQ ID NO: 204087 - RNA, 76 nt, Homo sapiens
cacaacggcccaagcaccgccgggcccgcccgcacgaaaccggccggcagaagcgcaccggcacaccacaaggaag

SEQ ID NO: 204088 - RNA, 72 nt, Homo sapiens
aaggcccagagaacagagagagaaggaacaccagaaacgggagagcacaagccaacccgcccgaggcccccc

SEQ ID NO: 204089 - RNA, 56 nt, Homo sapiens
aaaaggccggcgaggaccagaggaacggcagccagcgcagaagggcccccgccacc

SEQ ID NO: 204090 - RNA, 75 nt, Homo sapiens
agagaaggcaccccggaccacaccagaaggaaaacacaccccgaagcacaaaagcagacagcggagaagagacaa

SEQ ID NO: 204091 - RNA, 70 nt, Homo sapiens
cacagagggggaaagccaaggaaaaacggagagccacaaaaaaggaagcgaaacgagcaggagcacgaag

SEQ ID NO: 204092 - RNA, 92 nt, Homo sapiens
agcgcccggagcaagcggagccccccaagagccggaaaggcggaacaacagaggcagggaagacgaggacaacggcacagcagagcgggaga

SEQ ID NO: 204093 - RNA, 65 nt, Homo sapiens
cggggacccccgacgccaggcagcgcccccaaacgggagaagaaccaacaacggaaaaccagcgg

SEQ ID NO: 204094 - RNA, 62 nt, Homo sapiens
ccggcacccgaccccgccaccccacaccgccacaggaggccagaggggggacccagacagcc

SEQ ID NO: 204095 - RNA, 86 nt, Homo sapiens
agcaccagcaagacgcggagaagaagcagagggacagagcgaagaaccccccaagaagacgaaacccccgggccacaagaaggggg

SEQ ID NO: 204096 - RNA, 77 nt, Homo sapiens
gcggcaaacggcagagcaggccgcggcgacccagcgaggccgcaggagggaagcgcacggaaaccgccccgggaggc

SEQ ID NO: 204097 - RNA, 81 nt, Homo sapiens
aagcgaaccaggcgaacaagacgacaccgccagcaccgaccaccgaggcggagggggagaacacccagccaaaccgagaaa

SEQ ID NO: 204098 - RNA, 76 nt, Homo sapiens
acaaaggccaaggagaaggcgggaagccaagggaggccaagcagacacacgagaaacagaggacgaaggcagccag

SEQ ID NO: 204099 - RNA, 88 nt, Homo sapiens
agaaaaacacaagaacacgaaaccgaaacacgcagaaagagaggaaaaaaggccaacagaacaacagccaagcgcagaaaacaccaca

SEQ ID NO: 204100 - RNA, 80 nt, Homo sapiens
caacaacgaccaaccaagaaagcaacccagccccagagaccggaaggggcccgaaccgcgaccaacaaaaaaaagagaag

SEQ ID NO: 204101 - RNA, 61 nt, Homo sapiens
ggggaggaccgaacggcgccaggcgccaccaggggccagaaccgcccacggcccccacagc

SEQ ID NO: 204102 - RNA, 72 nt, Homo sapiens
gaggacgacgcgcaacgcgcaccaacccaggacgaaggacaggcgggcgggacccccaggcgccacagaggg

SEQ ID NO: 204103 - RNA, 62 nt, Homo sapiens
ccaagacaaaaacaaaggccgggccgagaacgaacagaccacccaaccggagcccagacacg

SEQ ID NO: 204104 - RNA, 75 nt, Homo sapiens
gcccacaaagaagggcccaacacagcgaccacagggcagaaccaacccgcccggaacgggacccacgagcagcca

SEQ ID NO: 204105 - RNA, 64 nt, Homo sapiens
gggacccccaagagcacaggcagaaggcacaagggagaacacgagacccgcacaaaaccccgcc

SEQ ID NO: 204106 - RNA, 81 nt, Homo sapiens
agcagacagcagcgacagggccgggcgccggcgagagccgcaccgccaacccccgagcaagacgggggcgacaagagaaaa

SEQ ID NO: 204107 - RNA, 70 nt, Homo sapiens
ccaaggcaaagaaccggccaagccgaccaccccccaaggggaggggaaacacagagaacggaacagaagc

SEQ ID NO: 204108 - RNA, 86 nt, Homo sapiens
acccccagcggcgccaccagccagccccggcaggcagcacaagcagcagaaccgggcgcccgggggcggagaaggccaggcagcag

SEQ ID NO: 204109 - RNA, 81 nt, Homo sapiens
cagaggagccggcccaccccgaaacggccggaccggccagccgccgcccaggaaaccccccaggcaagaggcgcaggaccg

SEQ ID NO: 204110 - RNA, 95 nt, Homo sapiens
cgggacgccaagcacccgccgcgggcggcgcgccgcagcgcccaggccggaccgggccgggcgcccgcagcccgggaccgggagcccgggaccgg

SEQ ID NO: 204111 - RNA, 71 nt, Homo sapiens
cccgcaagaggacggcgccggcagccgcggaaaaggacagaagaggaaggcggccaacacggagcaaagaa

SEQ ID NO: 204112 - RNA, 73 nt, Homo sapiens
gcccgagccagggcagcaaaagacaaacgaagcacaaaccaggcagcagggagaccagaccaggacagaccgg

SEQ ID NO: 204113 - RNA, 81 nt, Homo sapiens
acgaggaggagccccacccgcgcagggcggcgacggcggcgcgaggaccgaccgggcccgcggacgaagaaggcacccccc

SEQ ID NO: 204114 - RNA, 51 nt, Homo sapiens
cccggaaaggcccgcggcgaggagcgagcagagacaccaccccacaacacc

SEQ ID NO: 204115 - RNA, 77 nt, Homo sapiens
cgggggggagcgaagggccgaccaccggaccggagccggcccagccgcacaagagcagaagcaggggcaggaggagc

SEQ ID NO: 204116 - RNA, 75 nt, Homo sapiens
cgacaacaaaccgaagacggcagagagcagcaacccggaaacggaaaagacaaacacaaacaccccgagaccaca

SEQ ID NO: 204117 - RNA, 36 nt, Homo sapiens
gaggcacgaccaagacgcagggagagaaagaacaaa

SEQ ID NO: 204118 - RNA, 77 nt, Homo sapiens
ggaacagaccaaccgccaaaaaagccaccagcaaaccccccacagcaggcggcaccaggacgccgaaaagcgaccgg

SEQ ID NO: 204119 - RNA, 73 nt, Homo sapiens
gggcacaagagcaaagagagaaccacccgcacacagccaaagcgcaaagaaaaacaccagcaaccgacggcag

SEQ ID NO: 204120 - RNA, 77 nt, Homo sapiens
aaggggaaggacgcgcgggcccaacaaggcgcaccgagcaccacgacgggagcgccaagcccaacgcccagggcccc

SEQ ID NO: 204121 - RNA, 78 nt, Homo sapiens
gcgccacgcacagcgaggggccaaggcagaagaaacggagaagggcaaaggcgaaggggcgccgaaccgagcccgaag

SEQ ID NO: 204122 - RNA, 69 nt, Homo sapiens
gcaaggccagccccagggaggcacagggcgaaacaccacacccaggccgacacaagaaggagaaaaggg

SEQ ID NO: 204123 - RNA, 71 nt, Homo sapiens
cccgcgcccccagcagccggaaacgcgagcaacgggagagagacgggagaagacgggagggcccaaacccc

SEQ ID NO: 204124 - RNA, 72 nt, Homo sapiens
aaagccggcgggaggggggcaaggagaagaccgaggcgacacgggaaacgcacccgcacagagcgcagaacg

SEQ ID NO: 204125 - RNA, 75 nt, Homo sapiens
cgagcgagcggcgcaccagcacgaccccaccggcggcgggccggaagcagagcgcaggcgaccggcccgaggacc

SEQ ID NO: 204126 - RNA, 68 nt, Homo sapiens
gaccgagcccaggagcgccacgcgcggaaggcagcgcccagcagcgcaggggaaaaagagccagaaca

SEQ ID NO: 204127 - RNA, 74 nt, Homo sapiens
ccccagaaggaacccaagcaaggaaaaagccaaaccacccaccgcccccaagggcaaagcccagagcaagcccg

SEQ ID NO: 204128 - RNA, 57 nt, Homo sapiens
caagaaaggcaacaaaaccacgcaggaccagggaagacacgggagcgccgccgccgg

SEQ ID NO: 204129 - RNA, 67 nt, Homo sapiens
gagacagcagacgcaccaaagggacagaaccaaagcgagaacaagccaaagacagaccgccagcgca

SEQ ID NO: 204130 - RNA, 72 nt, Homo sapiens
cagggcccccaaacaaaggcgcagccgggcacagaagacaagacggaagcgaacacaacgacggcacccgga

SEQ ID NO: 204131 - RNA, 73 nt, Homo sapiens
aggcccggccacacgcagcgccacaaacaagaggaccagggaggggaggcaagcaggggggcaaaggaaagaa

SEQ ID NO: 204132 - RNA, 44 nt, Homo sapiens
agccagacacaggcagagcaagcgcacaggagcagccgcaacag

SEQ ID NO: 204133 - RNA, 79 nt, Homo sapiens
gccgaagcagaagaaggggaaggcggagcccccaagacacggaccagacagcaggaaaagacaagaaaaggcgccaaca

SEQ ID NO: 204134 - RNA, 77 nt, Homo sapiens
cgccggggaagaaggaaggaggggcgccgggggccccgaaggcaccacgcagagcaggacagccgggccagcacgac

SEQ ID NO: 204135 - RNA, 103 nt, Homo sapiens
caacgaaaacaggggccaaagggagagggaagccacaacaagccaaagaagaaggaacgcacgagagagaaagggcacacagagaaccaagaaagcagaccac

SEQ ID NO: 204136 - RNA, 74 nt, Homo sapiens
acagcggggaccacccacgacccgagcgaggagcgacgcgccacgccggccgggaaggggaccgaccgacaacc

SEQ ID NO: 204137 - RNA, 86 nt, Homo sapiens
ggaaacggagcaggagaagccccggggggaagagcgccaccggcggcccgcaagaagaccgagaaggaagagagaaggccacgccc

SEQ ID NO: 204138 - RNA, 51 nt, Homo sapiens
agggcagaaggcaccaaaggcaggagggaaggccaggacaggggaacaggc

SEQ ID NO: 204139 - RNA, 81 nt, Homo sapiens
cgggacgggggggcggcccggccccgcagggaggcccaggaacacaccaccaggaaaagccgaaggaagcgacaggaaggg

SEQ ID NO: 204140 - RNA, 132 nt, Homo sapiens
caagcacacaaccccaccgacgacgccacacgagaagcgccaggaggaggaggagggggcgcaagagggaccagacgggggcggggcccagcgacacggacaaggaccgcaccaagggcccggccgaggcgg

SEQ ID NO: 204141 - RNA, 79 nt, Homo sapiens
ccaaagaagccacagaacaggggaggcagccaggaggagcgagcgacagaaaccaacccaagagcgcccagcggaaagg

SEQ ID NO: 204142 - RNA, 74 nt, Homo sapiens
agaggaagaaaggacagggagagaagccaagaaagacagacggggaccgaaagccaaggggacccgcgaccacc

SEQ ID NO: 204143 - RNA, 76 nt, Homo sapiens
gccgggcggggaggaacaagaaaaccggcccgaggggacgggggaacccggggccagaggcaccaagaagagcccg

SEQ ID NO: 204144 - RNA, 53 nt, Homo sapiens
cagacaagcggagaacaaacccgcccaaccgagcaaggaaaagcaacaagggg

SEQ ID NO: 204145 - RNA, 86 nt, Homo sapiens
accagccccggacgagaagcgcagcaacggcgggggaccacgagagcaaacggcgaggaaagagaggagccccggaaagaaaagga

SEQ ID NO: 204146 - RNA, 69 nt, Homo sapiens
aagacaaccaccaacacaagaaaggcaggaacagcaggacaggacagggccaggcgagagccaggcgaa

SEQ ID NO: 204147 - RNA, 33 nt, Homo sapiens
ggacaggaaaaaaagagcaagaagaaaccgacg

SEQ ID NO: 204148 - RNA, 105 nt, Homo sapiens
caccacccacacccacagaacaccggcaaggaccagcaggacagccagcccagagaggaaggccaaaacagaagaggcaaagcccagccacagcagcagcccagc

SEQ ID NO: 204149 - RNA, 128 nt, Homo sapiens
ccaccaccacgccagccgcaccagccgcccaagccgcacagccgcggcggcagcagcaggagaggcgaccccgcacacacacccaccagccacggcagcccagcggggacccagccgccccgcccgcg

SEQ ID NO: 204150 - RNA, 76 nt, Homo sapiens
agacgcgggcgagcggagcgcaacaccgcggggggagacggcgcggccgagcccggagagggaaagaagcagaagc

SEQ ID NO: 204151 - RNA, 78 nt, Homo sapiens
gggaagaaggagaccgagcagccccagccccgcccaacagcacagcagacaggccagcaaaacccaggggggaccagg

SEQ ID NO: 204152 - RNA, 79 nt, Homo sapiens
agaggggcgagaacgccacgcgggccggcgaaagcgccccccacgaccgaaagaggacagcgcccaagcccagaagcgc

SEQ ID NO: 204153 - RNA, 36 nt, Homo sapiens
gggcccgcgacccgcaggggccggacaggacaccac

SEQ ID NO: 204154 - RNA, 78 nt, Homo sapiens
ccgggcggggccgcgcccccccagggaccagcaccggcagcaccaaagaccgcacagaagcagaagaaccgcccggag

SEQ ID NO: 204155 - RNA, 77 nt, Homo sapiens
caacgcggaccacacccgggagagaggggggccaccaggaccggaaagggggcgggccggcagaagcacgggagacc

SEQ ID NO: 204156 - RNA, 74 nt, Homo sapiens
caaagggaaggcagcacgggggcagggcaaaacacacagcgaggcgcggagcgggaaagacacggagcaggccg

SEQ ID NO: 204157 - RNA, 74 nt, Homo sapiens
agagcccaacaccacccgagagccccaagggagagggaaccagcccagggacaggccccaagagcaagaaagac

SEQ ID NO: 204158 - RNA, 43 nt, Homo sapiens
agcgaaggagcggagccaccaggcgagagccacagaaggagga

SEQ ID NO: 204159 - RNA, 74 nt, Homo sapiens
cccaaggaaggacccgccagacagccaagcaccgaacaggacaacacaaacaaaaaagagagggagaaaaacaa

SEQ ID NO: 204160 - RNA, 82 nt, Homo sapiens
cgcggcgggagaggaacgcgcagccagccgggaagcccaggggcccgcgcgcgggggcgggacccacaccagaagggagggc

SEQ ID NO: 204161 - RNA, 77 nt, Homo sapiens
accaggcaacaggcagaaaaagaaccaggagaagagagcggacccacaccagggaagacaggggagagggggcacca

SEQ ID NO: 204162 - RNA, 65 nt, Homo sapiens
gcgggacagaggagcgggcagcaagcggaaacgcggaagagagcagcgaagcagggcgagcggcg

SEQ ID NO: 204163 - RNA, 79 nt, Homo sapiens
gcgcgcccggccgggccgagcgccgagcagcacggccaagaggcggacggaaagaaggacgccggcagggaccagcaac

SEQ ID NO: 204164 - RNA, 80 nt, Homo sapiens
agaaacgcacaggaagagcgagaaacgcggaaagaagcagaagcggaggagcgaagacaggcggcggaggaaacaacagg

SEQ ID NO: 204165 - RNA, 72 nt, Homo sapiens
cagcaagacccacggaccggggcaggaaaggaaccaggagagagcagccagaggccagcaacacccaacaca

SEQ ID NO: 204166 - RNA, 72 nt, Homo sapiens
ggagaacacaccgagccagcagcagaaacagaagggagcgcgcaaggaagcgcgggggcaggccgggcgacc

SEQ ID NO: 204167 - RNA, 80 nt, Homo sapiens
ccagccacacagacagcaggagccacgcagcggaaaaacaagaaggggcaaccccaaacagccacaaaccccggaaagac

SEQ ID NO: 204168 - RNA, 67 nt, Homo sapiens
ggaaagaaggaggcaaaaacagcgaggcaaaggagcccgggcagacccaaacaaaacggccaaagag

SEQ ID NO: 204169 - RNA, 78 nt, Homo sapiens
gccgggcagcgagaagaggcacagaagcccccgagcgcccacagcagaaggaggaggccccccggcgccgcccccggc

SEQ ID NO: 204170 - RNA, 77 nt, Homo sapiens
gagcaaagggcagcggcggagccgccaaggcggcgcagcggcaaaagagcggaaaaggcacaggagcggggagagga

SEQ ID NO: 204171 - RNA, 79 nt, Homo sapiens
cacaacccgcacggccacagcagcgggccagccacacgggaggccagccagacggacaagcaaacaccacgcgaagcga

SEQ ID NO: 204172 - RNA, 78 nt, Homo sapiens
agggacaagcgcagacccgggggagcccggggagcaagaagggaccacaggaccacaccagaaaccgcaaagagacag

SEQ ID NO: 204173 - RNA, 68 nt, Homo sapiens
gaggaggccaagcacaaccggagaagcagacgccacccccagcccagaagggacaagagaaccgcacc

SEQ ID NO: 204174 - RNA, 70 nt, Homo sapiens
aaaaggaaacaagaccggcacaggccccgcaaggccaaacacacaggaacgccagaccccagccgaggga

SEQ ID NO: 204175 - RNA, 78 nt, Homo sapiens
agcacaagggcaccacgcaaacagggaaacaggcagggacccgggcaggcagcacgaagggagaaggagacccaggag

SEQ ID NO: 204176 - RNA, 109 nt, Homo sapiens
gcagaacagccggacagaaaccacggaaaagaccaccaagcccaacaacaggggcgacagacaaaggcagaaaagcgagccaccccaggggaagaacacagacgcaaca

SEQ ID NO: 204177 - RNA, 61 nt, Homo sapiens
ggagggaacccgcccccagggagggaacaaagcccacagcaccgacgcagccagcaaaggc

SEQ ID NO: 204178 - RNA, 76 nt, Homo sapiens
gggccaggagcggggccacgccgaacccagcacgagaggccgcggggacagacacgaggaaaagggaggaagcacc

SEQ ID NO: 204179 - RNA, 72 nt, Homo sapiens
gccgccgccccacccggggcaggggccagggccagagcggggaggagacaaaggagacgaaaaaaaggccaa

SEQ ID NO: 204180 - RNA, 69 nt, Homo sapiens
aaggcgacaggccgagacggagcagcaaagagagccaaaacccccgccaacagagcagacacacaaagg

SEQ ID NO: 204181 - RNA, 54 nt, Homo sapiens
accccaagccaagcccaagacaaaaacggcgcaggaccggcccagaagccccgc

SEQ ID NO: 204182 - RNA, 63 nt, Homo sapiens
gaagccgagaggccggacgagcacccaacgagaggacagaaaacccagagcaaagaaggcaca

SEQ ID NO: 204183 - RNA, 77 nt, Homo sapiens
gacggagacggggcgaaacacccaaaaggcagagagcaagcaaagccagaaaagcaaaccaaagggagcaacaagaa

SEQ ID NO: 204184 - RNA, 69 nt, Homo sapiens
cgggcagaccacggagacggagccaggggagaaacacaaaaagacagaaacggggcacaacgggagaaa

SEQ ID NO: 204185 - RNA, 69 nt, Homo sapiens
gccaagcaggaccacccaccagccaccaggccagagccagaggccacgcgaccgccagaacgggcggaa

SEQ ID NO: 204186 - RNA, 82 nt, Homo sapiens
acgaccaagccagagaacagcccccacgcagcccagaaggagcacagcaagcgggagcaggcagaccaaaggaacagaagcc

SEQ ID NO: 204187 - RNA, 48 nt, Homo sapiens
gaggaacccacgaaaaggagggagccaaagggaggaagcgcagcggga

SEQ ID NO: 204188 - RNA, 72 nt, Homo sapiens
gaggggacgcagagacaggcggacaccccacgcgagcaccacccgggagcagagacgcgcaccagaagaagg

SEQ ID NO: 204189 - RNA, 74 nt, Homo sapiens
agaggcccaaagaggcgcaagagagaggagggggcaccgagcaacgagggcaggaacgagggaaaccgccccac

SEQ ID NO: 204190 - RNA, 69 nt, Homo sapiens
cgaaaagaaaggggggagagccacaggcaaaaggcccagcaggggcagcagagcgggcaacagagagcg

SEQ ID NO: 204191 - RNA, 85 nt, Homo sapiens
ccaccgagcacaaacccacgaagccaacgcccaggcaaaagcagaccggaaaacccaccggcaagaccacacccgaggggagccc

SEQ ID NO: 204192 - RNA, 80 nt, Homo sapiens
cacggacggagagaggcaaagggggacggacaggagagaaggaaccggacgacgaacacaggcccgccgccgggccccaa

SEQ ID NO: 204193 - RNA, 73 nt, Homo sapiens
aggcaaacaaggaccgggaaagaggagacaaaccccagacgcgccggagggccaggcaagaagagaaaggaag

SEQ ID NO: 204194 - RNA, 77 nt, Homo sapiens
gcccccggcccagccgcgccgcgcgcagaccagccggccagccccaaacaagccaggacaaaaccaggcagaaccaa

SEQ ID NO: 204195 - RNA, 74 nt, Homo sapiens
aaggaaaagagaagggaacgaaccccacaggcagcagagaaagccgaacagaacagcacgaacaagagcaggaa

SEQ ID NO: 204196 - RNA, 81 nt, Homo sapiens
aacaagcagccaagcccagacaagccccagggaagccacagcaccccagcacccagacaccagcccccggacaacccaagg

SEQ ID NO: 204197 - RNA, 80 nt, Homo sapiens
gacagggggcaccacaacccaccccaagccgacacagcccccgaggagcagccacaccagccccaggcgcccccccacgc

SEQ ID NO: 204198 - RNA, 71 nt, Homo sapiens
cggcccccgccccagcccgccggcggcggcgggacagggacaagcgcacagcggagaaagcagcgcggcca

SEQ ID NO: 204199 - RNA, 65 nt, Homo sapiens
cagaaagcaggcgaacccgcggcgcaaaacggggaaaagaaacaaacaacaagaagaaggacaag

SEQ ID NO: 204200 - RNA, 71 nt, Homo sapiens
cgggagaggagaccagaacgaacccccccccccgagacagggccaggcccaggcgcgaacccgggacaagg

SEQ ID NO: 204201 - RNA, 82 nt, Homo sapiens
ccaggcccgcgaccgccgccagcgcccgaggccggcccggccacccccgggcccgcgccccaggcgagagccccgcaacgac

SEQ ID NO: 204202 - RNA, 65 nt, Homo sapiens
ggaagggagaagcaagaggacacgaagacacagacggccgacgccaccgccgagcccagaccgga

SEQ ID NO: 204203 - RNA, 66 nt, Homo sapiens
agaaaaccccccagaaagaggccaaagcaagaggagagcggagggcagaaagaggggaacgaaaaa

SEQ ID NO: 204204 - RNA, 79 nt, Homo sapiens
gcacccgcgccccagagccacgaaggcaccgacgcacagcgaccaccaacagaccgaaggaaacaggcaaaggagcgac

SEQ ID NO: 204205 - RNA, 76 nt, Homo sapiens
aagaggagcgaagaaggaaaaccaaagacaggaggagcccaaaggggggccgcccgcccaaggcaggaagaggggc

SEQ ID NO: 204206 - RNA, 72 nt, Homo sapiens
aacaaccgccagggccgggaacaagcgaggcacaccaccgaacccaccccagccacaccaccacaagcgggc

SEQ ID NO: 204207 - RNA, 56 nt, Homo sapiens
caagagccaaaccagagcaacaggacccaaagacaggaccacgcaccagcagagaa

SEQ ID NO: 204208 - RNA, 81 nt, Homo sapiens
caccgggaaggcggggaggaggccccaaagggcgagagaaccaggagcggcagaccgccgccaggaggaggcacgcagccc

SEQ ID NO: 204209 - RNA, 70 nt, Homo sapiens
gaaaaaaggagggaaacaagcgcaaggaggcaaggacacggagccagcgaaggacggagaacgagccgcc

SEQ ID NO: 204210 - RNA, 62 nt, Homo sapiens
gcaggacacagagggccagggaaacagacgaaaacccggcgccgacacggccacacagaccg

SEQ ID NO: 204211 - RNA, 76 nt, Homo sapiens
gaaagcgagcagagcccgcgaacaagacaagcagacagagacccaccaaggggggaaaaggacagcgacacaggga

SEQ ID NO: 204212 - RNA, 71 nt, Homo sapiens
accccgcggcgggaggagccgccccgaggcgcgggacaaccaacacaaccaaagagaagaaaacgcaaaga

SEQ ID NO: 204213 - RNA, 51 nt, Homo sapiens
ccagagacgggagaggaagaacacaggaccaggaccgccccccggccccgc

SEQ ID NO: 204214 - RNA, 103 nt, Homo sapiens
cagcgagccgcagcagccacccacgagcccggcaaaagcgcacaaacgcccaagacccccagcaccccgggcagcggagaggccggcccggagcaggagcagc

SEQ ID NO: 204215 - RNA, 54 nt, Homo sapiens
ccccagaggacaggcgggccagcggcgcccgcagacgcagaagaccgcagagcc

SEQ ID NO: 204216 - RNA, 81 nt, Homo sapiens
gagaagaaggaggcgcagggcccccacgcgaagagcccccaggagcgacgggaaccacaacgaaggaagaagaaagccaag

SEQ ID NO: 204217 - RNA, 58 nt, Homo sapiens
cgcgaccgcagaggaaacaccaccgagagcgcaaaggacagggacaagaagaaacgga

SEQ ID NO: 204218 - RNA, 63 nt, Homo sapiens
agaccgcagaaggccggagacaccagcaggccacaccacgaggcgagccaagagcgaggcagc

SEQ ID NO: 204219 - RNA, 79 nt, Homo sapiens
ggaaccacaagcaggggcaagggaacaaccaagacaaacgcggcgcgaggaagaggacacagacagacacaaaagaaaa

SEQ ID NO: 204220 - RNA, 87 nt, Homo sapiens
agccgcacaccggccgcgggaagacaacaggcgcggccccaaggaacgcacccaggacgagaagcgccgccggaggcccggacgccc

SEQ ID NO: 204221 - RNA, 83 nt, Homo sapiens
ccgggagaccgcaagccggagcgaggccaccgaggagggcgggacccaaagacaggaccacgcaccagcagagaaggaaagca

SEQ ID NO: 204222 - RNA, 71 nt, Homo sapiens
gcccccggcacagaaacagaaccccaaacccaccagaaaagccccagcgagcggcacccccacgggaaccc

SEQ ID NO: 204223 - RNA, 67 nt, Homo sapiens
gaccccagcaccccccaaagggcacagagacagagcagccgccggacaaaagggaccccaccgaccc

SEQ ID NO: 204224 - RNA, 95 nt, Homo sapiens
cagcaggcccgggcgaagagcccccccccaaggacagagcgggagccaccagcgccaaagggaagccaggagcccgggggcacggggagaagacg

SEQ ID NO: 204225 - RNA, 76 nt, Homo sapiens
aagcggccaagcacaaagagcgccccacgagagaacggcacacgcgagcgccgccgccagcgcgcacgcaaggagg

SEQ ID NO: 204226 - RNA, 78 nt, Homo sapiens
ggaaaacgaacccaaaacaaaaccgaaaagcaccgagcagaaggcccgaacaggcacgaaaaaacccagcgaagacca

SEQ ID NO: 204227 - RNA, 75 nt, Homo sapiens
cccagaagacagagggcgagaagaaaggagcgcacccacacaagacagaacacgggaacagaccgaggaggggag

SEQ ID NO: 204228 - RNA, 69 nt, Homo sapiens
agccagaaggccgaggaaccaccgggaccaggccgcccgaggcgcggaaaaagcgcccgaaccgcacga

SEQ ID NO: 204229 - RNA, 82 nt, Homo sapiens
ggggaggcacggcagcacccaggaacacgaagccccgggcaccccgggggagcaggaaagggcaggcgaacagacaagcaga

SEQ ID NO: 204230 - RNA, 83 nt, Homo sapiens
aagagcaacagaagaccagcgccacaccagaagggcggcacggcgaacgacgacgggcaacggcaaggaccccggcagccgca

SEQ ID NO: 204231 - RNA, 87 nt, Homo sapiens
gccggccgagaaggcagaggcggagggccagacaaggggaacacaagaggagagaaggggaccgcagggagaaaaggccagagagag

SEQ ID NO: 204232 - RNA, 79 nt, Homo sapiens
ggaaacccaccccacacaccagccgacgagaccccaaaacagagcaaggcagacacaagcagaaaacaccgaccggagc

SEQ ID NO: 204233 - RNA, 71 nt, Homo sapiens
accggcgaagccgggccaaaggacgaagaacccacagagggcacccggcgcgcacacaaagaaccgcagaa

SEQ ID NO: 204234 - RNA, 75 nt, Homo sapiens
ggcgacgagaacagaagacccaacaaaaccaggcagggccaagagagaaaccgaagaaggcccacacacacagga

SEQ ID NO: 204235 - RNA, 68 nt, Homo sapiens
agaccgacaggaggccaaccacgagaaggcaaacgaaaggacccacccaggaggcagaaacacgccgc

SEQ ID NO: 204236 - RNA, 80 nt, Homo sapiens
ggcaccaggaaggggacgggacggacgggaggggcgccgcggcggcgggcgcccccaggaggaaacccggccggcgggca

SEQ ID NO: 204237 - RNA, 62 nt, Homo sapiens
agccccgcgccgccgaccccccggcgccgcgccggcggcggcccgagcagccccgcccaaca

SEQ ID NO: 204238 - RNA, 63 nt, Homo sapiens
ggcgcgcgggggcgggcccgggacgcggcagccccaagccacagacggggccggcacagcccc

SEQ ID NO: 204239 - RNA, 55 nt, Homo sapiens
ggccccagaccagaccagaccccggggaaaccacggggaaaaagcgggaccgcag

SEQ ID NO: 204240 - RNA, 75 nt, Homo sapiens
gggcaacacgcccccccagagggaccccagggcaggagggcgcccccagcgcccagccaccagagcccacgccac

SEQ ID NO: 204241 - RNA, 81 nt, Homo sapiens
gccaccaggcagcagaaagagaaccggccagccagcacaaaagaagcaagacaccagcagagaagaagaaaggcgaagacg

SEQ ID NO: 204242 - RNA, 86 nt, Homo sapiens
gcaggggcgcagcgcggccgcggagacagggagacccggggcggagagggagccaggaccccagcgaggaccccgaggacgggcgc

SEQ ID NO: 204243 - RNA, 78 nt, Homo sapiens
gagaaaaacaagggaaagaaaggacagagagaaccagcagcaaagcaaccaggaacagagacgccaagcccgggcccg

SEQ ID NO: 204244 - RNA, 70 nt, Homo sapiens
cggcaccgccaggagggcgacaccagcgaaaagaggcagacagcccggggcacaaaggagcccgagccga

SEQ ID NO: 204245 - RNA, 77 nt, Homo sapiens
ccggccagcacgggcagaaagagaacggccccacccggcaaccccgaccagcccgcaggacggcgcggggagacgac

SEQ ID NO: 204246 - RNA, 70 nt, Homo sapiens
agaccgaagcccaaagcaggaaaagccaggacgagcgaggaagcagcaacaggaacaaccgcagggaaca

SEQ ID NO: 204247 - RNA, 79 nt, Homo sapiens
ccaggacacagaaggcgaaacagaaggcggaggcagaacgaaagagaggacaagaggaaaaacagcgagggaaaagcag

SEQ ID NO: 204248 - RNA, 78 nt, Homo sapiens
cagccgccgaccacggcgacggacacgaggagcagaagcaggaaacgccaagagcgagcggacgaggagcccggaaga

SEQ ID NO: 204249 - RNA, 77 nt, Homo sapiens
gaacccagcacgagaggccgaggcgaaagggcagggcaacgagacaagaagcaacagacaacagacccacagacaag

SEQ ID NO: 204250 - RNA, 64 nt, Homo sapiens
gcaacgccaacccagagaccaccccacagaaacggcgcccgaagcggaacaagggggcgcaaca

SEQ ID NO: 204251 - RNA, 42 nt, Homo sapiens
gcccaggcccgcgggcccaggccacacaacgagcagaaaagc

SEQ ID NO: 204252 - RNA, 72 nt, Homo sapiens
ccacggagggacccacccaaaagcacgagaagcccgccaacggggaaagcagaccaacacgccaaggaaaac

SEQ ID NO: 204253 - RNA, 78 nt, Homo sapiens
ggcggagagcggccgcgggcgacgggccgaggggaaacaagggccggaacccagggcagcagaaccgaagaaagggcg

SEQ ID NO: 204254 - RNA, 111 nt, Homo sapiens
gagaccacagagcccaagcagacaacaaaaacacaaaacggcgaccaaaaacagggaaggcgaacgaaggagggcgagggagcaaggacaccgcggagcacggaggacacg

SEQ ID NO: 204255 - RNA, 91 nt, Homo sapiens
caccgcgggcgccaaggggagcagaaggaccggacacagggaaaccagcccagagaagacgggagcccccggggcccgcccagcaagccag

SEQ ID NO: 204256 - RNA, 78 nt, Homo sapiens
gggagcggcccacgacgggacacgccccggagggacgcaaagaagcccccagccaggccaacgaaggggaagacaggc

SEQ ID NO: 204257 - RNA, 73 nt, Homo sapiens
agcggaggcgggcaagcagcccgacgccagcagagacgagacggggacagaagacccacgccgagccgcggca

SEQ ID NO: 204258 - RNA, 71 nt, Homo sapiens
aaaagcagaccggccgagaagaagcggggacggcaaaacagccaacggaacaccaaggaaaaagaagaaca

SEQ ID NO: 204259 - RNA, 84 nt, Homo sapiens
ccgggagccgcaaggcgagagcgcaaagcggaagaagagcaccaaaaagaacagaaaagaaacccacagccacggagaaaaaga

SEQ ID NO: 204260 - RNA, 54 nt, Homo sapiens
gcagcaggaagcacggcgggcgaaacagggaaagggagcagcaccggccacacc

SEQ ID NO: 204261 - RNA, 78 nt, Homo sapiens
aaacaaggaagaggaaaagaccagggagaaagagaagcacagaagaaaacggcaccgagaggaagacagaaggaagca

SEQ ID NO: 204262 - RNA, 85 nt, Homo sapiens
cgaagggaaggccagcagcgcgcggagaagaacggggagccagggcgaaccgaccaagaacaacacccagagggccaggagaagg

SEQ ID NO: 204263 - RNA, 74 nt, Homo sapiens
aaaagcgaaaaaccggagccaacgaaacaaaaagcaggccccagggaaaggaccgaggcaggaaagaggccaga

SEQ ID NO: 204264 - RNA, 73 nt, Homo sapiens
ccagccccgaggcagacagccgagacaccggagccgcacagcccggccaacgcaacagggagcccacgcaaga

SEQ ID NO: 204265 - RNA, 79 nt, Homo sapiens
cgaggacacagaaccagagccaagggcgaaccaaccagaagcagccacacaagggcagaacagagcagcccaaggcaca

SEQ ID NO: 204266 - RNA, 56 nt, Homo sapiens
aacgaacccaggcgcacaggagaagagacccaagaggaaggaaaagggcagaggca

SEQ ID NO: 204267 - RNA, 86 nt, Homo sapiens
cggcggccgcgcagaggcagcagcagccgcggagcagagccgccggggagggagccagaagcaacgagggggggaggacgcaccgc

SEQ ID NO: 204268 - RNA, 72 nt, Homo sapiens
ggcagagggaaaaaagagaggagcgaacgagacagaacaggaaaaagggaagcagcgagcccggagaccggg

SEQ ID NO: 204269 - RNA, 84 nt, Homo sapiens
gaggaggagggcaggaaaggaacccacaacgaagggaagccacggaagaaagccggaaccaaaaagaagccccagagccggggc

SEQ ID NO: 204270 - RNA, 56 nt, Homo sapiens
agaaggaccaagaaccaggagaggaaaaggcagggggcgaaaagacgaagagaaga

SEQ ID NO: 204271 - RNA, 80 nt, Homo sapiens
gaggagaaacgcggccgggccggcaaacaccagcaacacccgggacaaaaacgggggccaccacccccaccgaaccagca

SEQ ID NO: 204272 - RNA, 60 nt, Homo sapiens
aaaaacacaaaccaggcaacaggcagaaaaagaaccaggggagcgggaggggccaaccgc

SEQ ID NO: 204273 - RNA, 82 nt, Homo sapiens
acagcgaggaaacagagcaggcagcaaggagccgccccagccgaaacgaggaagcaggagcggccaacagccggagcgaccc

SEQ ID NO: 204274 - RNA, 64 nt, Homo sapiens
ccggagacagggcggcaagaggagcagcacccaacaccgaaagaccccgccgggcacccagggc

SEQ ID NO: 204275 - RNA, 83 nt, Homo sapiens
gggacgggcccgcggcgagcgagcccgaggacaaacaacagaccaaggggcggaaaacccgaagccaggaacagcggcaagcc

SEQ ID NO: 204276 - RNA, 56 nt, Homo sapiens
cggcagcgagccggggccccgccggcccaggccgccaggcacagagaaggcaaacg

SEQ ID NO: 204277 - RNA, 73 nt, Homo sapiens
agaccgggccccagaagagccccggggagaagaaggccgagaaccacacgaggaaaagacacgaagggaggcg

SEQ ID NO: 204278 - RNA, 74 nt, Homo sapiens
cagacgcagggcgcccccggcgcaaaccagcgaaggccgaagaaaaagaaacagcccggcgaggacccaagaac

SEQ ID NO: 204279 - RNA, 65 nt, Homo sapiens
gggaggacgccgggacaccggaagccgagaaaggacagggcagaccgccagcagcacagcaagcc

SEQ ID NO: 204280 - RNA, 70 nt, Homo sapiens
acaccacccccgaccgccacccagcggaaccaccccccacagcgcacgagggacccagagacagggcggc

SEQ ID NO: 204281 - RNA, 71 nt, Homo sapiens
ggcgccccccccccgaggcgcccgcagggccaggacggagacaaaggacaggcagaaaccagaacaggcaa

SEQ ID NO: 204282 - RNA, 78 nt, Homo sapiens
gggggagaagaaaggggccgggggacggaggagccccggcggagaccacgcaaggccacagcccggaccaagagacga

SEQ ID NO: 204283 - RNA, 86 nt, Homo sapiens
ccagcaaaagcgggaagaacaaaggaaggggagcccgggacccccgggggcgcagcccaaccacgaagaagaagcgagcggcgcag

SEQ ID NO: 204284 - RNA, 83 nt, Homo sapiens
cacggggcacggaccaacgggaacaaaacacacacccgcagacaagaacggagaggccgcacccagaagaggaggcgacagaa

SEQ ID NO: 204285 - RNA, 85 nt, Homo sapiens
acgaaggcaccgacgcacagcgaccaccaacagaccgaaggagacggcgaagaacagaggaacaacgccaacgacaagacgagga

SEQ ID NO: 204286 - RNA, 78 nt, Homo sapiens
ccggcgcgcgaccgcgcaaaacggagaaagacagcaaagaaaaggagaagaaaggaaaaaaacaaccccgggcacccc

SEQ ID NO: 204287 - RNA, 76 nt, Homo sapiens
gccgccgcccgggaccggcgagaaggccacaaccaagagaaacaaccaacagaaaggccccggagcagcgcgaccc

SEQ ID NO: 204288 - RNA, 72 nt, Homo sapiens
ggggagagcaaccacaaaccacacaacagagaaggccaaacagaggaaagagcggagcccgccagaaacaga

SEQ ID NO: 204289 - RNA, 70 nt, Homo sapiens
gagagccccgaaaaagacaacagaccaaaggagacccccagcagaggcgaaaaagcgacagaaaacaagc

SEQ ID NO: 204290 - RNA, 49 nt, Homo sapiens
caggggaaaaccaaagaccgacaagacccgaaggcccggcgggggcaac

SEQ ID NO: 204291 - RNA, 67 nt, Homo sapiens
gccaggcgaaacaggagacagaaggaccagcgaccgagaaacagaagcggagagacagggacaaggg

SEQ ID NO: 204292 - RNA, 52 nt, Homo sapiens
aaggggcaacaaaacaggcagaaggggggcaaaccgagggacacccagcgag

SEQ ID NO: 204293 - RNA, 60 nt, Homo sapiens
ggaaacccagcacaggggaaaaggccaggccaggagcgggaccaagaaaggcccagggac

SEQ ID NO: 204294 - RNA, 76 nt, Homo sapiens
accggcgaggggcaccgcgccagacgcccgagaagccaggcagcaaacacacagacggccaccaccgaccccggag

SEQ ID NO: 204295 - RNA, 54 nt, Homo sapiens
ccgaaacgccgaaaacgagccgggagaaaccaaagggaggcggagagaacaaga

SEQ ID NO: 204296 - RNA, 58 nt, Homo sapiens
gccggccccaaggaaaaccacccgcagcgaaacacagggggagacgaaccggcaagga

SEQ ID NO: 204297 - RNA, 59 nt, Homo sapiens
gcggagcgccacagccaggagacacgcgcccggggacagcccggacgaagaggaccgag

SEQ ID NO: 204298 - RNA, 59 nt, Homo sapiens
gaagcccacgccgggacccagcgcagggcggagaacggaaaagcaccaggaagcagaga

SEQ ID NO: 204299 - RNA, 30 nt, Homo sapiens
gcacgggcagagccagccccaggcgccccc

SEQ ID NO: 204300 - RNA, 80 nt, Homo sapiens
ggaacagacaagcagagccggcaccacaggaagccgagcaggaggcccacaagcggcacccaccaagacaaaccagcaag

SEQ ID NO: 204301 - RNA, 80 nt, Homo sapiens
cccacgcggccagcgaaaacgcccagaggagcaccgccccaggcggagacaaggcagaccagcacgcaaccccgcccggg

SEQ ID NO: 204302 - RNA, 57 nt, Homo sapiens
acgggccgcgaggggaagaggaagcaaagccaaggaagggaccacagaccagcacgc

SEQ ID NO: 204303 - RNA, 72 nt, Homo sapiens
ggagacaaggaccgaaacagaaacggaacaccaagacaggagcgcgaaaggggaacccacagggggcagcgg

SEQ ID NO: 204304 - RNA, 79 nt, Homo sapiens
cggcccagccaagaagaggacaagcccagcgaagcaggccggccggcgccacgggagcgcaggagcggaagaagccaag

SEQ ID NO: 204305 - RNA, 53 nt, Homo sapiens
acaacgggacccagaagagcccacccgggaacgccagaggcggcaaaccagga

SEQ ID NO: 204306 - RNA, 77 nt, Homo sapiens
gaagccggccaggaccggaggcggcggcggcgagcggccggggcaggccggacaagacgcagagagccgacagaccc

SEQ ID NO: 204307 - RNA, 78 nt, Homo sapiens
cgcacaacgcaggaacaccgcacgcgcggaggaggacccagagagggaccagggccaaagaagagccggggggcaggc

SEQ ID NO: 204308 - RNA, 76 nt, Homo sapiens
cacgccgcccagacaccaggccgggcggccccggagggcccgcaccccaggaggaagaagacagaagagcccgcga

SEQ ID NO: 204309 - RNA, 79 nt, Homo sapiens
ccgcccgggcggggcggcggcgacgcggaccgcggacagcgaacccggaggaaagaccacagcaagaccacgcccccag

SEQ ID NO: 204310 - RNA, 62 nt, Homo sapiens
acccgaccgcccccagaggccgggccgcacccccgaaagaccacagcaagaccacgccccca

SEQ ID NO: 204311 - RNA, 73 nt, Homo sapiens
aacgaacaagcaccggaggaacccgaaaaaggacacaccccaaccaaagagcacagggaggagcgcagaaccg

SEQ ID NO: 204312 - RNA, 62 nt, Homo sapiens
ccggcgacggacgcggcgcgcgaccgacacgaaggcagcgccccccgggccccgagcacccg

SEQ ID NO: 204313 - RNA, 35 nt, Homo sapiens
aagacagggggccaacacagggaagccgcccagga

SEQ ID NO: 204314 - RNA, 62 nt, Homo sapiens
ccaggccgccagggagcgccggagcacgagaagggggccagcgcaggcggccaaaccaggac

SEQ ID NO: 204315 - RNA, 79 nt, Homo sapiens
acacagaagaaaaaggggacgaagacacgaagcaggcgcacacacaaaggggagccaggaagaagacaaaacagagagg

SEQ ID NO: 204316 - RNA, 76 nt, Homo sapiens
cgccagcgccagagcgagcgccccgcccaggagaaacggaaacccgagagccaggagacgcacagagggcaacccg

SEQ ID NO: 204317 - RNA, 81 nt, Homo sapiens
gcacagccaggacaccggaaccgggaaagggagaacaaccgcaacgaacaaacaggagacagagagcaagagcaccccaac

SEQ ID NO: 204318 - RNA, 72 nt, Homo sapiens
cccgcagccagggcgaacccccgcaggaaacgagcacacgaggcccaccaccggagagaccggggagccgac

SEQ ID NO: 204319 - RNA, 56 nt, Homo sapiens
aaacaagcagcaggaggacaccaaaggaggggaagcaaggccaagccacagccacc

SEQ ID NO: 204320 - RNA, 72 nt, Homo sapiens
aaacagcaagcgagcgaaaggaagcagacaagcgacaaggccgaaccggggcagcgcgcaaggaggagcagc

SEQ ID NO: 204321 - RNA, 83 nt, Homo sapiens
cgggcgccgaggcgccacaaaaagcggcaccaaaagaaccacgccgagggaagcagagaaagcggggacagaaagcacgggaa

SEQ ID NO: 204322 - RNA, 48 nt, Homo sapiens
gaacagccccgcggcccggggagaaggccggccgagcaccccgcgccg

SEQ ID NO: 204323 - RNA, 60 nt, Homo sapiens
gaccggccaacacaggcgccaagcagccagccgggacccaacacgcaaccacagccaggc

SEQ ID NO: 204324 - RNA, 70 nt, Homo sapiens
cggagaaaaggccaagaaggcaggaaaagacaccgaagccagcggccgcagaccccgaggcccccgacca

SEQ ID NO: 204325 - RNA, 67 nt, Homo sapiens
agacaagacgagcccaccacggacagcaaacagggccgaacaaacgcaagaaaccggccccagaaca

SEQ ID NO: 204326 - RNA, 71 nt, Homo sapiens
agacaggcggcgccaccgaacagacccggaaggacggcgagggaggaaccaaggaaacaccgagccacagg

SEQ ID NO: 204327 - RNA, 68 nt, Homo sapiens
gaaaaaaaagcaaacaacgaggagcgccaaaacagccacagccacgaaggagaagaggcccgaaaaga

SEQ ID NO: 204328 - RNA, 72 nt, Homo sapiens
gcccaaccgggacaaagaaaggaaaagagaagaaccggagccggagagagccgccggccgacgagacacgcc

SEQ ID NO: 204329 - RNA, 53 nt, Homo sapiens
ccggacacagcaaaccgggccacaggcgcccgagccggaaaagcgaggacgcc

SEQ ID NO: 204330 - RNA, 76 nt, Homo sapiens
gaaaagggagcgaacccaccaaagcagaaaaacgaccggcccaggaccaaaaaagccaccaggacacccggaaaga

SEQ ID NO: 204331 - RNA, 79 nt, Homo sapiens
gaaaaaggaaaacgcggaaaaccgacacaacaggggcaaagaaaaaggagagaaaaagaggcaaaacaacaagaagaaa

SEQ ID NO: 204332 - RNA, 60 nt, Homo sapiens
accagcaggaggccagccggaagagggccaagaacaaaaacaccgccagaagcaccagga

SEQ ID NO: 204333 - RNA, 71 nt, Homo sapiens
aaccgccaggagcggcagacggcaggccagcgcgggcagcacagccaagagccgagcacgggccaggccaa

SEQ ID NO: 204334 - RNA, 84 nt, Homo sapiens
cgccacccggcgcgaccgcccggcaccgggagaaccaccgccaccgccaccagccggcaggaggagcggcagcgggcaaggacc

SEQ ID NO: 204335 - RNA, 70 nt, Homo sapiens
cgacccccagacgcccggcaaaggagcgcaagagagaagggagcggcaacaccaagacacggccacggca

SEQ ID NO: 204336 - RNA, 74 nt, Homo sapiens
cgcgacagaggagggaggaaaacaaccgagggcagaggccaagggcggagcacgagaaagcggcaccggcagac

SEQ ID NO: 204337 - RNA, 84 nt, Homo sapiens
cacccgcgccgggcaccgaggaccagccaagacaggcaccgcagaacaggccaggggaagacaaccacaggccagaagcaacgc

SEQ ID NO: 204338 - RNA, 80 nt, Homo sapiens
cggcgccaggccggagcgcgacacggagacaggggcaggcgcagagccagaaggcaaacacaaccgcagcggcagagaac

SEQ ID NO: 204339 - RNA, 77 nt, Homo sapiens
aagaaagacacaggccaagaaaaggcacacacacccgcaggagagcgccggagaaaggaagaacccagacacagagg

SEQ ID NO: 204340 - RNA, 100 nt, Homo sapiens
gaagccgcgccagaacgaccccgagaggcgcccgccccgagagcaagaaagaagaggcccagcacaagcggaagccccagggggggaaaacggaaccccg

SEQ ID NO: 204341 - RNA, 73 nt, Homo sapiens
agagaaagagaagagaagagaaaggcccggagacgcgcacaacagcgaaagccccagacaaacacacccgccg

SEQ ID NO: 204342 - RNA, 74 nt, Homo sapiens
cagcccagggaaggcaccaaaagggggggcaggaaagggcgacgccaggagcacaccgaaaagaaaggaaaacc

SEQ ID NO: 204343 - RNA, 83 nt, Homo sapiens
accaaaggaaccccagagaaggccagaaggacagaaacgggaaccagggaagaagcaagccagaaagaaaccacccaagagga

SEQ ID NO: 204344 - RNA, 74 nt, Homo sapiens
gaaagaacgcaggaaggagaaacacagaagccaagacaagaagcggagaagcgagagaaacacagggacagagc

SEQ ID NO: 204345 - RNA, 87 nt, Homo sapiens
ccgccgccaccacccacccggacacagccgcccaccgagggagccaaagacgaggaagggagaaggggcccggaaccagaccacagg

SEQ ID NO: 204346 - RNA, 83 nt, Homo sapiens
gagagggggaccccgcagccgcagaggaggagcgcagcccggcccggccgggggaagccaaggcccacccgagaggcccgcca

SEQ ID NO: 204347 - RNA, 71 nt, Homo sapiens
ggagcccagacccagaaggaggaggagacggacgggggggcagggacgcacaagggaagcaagcacgaacg

SEQ ID NO: 204348 - RNA, 70 nt, Homo sapiens
ccacgcgccggggcgaggacaccacgagacgagagcaccgacaggcggaaccacacgcacgagaacccac

SEQ ID NO: 204349 - RNA, 70 nt, Homo sapiens
cagaggggccggccaccccaacccggaggccagagggaagcaaagcagccaacaccagaagaagggacaa

SEQ ID NO: 204350 - RNA, 71 nt, Homo sapiens
gcagccagaaaacaccagcagcgcgcaggacccagagaagacccaaagagaagacgaaacggacggcacgg

SEQ ID NO: 204351 - RNA, 78 nt, Homo sapiens
cgggaagaagcaaagggcgggcagggcgcagaaaacagcggaaacagaacagcagagaacacaacacaggacaagcaa

SEQ ID NO: 204352 - RNA, 68 nt, Homo sapiens
cagagaacggggcacgagcgcgacaaaacaccaacagcgccggcgagaacgccgggagggaagaaagc

SEQ ID NO: 204353 - RNA, 82 nt, Homo sapiens
cccaccccggagggggaccacaagacccacgacagaaaaaggcacaaacccagcacagagaagacggcgacaagcaaaagac

SEQ ID NO: 204354 - RNA, 77 nt, Homo sapiens
ggacacacaaccgcccagccggcgagggacgccgcagacccagaacaggaagcagaacgggccaagcccagcccggc

SEQ ID NO: 204355 - RNA, 51 nt, Homo sapiens
gaagagcgaccggcgcaggccacgaacgacgcacggaggccacaacaccac

SEQ ID NO: 204356 - RNA, 69 nt, Homo sapiens
aagcccaggccagcggcgaagcagggggccccaccgccaggcagcgggacagggaggagaaagaaaagg

SEQ ID NO: 204357 - RNA, 78 nt, Homo sapiens
acgccacgacagcgcccgcccacaggcgcggggacgcagaagccacgcaccaaagagaccgagcccagcggacccaaa

SEQ ID NO: 204358 - RNA, 84 nt, Homo sapiens
caaagcgaggaccagaccagccgcaagaacgccaggacggagaagaagacaaacggcagcgcaagacacccgaggggccgaggc

SEQ ID NO: 204359 - RNA, 79 nt, Homo sapiens
aacaacggaacagacaaggcaaaaacaagcaccagaggcccgagcagccagcacggaggcaccggggccgagaagccgc

SEQ ID NO: 204360 - RNA, 71 nt, Homo sapiens
gccaagagacacacagggcaccagaccggggaccccaccggcgcggccagagagacgggaagaggacccga

SEQ ID NO: 204361 - RNA, 52 nt, Homo sapiens
aagcacaagaagaagacgaggcagggcagaagaccgcaccaggccaaggcac

SEQ ID NO: 204362 - RNA, 71 nt, Homo sapiens
cgggcgacaagcggacaaaggcgcgcacgggcacgccagccaaaacggccgcggaaacgaaaacggaagac

SEQ ID NO: 204363 - RNA, 82 nt, Homo sapiens
cgggagacccgagggagccacgaaaacaacacacggagagacaagagcaacaacagggagaacaaccgcaacgaacaaacag

SEQ ID NO: 204364 - RNA, 76 nt, Homo sapiens
gagaacggagacccaccggggcgggccgggcggccacagagccgaacacagcagagggggacaagcccacggagac

SEQ ID NO: 204365 - RNA, 79 nt, Homo sapiens
caggacagagagaaagaagcaccagaaaaagaagagaaaccacggggaggaagagaagaccaggccaacccgagaccgc

SEQ ID NO: 204366 - RNA, 69 nt, Homo sapiens
ccagcgcaacaaccaagcagcagcgcacaccagcccaaaagacgacggccgcacgcaagaggccgggac

SEQ ID NO: 204367 - RNA, 83 nt, Homo sapiens
agcaccggaccacgccacccccacggcccacggcccggggagacaccagcagcgcgaaaaggccgacgaggaggggggcgaca

SEQ ID NO: 204368 - RNA, 70 nt, Homo sapiens
acgcggcacaccaagcaacagccggggaaaacgaaacaaggacacgacgcccagcaccccgagagaagcg

SEQ ID NO: 204369 - RNA, 84 nt, Homo sapiens
agcagaacagaggggacacacagcagagaaaccggggcaaccggaggagacagacgacgggaggaccagagccccgcgacaaga

SEQ ID NO: 204370 - RNA, 72 nt, Homo sapiens
acaagcaaccaggggagaggaaagccgaaggacagagccacccgacacccggcagaccaacaccgaaaacga

SEQ ID NO: 204371 - RNA, 102 nt, Homo sapiens
ccaagagaacaagcgagaccaaagcccagagcaagagagaccacacaggcacggagcgagcagaggaggaggaaacccggaacacgcagaagaagcaagaca

SEQ ID NO: 204372 - RNA, 105 nt, Homo sapiens
ccagccgagccccagccaggacgagaggagcggagcccgcagaaccccacagcaagaggacggaaaagacaggcagggaggcagcggcaagcggaccgggaggca

SEQ ID NO: 204373 - RNA, 80 nt, Homo sapiens
agcagccgcagaggcacaaggggcggcaagagaagaccccgcgggagggacagggcagaccgccagcagcacagcaagcc

SEQ ID NO: 204374 - RNA, 63 nt, Homo sapiens
gaaaagcacaggaggcagcggacaacagagaaccaagccgccacagggagaaaagagcagagg

SEQ ID NO: 204375 - RNA, 68 nt, Homo sapiens
ggcagcagcaccagcccaagagaaggaacaggacaagcgaaccggagcccaaaacagcaagcggacca

SEQ ID NO: 204376 - RNA, 33 nt, Homo sapiens
ccgaagcgggccagaggaagggaagaggggagc

SEQ ID NO: 204377 - RNA, 82 nt, Homo sapiens
gggcccagagccccgggccaggcaggcggcgcggggcccgcgcccggagcggcgccagcaccacccgaaggcccaaaccccg

SEQ ID NO: 204378 - RNA, 70 nt, Homo sapiens
aaagggccccggaggaagcacccggaccacggggacagcgggacaagcgcacagcggagaaagcagcgcg

SEQ ID NO: 204379 - RNA, 85 nt, Homo sapiens
gggcggccgggacaacagaggcagaaaaggggacacggcgggcaggaaaggcgacacaggaggagaaccgggagcgaggagcagg

SEQ ID NO: 204380 - RNA, 70 nt, Homo sapiens
acaagccaacccaggaggaaaaacgacagcgcagaagccgcacagcggcaagcagaccgagaaacccgga

SEQ ID NO: 204381 - RNA, 74 nt, Homo sapiens
cgcccccggagagcagaaggggccccgggagcggagacagaggacagcgcaagccccggggcagagacacagga

SEQ ID NO: 204382 - RNA, 78 nt, Homo sapiens
aaaccgaagaaaaaaaccagaagcggaacacagagacacaagcagcgaggaccaggaacaacagagacaagaacaagc

SEQ ID NO: 204383 - RNA, 74 nt, Homo sapiens
ggaacagacacggggaagcgcaaaaacaagacggggcgccccacagaggggcgacgggaagacagaaggaagca

SEQ ID NO: 204384 - RNA, 97 nt, Homo sapiens
ggcacgggacaacccaaaggaccgaggcaccagggccaaggggggcaagacggaaaagaagaaaacagggaaaggaggcaaacacgagaagaagcca

SEQ ID NO: 204385 - RNA, 36 nt, Homo sapiens
agcgcccagcagcgcagcagcagcccacaaaaggga

SEQ ID NO: 204386 - RNA, 77 nt, Homo sapiens
ggggccagcgacaacccccagaagagaccaacgccaccaaccaaccggaacacaagggcaagacagccgggaacccc

SEQ ID NO: 204387 - RNA, 79 nt, Homo sapiens
agcgagcaggcacgccccgagacaacacggacccgccggagaaaccgaggccagggacggaggacgggccaaggccaca

SEQ ID NO: 204388 - RNA, 74 nt, Homo sapiens
agccgcgcagccccggagcacgggaaacacaaagaagacaccagaagggccagcaccacgacaacacggcgaca

SEQ ID NO: 204389 - RNA, 65 nt, Homo sapiens
gcacaggcaaacagcaccgacaccgaagcgcaggcacccccggggacaaagccgcgaaaaggaac

SEQ ID NO: 204390 - RNA, 77 nt, Homo sapiens
ccaccggagcgcgcgcggccagcgccaggggcacacggggcaccgggcccagaggagcagcccggagcgggagcccc

SEQ ID NO: 204391 - RNA, 71 nt, Homo sapiens
gggcgacggaccacaagacgcacccacaagcgcagccgggagaggacgacaaaaggaacagcgcaaaccaa

SEQ ID NO: 204392 - RNA, 74 nt, Homo sapiens
gcggggcagagcaggggccggaagcaccaggacagacaacaggcacaaagagagaaggaacacccacagggcag

SEQ ID NO: 204393 - RNA, 83 nt, Homo sapiens
caaacggacaagacagaagcaaagaggccacccggagaaaggccacggccccagcccaccggaccggaccgcgggcaggggaa

SEQ ID NO: 204394 - RNA, 69 nt, Homo sapiens
ccaccacagacccagacagcggagcggaggcagacacacacggggggagagggagggggggacacggcc

SEQ ID NO: 204395 - RNA, 57 nt, Homo sapiens
caagacagaccgcaggaccacggacgaaggagacgcaggagggagagcagccagagg

SEQ ID NO: 204396 - RNA, 72 nt, Homo sapiens
agagcggaggacccggaccggacaacgcaacacaggacagaaccccacacagaacccggcaacggaaaaaca

SEQ ID NO: 204397 - RNA, 73 nt, Homo sapiens
ccacaagggacgagaccaaacggaagaggccaagagcccagggcaaaaacagaccaggaacgcagaaaaggaa

SEQ ID NO: 204398 - RNA, 80 nt, Homo sapiens
agagccgcccgggccagcggccgcgcacccccggccggaggcaccagcgcgcggggaggcccagcccgccgcagggccac

SEQ ID NO: 204399 - RNA, 80 nt, Homo sapiens
caacaagaaggccaaaaaaacccagcggaaagcaacaaaagccaggaccagcccagaacacgcagaaaaggaccgggaag

SEQ ID NO: 204400 - RNA, 79 nt, Homo sapiens
caggaccggcgggccggaagacggcagcggccccggagacacaccgaccagcagaagagacacgggagcaccagggcgg

SEQ ID NO: 204401 - RNA, 70 nt, Homo sapiens
gaaagggaaaacccccacacggaggggacgaagacaaaaaccagagcagaagaaagggaaagcaaaacgc

SEQ ID NO: 204402 - RNA, 87 nt, Homo sapiens
ccagagcaggaaaaaagcgaaggcaacaggagcgggaaacgcaacacagcacccggcggcaaaccaaacaaaaccagagcacgggga

SEQ ID NO: 204403 - RNA, 71 nt, Homo sapiens
cgaggcccacagaaaagccacaacccagcggcagcaacgcgcgacggcaaccggcccaggaccccaggcaa

SEQ ID NO: 204404 - RNA, 78 nt, Homo sapiens
ccgaacaaacaaacacccagaaacaagagaggaaagggagaacaggggacccaccgaccggaaccagacaagcaagaa

SEQ ID NO: 204405 - RNA, 75 nt, Homo sapiens
agagcaaggaacagcaggagaagaccaacacaggggggaaggaagggccccacaccaaagaaacccaaaaagaac

SEQ ID NO: 204406 - RNA, 38 nt, Homo sapiens
ccaggccggcggcagggaccaagaaaggcccagggacc

SEQ ID NO: 204407 - RNA, 58 nt, Homo sapiens
ccgcaagaaggcgaacacaaggagacgacggccgcaaggagaaggaagaaagagcagg

SEQ ID NO: 204408 - RNA, 61 nt, Homo sapiens
acgaagcgggaggcaaaggcacaagcgccccagaggacacacgccaagaggaacgccggcc

SEQ ID NO: 204409 - RNA, 61 nt, Homo sapiens
gagagagccaggaaagagcacggcccaaagaagagcaggccaaggaacaagaagagaaacg

SEQ ID NO: 204410 - RNA, 73 nt, Homo sapiens
gcccaaggcccgcgggcgggagaacggaaaaccccaacccggacagaaagcgggacacaagcaggagcacaga

SEQ ID NO: 204411 - RNA, 78 nt, Homo sapiens
aggacgaggaagaagaacagccgagagagcaacaagccagcccgggaccgaggaggcccacaagcggcacccaccaag

SEQ ID NO: 204412 - RNA, 73 nt, Homo sapiens
gaacaaagaagaggcgggcggagggcacaccagaggggaagaaaacaccggagcccaagacaccaaaacagac

SEQ ID NO: 204413 - RNA, 84 nt, Homo sapiens
ccggcgccgggaagcccagccgccgaaggagcacagcaagcgggagcaggcagaccaaaggaacagaagccagggccggaaaac

SEQ ID NO: 204414 - RNA, 75 nt, Homo sapiens
agggacaggaaagggcacaaggaagagaagacggaacaagaaaggaccaggagccccgggcaacagacagaggga

SEQ ID NO: 204415 - RNA, 84 nt, Homo sapiens
cggagcgccgccgccgggaccccgcccagcaggccccgagccccggccccaaagacccaaaacagagacaccccccagcccccg

SEQ ID NO: 204416 - RNA, 73 nt, Homo sapiens
aggcgcaaggcggagaacacaggaaaacaacaccagggcaagaaggaaggagggccccggagcagccacacca

SEQ ID NO: 204417 - RNA, 76 nt, Homo sapiens
gacagccacgcagacggaaacaaggcaacagaaagagcaacagcagggcaacagagccggaggagccaccaacaga

SEQ ID NO: 204418 - RNA, 79 nt, Homo sapiens
agcggacccgccgagccccggccccaagaacgccgccgccccggagccgccgggggcgcgaacacaaagggagggaaag

SEQ ID NO: 204419 - RNA, 85 nt, Homo sapiens
gccgccgccgccgcagcgggagggcgccaccacagggcccaacgaaccgaagagaaaaggccaccaggaaacccaaaagccagaa

SEQ ID NO: 204420 - RNA, 58 nt, Homo sapiens
agcagaggaaggaagggggcccaagcgccaaagcgcaaagaagcacccaagagccgag

SEQ ID NO: 204421 - RNA, 70 nt, Homo sapiens
caagcccggaaaccagaggcccaacaacaccggcggggcgggcagcgcccgagagaagaagaaaggaaac

SEQ ID NO: 204422 - RNA, 60 nt, Homo sapiens
gacggccgcggcaaggcaagagcggcggcgccaagagggcgaagacaggacggcccaggc

SEQ ID NO: 204423 - RNA, 83 nt, Homo sapiens
cacaagggcaaaccccacaggagaaggaacccagggacaaccaaagaggacggggcggacccaaaagaccaggggcagcccaa

SEQ ID NO: 204424 - RNA, 73 nt, Homo sapiens
cacgaaggcaccgacgcacagcgaccaccaacagaccgaaggcggcggccggggcagcgccgcgagccagcaa

SEQ ID NO: 204425 - RNA, 70 nt, Homo sapiens
ggccaacggacagaggcccagagcccgggacaagaaagaccgcaaggggaagggacgacaccccgacgac

SEQ ID NO: 204426 - RNA, 66 nt, Homo sapiens
gagacgggcagcacaccgcaggcgcaaagcaagaaagccacgaagaccagaacgacgagaagaggc

SEQ ID NO: 204427 - RNA, 76 nt, Homo sapiens
ggcccacgcaccgccggcgccaccgcccacgcaagacagaccaggaccgccgggcaggacacgccccgacaggcca

SEQ ID NO: 204428 - RNA, 49 nt, Homo sapiens
caaaggccaaggggcggcaaaaagagagcggcaggccagacgcaggggc

SEQ ID NO: 204429 - RNA, 77 nt, Homo sapiens
gggcccagggcggggcccgagccaggcccacccacagccaaaacacccacccagggaccccagggcgcaaccaagcc

SEQ ID NO: 204430 - RNA, 60 nt, Homo sapiens
gcacgagccgcgccagcgagccaggcaagccaccgagaaagggaggaccacaacaacaaa

SEQ ID NO: 204431 - RNA, 75 nt, Homo sapiens
gaggaggggcccggcggcggggagacaagcacgcgccagcagaaaacacccccaaaacacagcaagcccacccag

SEQ ID NO: 204432 - RNA, 79 nt, Homo sapiens
cgaacagaaggaacgacgcggaccagaagccagagcgaggacgccggcagcccgccgacacagccaccaagaaggcaca

SEQ ID NO: 204433 - RNA, 81 nt, Homo sapiens
cacgggcgagaagcccacgaggcaacacgcaaggccgccaccaggccggggggggcacagagccccggaagacagccccca

SEQ ID NO: 204434 - RNA, 69 nt, Homo sapiens
ccgcccgggccagcggccgcgcacccccggccggaggcaccagcggcagcgaaccgggagaggaaccgg

SEQ ID NO: 204435 - RNA, 49 nt, Homo sapiens
gccgcccccccagaccgccagggagcgaggcggccagggccccagaagc

SEQ ID NO: 204436 - RNA, 56 nt, Homo sapiens
ccgaccggccgcgacagcgaacagcgcggccgcagaaagcccaagcgcaaaaaaaa

SEQ ID NO: 204437 - RNA, 80 nt, Homo sapiens
agcaagaacggggagcagacgcaaggccggacaggacaaaaggacacaacccacacaagaggagaagagaacaggccggc

SEQ ID NO: 204438 - RNA, 79 nt, Homo sapiens
agcgcacggcgacgccccaggggaaaacccccgggaccagcgccgaaaagcgaaaagaaacaagccgcggcaacagcga

SEQ ID NO: 204439 - RNA, 34 nt, Homo sapiens
aagcggaaggccgcgaagggagggccgccccaac

SEQ ID NO: 204440 - RNA, 73 nt, Homo sapiens
ccaaccccaggaagaagccggggacagcgaaacaagaccagagggggacccaacaacagggagcgggaggggc

SEQ ID NO: 204441 - RNA, 56 nt, Homo sapiens
ccccagccgagaggacgcggcggaaacgaagagcaacagcccgaggggaaaaaagc

SEQ ID NO: 204442 - RNA, 76 nt, Homo sapiens
accgccgaaaaagagaagacgcacccgaccgggccgaccaccccaacagcaggggggaacaccccgagcccaaggc

SEQ ID NO: 204443 - RNA, 66 nt, Homo sapiens
acccgaacgaaggaggagaccggaaaccgagagaaacgaagacgaagaaacagccgcacacagaag

SEQ ID NO: 204444 - RNA, 82 nt, Homo sapiens
acaaaggcaccaggccaccacagaaacaaaagcaacaaagagggcaagcagaagaggaacagaagaagcagagcagagacgg

SEQ ID NO: 204445 - RNA, 69 nt, Homo sapiens
acaccaaaaaacacagagagcaacacgagcgcaaaggaaaacagcaagagagcagacgccaaagagacg

SEQ ID NO: 204446 - RNA, 54 nt, Homo sapiens
cgagaacgggacccggccagaggaaagaacccgaggcacgcagaagccagcgga

SEQ ID NO: 204447 - RNA, 66 nt, Homo sapiens
agacgcagggcgcccccgcaccccaacagcaacggacacgggagcgagagcaagaccgaagcaaac

SEQ ID NO: 204448 - RNA, 87 nt, Homo sapiens
aggcacaagaccccgccgcacaacgcagacaagcagaccggaagaccgacggaagaccacaccccgagggagcccaggacaccacga

SEQ ID NO: 204449 - RNA, 79 nt, Homo sapiens
gcccccccgcgcccgcggggcgccaacgccccagcccggccccgcgccgcaccagccgccagagaacgaggaaccccag

SEQ ID NO: 204450 - RNA, 78 nt, Homo sapiens
gcaacaaaagaaggaagcacagcacaaagcggacgaccccccacaccaacagcgacaccaagcagccagggcagaaag

SEQ ID NO: 204451 - RNA, 81 nt, Homo sapiens
aagaaaccacaaggacccaggcgaacagagcagagcacgcccagaaggccggaaaggagcacacccagcaaagaagcgaag

SEQ ID NO: 204452 - RNA, 39 nt, Homo sapiens
gaaaggcgggaaggcaccaagggaaaaagacccgagaag

SEQ ID NO: 204453 - RNA, 73 nt, Homo sapiens
gggggggaggaagggcagagaaggaccgcacaggacgagcgaagacagggaaaagaaaagggcgccgaagaag

SEQ ID NO: 204454 - RNA, 79 nt, Homo sapiens
cgaagagcccgggcccagcacaagcggccgaaggggggcgaggaaccacacccagcccagaggcccgagccggcaaacg

SEQ ID NO: 204455 - RNA, 73 nt, Homo sapiens
cccagaaagcagaggccagagcggagacagacgcgaaccggccaggcagaccgggacgaagacagaagaagga

SEQ ID NO: 204456 - RNA, 74 nt, Homo sapiens
cacacacaggcagcgccagggggcaagaacgggcaacaaagaccagccacaagaagacagacacgaggaaggaa

SEQ ID NO: 204457 - RNA, 78 nt, Homo sapiens
ggccaccaaccccaacccggagagcggcgaggggcggcaccaggaaaaagaaagacggcacagaacaaggcccgacag

SEQ ID NO: 204458 - RNA, 64 nt, Homo sapiens
cggccccggccggccggccccggagcggcggaccccggcagggagacagaacagacagaaaaaa

SEQ ID NO: 204459 - RNA, 67 nt, Homo sapiens
cggaaagaaacccaggaacagaggaaggaagcagaaagcccaagcggaaaaaagcggcggagaaacc

SEQ ID NO: 204460 - RNA, 73 nt, Homo sapiens
caggggaagcgggacaacggggaaccaaccaagcggaacagcccaggcaaacggaacgaaggaacaaccaggg

SEQ ID NO: 204461 - RNA, 51 nt, Homo sapiens
acaacacagaaaagagcaaacgggaagaagagaacacccacacgaggcacc

SEQ ID NO: 204462 - RNA, 51 nt, Homo sapiens
gcagggacccagcaacccgacggacccgaagacgaacagagagaagggcgg

SEQ ID NO: 204463 - RNA, 77 nt, Homo sapiens
agcgcggacagaggcagaaccacaggacaaggcggaccacccaagcacgggacagagcagaagaccgggaggccggc

SEQ ID NO: 204464 - RNA, 74 nt, Homo sapiens
agcacccgccccaacgaggcaggaaaagcagacagaggaacagccgagacccacaccacaacagaccgcaacac

SEQ ID NO: 204465 - RNA, 110 nt, Homo sapiens
ccgccgccgcgggcgccagaaggaagaggcggacggaggagcaggcgagaagagaaggagcgggaggaggcaacgagcgggagggaaagcaaggaggcggaggaggcaca

SEQ ID NO: 204466 - RNA, 71 nt, Homo sapiens
aagcagccccaggagaagaaaaggggaagcaacacgcagcaacaacaacagccaggccaggagcaagcaag

SEQ ID NO: 204467 - RNA, 79 nt, Homo sapiens
gaagcaaaaagaagcccggcagaagacaagccgaaaaccagccccgcccacacacaccaacagaacccgggggaccccc

SEQ ID NO: 204468 - RNA, 72 nt, Homo sapiens
gacgcccaaggaaccccgccggccaccggcggggggggaagacaacccggagaacacccaggggacgcccag

SEQ ID NO: 204469 - RNA, 80 nt, Homo sapiens
cacccaggccggccagcacccaccgagaaggccagcagcgcgggccaggcacgacaccgcaacgacacagcagcgaagcg

SEQ ID NO: 204470 - RNA, 79 nt, Homo sapiens
gacccgaccccgcgcgacgacccgccgccgccgggcggagccgcaaagaaaaaaaggaccacaaaaacacacgacagcc

SEQ ID NO: 204471 - RNA, 73 nt, Homo sapiens
cagggaggcaggggcagaaacagagaaggaacaggggacaccagcagccagaaagaggcgaagacccgagcca

SEQ ID NO: 204472 - RNA, 58 nt, Homo sapiens
gcgccggaccgccggcggaaagccaagggaagaagcagaagcaagcccagggcaagga

SEQ ID NO: 204473 - RNA, 74 nt, Homo sapiens
aaacaacaccacaaacaaacggaggaacaaacgacggcggaaaacccgaagcagaagcccgacacaggcacaag

SEQ ID NO: 204474 - RNA, 83 nt, Homo sapiens
ggagcacggcccccgaggacggaggcacagcgcagcgacgagagggaccgagagacgaggcacgacccccaggaccccagaag

SEQ ID NO: 204475 - RNA, 55 nt, Homo sapiens
gcgagaagacgccccaaagaaaaggagcccacagaggaaaaggggacccaaccac

SEQ ID NO: 204476 - RNA, 82 nt, Homo sapiens
gggccggccgcggcggagggaaaaaggaagaggagaaggaaagcccgaacccgcaggaaaaaccagaagagaaaaaacaaag

SEQ ID NO: 204477 - RNA, 63 nt, Homo sapiens
cgagggaggcggccggagccaaaccgaagagcggaagagaaagcccgcggagcagaagcacgc

SEQ ID NO: 204478 - RNA, 105 nt, Homo sapiens
cagaaggaacgacgcggaccagaagccagagcgaggacgccggcaggggcagggggagagcgggcaaggcaaggagcggccagccccggaggcagcgagaacacg

SEQ ID NO: 204479 - RNA, 75 nt, Homo sapiens
aaaacagccgcaagcacgagagcggccaaccaaagcgggccacaaagcccagacaagcgcagaagcaacagaacc

SEQ ID NO: 204480 - RNA, 82 nt, Homo sapiens
ggaagaagggagacaaaggaaaacaaaggcgcgaccccgggggcagcacgccacacagacagaccaacagagcagagcagac

SEQ ID NO: 204481 - RNA, 66 nt, Homo sapiens
aacaccagaacaagggacaccaaacaccagagggaaacccagacgacaaggaaggccaagggaccc

SEQ ID NO: 204482 - RNA, 65 nt, Homo sapiens
cagaggccgacggccccaggggaccaggggacgaagggaacaggagcagcaccaacacacagcga

SEQ ID NO: 204483 - RNA, 80 nt, Homo sapiens
cagccgcaaaaaacccaagaccggcaagggacgccaggaacaaaagaacagcaccccaaggaccccccccccccccacgc

SEQ ID NO: 204484 - RNA, 69 nt, Homo sapiens
ggaacagggacgggggcagggacaagggaaagaaacggcggaaaaacaggagcaggagagagcacagaa

SEQ ID NO: 204485 - RNA, 80 nt, Homo sapiens
cgcacccaagaggggaagaggacgggcaggcggaagcgccagaggagccaccagacccaacagaggaagccgcaagaaac

SEQ ID NO: 204486 - RNA, 68 nt, Homo sapiens
gaaagaacacgcggccaaacccggaggaggagaagcaccgagaagcaaagcaggacaggaagagccca

SEQ ID NO: 204487 - RNA, 71 nt, Homo sapiens
gagcgccaggaaggccggcaagcccaggggagagcccagacaccaccggggaccgaaacaacacgaagcga

SEQ ID NO: 204488 - RNA, 68 nt, Homo sapiens
gaggggcgaagacgaaagagcgaagggggcagggcgacaacccggaaaccacaaaaggaaggaccaaa

SEQ ID NO: 204489 - RNA, 71 nt, Homo sapiens
gcccaccgaagaacagaaaacgcaaggagaaacccaagagcagcggcagggcaacagcaggcgggacacgg

SEQ ID NO: 204490 - RNA, 76 nt, Homo sapiens
cccaaagccacggagcaccacacaaacacaggggaaacacgagagagcaacagccgacagagcggcaccgaccagc

SEQ ID NO: 204491 - RNA, 83 nt, Homo sapiens
ggcgaacaaacaagaaaagcgcacgaggcccagaagcacgcacaaaaaaacaccggggagaaaagagccggaagcaaacccca

SEQ ID NO: 204492 - RNA, 62 nt, Homo sapiens
cccagaaccgaccgggcaggggggccagagcacagcacgagaacaaaaagcgccccagaaag

SEQ ID NO: 204493 - RNA, 119 nt, Homo sapiens
ccaaccgcaaccagacgccagcgggacgaggaccgagaccgcggccgggaccgaggcccgggcgcgccaggcacagccaagagcggaccggcagcggccagcgcagcggccggagcaga

SEQ ID NO: 204494 - RNA, 86 nt, Homo sapiens
caaaaggaggaagagagcggcgcgcccggcggccgagcggcaacggggcccgggcccaagggcaaacgaacacaagagacagggaa

SEQ ID NO: 204495 - RNA, 78 nt, Homo sapiens
agagggaagagaaagcaaacgagcagggcaagcgcaccacgacaaagaagagaaaacgcggcagagcaacaaacacag

SEQ ID NO: 204496 - RNA, 80 nt, Homo sapiens
gaggaaagcgggggcacacagaaaccagcaaggaaggagagccagccgaaggccaagacccggaaacggccagggcaacc

SEQ ID NO: 204497 - RNA, 76 nt, Homo sapiens
cggagaaacgagagcagaaggcaggccaggaagaccccaaaccaaagagaagagaccagaggaagggcaccgaaca

SEQ ID NO: 204498 - RNA, 78 nt, Homo sapiens
gggcgagagggagccgcagcgagcaggccccccggacagccagagaaccaaaggcagaccacacggcacaccagaaaa

SEQ ID NO: 204499 - RNA, 87 nt, Homo sapiens
cgagcgcccccccgcgccggagagacgagagcgagcgacccagcccgcgagcgaggcaagagcgaaggagaaaggcaacaaggcccg

SEQ ID NO: 204500 - RNA, 76 nt, Homo sapiens
gcggacgccggggagacgcaggcgagggaggagccacaacccgacaagaccacacgacacaaggccaaaagcccaa

SEQ ID NO: 204501 - RNA, 79 nt, Homo sapiens
gaagaagcgaaaaggagcacgccaggcgaccacgagcccccaggccgagacacggaggaggcggcaggccccagagccc

SEQ ID NO: 204502 - RNA, 90 nt, Homo sapiens
cggcaaccgccccgcgagaaacgcagccagcggagcccgcagccggcccgagccaggaacccaggccggagcccaaccaggaggacaaca

SEQ ID NO: 204503 - RNA, 69 nt, Homo sapiens
agaacagaaacgacaaacacgagccaaaaggcagcaaccaccggagggcgcagagaagagacagagcgg

SEQ ID NO: 204504 - RNA, 38 nt, Homo sapiens
ccaggccaaagaaagagaaaccaagagcgagccagagc

SEQ ID NO: 204505 - RNA, 91 nt, Homo sapiens
acgggcaagcgcgcaaacccagaagaaacccaccagagaaggcgcggccacccaggacccgggggaggcagcgaagaaaacaaaaagccaa

SEQ ID NO: 204506 - RNA, 75 nt, Homo sapiens
gggcggccacagagagagggggaggcaggagaccaagaaaccccgccaacccccaacgcaacgccaccggccggc

SEQ ID NO: 204507 - RNA, 51 nt, Homo sapiens
gaaaacagcaggacacaaagacagaggagacgcgaagaacgaaccaaaggg

SEQ ID NO: 204508 - RNA, 83 nt, Homo sapiens
gcaaagagacacagccaggcagcacacgacagccgcaggaagacaggcggccaacgaagggaccaggcaaaccccggacaagc

SEQ ID NO: 204509 - RNA, 89 nt, Homo sapiens
ggcccgcgcccaggggcgcgagcgcccagcggacaccggcagcgcgcggcgacgcgggccgagccccccagaccagcaccagacagcga

SEQ ID NO: 204510 - RNA, 79 nt, Homo sapiens
ggacacacaccaggaggaggggcacggggagacagggacggaaaaacagacagaggaaaaggggaacaggccggagacc

SEQ ID NO: 204511 - RNA, 84 nt, Homo sapiens
ccccccaacaccacacgagggcggcaccaaggcgcacgggacggcagcgcggaagaccgcaaaagaaggagaacgcccaggcag

SEQ ID NO: 204512 - RNA, 125 nt, Homo sapiens
cagcaccaggaaaggaacacgaaaacggaaaacccgaaaaggagaaccaagaagaggggcggaacagaacgacaggagaacagaccagagcgaagaacaggaccacccaggcaaccacacaacaa

SEQ ID NO: 204513 - RNA, 73 nt, Homo sapiens
cgcccccaggagggccccgccgccggccacccgcgcccgcggcgggggcaccgcccgccaccgggggacaccg

SEQ ID NO: 204514 - RNA, 70 nt, Homo sapiens
ccaaaagagcacagaaccaagggaagagaacacacggaccgagagagaaagagcggcaaaaggacagcac

SEQ ID NO: 204515 - RNA, 77 nt, Homo sapiens
gggcaccagagaagccacacccaaaaggaccacccaggacaggagagacaacggaggcaagaaagacggagaagcga

SEQ ID NO: 204516 - RNA, 84 nt, Homo sapiens
acggggcgggcagcggcgccgggcacaggagggaagagcaaggggcccggacagggacggaaagggggcaacccgggggccgag

SEQ ID NO: 204517 - RNA, 80 nt, Homo sapiens
aacaaagaacacagcaaagcagaaaaagacgagacgaagaaacaaaaaccaggaacagggaggcggcaagggaaaagggg

SEQ ID NO: 204518 - RNA, 58 nt, Homo sapiens
acagacagaacagaacccaaaagccgacaaccccagaaacaggagcccccaggcccaa

SEQ ID NO: 204519 - RNA, 73 nt, Homo sapiens
ccgagcccagccgacacagggacacccaccacacagaaggagcacacagagagagcgccagccaggaaaacca

SEQ ID NO: 204520 - RNA, 59 nt, Homo sapiens
cgccggggagccggccgagcggaggccgaggcacccgcgcaggccgcacaagcagcggg

SEQ ID NO: 204521 - RNA, 62 nt, Homo sapiens
gaggcaagaggaaggagaggggccaaaggaggagagaaagaacccacgcaggacgacagaag

SEQ ID NO: 204522 - RNA, 79 nt, Homo sapiens
agcacaacagccggggagacaacacaggccaagcccaggccgaagggccccaaaagagggaagccacgagcaccagaga

SEQ ID NO: 204523 - RNA, 82 nt, Homo sapiens
cggagccagcggggaggccgcgccgcgcgcgccgcaacaagggaaaccagccaaccaggggcaccagaccaaggagaacgag

SEQ ID NO: 204524 - RNA, 76 nt, Homo sapiens
acaccacgggccacggccacccaagcccagggcggaacgggccccggaaagccaggccagaagaaggaaggccggg

SEQ ID NO: 204525 - RNA, 68 nt, Homo sapiens
gaccggaaccggaggagaagcccagggagcgcaccccaggaaaccaaaaaggcgacggcggagacaga

SEQ ID NO: 204526 - RNA, 67 nt, Homo sapiens
gaccgggccggcgagccgcaaggaagcagccgaagccacaaccgaacgccgccgcggacgacaagcc

SEQ ID NO: 204527 - RNA, 78 nt, Homo sapiens
gcacacccagcgagcgaccggggaaaccagagcagacccggaacacgcacaggaaaggaccacccacccaccgcgcgg

SEQ ID NO: 204528 - RNA, 58 nt, Homo sapiens
gccacacagaaggacggcccgacggaagagaaggaggggccaagggagaagaccgcaa

SEQ ID NO: 204529 - RNA, 83 nt, Homo sapiens
gcaagcgaagccgaaaaagcgcccgagacgggcccgccgaaagaaagcaccgggaggaaagagagccacacgaagaacacggc

SEQ ID NO: 204530 - RNA, 69 nt, Homo sapiens
aaacgaagaggagaagacaccaaaaagcaaacggaccagaccgaccaccaaaagccaggcgaaccagcc

SEQ ID NO: 204531 - RNA, 69 nt, Homo sapiens
ccaaccaccgccaggagaggccccaggaaaccccaccaccggaacaggccaagccaaacccgccggacg

SEQ ID NO: 204532 - RNA, 81 nt, Homo sapiens
cgacccgggacgcccccgccagccgagcccccgggccgacggaacaagaagaaggagcggagaacggaccacccagcagcc

SEQ ID NO: 204533 - RNA, 68 nt, Homo sapiens
aaaacggcaaagaacaaacagaacaccgagcagaaacacggcaccgggggcggaaaagcagaaaggaa

SEQ ID NO: 204534 - RNA, 101 nt, Homo sapiens
gaggcggagaaggcgcccgcggccggcgccggagcaggcggacccccagagcgaagacccaaccccacaagaggaagaaacggaccccagacaggaagccc

SEQ ID NO: 204535 - RNA, 72 nt, Homo sapiens
cgacccggccgcgccggcgccgaccccgcgcgccagggccaccacgcaccggaagcgagaccaggaggagcg

SEQ ID NO: 204536 - RNA, 78 nt, Homo sapiens
aaaacagggacaagggcaacagccagaaggggacagaaaaacccagagcccggaacaaacgggcccaagacaaacaag

SEQ ID NO: 204537 - RNA, 70 nt, Homo sapiens
gcgacggcgagacccagaagggcgggcaccgagaaacaccccacagaggaggccgagcagaaagacaggg

SEQ ID NO: 204538 - RNA, 84 nt, Homo sapiens
agaaggccccaggggggcagaaccaaggaggaccgcgccaacaggacgaggagaccgaccaggagaccccagcggagacgaccg

SEQ ID NO: 204539 - RNA, 76 nt, Homo sapiens
gccggcggaagggcacccacagcccggcacagcagcacgccaaaccaaggcgcccagaaagagcgccggaagcaga

SEQ ID NO: 204540 - RNA, 60 nt, Homo sapiens
cagcgcgaggacgcacagccccagaacaggaaaaaaccccccgccaaagggacggcgccg

SEQ ID NO: 204541 - RNA, 72 nt, Homo sapiens
caccgccgggaagaaagggcagccagagccggaagacagaggccacaccaggaagcacaaaaggacaaacca

SEQ ID NO: 204542 - RNA, 77 nt, Homo sapiens
cccacaccacacagagagcgaggaagcgcgcgccggaaggggacccccccccagagccaaagccggcagaccgcaaa

SEQ ID NO: 204543 - RNA, 55 nt, Homo sapiens
aagacagaaagaagccacccgaccacgacaaggaggaccagaacagagaagaaag

SEQ ID NO: 204544 - RNA, 65 nt, Homo sapiens
cagagcccgccgccgaccgccgcccgccacacccgccgccagccacccggccgggggaaggagac

SEQ ID NO: 204545 - RNA, 70 nt, Homo sapiens
acaacagccacaaggcgagccaagccgcgggcaacaggaacacagacaaccagggacacaccccgccagg

SEQ ID NO: 204546 - RNA, 106 nt, Homo sapiens
cggccacagcagaggacgcagaagcgaggagccaagaacaacaaagagaacccgaacgagcgcacggcagcgaagcgccggcagaaccgaggccagcggccaggag

SEQ ID NO: 204547 - RNA, 119 nt, Homo sapiens
cgccccgccaaccgcaaccagacgccagcgggacgaggaccgagaccgcggccgggaccgaggccaccaggagagaacgccgcgccgcgcgacaacggcccggcaggcaaggccggccg

SEQ ID NO: 204548 - RNA, 76 nt, Homo sapiens
ggaccaagggacgagaccagaccaaccaacgaagaaacagacaagcaagcagagacacacagcaaaagccaacaca

SEQ ID NO: 204549 - RNA, 75 nt, Homo sapiens
ccgggccgcggcgcgcccccgccaagaggaacagcggaaagccagcggaagacccaggaaaggaggcagaccgac

SEQ ID NO: 204550 - RNA, 85 nt, Homo sapiens
gggaagaggaaaagaagacacagaccaggacccgaacccgaggcaacaacagcaacaggagcacaggcggaggcagcggaggccc

SEQ ID NO: 204551 - RNA, 81 nt, Homo sapiens
ccagcaccggcccaggggcccccgaaggagggacccagacacccccgcagcacgcgaaggcacaggcgacagccaccccac

SEQ ID NO: 204552 - RNA, 86 nt, Homo sapiens
ggaaccgcaagcggccaagcacaaagagcgccccacgagagaacggcacacgcgagcgagccaggacaaaaccaggcagaaccaac

SEQ ID NO: 204553 - RNA, 63 nt, Homo sapiens
ggagaaggaccaagaaccagcgaccagaaggccaaaaaggcggaacaacaaggagaacagcag

SEQ ID NO: 204554 - RNA, 79 nt, Homo sapiens
aggggccagggagccccgaggcgcaccgacagagcgggagccaccagcgccaaagggaagccaggagcccgggggcacg

SEQ ID NO: 204555 - RNA, 59 nt, Homo sapiens
agagaaagaaggcggccaggccaaccgaaggggcgcaacgccggagcgggggaaccgac

SEQ ID NO: 204556 - RNA, 56 nt, Homo sapiens
caaccagcaggcagggagagaggggcggaaaggggaggagagggccacggacccaa

SEQ ID NO: 204557 - RNA, 61 nt, Homo sapiens
agccgcaagacccgccacaagcaacgcgggaagagaagccgagcgccggaaaccagcccgg

SEQ ID NO: 204558 - RNA, 42 nt, Homo sapiens
cgcccgccagggagacaacaggcccagagaaggacgcagcgc

SEQ ID NO: 204559 - RNA, 72 nt, Homo sapiens
accaaacccaccgcaagacagggaagcgcagagacagaccagaagacggcacggcacgggaccgagcggccc

SEQ ID NO: 204560 - RNA, 74 nt, Homo sapiens
aagcgaaggacagggaaaaaccacacaaaaggggccaagaaaggcgcgcgcggagcccgcagaaaaaccggcag

SEQ ID NO: 204561 - RNA, 59 nt, Homo sapiens
aagaaaagggagacagaacaggacacccagagcaacaaaccccaaagaacaaagacaag

SEQ ID NO: 204562 - RNA, 64 nt, Homo sapiens
cgcggggggagaccccaccaccgcagcaccaaggggggccagcggaaacaggacacagaggggg

SEQ ID NO: 204563 - RNA, 67 nt, Homo sapiens
ggagggcgaaggcgagaaggggagccagaggggacggcagagacaaaaccccgccagacagaaccag

SEQ ID NO: 204564 - RNA, 81 nt, Homo sapiens
ccgcagccccgggcacggcggaggcagcggagcccgggccacgggaccgcgcaagaaacgccggagggaaaaaagcgaaaa

SEQ ID NO: 204565 - RNA, 68 nt, Homo sapiens
agccaccaggcagcgacgacgccaagggcccagaccaagccccaccaacagaagagccccacacacag

SEQ ID NO: 204566 - RNA, 78 nt, Homo sapiens
gaaaaacggagacacagcccgcggaagccgcacaagagagacacggcgggggagggcacggcggcgggccaacccgcc

SEQ ID NO: 204567 - RNA, 67 nt, Homo sapiens
agcagacaagcgacaaggacagggggagaggcaaggaaacgacaagagaagaacacccaggaaaagg

SEQ ID NO: 204568 - RNA, 78 nt, Homo sapiens
agggaggacagcaaaaaccagggcccacagaggagacgacgcagccagagcagcaagaggccaaggggacgacggcca

SEQ ID NO: 204569 - RNA, 71 nt, Homo sapiens
acgcagggcgcccccggcagcagacgacaggacggcagagccccaagaaagcgcaaccgagaggcgggcca

SEQ ID NO: 204570 - RNA, 80 nt, Homo sapiens
aggaaacaagcgagacccagggaggcaggaaaggggagaacggagggggacaccagaccggggggcccccaaagggaagc

SEQ ID NO: 204571 - RNA, 87 nt, Homo sapiens
cagcagaagaccagggggcagcccaagacaaaggaggaggcggcaggagaagcagagaagaccgcacgggcaacaccgggacgaggg

SEQ ID NO: 204572 - RNA, 73 nt, Homo sapiens
aaaccgaagggaaggccagcagcgcgcggagaagaacggggagccagaggcgcgaacagggcccacccgccac

SEQ ID NO: 204573 - RNA, 70 nt, Homo sapiens
gcaggacggaaccgccgagccagaggaggagcgaccagggaagaaaacaccggagcccaagacaccaaaa

SEQ ID NO: 204574 - RNA, 83 nt, Homo sapiens
gcccagcggagaccagcaggaggccagagcgagccagcagccccaagccggaggagaaccaagcacacgaccagacggcacag

SEQ ID NO: 204575 - RNA, 76 nt, Homo sapiens
ccgccccgccagcagaaggaggcacccggaagcaaggcggccagcaaagaggagagaacacagccagaggggaaaa

SEQ ID NO: 204576 - RNA, 72 nt, Homo sapiens
accacaggagcgagagcaaacaggcgaagagaaacaagaaagaagcaaaccgccagcaaaaggcaagagaac

SEQ ID NO: 204577 - RNA, 64 nt, Homo sapiens
agcagaagggacgagagacagaggaagagaccggacaacaggacaggcaggagacagcaacaag

SEQ ID NO: 204578 - RNA, 39 nt, Homo sapiens
cccaaagcacggcaccggacagggcgcaagaagaacgga

SEQ ID NO: 204579 - RNA, 52 nt, Homo sapiens
aacgaaggggggaggcccaggccaaaagagcgaccaacgacgaagagcagag

SEQ ID NO: 204580 - RNA, 69 nt, Homo sapiens
gccaggagcaagggaaagaacccggcggggaaaagggaaggaaaagagacgcaggacagaaagcgggac

SEQ ID NO: 204581 - RNA, 56 nt, Homo sapiens
cggaccacacccagggacaagccccgcgcccaccacggcagaaaccaacagaaggg

SEQ ID NO: 204582 - RNA, 82 nt, Homo sapiens
cccagcgcacgggagcagccagaaacaagcgcaggaggaaagagagcccagagaaaaaaaaagaaaggaccgagaaacaaac

SEQ ID NO: 204583 - RNA, 74 nt, Homo sapiens
acccaaggccccacagcaacgagagccagagaagaagggccgcgaggaaaagggccaccggaaaacccggaccc

SEQ ID NO: 204584 - RNA, 73 nt, Homo sapiens
gggaaagggaccacagaccagaaaagagggagagaacagcacacagaggcgcaaggggaagagaaaagacaga

SEQ ID NO: 204585 - RNA, 78 nt, Homo sapiens
gccagcagaaggagggacgagaaaagcgacgaggagcaaccagggccccacgcccggcggacggccggccacacacag

SEQ ID NO: 204586 - RNA, 69 nt, Homo sapiens
ggggccggaagcaccgcacaccacacccgcgccgacagcgacgaggaaaccccgaagcaacggccaagc

SEQ ID NO: 204587 - RNA, 69 nt, Homo sapiens
gacgcaggagcggcccaagacgggagacacccaacaggggagaagcagaccgcaccaggcgggaccccg

SEQ ID NO: 204588 - RNA, 61 nt, Homo sapiens
ggcccaccgcccgagggagagcgcccggcagagggagcccaggcggcaggagagcaagggg

SEQ ID NO: 204589 - RNA, 54 nt, Homo sapiens
acagcgagccaccaagcccccacaaaggcacgggaggacccagcccacggaaag

SEQ ID NO: 204590 - RNA, 87 nt, Homo sapiens
gacaccgacaagacaccacggacgagagacaaacgccgaagccaacaggcagaccacagaaacgaagccgggagaacgcccggggcc

SEQ ID NO: 204591 - RNA, 79 nt, Homo sapiens
caagagggcgaacaacacggcaacgggacggcgacagcccgcaccaggcagcagagcagcaccagggcgggaggcgaga

SEQ ID NO: 204592 - RNA, 61 nt, Homo sapiens
ggagcgcccagaggcgagcccggggaggaagagcaagggcccgcccacggcccaaccgaag

SEQ ID NO: 204593 - RNA, 77 nt, Homo sapiens
cgggaaccacgagacagacgagcagacacccaaacccgcgcacagaaaacgacagaagcacgacaacaacgggcagc

SEQ ID NO: 204594 - RNA, 92 nt, Homo sapiens
ccgccgcagaggaaaagcagggccgggccgccccgggggcgccaggcgaccggagcgaacgccacgccgggaacagaaaggccccggagcag

SEQ ID NO: 204595 - RNA, 75 nt, Homo sapiens
cccccccggagcagcccccagccaaccgggaagccaggaacaggggagccacaccggggcggggaagaaaaggag

SEQ ID NO: 204596 - RNA, 82 nt, Homo sapiens
gggagggagccgcgcgccggcgcgcgccgagcgcgccggagagcagccaagaaagccacagaaagacaaccaggacagaaag

SEQ ID NO: 204597 - RNA, 73 nt, Homo sapiens
aaaaaccacagcgcacacagaggcacaggccagacgaaccccagaggcaacgagaaaggcagaagaaaaagaa

SEQ ID NO: 204598 - RNA, 68 nt, Homo sapiens
gaccgagagcgcgaaacgcacgagaagaaaccagggggacaaacagaaagccaacaagaacaccccac

SEQ ID NO: 204599 - RNA, 70 nt, Homo sapiens
caggccaccaggccacacaagggaacggccagcaccaagggcaccaggagaaaggggcggacggcacaac

SEQ ID NO: 204600 - RNA, 54 nt, Homo sapiens
gcccgcagaccgcagaaggccggagacaccagcaggaagaaaagagccgaagga

SEQ ID NO: 204601 - RNA, 85 nt, Homo sapiens
caccgggacggaccgagaccggaccgagagcggaccgagagcgcgaaacgcacgagaaggccaaaacagaagaggcaaagcccag

SEQ ID NO: 204602 - RNA, 65 nt, Homo sapiens
cgaaggagaaccccagcacccagaagcaccacgaaggacgagaccagccacaacggggcgacaca

SEQ ID NO: 204603 - RNA, 59 nt, Homo sapiens
acaaaacaagcccccaggaaccacagcaaaacgcacccccaggagggacgggaaaacgc

SEQ ID NO: 204604 - RNA, 69 nt, Homo sapiens
cagcggccgggaacgaccgaaacaccagggacagccaaagaccggagcggagagagaagaaacaggcca

SEQ ID NO: 204605 - RNA, 71 nt, Homo sapiens
gacgacgcaccgcaggcagacaaaagggccaaagaagggagagagcaggaggagcaggacggagcgaaggc

SEQ ID NO: 204606 - RNA, 85 nt, Homo sapiens
cggcggaggggcggacgccacgccaaaggaaaaaaacagggaccaagacaaggaaaacccaaaggcccggggcagggacaagagg

SEQ ID NO: 204607 - RNA, 57 nt, Homo sapiens
cagaccgaggaaaaggagagaggaggagagaaagaacccacgcaggacgacagaaga

SEQ ID NO: 204608 - RNA, 79 nt, Homo sapiens
aacagacccagggaggaggaggagaggaaaaagcgaacaccaggacagagcgggggcccgacagaaaaggcaacagcag

SEQ ID NO: 204609 - RNA, 73 nt, Homo sapiens
caaagaaggaccaaaaagcacacacagggaaacccagacgacaaggaaggccaagggacccacgaccaaccaa

SEQ ID NO: 204610 - RNA, 103 nt, Homo sapiens
cgcccacgaaggacgcagaaggaagccgaaaagcacgcaggaagcgaacggaggaaccacgcacagaggagcggcgacacgggccggcggggcggggcgcccg

SEQ ID NO: 204611 - RNA, 84 nt, Homo sapiens
gaaaaagcagagcgaccggaagggaaagcgccgagagacgggccgcgccgcccgcaagcagagggaaaaagacacagcaaagcc

SEQ ID NO: 204612 - RNA, 81 nt, Homo sapiens
ccgccgcaccgaccacacgggacgccccccggcaggcagagcccaaggaaccagagaaacggagcgaaaccgaagagccac

SEQ ID NO: 204613 - RNA, 80 nt, Homo sapiens
ggagccgccagaccccggagacagccccacagccccgagaccggacgcccagacaggcgcccagaggccacgcaagcccc

SEQ ID NO: 204614 - RNA, 81 nt, Homo sapiens
agagcaacacaaggaagcaagggccaccgcccagccaaccacagaccccaggcaggagcacacacaagaaaacccaaccag

SEQ ID NO: 204615 - RNA, 84 nt, Homo sapiens
agcgagccgagccgagcccccgccgcgccagggccagaacgaccgagggcacggccgaggaccgccgaccagaaagcccgggaa

SEQ ID NO: 204616 - RNA, 39 nt, Homo sapiens
gccagcccagcgaccagcagaagcccagcagagagaaaa

SEQ ID NO: 204617 - RNA, 78 nt, Homo sapiens
ggaccagaccggaacgcccaagccccaccgcgagagccgggcagcgacgacagcccgcgggggggcaccagccggccc

SEQ ID NO: 204618 - RNA, 54 nt, Homo sapiens
ggacgagcacgcaaccacgggcccccgcgcgcaggaggcaggggaagcacaaaa

SEQ ID NO: 204619 - RNA, 80 nt, Homo sapiens
gaaaccaagcgggaggccgaggccagccaagcgccaaaaggaacgaaggcggggggcccgagggaccgccaacaagcggc

SEQ ID NO: 204620 - RNA, 76 nt, Homo sapiens
gcgggggcgcgccccgcgcgcagggaccgcccgaccagggcccaccgggaacccggcaccgagcgacacaccagga

SEQ ID NO: 204621 - RNA, 68 nt, Homo sapiens
gagcccgcacccagccacaccggaaccgcgggagccgaagggagccacacgcaccaaccacccgaagc

SEQ ID NO: 204622 - RNA, 77 nt, Homo sapiens
cgccgaggggcgacgaaacaacagacaagccgagaccaccaggagcagagcggaggcaaccagccaaaacaacggaa

SEQ ID NO: 204623 - RNA, 73 nt, Homo sapiens
agaacacgcccaaaacgaaccaagcaaggaaccagcgagcaaacgcaaacacaacagaaaaaagaaaacacga

SEQ ID NO: 204624 - RNA, 70 nt, Homo sapiens
aaagagagaggggaaagccacgcggaaaggagccccgggaacgcaagaagggccagccggaaggaaagac

SEQ ID NO: 204625 - RNA, 70 nt, Homo sapiens
cgggcaaaagaccacaacaggacacaaaaaggagagaagaccacaggaagacaacgaggggcacgcgccc

SEQ ID NO: 204626 - RNA, 39 nt, Homo sapiens
gaacaagacgggaagaccagcgggcgcggaacagaggaa

SEQ ID NO: 204627 - RNA, 64 nt, Homo sapiens
aagaaagaaccgaagacagaaacggcgcaaagccacaagccaggcgaacccccccaaaaaaaac

SEQ ID NO: 204628 - RNA, 75 nt, Homo sapiens
ggcgggagaaggcgcaacgcggcgcgcccgacaggcccccagagccgcccacaggaggccccgggcagcgcgggc

SEQ ID NO: 204629 - RNA, 71 nt, Homo sapiens
gagaaaggacaagaaagagaagaggaccaagaaggacagcgcaggggagcggagcaagaaaccaagacaaa

SEQ ID NO: 204630 - RNA, 80 nt, Homo sapiens
cagcaccccccggcacgagaggaaaaacgagacgcaggacaaagagaaacgcgaagcggaggacgacgaggaaaggagcg

SEQ ID NO: 204631 - RNA, 70 nt, Homo sapiens
ggggggaggccacaggcgcaagcagcaacaggacaccagcaacagcgccaggagaacgaaacaagcagga

SEQ ID NO: 204632 - RNA, 83 nt, Homo sapiens
acgcggccacggcgcgagccgcccggaagcgaagaaacggaacgaaacacaggaggaaggagaggcccagcaccaccagcccc

SEQ ID NO: 204633 - RNA, 56 nt, Homo sapiens
ccccgggaccgggcacggcggagcaggaccccacagacacacccaaagcagcccac

SEQ ID NO: 204634 - RNA, 79 nt, Homo sapiens
cggaacagaacaagaggacaggagggcgccaggcagggaacaaacggaagcggagaaagagaaaacaaagaaccgagcg

SEQ ID NO: 204635 - RNA, 54 nt, Homo sapiens
ggacgagcagccagaccagggcaagaaaaggggggcccagaaaaggggaaaagg

SEQ ID NO: 204636 - RNA, 74 nt, Homo sapiens
ggcggcgaacccgcggcggacacgcacgccccggcacagagccaaggaacgaacagggcgggcggaggcgggaa

SEQ ID NO: 204637 - RNA, 42 nt, Homo sapiens
cccgggcacccgcggaccagaaaagagccacgggaaggcaag

SEQ ID NO: 204638 - RNA, 60 nt, Homo sapiens
aagaaccccacaagccacaggaggaggcagcagcgccggaggaagagcggaaaaggcgga

SEQ ID NO: 204639 - RNA, 69 nt, Homo sapiens
gagggccagagggaaggacagaagaagacaagagcagacgagggagaagcgggcaaaacagacaaagga

SEQ ID NO: 204640 - RNA, 76 nt, Homo sapiens
gaggcagacggggcggagaagggcagggcgagcgcccccgccagggccgaccaggagccagcaggccaagggaaaa

SEQ ID NO: 204641 - RNA, 80 nt, Homo sapiens
cgggaggccacagcagccagccggcccgaggacaccgacaccagcaggacccagaagaccccagacggggagcgcagcag

SEQ ID NO: 204642 - RNA, 78 nt, Homo sapiens
cgcggccaggcggaggacagggcggggcagggccagaaagcgcgcgcccggcccaggagaggacacccgaccgccagc

SEQ ID NO: 204643 - RNA, 78 nt, Homo sapiens
gaggcggaggcagaggggaggcgcgaaagcgccgaaaagcgaaaagaaacaagccgcggcaacagcgaccccaagcca

SEQ ID NO: 204644 - RNA, 76 nt, Homo sapiens
gcgcagccagaacggaggaggagccgcagccaaaaggaagcggcagaacaaaaagcaagaaagaaacacggagaag

SEQ ID NO: 204645 - RNA, 70 nt, Homo sapiens
gccaaaaaaaaacgaacagacgagcgaagagacccagaacaggcgacggggcaagcaagggccaaaggcg

SEQ ID NO: 204646 - RNA, 79 nt, Homo sapiens
acagacaaaccagcccaagcagcgggccggggggacggaggcgcgagcgacccgaggaagacgggcgcggggagggaac

SEQ ID NO: 204647 - RNA, 65 nt, Homo sapiens
gaagacggaaaaaacagacgaagagagaaaggcagggcaccccaccacagcgacaaagacccgga

SEQ ID NO: 204648 - RNA, 59 nt, Homo sapiens
gaaagccacaacagggcggcaacaggggcgagaaaggggcggagaacggaaaagcacca

SEQ ID NO: 204649 - RNA, 37 nt, Homo sapiens
ccaagggagggacaaaacgccaccccgccccaccgag

SEQ ID NO: 204650 - RNA, 74 nt, Homo sapiens
cgggccgccgagcggacccggaccgggggaggcgaagcagccccgacaaagaacggaaggaggccaacgcagag

SEQ ID NO: 204651 - RNA, 80 nt, Homo sapiens
agccggcccgaggacaccgacaccagcaggacgagaacccccgcgaaccagaggaacccagcgagcgagagcggaccaga

SEQ ID NO: 204652 - RNA, 74 nt, Homo sapiens
cgggccgagagccgcccgggccagcggccgcgcacccccggccggaggcaccagcggacacaacccgccacgcg

SEQ ID NO: 204653 - RNA, 69 nt, Homo sapiens
caaaagccgacaaccccagaaacaggaaaacaacccgaacaggaaacgggcacaaaaggccccagaacc

SEQ ID NO: 204654 - RNA, 56 nt, Homo sapiens
gggacccgcgggcccggcagagcgcagcaacgggacgggccgcacaaggaggaaag

SEQ ID NO: 204655 - RNA, 72 nt, Homo sapiens
gacagagacggagcggagaacacgagcgggcaccggggcaccgccgaggcagacccgaagccagaaacgcac

SEQ ID NO: 204656 - RNA, 67 nt, Homo sapiens
agagccagaaggcaaaagaaaacggccgagcacggagagaaaggaggaaagggccgccacagaaacc

SEQ ID NO: 204657 - RNA, 84 nt, Homo sapiens
aacaacagcgagggaacagcagaaagcccagaaaccaaaagagaagacggaccagagacaagaagccccagaggagacaagcag

SEQ ID NO: 204658 - RNA, 69 nt, Homo sapiens
aagccaggaggccacagcaaaaacgaagaccaaagcgcagcccaaacggcgaccagaagacggaagaag

SEQ ID NO: 204659 - RNA, 80 nt, Homo sapiens
cgcaggaccggaccgggggagaagcagggcgagcgcgagcagccgggaacgaggccaacaagggagccccggcacacaag

SEQ ID NO: 204660 - RNA, 76 nt, Homo sapiens
gggagacccgagggagccacgaaaacaacacacggagagacaagagcaacaacaggaaaccgcaagaacccaggca

SEQ ID NO: 204661 - RNA, 51 nt, Homo sapiens
gacgcccccagccaccagcccgccccgcgcagcagcacacagaagaaacag

SEQ ID NO: 204662 - RNA, 95 nt, Homo sapiens
ccggcaagggaaaagcggagacgacgaccgcggcaacgacgacgagacccacccaccagcacacaccaaccaaggaaaaaaggagccggcaacgg

SEQ ID NO: 204663 - RNA, 52 nt, Homo sapiens
ggaccggcccccagcaagccccagaccgaaacaaggaccccccgggagaaga

SEQ ID NO: 204664 - RNA, 80 nt, Homo sapiens
aagcagagcaagaaaggacccaggacaaacaggccccccggaagcccaggaaaccagaaagagggcaggcacgagcaagg

SEQ ID NO: 204665 - RNA, 80 nt, Homo sapiens
aagggaagcaccaacgacgggcagaaccaccgggagacaggggacacaccggaagacgcaacacaggccgcgagggggca

SEQ ID NO: 204666 - RNA, 72 nt, Homo sapiens
ggacagcgaaaaagaaacacaagggaaaaacccccaaaacaaacagccagacccgaaagggacgggaacgcc

SEQ ID NO: 204667 - RNA, 72 nt, Homo sapiens
cgggagaaaagaaccgacccacaccaagaaccaggccccgccggcggagcgccaggcgcgaccaccaacgga

SEQ ID NO: 204668 - RNA, 79 nt, Homo sapiens
gaggccgcgcagcccagcgcagccagcgcgggggcaggcagggcgcgcgggccaaggcccggccaacggcccacgaccc

SEQ ID NO: 204669 - RNA, 70 nt, Homo sapiens
agaagagaaacccccaggaaaggggaaccacgacccaacaaaaaacggaaggaaaagggagcgaacccac

SEQ ID NO: 204670 - RNA, 81 nt, Homo sapiens
agaaaccacccacccaaggaagacccacgccacaccaccccccaggcggaagacgggagggaaccgcaggaagcagacaag

SEQ ID NO: 204671 - RNA, 68 nt, Homo sapiens
ggcaaaccggcaggcgcccggacacagaagaggacagagccggagaaagcgggaacagcacaaggagg

SEQ ID NO: 204672 - RNA, 55 nt, Homo sapiens
gcaaccacgccacggcggcaaagcgcacagcaagaaggaccggcaaagagagcac

SEQ ID NO: 204673 - RNA, 74 nt, Homo sapiens
gagccacggaagcggacaggcgggaaacaggagaggagaccggaaggccccacgacccaacaggcaaaagcaac

SEQ ID NO: 204674 - RNA, 85 nt, Homo sapiens
ccaccaccgccgcgccccggcgcccccccgaggaaacccagcggcggcagaaccagccggcacaaagccgaaccagagagagcaa

SEQ ID NO: 204675 - RNA, 79 nt, Homo sapiens
ggggcaacaacccaccggcacccgcaagaagcaccagcaagggccccagggcaccccgcgggagggccacaggagcggg

SEQ ID NO: 204676 - RNA, 76 nt, Homo sapiens
ggaaaccaaacaccgacccaaagcaaaccaggaagcggcagagaaagacccagggcgaccccaacacaagagcaag

SEQ ID NO: 204677 - RNA, 87 nt, Homo sapiens
cggaagcccacacccccgaggcacgaaccccccaaccggcagaaacggacagaagaaaccagcccgaagaggaaggagaaggaaaga

SEQ ID NO: 204678 - RNA, 71 nt, Homo sapiens
cagaaggagggacaggagcccaaaagaaacagggcgcaggaaaagacgagccaggaaaagcaacaaaggga

SEQ ID NO: 204679 - RNA, 57 nt, Homo sapiens
caacacgcagacgcccaacagaggaagaggaagaaacaagcgagaggaagcacagca

SEQ ID NO: 204680 - RNA, 76 nt, Homo sapiens
gaggccaacggcagaagccaccacaaaagcgaaagggcacaccacagaaacacaacacacgcaggacgcaaacgcc

SEQ ID NO: 204681 - RNA, 83 nt, Homo sapiens
aaacaaccaacagagcccgcagagcaccaggcccaccggaaagaaaaacggacccggcgagaagcaaagaagggaacgcgcaa

SEQ ID NO: 204682 - RNA, 70 nt, Homo sapiens
cagcgcgggcgcgaggccgccgccacccgcccagcacagaaccgaaagacgcgccagcaggcaacaaaac

SEQ ID NO: 204683 - RNA, 55 nt, Homo sapiens
ggaagagcgaaaaagagaaagcggcaaaggaaacaggagaaaggcaggaagcgcg

SEQ ID NO: 204684 - RNA, 78 nt, Homo sapiens
gacgacggacggcgggcaccggccgacggccggagcaaggaagacagaacgaggccaggaagcgagaagacaaagcga

SEQ ID NO: 204685 - RNA, 72 nt, Homo sapiens
aaaagcacagcaagggcaaagcccggaagagggaaggggaaacgcggagccaagccggggggggcacagagc

SEQ ID NO: 204686 - RNA, 77 nt, Homo sapiens
gagcacgagcacccgccccaacgaggcgcaagacaaaaacaaagaagaaaaggccaaaaagaaaaaacaagccaagg

SEQ ID NO: 204687 - RNA, 82 nt, Homo sapiens
agaaaagccagaagcacaggccagggcagaggaccaacagggcagagagcaagggggaggaagcagggccaggcacaaccag

SEQ ID NO: 204688 - RNA, 66 nt, Homo sapiens
agaccgcgcccgcggagagcccaaacaccaccaccaaggccccgagccccggccccaaagacccaa

SEQ ID NO: 204689 - RNA, 66 nt, Homo sapiens
caggagaaaccggacgcgacggggcccgacagcaacgggagaacagacagcagagggaagcggacc

SEQ ID NO: 204690 - RNA, 63 nt, Homo sapiens
ccccccggacccagccccggagcccgaagcggaacaggaagaggaaagggaggaagaaaaggg

SEQ ID NO: 204691 - RNA, 71 nt, Homo sapiens
gggacgagcccacgcgagagaacgaagaaggaggaggggaggcaaacccccaccagcacaacagacgggac

SEQ ID NO: 204692 - RNA, 73 nt, Homo sapiens
gaaagagacccgcagagccacagggcagggaagcgagaaacagagagacaggccaaagccccaaggccagaga

SEQ ID NO: 204693 - RNA, 74 nt, Homo sapiens
aggaccaaccggcaagggacaacggccaaacagcccaccgaggaagaccaaaggaccaaccaacaagaagcaca

SEQ ID NO: 204694 - RNA, 84 nt, Homo sapiens
gcaaaggcagggccccgccgcggacgcccgccgcgcgcggccaagccagccggccccaggggaccaaaacaaaacgagagcaag

SEQ ID NO: 204695 - RNA, 73 nt, Homo sapiens
ggaggaaagcaggaccagagaaccagaagagaagacaggccccagccaacgaaggagggacgggacacccgga

SEQ ID NO: 204696 - RNA, 50 nt, Homo sapiens
gaacccgaccggacccagccccagaaggggaggaaagaaagggcccaccc

SEQ ID NO: 204697 - RNA, 74 nt, Homo sapiens
cacagaaggcccagcaggagcggaaacggacagcccgggcagaaagcagacacgggagcaaagacacgaggaag

SEQ ID NO: 204698 - RNA, 83 nt, Homo sapiens
cgccaaagcccgggcgcggaagaagccaagaccaaaagaaccaggcagagaccagaaacaaagcggaccagaaggaggcaggc

SEQ ID NO: 204699 - RNA, 55 nt, Homo sapiens
caagaagaagacagaacgcccccaccaccgcaaacaccacagaccccgccgggga

SEQ ID NO: 204700 - RNA, 116 nt, Homo sapiens
gacagagcggagcagcgggcacggcgccagggcagcagggccgggccgcggcggccgcgccggccggcaaggacccacagaccggcgacacaagaaaacaacggggaggggagccc

SEQ ID NO: 204701 - RNA, 72 nt, Homo sapiens
acgcgagggaacaggaaccggacaggcccaagggaagcaagaaaaaagacgggcccggggagagaaggagcg

SEQ ID NO: 204702 - RNA, 82 nt, Homo sapiens
ccgaggaggcagcgcggggcagcgcgagccgggaagaacaccccaccagaccacccagcaagcccacaaaaaaggcacaagc

SEQ ID NO: 204703 - RNA, 72 nt, Homo sapiens
agcagcagcgcgagcgacaacgggacgggaaacgcccggagcacacaaggcgaaagaaaaggcaagagaacc

SEQ ID NO: 204704 - RNA, 80 nt, Homo sapiens
gcccggcaggaccgaccagccgagggccacgccggaccccgccacgggacacggcaaagagaccccccaggggacagaag

SEQ ID NO: 204705 - RNA, 57 nt, Homo sapiens
cgaaaacccggacccgcaccgcagcgcagccgaggaagaagaaggcagcagaaaaga

SEQ ID NO: 204706 - RNA, 74 nt, Homo sapiens
ggacccagcccaggcggcgcggacggggcggagaccgacaaagaaccaccgcaaggaccagggaaccgggcaga

SEQ ID NO: 204707 - RNA, 84 nt, Homo sapiens
gagcaacgaaaagagcccggaaggaagagacaggaggcagcagacggacaccagaaaaaaggcagcggaaagaagaaaagaaac

SEQ ID NO: 204708 - RNA, 35 nt, Homo sapiens
caggaacagacaaagcaggccgcagccccccggcc

SEQ ID NO: 204709 - RNA, 72 nt, Homo sapiens
caaggagagaagagaagaacagcacaggacagccgagcacaccacaggccaaacggaggaaggcaccacggc

SEQ ID NO: 204710 - RNA, 77 nt, Homo sapiens
gggaacaggcggagcggaagcagaacgggccaagaagaggagcgaaagaagaccaccaaccagaaaaaccaggaagg

SEQ ID NO: 204711 - RNA, 71 nt, Homo sapiens
agaggggaggcgcgaaagggagaaagaagagagaccagaaacgagaggagaagaaaccagccagacagagc

SEQ ID NO: 204712 - RNA, 74 nt, Homo sapiens
acagaacagccaccaaaacagaagagaccaggcgagcccagggaaagacaaacgaagaagagcaaagaacaagc

SEQ ID NO: 204713 - RNA, 89 nt, Homo sapiens
gcggagcagcgaccccggcccggaggaggccagcgggacaagcgaaacgcgaagacgacgagcgcaccaagaggaacacaggcgaccgc

SEQ ID NO: 204714 - RNA, 72 nt, Homo sapiens
aagaggcaccagccgccgggaggcaccagcgccgcagaggaagaccgcaggaaagcaggaaggcaagaaagc

SEQ ID NO: 204715 - RNA, 52 nt, Homo sapiens
gaccacagggccccaggcacggacaaacaacagaccaaggggcggaaaaccc

SEQ ID NO: 204716 - RNA, 51 nt, Homo sapiens
accaggccggcggcagccaaaagcgagacaagacgaaaggacgccacaagg

SEQ ID NO: 204717 - RNA, 74 nt, Homo sapiens
cggaacgcaaagagcagcccccacaagcgaagagcaaaagcacagaaaggacacaaagagagcgaaaagagaac

SEQ ID NO: 204718 - RNA, 72 nt, Homo sapiens
gagagacccgccccaaggacaggcagccccaccaccgggccccaaccaaggcaaaccgacacaaagcgagag

SEQ ID NO: 204719 - RNA, 79 nt, Homo sapiens
caagacggggcgccccacagaggggcgacggggcgggcagcgccgaggcacgacaaccgggccacgggcagcagacggg

SEQ ID NO: 204720 - RNA, 76 nt, Homo sapiens
cggcagcagcggcccgccgccgcccgcccgcgcgcagcccccggcagcggagcagaaaaggaaacgaggcgcagaa

SEQ ID NO: 204721 - RNA, 78 nt, Homo sapiens
gccggagaggaccacacaaccgagcagcacagaccaacgggagccgcaaggacaacagccgcggccagacagcggccg

SEQ ID NO: 204722 - RNA, 69 nt, Homo sapiens
gggggagggagagcggcccccccccggggggccgcggggaagcccccgcccggacagaaagcgggacac

SEQ ID NO: 204723 - RNA, 51 nt, Homo sapiens
gcaacccggcacacgcccccggcccgcccgagagccgcacagccacacggg

SEQ ID NO: 204724 - RNA, 58 nt, Homo sapiens
ggaaaccacgggccacaggaaaggcaggcacacagagaaaaaaagggaacaaaacaca

SEQ ID NO: 204725 - RNA, 81 nt, Homo sapiens
cgacgggggggaggcggcagcgcaaccacgagacggccccaagagagaaggcagaaacaaaaaagggagagaaaaagcccg

SEQ ID NO: 204726 - RNA, 70 nt, Homo sapiens
ccaggacaacccagaggcaacaaaggcgagacaaccggagcccccacaaaaccaggaggaaaaagaaccc

SEQ ID NO: 204727 - RNA, 77 nt, Homo sapiens
gacccaggagcgcaaaccacccaagcgcaacaccagggaggccaagcgaccacccaaagaagggcggaaagcaggaa

SEQ ID NO: 204728 - RNA, 76 nt, Homo sapiens
ggaacagcaggagaagaccaacacagggaccagggcgcgcaacaaaggagaaaaagcgggagaaggaaacagccga

SEQ ID NO: 204729 - RNA, 81 nt, Homo sapiens
ggcccggcccgacaccgcgggccgccagacgggaagggggacaccggggaaggaggccagacggaccgaggccggacccag

SEQ ID NO: 204730 - RNA, 73 nt, Homo sapiens
acaaccaggagccccgggcaggagagacaacaaagcgcaaccaaggcagaagaaacacacaggagaacccccg

SEQ ID NO: 204731 - RNA, 68 nt, Homo sapiens
aggagcaacccgaaaaccagccagacacaaacaacccgggacagaggcaccgaaggcaagaagaacag

SEQ ID NO: 204732 - RNA, 66 nt, Homo sapiens
cagcgggagaggagggacccacccccaccccacccagagaccaggcccccacaccggaaacccccc

SEQ ID NO: 204733 - RNA, 73 nt, Homo sapiens
ggagggacacagacccaggcacagggagagacgccaaggccccaaaggacaaagcacagacagcagaagcaag

SEQ ID NO: 204734 - RNA, 76 nt, Homo sapiens
acgacaccacggggccgggaccccacccaagaggggccagaaaccaagcagaagaagacacaaccaaggcgcaccc

SEQ ID NO: 204735 - RNA, 81 nt, Homo sapiens
caaacaagaaaacgagcaggcacgagaggagaccacggaaaggagcagcagcaggccacgccaggggaggaacgacccagg

SEQ ID NO: 204736 - RNA, 78 nt, Homo sapiens
gcgggcaacggcgggacagcaaaaagacccaccaaggaagcagcggccacgccagcgccaaggaaagagaaaaaccaa

SEQ ID NO: 204737 - RNA, 82 nt, Homo sapiens
gaccgcacggaaggaacggaggaaagcgaccaggcggcggaacagcaggaacaagaggaagccgagcccgggcccccaagcg

SEQ ID NO: 204738 - RNA, 55 nt, Homo sapiens
agccaaggcacagccgaaaggagaggcacagccacagccgcaagccaagagcagc

SEQ ID NO: 204739 - RNA, 86 nt, Homo sapiens
gacaacccgcagcaaacaacccgcaaacgaaaaagaacgacagagcaaccaggaaagaagaggagcagccacacagcgagagagaa

SEQ ID NO: 204740 - RNA, 79 nt, Homo sapiens
gagcccggaaacaagggaaaagggagcggcaaggagagaaggcaaagcgggaaaaaagggacaagaggaccaccaaaaa

SEQ ID NO: 204741 - RNA, 63 nt, Homo sapiens
gagacccagacccggaacgaaccagaggcacaaaacaaggagaggaggagggagacaggggca

SEQ ID NO: 204742 - RNA, 77 nt, Homo sapiens
agaacggagaacgggacagaaagcagggaggggaaaagcacgaaagcaagagaacaaagcacgaacaacgacgaagc

SEQ ID NO: 204743 - RNA, 64 nt, Homo sapiens
agacaccccgcaacgaggaacaccaggcgaacaagaaaacagagagaaaagaaaaagaagaagg

SEQ ID NO: 204744 - RNA, 65 nt, Homo sapiens
cgagcagggccgcccacaggagcaccgcagcccaccgaaagcaggagcccggaaaggagaaggaa

SEQ ID NO: 204745 - RNA, 84 nt, Homo sapiens
aagcggccaaagaaggaagcgcgcaccggagggaaacaaaagcagcagggcagagaaccgcaagccagggccagcagcggccca

SEQ ID NO: 204746 - RNA, 73 nt, Homo sapiens
ggaaaaggaggcaagaaaaaggccccgacagacgacagggacaagcgcacagcggagaaagcagcgcggccag

SEQ ID NO: 204747 - RNA, 71 nt, Homo sapiens
ggggacacggaaacccgaagcgcgccaacaagacaaaggcagaagcagggaaggcccacccagcagaacac

SEQ ID NO: 204748 - RNA, 63 nt, Homo sapiens
acaagcagaaacagacaggaccacgcaaggccagcagaacgaaggggacgcaagcagaaaagc

SEQ ID NO: 204749 - RNA, 81 nt, Homo sapiens
gacccacccgagaacacaccaaagcccgcccccaaagaccccaacggacccaggcaaaaggagggcaccccgccaggaccc

SEQ ID NO: 204750 - RNA, 59 nt, Homo sapiens
ccgaccgagcagggcacacccgcgaggaaaggcccaaagggcgaaagaccagggccagg

SEQ ID NO: 204751 - RNA, 56 nt, Homo sapiens
gacacccagcccaggagaaagcagacgccccagcgggggacagaaaacggacgaac

SEQ ID NO: 204752 - RNA, 73 nt, Homo sapiens
caaaaagaaccgcagacagaaccaggccaacggagcgacccagcgacaaaccagaggggccagcggggcgggg

SEQ ID NO: 204753 - RNA, 79 nt, Homo sapiens
aaggaggggagaaaagacccgaaggaagaagcaagcagagaagagagggcagcacgaaaggacaagggagaaaaccaaa

SEQ ID NO: 204754 - RNA, 68 nt, Homo sapiens
gacacagaaaccccgcagaaccagaaccaggcggggaggacccgaagacaaaaccacccacgaaagcg

SEQ ID NO: 204755 - RNA, 64 nt, Homo sapiens
cagaacagcagccgaaaacccccaccaacccgccgagccaggggagaaagacagcaaagaaaag

SEQ ID NO: 204756 - RNA, 57 nt, Homo sapiens
cgagacagaaacagaaagggacacaaaaggcccgggaaaccgcaagaccgcacgcgc

SEQ ID NO: 204757 - RNA, 73 nt, Homo sapiens
ggggagcacgaggagccgaagaaggaagaaccacgaagaaacaccacaaaccgggggccaacaagcagccgca

SEQ ID NO: 204758 - RNA, 36 nt, Homo sapiens
cccaagaggggaacaggaacacagacggcagagcag

SEQ ID NO: 204759 - RNA, 73 nt, Homo sapiens
gagagggaaccacaaccccaccaggggaaacaggaagcacgacccgcggaacgcgaccaaagcggaacacccg

SEQ ID NO: 204760 - RNA, 86 nt, Homo sapiens
cggagcaggacacgggaccggggcgagggggccagcgacgccggccaccaacgagagccaccgaaggaggagaaggaccaagaacc

SEQ ID NO: 204761 - RNA, 53 nt, Homo sapiens
cgaggggaccaccgcagaccacaaagaggagaacgaaaccagaacagaaaggg

SEQ ID NO: 204762 - RNA, 72 nt, Homo sapiens
aaagaaggaccggcaaaggaagcccacacagaagagcaggccgacgaggcgaggaaccaaaggccaccccgc

SEQ ID NO: 204763 - RNA, 74 nt, Homo sapiens
gggcaccagaggggaaggggcccgggccgcagcaaggagaccaaggagaacccaccacggagcgggcggcaggg

SEQ ID NO: 204764 - RNA, 81 nt, Homo sapiens
cggcggcgccgcgcgcgcagggccgccggcccgcagccgccaccacccaggaccagaaggcggaggcaaggcaagaccggc

SEQ ID NO: 204765 - RNA, 75 nt, Homo sapiens
gacaaccacccagaggcaacggggaggcggcccagcaacagcgggcagaaacgaagcacaggaacaagaagccaa

SEQ ID NO: 204766 - RNA, 57 nt, Homo sapiens
ccaccaaccccagcggggaaaacaaagggaccgacacaagaagcagccagaacagac

SEQ ID NO: 204767 - RNA, 81 nt, Homo sapiens
ggggcagaggccaagagcccaacaccacccgagagccccaagaaaggcgaaaagcgaagacagccccgcggaaggacaaaa

SEQ ID NO: 204768 - RNA, 59 nt, Homo sapiens
cggccaagaaagcccgaaaaccaagaacaagcacacagagacggggacggcaacaacaa

SEQ ID NO: 204769 - RNA, 74 nt, Homo sapiens
gaaccaacccaagggaccaaaagcacagaagaaaagccagaagaagggcaagccagacaacaggccaaagccag

SEQ ID NO: 204770 - RNA, 81 nt, Homo sapiens
cccgggcgagacaaacaacccaggccacaacacccggcccaaagaggcgaggagaagggaagcccacacgagggcggcggc

SEQ ID NO: 204771 - RNA, 77 nt, Homo sapiens
caacagacaggccaaagccaaaccaagacacaagcagacccgacaccagaagaacagacaacccagcaacagacgga

SEQ ID NO: 204772 - RNA, 84 nt, Homo sapiens
agaaaggaaacggaagaaaaaagaaaagaaacgacaaaaacacgagggaggagagaagagaaggaccccccgccaacaccacgc

SEQ ID NO: 204773 - RNA, 73 nt, Homo sapiens
caaggaagaccaaaagacggacacccaaaacagaggggagggacaggcgcgcgaagaggacaaagcgaagaga

SEQ ID NO: 204774 - RNA, 92 nt, Homo sapiens
gggggcgggagccgccgacccggagcccgagccgggagagggagccgccgcagccgccggcgcgggagcaggaggcaaagggaccccaagaa

SEQ ID NO: 204775 - RNA, 67 nt, Homo sapiens
gcggagagcaacgccgggacagcgcaaggcgggaacaagcggagcaccacacccagcgaggaagcca

SEQ ID NO: 204776 - RNA, 68 nt, Homo sapiens
cgacgcccccccccgcccggaaagcgcccagccaccagcaaccccccaggaggcaccgacacacccgc

SEQ ID NO: 204777 - RNA, 77 nt, Homo sapiens
aagagccccccccccaacaccgcgacacgcaggacaccagaggaccagaacccacgagaaacagacgagccaaccag

SEQ ID NO: 204778 - RNA, 83 nt, Homo sapiens
ggccgcgggcgcggacgccggcccgcgcgcgcaccccgcggacgccacagcgcgcagccagcacgagcccccccaccaccaca

SEQ ID NO: 204779 - RNA, 80 nt, Homo sapiens
acacagaaaagaagacaagcgaggacaaagagaggccccagaaacaaacgagaaagggaaaaccgccgcaaacaacgaaa

SEQ ID NO: 204780 - RNA, 41 nt, Homo sapiens
gccgggcgggagcccccggccagacgggaacggagcccccc

SEQ ID NO: 204781 - RNA, 67 nt, Homo sapiens
ccgaaggcgaacacagaggaaaccgcaccgcccggagaccaccgccagggagaaaacccacacaggc

SEQ ID NO: 204782 - RNA, 62 nt, Homo sapiens
aggcgcgcgccccccgagcaggagggcccaggaaccacccagggaagacgaggggcgaggag

SEQ ID NO: 204783 - RNA, 67 nt, Homo sapiens
cacagagaacaggaacggacaaggcaggacaaaacaccggggcccacaggacagccgggcgcacaca

SEQ ID NO: 204784 - RNA, 59 nt, Homo sapiens
cgccggaaaccaccgggccagaaggagggggcccacgagaagagcaggcgacgggggag

SEQ ID NO: 204785 - RNA, 73 nt, Homo sapiens
gcccaacggaaccacacggcagggcagaaaagaacagacccagaagaagcgaaaggggagaaagaagaaagca

SEQ ID NO: 204786 - RNA, 70 nt, Homo sapiens
ggcacacagcacgggcgggggacgggcagaaaaacaggccggggggggcacagagccccggaagacagcc

SEQ ID NO: 204787 - RNA, 74 nt, Homo sapiens
caaggagaaagggcaaacgcagcacacaaggcagccccaagcaagaagaacgagacggccagagacggaggcac

SEQ ID NO: 204788 - RNA, 80 nt, Homo sapiens
cgacgcggaccagaagccagagcgaggacgccggcaggaaccacggaaggagggggcgacacacaagcaggggggaccga

SEQ ID NO: 204789 - RNA, 74 nt, Homo sapiens
aaacgaaacggagagacagccgacaccgaaggagccagcgccccgaagaagaaagcccaacgcaggggcgagcc

SEQ ID NO: 204790 - RNA, 81 nt, Homo sapiens
ggggcaccagggccaggaagaaggagagacgaccacgcaacagaaaaagagcgcacccaagggaagagcgaaaacagaaaa

SEQ ID NO: 204791 - RNA, 86 nt, Homo sapiens
ggcaagcccgcgaaggaggcagcggcggggcccgggacgaggcggacggggcccccacagagagcacacaaacaaagcgaaaccac

SEQ ID NO: 204792 - RNA, 78 nt, Homo sapiens
aaaagaagaaagccagcagaggaaaaaagaacacagggagcgagaacgggccaggcaggaagaacccgcccagcagcc

SEQ ID NO: 204793 - RNA, 73 nt, Homo sapiens
gaccccgcgcgcccccgggccagcagcccggcccccgggggacaacaaccggcaccggacaagagcagagaaa

SEQ ID NO: 204794 - RNA, 61 nt, Homo sapiens
aaacgggacgggaaagagcccaccggagacccaccaggggggagccgccaccaaaagcaga

SEQ ID NO: 204795 - RNA, 84 nt, Homo sapiens
acagagaacccagacaacaggacgccgccaaggggaaccgcccaaaagcccgccagaagaaggacgggagccaaaagaaggcaa

SEQ ID NO: 204796 - RNA, 57 nt, Homo sapiens
gacagggacaagaaagagacggaccaccacgagagacgaagaaccaaaccagacggc

SEQ ID NO: 204797 - RNA, 78 nt, Homo sapiens
gacccgggagcccgaggcgacgagcggcgggggcaggaacagagcggaagggagacgggacccgcgcccacggcccac

SEQ ID NO: 204798 - RNA, 73 nt, Homo sapiens
gagaaagcggcgggcacgaggagaaggccgggccgaggccacgggcaagcccgggagggaaagccagaccgcc

SEQ ID NO: 204799 - RNA, 65 nt, Homo sapiens
gcggcgcacggaaacagccacagcaggagccaaccaaaggagaagacgggagaggaagaagaagg

SEQ ID NO: 204800 - RNA, 63 nt, Homo sapiens
ccggccaacaccccaaaggcgcgaaaaagacccccacagccacaaccgggcggggggcgcgcc

SEQ ID NO: 204801 - RNA, 79 nt, Homo sapiens
cagcgggccaagagagggcaccggaacaaggccgcaagacggcaggcaccgagaccagcgaggaggagagcgcaaccaa

SEQ ID NO: 204802 - RNA, 75 nt, Homo sapiens
cggccggcggggcggcccgaggagcgggccgccgcagggggaggcacccaaaacggccaaagaccacagccaaaa

SEQ ID NO: 204803 - RNA, 78 nt, Homo sapiens
gaagcaagaccaacacgcgcaaggaggggcagcagcaggacagggaacccgggagacagcaacagacggaggaacggg

SEQ ID NO: 204804 - RNA, 74 nt, Homo sapiens
ccacccacacccccccccaccgcagcagcacccgacaggacgggaaaagccagccggcacggccacaaccgacc

SEQ ID NO: 204805 - RNA, 76 nt, Homo sapiens
ggccgggaccggagcaccggcagacccggggaccgggaaggacaccaaccagaagacggagagagcacccgcaaaa

SEQ ID NO: 204806 - RNA, 87 nt, Homo sapiens
cgcgaccgagacggcaggcggcggaagcgggagcaccgcggacgccccagggcacaccgcgcaccagcgagaggaggagaaccggcc

SEQ ID NO: 204807 - RNA, 81 nt, Homo sapiens
caaacgaaaaccggaacagcagcacagcaaaggggagaggacagaaaccgaagcgaaaagggccgggccaagcaggacaac

SEQ ID NO: 204808 - RNA, 78 nt, Homo sapiens
gagaagcagcgccgcccggggcagaccaggcagaacccagagggaaacagccagacggggcccccaaacccgaccggc

SEQ ID NO: 204809 - RNA, 49 nt, Homo sapiens
caaggggcagcagacccaccggaaagacgccagacgacaaaaggggcgc

SEQ ID NO: 204810 - RNA, 66 nt, Homo sapiens
cacaacccccaaaaaggaaaacccagaacagcgccgaggaggaaggaaaacacccggcagggaagg

SEQ ID NO: 204811 - RNA, 68 nt, Homo sapiens
gccacgcgggaggcccaggcccccggacggcgcggaccccgacggcgccggcgagcgaacccacacag

SEQ ID NO: 204812 - RNA, 70 nt, Homo sapiens
aaaaggaacagacccaacaaaggaggcagaacagaaagcagccggaaaggagaaaagccagaaccaaaga

SEQ ID NO: 204813 - RNA, 77 nt, Homo sapiens
ccgacggagcgccaggacgacaggcccagaacaggacagagcaggacacaaaaaggaacccagaaagacaaggaaga

SEQ ID NO: 204814 - RNA, 73 nt, Homo sapiens
caccgccggacccaagcgaaaaagggagaacagcagcgacccgaaccgcagacggagaacaaaggcagcggcc

SEQ ID NO: 204815 - RNA, 81 nt, Homo sapiens
cgaggcaggcgcccaccgccggcgggagcggcggaagcccagcggccaccgggcgcgaaggcacagaccccgccacagcca

SEQ ID NO: 204816 - RNA, 87 nt, Homo sapiens
gggagcgcggaaacggaaccgggaggcgacgcacacgagcggaggcgaagggcggaaaacaccccaaaagccaaaagggaaaggaaa

SEQ ID NO: 204817 - RNA, 76 nt, Homo sapiens
cggagaggagggagaacaagacgaggaacaaaaaccgagagaggaacgaggggcacagaaaccagaaaaacggagc

SEQ ID NO: 204818 - RNA, 62 nt, Homo sapiens
caagcacacacaggcgcgaaacggaaaaaggcagaaccacgagcccagccaaggccgcacaa

SEQ ID NO: 204819 - RNA, 66 nt, Homo sapiens
ggcaggcgacaagcaggagcacagacgacaggaagggaaggggcggagacgggcggaacgcaggag

SEQ ID NO: 204820 - RNA, 77 nt, Homo sapiens
agcggaggacagccgagaggaggcgacgccggaccgcgaagagacgagaggggcacggaaggggagagggacgggga

SEQ ID NO: 204821 - RNA, 71 nt, Homo sapiens
gggcagcaggcggccaggcggaggggcgcggcgcagcccgcggcggcccagcccggaccaagagacgagga

SEQ ID NO: 204822 - RNA, 41 nt, Homo sapiens
aggccaacacgcgcacaaaggagggagaagaccaaagaaga

SEQ ID NO: 204823 - RNA, 72 nt, Homo sapiens
aggaacagaaccaccaaagggaacccagccaaaagcagggacgcggacaaaggggcaaaggccaagaaagga

SEQ ID NO: 204824 - RNA, 78 nt, Homo sapiens
agcgcaccccacacacccaaccggggcgggaagaagcccgccgccaccaccccaccaccagcgcagcagagaagaaaa

SEQ ID NO: 204825 - RNA, 75 nt, Homo sapiens
gccacgaaaccgaccgcggcaagagcaggcaaaccgacaccagcgacacaagcgcgagggaaccacagaggacag

SEQ ID NO: 204826 - RNA, 69 nt, Homo sapiens
ggacagcgcggacaaccgggccccagcccagaccagccagcagaaaacacagagaaaacacggagaaac

SEQ ID NO: 204827 - RNA, 66 nt, Homo sapiens
aaccccaaccccgcgcgcggccggaagaccccaaggcacgacgacggagagaggaagaagacgggg

SEQ ID NO: 204828 - RNA, 54 nt, Homo sapiens
ccgagagcccggaccagcagagggccgacgccccaggcgggggaggaggagggg

SEQ ID NO: 204829 - RNA, 68 nt, Homo sapiens
cgccgcaagcggccgaaaggagaaccgaccaaaaggagcggcgaggccaggaaaagcaagaacggaaa

SEQ ID NO: 204830 - RNA, 75 nt, Homo sapiens
agaagaacccacaggggccaacagaggaaggcccgccagccaccgcagaggcgaccccaggacggacgacaccca

SEQ ID NO: 204831 - RNA, 90 nt, Homo sapiens
gcggaccccagcgccagaggacaggggcgaacgccgccgggagacccagccggcgggcgagcagggaaggcggccccgcagcagaggcga

SEQ ID NO: 204832 - RNA, 37 nt, Homo sapiens
agccgcacccaggagggaggcagaagacaagcccggc

SEQ ID NO: 204833 - RNA, 75 nt, Homo sapiens
gggaggagagacggcggcggaaaaccccaaaaggacaaagggaaccgagcaagggggcgagaggggaacgccacc

SEQ ID NO: 204834 - RNA, 70 nt, Homo sapiens
ccaaggagaccgcccccagcccacagaggcgcggaaagcacggaaggggggggccgaagaagccaggggg

SEQ ID NO: 204835 - RNA, 81 nt, Homo sapiens
aacacaccagaacaggaaggggagaacaccgaagcccccacaagggaagaaccacaaggggagcccaggggcacacagggg

SEQ ID NO: 204836 - RNA, 63 nt, Homo sapiens
cgcggagaagaaggcccagagaggggcaacaaggcggcgagccagaggccaacgcagaggaac

SEQ ID NO: 204837 - RNA, 73 nt, Homo sapiens
cgggaagcaaacccggaaggagaggaaccggcccccagcgcccagagagagcagacgaccagggaaaaagaca

SEQ ID NO: 204838 - RNA, 64 nt, Homo sapiens
agcaaaaagcaaggccaccaacaagagcaacccaggcgacagagaccggggccggagcaggcaa

SEQ ID NO: 204839 - RNA, 102 nt, Homo sapiens
cccaggcaggacgcgcgacagccgaggagcggacgcccaggaccggaacagacgaggcacaggagaggaagcgaaaacgaagcacaaccccagcacgccgcc

SEQ ID NO: 204840 - RNA, 86 nt, Homo sapiens
cggagcgggcacaggccaggcccgcccgggagaagcccgccacacgcggcccacgcgagggccgcgcagccccccaagacccgcag

SEQ ID NO: 204841 - RNA, 74 nt, Homo sapiens
aacacaccggccccggggggacaaagaagcacacaggcacgcggcaaagaacagggagcgacgacagaacagcc

SEQ ID NO: 204842 - RNA, 85 nt, Homo sapiens
gggagccaccagccccccggagcgggcgggagaaggcaagcaggagaagccggagcggcgcgcagacgcggcgccgcaggccagc

SEQ ID NO: 204843 - RNA, 76 nt, Homo sapiens
ccgccggaagaaggccgcccccaccggacgaggccccccaaccaggcaagaagcgcaacaggaaaggagagaagaa

SEQ ID NO: 204844 - RNA, 82 nt, Homo sapiens
aaaaaaaggaaacacacaaacgcagcagcacacaggacagggaaaagaagaggaagaaaacaacacacacccaacacaaaag

SEQ ID NO: 204845 - RNA, 106 nt, Homo sapiens
ccgagagccgcccgggccagcggccgcgcacccccggccggaggcaccagcaccgccagagcggaacgaccccagagcgagcccgcagcagcccagaaacaaagac

SEQ ID NO: 204846 - RNA, 69 nt, Homo sapiens
agagaggccagaaaggaagaagcggggcgaccgagggcgcagaacacacaaagacagaggggcaccagg

SEQ ID NO: 204847 - RNA, 77 nt, Homo sapiens
gcgaaaggaaagaaccagaggaaacggacgaggaaggagaacccagaaaggcggagaagacaacacaggaggcccgc

SEQ ID NO: 204848 - RNA, 75 nt, Homo sapiens
cgcacgccgccggggcgcggccgcccgagggcagcggggaagaagaaaaggaaccgaggccccccggcgacacgg

SEQ ID NO: 204849 - RNA, 79 nt, Homo sapiens
cagggcaagaaaaccggacccagagagggaaaacaccagcagcaaggagcaaggaggcggcgaggccagcagggagagg

SEQ ID NO: 204850 - RNA, 81 nt, Homo sapiens
ggaagggagagggaaaagagcccagaaggaaagcacgcagacagccgaaccaccgggcagcaacaggaacagcggaggcca

SEQ ID NO: 204851 - RNA, 63 nt, Homo sapiens
gcgaaaaggcggaaaggccggggaaaagagagaagggagggcccaaccccagccggaagccag

SEQ ID NO: 204852 - RNA, 60 nt, Homo sapiens
aaggaacaaaccgaagaacagcgggaaagaaggcaaaacacggaccccgagccacgacca

SEQ ID NO: 204853 - RNA, 109 nt, Homo sapiens
agagcaccgcgccccggcgcggggcccgcggagcccaggccccccccggacccgccgcagagccaggacacgcaccacggcacgggagggagacagaacgccagcgcac

SEQ ID NO: 204854 - RNA, 70 nt, Homo sapiens
gagagaccgaagagagcccgagcgagagaaagagccaggacagagggcagcggcacaacccagagggccc

SEQ ID NO: 204855 - RNA, 79 nt, Homo sapiens
cggcggggccgcagggcgagcagaaagcccccagcacagccaacccagccggcaacaaggccaagaagacgccccggac

SEQ ID NO: 204856 - RNA, 73 nt, Homo sapiens
cccccggcgcgccgcggcccggagcgcggcccgaggcccgcccagagagccaggacaaaaccaggcagaacca

SEQ ID NO: 204857 - RNA, 60 nt, Homo sapiens
ccgggccaaaggcaaccggacggcggacaaggcccagaacaagcacaacaagacccaaag

SEQ ID NO: 204858 - RNA, 71 nt, Homo sapiens
gaccccccggcgccgcgccggcggcgagaacacaaggaacgaaaggaagggaagaagcagaaccaagacaa

SEQ ID NO: 204859 - RNA, 52 nt, Homo sapiens
aaacagaagaggacaagcggcccagaaccaaaagagcagaaggagcgagaga

SEQ ID NO: 204860 - RNA, 76 nt, Homo sapiens
aggcccacccaggaaaccagccggcacgggaggggcccagggagccgcagaacaccgagagcagccgcaccgcgcg

SEQ ID NO: 204861 - RNA, 79 nt, Homo sapiens
caagcaaagggcaggaggcggccaccaagaccaccacaaaacagccaagggacaaggagacaaaggggaacacccaacc

SEQ ID NO: 204862 - RNA, 80 nt, Homo sapiens
cgcggggaaaggcgcgagacccagaggccgcggccgcgggggcacccgaggaggaagagggcagggcccacggaaagaag

SEQ ID NO: 204863 - RNA, 93 nt, Homo sapiens
cacaacgcaggacccccagagccccaggaccagaaccaaggccccccagccccaaaacagaacagaagacagagacacgacacagcagccagg

SEQ ID NO: 204864 - RNA, 62 nt, Homo sapiens
gcggagaccagcaccaccagcaggcacagccacgagagaagaaagaaaaagaaaccgccagc

SEQ ID NO: 204865 - RNA, 84 nt, Homo sapiens
agaagacaagaacagccaaagccccacagcaagacccaggaagccgcgggcaaaccagaccgaagggccgccggcccaggcgga

SEQ ID NO: 204866 - RNA, 60 nt, Homo sapiens
aaggcagaccgaagcagacgcggccgagacacaaagcggcagggaagggacaacagccag

SEQ ID NO: 204867 - RNA, 79 nt, Homo sapiens
ccaccacaccgcaccggcacaagacaccaagacacgacgacaggaaaaccaacggcccggaggaccacagcccaggggc

SEQ ID NO: 204868 - RNA, 73 nt, Homo sapiens
cagcggaaaaaccggagacgccaaaaaggacggacagcgcaggagaagagggccacaagcgaaggcaaaacca

SEQ ID NO: 204869 - RNA, 113 nt, Homo sapiens
cgcaagaccagcaacagaacgcgccgagcccccgcgacccaccgaaggccgggggacggagaacccaaggagaaacacgggagcaccgaaaagaaagggcagaaaggaagaca

SEQ ID NO: 204870 - RNA, 72 nt, Homo sapiens
aaaccggacagccaagcaacagcccagcaaggggggcacccgaggaggaagagggcagggcccacggaaaga

SEQ ID NO: 204871 - RNA, 104 nt, Homo sapiens
ggggaaagccaaggaaaaacggagagccacaaaaaaggaagcgaaacaaaccggcacgagccaggcaccagaaccagaacaccaccaggagcgcgcagaacgcc

SEQ ID NO: 204872 - RNA, 77 nt, Homo sapiens
ccgcagcgcagaaggaaccggcaaagcgcaggaacgggaacgcaggagcgaccagacgaagaaccaagagaaaagac

SEQ ID NO: 204873 - RNA, 78 nt, Homo sapiens
gggaagccggcagcaccaaagggaggcccagaccacaacacaaaaccaccaccgggcaagcaccggcagaccgagcag

SEQ ID NO: 204874 - RNA, 71 nt, Homo sapiens
gaaaccaggagggcaccaaacaaaaggaaaccacaccaaccaagaagagccagccgcggagaaccgaacca

SEQ ID NO: 204875 - RNA, 67 nt, Homo sapiens
cgacaggaaaaaaagcggaagagcgccagcacgacagcgaacccacccaacacggcaaaacaaagac

SEQ ID NO: 204876 - RNA, 55 nt, Homo sapiens
cgaacaccggaccgccaggggacagcccaccacaagcaggccccaagcccaacag

SEQ ID NO: 204877 - RNA, 71 nt, Homo sapiens
ggggcaaagcaaaaaggcagccagagcggagccacacaccgagggagagaagaacaaggggagccaagaac

SEQ ID NO: 204878 - RNA, 56 nt, Homo sapiens
agacccccacaagacgacacccgacgaacggccgagcgaccaggagaggagccccc

SEQ ID NO: 204879 - RNA, 84 nt, Homo sapiens
cggcagaaaacggacgcccacagaaggaagcacaaaaagggacagcggggaaaggccacagaagacacccgaggagccaaagaa

SEQ ID NO: 204880 - RNA, 81 nt, Homo sapiens
ccccggaacagcgccgaggcccaaggcagaggcgaggcggaagggcaccccacccggggccacaacaacaaacggacaggc

SEQ ID NO: 204881 - RNA, 78 nt, Homo sapiens
cgcaggaaggacaccgaaggaggcaaccggaccccaaaaaccgagcccaagggcagggaccagccgcccccgggcgag

SEQ ID NO: 204882 - RNA, 89 nt, Homo sapiens
cgggagaaagcgcccacgcacgaaagcccaggccaaaaagagagcaaaggaaacccagcccagagccacgagccagagaggagggcgca

SEQ ID NO: 204883 - RNA, 76 nt, Homo sapiens
ccggcagaaaaacaccaggaaacaggaacacgaaagaggaaaaacgcacaagaaaccgaagccaaggaggagagga

SEQ ID NO: 204884 - RNA, 51 nt, Homo sapiens
ccgcaccaacaaggggaaagagggcggaaagaagggacagcagaccacagc

SEQ ID NO: 204885 - RNA, 73 nt, Homo sapiens
caggccaaagaaagagaaagcaacaccgccggaaccggacgggaggaacacgcacggaagacgcgcagcaggc

SEQ ID NO: 204886 - RNA, 66 nt, Homo sapiens
aagacggccagggaaccaaacagcagagcagagcagcccgacggccaggaggcgaagagacgagga

SEQ ID NO: 204887 - RNA, 74 nt, Homo sapiens
gggagcgaaagaagaggcaagaagcagggaagacaccgagggaagagagagaaaagcccacggcaggcgagaag

SEQ ID NO: 204888 - RNA, 70 nt, Homo sapiens
ccccgccaggcaaaaggcagcgacaagacaagccccagcccagaaaccaccccggacaggaagccgggac

SEQ ID NO: 204889 - RNA, 54 nt, Homo sapiens
ggaagagaaacaggccacaaaccacgacagcagagggaagcagacggggaaagc

SEQ ID NO: 204890 - RNA, 74 nt, Homo sapiens
acccccaacaccagcaccgcagaggcaaggggccaccaggaggccagggggcgccagggccaaaagaacacagc

SEQ ID NO: 204891 - RNA, 63 nt, Homo sapiens
gcacaaggaagcaggagagcagaaacacccaaggaggggcaagaaacagggcaaggagcggag

SEQ ID NO: 204892 - RNA, 86 nt, Homo sapiens
gcgagagggcagaggagcggcggagagcggccgcgggcgacgggccgagccagaggagcagccaagaagccccccaggggcccgca

SEQ ID NO: 204893 - RNA, 78 nt, Homo sapiens
gcacgagggcagggcggaagaaacgccaagggaccacggaacagcgcaagaaaacaagcagaaaacaagaagacgaaa

SEQ ID NO: 204894 - RNA, 79 nt, Homo sapiens
ccggaccgcccccgagcccggaggggggagaaaaggacagcccgggcccagcggccccggcaagggcgcgaagcagcca

SEQ ID NO: 204895 - RNA, 68 nt, Homo sapiens
ccgcaaaaagcccaccacccgaagacgaaggccaggaggaccagaaaacagcagaaagaccagcaaga

SEQ ID NO: 204896 - RNA, 70 nt, Homo sapiens
acagaaacacgggcgacacagaggcgaaccgcagaagaagacgaacagaaggaaaaaaaaaagaaagaca

SEQ ID NO: 204897 - RNA, 61 nt, Homo sapiens
gaggaggcaaaaaggcaggaaggcggaaccgagaagggggcccacaggaggagcaagaaga

SEQ ID NO: 204898 - RNA, 63 nt, Homo sapiens
caacacaaaacacgaccaaggacgaaccccagaacggaaggaaaagggaaaaagccaaaccca

SEQ ID NO: 204899 - RNA, 88 nt, Homo sapiens
ccggaggcggcgggacagagcgccgcgaccccagcgggcccggggaggcaccgacgaggaggccaaagcccagaaggcggaagggccg

SEQ ID NO: 204900 - RNA, 81 nt, Homo sapiens
cccaccagacgagcaccaagaagcgagaagcgcccagaaaaagcggggaaggggggcaaaaaaaagaagcaagcgaagcac

SEQ ID NO: 204901 - RNA, 59 nt, Homo sapiens
cagcagaagacaagaagaggagggaccaagaaaggcccagggaccaaagcccggacaag

SEQ ID NO: 204902 - RNA, 70 nt, Homo sapiens
gagcaggggacccaaggccgggcaggggccacaggaccacgggaggcgccgaacaaagcaagaagcgccg

SEQ ID NO: 204903 - RNA, 78 nt, Homo sapiens
gagacggcagccgcgacagacacaccacgaacaaagcagcagaacacaggaacacagagaagaagaggaagcagcagc

SEQ ID NO: 204904 - RNA, 71 nt, Homo sapiens
acaagacaggagaacccgccaaacagcaaaagggagcggcgggacaacacaagggaaccaaggagggcgcc

SEQ ID NO: 204905 - RNA, 75 nt, Homo sapiens
gccgcgggcggaagacaggccacccagcggggagcacggcgagcagccaggccaggagagcaaccaaacgccgca

SEQ ID NO: 204906 - RNA, 77 nt, Homo sapiens
gagacaacccgcagcaaacaacccgcaaacgaaaaagaacgacagagcaaccaggaaagaagaggaaaacaccagca

SEQ ID NO: 204907 - RNA, 64 nt, Homo sapiens
cccagggaagcgcagaaagcaggcgaacccgcggcgcaaaacgaccaaaaagagccaagcgaga

SEQ ID NO: 204908 - RNA, 70 nt, Homo sapiens
acaacacacaacgcaggcgcacagccgccccaacaacacaggcacacggggcggcgacgaaaaccgcagc

SEQ ID NO: 204909 - RNA, 67 nt, Homo sapiens
acgcagggcgcccccgcagcgagcaaggcaagaagccgaggaacggcagaagggcgggaaaaaggag

SEQ ID NO: 204910 - RNA, 78 nt, Homo sapiens
aaaggcggaccgacaccacgacgacgggccacagcagccggcggcggcagaggggagaacacccagcagaggcgcagg

SEQ ID NO: 204911 - RNA, 86 nt, Homo sapiens
agcccagcggagccgagcaaggagcgggccgcgcggagccggagggcgggaggaacagacacgcggaggagagcgacgcaggggag

SEQ ID NO: 204912 - RNA, 36 nt, Homo sapiens
acaggagccccacgccacgggaaaaaacggaagcac

SEQ ID NO: 204913 - RNA, 83 nt, Homo sapiens
gacgggccagcccgaggagaccaggccccaccccaccgcccgaaacgaaggaggcccaaccacaaaaggagccgacggaaccc

SEQ ID NO: 204914 - RNA, 73 nt, Homo sapiens
gaggaaagcggcccacaaaaacagcggaggagaccgggaaaccgccgaagacgaagggcccggcaggaaccgg

SEQ ID NO: 204915 - RNA, 72 nt, Homo sapiens
cggaggcgaaacacaaagggaacaaagaagccacagacaaagagggaggaacaaacaacaaaggaagggaac

SEQ ID NO: 204916 - RNA, 82 nt, Homo sapiens
ggaggaaccggagaccccgaaaacggaagcgcagggagaaggaagaggggaaaagccacggacacggaaggccgagcccgga

SEQ ID NO: 204917 - RNA, 75 nt, Homo sapiens
gaggagaacgcccgcggacgacccgagggcggggaggagagagaccccacgggacgccgggcaccaaggccacgg

SEQ ID NO: 204918 - RNA, 73 nt, Homo sapiens
ccgcagcgaacagccacggccgcccgcgacaccccagcagaagaggaagcaccaaccgcccccaggggcagcg

SEQ ID NO: 204919 - RNA, 74 nt, Homo sapiens
cacgaaacccaacaaaaggcaaaagggggagaagaggcaggaacgaaccaacgcaggaccaggaaaccaagcga

SEQ ID NO: 204920 - RNA, 77 nt, Homo sapiens
ccgccggcccgcggcccggggacccacacccagaagagagcggaggaaggacagagagcggcagcgacaccggcgca

SEQ ID NO: 204921 - RNA, 75 nt, Homo sapiens
gaacgccaaccccggccgagccgggccgcgccgccgcgccgccgccgcgcgcggcaccccccaggccacacgcgc

SEQ ID NO: 204922 - RNA, 46 nt, Homo sapiens
cacggcaaagcccacaaaccggaaaaaaaagggcagcaggagcgac

SEQ ID NO: 204923 - RNA, 77 nt, Homo sapiens
gaacagaagacagagaaaagggaccaggcccgcccgggcgcacacacccagagggcggaggaccggaggagaggaaa

SEQ ID NO: 204924 - RNA, 79 nt, Homo sapiens
gcgccaggggggacacaaccggagcacacacaagggaggggacagcggagaaaggccgggaaagaagcagaagaaagag

SEQ ID NO: 204925 - RNA, 79 nt, Homo sapiens
gcagagcacacaaccagaagccagggagaaggaaggaggaggagaacacaggggcacagaaaacgaacgagaaacgagg

SEQ ID NO: 204926 - RNA, 61 nt, Homo sapiens
gcgaaacgcacgagaagggaaagcaggcaggagggagagcgccgaagaaccaccccccgcc

SEQ ID NO: 204927 - RNA, 62 nt, Homo sapiens
aggccgacggacccagccccagaaccggagaagaaacgggccaggcagcgaagaagacaaag

SEQ ID NO: 204928 - RNA, 87 nt, Homo sapiens
cgggaccaggcgaagcggccgagcaggcgagcgaacgacggagacgcaggcagaaggaaagggcgcagaccgggcagcagcagccgc

SEQ ID NO: 204929 - RNA, 80 nt, Homo sapiens
aggaaaacaaaagaggagaaagcccacagaagaagggaaaaaagagcgcgccaagaacgcgaacccccgcgcggagcggc

SEQ ID NO: 204930 - RNA, 83 nt, Homo sapiens
agagaccaaccgaagcggcggcaggggccgcggcccggagcgagacaagcgcaagcagccagagcccgggcgcaaagaaccag

SEQ ID NO: 204931 - RNA, 73 nt, Homo sapiens
acaggacgcaagaacgccgaaccaggaacaacaagaaccaagccacagaccggaaaacccaagagaacgacac

SEQ ID NO: 204932 - RNA, 81 nt, Homo sapiens
aaccgacccccccgccgacacggccccgcagaaccccagaaccagccacacggccaaccggagccggaagaaaacagaagc

SEQ ID NO: 204933 - RNA, 76 nt, Homo sapiens
caagcacgaagcgggggagaaaaggaccagggaggacggagaaccaagaaggagcgagggaggagcagcgagacag

SEQ ID NO: 204934 - RNA, 78 nt, Homo sapiens
gcaccagccaaagcagcgaagaagaggcccaacccccaccccgcccaaggaggcccagcgaaccagcaacacacaaga

SEQ ID NO: 204935 - RNA, 83 nt, Homo sapiens
acagacggccagccagcacaaacgcaagaggaggaacgacgagaagagaggaagagagagacgcaacggagaggaagaacaaa

SEQ ID NO: 204936 - RNA, 77 nt, Homo sapiens
gagaagcgccaaggacccgggacagggaccagcgggaaggcagacagcgagggcgacgagcgagagagaggcgggga

SEQ ID NO: 204937 - RNA, 76 nt, Homo sapiens
aggagcccggccggccgcgacgcaggccccacgaggggagggcgagccgccagaaagcggaaaagcccaggaagaa

SEQ ID NO: 204938 - RNA, 47 nt, Homo sapiens
cgaccacgggagaacaggaggagagaaagaacccacgcaggacgaca

SEQ ID NO: 204939 - RNA, 74 nt, Homo sapiens
cggcggccccgacgacagcgggccgggaaaagggcacgaggccggaaccgcccagccccggaccaagacagagg

SEQ ID NO: 204940 - RNA, 61 nt, Homo sapiens
cggccgccggacggccgggcgcggagaagcgaggaaacgaccaaaccccccaacagagaaa

SEQ ID NO: 204941 - RNA, 85 nt, Homo sapiens
caggccaggaggaagacggaccccgaagggcaaaggcaaggggccaccacagccgacggcaaaggccccccgggccgggcacggg

SEQ ID NO: 204942 - RNA, 114 nt, Homo sapiens
cgccccaagccccaaacagccggcgaaaacacaaaccaaagccagcgaggaggaacccgcacagacaagacagcaacgcaggaaaaggaagccacaccaggggcagaaacagaa

SEQ ID NO: 204943 - RNA, 74 nt, Homo sapiens
gcccgaccgggagaggacaagaccacgagccagcgaaggagccaagagaccaaccaaggaaacccccacccagc

SEQ ID NO: 204944 - RNA, 73 nt, Homo sapiens
cgcaaacgacagccgaagccccggaagcccaagacgcggaggaccgggggcccgcgcacagaccaaacgggcc

SEQ ID NO: 204945 - RNA, 76 nt, Homo sapiens
cagcgagggcggcccggggcacccgcacgggaagcaggcccgccacaggaaacgaaaagagacagcagggcaaaac

SEQ ID NO: 204946 - RNA, 56 nt, Homo sapiens
ccagcggaggcgggggaccggaggaagacccgggacacaccaacgcaccccccaag

SEQ ID NO: 204947 - RNA, 84 nt, Homo sapiens
ccgagcaggaggcgccacaggcacggcagacacaccgaccagaggaaggcgaacccgccacgcagcaggagcaggggacgaagg

SEQ ID NO: 204948 - RNA, 69 nt, Homo sapiens
aaaacagaacaacggggacagaaggcgccaccagcaaaaccagagaaacaggcagagaaagacacccgg

SEQ ID NO: 204949 - RNA, 79 nt, Homo sapiens
gcccggacggaagaggaggagaccaagcgcacagccaggcgcaaaaaaggagcagcaacaagagcaaccgaagaaggaa

SEQ ID NO: 204950 - RNA, 83 nt, Homo sapiens
ccgcccgggcggaacgacccgaggggcgccacccccagcaagagggaacagcgagcgaaggaagagaaacacgacacagcagc

SEQ ID NO: 204951 - RNA, 80 nt, Homo sapiens
caggaaacaccaagaaaaagccaaagcaagagcaggcgacacgcaggagacccccaaaccccagcggacacgcagccggg

SEQ ID NO: 204952 - RNA, 78 nt, Homo sapiens
gaagaccggaggggacgaagaacggagccacggcaggaagcacagaacccgggccgccagagcccacgcaaccaggag

SEQ ID NO: 204953 - RNA, 70 nt, Homo sapiens
caaagcgaggccagagaaagagaagcggcacccccaggaagcgcgagcgaccaaagcagggcacccccga

SEQ ID NO: 204954 - RNA, 93 nt, Homo sapiens
ccgagccgaggcccggaacccgggaggggaggaccaaagacgagaacaccgcagcccaccaaagaaaccgcccgcccggagccccggcacggg

SEQ ID NO: 204955 - RNA, 86 nt, Homo sapiens
cgggcaaaggacacccacagggcggaacagaacacaggagccagggcaggaaaagccagaagaaccaccagggccaggaagcaccc

SEQ ID NO: 204956 - RNA, 78 nt, Homo sapiens
cggagccccccacaagccacaggccacgagggccccgcccaggcccaagcccgacagagaaaggcacaacccagacca

SEQ ID NO: 204957 - RNA, 71 nt, Homo sapiens
gacaaacggaacagccgacaaaacgaagagggaaacagccacaaggaacaggaggcccggacccccagcac

SEQ ID NO: 204958 - RNA, 85 nt, Homo sapiens
agcaacaccccaccccaagcccgaccccacgcacccggagccaccgagacgaaccaaacccaggaagcggcgccaccaaccagcc

SEQ ID NO: 204959 - RNA, 79 nt, Homo sapiens
ggccgcgccgggcgggacgggggggcggcccggccccgcagccccggcacaaagcagaccgccccacgggcgcgcccgc

SEQ ID NO: 204960 - RNA, 74 nt, Homo sapiens
gacggcccagccgggaaggccccggggcaggcaccaccgagacaccacacaacggggggccacagcagcccaga

SEQ ID NO: 204961 - RNA, 67 nt, Homo sapiens
gaagcagccaggcaaggccaaacacccggagaccgggagaaacgagaccagaaggaagcagaaacgc

SEQ ID NO: 204962 - RNA, 51 nt, Homo sapiens
cagcccgccgaacccgaaaggagaagaggccccaggaccggcgaggccccc

SEQ ID NO: 204963 - RNA, 81 nt, Homo sapiens
agaccaaaggcagggcaaggaaacggccacaagaggaggagcagcgcggaggaggaagccccccggccagaacaccggacg

SEQ ID NO: 204964 - RNA, 79 nt, Homo sapiens
cgcagcagcacaggcgagcccccgggccgggccccacacaccgcccagggagccaagacaagcaaacccaggaacaccc

SEQ ID NO: 204965 - RNA, 73 nt, Homo sapiens
aaaagaagagcgccacccccaacacaggccaccagcggaaaagccagggcggaaaccggcaagaggaagagaa

SEQ ID NO: 204966 - RNA, 61 nt, Homo sapiens
gggacggggaccagcagcgcgccgccgcccaggcacgcagaagccagcggacgcccgcaac

SEQ ID NO: 204967 - RNA, 76 nt, Homo sapiens
ccccccgggccccgagccagcccacgcagccgccccgaaggagccaggcagaaaggagcagaagacaaaacaggca

SEQ ID NO: 204968 - RNA, 106 nt, Homo sapiens
caccaccgcacccgccagcgagcccgggcacccgcggaccaggcccagagccccgcagggagaaaggaagggccaagaaaagaagaaggacggaggaggacaaaag

SEQ ID NO: 204969 - RNA, 71 nt, Homo sapiens
caacagccaccggaggacagacacaccggccgaagacaaaccggagccaaaaacacgagaagagacagggc

SEQ ID NO: 204970 - RNA, 80 nt, Homo sapiens
cccgggaaacgggcgagaccgcggcgggcgcgagcgaggcgcccagacaccccccccgcccagagggaggaaagggggac

SEQ ID NO: 204971 - RNA, 72 nt, Homo sapiens
gcgagggcgccggcagcccagggcccacgaaccagcagcagaaaaggcgagaagaagaaaaagacaaaggcg

SEQ ID NO: 204972 - RNA, 73 nt, Homo sapiens
gaccccacccggcggaggaacaggacagggacaagcgcacagcggagaaagcagcgcggccaggaggcgggaa

SEQ ID NO: 204973 - RNA, 73 nt, Homo sapiens
ccagacagcagcacggaagaagcgagggcacagcagagaaaaggaaacaagggagaaccccagacagcacaag

SEQ ID NO: 204974 - RNA, 82 nt, Homo sapiens
gcggcccgggagacacacagcaggggagagggcgaagacaggacggcccaggcagacacggaggaggaggaagaggaggagg

SEQ ID NO: 204975 - RNA, 73 nt, Homo sapiens
gcgcgagccgagaagggaccggcgccccccgagggggaaggaaggaggagaacacacacagaggggcaagcca

SEQ ID NO: 204976 - RNA, 75 nt, Homo sapiens
gaacgcccaaccaggccaaggcaaaagggaaagcaaggggaagggcccaagaagacaccccaccagaaaccgaac

SEQ ID NO: 204977 - RNA, 81 nt, Homo sapiens
acggagacagcgacacccaccgagaagagaccccaggaggggagcaacgagaagaagacaacagggcaccggcccaagacc

SEQ ID NO: 204978 - RNA, 65 nt, Homo sapiens
agcggacagacgggcagcgggcgacacaccaaagaaaaaacacaccaagcagaaacggagccaag

SEQ ID NO: 204979 - RNA, 76 nt, Homo sapiens
acggaccgagaccggaccgagagcggaccgagagcgcgaaacgcacgagaagggacgaggagagcaggaagccgga

SEQ ID NO: 204980 - RNA, 62 nt, Homo sapiens
agagaaggcagacggaacagaaggacacggacaaaacccgcgcagcgcgccacccaaaaccc

SEQ ID NO: 204981 - RNA, 62 nt, Homo sapiens
gcgcagaaacacaagccgggagcacggggaccaggacgccaggcgcagggccagccgaaccc

SEQ ID NO: 204982 - RNA, 31 nt, Homo sapiens
agaagacggaaaaaacagagcaacgaagaca

SEQ ID NO: 204983 - RNA, 35 nt, Homo sapiens
gcacacggagaagaaaaacacaagacacccaagaa

SEQ ID NO: 204984 - RNA, 83 nt, Homo sapiens
agcaggggaccgggagaagcacccacaaaacagcaccccggaggagccgggggaggcaagcaggggggcaaaggaaagaaggc

SEQ ID NO: 204985 - RNA, 44 nt, Homo sapiens
ccgcggcgcaggaggaggaggaggggccgcgcccggcccagcac

SEQ ID NO: 204986 - RNA, 80 nt, Homo sapiens
caacaaccagccacacgccacccaaccccgcaagaggggcgcccagggagaaggccagccaacaccggccccacggaggc

SEQ ID NO: 204987 - RNA, 69 nt, Homo sapiens
agacgcagggcgcccccgccggacaggacaaaaggacacaacccacacaagaggagaagagaacaggcc

SEQ ID NO: 204988 - RNA, 74 nt, Homo sapiens
aaagcaggaagcagcaggaggaaaaaggacgagacccaggcacaccaaagacaacaggcacgggggaaaagaag

SEQ ID NO: 204989 - RNA, 75 nt, Homo sapiens
accgcgccgcacgcgcaggagccgggcgcgagcagcgcgagaagacccccaggacgccaaggagcgccggccggg

SEQ ID NO: 204990 - RNA, 75 nt, Homo sapiens
ggaggaggaggcccgcccggccgagaccccgcgggagaacagaacgggggaaggacggggaaacagcgaacagcc

SEQ ID NO: 204991 - RNA, 66 nt, Homo sapiens
cgcgacacaaacaaaaggacgggccaacgcacggcccggcagagccagcaccccccgcggcagcca

SEQ ID NO: 204992 - RNA, 78 nt, Homo sapiens
agccaaggaaggccgagaagaagcaaagggcaaccagggaaacaggagaggagaggcacagccacaggaccggagggc

SEQ ID NO: 204993 - RNA, 57 nt, Homo sapiens
cccagggccggaaaagccaacgccggcgaagaaagggagcgccaaaaagaaaagacc

SEQ ID NO: 204994 - RNA, 76 nt, Homo sapiens
gaccccccggcgccgcgccggcggcgggaccagaagcagcagccccagaagccccgaagccggggcaccccaccac

SEQ ID NO: 204995 - RNA, 71 nt, Homo sapiens
aaccacaaccccagaacgaacaaagacaacagccggaacgccccaaaaaagggacaggagacaaggcaacc

SEQ ID NO: 204996 - RNA, 78 nt, Homo sapiens
cggaaaacagagaacaggaccgacccaaccgaagaaagccaaaagaaaaaaaacaagaggaaaaggaaaagaacagag

SEQ ID NO: 204997 - RNA, 74 nt, Homo sapiens
ccacgcggcagcacaaccaagggaaacgaggcccgccgccccggggcacgccaggcaaccaagacaacaagcca

SEQ ID NO: 204998 - RNA, 75 nt, Homo sapiens
cagaagcgggcggcgcgggggagagggcccacggccccacggggcgacgagccacgggcgggcccaccgcagggg

SEQ ID NO: 204999 - RNA, 75 nt, Homo sapiens
gaggaggggcgcgaggagggacggaagagaagagagagaagcagcgggcgagaccaagggaaacagacgggcggc

SEQ ID NO: 205000 - RNA, 99 nt, Homo sapiens
gggcgccgcccgcgggacgcgcccccggggccggcggccgaccgagaacgcagcaccacggagaacaaccgcaacgaacaaacaggagacagagagcaa

SEQ ID NO: 205001 - RNA, 80 nt, Homo sapiens
gcagccgccgcccacggcacggcagccaccaggcgcccgcggccggcccggcggagaggggaagagagaaggccacgccc

SEQ ID NO: 205002 - RNA, 78 nt, Homo sapiens
caaacacgcaaaaaaaagaggggacagaggagccaccagacacaacagacagaggcagacacaaagaagaggacagcc

SEQ ID NO: 205003 - RNA, 84 nt, Homo sapiens
ccacgccaccggccacagccccggccaggggcgaacagccacggccaacaaacagcaacaggcaaccagccaaggaaccccacc

SEQ ID NO: 205004 - RNA, 83 nt, Homo sapiens
ggcggcacgcacgcgggcagggaacaggcggagcggaagcaggaggcaaagggaccccaagaaaccaaagggcaagagccgca

SEQ ID NO: 205005 - RNA, 81 nt, Homo sapiens
aaagacaggcccaccgaaggacccggccagccccaacaaacaaagaacgaagaacacagagggcagagggacgggacagga

SEQ ID NO: 205006 - RNA, 61 nt, Homo sapiens
gcggcgcgcgagcggagcaccgcgaccgaagagcaggcggggcggggaaggagacacccag

SEQ ID NO: 205007 - RNA, 70 nt, Homo sapiens
gacacaaagccagcaaccacagagggcgagcagagacccccaggcaaaccgccccgcagcaccacccggc

SEQ ID NO: 205008 - RNA, 69 nt, Homo sapiens
gccaccccccccagcgccagcgggggagagcagcggcgccagcccgggccacaccgggacgcacccccc

SEQ ID NO: 205009 - RNA, 76 nt, Homo sapiens
agccacagggaaaaaccaaagccccgcgcaaagaccgcagagagcagcccgaagagggggaagaagcgcgcagcga

SEQ ID NO: 205010 - RNA, 77 nt, Homo sapiens
aaaaggagacaggagcaagaaaaaagaacaaacgaacccccccaacacaaggccggccgacaacaccgagcaaagaa

SEQ ID NO: 205011 - RNA, 35 nt, Homo sapiens
acagaggaagcggagagaaacaacggcaagcggag

SEQ ID NO: 205012 - RNA, 78 nt, Homo sapiens
gcaaagaaggacacagcacacacacccgcgccaggcccagacacgcagaggagacccgaaccggcaacagcaccggag

SEQ ID NO: 205013 - RNA, 54 nt, Homo sapiens
gggcagggaaaaaaagggcagcaccccagaacacgggcggccagaaccgggcgg

SEQ ID NO: 205014 - RNA, 85 nt, Homo sapiens
cagaagcgggccaggagcagggacggaaggacgccagcacaacaccggcgcgaggccgacgagagccaggccccggggccccagc

SEQ ID NO: 205015 - RNA, 73 nt, Homo sapiens
gggcgaaaccggaccgggcccggaggagcgaacaaggcgacaacacagacacgccagcaaggcaaaacaacaa

SEQ ID NO: 205016 - RNA, 94 nt, Homo sapiens
gccaaccggcaagaccagacgggaacgggagacaagcgcagcgagcccagcgacaccaagagcaccacagaaaaccccaccacagggaccaggc

SEQ ID NO: 205017 - RNA, 80 nt, Homo sapiens
agggaggacaccggaccccggacgcgggaaaggagcaggaggagaagaaaccccaagaccagagggcagcccagaaagag

SEQ ID NO: 205018 - RNA, 91 nt, Homo sapiens
caccccaaaagcagggccacagaaaaacacacaggaaggaacaaccggagacaacacggggggcaaaggacaaaccgagaagaggccaaga

SEQ ID NO: 205019 - RNA, 90 nt, Homo sapiens
cggaacccgcaccaagccgcccacacgccaaccggccagaggacgagggccgcggcccaggagcccgccggcccggcccccggccgcccg

SEQ ID NO: 205020 - RNA, 80 nt, Homo sapiens
agccccgaggagggggaacaggcacggccaccacgccaggaggggcaaagacacgcgccaggaaaaggaagagagagaag

SEQ ID NO: 205021 - RNA, 52 nt, Homo sapiens
ccacccagccagcacacacgaaagacagagcgagggggaacggacacgaaaa

SEQ ID NO: 205022 - RNA, 83 nt, Homo sapiens
ggcaacggaaaacaccgacggaaaaccgaggaagccaaaggcgggggggcggaaggggaggagcccaggaaaaaaggacaagc

SEQ ID NO: 205023 - RNA, 71 nt, Homo sapiens
cccaggccagccaacagcacacacccaggggcaaagccggcgggccgagaagaagcggagcaagcagaccg

SEQ ID NO: 205024 - RNA, 54 nt, Homo sapiens
gacggggaaggggcccacccccgccagcggaggcacccaccacgggccaggcgg

SEQ ID NO: 205025 - RNA, 77 nt, Homo sapiens
gcaaacgacaccacccgaccgagccggaggagccaccaacagaagcaggagccaggaaaccaaaacccacagagagg

SEQ ID NO: 205026 - RNA, 78 nt, Homo sapiens
aaaagcccagggaggaaagagcagccgaggagaagggaggcacaggaacccgaccaaaaacgaaaaccacagagaagc

SEQ ID NO: 205027 - RNA, 66 nt, Homo sapiens
ccccagaaccccacagcccgcaaggcagcaggagaaacgagaagaaacagacgcgcgaggggaaac

SEQ ID NO: 205028 - RNA, 71 nt, Homo sapiens
acaaagcaccccacacgcgaaaagcgcacgggaccccacaagaacaccgggcaccgcagaacaggccaggg

SEQ ID NO: 205029 - RNA, 59 nt, Homo sapiens
acccgagaagggggaccccggagaggaccaccgagagggaacagccaagccagcagacg

SEQ ID NO: 205030 - RNA, 67 nt, Homo sapiens
aagacacaacacgcgacacaaaggagacgcagaaaagagacacacaaaggaagcaaagccggaacca

SEQ ID NO: 205031 - RNA, 56 nt, Homo sapiens
gcagcagagccagcagcagcgcagaccaacagacgcagccacaccaaaagacacac

SEQ ID NO: 205032 - RNA, 78 nt, Homo sapiens
cacaaccgaacaaagacagccagaggaagggaggagaagggaagaagaaaaaaccgccgacgagccgaaggaaaaaag

SEQ ID NO: 205033 - RNA, 53 nt, Homo sapiens
cagccagggacccgggagaggcccggcagggcagagacacccaagacaccccc

SEQ ID NO: 205034 - RNA, 81 nt, Homo sapiens
agagacgcagcagcgggcagggccgccagggccgagcccccagcagagcgccgggcacaggcacgcagcggcccgggacac

SEQ ID NO: 205035 - RNA, 70 nt, Homo sapiens
ggaagcacagaaccagaagcagacaaacccgacaggccacacacggccaaaagaggaggacgcgcgcgga

SEQ ID NO: 205036 - RNA, 84 nt, Homo sapiens
cgccgccgccgggaccccgcccagcagggaccaagaaaggcccagggaccaaagcccggacaaggcccgagcaccaggaccgca

SEQ ID NO: 205037 - RNA, 53 nt, Homo sapiens
ggaaacgcccagaggggaggccacaccgacaccgggaagggcacgacaggaaa

SEQ ID NO: 205038 - RNA, 98 nt, Homo sapiens
gggggacccagccaagcgacccagcaaccgcacgaaccggcacggagaagacaccggacggcagaagcccgagaggagccccggaagccggaagacac

SEQ ID NO: 205039 - RNA, 80 nt, Homo sapiens
cggaccagaagccagagcgaggacgccggcagggaagggagagcacaccgcgacggcgagaggagacacgggaagacaaa

SEQ ID NO: 205040 - RNA, 66 nt, Homo sapiens
cagaaacaggacgaaaaaagggcaagaagccagaagagggcccagaggagacaggggaaccaggag

SEQ ID NO: 205041 - RNA, 77 nt, Homo sapiens
caggaagaaccgaccagaaccacccggccgacgcgcacgacccggcacacaccaccccagaggagcgccgcacccag

SEQ ID NO: 205042 - RNA, 71 nt, Homo sapiens
ggggacaggggcgggcgaaagcagagaccaagggcacacaagaccagaagaaagaaaacgggaaaaagacc

SEQ ID NO: 205043 - RNA, 78 nt, Homo sapiens
cgaccgggacggccggcaggccgccgccgagcggcgaagggagggccgccccaaccgacgcaccagccggaggaggag

SEQ ID NO: 205044 - RNA, 41 nt, Homo sapiens
gggcagcgggccggcgccggcgcggcacagcagaagaagca

SEQ ID NO: 205045 - RNA, 84 nt, Homo sapiens
ggaggccccagggaagcgcagaaagcaggcgaacccgcggcgcaaaacggcgccagcagaaccggcggggagccgcagaaccca

SEQ ID NO: 205046 - RNA, 75 nt, Homo sapiens
ggcggcaaagaggccagcaccgggcgcaacaggagaccagcaagaagaccccccccccaaaggagccaccgcccc

SEQ ID NO: 205047 - RNA, 72 nt, Homo sapiens
cgcgcccacgccgcgccagacaggacccaaagacaggaccacgcaccagcagagaaggaaagcaaaccgaag

SEQ ID NO: 205048 - RNA, 73 nt, Homo sapiens
gagagggccgggaggcacggacacacaaaaagagaccaggggagcccagcccccgcccggagcgcagagggaa

SEQ ID NO: 205049 - RNA, 79 nt, Homo sapiens
cgccccgggccccagcccagcggcgcgaagcgaaaccggggccaagaaagccaggccagaagaaggaaggccggggagg

SEQ ID NO: 205050 - RNA, 57 nt, Homo sapiens
aacaggccggaaagcacaggaaaaaccaaaggaaccagcgcagaagagggcgccgga

SEQ ID NO: 205051 - RNA, 75 nt, Homo sapiens
gaaccaccacacacaaaagcaccagcacacggacccgacaccggcgccagcgcaagaaacgagcagaagaggaac

SEQ ID NO: 205052 - RNA, 70 nt, Homo sapiens
acccggaaaggaagggaggcgcagaagccgacgcaggagaggaaccaagaggacaacagagaaacacaaa

SEQ ID NO: 205053 - RNA, 73 nt, Homo sapiens
cccaagcagaaaagaagggccagacgcagagacggcgagcaaagcccgggaaaaagacacacaagcgaacaga

SEQ ID NO: 205054 - RNA, 91 nt, Homo sapiens
aagaaaacacacagacccaacgacaagaggagaggaagaggaagaggagaagagcacagggggcgacaagacaggaagaaagaagaggaac

SEQ ID NO: 205055 - RNA, 76 nt, Homo sapiens
gcaccagaccccagcgagacaccaaagagagacggaccacggccggcccccccagcgcgaggagcagacaagggcc

SEQ ID NO: 205056 - RNA, 68 nt, Homo sapiens
gaagaccaccggaaaaccaagcagggagaccagcacgagccgggcgggacgccggaaggggcacaaga

SEQ ID NO: 205057 - RNA, 75 nt, Homo sapiens
gaaagaggccaaaaaaaaacgaacagacgagcgaagagacccagaacaggagaacggaagccagagaaaaggaag

SEQ ID NO: 205058 - RNA, 56 nt, Homo sapiens
ggacgagaacgccgcgacagaaagacaagccgccgcaagaaaaggagacaggaaga

SEQ ID NO: 205059 - RNA, 80 nt, Homo sapiens
aagcgacagagagaggcagcccgccgcagcaagagagagcaaggagcaggcgcagagcagagcagagcagggcggggagg

SEQ ID NO: 205060 - RNA, 76 nt, Homo sapiens
gaaggagcagcagagagccgggccagagccaggggccgggagggcgccagcccgcccgaagagggcaccagcccac

SEQ ID NO: 205061 - RNA, 35 nt, Homo sapiens
agaaccaggacccaagaaaagggggccaggaagca

SEQ ID NO: 205062 - RNA, 59 nt, Homo sapiens
gcaccccgggggagcaggaaagggcagagcggagaacagccgggagcacgccagcagcc

SEQ ID NO: 205063 - RNA, 50 nt, Homo sapiens
cagacaacccgcagccacgcgcagggaagacacacccaggaccaaccgaa

SEQ ID NO: 205064 - RNA, 70 nt, Homo sapiens
ggaagaggaaaggaagagagccacgggaagaagaaccaggccgaaaaggaaaaggagccagggcggaccc

SEQ ID NO: 205065 - RNA, 73 nt, Homo sapiens
gaaagaaggccacagaggagaggccgggccgcaggaaacgcaagcccggaagcagaaggcgaggcaaacacac

SEQ ID NO: 205066 - RNA, 80 nt, Homo sapiens
cgaagaaaagagaaggaaaaacagaacggcaaaccggaaaaaaacggagagcaggagaaaaggaaacaagaccaaaacca

SEQ ID NO: 205067 - RNA, 79 nt, Homo sapiens
ggcgcagcggcggagcggagcggagcccggaggagccacacaaccacaaccccaaaagagccacgcgcggaacacaacc

SEQ ID NO: 205068 - RNA, 53 nt, Homo sapiens
gagccaagccaggcccagcagccgccaccgcagggagccaggagaaagaggaa

SEQ ID NO: 205069 - RNA, 74 nt, Homo sapiens
ccagaagaccgacgagcgggcacccgacacgggaggaagaggaggagagaagagaggaagcgagcagcacgggc

SEQ ID NO: 205070 - RNA, 82 nt, Homo sapiens
gcggcagcaagaacagagagagaggggacagacgagagaacgaggcagggccacacccagcacaccggcccggccacccccc

SEQ ID NO: 205071 - RNA, 89 nt, Homo sapiens
gcgagacgagccaagaaccggcacggcccggccccgcccggcgccgaggacccccgagacccaaggggccccccggcgagcacagccca

SEQ ID NO: 205072 - RNA, 53 nt, Homo sapiens
aacgagagaaaaggaagaaaggaagcgggggagaggcaccagcaacagaccaa

SEQ ID NO: 205073 - RNA, 74 nt, Homo sapiens
agccaaccccaaacaagaacagaaaacgggaagagagggaacacgcaggaggggaagagcaacgcaaggaaaaa

SEQ ID NO: 205074 - RNA, 84 nt, Homo sapiens
ggcagaaggcccgaccgccggcgccacagccacagcccggagcacagccagggcgaaagaagaccccgccaccggcccccacgc

SEQ ID NO: 205075 - RNA, 52 nt, Homo sapiens
gcagcaccacaggaggggcaggaaacgaagacaaacccacaagcgaaagaac

SEQ ID NO: 205076 - RNA, 70 nt, Homo sapiens
aaaccgccgaagacgaagcgaccccaaacccaagaacacgagacagaacagaagagaagaaacagccaga

SEQ ID NO: 205077 - RNA, 74 nt, Homo sapiens
caagaaaagcgcaggccgggccgcaacgacgcagcacgcagcacggggaacgaggagaacacaaagaacccaaa

SEQ ID NO: 205078 - RNA, 74 nt, Homo sapiens
gccagggcagcaccgggcagcgagacgaaaaacgaacacaccagcgggcacagcacagcagggaggcgagaaga

SEQ ID NO: 205079 - RNA, 71 nt, Homo sapiens
ggggacgggccagcaagacacaggcccaagaaaagcccaaagaacgccaaagagacggcaaagcagaacca

SEQ ID NO: 205080 - RNA, 90 nt, Homo sapiens
gccacaccaagacgccaggagccagccacgcaaagagggggagccagcgaaagacgagacaagcagccccggaaaaaacaagcaacccag

SEQ ID NO: 205081 - RNA, 80 nt, Homo sapiens
aacaccgaacaccagccgaaagggcccaccgcaaggacggagaaggaagagaagcgaaggacgacagccaggggaggaca

SEQ ID NO: 205082 - RNA, 57 nt, Homo sapiens
gcgcaaacaacacaaagcgcgagacccgaagagcccgaagcagggaggcgcaaaaaa

SEQ ID NO: 205083 - RNA, 71 nt, Homo sapiens
ccgcgaaaggcaacaagacaaagaaaccagccgagcaaccaaaccaaaggaggcagccggggccgagagcc

SEQ ID NO: 205084 - RNA, 52 nt, Homo sapiens
gccggcgcacgagagggaggagaaggggcggaggcgaggcaggagaaccgaa

SEQ ID NO: 205085 - RNA, 110 nt, Homo sapiens
gggaggaagggccaagccgccacgcaagagcccagacccccagaccagagaagagggaggaagaggcgcggcaagggcgcggcaagaaaaccggggccgccccacccaag

SEQ ID NO: 205086 - RNA, 72 nt, Homo sapiens
gggaaaagcaaaacaacagaacacacaggacagacagccccagcaggcacagcaagcaacccggccgagggg

SEQ ID NO: 205087 - RNA, 73 nt, Homo sapiens
caacagccaccgcagcgaacagacccagggacgaaaagcacgcagaaagcccacgcggagcgacacgcccgaa

SEQ ID NO: 205088 - RNA, 72 nt, Homo sapiens
gccacggcaccgcgccgacagggcagaagcacagggagaagagagggacagagaccggaaacaaaagagaca

SEQ ID NO: 205089 - RNA, 35 nt, Homo sapiens
acaccagacagcgacaggcacagacaggcgagcgg

SEQ ID NO: 205090 - RNA, 63 nt, Homo sapiens
gagaagggacaccggaccccacaggaccccaccaacaacgaacgcggcaggcgcacaaggaag

SEQ ID NO: 205091 - RNA, 88 nt, Homo sapiens
cgcccgaggccggcgaagccagggcgccgggaccccgccgccgccgccgccgccgccgcggccccagacaagggagcagccgcacagc

SEQ ID NO: 205092 - RNA, 79 nt, Homo sapiens
cgcagacgccgccaccgccagggcccgaggccggcaaagcaccaggcacagcaagcgccgaaagaccagggaaaaaacc

SEQ ID NO: 205093 - RNA, 49 nt, Homo sapiens
aaccagaggggcaagaaggacgccggagacagacccgaggccaaaggaa

SEQ ID NO: 205094 - RNA, 77 nt, Homo sapiens
aagcggcagaaagcacagagagcacaggacacagaacagagaagaagcagacgagacagaaaaagaaccagacagag

SEQ ID NO: 205095 - RNA, 80 nt, Homo sapiens
agagagcgagcggacacggccacggccccacgccagccggaggagaaccccacacaagccagcccggacggacggcccac

SEQ ID NO: 205096 - RNA, 61 nt, Homo sapiens
gaaggcgcgggcaggagccggcgaggagcaccccccgccggaaaggggaacggcgagggaa

SEQ ID NO: 205097 - RNA, 76 nt, Homo sapiens
gccagagaaggaagcaacgcccagcagagagacagagccaggagaaaccagggaggaacaaacagaacgcaaacca

SEQ ID NO: 205098 - RNA, 70 nt, Homo sapiens
aaaagcccagggagcggcggcagcaggcccagggggaggcggcgcaacgcggggaaagcaaccagggggc

SEQ ID NO: 205099 - RNA, 75 nt, Homo sapiens
caaaaaacacagggacgagccaccagagagaggaaagcaagacagagaggacaagcaagaaacgaggccaagcaa

SEQ ID NO: 205100 - RNA, 76 nt, Homo sapiens
gggggcagagagcagccaggaaagggaggaaccgccacagccagaggcggcaggaagaagagcgcagggcaggcgc

SEQ ID NO: 205101 - RNA, 68 nt, Homo sapiens
agccacaggaacagagacagcgccgcgggcaaggaaacggcaaaacagacaggaacggccgaacacag

SEQ ID NO: 205102 - RNA, 70 nt, Homo sapiens
ggcgcggagggccgagggagggccgagccagccgcggccggaggagcccccaggccggcagaggcaaaaa

SEQ ID NO: 205103 - RNA, 70 nt, Homo sapiens
gcaggcaagagccacacccagcaccgaacagaccccgccccagcagaagaggcgacgacaggaaaaggga

SEQ ID NO: 205104 - RNA, 73 nt, Homo sapiens
ccgagagacccgcgggaggacgccgaaccacaggaaggcaccagggagagccaggacaacccacggcgcccag

SEQ ID NO: 205105 - RNA, 56 nt, Homo sapiens
cccccaagacaacgaagaaaccagagacgaccacaagaacccacaggacaaggggg

SEQ ID NO: 205106 - RNA, 63 nt, Homo sapiens
gaccgagacccggcaggcaaccgagcccgcgggacaggggaagaggccagaacaaaggagcac

SEQ ID NO: 205107 - RNA, 72 nt, Homo sapiens
gggggccacggacccggcgacaacacccggccccgagacagaagccgagcggagagcgaggaaaaagggcga

SEQ ID NO: 205108 - RNA, 74 nt, Homo sapiens
cggccggcgggggccgggcgcaggcgcgcagaacggacccagagcccggcccgaacgccaccagaggaagacga

SEQ ID NO: 205109 - RNA, 67 nt, Homo sapiens
ggaaacaccaccagaaaagggagcccaccacgaaagcagcaacagcgcggcacgaagacccgaagaa

SEQ ID NO: 205110 - RNA, 53 nt, Homo sapiens
ccacacgcccgccccggcacgagcccagcccccggagccgagccccaaacacc

SEQ ID NO: 205111 - RNA, 54 nt, Homo sapiens
gaagccgggcgccgaggagagccgggggcgcgcggggaacgaaaacaaacggaa

SEQ ID NO: 205112 - RNA, 78 nt, Homo sapiens
gcccaccggcacagcggaccccgcccgagcaggacgaggagcggaggcggcagcagcagagaagagagcgcaagcggg

SEQ ID NO: 205113 - RNA, 70 nt, Homo sapiens
cccaggccagagaaggggaaggaggggcagcggcaggcacagaacgaaccaaaaaggaaaggacccacaa

SEQ ID NO: 205114 - RNA, 74 nt, Homo sapiens
ccccgccggcgcacgcgggggggggccgaccggagcgggccaggccgggaggacgaccaaggacacaagaaaac

SEQ ID NO: 205115 - RNA, 90 nt, Homo sapiens
cgcaaccagacgccagcgggacgaggaccgagaccgcggccgggaccgaggagacaaagcaggaggacacaagaagggaggaaaggcgga

SEQ ID NO: 205116 - RNA, 83 nt, Homo sapiens
cgaacagggcagcgcgaccggccagcgccgcgacgggaggagcgccggaacgccgaggcccagggacagaccagaccggcacc

SEQ ID NO: 205117 - RNA, 59 nt, Homo sapiens
gccccgggcacggccccccagcagggcaagccccgggcgcaggggggaaaggcacccgc

SEQ ID NO: 205118 - RNA, 75 nt, Homo sapiens
gaaaacaaaaacaaaaaaaaccccaggaaccagaggaaaaccccagagagaacacaggaggcccagacccacaca

SEQ ID NO: 205119 - RNA, 65 nt, Homo sapiens
acaagacggggcgccccacagaggggcgacgggcccggcagcgacggagcggaggcccaaagacc

SEQ ID NO: 205120 - RNA, 54 nt, Homo sapiens
cccgaacgggcgcgggccaagcacgccacccggaagcagggagccaggagaaag

SEQ ID NO: 205121 - RNA, 50 nt, Homo sapiens
cagaacacagggcagacgcgaggggacccaggacaaaggccgagaaccga

SEQ ID NO: 205122 - RNA, 82 nt, Homo sapiens
ccaacgggaccgggcagccgcgcaggcggcacacagcccgcccagcaaccgcaaggaagcaaaacacagcgaggaaagaacg

SEQ ID NO: 205123 - RNA, 76 nt, Homo sapiens
aaacaggcgaaggagcggggccggaaggccaaaggacaggggaaacagagaaacccaggaaagagaccaagaagca

SEQ ID NO: 205124 - RNA, 82 nt, Homo sapiens
ggggcgagggcgcggccgaggcacccgcagggcgcccccgagccccggcgccgagcccacagacccccgagcagcgggagcc

SEQ ID NO: 205125 - RNA, 63 nt, Homo sapiens
ggaagccggaaaaggggcgcaagaggaaacagaagaacaacgaagagcgacaaacaggcaagg

SEQ ID NO: 205126 - RNA, 59 nt, Homo sapiens
gccaaagcgagagagggaagcgcccggccggccaaccgccccccagcagcaggcacggg

SEQ ID NO: 205127 - RNA, 56 nt, Homo sapiens
agaaaccccccaggacagacccaggcccgagacgagaagcccagagcgacgggcgg

SEQ ID NO: 205128 - RNA, 68 nt, Homo sapiens
ccggaggaggggccagcgccagacggcggccacaaccaccccacaggacgaacagaaagcacgaccgc

SEQ ID NO: 205129 - RNA, 52 nt, Homo sapiens
acccccagcaagaaccagaaaccaggacagaacggaggcaaaggaaagggga

SEQ ID NO: 205130 - RNA, 78 nt, Homo sapiens
aggagaaaggagcagccagaaagcggcacgaacagagccgggagcaagaagaacacccagagagcccaaaaggcagag

SEQ ID NO: 205131 - RNA, 72 nt, Homo sapiens
cgagcgcggaagcagaccagaagagcaaaaggagaagccaaaccaagaggagagcgcgacgccagaagaccc

SEQ ID NO: 205132 - RNA, 71 nt, Homo sapiens
cgccccccccagacaggaggggaagcccgcccgcaccacagcccagacgagaggccccacccacagagaac

SEQ ID NO: 205133 - RNA, 72 nt, Homo sapiens
aagcagcagcagaccacagaacccagcaacaaggacagcaaggcggcaaggcgggagaccagagagacccag

SEQ ID NO: 205134 - RNA, 76 nt, Homo sapiens
ggaaaacaaggcaccaggaccaaagaacccacaggagggccagaggacaaagcacggcggaagagaagccagccgc

SEQ ID NO: 205135 - RNA, 67 nt, Homo sapiens
gaaaaaacagcacaccaggaagcaagggcccgagaacaccccagacgaaccccgggccggcgagaca

SEQ ID NO: 205136 - RNA, 76 nt, Homo sapiens
ggggcaaaccgccgccgcccccaccagacagacgcgcaaaacccagacaggggcaaggccgaggggaacagcacac

SEQ ID NO: 205137 - RNA, 70 nt, Homo sapiens
gcccgagcgcaccggagggacggcacagggaggccagccggagaagcgagcagcggaacaacagcagaga

SEQ ID NO: 205138 - RNA, 82 nt, Homo sapiens
gggcgaaggggccacgcgaaaaccacccaccgaaggaggagagccgaaagcgcaaacaccacaaagcaggagcacagaaaca

SEQ ID NO: 205139 - RNA, 76 nt, Homo sapiens
aaacaaaccagagacgaagaagagcgaagaaggagacacgccagaggggaaggcaggaaaggaggaaacagcaacg

SEQ ID NO: 205140 - RNA, 76 nt, Homo sapiens
cagcaggggccgacggccgagaagcccagggggcagcaaagaagaaagaagaggaagacccagaaacagcaggagg

SEQ ID NO: 205141 - RNA, 77 nt, Homo sapiens
ccacacacgaacaccaaaggaaacccggacccaagaaaacagagacgacgcagccagagcagcaagaggccaagggg

SEQ ID NO: 205142 - RNA, 79 nt, Homo sapiens
gaaaaaagaagcaaaacaagaaagaggagaaacgacgaagaggccccaggaccggcgaggccccccccccagcagcaaa

SEQ ID NO: 205143 - RNA, 69 nt, Homo sapiens
aggcagggcaaaacgaggcggggagaggagagagagccaaagagaaaggagaacgaaaagagagcaaaa

SEQ ID NO: 205144 - RNA, 80 nt, Homo sapiens
ccgggacccggccccggcccacaggggggggcaaacccgagagaacggcccgcagggaaggagcaagacgagggaaacac

SEQ ID NO: 205145 - RNA, 60 nt, Homo sapiens
gaagggaaggcgcgaggaggaaaggaggacgagcagcacaaggaaaacgagagaaacgaa

SEQ ID NO: 205146 - RNA, 76 nt, Homo sapiens
cggacggaaggcgcggcacacacaccccagcaggggcgcggcgccgcaccacggccccacgcagcagggccagccc

SEQ ID NO: 205147 - RNA, 87 nt, Homo sapiens
ggcaaaaccaaggcccagaacacaaaaccgcaggcgggacaagaaaagaaaaagcaacagaaaaacaaccggaagccggaagagcaa

SEQ ID NO: 205148 - RNA, 72 nt, Homo sapiens
ggaaagagcgacaaacaaagaaagacggacccaaaagccaaaagccgagaacgacgaagacggccaacaagg

SEQ ID NO: 205149 - RNA, 76 nt, Homo sapiens
cggcgcgggggacggccgccagagggcagccacaaggaggggaaaagccccagagcggaaggcgaagcacaaacag

SEQ ID NO: 205150 - RNA, 77 nt, Homo sapiens
cacagagaaggggagaagccgaagcccggaaggagcacagcagaccccaggcgcccggagagagggcggaagcacaa

SEQ ID NO: 205151 - RNA, 85 nt, Homo sapiens
cgcggcgcacggcggcgaaggggcgagcagggagcagcgcagcgcgcgcagagcgcgccaggggcagcacgagaccgcgcgaaac

SEQ ID NO: 205152 - RNA, 62 nt, Homo sapiens
gggcgaagagcccccccccaaggccgggaccccaccagcgccggcagggccaaggggcagag

SEQ ID NO: 205153 - RNA, 75 nt, Homo sapiens
agcacagccaccagccagcaagcccaagccaggggcggagggaaaaaagaacgaaggggccccagcaggaacgag

SEQ ID NO: 205154 - RNA, 67 nt, Homo sapiens
aggcagcgcccccaaacggacaagcagaccaggaccggagaaaacgggacaacaccgaccagaaaag

SEQ ID NO: 205155 - RNA, 56 nt, Homo sapiens
agcaacagggaggcgaacagcagaggaaagacagagcgaacccaaagaaaaggcag

SEQ ID NO: 205156 - RNA, 38 nt, Homo sapiens
gagaacagcccgaccacgggccggcgcggcccagcaag

SEQ ID NO: 205157 - RNA, 76 nt, Homo sapiens
cggcaacgggacgaggccaagaagcgagagaagaaaaacagaaaaagccaagacagaaacaagaaccaggaaaacg

SEQ ID NO: 205158 - RNA, 35 nt, Homo sapiens
accggggcaaaagggacaagggcagaggaggaaaa

SEQ ID NO: 205159 - RNA, 76 nt, Homo sapiens
ccacacccggcgcggagggccacaaacgaacagcgaaacggagaacggaagaaagccccagcaccccggcgaagag

SEQ ID NO: 205160 - RNA, 53 nt, Homo sapiens
aagaaaggggaaccccggagaaaaggccaagaaggcagagccgggcacaaagc

SEQ ID NO: 205161 - RNA, 74 nt, Homo sapiens
ggcagagacggccacgcgggcaggagaagagaccccgggcgaacaacggcaagcggagaagagcaaggccgaac

SEQ ID NO: 205162 - RNA, 52 nt, Homo sapiens
aagcgagcagcagcgccgccagaagcaacgcgacccggaggacgacgggccc

SEQ ID NO: 205163 - RNA, 97 nt, Homo sapiens
caaaaagaggcgaaaggaagcaagcagcagaagagccaaggaaaaacagcaagaacccaaaaggggaaaagaaagaacccgaaagacaaaagagaag

SEQ ID NO: 205164 - RNA, 70 nt, Homo sapiens
cacgccacacagccccccagccaacacacggcgccagaggcgcccaccgaaaaggagcgaacaggggcca

SEQ ID NO: 205165 - RNA, 78 nt, Homo sapiens
ggccccgcgaccgcgggggacggaagagcggcccgagccgacgcggggcaagagcagccccaccggaaacacaagaaa

SEQ ID NO: 205166 - RNA, 77 nt, Homo sapiens
gagggagaccacagcaagacgccaggacccacggaagccagaaagccccacgacggcaggcgcacggaacagcgagg

SEQ ID NO: 205167 - RNA, 71 nt, Homo sapiens
cacccaaacaccggccacgcgagaccgacagagcacaaagaaccaaggaacgaaggggcaacagaacaccg

SEQ ID NO: 205168 - RNA, 84 nt, Homo sapiens
gaaacaggcagaagaacgaagaacacacaacgggaggagaacaccggaaagcggggcagcaaggcaaggaaaaaacgaagagca

SEQ ID NO: 205169 - RNA, 70 nt, Homo sapiens
gaaaggcgcaccaaggaacacgacgacaccaaagaaaccgcccccgaccggccgcgacgggacggcgcgc

SEQ ID NO: 205170 - RNA, 81 nt, Homo sapiens
gacagcgaggaggccagccggaagacagagagagaaaagagggacgccaaacacccaaaggagagaagagagcccagcagg

SEQ ID NO: 205171 - RNA, 70 nt, Homo sapiens
aacagcgaacagagcgccgccaaggacgaaagaagacagagaagcaaagaagcaggcgcaaaaaccagac

SEQ ID NO: 205172 - RNA, 91 nt, Homo sapiens
cggccggggaggaggccccccaggagaaggcggaggacaagcccagcaccggaccccgcgcccaggggaggaccgcagccgaggagccgac

SEQ ID NO: 205173 - RNA, 85 nt, Homo sapiens
gcggaccccagggccggcccggaggcgggacccagggcccaggagggggaagacagagaagaccacacaaccgaaggggccgggc

SEQ ID NO: 205174 - RNA, 72 nt, Homo sapiens
gcggagaggccgggagccggcccccggcccaagaccgcgcggaggcgggcccagagccccagcacggaaaac

SEQ ID NO: 205175 - RNA, 75 nt, Homo sapiens
caagacagcccaggccgggaaaggaagaggcagaggacagacacaaaaagacgacgggagcggggcgccaagcac

SEQ ID NO: 205176 - RNA, 75 nt, Homo sapiens
acaggggaccggccaggcccagcaacggccacccaaagaacaccacgcgaggcaaaaaggagagaaacgcaagac

SEQ ID NO: 205177 - RNA, 74 nt, Homo sapiens
accccgcgcggccggagcccagcgcacccggacgaccggcgagcccggggcagaaacgggacccgggggcgcag

SEQ ID NO: 205178 - RNA, 72 nt, Homo sapiens
agaaagccgagagaaggacaacaccacagagggacggaaacagacgacgacacggacaggacggcggacagg

SEQ ID NO: 205179 - RNA, 52 nt, Homo sapiens
ccaccccagcaccgcaggcgcaggggaacggccgaaccgcccggaaccggga

SEQ ID NO: 205180 - RNA, 55 nt, Homo sapiens
acccagacaaggcacacacagacagcgaacccacccaacacggcaaaacaaagac

SEQ ID NO: 205181 - RNA, 50 nt, Homo sapiens
aaccgaggcaaaagaaaggaaccgaacaagacagaaagcgggacgcgcaa

SEQ ID NO: 205182 - RNA, 54 nt, Homo sapiens
cccagcccagacgggacacacccaaggacaaaccggcgaccacacacggggacg

SEQ ID NO: 205183 - RNA, 87 nt, Homo sapiens
acgaagcccccccaggcccaacgaagagacgacacaaggagacgaggggaagaggagggaggcagcacagacaggaggacgaagaag

SEQ ID NO: 205184 - RNA, 74 nt, Homo sapiens
acgaaggaggccggagaagaaagaggccacggaccgaaaaaacaccagcagcccagcaaccaaaaagaagaccg

SEQ ID NO: 205185 - RNA, 71 nt, Homo sapiens
caggcacaacaaccaagaaaaacgggggccgccgccaagggagccgaagggaggccagacgcggggccaac

SEQ ID NO: 205186 - RNA, 79 nt, Homo sapiens
aacggcaggcgccggcgggccggccgccagcaagagacagggaggccgcacagaggaggagcaccaaaccgagggaggg

SEQ ID NO: 205187 - RNA, 75 nt, Homo sapiens
aaccgcgcagaagggaagaaagagccccagacaagcaaccggggacccggagggggcccaacggcagcacccccg

SEQ ID NO: 205188 - RNA, 110 nt, Homo sapiens
cggcgcccacccgccggagcagcccgaggccccagccagcgaacaaagggacgcggcacagaacgaagaagaaagcagaagcaagagaaaaaagaaacaccgagacggcc

SEQ ID NO: 205189 - RNA, 67 nt, Homo sapiens
gcgaggcgaagggaccggggaccgagccagcagaaaacgagcccggcacagagaacggcagacgacc

SEQ ID NO: 205190 - RNA, 81 nt, Homo sapiens
caagccacccccagccgggcaccaccgcacgacaacacacgcccgaccaacaagaggaaggcaaaagcagaccggaaaacc

SEQ ID NO: 205191 - RNA, 72 nt, Homo sapiens
cgagcccccagcagccacccggccggcgggacacagaaaagagacgacaaaacggcagaaaggaagcaggga

SEQ ID NO: 205192 - RNA, 81 nt, Homo sapiens
aaccacaggggccgaggacggcgccccaacaagagcggagaacccacccacggccgggcaaccccgggaacgaaacaaaag

SEQ ID NO: 205193 - RNA, 93 nt, Homo sapiens
caacagcagggaagaacgcagcggaaccagaaggagggaccagagcggaccaccagaaagaccgaaccaggaagagaaacgacgggcaacaga

SEQ ID NO: 205194 - RNA, 55 nt, Homo sapiens
cacaacgacacagcacgaggaaagaacccagagggaaacagccagacggggcccc

SEQ ID NO: 205195 - RNA, 62 nt, Homo sapiens
aggcgcccacccccaccaccgaccgcgcacaaagagcacagagaccgaagggagagcgcgac

SEQ ID NO: 205196 - RNA, 75 nt, Homo sapiens
cggcccgagcgcaccggagggacggcacagggaggccagccggagaagcgagcagcgggcaccgccgaccgaaac

SEQ ID NO: 205197 - RNA, 57 nt, Homo sapiens
gaaaagaaaagccaacacaggcaacgaaagcaaaccgagagcaggcgaaggccggga

SEQ ID NO: 205198 - RNA, 64 nt, Homo sapiens
cccaccggacgaacaaaacgaagggaaagacaaggagccgggccgagaaaccgaaccagagacc

SEQ ID NO: 205199 - RNA, 61 nt, Homo sapiens
caaccagcccacggccccaaccacccccagaagccagaggacaacagagcaaccagccggg

SEQ ID NO: 205200 - RNA, 81 nt, Homo sapiens
gagaagggcccccacacaggaacgacacccaggaacccaagaacacagaccaccaggcaaaacaagaaaaagcaccaagaa

SEQ ID NO: 205201 - RNA, 83 nt, Homo sapiens
aaaccccaggccaagcagccaccagcagcccccagagcgggaccacagggccgggaacccaagacagaaggcccgaggccgga

SEQ ID NO: 205202 - RNA, 75 nt, Homo sapiens
aggaggccccagcggaccgaacagcaacgaaggggcgagaaagcgaggaacacggaggcaagagcagcgggaagg

SEQ ID NO: 205203 - RNA, 64 nt, Homo sapiens
ccaccgagacgaccaagagaaaagcgaaagcagcacaagcaagcagagccccgagaggggcgcg

SEQ ID NO: 205204 - RNA, 85 nt, Homo sapiens
aggccggacccgggccgcaggcagcccgcggcagcaggacacagaggcgggaggcggcagaagcagccagaggagggcacaggcg

SEQ ID NO: 205205 - RNA, 94 nt, Homo sapiens
agacaggaagcagagggcagggggcaaacaagccgaccggaaaaagacgccaggaagaacaggaaaaggcgaacacagaaaggcaagagggagg

SEQ ID NO: 205206 - RNA, 69 nt, Homo sapiens
ggacccagccgcaagcaagaggccaggacccgccaggagaaagcgaggggaacaacggagcacgaggac

SEQ ID NO: 205207 - RNA, 80 nt, Homo sapiens
cagaagacagggagggagcagggagcagcagcagccacggcgcaaaaaggaccaggggcaaggaccaggccggaagacac

SEQ ID NO: 205208 - RNA, 77 nt, Homo sapiens
gccacgaccaccgcacacccgacacagcggagcgcccagaggcgagcccggggaggaagagaagggaagaacgcaag

SEQ ID NO: 205209 - RNA, 82 nt, Homo sapiens
gcacccaggagggaacagcccaggagccagagggagacggcgaaaaccaaagaagaaaagcaccccaagagacgagacaaag

SEQ ID NO: 205210 - RNA, 69 nt, Homo sapiens
agaggcggaccggacggccgagaaccgcacggccaagcccacacagaggaaaccgggagagagacagaa

SEQ ID NO: 205211 - RNA, 77 nt, Homo sapiens
agcaacaccccaaagcaacagaagagccgaggagaagaaggcgggggcgcaacacacagagggagaaaacccccagc

SEQ ID NO: 205212 - RNA, 58 nt, Homo sapiens
ccacccagccccagagagcggaaaacagaggacacgagcccagccaggcgagccagcg

SEQ ID NO: 205213 - RNA, 78 nt, Homo sapiens
aacgaccccccgaacggaccccgcgagcaccagagcggcgaacacgccgacaggggaaaaccaagacgaaacaaacgg

SEQ ID NO: 205214 - RNA, 69 nt, Homo sapiens
aacgaaagaaggggggaaggcgcggaaagacagacaacaaggcagaaaaaggaagaggagaaacccaaa

SEQ ID NO: 205215 - RNA, 77 nt, Homo sapiens
gccgacaggcgcccacacccaagcagaaaaccgcccccccaccgggcggccgagaggacagaaagcagcggagagga

SEQ ID NO: 205216 - RNA, 82 nt, Homo sapiens
caacgccgggacagcgcaaggcacccgccggcgccccccggcacaacccgcgggcaccagccccggacgacaccgcggacag

SEQ ID NO: 205217 - RNA, 73 nt, Homo sapiens
gcaggcagcagcagaaggagggccaaaccaccaacccaagcggcaccgaagaaccgcgcaggcgcaaagcgcc

SEQ ID NO: 205218 - RNA, 77 nt, Homo sapiens
gggccgagaccaaccacagccagcaggacggacagcaagcagggagacacagcaacaaagccaaggccagggcagag

SEQ ID NO: 205219 - RNA, 101 nt, Homo sapiens
cggaaccgggaggcgacgcacacgagcggaggcgaagaaaaaaccagaggaggagaagagccgcagggcccagcgggggcgagggcaggagccagagcgcg

SEQ ID NO: 205220 - RNA, 80 nt, Homo sapiens
cccggccgccccccagaccgggacagaaggcaaggaaaacaggaaaagccaaccgggagaggacacagagcgaaacaggg

SEQ ID NO: 205221 - RNA, 76 nt, Homo sapiens
cgaagaggcgacaaacagacccccgcaaagcagacaacgaagaaggagagccacagaccccgcaccggaggaggac

SEQ ID NO: 205222 - RNA, 55 nt, Homo sapiens
ggggagaaggcaggcaccacaaaaaggacagcaccaagagaaggagcagccgaag

SEQ ID NO: 205223 - RNA, 67 nt, Homo sapiens
gggacagcccacacccggcgcggaggaaggacagaaaacgggccccagacacaagccccaccaagag

SEQ ID NO: 205224 - RNA, 76 nt, Homo sapiens
agcaagaacagcccacacagggcaccaaggccaaagccagccaagaaaaggggcacaacagaggaggcaggaccgg

SEQ ID NO: 205225 - RNA, 114 nt, Homo sapiens
aacccccacagaacaggacaagacaaggccgacgcagacacgggggaaacaagaccaggggacagcacggaaaagagccgccccgcgccacaagaaagagagacaaaaaccccc

SEQ ID NO: 205226 - RNA, 81 nt, Homo sapiens
cgcacgcaagaaccagaacgacaaacacacagccaggggaagagccaagaaaaaaaagagcaagggccggacaaaaggaga

SEQ ID NO: 205227 - RNA, 70 nt, Homo sapiens
aacggccaaacaacagggaaccaaggggacaaaccaacagaagggcaaccagccagcagcgcagcgcccg

SEQ ID NO: 205228 - RNA, 56 nt, Homo sapiens
gggaggacccaaggagaggcacccgggacggaaccgaggaagaccccagagaaaca

SEQ ID NO: 205229 - RNA, 72 nt, Homo sapiens
ccccggcgccccggcccccgccccagcccgccggcggcggcggaagagaccgacagcccacagacccagaca

SEQ ID NO: 205230 - RNA, 73 nt, Homo sapiens
caacagcagggggagacgggcgccagcgccggaacgggaccagcccaggagaggaaccgagaacacgacaccc

SEQ ID NO: 205231 - RNA, 74 nt, Homo sapiens
cggcgcggagagggggcgcgagcgggggaaggccagaagacagaacgaagaagaagagccagagaccacagaga

SEQ ID NO: 205232 - RNA, 63 nt, Homo sapiens
gcgcagaggaacgcccacccgacaggaacccaacgggggggggcggccagacaccccggaaac

SEQ ID NO: 205233 - RNA, 81 nt, Homo sapiens
caccacaagaagggcgggggcaggagggacgaggccacagcagaaaaaaccgggaggaaaaacgaaaacgcacaaacccag

SEQ ID NO: 205234 - RNA, 37 nt, Homo sapiens
acaaaagcaacaaagaggcaacacgaagaagagacga

SEQ ID NO: 205235 - RNA, 56 nt, Homo sapiens
cgagaaagggcaaccacacgagaggcgagggacgacagagcaagcggcagagggca

SEQ ID NO: 205236 - RNA, 37 nt, Homo sapiens
acggagaaccgcaggaaagggagcaccgaagacgagc

SEQ ID NO: 205237 - RNA, 77 nt, Homo sapiens
cgcccccggagagacaccccaccggcagacgcagccgccggagggcgcggagcggggaccgcacaccgcccgacgcc

SEQ ID NO: 205238 - RNA, 80 nt, Homo sapiens
gggcgcgggggccggggcgcgcgcagggggacagccgcgccgcgcgcccgaagagggaccgaccgagccccagggagacc

SEQ ID NO: 205239 - RNA, 63 nt, Homo sapiens
gccccagggcaagccccgcccggccaacaaacggcgcggacggacagaaggaacccccacccc

SEQ ID NO: 205240 - RNA, 69 nt, Homo sapiens
cggaacggggccccgcaaggccggcgcggaggaggggagcagcgcgcaagcgcgccgggggcccggaaa

SEQ ID NO: 205241 - RNA, 54 nt, Homo sapiens
aaggaaagccaaaacacgacaggcggggaccaagagaagagcagaggaccagca

SEQ ID NO: 205242 - RNA, 83 nt, Homo sapiens
gaaacgaccgcaaaggcacccggggcagaccggaccaaggagggacggccgagaacaaacacacgacccaagagaaaggagag

SEQ ID NO: 205243 - RNA, 79 nt, Homo sapiens
gaccggcccaacggggaccggcaaggcagccagccggagcaccgcgacggccaagggaggccgccagccgaggcgagga

SEQ ID NO: 205244 - RNA, 66 nt, Homo sapiens
gaacaggcgcgcccccaggcagccgcgaacccccagaaccgaaacgaccaccgagacgcccagcga

SEQ ID NO: 205245 - RNA, 85 nt, Homo sapiens
acccacaaggcggggcccggggacccaaggccccccagcgaggaggaaccgagagcggcgcggggcaccgagcccaggaaggcaa

SEQ ID NO: 205246 - RNA, 80 nt, Homo sapiens
gccacacagaggagacaaacaccccacggccagaccggcgcacaggacgaggcacgggcgagagcagacagacagcgaac

SEQ ID NO: 205247 - RNA, 78 nt, Homo sapiens
aggacgccacggcccgggcagagggacgagaagccggacagggcccgcggacacgacccagacgagagaccgaccacc

SEQ ID NO: 205248 - RNA, 74 nt, Homo sapiens
caaaaggagacgagaagaagacaagaggaaggccacaggggcaacagacagggaccagcgcaagccggcaacga

SEQ ID NO: 205249 - RNA, 71 nt, Homo sapiens
cccagaagacagaaggagacgccacacacagaacgacaccacagcgacaaccggcgaaccacaggagaaag

SEQ ID NO: 205250 - RNA, 57 nt, Homo sapiens
ggcgaggagaggagagccaggaaagagaagggagggcgacgagagccgaagcagagg

SEQ ID NO: 205251 - RNA, 74 nt, Homo sapiens
gcgcggcgcgcgccagaccggcgagcccgagcagaaaaccgagacacccccgacacaccgggaggcgccagcca

SEQ ID NO: 205252 - RNA, 81 nt, Homo sapiens
gcgagacccagaggccgcggccgcggcgcaaggaagaagagacgccgcgcggcagacaaggcccggcaggcaaagcgggcg

SEQ ID NO: 205253 - RNA, 73 nt, Homo sapiens
ccgaacaagaaaagcgcaagccccagaagcccagagcacgccgaagccaccagacggccccccccccgcaacc

SEQ ID NO: 205254 - RNA, 78 nt, Homo sapiens
aggaaccccaagcgacgcaggcagaagcgagacggcaaggcgagacccgacagcagacagcgggcccagcgaacagag

SEQ ID NO: 205255 - RNA, 81 nt, Homo sapiens
gggaacaggcccggagcggccgccggcccaaaggccagagaacccaaaagcaaacccaagaccgaaagaaacccgggaaag

SEQ ID NO: 205256 - RNA, 90 nt, Homo sapiens
cggggcaagggcgagaccggagagccgcaggacggcgcggcagagccccgacgccacagaacgacagggagccaggagggaaccacggac

SEQ ID NO: 205257 - RNA, 69 nt, Homo sapiens
gccagccggacagagacccaacagcagcaagcgaacaccagaggaccaccacaacagagcccccagagc

SEQ ID NO: 205258 - RNA, 72 nt, Homo sapiens
accgagagcggaccgagagcgcgaaacgcacgagaagagaggaagagggcggagccacaccaccgcgaaaac

SEQ ID NO: 205259 - RNA, 81 nt, Homo sapiens
aggccgccaccgccccacggaacacccgcgcccggcccccacacggcggggagccaggaacgggggacaaggagaggcaca

SEQ ID NO: 205260 - RNA, 73 nt, Homo sapiens
cgggggagcacgaggagccgaagaaggaagaaccacgaagaaacaccacaaaccggacaagcaaacaacggaa

SEQ ID NO: 205261 - RNA, 71 nt, Homo sapiens
accccccgaaccagaggcgaagagcagagggaaaaagacacagcaaagcccccagcacaaaaggaagaaag

SEQ ID NO: 205262 - RNA, 79 nt, Homo sapiens
gaagcgcacgaggcgggcgggccggcagagcagcaccccacaggacaacccgaggagccaccagagggaacagaaagag

SEQ ID NO: 205263 - RNA, 79 nt, Homo sapiens
ccaggggagcagcaaccgcagcacccgggccccaaggaacaagcaaaggggaagcgccagaagggagagcaccgggagg

SEQ ID NO: 205264 - RNA, 63 nt, Homo sapiens
aagcgaggcccgggggacaacggaaacaaacggaaacggcacgaagggcaccagaaaaaaccg

SEQ ID NO: 205265 - RNA, 79 nt, Homo sapiens
gccaacaaaagacaagcccccgaaaccaaggagcgcaagaaaagcgggaaccaaaacgagacaccagagagccacaaga

SEQ ID NO: 205266 - RNA, 93 nt, Homo sapiens
agcggggagcgcccgcgacagaggagggaggaaaacaaccgagggcagagaaaccccccaggcaagaggcgcaggaccgggaagaccaacaaa

SEQ ID NO: 205267 - RNA, 80 nt, Homo sapiens
ggcgcggcaccggcccaggagcagcggggggagagcagacaaagacggaagaccaaagacaccggcacgaggagaaggac

SEQ ID NO: 205268 - RNA, 56 nt, Homo sapiens
ggaaagaaggaacggagaaggcaaagaagccccaaagcccagagaagaccagagag

SEQ ID NO: 205269 - RNA, 85 nt, Homo sapiens
gcgaaagcgccaaaaggacagcagcgagaaagaacgcagcgcagcggacgcaaagacaagcagccagcagacaggagagaccgga

SEQ ID NO: 205270 - RNA, 76 nt, Homo sapiens
acaggaagcagggagaacagcacaagccggaaaggaggggaaggaggagaccggagacaagccaagcaccagccaa

SEQ ID NO: 205271 - RNA, 77 nt, Homo sapiens
cagcgacgcgccaccggcggggggcgagcaacaccgggcaaaaacccccaaagccacgccgcgccacacccacgaag

SEQ ID NO: 205272 - RNA, 67 nt, Homo sapiens
ccggcccggacaggccgccaacagacagggcggagaggcgggccaggccagcgggccggggagcgcc

SEQ ID NO: 205273 - RNA, 66 nt, Homo sapiens
gaacgaccaggagacgcggcccaggccacacacagagaccccacgggaagggcaaggcgagaaaga

SEQ ID NO: 205274 - RNA, 60 nt, Homo sapiens
ccggggcaaggacaacaggccgaggaggggcagcagcaggacagggaacccgggagacag

SEQ ID NO: 205275 - RNA, 83 nt, Homo sapiens
ccgcacacgaggccaacccgcaagacagaaaacgggccccagacacaagccccaccaagaggacaccccaggaacgcggaggc

SEQ ID NO: 205276 - RNA, 75 nt, Homo sapiens
agccgcccacgcccaccacccgcgcgcacgggcccgcggcagcgaaaggcccaggccgggcccgggaggagcagg

SEQ ID NO: 205277 - RNA, 63 nt, Homo sapiens
gcaacagagaccgagacacaagaaccaagccccagaacaacaaggaaaaacgcaaaagaggac

SEQ ID NO: 205278 - RNA, 82 nt, Homo sapiens
acagaagaaggccagcgaggaagacaaggcgagaccaccagaaggaggccggggagaaccacgggacagcaccagaacaggg

SEQ ID NO: 205279 - RNA, 88 nt, Homo sapiens
aaccaagcaacacaaggaacaccacaccacgggcccacaggagcaaaacaacggcaccgaaagcgaaggaagcccgcccccaaagccg

SEQ ID NO: 205280 - RNA, 59 nt, Homo sapiens
aaggacggggagcccagaagcgccaccgaaccaaggcgagcagaacaaggagaaagacc

SEQ ID NO: 205281 - RNA, 82 nt, Homo sapiens
cacacacccaaaggaacaccaaaggacacagggcggcgacggcggcgcgaggaccgaccgggcccgcggacgaagaaggcac

SEQ ID NO: 205282 - RNA, 87 nt, Homo sapiens
ggcggaggcgccaggacgacgaggaggagacgaccggccggaaaaccgcaagaccacagcaggacccccagaggaccccaacaccca

SEQ ID NO: 205283 - RNA, 76 nt, Homo sapiens
gggagcagagccgacgggcgcggaccagccaaagcgagggggagcagaccggaagacccgacggaagaccacaccc

SEQ ID NO: 205284 - RNA, 56 nt, Homo sapiens
cagccccggcccggacaccacgccgcggacgcaagaacgggcccacaaagggaacg

SEQ ID NO: 205285 - RNA, 83 nt, Homo sapiens
agaagggggggggacagcagacccccaccacccaaccggcggcgcagacccgcgggacgagccggagggaaggaggagaagcg

SEQ ID NO: 205286 - RNA, 71 nt, Homo sapiens
gacgacaagcacacacaggcgcgaaacggaaaaagggaagggcccagccagggcagaagagaggagaccga

SEQ ID NO: 205287 - RNA, 48 nt, Homo sapiens
accgagaggaaaggcgagggaagcgccgggaaccaccggacaaacacc

SEQ ID NO: 205288 - RNA, 65 nt, Homo sapiens
gacgacgcaccgcaggcagacaaaagggccaaagaagggagagccacggaaccgcccagccccaa

SEQ ID NO: 205289 - RNA, 75 nt, Homo sapiens
gagcggggccggccacagaaccccaaacacagagaaggaggcgcaacagggcaaggcaaagagaaggaccacaca

SEQ ID NO: 205290 - RNA, 51 nt, Homo sapiens
cgcagggcgcccccggagaagagacagaagagggcccaaaagaagcggcgg

SEQ ID NO: 205291 - RNA, 72 nt, Homo sapiens
caggcccgggcgaaggggccacgcgagggaaggagggcgaaacaaaggaccagcacgggaaccggccgccca

SEQ ID NO: 205292 - RNA, 82 nt, Homo sapiens
gggcccgaggaggcagccaagccgagccgccacccggcgaacaagcagaaagcacgaacaacgagaacaagacacgagcaaa

SEQ ID NO: 205293 - RNA, 64 nt, Homo sapiens
ggccagcgccgcgacgggaggagcgccggaacgccgaggcccaggaaggagacccaggaagaaa

SEQ ID NO: 205294 - RNA, 58 nt, Homo sapiens
accccaggcgcgacgccccagaacagggacgcaggaaacccggaaaggaagggaggcg

SEQ ID NO: 205295 - RNA, 77 nt, Homo sapiens
aaaagcagccacgcagggccaccaaacagggaccaagaaaggcccagggaccaaagcccggacaaggcccgagcacc

SEQ ID NO: 205296 - RNA, 87 nt, Homo sapiens
cgggaccggccaagggcccacacaccaagaccaagccgcggcgagccgcacagggcaacacacgcaccgcacggcccccgcccacaa

SEQ ID NO: 205297 - RNA, 87 nt, Homo sapiens
cagcggggcaggggcgcaggagcaaggaccaggagcaggacggggacagaccaggccccgccccagcccgggggcagggcaggggcg

SEQ ID NO: 205298 - RNA, 72 nt, Homo sapiens
accccgaagaggcgaggagcaacccaacgcccccgggacgaaaagaagcaggaagacccacaaagcaccaac

SEQ ID NO: 205299 - RNA, 84 nt, Homo sapiens
aaggagcacccggcggagcagagccagggagagaacgccgagccgcgccgcagccccgccgccgagaagcccgcccgcgcggga

SEQ ID NO: 205300 - RNA, 61 nt, Homo sapiens
cccgagcccacgggaacagacagaacgagggcagaaagggcccagccggcagagggaccgg

SEQ ID NO: 205301 - RNA, 41 nt, Homo sapiens
gggcacaccaaacccacggccacccaccccaccagagccgg

SEQ ID NO: 205302 - RNA, 89 nt, Homo sapiens
gggagcccgcgcccgccgcgggagagaggacccccccccccccccaaggaagaagacggcacgggacccccagcacaggcagcaggccg

SEQ ID NO: 205303 - RNA, 70 nt, Homo sapiens
ggcgaggggaaccccaggaggcaacaccgcaccaacgaccgaagcaccaggcacacccacaagccgagcg

SEQ ID NO: 205304 - RNA, 58 nt, Homo sapiens
ccagaccaggaaagacagagcgaggaccccagcccccccagaccacaccggaacagcg

SEQ ID NO: 205305 - RNA, 70 nt, Homo sapiens
cacgaggcggccgggaggagggcgaagccaccaaaccagggcgcaaacagaagagagagacccaaagcaa

SEQ ID NO: 205306 - RNA, 83 nt, Homo sapiens
caaggaaggagagaaagcacgaaagagcccacgaacggcgggaacagaaagccagaggccggagagcgcagacacagaccgga

SEQ ID NO: 205307 - RNA, 62 nt, Homo sapiens
agaaaccccccgaagaagaccccccacacggagccaggaagaaggcaggccccaacgccaca

SEQ ID NO: 205308 - RNA, 75 nt, Homo sapiens
gacggggagacagcagcaggaacacaggaaaccccccggagccccaaagccaggacagcccagccggagccaaca

SEQ ID NO: 205309 - RNA, 80 nt, Homo sapiens
gaaaggagggcggcgcgccgagcgggggcacccgaggaggaagagggcagggcccacggaaagaagggaaacccggggag

SEQ ID NO: 205310 - RNA, 66 nt, Homo sapiens
aggaccaagaaccagcccacaggacacggccagccccacggcgcacggcagaaaaaagccccagcc

SEQ ID NO: 205311 - RNA, 34 nt, Homo sapiens
ccgggagcgggacacagaggaacaccggcccagg

SEQ ID NO: 205312 - RNA, 76 nt, Homo sapiens
cagaccggggcacggcaggaccccaaagcaccaagaccaagacgaggcaccacaaccagacaaccccgaaagggag

SEQ ID NO: 205313 - RNA, 54 nt, Homo sapiens
gcagacaaaagggccaaagaagggagagagaaagaagagcgaagcacaacacgg

SEQ ID NO: 205314 - RNA, 57 nt, Homo sapiens
agggccaagggcaaaggccgaggggacagagaagcagaaccagaaaacccggacaac

SEQ ID NO: 205315 - RNA, 78 nt, Homo sapiens
acaaaaccagcgaaaagcagcgccaagcgcagcagagcaaagccgaaacaaaagaacagaagggagaagccacaacca

SEQ ID NO: 205316 - RNA, 78 nt, Homo sapiens
gcacgcgcagccggggccagccccgggcagccccgcccggacaggaagggaccacagaccagcacgccggcgccacga

SEQ ID NO: 205317 - RNA, 69 nt, Homo sapiens
aagaagagaaagaaagagaaggccagaaaaggaacacgccgccccacccgcaggagacagcaaggacca

SEQ ID NO: 205318 - RNA, 52 nt, Homo sapiens
ggccgcgccacccgcgagggggcagggcccagaggccggagcgagcccagaa

SEQ ID NO: 205319 - RNA, 61 nt, Homo sapiens
ccgcccccggccgagcgacgggcgaaccgaccaagaacaacacccagagggccaggagaag

SEQ ID NO: 205320 - RNA, 73 nt, Homo sapiens
gagaagcggggcaccacgaaggaccgaagaggacaaacgcccccacagcaagcaaggcccaagaacaagcgaa

SEQ ID NO: 205321 - RNA, 82 nt, Homo sapiens
aagaaacagaacgccccacgaggcggcgccgcgaaagggacacgggagccccgcaggacccccgcacacgcccacacagcag

SEQ ID NO: 205322 - RNA, 56 nt, Homo sapiens
agcggagagacgaggaccgagaggcacagagccgagccgccgagccccagagggcc

SEQ ID NO: 205323 - RNA, 86 nt, Homo sapiens
ggacaacgagaaacggacaaccaacggccaagaacaagaacaaaggccgcgacggagcggagaagcggaggagaccaaggaggcca

SEQ ID NO: 205324 - RNA, 79 nt, Homo sapiens
ccgcccacgaaaacccaagacgccgcaaccaggacccagaagcagaaaagggagaacagaagaacagaaaagaaagcac

SEQ ID NO: 205325 - RNA, 77 nt, Homo sapiens
gcgcaaaaacaagacggggcgccccacagaggggcgacggggcgggcacaagggaagacagcgcccgggacccaacg

SEQ ID NO: 205326 - RNA, 66 nt, Homo sapiens
gagaaggcacgaccgaaggcccagaggagccacaagaggacacaaagcccaacaaacaaagccagc

SEQ ID NO: 205327 - RNA, 79 nt, Homo sapiens
ggcgagcgcgccgggcggaagcgcggaaaggcaacgcgcggggagggcgggcccggaggacgagccaaggagaccggga

SEQ ID NO: 205328 - RNA, 75 nt, Homo sapiens
acgaagagcccgggcggcgccgaccggccacgggcgagcgcggcagaaacccaacccagcaggaagagggaacag

SEQ ID NO: 205329 - RNA, 70 nt, Homo sapiens
gggccggaggccgcgcgcgcaggagacagagacccaaaggcaagggaacagccaagggggaagaaaagga

SEQ ID NO: 205330 - RNA, 43 nt, Homo sapiens
cggaacgcaaagccggacagcaaaagccagaggaaccgacagc

SEQ ID NO: 205331 - RNA, 58 nt, Homo sapiens
gggaaagcacagggggccggggggggcacagagccccggaagacagcccccagcgacc

SEQ ID NO: 205332 - RNA, 82 nt, Homo sapiens
cccgagggcgggacacagggaaggggccgcaaagcccagagagcgccccacaagaccagcagaagaggggcaaacagaaacc

SEQ ID NO: 205333 - RNA, 64 nt, Homo sapiens
ggaggcgaagggagggacagagcacgccgaggcgagaaggaccgccagcacggagccaacacgc

SEQ ID NO: 205334 - RNA, 84 nt, Homo sapiens
acagacgagaaagaaacccagaagaggaagaagaggaaggaaaaggagcaggaggcaccagaaccccaaacgcagagaaggagg

SEQ ID NO: 205335 - RNA, 66 nt, Homo sapiens
aacccagagagaaagccaagcagcagacaggggacacaagcaggacggaggggggaggagcaggcc

SEQ ID NO: 205336 - RNA, 84 nt, Homo sapiens
gaggcggcggagcggggaggccaaagcacgggcgagagcgggaagagcacgcacaagcagagcgcacaccacggcgccggcacc

SEQ ID NO: 205337 - RNA, 76 nt, Homo sapiens
caggcaaccgccgggcggacaaaaggggaagccagagggaccccagcgggcggacgggggacagacacaccagcga

SEQ ID NO: 205338 - RNA, 56 nt, Homo sapiens
gccccccgcggcggcagccacagagaagacggcccagcagagcacccaaccagcgg

SEQ ID NO: 205339 - RNA, 76 nt, Homo sapiens
acacgaaaccagcacacgcacggcaaaccagacacacggaagaggcaaagcgcaggaagagcacagcagcacagaa

SEQ ID NO: 205340 - RNA, 79 nt, Homo sapiens
gcaaccaaaagagccaaggacccaaaaaccagggaggcaaaacccaacgaggacgggggaaagaaggaagggaaaaaaa

SEQ ID NO: 205341 - RNA, 73 nt, Homo sapiens
ggcggcggccggcgggcaaaggacgccaggaggaagggacaaaagaaacccccagaaagcccagaaaaaagag

SEQ ID NO: 205342 - RNA, 82 nt, Homo sapiens
ccccaggcaagggggcgccccccgcgagccagccgcccccagccaaacggagggaggagaagacagagcgaacagaagccgg

SEQ ID NO: 205343 - RNA, 73 nt, Homo sapiens
ccaagacaccggaaagcgaacaaaagaggaaaaccaaccgcacccgcgaacgaggaacagcacaacacaagaa

SEQ ID NO: 205344 - RNA, 74 nt, Homo sapiens
gccggccacccaaagcacgggggcaacagagggagacacacccacggagaagaaaggaggaaccaaagcccccg

SEQ ID NO: 205345 - RNA, 84 nt, Homo sapiens
ccagcaccggggagccacaggccggcggcccggccagcgcagccacgacaggggagggagcaaagccgcacacggaggggacag

SEQ ID NO: 205346 - RNA, 73 nt, Homo sapiens
agagaccaaccaaggaaacccccacccagcggagaagcaccagaagcacagaagcaagaaaaaaccaacagcc

SEQ ID NO: 205347 - RNA, 57 nt, Homo sapiens
ccaggccaaagaaagagaaaaaggagagcgaagaccaaagaacaaaggccgagggac

SEQ ID NO: 205348 - RNA, 81 nt, Homo sapiens
ccagcgcgggagcagcgccccgcacccagggggagacgcagcggcaccacaaggagggccggaagccagaacaacccccga

SEQ ID NO: 205349 - RNA, 95 nt, Homo sapiens
cagaccccacgaccggacgcccacgaccccagcaggggaagggaaaagggagagccaacccaccaggaacgacaacaagagaaaagagggcgaac

SEQ ID NO: 205350 - RNA, 76 nt, Homo sapiens
gcgcacgaccagcccgaacaagacaggaaggaaagagggcaaccgaagaccaacaagagaaccaggagcggcagac

SEQ ID NO: 205351 - RNA, 90 nt, Homo sapiens
cagccgcaaagcaggcgccacagacacacggccgccacggacaccccgcgggccaggaggcggaagccaggaggacgaaccagcccaagc

SEQ ID NO: 205352 - RNA, 65 nt, Homo sapiens
cggaacagccacagcagcccccaaggagcgcaagggccgcagccacgccccagggcgcgccagac

SEQ ID NO: 205353 - RNA, 68 nt, Homo sapiens
gaaaggagaggaaggaaaaaggacgcggggcacacaaagcagagggccgaaaaaaagagcaaaccacc

SEQ ID NO: 205354 - RNA, 76 nt, Homo sapiens
ccaacccggacggacaacaccggggagcgcggcaccacgcgcgcccgagcggacaagagcagcgggagcggagaga

SEQ ID NO: 205355 - RNA, 73 nt, Homo sapiens
accgcaaaccacacgacccaggccccggcaacccagaaaggccaagagcaccagccgacgaggcaacggaaga

SEQ ID NO: 205356 - RNA, 72 nt, Homo sapiens
ggaggacccagcccccagggcacgagcccagcacaaggccagcccggagacggaaaagcagacccagagcac

SEQ ID NO: 205357 - RNA, 33 nt, Homo sapiens
acaaaccagccggagaggcgccgacccaggcag

SEQ ID NO: 205358 - RNA, 74 nt, Homo sapiens
acagggaaaaaggcgccaaagcacagagcaagcggacaaaagaagggacagacagccagagggaaacgagagcc

SEQ ID NO: 205359 - RNA, 61 nt, Homo sapiens
gccacgggcccgcgacgcgcagccacgcaggagaccagagaagagacaacagcccaagaca

SEQ ID NO: 205360 - RNA, 85 nt, Homo sapiens
caaaccccaccggacacggagccaaaaccgcccagcccgaggccaccaagacacaaggaacagccagccaggagaaaaacgaacc

SEQ ID NO: 205361 - RNA, 83 nt, Homo sapiens
gcggacgcaggagcgaggcagcgaccgaaagccgccagggaacccgcccaggacccgccaagcccgccaccgcacacgggagg

SEQ ID NO: 205362 - RNA, 78 nt, Homo sapiens
acccaaaaagacggacagcccacgggaacaagaggggacagaaagcagggaagaacggaaaccagagaaagaaacgcc

SEQ ID NO: 205363 - RNA, 51 nt, Homo sapiens
ggacagagcagacacccgaagagagaagaccgaaacaaggaccccccggga

SEQ ID NO: 205364 - RNA, 72 nt, Homo sapiens
gaaaaacccgacccaccaggaaacagagaaacacgacagcacaaaaaggcgggaaaaccgccacaaagcccc

SEQ ID NO: 205365 - RNA, 77 nt, Homo sapiens
aaacagaacggcaaaccggaaaaaaacggcagcagggaagagcacgcaagcaaacacccacccacagagcgcaccac

SEQ ID NO: 205366 - RNA, 78 nt, Homo sapiens
gggacaagcagagcacgacagccggcgaagaagaagcaggacaaagcgaaagggaaaaaacaaaaggagccacaccgg

SEQ ID NO: 205367 - RNA, 80 nt, Homo sapiens
cgaggaacaccgagccggcgggccgcgagcccggccgcggccgcggcagagaagagacgccaacagaccggggagaaggg

SEQ ID NO: 205368 - RNA, 88 nt, Homo sapiens
ggaccagagagaggacgggcgaagacaccaaagagggggaggggaagggagaagcccaccacgcaacgggacggcgcggcggaaggcg

SEQ ID NO: 205369 - RNA, 78 nt, Homo sapiens
cccagaaagcagaggccagagcggagacagacggacaaagggccggagagagcccgcaggccaccagcccagaaaagg

SEQ ID NO: 205370 - RNA, 55 nt, Homo sapiens
cgcagggcgcccccgaaggcacgcaaagcaggggcacgcgcgcggcaagcacgaa

SEQ ID NO: 205371 - RNA, 64 nt, Homo sapiens
aaccccaaaaaaggccagaggaggacagcacgagagaacgcgcggcaccagcgaccaggcaaga

SEQ ID NO: 205372 - RNA, 76 nt, Homo sapiens
cacaacagaagaggagcacggaggagccgaccgcagcgagggaccagcacgcgagagcaagacccgcacaagacca

SEQ ID NO: 205373 - RNA, 77 nt, Homo sapiens
gaggagcacggaggaagcacacccgccagggacgggcacgggaaggaagcccggggcggcgacggagcacgacccaa

SEQ ID NO: 205374 - RNA, 65 nt, Homo sapiens
gcacggcacccgcaaaagcccaggggacccagccccaaagcgacaccaaaggaaccacgcaagag

SEQ ID NO: 205375 - RNA, 78 nt, Homo sapiens
cgcgcaggagcgggcaccacccaaagaagcggcggcaccaggacgccgaaaagcgaccggacgcaggcacagggacac

SEQ ID NO: 205376 - RNA, 82 nt, Homo sapiens
cgccgcccccgggcggccccgcgcgggcagcgcagccaggccgcgggacaagccaaaaggcagcaaaggcgagcaaaacaag

SEQ ID NO: 205377 - RNA, 70 nt, Homo sapiens
ccccacgacccaagcaaaaggggcgcaaggcaagcaagaaggagaacggaggccaccacgaaacagcaca

SEQ ID NO: 205378 - RNA, 73 nt, Homo sapiens
gggaagggagcaccgagaggcagacaagacacccgcaggcacggcagacacaccgaccagaggaaggcgaacc

SEQ ID NO: 205379 - RNA, 78 nt, Homo sapiens
agggcaacccggacaagcgggcaagaagaccaaggaagaaaaagccaggagaaaagagaaggaaaacaaaaaaaggag

SEQ ID NO: 205380 - RNA, 68 nt, Homo sapiens
cagaacgggaagcagcgggcggcacggaaaagaaaggaaaccagcaggccagcggaggcgagacgaaa

SEQ ID NO: 205381 - RNA, 77 nt, Homo sapiens
caccaaaaaagccaaagaacacaaggagccggacgaccgaaaggacaaaacaaaaggaaagcccaaaccccagcaag

SEQ ID NO: 205382 - RNA, 70 nt, Homo sapiens
cgcgcagcggccccggcggggcaagagcgggggcgggaccccgccgcggcgggagggcgggaaaacggca

SEQ ID NO: 205383 - RNA, 59 nt, Homo sapiens
caacaggcagcagcgggccccgccaccggcacaccgaaggagccgaggaacagaaacag

SEQ ID NO: 205384 - RNA, 76 nt, Homo sapiens
gaaaggaagaggacaggagccagggacgccaggggagccagggacgagcgggggacagcaagcaggagacaggccg

SEQ ID NO: 205385 - RNA, 73 nt, Homo sapiens
aaccacagaaacacgccccgcaaaaagggaagaggcaagccgacaggaacacccgacgggaccaagcgcaacg

SEQ ID NO: 205386 - RNA, 89 nt, Homo sapiens
ccggccgaggaagcccgagagccgcgagccccagggcgcccggagcgccccccaggaggccggcacgaagaccgcccacagaaggccgc

SEQ ID NO: 205387 - RNA, 75 nt, Homo sapiens
ccaaggagggacccaacagggacagggaccgacagcaagaaaaggagaaaacaaggccgcgggcacacagcaacc

SEQ ID NO: 205388 - RNA, 81 nt, Homo sapiens
cgagacggaggcgaggcaaacggggggcgcggagggaccagcgagcggccacacgcacagacgccgggaccggaaagcagc

SEQ ID NO: 205389 - RNA, 78 nt, Homo sapiens
gccccagacgagccgagaaggggggcgcccccgagcaagaggagccaggagcacggggggaacaagaccgccgggacg

SEQ ID NO: 205390 - RNA, 72 nt, Homo sapiens
gcggccgcagacaagagaagggaaaagaaggagaggaggggagaaagcaaaaccacaaaaagaggacacaac

SEQ ID NO: 205391 - RNA, 75 nt, Homo sapiens
cagccagccgagacggccaccccccgggcgaggaagggcggagggaggaaggagggagcgcccagagggccacgg

SEQ ID NO: 205392 - RNA, 70 nt, Homo sapiens
acagagcaaaaagcacccagagaccaagagaagggacaacaaacccggagcccaaaagggacacagaaac

SEQ ID NO: 205393 - RNA, 82 nt, Homo sapiens
aacgagcccaggccacagacccacacgccggcggccaaggccaccgcgcggcgccacccaggggaacgaggccaggagccac

SEQ ID NO: 205394 - RNA, 67 nt, Homo sapiens
cagcggacaaccccagcggcccaagaaacaaaaaaaggaaacacacaaacgcagaggcgcagccgag

SEQ ID NO: 205395 - RNA, 82 nt, Homo sapiens
aacaggagcacaagagaccacagacacacagccggcccagcccaccccaggcccccccagcccagcaccaccagcagaaaac

SEQ ID NO: 205396 - RNA, 70 nt, Homo sapiens
acagcaggcccgggcgaagagcccccccccaaggcgccgcgcccggggagacagaaacgaggcgccccca

SEQ ID NO: 205397 - RNA, 76 nt, Homo sapiens
ccgcgaccggggcccggggaaggcccgccgcccgccccagagggagagacacagaccaagaacaagccagcaagag

SEQ ID NO: 205398 - RNA, 82 nt, Homo sapiens
gccccacgaccccacgcggacgggcgaggagaacacccggaccggacacgccgagcaaagaagaggcccagcacaagcggaa

SEQ ID NO: 205399 - RNA, 66 nt, Homo sapiens
gcacagagcagacgaaaccgacaagcgcgcaaagcacagggaacaccagaggcgggaccacgggca

SEQ ID NO: 205400 - RNA, 84 nt, Homo sapiens
gcgcggaaacgcaagacgggccgagaagcagcgcgaggagaggcagcccccgccacggagccggagcaaaacaagccccacaga

SEQ ID NO: 205401 - RNA, 58 nt, Homo sapiens
gaccgggccagggcaggacaaggacaaggacagggaacaaaggcagagaaacgcaccc

SEQ ID NO: 205402 - RNA, 76 nt, Homo sapiens
acggaggaaggagaagagacaaggcacccacagaaggccacagaagccgccaccacccgccggagacgcagcagca

SEQ ID NO: 205403 - RNA, 73 nt, Homo sapiens
gaagggggacagcgcggccccggccgacgggaagcccgaagccagagagggcacccgccggcgcacgagaggg

SEQ ID NO: 205404 - RNA, 57 nt, Homo sapiens
gggaggaaccaagggaaacaagaaaagggaagcgcggggggagcggcccagaaaagc

SEQ ID NO: 205405 - RNA, 81 nt, Homo sapiens
ggcgggaacccgcggggagcgggacacgaacggcaggagagggcaggacagggagaggcgaccacccagaaccgccgagcc

SEQ ID NO: 205406 - RNA, 85 nt, Homo sapiens
cagcgaagaagacgaaaaaaacccaggcggcggcggcggcgcccgggagccggagcccgcggcgccacgccccccccgcgcaccc

SEQ ID NO: 205407 - RNA, 72 nt, Homo sapiens
aaacgaaacaaaaagggggagacagaccgcagacaggaacacgcgccagacaggggcaaggccgaggggaac

SEQ ID NO: 205408 - RNA, 55 nt, Homo sapiens
acagccgacccaagacgggcgaacagaggaaggaaaacggagccagcaggagaag

SEQ ID NO: 205409 - RNA, 69 nt, Homo sapiens
gcaggaggcaagaaaggggaaccccggagaaaaggccaagaaggcagcagcagccccgcgaagaagaga

SEQ ID NO: 205410 - RNA, 75 nt, Homo sapiens
acacgccgggcgcgcgcggccccagcgacgagagcccgggagcacaaggaagcgagggaggcgcaggaaagggag

SEQ ID NO: 205411 - RNA, 78 nt, Homo sapiens
ggagcgagaggcgcgaagcaacaagcagagaccgggcacaaccagccagcaacccgcccgggccaagcaccgcccacc

SEQ ID NO: 205412 - RNA, 57 nt, Homo sapiens
ccacccgcccgggccccagacagcacaaccagagcacaccgaagaaccagcaagacc

SEQ ID NO: 205413 - RNA, 64 nt, Homo sapiens
gggagcacagaacacagcaggagcgagaacccgagcagcgccagagcaacacaccgcgccccag

SEQ ID NO: 205414 - RNA, 57 nt, Homo sapiens
agcacgaccagccaccgggagagcggaaaggggacggcaaaacagaacagaaaggcg

SEQ ID NO: 205415 - RNA, 79 nt, Homo sapiens
gagagccgcgcccgcccgcccgaaaaggcccccggcggacagccgcccgcgccgggcaccgagaagacgccaaagcgcc

SEQ ID NO: 205416 - RNA, 88 nt, Homo sapiens
gcgccgccgccaacgccgcgcccgacgcagcgagggcaacacgggcaccggacccgccagggacacacaggaagggcccaaggaccac

SEQ ID NO: 205417 - RNA, 72 nt, Homo sapiens
caccggggcccggcgcccgggcccgccccggaggaacggcggccaaagcgccagacaagggccgagccccgg

SEQ ID NO: 205418 - RNA, 66 nt, Homo sapiens
gaaacaagaacaaggggacgcgcagcaggagaaaacagagcgcaaaaacagaccccacaacaaagc

SEQ ID NO: 205419 - RNA, 78 nt, Homo sapiens
ggagagcggcagaaggggaggccaggaaacgccgagccgggcagccccccgcaccggcagaggaagcaccaaccgccc

SEQ ID NO: 205420 - RNA, 73 nt, Homo sapiens
acacacacgccaccgccacaccacacaggacccaccaggcaaggaggaacgcggcaccacgagaccacccaac

SEQ ID NO: 205421 - RNA, 73 nt, Homo sapiens
gcgcaacacgagcccgcacgcacgaaagcaagagaacaaagcacgaacaacgacgaagcacaacaaggggacg

SEQ ID NO: 205422 - RNA, 72 nt, Homo sapiens
gcaaaaggcggaccgcccccgccaacgaagaccgagaccaggaaaccggagaagacacaccacagagcaccc

SEQ ID NO: 205423 - RNA, 78 nt, Homo sapiens
cggaaagaagagaagaccagcaaaaggagaccccccgacagggcacccaaaaagagaggcgagaacacggaaagccca

SEQ ID NO: 205424 - RNA, 72 nt, Homo sapiens
cccaagagcgggaacagagggcgaacagccgaggcgaaccgcagcaaggccaggacgacccagccggccaac

SEQ ID NO: 205425 - RNA, 55 nt, Homo sapiens
ggggagggccaagggagagcggccgcggccaaggggcagcaagacaacaagaccc

SEQ ID NO: 205426 - RNA, 66 nt, Homo sapiens
aggggccggggcccccaagggcacaggccccaccgccacccggcgcggcccacaagaccagcccca

SEQ ID NO: 205427 - RNA, 72 nt, Homo sapiens
aagcacaaccaaagaaggccacaccaggcgaacccaggagaacagaccaagcacgaaaaccgcacgaaagcg

SEQ ID NO: 205428 - RNA, 75 nt, Homo sapiens
cggagggcccccgcgccgcaagcagacggcaaggaggcggaagcgggcagggcagcgagcgaggggaagcccgac

SEQ ID NO: 205429 - RNA, 76 nt, Homo sapiens
cgacgaggaccacggagaggaaacggcaggcccacgcggaccggcagcgccaccggaccaccagacaaggacacgg

SEQ ID NO: 205430 - RNA, 72 nt, Homo sapiens
aaaaagacagagaaacagggacacagaaggaaggagagagcaagagcggaaaccagaccaagagaagaaccc

SEQ ID NO: 205431 - RNA, 77 nt, Homo sapiens
cgcaggagacgagaggacgggaccaggcgaagcggccgagcaggcgagcgaacgacgagcgccacagcagccaaacg

SEQ ID NO: 205432 - RNA, 77 nt, Homo sapiens
cgcagggaggcacagacccgagggacccgggacaggccaaagccgacagaaaaggaagagacccagcgaacaagagg

SEQ ID NO: 205433 - RNA, 66 nt, Homo sapiens
agccggcacggagagaagcacaggcagcaggcggagggcggcggccccaccccgggcgggacagga

SEQ ID NO: 205434 - RNA, 52 nt, Homo sapiens
caccacaacccacggaggccaggagcagcggcacagccagggaccagacaca

SEQ ID NO: 205435 - RNA, 81 nt, Homo sapiens
acaggggcccccaccacccggaggagcagcccgccccgccgggggagacgacccccgccaggacagcccagagcaagcaca

SEQ ID NO: 205436 - RNA, 93 nt, Homo sapiens
gcgggcccaaggcggaggcgccgcccggggccccgcggcgcaggaggcggggagcgcagagcgggcgagcgcgaaagagccgcagacgcacag

SEQ ID NO: 205437 - RNA, 82 nt, Homo sapiens
cgcaggaggcgccccccccaccggcccccggcggaagacccagacagagagagggagcagaggggaccaggcgagaaaggaa

SEQ ID NO: 205438 - RNA, 85 nt, Homo sapiens
gccggggaggaggagccacggccggggacagggccagcccaggacaacaacgcggcaccccagaggacggcacggcacaagaaaa

SEQ ID NO: 205439 - RNA, 74 nt, Homo sapiens
aacccaggggaccgcagaggggacaacacccgagacgaaaaacccacccccagggaccaaaagacacagcaggg

SEQ ID NO: 205440 - RNA, 77 nt, Homo sapiens
ccgccggcgcgggaaacgggcgaagcgacgagccgcgaggaggaacaggacggacggcacacaaagggcgaagacga

SEQ ID NO: 205441 - RNA, 78 nt, Homo sapiens
gggccggagaggggaaccagcagaagagagaacccaccgcaagagaccaaaggccaagagcaccgcagccaccagccc

SEQ ID NO: 205442 - RNA, 82 nt, Homo sapiens
caagaaaccaaagaagaaaacccagggacacaccggcacaggggggggacccagacagccaggggagacaagcgagccgaag

SEQ ID NO: 205443 - RNA, 80 nt, Homo sapiens
ggcggacggcgggaccacaagacaacgcggagcggcgaagagcaaccagggggaaagcccaccgacacccagaacgggaa

SEQ ID NO: 205444 - RNA, 70 nt, Homo sapiens
ccagaacagggacgccagccgcagaggaagacccggcagccggggaacggaagaaaaggaggagaaccca

SEQ ID NO: 205445 - RNA, 77 nt, Homo sapiens
acgccacagcaaggcgcaaaaaagccaaacggcccgcggcaacaaagcacagccccgaagacaggaaacaaccccaa

SEQ ID NO: 205446 - RNA, 65 nt, Homo sapiens
cccgagggcggacgggccccgcggccgcccgagcaggaggacgaacagacaacaggcacaaagag

SEQ ID NO: 205447 - RNA, 78 nt, Homo sapiens
cggaggagcaggcgagaagagaaggacaggaacacaagacacaaacaaaccacagggagggaccaaccagaaggccag

SEQ ID NO: 205448 - RNA, 93 nt, Homo sapiens
caagagggagggacgaagcgcacagcaaacagcgcacggcggaaggaccgggggaggaaaaacgaggcaaagaggaacgggaaaacagcggca

SEQ ID NO: 205449 - RNA, 78 nt, Homo sapiens
cgggcgcgcagaacccgcgggcaccgccgcgggagcgccgccaaggaccaagaacgcccagcccgcgggcaccggcag

SEQ ID NO: 205450 - RNA, 76 nt, Homo sapiens
aaaaaagccagccaacgacaacaccagcccggccagggccaaccggccaaggaccagaccgccgcgacagggaccc

SEQ ID NO: 205451 - RNA, 72 nt, Homo sapiens
caaaaacagaggagaaaaggcggacagcagcgcaggcaaaaaacaggacagcagcagaccagcacgaggaag

SEQ ID NO: 205452 - RNA, 70 nt, Homo sapiens
gccccgagagcggacacagacgaaagagcaaccgggaacagaaacaggcaccagaagcagagggggagac

SEQ ID NO: 205453 - RNA, 69 nt, Homo sapiens
aaacaccaaaaaaggaaggcacccaaggccgaaccaaggacgagcacacaacaaaccggagggaggacc

SEQ ID NO: 205454 - RNA, 76 nt, Homo sapiens
caaaaagaaagcaggcgcgaaagcacgagaggaacagaaaggggggcacgaacaacaagacaagcaaccaagaaag

SEQ ID NO: 205455 - RNA, 75 nt, Homo sapiens
cgggaagaacgggcccgccggcccggccggcaaagcaccaggcacagcaagcgccgaaagaccagggaaaaaacc

SEQ ID NO: 205456 - RNA, 81 nt, Homo sapiens
ccggccccagagggcgggaacagggaaaggaacacaggcggaagaagaaaggagccacagagggggacggaaggggaagcg

SEQ ID NO: 205457 - RNA, 89 nt, Homo sapiens
agcggcgcagcggcggcagcggagagcgagagaggggagcaggaggcacaaagagagacggaacgcagaaagaccacaagggagagaag

SEQ ID NO: 205458 - RNA, 78 nt, Homo sapiens
ccaaaccagagaaaaacgagaacgccaccagccaaggcgacgcaacacacgaggagcgacagacagcaccaagaagaa

SEQ ID NO: 205459 - RNA, 70 nt, Homo sapiens
gaggagggcggccgggacagccaggacagcagccgaaagaacagagacgcaggcaagagcgcggaggaga

SEQ ID NO: 205460 - RNA, 76 nt, Homo sapiens
aaaaagagaaagacccgccaaaggccccccccacggaaacacgaggcaacaaaacagcagaggagcagcagccgaa

SEQ ID NO: 205461 - RNA, 66 nt, Homo sapiens
aaacacagagggcacacggcacagaccagagccgcgagaaggggccagcaaagacggagcgggaag

SEQ ID NO: 205462 - RNA, 73 nt, Homo sapiens
gccccagacggggcagagacgcaaggaagacggcgcagaagggaagagacagggcacaggcaggagaaggaaa

SEQ ID NO: 205463 - RNA, 81 nt, Homo sapiens
caagagggcccccagcaccacacgacccgcgcccaagccagacagcgagccgaggaacgcggcagagaggcgagacacgga

SEQ ID NO: 205464 - RNA, 86 nt, Homo sapiens
gcggaggacagccgagaggaggcgagaaccacgccgacaacggcggaagaggaacgggaacggggaagaagagcggcgccaagcgg

SEQ ID NO: 205465 - RNA, 78 nt, Homo sapiens
agcagggaagaggagcgcaagcgccggggagggcacagagcagaggacaccacaggaaggaggcgcagagagaaggcc

SEQ ID NO: 205466 - RNA, 73 nt, Homo sapiens
gaaaccaacccgaaccccgcacagagcagacgaaaccgacaagcgcgcaaagaacccagaccccaggagacaa

SEQ ID NO: 205467 - RNA, 75 nt, Homo sapiens
agacgggggcccaaaacaccacccagacggaggagaaccgaaaaaagcagagaaaaggagccaggacgacacagg

SEQ ID NO: 205468 - RNA, 68 nt, Homo sapiens
ccgagacacggggcgagaaggcggcgcacaaggacagcagaccacagcccggcaggcccaaaaaccca

SEQ ID NO: 205469 - RNA, 77 nt, Homo sapiens
ccaaaaggaccgccagagacgggagggacgcgcaaggaccaaggcccacaagacccggccccggccccacacaacgg

SEQ ID NO: 205470 - RNA, 77 nt, Homo sapiens
gacaaccacaccccccggagaagggcgggcggcacccagagaccacccggcggggaagcgcggcgaggagaggccca

SEQ ID NO: 205471 - RNA, 65 nt, Homo sapiens
ggaaggcgcgaggaggaaaggaggacgagccaggggcacagaagggaccacaaacgagggccaag

SEQ ID NO: 205472 - RNA, 65 nt, Homo sapiens
gggcaacgaacaagggcaaggcagccaccggcaggggagcgcagcggccagggcaggacgagacc

SEQ ID NO: 205473 - RNA, 69 nt, Homo sapiens
caaaacccagagaagcgagcgagggcgcgccaggcggggcccgggacaagaacaggaacccagccaccg

SEQ ID NO: 205474 - RNA, 80 nt, Homo sapiens
aacgccaggcagcccgagcagaggaagagcaggggcacagagagaggagagagaccagagggccgaaaaggaagcacagg

SEQ ID NO: 205475 - RNA, 60 nt, Homo sapiens
cggccccgagaacccacaggaccgggagcggcccaacaggaagcaaagcacaggagggcg

SEQ ID NO: 205476 - RNA, 68 nt, Homo sapiens
ggaggggacgaagacaaaaaccagaagcaaggcaaggaaaaccaacaggaaaaacagaagaacagcaa

SEQ ID NO: 205477 - RNA, 72 nt, Homo sapiens
acccacggagagaacagccaggggagaaaaccagccacggaacccagaacaggccaagccccacaggccacg

SEQ ID NO: 205478 - RNA, 63 nt, Homo sapiens
ggaggcgggaccccggcacggacagagaggcgcaggcaagacccggaaggcccagaagaaacc

SEQ ID NO: 205479 - RNA, 73 nt, Homo sapiens
ccaagccgagccgccacccggcggagcccaccgacaccacaggcaccgcagcgcggcccagccccaccggaaa

SEQ ID NO: 205480 - RNA, 78 nt, Homo sapiens
aggccgaccgcccgccacgagagaacgaaacagccacacgaagggagagcggggcaggaaaaacagccagcaagagcc

SEQ ID NO: 205481 - RNA, 67 nt, Homo sapiens
ggaaaaggcccaaaggccgccaggccgcagacgcgaaggaacggcaaaggaaagacacacccaagga

SEQ ID NO: 205482 - RNA, 75 nt, Homo sapiens
ccaggccaagagggacccacccggcgggcagcggggaagaagaaaaggaaccgaggccccccggcgacacggcga

SEQ ID NO: 205483 - RNA, 90 nt, Homo sapiens
agccgacccgcagcagccgagccggccagcagcgccccaccaccccgccagcagccgagccccaagagagacggggcgccggagccagga

SEQ ID NO: 205484 - RNA, 80 nt, Homo sapiens
ccggggccgcgcgcccggcccgcgaggcggacacgccggcacagacccagagggaccaccacacgaaaccaaggaaaaac

SEQ ID NO: 205485 - RNA, 76 nt, Homo sapiens
aagaccacaaacacaagcaagagaagcgaggcgcaagcaaacgcgagaggaggcagcacgaaaccagcaggcaaga

SEQ ID NO: 205486 - RNA, 77 nt, Homo sapiens
gggggacacagcggaaaacacggaggagaagacagcgaacccacccaacacggcaaaacaaagacaccacacccaaa

SEQ ID NO: 205487 - RNA, 77 nt, Homo sapiens
aggagaaaaaccagcggagagagagacggaggagcagaggagggacagcacaacagagcccaacaggaaccgcagac

SEQ ID NO: 205488 - RNA, 75 nt, Homo sapiens
ccacgaccccaggggcgcggccgaacagccccgcgggaagcgacgaggagcgaggagcgacaaggcccagcagca

SEQ ID NO: 205489 - RNA, 98 nt, Homo sapiens
cacaagaacccagccaaagccccaagaagaacggaaaagccagccaggacaggaaaggacaaccccacagggagaaccggagacaaagcaggacccca

SEQ ID NO: 205490 - RNA, 80 nt, Homo sapiens
ccgggcgcggcgcagcgccgaggcgggcgaggcgccgcggaccagaggcgccgggagggcagaggccaggcccccgcccc

SEQ ID NO: 205491 - RNA, 73 nt, Homo sapiens
gagacaccgggaaagggccaagaacccagaaaaagggaggaggggggcacagagccagaggaaaggaagaaga

SEQ ID NO: 205492 - RNA, 74 nt, Homo sapiens
cccaggacgggcggaggcggggggaccggcgggcggggcccggggacacgagcggccccagcgcccgcacaagg

SEQ ID NO: 205493 - RNA, 69 nt, Homo sapiens
cgaagaaaccaaaaaaccaccaacgaggaccaaaagcaccaaaggcaagcagaagaggaacagaagaag

SEQ ID NO: 205494 - RNA, 45 nt, Homo sapiens
gagggcggagcagcacaaggacaaggaccacagcacggcccacga

SEQ ID NO: 205495 - RNA, 71 nt, Homo sapiens
ccaggcacggcccggcaagggcgggggagccgacaaccccggaacgcgggcaaaaggccccaggggaccgg

SEQ ID NO: 205496 - RNA, 85 nt, Homo sapiens
cgacagcagccagaaccaacagcgggaacaagaggcgggagaagacgggaagccaccagagcccaggcacgaggagacccaggag

SEQ ID NO: 205497 - RNA, 80 nt, Homo sapiens
gggcaaagcggagaccggcccgggcaggacggggcggggaccaggagaggcgccaccgcccggaccgggggggggcagga

SEQ ID NO: 205498 - RNA, 81 nt, Homo sapiens
ggaaaccaagcaagagccaggacccccgaaagccagacagccccggaacagagacagagacacggcacaccgcaggaggaa

SEQ ID NO: 205499 - RNA, 81 nt, Homo sapiens
cacgcagggcaaaagaagcgaaaagccacacagaaagaaacagcaaccaaggacagagcagcccccaccgcggagaaaaca

SEQ ID NO: 205500 - RNA, 68 nt, Homo sapiens
gggcgaagaaaccacgggcgacccaccaacaggcaacccagacaaagaagagcagccgcagaaaaaaa

SEQ ID NO: 205501 - RNA, 74 nt, Homo sapiens
gcccaagccaccgcaggggcaccaaaacacacaccgaaacccacgcgcacaggcagaaaaacgccaagacacgc

SEQ ID NO: 205502 - RNA, 73 nt, Homo sapiens
aagccccggaaccagcgagagacaccaaggagcagaggcaccagcccaggcagaagaacacccaggaccaacc

SEQ ID NO: 205503 - RNA, 70 nt, Homo sapiens
ggagaagcgggaggagaccacccaaacgcggcacgggaggcgggaggcggaggccacccagacccggccg

SEQ ID NO: 205504 - RNA, 71 nt, Homo sapiens
gagccgcggcgggcagccagagcccagagagcagcaccagcagaagagggcccgaccacggcaacccagag

SEQ ID NO: 205505 - RNA, 76 nt, Homo sapiens
ggagccgggccagggagacgacgagggagaacacggggacaaagaaagcccgcgccgggagaagagacaacggcac

SEQ ID NO: 205506 - RNA, 73 nt, Homo sapiens
cgcgcggcgggggcgcaccagaagcacggaccccaccgaacagggccggcagacgcagacagggcccggcccg

SEQ ID NO: 205507 - RNA, 78 nt, Homo sapiens
gaagccaggacaccgccacaggagggaccagcaccggaggaaccgcaccaacaaaccacagggaaccgagcaaaggaa

SEQ ID NO: 205508 - RNA, 80 nt, Homo sapiens
ccagacgcggcacagagagggccgggagcgcgcagccagcgagcaaaagaggaaaaccagcaaagccaccgcagccccga

SEQ ID NO: 205509 - RNA, 81 nt, Homo sapiens
agcgggacaagcggcgagccacaaacaccaacaagcgcgggccggcagcccaggaacgagaggagcaacagagacaggcgg

SEQ ID NO: 205510 - RNA, 79 nt, Homo sapiens
agacccacagaggaaaacaaccccggggccacaaagcgagacgagaacccagccagaaaaccacgcacgcaaaaaggca

SEQ ID NO: 205511 - RNA, 80 nt, Homo sapiens
caccagacagccccgacgccacgccaggggcccaagcgcagacaaggaaagaggaggaggcaaaggacaaagccccagaa

SEQ ID NO: 205512 - RNA, 86 nt, Homo sapiens
ggagacgagaggacgggaccaggcgaagcggccgagcaggcgagcgaacgacggaccgggcagccgcaagagcccccagcgccagc

SEQ ID NO: 205513 - RNA, 77 nt, Homo sapiens
cccgcgcggcgcggggaccgcggcccggccggcaagaagccaacggagaaccaaggccaagaccagaaccagcccgg

SEQ ID NO: 205514 - RNA, 112 nt, Homo sapiens
aaacaacgacccacccgcagagagcagcagccgacggagaagccccagaaacccgacccagccagaccccagcgccccccgcccacggacggaccagacgaccccagaccgc

SEQ ID NO: 205515 - RNA, 72 nt, Homo sapiens
agcaaaagcgaggaaaaggagcagccagggggcacaagaaggccaaccccaaaagagagaacacaggcaaga

SEQ ID NO: 205516 - RNA, 75 nt, Homo sapiens
cgaagaccggaccgggggcaccggaccgaggagaaagacagcaaagaaaaggagaagaaaggaaaaaaacaaccc

SEQ ID NO: 205517 - RNA, 50 nt, Homo sapiens
agacgcagggcgcccccggccgcgaacacaaagagcagacaacgacaaac

SEQ ID NO: 205518 - RNA, 72 nt, Homo sapiens
gccgacccgccagaggaggccccccagccacggaaacggccagcggaccaaagggagccacagcacagcaga

SEQ ID NO: 205519 - RNA, 77 nt, Homo sapiens
gagaaggaggacgggcccgggcggcccggcgagcacggcaggcggagcccagaaccgggacaacccagcaaacaggc

SEQ ID NO: 205520 - RNA, 107 nt, Homo sapiens
caaagggaaaggggccgcggagaacaccgaagcgggggagaacaaaagggaggcccaggaacacaccaccaggaaaagccgaaggaagcgacaggaaggggaccaga

SEQ ID NO: 205521 - RNA, 52 nt, Homo sapiens
gccggccgagaaggcagaggcgagaaccgcagccagaagcaaagcagacaga

SEQ ID NO: 205522 - RNA, 80 nt, Homo sapiens
cgccaaaggcccgggagaacggcagaaacgaagaggcccaccagcccggccgggcgaggacaagcagccagcgccgcacg

SEQ ID NO: 205523 - RNA, 78 nt, Homo sapiens
cacggaccagcagaacagaaacaagcagcaagagaagagcgacgcggcagcgagagagagagccgcagcaaagcagaa

SEQ ID NO: 205524 - RNA, 78 nt, Homo sapiens
ccggagcgagaccgggcggccacagccgcagggagaacccgaggcggacaagagcgagcaagccgccgcagcaagcca

SEQ ID NO: 205525 - RNA, 75 nt, Homo sapiens
aggaccccccagcccagaaagccggcgggaggggggcaaggagaagaccgcggcggagaaaccaccacaaacacg

SEQ ID NO: 205526 - RNA, 75 nt, Homo sapiens
gacggcgccggccggggggacgggcacggggagaaggaagaccaaagaaaaacacaaagcacgcaagccaaaagc

SEQ ID NO: 205527 - RNA, 40 nt, Homo sapiens
ggagagcacaagccggccacgggaccagaccccacaagaa

SEQ ID NO: 205528 - RNA, 67 nt, Homo sapiens
aaagagagaacaggaccggagaccgggcccaaacaacaagaagagcccccagagccgagggggcccg

SEQ ID NO: 205529 - RNA, 75 nt, Homo sapiens
ccagcagacgcccagcggagcaacgaggcgccacaacacaaaggccggacccaagccagaagcccgcaaagcccc

SEQ ID NO: 205530 - RNA, 52 nt, Homo sapiens
caggcccgcaaggccggacgaaggaagagacccgaagcgaaaccccgaccga

SEQ ID NO: 205531 - RNA, 75 nt, Homo sapiens
gcgggccagcgacccgcgccagcgcccagggggggaaaccaccgacggcacaggagagggccaaaacgaaggaga

SEQ ID NO: 205532 - RNA, 75 nt, Homo sapiens
cccccgcgccgcacggggacgagacggagcaaagagacaggggcagaaaacaaggcccagccaggaccaaaaaag

SEQ ID NO: 205533 - RNA, 34 nt, Homo sapiens
ggaagcagaggccacccagaccgacagaacaagc

SEQ ID NO: 205534 - RNA, 77 nt, Homo sapiens
cagcaaaaaaaagagacgacaccccaccggaaagaacgccggacaacagcggcgaagaaggcaaaccgaaggcccac

SEQ ID NO: 205535 - RNA, 76 nt, Homo sapiens
cgccccaggaaggagaacacacgggaacaacggaccggccagagagagacaagaacaaccaaacagaaacaagaaa

SEQ ID NO: 205536 - RNA, 83 nt, Homo sapiens
cgcacggacaccggcggccccaccagcagacgcagccgagacaccagcccgaaacaccaccaagagccggaaaccggccggcg

SEQ ID NO: 205537 - RNA, 74 nt, Homo sapiens
gacaccccagcgaaccgacacccacagaccaccaacaaggaggcggaaaagggcgaggagcgggagcacgccaa

SEQ ID NO: 205538 - RNA, 73 nt, Homo sapiens
gaacaggacgaagaccagcgccagggaaagaagacgggaagacccagggcacaagaaaacaacggcgggggac

SEQ ID NO: 205539 - RNA, 84 nt, Homo sapiens
cgccggaggccgagcggagggagcccccaggacaggcacacccgggaaaaccgaacacccagcccagacacaaggacacaggag

SEQ ID NO: 205540 - RNA, 88 nt, Homo sapiens
ggccaagaaagacaaagacccaggaacaaaccgggggcaaggccaaaaagaaggagacagggaaacgaaaaccaccgggcaccacgag

SEQ ID NO: 205541 - RNA, 63 nt, Homo sapiens
aaaaacgcaacaacagacggggagagaccacaacacaggaccgccagacaggcccgagaaagg

SEQ ID NO: 205542 - RNA, 78 nt, Homo sapiens
cgaggaagaggacaggagcggagagaaaaacacaccgacagcagaacacacgcgaaaggaaaccaagcggaagggaag

SEQ ID NO: 205543 - RNA, 84 nt, Homo sapiens
gacgcccagagccgcggccggggcgcgggagaacgggagaagacccgggccgggaggccgccagcgccaggaggaaccagcccc

SEQ ID NO: 205544 - RNA, 60 nt, Homo sapiens
cgcaagagaagcgaccgcgcacgcccggaagcgggcccccaggcaccccagccgcaaccg

SEQ ID NO: 205545 - RNA, 81 nt, Homo sapiens
ggggagcaaaccgcagagagcgagagcacgaaccagagcaagcagcaggcgggggggccgaagaagccagggggaggaaag

SEQ ID NO: 205546 - RNA, 48 nt, Homo sapiens
ggagaaggaccaagaaccagcagagccccgagaggggcgcgcagaaac

SEQ ID NO: 205547 - RNA, 66 nt, Homo sapiens
gggcagcgaaggggaaaaagcgcggcaaagcgcggcccacacaggagccaaggaaagcccaacaag

SEQ ID NO: 205548 - RNA, 72 nt, Homo sapiens
acgagccgagcagaggaaccaacaaagaaggagcggaaaaccaggaacggccaggacaaggccgacgcgcac

SEQ ID NO: 205549 - RNA, 81 nt, Homo sapiens
agcaaggacgcggcagcaacacgacggcgcccgccgaaccgagagaagacaagcacgcagcagagagcaaaagaagacgcg

SEQ ID NO: 205550 - RNA, 73 nt, Homo sapiens
gcgaggaccccgacccccagcaacacacaggcggagaaccccgccaaccagaggcaagcacaaaccagaggaa

SEQ ID NO: 205551 - RNA, 78 nt, Homo sapiens
ggagcggccagggccgggccagccggccggcgcggggccgcaaggcagccgcggagcccgacacaggcccaccgggac

SEQ ID NO: 205552 - RNA, 59 nt, Homo sapiens
gcgcagcgcgcgggcacaagcgcgccgggggcccggaaagggacgcgcgcccagggagc

SEQ ID NO: 205553 - RNA, 77 nt, Homo sapiens
aagcccaagggacaagggcaacaaggccgcacacagccgaggagggcaaaacaaaagcagcgaaaaaagcgaagaaa

SEQ ID NO: 205554 - RNA, 81 nt, Homo sapiens
aaggcgcaggaagccagccgcgccgacagcacgcagagcggagaagccccagaccagaggggaaggagaacaccagagaaa

SEQ ID NO: 205555 - RNA, 59 nt, Homo sapiens
aggagaccacaaaggaccagcagaggcaggaagagccagggacggagagaaaaacagag

SEQ ID NO: 205556 - RNA, 72 nt, Homo sapiens
gcacgccggccacggccccggagagaagagacaggccagacacagcaggagccaagcccccccagacacaag

SEQ ID NO: 205557 - RNA, 61 nt, Homo sapiens
gcacacaggacgcggaaccgcacgcagagaaacaaaagcgcacagccagaagaaaccggga

SEQ ID NO: 205558 - RNA, 81 nt, Homo sapiens
ggaccggccagggacaggcacgcaggggacgagcgcaggacaggggggccacacagggaaccagacccaacaacggaacgg

SEQ ID NO: 205559 - RNA, 77 nt, Homo sapiens
gggaagaagacgagcaacaggagagggaacgggaggaccaggggacggaagaagcaggagaagcacaacgcgaaagg

SEQ ID NO: 205560 - RNA, 108 nt, Homo sapiens
ccaggagcgagagcacaggaaaagaaaaccggagaccagggcaacccagacgcccaccgacccagcgaaagaagggaggcagcgcagaagaaaaaacaaacccaccaa

SEQ ID NO: 205561 - RNA, 90 nt, Homo sapiens
aaacaggcgccgcgggcccgcgcccggccggacccgggcccgagggcccaggaacccgaagcgggcgagccagagcgcgccagaaccccg

SEQ ID NO: 205562 - RNA, 69 nt, Homo sapiens
agcaagggcaacggggcacgcaaagaggaccgccaacaacagaaacaccacgacagacacaagaagaag

SEQ ID NO: 205563 - RNA, 78 nt, Homo sapiens
caggggcccccaccacccggaggagcagcccgccccgccgggggagacgacccccgccagccaccaggagagaacgcc

SEQ ID NO: 205564 - RNA, 79 nt, Homo sapiens
gccgccgcccgcgcgcgaccgccccgggacccggcacagaggcgcaagggacaagcgcaccagaaagagacggacgagc

SEQ ID NO: 205565 - RNA, 81 nt, Homo sapiens
caaagacaggcgcaaacgcacagccagaccaacccaaagccagaggcaggaagaagaagacgagacagggcgaaccagggg

SEQ ID NO: 205566 - RNA, 56 nt, Homo sapiens
agaacagaacccaaaagccgacaaccccagaaacagggagaaaccgaaacgaaccc

SEQ ID NO: 205567 - RNA, 77 nt, Homo sapiens
gcaaggagggccacgagcaggggagaaaggcgacgagcgcccccaccaaaaaccaagacaagaaaagccaaaaacaa

SEQ ID NO: 205568 - RNA, 56 nt, Homo sapiens
ccaggacacgaaaacgcaaagccaggaacccaggacaaggacaacggcaagcggag

SEQ ID NO: 205569 - RNA, 86 nt, Homo sapiens
gaacccaggccccgccgaggcggccaggaacgcacaccagcaccagcccaccaaaccagcacgaccccggagcagaagaaggagcg

SEQ ID NO: 205570 - RNA, 99 nt, Homo sapiens
gcacgcgacgcacagaggaacacgccggggcccaaccacaagacgaccaaaggaggaaggagaaaagaaagccagaaggaaggaagcaacgaaccaaga

SEQ ID NO: 205571 - RNA, 76 nt, Homo sapiens
ccggagaaggccgcaccaccaaaccaagcaaggaaagaacaagaaaggagaggagagagcgaagcaccgcgcagac

SEQ ID NO: 205572 - RNA, 76 nt, Homo sapiens
aacaagacaggaacgccaggccgcagcaccgccaccaccagcgccccaccgagacagcgacaccaggaaggaagga

SEQ ID NO: 205573 - RNA, 72 nt, Homo sapiens
aagagagaaggggggaaggcaccccaagggccaacaacaggagcaagaagccacggcaccagccaacaccag

SEQ ID NO: 205574 - RNA, 71 nt, Homo sapiens
cacgaaagggccagaagaagacacaaggagcgggagccacgccccaggggagccaacgccagcagccgcac

SEQ ID NO: 205575 - RNA, 92 nt, Homo sapiens
acgagaaagagaggggagagagagaggcagagagggagagagggagaggacagcagcgccgccggaaccaaaaagaagccccagagccgggg

SEQ ID NO: 205576 - RNA, 84 nt, Homo sapiens
gcagcagccccggggcccggagagaagaaggaaccagcaaagcgccacgaagcacaagcaagaggaccagccaaaaccacacag

SEQ ID NO: 205577 - RNA, 81 nt, Homo sapiens
agcgggcggagacgccgggcagccgaacggagggcgacggagggagggacaagagaaaaaaagggcgggcgaacaaaaaga

SEQ ID NO: 205578 - RNA, 75 nt, Homo sapiens
cccggccacggcgccagagccggggacgaaagggaaggacaggcagagcaaacaaggaaacaggcagagaggaca

SEQ ID NO: 205579 - RNA, 75 nt, Homo sapiens
cgccggcccacgcgcggccaagggcaccgcgccggcgcagcgccggcccccaagaggagacgggaggggggcgcc

SEQ ID NO: 205580 - RNA, 78 nt, Homo sapiens
agaacaaccagcccacgcaccgcaaacgaacaccagggggacaagcggagaggcgagagagaaacacaggccccagaa

SEQ ID NO: 205581 - RNA, 79 nt, Homo sapiens
cgaagaaaagagaaggaaaaacagaacggcaaaccggaaaaaaacgggcgcggggccacgcccagacccaaaaacgaca

SEQ ID NO: 205582 - RNA, 76 nt, Homo sapiens
caacccagcgagagaaagaagacgaccccgacgcaggccaggagccgcggacagaagccgagcacggccgagacaa

SEQ ID NO: 205583 - RNA, 80 nt, Homo sapiens
cgggaccggcgccaccgcagggcggggaacagaccagggaaggggaggagaagagccgggaaaaacacagcaagaaccac

SEQ ID NO: 205584 - RNA, 77 nt, Homo sapiens
caggaggcaagaaaggggaaccccggagaaaaggccaagaaggcagccacagaaagaagacacccgccacacaggac

SEQ ID NO: 205585 - RNA, 82 nt, Homo sapiens
ccgccccgccgaggcaggcgcccaccgccggcgggagcggcggaagcccagcgggcgcggaagagggagcgcgaaggagcgc

SEQ ID NO: 205586 - RNA, 74 nt, Homo sapiens
gacgacggaaacagagcacaacaaaccgacggcaggcaagggagcagagacacgaaaagaaagcacagcaacac

SEQ ID NO: 205587 - RNA, 65 nt, Homo sapiens
agacacaagggcacgaaggggaggaacaaaagaaaaaggaacgggggaacgacagcagcaggacc

SEQ ID NO: 205588 - RNA, 55 nt, Homo sapiens
agaacggcaaaccggaaaaaaacggaagacaggccagaaacccagaaagaaagaa

SEQ ID NO: 205589 - RNA, 78 nt, Homo sapiens
gggagaaacggcgcagcagagcgagaccgccaacaggacaccgaagccaaccggggccaaagcagccgcgggacaccc

SEQ ID NO: 205590 - RNA, 61 nt, Homo sapiens
gcacccgcccacgcggagaggggggcagaagggaagaaggagaaagggccaaccccgaaga

SEQ ID NO: 205591 - RNA, 79 nt, Homo sapiens
cgacgaggagcagggccgacgcgcaggggacacgcgccggaggagcagcgagcgcaggccggccccaaggaaaaccacc

SEQ ID NO: 205592 - RNA, 73 nt, Homo sapiens
ggcggcgagggggcggccggaagcaggaaaagcccaggcggggcaggcccagcacgagcccagaaaccagcag

SEQ ID NO: 205593 - RNA, 80 nt, Homo sapiens
gcacaggagcgcacgagcgggagagccaaaggaggcacgacagcagaggaagagaagcagcgaagccgaggcacagaccc

SEQ ID NO: 205594 - RNA, 75 nt, Homo sapiens
gggcagccggccgggccccagaagaggacagcccaaggcggaaaagcgaaggaagccacaagcacagcccacaca

SEQ ID NO: 205595 - RNA, 71 nt, Homo sapiens
cggggggccgaggccgggacaagcagcaaggcgcggggggccacgcgaggccgagaccccaggccccgaca

SEQ ID NO: 205596 - RNA, 73 nt, Homo sapiens
gggcgccccacagaggggcgacgacgcacccccccccccggcggagccccgaaggagcgcaggcagcaggagg

SEQ ID NO: 205597 - RNA, 57 nt, Homo sapiens
cgcaaccacccaacaagggccagcacgaagcccgaacaaccgcgacagaagccagaa

SEQ ID NO: 205598 - RNA, 77 nt, Homo sapiens
gccgagggcgggccgaggcggaaaggggaggcagagacagggcgagaagagcaggggggaggacagcaaagaagaca

SEQ ID NO: 205599 - RNA, 85 nt, Homo sapiens
gcgcggcgcgggagccggcggggcggcggcaacggggcacgaccggggacagcccacggagcagcgggacacgacagaagacaag

SEQ ID NO: 205600 - RNA, 68 nt, Homo sapiens
ggacgacagcaaccggcccacgagagcacccccaaaggccggcccacagcccaaaaagaaacaggacc

SEQ ID NO: 205601 - RNA, 75 nt, Homo sapiens
accgagagcgcgaaacgcacgagaaggcaagagagagaagaagccggcagcccggcccaggccgagaaaaaagag

SEQ ID NO: 205602 - RNA, 64 nt, Homo sapiens
ccccgcggacgccacagcgccccgggcgcgccaggcacagccaagagcggaccggcagcggcca

SEQ ID NO: 205603 - RNA, 48 nt, Homo sapiens
gggccagagccaggggccgggagggcgccagagaacggaaccccaccc

SEQ ID NO: 205604 - RNA, 88 nt, Homo sapiens
ccgggcaggacgccgagcgggacccccgccgccccgggggccggacgagcagacagacagcgaacacggaagccacgaaaagcaaaag

SEQ ID NO: 205605 - RNA, 76 nt, Homo sapiens
ggacccgcgggcaccccgcgcgaccggccgccgagcgaaagcgggaacccacaacgaaggaaggaacagaggcaca

SEQ ID NO: 205606 - RNA, 75 nt, Homo sapiens
cacaccaggcacccgggcccagccgggaacccccacgcggccagcgaaaacgcccagggggaggggggcgaaacc

SEQ ID NO: 205607 - RNA, 81 nt, Homo sapiens
cagacagacgccggggaggcagcgcgggacccagcccaggcggcgcggacggggcggacaagccagcgccagggagcacaa

SEQ ID NO: 205608 - RNA, 74 nt, Homo sapiens
ggagaaaaaagagaggaaaggcaaggaaaaacacaacccaagaagggaaagcaacggcgcaagcggcggcggcg

SEQ ID NO: 205609 - RNA, 117 nt, Homo sapiens
cggccgaacgcggggccacgcacgcaggggcgcgcggggcggcgcgccgccgcgcggggcagcgaagacccgaaggccgcgagaccgagaaggacacgcaggagaccagcaacagcc

SEQ ID NO: 205610 - RNA, 78 nt, Homo sapiens
gaagaacaggggagaccagccgccagagaaacacaaagaaccagcagcaacggagaaagaagaggcccagcacaagcg

SEQ ID NO: 205611 - RNA, 81 nt, Homo sapiens
cccgggccgagccccgcccgccgccagccagcacaagagggccagggaccaggggacgcccaagacggccacccgcgaagg

SEQ ID NO: 205612 - RNA, 62 nt, Homo sapiens
aaacagacacccaaacagggcacacagggaccccagaacaggacaaaacagcaggcagggaa

SEQ ID NO: 205613 - RNA, 64 nt, Homo sapiens
agacagagacccccgcaagaggaagacccagcgaaggaaagaaccaaaggcaagaaccggagca

SEQ ID NO: 205614 - RNA, 52 nt, Homo sapiens
ccagagcgggaggacgacgagagagagggacggaaacagacgacgacacgga

SEQ ID NO: 205615 - RNA, 74 nt, Homo sapiens
cggcacggacaacggaggcgggacagaaacagccacggggccaccacaggaccggggcgaggagagaggaacca

SEQ ID NO: 205616 - RNA, 69 nt, Homo sapiens
gcccgcggggaggcgcggccgccccgcgggggacggacagaccgaaaagcaacaacaacggagaagagc

SEQ ID NO: 205617 - RNA, 78 nt, Homo sapiens
ccgggaggaagccggggccagcggcgccgacgcacaggagagagcgaaggggagaaggacgaccccggccagccaccc

SEQ ID NO: 205618 - RNA, 80 nt, Homo sapiens
ggaaagggaagacacgaaaaaagagaaagggccaacgcggagaagcggaggagaccaaggaggccaccaccacagaagga

SEQ ID NO: 205619 - RNA, 89 nt, Homo sapiens
ggcgcccgggccccggagaggacaccgccgggagcgcgaggagaccggggaagcgccaaaacgggcaaaagggccaaaacgccgaggca

SEQ ID NO: 205620 - RNA, 78 nt, Homo sapiens
agcgaggggccaaggcagaagaaacggagaagggcaaaggcagagggcaccacagacaagaaagcccccacggaaggc

SEQ ID NO: 205621 - RNA, 59 nt, Homo sapiens
gcagcccccgaaggcccacaggacaggagagaaagacggccccagggcaccaacaacac

SEQ ID NO: 205622 - RNA, 81 nt, Homo sapiens
gggggccggacggacagccccacaccgacagaaccaggacgcaggaccaaggacgggaagccgcgggggggaaccccaccc

SEQ ID NO: 205623 - RNA, 74 nt, Homo sapiens
gagggggccacccaaggcccaccgagccgcgcaccccgagcgccggcagaaaaccgcgcgggagggggcaagcc

SEQ ID NO: 205624 - RNA, 60 nt, Homo sapiens
ggaaacccgacaagagaaggagcccagcaacacaacagcccggcagcaaaccgaagccgc

SEQ ID NO: 205625 - RNA, 70 nt, Homo sapiens
agcgccaaacgcccgaaagaagcggacggaggccaacaagcacagggaaggccacccaggaagaagcgca

SEQ ID NO: 205626 - RNA, 60 nt, Homo sapiens
ggacgacgaccggccaacaagcgccggccaccaagggcagaggccaccccggagggccag

SEQ ID NO: 205627 - RNA, 80 nt, Homo sapiens
aaagcaaagaaccagcgaagaaggaaagcaaggacaggcacgccacacacaggagcagagcagaagcaaaggagaggaga

SEQ ID NO: 205628 - RNA, 39 nt, Homo sapiens
agaagagacgcggaccacgggcccaggcaccacaaccag

SEQ ID NO: 205629 - RNA, 71 nt, Homo sapiens
gcgggggcaggcggagaaggagacaccggaggacgaagagggggagggcggaagagcgcgggaggggaggc

SEQ ID NO: 205630 - RNA, 79 nt, Homo sapiens
ggaaaggccccacccccacaccggagaaaggagcaaccagggaaaagaagaacgggggacaacggcaaccaaagggcac

SEQ ID NO: 205631 - RNA, 83 nt, Homo sapiens
ggggacggaggcaacggggacacgcacgagagaggagaaggacccaggaccgggcaacagcaccaaagccggagccagccacg

SEQ ID NO: 205632 - RNA, 72 nt, Homo sapiens
acgcacgcaggaccacagaaccggcaacgcaagaaacgaaagcagccacaaagagccccacgggagagaagg

SEQ ID NO: 205633 - RNA, 80 nt, Homo sapiens
ccgccgagccacgcggaggcagcaccaccgcccgggcaagggaccgagcccagaacccggacgggcagacaccaggagaa

SEQ ID NO: 205634 - RNA, 83 nt, Homo sapiens
aaaaggcagacgaagaagaagcaagcgaggcccacaagaagaagaagagaaaccgagccaggagagcaagaaacccaaaacgg

SEQ ID NO: 205635 - RNA, 82 nt, Homo sapiens
cgggagaagccaaccacacgagagaccggaggccacgccaagaccagaggaagaggaggagagaagagaggaagcgagcagc

SEQ ID NO: 205636 - RNA, 77 nt, Homo sapiens
caacacaaaaaaaaccaacagccccccagacagagggaaaaggaagaaacgcggggaaacccaaggaaaaagaagga

SEQ ID NO: 205637 - RNA, 77 nt, Homo sapiens
ggagcagaagaggaagaagcagaacgggcagaggaaaggcaagggcagaaaagaggggaaaaggccagccgcacgca

SEQ ID NO: 205638 - RNA, 79 nt, Homo sapiens
cagcaccacagcccgcagccccgccagccacccccaggcacgggaagcggagcccaccgccgagagcgggagcggggca

SEQ ID NO: 205639 - RNA, 56 nt, Homo sapiens
ggcccccagccagggaacggaggaacgcaaaaagcacaggaagagaaacaaaggga

SEQ ID NO: 205640 - RNA, 82 nt, Homo sapiens
cacacagccgcgaagaagcagcacgaaagagagaggccgcaagaagaacaggaccccaaaccagacagaggcggccgacgaa

SEQ ID NO: 205641 - RNA, 78 nt, Homo sapiens
ccggcccgcccggcgccgcccgcgggagccgccgccggccacccggggggggccccagcccggccgaacgggcgcacg

SEQ ID NO: 205642 - RNA, 83 nt, Homo sapiens
caccggccccagccgagccccagccaggacgagaggagcggagcccgcagaaccccacagcaagaggacggggaccagagaca

SEQ ID NO: 205643 - RNA, 73 nt, Homo sapiens
caccccacaagcccgggggcggcgaccggacaagagcagaaaagccccaacacccccaaccaccgggcagcca

SEQ ID NO: 205644 - RNA, 79 nt, Homo sapiens
aggagagggcagacggacaagagcgcggaacaggacgccccgagaagaccccggggaggccgggcggaggacaccgagg

SEQ ID NO: 205645 - RNA, 71 nt, Homo sapiens
cacgcccaggaaggcacaaccccagaagcagaggaaggcggaaggagccggaaggaccacccaaccaggcc

SEQ ID NO: 205646 - RNA, 77 nt, Homo sapiens
gccagaggggagcacagagcgagaccaggaaagaagggggcagaagagggagaggaaagaacccaagggaacaggga

SEQ ID NO: 205647 - RNA, 70 nt, Homo sapiens
aagcacacagacccaaggccaagaaccccacaggccgaggagcaggagggaaggaaacgcaagagccgcc

SEQ ID NO: 205648 - RNA, 87 nt, Homo sapiens
cgcggggacccagcgccaccacaacagcagcaacccgggcagcgccaagccagcagcgagacacccgacagacaggggccacgcgca

SEQ ID NO: 205649 - RNA, 86 nt, Homo sapiens
aaggaccaagaaccaggagagaagaccaagaggcggagaagaggagaaaagggcagaggccaaaaggagaaaggcaaagaggaacc

SEQ ID NO: 205650 - RNA, 79 nt, Homo sapiens
agaaaaaagccgcgaacaggcaagagaggagaaagggaaccaaccaaacaagagggagacgcgcacggaccggaaccag

SEQ ID NO: 205651 - RNA, 80 nt, Homo sapiens
aaagaaaacgaagaggcaaagagaaaaacacacccagacggagaaccgcaggaaaggcaaccacgagaaaacggaaccga

SEQ ID NO: 205652 - RNA, 73 nt, Homo sapiens
gggcccacaaacgacaggcagccagcggcagaggacgcacggcagcgcccgagaccaaggcgcacaggaagga

SEQ ID NO: 205653 - RNA, 69 nt, Homo sapiens
aagaaacccccagccgacgcccgcgccccccagcaaggaggagagaccgccgggcgcaggcacaggaac

SEQ ID NO: 205654 - RNA, 77 nt, Homo sapiens
accaacaaaaagagagaggagcaagcagcggccggaggacgccaaagaaggcacagacagaccaaacagcggcgcac

SEQ ID NO: 205655 - RNA, 82 nt, Homo sapiens
gcacggcgcagccgcggggcgcaggaggcgggcacagcgccaagggagacaaacccagaggcaacgaaaaggaacgcgaggc

SEQ ID NO: 205656 - RNA, 77 nt, Homo sapiens
ccaggagaaaaccgaagaagaggcccggaccaacagagagaaagccagaaaggagcagcagcccgggcaacccaggg

SEQ ID NO: 205657 - RNA, 37 nt, Homo sapiens
gaagagcagaagggacgagcgcgggacacacaggaag

SEQ ID NO: 205658 - RNA, 85 nt, Homo sapiens
ggagaaggccacaccacgcagaacgcaacaccaaggcacaccaccccagacgggggcaagagcagcaagagcgcagcaagaacag

SEQ ID NO: 205659 - RNA, 70 nt, Homo sapiens
cggcggcgggagccgggcgcggccggggccggaaccaaaggcagccaaacgggccggcaggacaggagac

SEQ ID NO: 205660 - RNA, 37 nt, Homo sapiens
cccccagaaaccaacccaagaaacagagcgcgggcca

SEQ ID NO: 205661 - RNA, 77 nt, Homo sapiens
gcagcccacagggagaaggcacgcacaggagaacacacaagcacaagcagaaagggaacgcaaaggaaacggcacaa

SEQ ID NO: 205662 - RNA, 73 nt, Homo sapiens
ggagagaagagaagaacagcacaggacagaaccaaaggcaagaaccggagcaggagaaaagccggaaagaaaa

SEQ ID NO: 205663 - RNA, 65 nt, Homo sapiens
cgcgggccacgcaccagaccgggcaaaaggacccacccaggaggcagaaacacgccgcgcgccac

SEQ ID NO: 205664 - RNA, 84 nt, Homo sapiens
aggaagcgggagaggagcccacgcgccgcacccaaacccagccgcgcagcccgaagagggccagccaagccgggagggaacgac

SEQ ID NO: 205665 - RNA, 31 nt, Homo sapiens
aaaacagaacgcggacgaacacaaaggggca

SEQ ID NO: 205666 - RNA, 64 nt, Homo sapiens
accaagaaccagcaacgcacccgcccccaaagagagaagcggaccacaaggggcgggcccagca

SEQ ID NO: 205667 - RNA, 53 nt, Homo sapiens
accaaaagaaccgaacgacacagaggacccaaggccgagccaagaacagaggc

SEQ ID NO: 205668 - RNA, 78 nt, Homo sapiens
agcgacggggcccgcaccccagccccggagcccgccgcccgccaccaggccagcagcgaaggagcccaccgccccccc

SEQ ID NO: 205669 - RNA, 55 nt, Homo sapiens
aggccaggacggagagggagaagcgcgccccagaccaccggcagggaacagccga

SEQ ID NO: 205670 - RNA, 88 nt, Homo sapiens
ggaaccccacggcccccgccagcacacaccgagcagggaaagaacgccggacaacagcggcgaagaaggcaaaccgaaggcccacaga

SEQ ID NO: 205671 - RNA, 75 nt, Homo sapiens
ccagaacaccaagagggagggccgaggaagacccccggagaacacccgcaccccgcccaagccagcccagacaga

SEQ ID NO: 205672 - RNA, 59 nt, Homo sapiens
aagcagcaaaccggaccaccccgaagaaagcacagacacgaaagcaaaggaaggaccaa

SEQ ID NO: 205673 - RNA, 79 nt, Homo sapiens
aaacacaaacaaacaaggacggggacacacaaagcaaccggggaagggcaaaggagaagaagaagcgagaagggcggag

SEQ ID NO: 205674 - RNA, 77 nt, Homo sapiens
agggcccaccgcgaagggggcagagacagcggccggggggcacccccgaaccgccggaaggggaccagacagcagcc

SEQ ID NO: 205675 - RNA, 76 nt, Homo sapiens
acaaaaaggaaaggagacaagcagagacgaaccaggcaaagggcaagaaacacggcagggcagagagcgaaacgcg

SEQ ID NO: 205676 - RNA, 56 nt, Homo sapiens
gacaggcaggaaaagacaggccagcgcagaagacgagaagccaggaggagaagcgg

SEQ ID NO: 205677 - RNA, 93 nt, Homo sapiens
gcaggaaaccgaggcgcaccagacgaaagcaaccaacgcagagcaccagaagcaaacgggaggcggggccacgccgaacccagcacgggaggc

SEQ ID NO: 205678 - RNA, 77 nt, Homo sapiens
gcccgccgacagccaggcccgggagaaaccccaggccagacaaacaagagcagcacaaagggaaggagcaggcaagg

SEQ ID NO: 205679 - RNA, 69 nt, Homo sapiens
gcgagcgcgcgcgaagaaccgggagaggaggagagagacggaggggggccggagaggccaaaaaaaggc

SEQ ID NO: 205680 - RNA, 79 nt, Homo sapiens
ggcggccagaagaaaacgaggggcggaacacccgccaaagcagagaaaagacaggaagaggcagcagcgggaaaccaga

SEQ ID NO: 205681 - RNA, 70 nt, Homo sapiens
accgagaccggaccgagagcggaccgagagcgcgaaacgcacgagaagacccccgagcccccagccggac

SEQ ID NO: 205682 - RNA, 78 nt, Homo sapiens
agaccggccagcaagagagccgggaaccaggcaccacgggccggcaacaagggacacaggagcagcggcggagaccca

SEQ ID NO: 205683 - RNA, 86 nt, Homo sapiens
ggcaagaccgccaccagacgcaaacagcaaagcccagagaacgcaggagcagagggcaaagaaagagcccaggacagccgaagcag

SEQ ID NO: 205684 - RNA, 82 nt, Homo sapiens
gcgaagcgaaaccggggccaagcagcagcaaggacaagaggagaaaagccagcaagcacaagcccgaacgagcagggaggaa

SEQ ID NO: 205685 - RNA, 53 nt, Homo sapiens
ggcacgacccaccgcaacaccaccaacccaccgaaggaagaaaccaaacgaaa

SEQ ID NO: 205686 - RNA, 77 nt, Homo sapiens
agaacaaggggacagcaaccgacaagcaagggcacagacagcagagggggagcgacccggaaagacggcaaaaccaa

SEQ ID NO: 205687 - RNA, 74 nt, Homo sapiens
ggccgcggcacggcccggggccgggagcgcccgaggaacacgccgcagagcaaaggggaccggacaacacacac

SEQ ID NO: 205688 - RNA, 63 nt, Homo sapiens
gggaccccggagcccagaagacagagggcgagggaaacacaaagaagacaccagaagggccag

SEQ ID NO: 205689 - RNA, 76 nt, Homo sapiens
aaaagccaaacaaaagaacacaacaaaggaaagacaggagagagggagaaagagcgccagaaagaggggacagaca

SEQ ID NO: 205690 - RNA, 83 nt, Homo sapiens
gggacaaggcagacgggagcgcaaggcgccccaaggccagacaaaacgaaaccggaaacaggacgaggcagagaacgaaacca

SEQ ID NO: 205691 - RNA, 81 nt, Homo sapiens
gcacccggcgcggcgcgcccccgccgcccgccgcgccccggggccggcccgcagggcggagaacggaaaagcaccaggaag

SEQ ID NO: 205692 - RNA, 78 nt, Homo sapiens
agcacagacacagacgggcaccggcagaaaaagcggggaaaacaaaaaaaagaaggagggaagagggggccaggacca

SEQ ID NO: 205693 - RNA, 76 nt, Homo sapiens
agcccgcagcaagggcaagccaggaccaaaggcaccgagcgggacaaagaaggacaagaacacacggagaagagga

SEQ ID NO: 205694 - RNA, 53 nt, Homo sapiens
aaggcggagaaggcagaagacaaggaagcggagcaaacaggcgaagcaagacc

SEQ ID NO: 205695 - RNA, 62 nt, Homo sapiens
acgggagccaagggacagccgcacacacaaaaggggaagagaaggagcaaagacacacaaaa

SEQ ID NO: 205696 - RNA, 89 nt, Homo sapiens
ggccggaaccgcccagccccgacaagcagaccggaagaccgacggaagaccacaccccgagggagcccaggacaccacgagaagcaagg

SEQ ID NO: 205697 - RNA, 88 nt, Homo sapiens
gaaggaagcaaagcaaaggagaaggcagcgggacggacaggcagggaagcaacgcagagcaccgcacccacaaagccaagagacaagc

SEQ ID NO: 205698 - RNA, 55 nt, Homo sapiens
caagaacacgaaaccgaaacacgcagaaagagaggaccagaggacgcaccagaag

SEQ ID NO: 205699 - RNA, 84 nt, Homo sapiens
accaagaaccagggagcgggaacgccgagagaaggagagagaagaggggaacgccagacagccggcagagccgccacccccccc

SEQ ID NO: 205700 - RNA, 82 nt, Homo sapiens
aaacacggcaaaaagaaaaaccagcgaagcacagggaggggggaagacagggcccagcaccacaggacgggccgggaagccg

SEQ ID NO: 205701 - RNA, 78 nt, Homo sapiens
aaccaccacagccacaaacaggcccaggcaggagccgagaacccccggggagcgcccagggggaccgagggaccccga

SEQ ID NO: 205702 - RNA, 80 nt, Homo sapiens
ccgcccaaccgcgacgccgaggagcagcagccggcccggcgccagcaggaaaacagaaggagccgggggaggcagacccg

SEQ ID NO: 205703 - RNA, 83 nt, Homo sapiens
gcggcaccacaccgaagaagcccaacacacaagaggaaagaagaccgagcccagggaacccagccagcacagcagcagcagcc

SEQ ID NO: 205704 - RNA, 47 nt, Homo sapiens
gaagcgaaggcagcccacgaccaaagagccgacacagcccccgagga

SEQ ID NO: 205705 - RNA, 65 nt, Homo sapiens
gaggagccgccgcgcgcccgcgcccccgcgcgacgccagcggagcagcaacagaggagaacgcca

SEQ ID NO: 205706 - RNA, 72 nt, Homo sapiens
aggaggaaaaaaggagcaaaaggaacacaggaaagcaggcaaaccacagggaccgaccaagagaagagcgcg

SEQ ID NO: 205707 - RNA, 69 nt, Homo sapiens
gagcccagcaccgcagcacggagcgccgaaggacccgcaggaaagggaacacgggggccccccacccgg

SEQ ID NO: 205708 - RNA, 55 nt, Homo sapiens
caaccgcggacacggagaggaaggcagacaggaaacagcaaacacgagcgcacga

SEQ ID NO: 205709 - RNA, 59 nt, Homo sapiens
gagcaggaccaaaagaagcaaagcacgagaagagaagcccagagcaaaacaccccaaac

SEQ ID NO: 205710 - RNA, 70 nt, Homo sapiens
cgagggagaacaggcgggcgccgagcgaacgcgcaacagggccgcacgcaagaggccggaagagcgggag

SEQ ID NO: 205711 - RNA, 72 nt, Homo sapiens
aacccccacgcggccagcgaaaacgcccagggggacgaccaccagccaggccggggacaaacaggcaaccga

SEQ ID NO: 205712 - RNA, 62 nt, Homo sapiens
ccagggggcagcagcgcaccccaccgaccagcggacacgggacacgaggaggggacggcccg

SEQ ID NO: 205713 - RNA, 82 nt, Homo sapiens
aggaaagcgaaggggaaggcgccgaagaggacgaagaccccaagaagaagcggaagaggagccgcggaaccaagacacaagg

SEQ ID NO: 205714 - RNA, 59 nt, Homo sapiens
ccgcccgaacacacaccgacgcaagagcaacgaaccaaagcaaaggaggccgggggaag

SEQ ID NO: 205715 - RNA, 52 nt, Homo sapiens
aaaggaaccggaaaagcaaaacagggcggcaggaggaaagaaagaaagaacg

SEQ ID NO: 205716 - RNA, 81 nt, Homo sapiens
acaacggccgcggggccccgagcagccccagcccacgcacggagccgggaaaccgaagaaggcagagaaggcaaacaggag

SEQ ID NO: 205717 - RNA, 72 nt, Homo sapiens
ccggagcccgaccgcggaaagaggggagcgaggacacaccacgaacccgagaacacgaaacaaggaagaaag

SEQ ID NO: 205718 - RNA, 62 nt, Homo sapiens
gccccaggaacgagaaaaaaccaggagcgagcagagccaccaccaaagacccgacaagcaga

SEQ ID NO: 205719 - RNA, 36 nt, Homo sapiens
cgggaggacacacaagcggaaccaagccgccacagg

SEQ ID NO: 205720 - RNA, 72 nt, Homo sapiens
ggaggcagagcgggcgcgccacggccacacgcccagcgagcgccccacacaggacagagcaagagccccaag

SEQ ID NO: 205721 - RNA, 73 nt, Homo sapiens
agggacagacgggaaaaaagagcaccaggccgacgccgggcaagccaagccagccgcccgggaaggccaagac

SEQ ID NO: 205722 - RNA, 90 nt, Homo sapiens
cgcgcccccgggagcgggcgcccagagggaacaacagccgcgcaggccgagccgccagaagcaggcaggaccgcccccagaaggccacag

SEQ ID NO: 205723 - RNA, 73 nt, Homo sapiens
gggggaagcggcagcgaggggccggagagggccggaccgagcggccggagaaagggcgcaaaaagaaagaaaa

SEQ ID NO: 205724 - RNA, 57 nt, Homo sapiens
ggcagcgcccagcagcgcaggagggcagagagcgcggacacagggaaacacgccgcc

SEQ ID NO: 205725 - RNA, 81 nt, Homo sapiens
ggccgaagcgggagaccggaggggccagaacggaaggcccgcaaagaggcgggcagacgcggcaaggaaccccaagcggaa

SEQ ID NO: 205726 - RNA, 81 nt, Homo sapiens
ccggaaggggggggcgccacccccaccagaggcccgcacagcccagccacgccggagaccaaggcacagccgaggcgaaaa

SEQ ID NO: 205727 - RNA, 67 nt, Homo sapiens
aggagacagagcgaaacacagggaacaggcgcgcaacccaagagaggggccacgagccacagaggga

SEQ ID NO: 205728 - RNA, 78 nt, Homo sapiens
caggacgaggaggcacgccagacagaggcccgccgcgcgggaacagccagggccaggaagaagaaagccagaggagaa

SEQ ID NO: 205729 - RNA, 72 nt, Homo sapiens
cacacaccagcagaggaggcgggggcagccgcgagacggcacaaggacccgaagacaaaaccacccacgaaa

SEQ ID NO: 205730 - RNA, 75 nt, Homo sapiens
agagcagaggcagagcacacaaccagaagccagggagaaggaaggaggaggagaacacagggaaggcccaaaagg

SEQ ID NO: 205731 - RNA, 78 nt, Homo sapiens
ggcgagaaacacaaaaccccacgcgcgggaggagacgggcccccccaggggagccgccaccaaaagcagacggaaaac

SEQ ID NO: 205732 - RNA, 69 nt, Homo sapiens
aacacgcaaggacccccccggccaagggcaagcaagggaagcgcaagaaagcacagagagccaaagaaa

SEQ ID NO: 205733 - RNA, 79 nt, Homo sapiens
ccagcaaggaggaagagagcggcccaagaggcgggcagacacacagccccccagccgccgacagaagccccaccacacc

SEQ ID NO: 205734 - RNA, 73 nt, Homo sapiens
ggacccgcacagcacccggacaggagagacagcccagaagcccagccgcacgaagcaaggggggcaacaacaa

SEQ ID NO: 205735 - RNA, 83 nt, Homo sapiens
gacgcacacgggagaacgaaaagggacagcagaaaacggagaaacagaggagagaggagcacgggacagagacgagaagagcc

SEQ ID NO: 205736 - RNA, 70 nt, Homo sapiens
accacaggcagggaaagaaaccaaggcggaggagaaaggcgcaggcagcaaacggaaaagagccagggac

SEQ ID NO: 205737 - RNA, 77 nt, Homo sapiens
gggagccacaggagagcgcccaggaccccaggagcaagcacaagcaaaaccacacacggaagccccacccgcgacac

SEQ ID NO: 205738 - RNA, 70 nt, Homo sapiens
gccacccagagcgcacggcgacgccccaggggaaaacccccgggaccaggccgaccggacggccgggcca

SEQ ID NO: 205739 - RNA, 67 nt, Homo sapiens
cgcaggcagacaaaagggccaaagaagggagagagggcaaaacacagaggccgcaaagaacacacaa

SEQ ID NO: 205740 - RNA, 70 nt, Homo sapiens
acggcgcgaaggagacacaaacaacaccacccgaaccgacaacgaagagaggaaagaagcggaaaggagg

SEQ ID NO: 205741 - RNA, 60 nt, Homo sapiens
gaccggagcgggccaggccgggagcggagaagcggaggagaccaaggaggccaccaccac

SEQ ID NO: 205742 - RNA, 78 nt, Homo sapiens
gcggcgggaaggagcgggcgacccgggggggccagcggagcccggcgccacagaggagaccggcgccagcagcgccac

SEQ ID NO: 205743 - RNA, 74 nt, Homo sapiens
cgaacgggcgcgggccaagcacgccacccggaaggcccccgcaggaaaaccaggggcaccagcgagggcacggc

SEQ ID NO: 205744 - RNA, 73 nt, Homo sapiens
gccacggacgaaaccagaaaacgggcggcacagcagacccacccagagacagggcccccgcacccgggcgagg

SEQ ID NO: 205745 - RNA, 51 nt, Homo sapiens
cacccaggccagagaggaccgagaggggccgcaaggccaggcgcgcagagg

SEQ ID NO: 205746 - RNA, 76 nt, Homo sapiens
aaagcccaaacccgaaaaagaaaagacaacacacggagaagaaggaaccccgaggggcgcagcacacgggcaaaag

SEQ ID NO: 205747 - RNA, 64 nt, Homo sapiens
cagcagccgaaaacccccaccaacccgccgagccagggggcagaaagaaagcaggaccaggggg

SEQ ID NO: 205748 - RNA, 84 nt, Homo sapiens
cggcgcagccccaagacagagcgcacccggcaggcgcaacagagcgccggcgaaagaagagcgaagcacaacacggagaaccgg

SEQ ID NO: 205749 - RNA, 65 nt, Homo sapiens
gggccaaaggacagagaagacagagagaccacagcagacacagagacgggcggacacaggccgac

SEQ ID NO: 205750 - RNA, 77 nt, Homo sapiens
acagccagaagaccacaggcaaagaacaaaacagagggcagaagacagcgaaaccgagcacgggcgacccgaaaaac

SEQ ID NO: 205751 - RNA, 69 nt, Homo sapiens
aacggagagccacaaaaaaggaagcgaaaaacagggccggacccacacccccagacccagagacacacg

SEQ ID NO: 205752 - RNA, 80 nt, Homo sapiens
ggcgacgccccaggggaaaacccccgggaccagaggaggggcaacaaacaaccacccgcccagcagacgccagaagcaaa

SEQ ID NO: 205753 - RNA, 75 nt, Homo sapiens
aaggcggagccaacagaggcagggcaccgcccgcccccccacccagggaaaacggacccgagccccaaagacaga

SEQ ID NO: 205754 - RNA, 67 nt, Homo sapiens
ccccgccacacggggcagccaaccggcccggaacagaaaggcaaggaccgaaggacggaacaagcga

SEQ ID NO: 205755 - RNA, 71 nt, Homo sapiens
caacgaggccgagcgcgcggcgccgcaacaaagcagacaccagggccgagcaccacagacagcgcgccccc

SEQ ID NO: 205756 - RNA, 73 nt, Homo sapiens
ggacccacacaggcgagaagcccgccgcgaggcgcgggcgacaccagacaacgaagagaggaaagaagcggaa

SEQ ID NO: 205757 - RNA, 107 nt, Homo sapiens
gggggagcgcgggcgaagcacgcacaccgggcagggccgagaggacgccagcggcgcgcagggagagggaacaccaaccgaagagaaggggagaagcacagaggaag

SEQ ID NO: 205758 - RNA, 84 nt, Homo sapiens
aacaccgcagccgcagcggacggcaggcccgagggcgagaccaagggaccggccaccggagagcaagaacccaggcggcgcgac

SEQ ID NO: 205759 - RNA, 77 nt, Homo sapiens
caaaccgagagagagagaaccaaacacaaaagcagcgcagggggggggcacacaggccccgagaaccaagagaaccc

SEQ ID NO: 205760 - RNA, 78 nt, Homo sapiens
cagcagccgcggcgaggacaacggcgcgccgccagaagaccggaagaccgacggaagaccacaccccgagggagccca

SEQ ID NO: 205761 - RNA, 70 nt, Homo sapiens
acgccggagaaaaaaacacaaccccacagggccagcgaagagaaagacagagggcgcagagggacaacgg

SEQ ID NO: 205762 - RNA, 83 nt, Homo sapiens
gcgaaccccgggacacgcaggaacggcccagcacaagaccgcgacagccacagacgaccacaggaagaggcagagacggacca

SEQ ID NO: 205763 - RNA, 71 nt, Homo sapiens
ggaaacaggaagaggaaaaacacgacaaaggcaaggcacacaaggaacaaaaaacaacagaggcgaaacag

SEQ ID NO: 205764 - RNA, 81 nt, Homo sapiens
ccacacacaggcgccaacaacggcgaggggggcgcccaggggcccagagccgacacccgaacaaggcccgccaagggaggc

SEQ ID NO: 205765 - RNA, 71 nt, Homo sapiens
gacgccaacccgccgcgcaccgacccgacgcgccggcccacgcgcggccaagaacccaggagaaacgagag

SEQ ID NO: 205766 - RNA, 76 nt, Homo sapiens
cacacgaccggcaacgggacagggagacagccacgagggagagaaggcaggaggagggccagaaggcaaacaacca

SEQ ID NO: 205767 - RNA, 85 nt, Homo sapiens
cggccaaagccgcccagacggccaccggcgggaggaacaaaaggagccggcccaggagcagcagggaggcgggaacgcccaggga

SEQ ID NO: 205768 - RNA, 75 nt, Homo sapiens
aggaagacaggaacccacagaacagaaagcggaacacaccgacgaagccagcccgcagaccacccagcccccaaa

SEQ ID NO: 205769 - RNA, 53 nt, Homo sapiens
ggggaagcagcagccaggaagcagcagcggagaaacagcaaggccccagccca

SEQ ID NO: 205770 - RNA, 68 nt, Homo sapiens
agagcgagcgggaagagaacaggacagagggcacaacggcaaagagggcggacggcagacaggcagca

SEQ ID NO: 205771 - RNA, 67 nt, Homo sapiens
gcccgcccaaccccagcggagagcaagggcggaagacccggggcgcgaggacagaaaagcccgccca

SEQ ID NO: 205772 - RNA, 79 nt, Homo sapiens
aggccaagcccggcagcagcacggacaggagcacaacaggcgggacagccgcccggggcccgccccacagcaacacagg

SEQ ID NO: 205773 - RNA, 78 nt, Homo sapiens
gagcccgcgcccgccgcgggagagaggacccccccccccccccaagccggccaagagccacgcacaagaggagcggca

SEQ ID NO: 205774 - RNA, 72 nt, Homo sapiens
caagcccaggaccaccaccagcacccaaaggggcacgcaaaagggacggcggacgaacccaaccccagagac

SEQ ID NO: 205775 - RNA, 40 nt, Homo sapiens
cacccagccaaacacccggaaccagcacacgcccgcccca

SEQ ID NO: 205776 - RNA, 80 nt, Homo sapiens
ggggccaggcccggcgaggggaagcggggacgcccagcgagcacaggcgcaccccccgcgccggccccgccagcagaccc

SEQ ID NO: 205777 - RNA, 82 nt, Homo sapiens
aaaggcaacaccggaacaccgaacaaaagcaccgcagaccagcagcccagccaggaccaccacccacgaagaggagcgcaag

SEQ ID NO: 205778 - RNA, 82 nt, Homo sapiens
gccagccaacaagccgacaaccagaagcgacacaggaccccggaggaaaagcggaagcggcagcggcgaacgccggaacgga

SEQ ID NO: 205779 - RNA, 40 nt, Homo sapiens
cgggggcccagggaccccggcgcgcccgggacgacggcgc

SEQ ID NO: 205780 - RNA, 41 nt, Homo sapiens
gcagaagggaagaacaggaggggaacggcacagggagggga

SEQ ID NO: 205781 - RNA, 85 nt, Homo sapiens
ccacgacgccgggaccggccaagggcccacacaccaagaccaagcacccaaggacacgacccggaagacggcgcaagggacgcag

SEQ ID NO: 205782 - RNA, 81 nt, Homo sapiens
ggccagccagggccgggccgcgaccggccccggagcacagggaggggcgaccccggggcccggccagcacgaccgaggagg

SEQ ID NO: 205783 - RNA, 79 nt, Homo sapiens
ccggagaccccgaaaacggaagcgcagggagaaggaagaggggaaaagggagcgcgcaaggaagcgcgggggcaggccg

SEQ ID NO: 205784 - RNA, 58 nt, Homo sapiens
gggccgggagcgcgcagccagcaagaggagccaggagcacggggggaacaagaccgcc

SEQ ID NO: 205785 - RNA, 70 nt, Homo sapiens
agggaaaaggaaagccacgcacagcagccagagaacaggcagaacaagaagggcaaccaggggggaagga

SEQ ID NO: 205786 - RNA, 79 nt, Homo sapiens
caagcaaggacagcacagaccaccaggcaaccaacaggaacagcagagaacaaaggaccgcaaacgaagacggcagcac

SEQ ID NO: 205787 - RNA, 71 nt, Homo sapiens
gagccgaaaaggcgcacgcagcggaaggaggcgcccagacccagcgcggacccgcgggacgagcgggaggg

SEQ ID NO: 205788 - RNA, 81 nt, Homo sapiens
gaagcgcgaggccgggggccagcggcccccagccggacgggcagggggaaaggccaagaacgccaggcaaccagaaaaaac

SEQ ID NO: 205789 - RNA, 66 nt, Homo sapiens
gacagagaggggaaaccccgaaaggggggcagggagagaaggagggccccaaggacgaaaaaagga

SEQ ID NO: 205790 - RNA, 74 nt, Homo sapiens
aacaaaaagagcagaggagacaaaccggagaaggagccaagaaagagaaggacacacagcaacgaagcagggga

SEQ ID NO: 205791 - RNA, 40 nt, Homo sapiens
ccaccacccgcgggcggggacggaccacagagacacggga

SEQ ID NO: 205792 - RNA, 61 nt, Homo sapiens
aggaaacgggcccgaagaacacagagagcgaggcagcagcaaggacaagaggagaaaagcc

SEQ ID NO: 205793 - RNA, 68 nt, Homo sapiens
agagagacacgaagcaaagaagaacaaggccgcccagccccacacgggagcacaccagcaagaagaca

SEQ ID NO: 205794 - RNA, 59 nt, Homo sapiens
cagaaaggaaaacaaaggagcacaggaggaccgacacaagaagcagccagaacagacgg

SEQ ID NO: 205795 - RNA, 118 nt, Homo sapiens
gacaagacgcccagcccgggaggagaagaaaccaagaggaggagaggaggaaaggacaaccagcacggaagaggaagacgcagaagcccaccggcccggagcaacccccaggcccacc

SEQ ID NO: 205796 - RNA, 78 nt, Homo sapiens
cgagggcccccccagcggccccggggcgcgggcagccacgcccggccaagcgagcagacagcggggagcacgcagcac

SEQ ID NO: 205797 - RNA, 83 nt, Homo sapiens
ggagccgaggggccgccccccacgccgagcggccgcgccgaccaccacccggcaccacgagacccaacgcaagacacaaccac

SEQ ID NO: 205798 - RNA, 74 nt, Homo sapiens
acgcggccaggcgacgggaagcgaccgcaggcgggcccccgaccgacaagcaagcgacaagaaggcagcggaaa

SEQ ID NO: 205799 - RNA, 80 nt, Homo sapiens
caaggacaccggacaaagagcaaggggggagccaacaacaagggcgcggcagagcggagagagagagacacagccgaaag

SEQ ID NO: 205800 - RNA, 79 nt, Homo sapiens
ggaaagccaccgagggagaagagccagaagaaaagaccagagccaaaaggaaaccagcgacaaaagaagacgaggaaga

SEQ ID NO: 205801 - RNA, 68 nt, Homo sapiens
acaggaaggaaccagccaaaaagcaaggaacacaagccagaaaaagggggaagccagagagagagaaa

SEQ ID NO: 205802 - RNA, 56 nt, Homo sapiens
agggcagagagggggcccagaccccgcgagcaacaaggggacgacaccccggcagg

SEQ ID NO: 205803 - RNA, 74 nt, Homo sapiens
cgcccgcggcgcccgccccagacgagacgccccccggagccccaggccggaagcgcgggcccgcaccgggcaac

SEQ ID NO: 205804 - RNA, 75 nt, Homo sapiens
gcagcgcggcacaacgcggcagaaaagaagagggaaggggaagaggggcccgaagcacaccagaccagaaagagc

SEQ ID NO: 205805 - RNA, 80 nt, Homo sapiens
ggagccggggcgggcggcagcgagcggccaggggcccaaggagaggaagcaggagcagaggcgagggaaaaaggacagac

SEQ ID NO: 205806 - RNA, 87 nt, Homo sapiens
agccaaggcaggagacgccacaagcaggagcaggaggagcggagcagccagaagacggacccaaaaggcgggcgaaaacgccaaaaa

SEQ ID NO: 205807 - RNA, 74 nt, Homo sapiens
agcccagcccagagaaaggcagggaacaaacggaagcggagaaagagaaaacaaagaaccgagcgagaagccac

SEQ ID NO: 205808 - RNA, 53 nt, Homo sapiens
ccgaggggcaggaggcaaaagggaggaagaaaccagacggagacgggagagcg

SEQ ID NO: 205809 - RNA, 91 nt, Homo sapiens
cggcacgccggcggggaccgcgggaaggcgaggacgaggacgaggacgcaagaaaaggacccaagggggcaaaggcggaaacagcagagga

SEQ ID NO: 205810 - RNA, 57 nt, Homo sapiens
aagcgacgagccgcgaggaggaacgccagacccgggagggagaaacgagaggcaggg

SEQ ID NO: 205811 - RNA, 75 nt, Homo sapiens
gagggcgcaggagcacacgagaccgcaccgcacggcggagcccgcacgcggcgggcagaaaggccaaagaagaga

SEQ ID NO: 205812 - RNA, 68 nt, Homo sapiens
gcggaggaggagggcggaagcacggaacccaaaggcagcggaggggggagaaaaggccaagggcagga

SEQ ID NO: 205813 - RNA, 77 nt, Homo sapiens
gccagaggaagacggaccaggagcggggagccaagacgaccaaggagcacgcggggagaacaggggggaaagaagac

SEQ ID NO: 205814 - RNA, 86 nt, Homo sapiens
ccgcccacaccacagggacccaagggcccacgagacgcgaacaaacgccgcgccgccagaagaacagaccgggagaccagccacgc

SEQ ID NO: 205815 - RNA, 82 nt, Homo sapiens
gacccggcgccgggcacgagcaccgccaccaggggaaggggccacaagggcgcagaagccggcagagcccaagagacaacaa

SEQ ID NO: 205816 - RNA, 68 nt, Homo sapiens
cggaccccagggcccggaaccaggacaggggcaggacgggaggacagcgcgggccagaacagccaaac

SEQ ID NO: 205817 - RNA, 81 nt, Homo sapiens
accagaagacagggcaagaggcgaaaaaccgagaggccacgagaagcaaaggaggaaggaggcgaacggggcgcggagcac

SEQ ID NO: 205818 - RNA, 68 nt, Homo sapiens
aaaagaacagaaagaaaaacaacaagcggaagcaagcaagagagggccacaggccaggcaaccaaacc

SEQ ID NO: 205819 - RNA, 72 nt, Homo sapiens
ggcagccgaccccgcccaccaaacacgaccgaacgaaagagaacagaagagacaagagaccgaacaggaaag

SEQ ID NO: 205820 - RNA, 73 nt, Homo sapiens
aacggccaagaagggccaccccacagacgagaaccccgcgacaaccaaacgggcggaaggggggaggaggcgg

SEQ ID NO: 205821 - RNA, 92 nt, Homo sapiens
ggggcggcggcgccggcgcgggcccgggccccgagcgcccgaacagggccaaccgccccccagcagcaggcacgggcgaaccccgagccccg

SEQ ID NO: 205822 - RNA, 51 nt, Homo sapiens
agaacggacagggcaaggaagagaggcgggaaggcacagcaggagaagaac

SEQ ID NO: 205823 - RNA, 83 nt, Homo sapiens
cgcgcgccaggccgcggcccgaggcgcagcagcaggaggaggaccgcagcaagacaccagccacaaggagaggaccccccgca

SEQ ID NO: 205824 - RNA, 73 nt, Homo sapiens
gaagaccaccggaaaaccaagcagaggccagaccggcccgggccgggccaggaggacacgcgcagggcccacg

SEQ ID NO: 205825 - RNA, 74 nt, Homo sapiens
agaaaaaagcagaaagaaagcgcggccgacaccagaggagaagacgagcagaaggacgaaaaaggcagccagga

SEQ ID NO: 205826 - RNA, 74 nt, Homo sapiens
gaagacccaaaaaaaagaggagcagcaggcacagcacgggcagagccaggggggaaaagacgacccacggaaaa

SEQ ID NO: 205827 - RNA, 71 nt, Homo sapiens
gagaaggcagaggcgcgagaaccagccaaaacacacgaacagggaacaagaaacaccgaagaagagcaaga

SEQ ID NO: 205828 - RNA, 82 nt, Homo sapiens
gcagaggcagaacccgccgcggccagaagcggcaccccacagacaaagcgcggaaaaggaacagaagaggaaccgaaaccca

SEQ ID NO: 205829 - RNA, 74 nt, Homo sapiens
cagcacaccaaggacgcagcgcggagggccagccgcacgagaaagggcgcaaaaagaaagaaaacaaaagccag

SEQ ID NO: 205830 - RNA, 80 nt, Homo sapiens
gggcgaaccccgggcagcccgggaaacccaagcagaaaggccccaggacagggagcagcaccaggggcgagccccacggg

SEQ ID NO: 205831 - RNA, 84 nt, Homo sapiens
cgcagccagaggagccgccgcagagccccccgcccccgggcgagggacaacagggcggacccgaccgaagaagggaagcgcgaa

SEQ ID NO: 205832 - RNA, 62 nt, Homo sapiens
cgcgcggaccagggcgacaaagggacccggcaaagacaggcagcaggcagaggacccgaggc

SEQ ID NO: 205833 - RNA, 79 nt, Homo sapiens
agccaccagaggagggccaggcgacaaagagaaggaaagcagaagccaccgggaagacacgacaggaagcagaacggac

SEQ ID NO: 205834 - RNA, 73 nt, Homo sapiens
gagcccagagagccacagcaaacaccaagaccgaggcccccacagagagcacacaaacaaagcgaaaccacgg

SEQ ID NO: 205835 - RNA, 81 nt, Homo sapiens
aaaccaccaggaacgcggcacgcagaaggggaaaggagccccaagcaggacccgcccgcccgaccacaccgcacggggcac

SEQ ID NO: 205836 - RNA, 73 nt, Homo sapiens
cccgccgccgagcgaggacacgccaccacaccgacccacgacaagaacggagagacgagcggcaggaaggcga

SEQ ID NO: 205837 - RNA, 93 nt, Homo sapiens
gagaccgccgaccggaaaagcgggcaaccccagccggcgccgcaaggcccggcaaggggccgggacgcacgaggccacaccgacaaggaagcc

SEQ ID NO: 205838 - RNA, 78 nt, Homo sapiens
ggagccagccacaggcggcggaacggaacagaagcaagggccaaaagagaaacaggcacgacaaccaaagcggaccca

SEQ ID NO: 205839 - RNA, 48 nt, Homo sapiens
gaagcgagcccagaacgaacggccaagcccaacaggggacaccggcca

SEQ ID NO: 205840 - RNA, 74 nt, Homo sapiens
cggcccagcccccacacaagcgggcccgcacgccgacacaacaaccagacgagcgaaggacgcgcggcggcccc

SEQ ID NO: 205841 - RNA, 67 nt, Homo sapiens
cgccgggagcgcacagagcggacagccggggacgaacccgagccgcaggacaaaagagaaagcgaaa

SEQ ID NO: 205842 - RNA, 79 nt, Homo sapiens
agagccccacaagaagacgagcccggaccaaccaccccgaagaaccccccgacccaaccgcagagcccacacgaggaga

SEQ ID NO: 205843 - RNA, 81 nt, Homo sapiens
gaagcgcgcgcgggggaaggcccgggcgcagcaccaccacagaccggcgagacccaggcgcccgggcgggggcgggacaac

SEQ ID NO: 205844 - RNA, 69 nt, Homo sapiens
ggacagggcaaggaagagaggcggagcacggcccaggcagccaagaaggcagagagacacacaagaaac

SEQ ID NO: 205845 - RNA, 79 nt, Homo sapiens
gaaggcgcgaggaggaaaggaggacgaggcaagaagaagaaagcaaagaacagccaacaaaagcagaacggaaacggag

SEQ ID NO: 205846 - RNA, 81 nt, Homo sapiens
agggagcccaggcacagacacacacacgcccacggcaagagaaacaagcacaaagaaacagccggaaaagcacgagcacaa

SEQ ID NO: 205847 - RNA, 56 nt, Homo sapiens
ggaagccacacaggccagaacgaggggccgcacgccccaccccgagccggggaaga

SEQ ID NO: 205848 - RNA, 85 nt, Homo sapiens
gccagcccaccccccagccgcacacccggcaggcaccaaagcagggaggcccgggcacgcagccagcaaagaaggggccacggga

SEQ ID NO: 205849 - RNA, 76 nt, Homo sapiens
cagaaagaaccgcccacgggccgcgccagggacagaacgcaacgaagaaagaacggaaggaagaccgaccagaaca

SEQ ID NO: 205850 - RNA, 74 nt, Homo sapiens
ggaacccgcccccgcagacaccgcccccacagaccagcggaccgcggacagggcagaacggggccccgcaccca

SEQ ID NO: 205851 - RNA, 70 nt, Homo sapiens
acccaagagcagcggaaaagaccagcacagaaaagcgagcacaacagaaagagggcagcagacagcaccc

SEQ ID NO: 205852 - RNA, 48 nt, Homo sapiens
accagaaccaaaggcggcacgagaggaagccgaacccggaggaagaaa

SEQ ID NO: 205853 - RNA, 63 nt, Homo sapiens
agcacaacaccgggcaaccacggggcggcgccggccccaagggcagggccagggggagcgaaa

SEQ ID NO: 205854 - RNA, 76 nt, Homo sapiens
ccgacccgacgcgccggcccacgcgcggccaagcccccgggcgcgccggacaggccgccgcggcgggacagcggcc

SEQ ID NO: 205855 - RNA, 82 nt, Homo sapiens
cgggccggggcaccacgccgccccagggaaccgcacaggccccgggggcgccgagggcacaagggcaacgacagaagggcga

SEQ ID NO: 205856 - RNA, 70 nt, Homo sapiens
gcgcggcgagcggcccgcacaaggccggcagacacaacagcaggcagcccgcccagcggcacgccacccc

SEQ ID NO: 205857 - RNA, 90 nt, Homo sapiens
gcggaaggcgcgccaaggagaccaggaagcgagcaccagcaggaaaccccagacagccagcagcaggccgggaccagcaggggccgcgca

SEQ ID NO: 205858 - RNA, 58 nt, Homo sapiens
cgcgcggggacccgacgcccgcacggcaccgacagcacagcagaaaggccgccccgcc

SEQ ID NO: 205859 - RNA, 76 nt, Homo sapiens
aaaccaagcaccagcgagacccagggaagagccagaagacaccagaccgcggacaggggaacagaggcagcccccc

SEQ ID NO: 205860 - RNA, 69 nt, Homo sapiens
ggggaccaccccaggaagaagacaacagaggcacaggaagggagaccaacacccccaagcagacaccaa

SEQ ID NO: 205861 - RNA, 79 nt, Homo sapiens
gaaggcacaaggacaaacccacccacaaagggggccacccagaaccgcacacacagacacaaaggcaaagcacaccgca

SEQ ID NO: 205862 - RNA, 82 nt, Homo sapiens
gaggaaagacaccaccacccacacccaagggaaaaaaaaacccaaagacagcgccgaacgcaggaagcagccggaaagacag

SEQ ID NO: 205863 - RNA, 75 nt, Homo sapiens
ggaacccaccccccaggagagcgaccaaacccccacaacaaggacaaagggacccaaggaccagcagcacgcgga

SEQ ID NO: 205864 - RNA, 73 nt, Homo sapiens
ggaaggcagcggcgaagggacaaggacaggaggccagggcacgggaaggcagcacgaggcaaaacaaggagca

SEQ ID NO: 205865 - RNA, 69 nt, Homo sapiens
ccccccaaaaaggaaagacaccggcggccgaaaaaaaggccaacggccaagaaagaaaaaccacccaca

SEQ ID NO: 205866 - RNA, 73 nt, Homo sapiens
cacagagaaaaagaagaagagacgagaagagaaagaaggacacgaggaggggacggcccgccacaggcacaga

SEQ ID NO: 205867 - RNA, 73 nt, Homo sapiens
caaaagaaggccaaagaaggagaaaagggagcagcaggagccccgcggggaaacccgaccgccccaggggcac

SEQ ID NO: 205868 - RNA, 60 nt, Homo sapiens
aagacagaaagagagagaggagagaaaccgcacacgaaaaaacggaagcacaaaacaaga

SEQ ID NO: 205869 - RNA, 76 nt, Homo sapiens
gccaaaaaaaaaaaaggaagcacaccaaggacaagacaagggccaggcaaaggcaaaaaggcaggggagcagacgg

SEQ ID NO: 205870 - RNA, 64 nt, Homo sapiens
aagaggaaaaccagagaaacaagaggaggagggccaaccaggaaaccgccagacggccgcacca

SEQ ID NO: 205871 - RNA, 56 nt, Homo sapiens
ggaaagaacaacgagagaccacggaagcagacccggagaagcaaaacacagaggaa

SEQ ID NO: 205872 - RNA, 71 nt, Homo sapiens
agcaagcaccggagggagaagacagcccgccgacacagccaccaagaaggcacaagcagaacgggaaaagg

SEQ ID NO: 205873 - RNA, 69 nt, Homo sapiens
aaacaaacacacgcaaaggagaaaggaaccgacagggcgcacaaaagagcacaaaagcaccaaggcgca

SEQ ID NO: 205874 - RNA, 54 nt, Homo sapiens
cgaacccggaaggagagcaaggcggcgaccccgcagggacaagagaaaaaaagg

SEQ ID NO: 205875 - RNA, 70 nt, Homo sapiens
aggagacccaacagacgggacgaaccaaagcaaaccacgggacgggggacccggaagacccggaggcacc

SEQ ID NO: 205876 - RNA, 80 nt, Homo sapiens
ggccggcgcgaagacgcgggggccgccccccgggccggggaaggcgcacgacagggaaaaaccagagggcaacaggaccg

SEQ ID NO: 205877 - RNA, 79 nt, Homo sapiens
cgagacggcacaaacgaagcacagcaaacaaggcaaggcagagccaccagaaacgacaccgacagacaaaacggaagcg

SEQ ID NO: 205878 - RNA, 69 nt, Homo sapiens
gccaggggaccgccgagcagccccaacaccacacccagcgccacaagaggagagaagagagacgaagga

SEQ ID NO: 205879 - RNA, 82 nt, Homo sapiens
gaagaagcagggcagaggaccaggacgcggggccaaccacccagcagcacagcccaccagcacgacagagccccacgaggag

SEQ ID NO: 205880 - RNA, 77 nt, Homo sapiens
ggaggaggaggggagaggccggaggacaccaacagaggacaagaagggcagagaagccagaacggagaaacaacgaa

SEQ ID NO: 205881 - RNA, 71 nt, Homo sapiens
agaagccccgacgcaaaccgcaagcaccgaaccgcacagcaagcccaggccaacagacccagagcacagcc

SEQ ID NO: 205882 - RNA, 63 nt, Homo sapiens
gcgcggcgagcggcgacccggcaagagcgaaggagaaaggcaacaaggcccgagcggggaaca

SEQ ID NO: 205883 - RNA, 75 nt, Homo sapiens
cgaggccagacaacacaacacaaggcagccacaggccaaaacagagaggcaagaaagacacaaagacgagcgagg

SEQ ID NO: 205884 - RNA, 74 nt, Homo sapiens
caaaaaacaaccgaaagaaggcggaaccacacagcagcagcccgggaacgaagcagacagagagagacacagcc

SEQ ID NO: 205885 - RNA, 62 nt, Homo sapiens
caacagagccaggaaaagaccagaacagaccacggaagagaaacggggacgcgcagggaaac

SEQ ID NO: 205886 - RNA, 72 nt, Homo sapiens
ccgcccgggccagcggccgcgcacccccggccggaggcaccagcggaacgaagcccaaaaggcagagacgga

SEQ ID NO: 205887 - RNA, 84 nt, Homo sapiens
cggaggacgaagagcgggacccgagcccgaagaaggaaccagcaaagcgccacgaagcacaagcaagaggaccagccaaaacca

SEQ ID NO: 205888 - RNA, 76 nt, Homo sapiens
aaggcaggacagccagcagggccgaggcacggaaggccaggacagaggcccggccgacgccgggggaggccgccgg

SEQ ID NO: 205889 - RNA, 76 nt, Homo sapiens
acgagggacagcacaaaagaacaaaaagagaaaaacagccacaacagagcgcaagagcggggagccgccgcaccag

SEQ ID NO: 205890 - RNA, 74 nt, Homo sapiens
cggaacagaggaaagcacagaggggcccgcggcccagccccagggagaaaacacaggcagcaagaagcccgagg

SEQ ID NO: 205891 - RNA, 80 nt, Homo sapiens
acaaccgcccaccacgccagccaccacgcggcgcacaacgcaggaacaccgcacgcgcggaggagcgaacgccgccagga

SEQ ID NO: 205892 - RNA, 79 nt, Homo sapiens
gccagaggcgaggcagggaggacccacccccgggggaaaagaacgagaaggaagaccccaagcagcagcaaaaaggaaa

SEQ ID NO: 205893 - RNA, 71 nt, Homo sapiens
aaagcacagagaacaggaacggacaaggcaggccggcggaagaggaccaagaagggggcagcgcgggaacc

SEQ ID NO: 205894 - RNA, 67 nt, Homo sapiens
aacgacccggggaccgaaccccggcgaacagcaaggcacaagagccacggcaggaagcacagaaccc

SEQ ID NO: 205895 - RNA, 70 nt, Homo sapiens
caagcacacacgggggacacaaaagcaggcgcccacgccggacacggaaagagcagggcgggggagaaaa

SEQ ID NO: 205896 - RNA, 74 nt, Homo sapiens
gccgcaccgccgccacgccacacccgcaacccgggcccgcgcacaagaacgagcaccccaccgacccagggccg

SEQ ID NO: 205897 - RNA, 46 nt, Homo sapiens
caggcaccaaggaaagcagaagacaagcgaagccggccacagccac

SEQ ID NO: 205898 - RNA, 58 nt, Homo sapiens
gggggcggccgggacggaggacgcgcaggcgggcaacacaacaaggcgcggacaccca

SEQ ID NO: 205899 - RNA, 75 nt, Homo sapiens
ccggcggagggagggaaaaccacacaaggcgcagcaggggacaaacgcccccacaacaaagagaaagaggacagg

SEQ ID NO: 205900 - RNA, 72 nt, Homo sapiens
cgccgccgccccgccagcgccagacggacgaggcggcggagaacaagcggcagggaggcgggacaccaggac

SEQ ID NO: 205901 - RNA, 90 nt, Homo sapiens
ccaagagaggcaggcagcgacagccacacaacggacagcgggcaccggggcccacagaacaagcagccacgggacagggggcgccccgca

SEQ ID NO: 205902 - RNA, 71 nt, Homo sapiens
cagcaaccaccaagggaacagcacaggcaggggcccgggcacagcgcagcgagcgccaccgcgggccaccc

SEQ ID NO: 205903 - RNA, 114 nt, Homo sapiens
cgcagggaggcccggggcaacccagccaggcccgccccagcgggcgagccccgacagggaaggaccaacgcagcgggcaacaagaggagcgcgaaagcagcaagaagaggaggg

SEQ ID NO: 205904 - RNA, 76 nt, Homo sapiens
ccgcgggcgacgcgagcccagcaccgggcggagccggaggcgagaagaggaagcggggcagggcgacgcaaacgag

SEQ ID NO: 205905 - RNA, 72 nt, Homo sapiens
ccgacgaaaaggagcagagcaaaagccacaaaaagcccgccccagccggggaaccaggaggagaggggagga

SEQ ID NO: 205906 - RNA, 78 nt, Homo sapiens
agcgcgaaaagcgccgccggccaaagggggacgaccaccagccaggccggggacaaacaggcaaccgacggggagggg

SEQ ID NO: 205907 - RNA, 87 nt, Homo sapiens
ccaaggaagaggaagaccagaaacacaaggcaaagcagcaaccaggcgccaagcccacgggcgcaccaacggagagccagagcaagg

SEQ ID NO: 205908 - RNA, 112 nt, Homo sapiens
gcccggcgcccgcggccagccgcaagacccgccacaagcaacgcgggaagagaaggaggccaggagcacagaaacacccaccaggagccaagcagaagagaaaaggccagac

SEQ ID NO: 205909 - RNA, 77 nt, Homo sapiens
agcaaggcgagaagaaagaggccagacaggagcccagaaaccggaaaaggagagacaagagagaagagcacaacaac

SEQ ID NO: 205910 - RNA, 38 nt, Homo sapiens
cgaggcgagacggaaagaggaagaggaggccgagagac

SEQ ID NO: 205911 - RNA, 72 nt, Homo sapiens
cagggcccaagcagagaagcgcgcagaggagcaagaggggggggcccccccgaagaaaggaaccggggagcg

SEQ ID NO: 205912 - RNA, 41 nt, Homo sapiens
agcccccgagagcgagacacagacagggcggccgcacccag

SEQ ID NO: 205913 - RNA, 54 nt, Homo sapiens
caaaacacagcacaagaagcccgagaaagaaacgcggagcaagcaagacgagga

SEQ ID NO: 205914 - RNA, 38 nt, Homo sapiens
gggagccgaaaaaagccgcagcccggacgaggggcagg

SEQ ID NO: 205915 - RNA, 67 nt, Homo sapiens
gccgccacggccgcgcccgcacacgagacgacgggaccgaaggaccccgccagagacaaccgagcgc

SEQ ID NO: 205916 - RNA, 73 nt, Homo sapiens
gaacccaaaagagaaacaccaggaagccggacaccgggaacggagagaaggccagggcagcaggaaagccccc

SEQ ID NO: 205917 - RNA, 69 nt, Homo sapiens
gggcggacaaaaaaaaaacgcgaggaaaggacaccagaggacgcccggcagaagggagcgagcagcacg

SEQ ID NO: 205918 - RNA, 67 nt, Homo sapiens
agaagaagcgagaaagcccgcgacaggccaaagcaaggccagaccagccagcgcggggaagcagccg

SEQ ID NO: 205919 - RNA, 84 nt, Homo sapiens
ccacacgccgggcaggagccacggccagccggggccacaagccccaggcccgagcaccgccgggccgacccgagagccaccgaa

SEQ ID NO: 205920 - RNA, 78 nt, Homo sapiens
aaccgaagggaaggccagcagcgcgcggagaagaacggggagccagcggagccggagcgaggcgggggaggcagcaga

SEQ ID NO: 205921 - RNA, 54 nt, Homo sapiens
aggaagcaaaagccccagaacgaggccgagcacccggagaggaaggagaaacgc

SEQ ID NO: 205922 - RNA, 49 nt, Homo sapiens
gcgcgcgccacgggccaacaggaaaagacacgaagggaggcgagaagaa

SEQ ID NO: 205923 - RNA, 76 nt, Homo sapiens
acagagacaccgaaaccgggagagggccagggcaaggccagagaaggcgggagaaagacacgaaccacagaacgca

SEQ ID NO: 205924 - RNA, 40 nt, Homo sapiens
ggaaaagaagccagaaaccccaccggcgcagggaagaaag

SEQ ID NO: 205925 - RNA, 57 nt, Homo sapiens
agccacgggccggaggcaaaaaacaggaaaaccgaaagcgccaggccagcgaaggag

SEQ ID NO: 205926 - RNA, 83 nt, Homo sapiens
gccacacccagcacgcccacccgccaggagacgacaaggcgggcagggggagcggcgcggcagagcgggcaggagaggccggc

SEQ ID NO: 205927 - RNA, 74 nt, Homo sapiens
acaccacccagaggagggccacaaaggcagccccccaggcagccccgcggacagaacgaccgcccggccagccc

SEQ ID NO: 205928 - RNA, 76 nt, Homo sapiens
acaacagcacacgcacccaagcgcccaggccacagcccaccgaacccaacaccagcccaccccgcgcaccaagccc

SEQ ID NO: 205929 - RNA, 65 nt, Homo sapiens
accccggagaaaaggccaagaaggcagaaccgcacggccaagcccacacagaggaaaccgggaga

SEQ ID NO: 205930 - RNA, 57 nt, Homo sapiens
ggccagagaccaaggcgcgcccggcgggccggaccaaggcaacaccaccgagaacgg

SEQ ID NO: 205931 - RNA, 84 nt, Homo sapiens
cagccaccacaagcccgagcccgaagagagaaggcaaagaacccggggaaaggagggccgcaagaacgagagcgcgccaaggga

SEQ ID NO: 205932 - RNA, 65 nt, Homo sapiens
cggggagcacggcgagcagccaggccaggagagggacaagagaaaaaaagggcgggcgaacaaaa

SEQ ID NO: 205933 - RNA, 82 nt, Homo sapiens
agagaccagcaaggaaccaaagcacacagagcaaggcaaccgaccagacccgaagaagacaagcgccgcggacccacgagcc

SEQ ID NO: 205934 - RNA, 69 nt, Homo sapiens
aggaagcccagcagcgagaagaagcccaaggagaggcagagacccacgcggggcaagggggccccagac

SEQ ID NO: 205935 - RNA, 78 nt, Homo sapiens
agcaggggcccaaggggaggggggaggggaacagcagcggagaacacggcagagacaaaacggaccaccgcgacagaa

SEQ ID NO: 205936 - RNA, 73 nt, Homo sapiens
ggacgaccaggggcacaacgaacacaaagagaacggacccgggcgacacaggggacccaggccgccaaagcag

SEQ ID NO: 205937 - RNA, 82 nt, Homo sapiens
ggcacacgcgcagccccggccccggcccgccggagaaacagcagagaccgggaggcagcaacccagaggccaccgccaagca

SEQ ID NO: 205938 - RNA, 73 nt, Homo sapiens
ccaccagagggagaagaaacagaacgccccacgaggcggcgcccgcgaaaggaccagagaagacacacaacaa

SEQ ID NO: 205939 - RNA, 57 nt, Homo sapiens
ccccggcaacgcggcaagccaaagcgccacagaagcagaagaaggacaccccacacc

SEQ ID NO: 205940 - RNA, 83 nt, Homo sapiens
ggagaccccgaaggcgcaaacgacaccacccgaccgacaaacaaggggggaagagaagagccaagaaaccggcgcaaagccag

SEQ ID NO: 205941 - RNA, 81 nt, Homo sapiens
gagagagacgaaaccaaaaggagcaagaaggaacacagacggcagagcagaccagacagcgccagccccaccccaacgaag

SEQ ID NO: 205942 - RNA, 81 nt, Homo sapiens
gccagaacggaggaggagccgcagccaaaagggcgagggaaaaagcgggaggaggcgggccagaacacgaccggggcacag

SEQ ID NO: 205943 - RNA, 79 nt, Homo sapiens
gccggcagcgccgcccccagggagggagccgcagccgagggaagaaaacgccagagaagcagagcagcccggagcgagg

SEQ ID NO: 205944 - RNA, 49 nt, Homo sapiens
ccgccgggagcggagcagacgcgagggaaaggcgcgacacgaaccagcg

SEQ ID NO: 205945 - RNA, 69 nt, Homo sapiens
ggcgaggcgcagaaggggacagaacacgcacacacaccccaagacaagaccgcgagcagagagagacag

SEQ ID NO: 205946 - RNA, 79 nt, Homo sapiens
ggaccaggggccgcggagaaccacacagcaaagaccggccaggcggggaccacagcagaacaaaggacaggagagaggg

SEQ ID NO: 205947 - RNA, 86 nt, Homo sapiens
gcgacggcagcggcggcggcggggggaaaggcggagacggccccaccggcaccgagaaagacaacccacggagaagaacgcgcggc

SEQ ID NO: 205948 - RNA, 82 nt, Homo sapiens
gggcgcaccgaccaggccccaaagccccaaggcgacaagaccggaccggaacagacgccccaccaggccagcggggcgcaga

SEQ ID NO: 205949 - RNA, 76 nt, Homo sapiens
gaaggaccaagaaccagccagcaagggcaaacccggaagaagaaaaaaaaacagaaaaacaagaaaagcagcacgg

SEQ ID NO: 205950 - RNA, 77 nt, Homo sapiens
ccaaacgcggcaacgcccccgggacagcacgccccggaccccaagacgaaggacagagagggacgggcagacgcccc

SEQ ID NO: 205951 - RNA, 64 nt, Homo sapiens
ggcagcgcagcggagagccaaaacagaacgacggcccgggagagcgcccaagggcacgcaacca

SEQ ID NO: 205952 - RNA, 68 nt, Homo sapiens
aaaagagagaagaagcacaggacaggagagacaacggaggcaagaaagacggagaagcgagaagagac

SEQ ID NO: 205953 - RNA, 72 nt, Homo sapiens
gagccgaaggagccccaagcaggaaaagcgcgggaaccagcaggcggacagacgcacgacgaaggcaagacc

SEQ ID NO: 205954 - RNA, 84 nt, Homo sapiens
aaaccccgaagagagggaacagacaacacgaaaccagacggggcccggaaccggagggggcacaaacccgaccccgaggaacca

SEQ ID NO: 205955 - RNA, 74 nt, Homo sapiens
ggcgagaggccggacccgaaaaacgagacgggcggcgaacggcggaggcaggcgaaaacaggccaaaagaaagc

SEQ ID NO: 205956 - RNA, 66 nt, Homo sapiens
caaaacggagcgaaggaagacaaaaacccccaagggaagcgcaagaaagcacagagagccaaagaa

SEQ ID NO: 205957 - RNA, 74 nt, Homo sapiens
gggcccccgagcaacagacagggggggcgcaggccccggaagagggacgcagccaaaaccgaggcagcgacgcg

SEQ ID NO: 205958 - RNA, 69 nt, Homo sapiens
gacaccagccgcagaccaggccacacggcagggcagggcaggccagcccagaacaaagcaggccacgga

SEQ ID NO: 205959 - RNA, 70 nt, Homo sapiens
gaagagaggccgccacccagcagaagcgcggaggcgggagaagaaaggccagaagcaaaacgcagagaag

SEQ ID NO: 205960 - RNA, 76 nt, Homo sapiens
ccgaccgcacgcgggcgcgagaacggccgcccgccgcagcggagagaacaggagagggaaggcaaaacaacccgca

SEQ ID NO: 205961 - RNA, 50 nt, Homo sapiens
cccacacacggaaacgggagccaaggcgcggggcacaagcgggccagaag

SEQ ID NO: 205962 - RNA, 81 nt, Homo sapiens
gacgccggagcaaacgacgagaaagcccacagccaaagccgggcggacgcggaggagcaccaagcaacggcccgcgaagga

SEQ ID NO: 205963 - RNA, 74 nt, Homo sapiens
cgccagcggacaaaagcagccgagaacccgccgcggcgcccgcccagcccccgagggaacaaaaaccaggagga

SEQ ID NO: 205964 - RNA, 54 nt, Homo sapiens
caggcagccacggaggagaccagcggcacggaaaagcagagagcgaagacgaac

SEQ ID NO: 205965 - RNA, 75 nt, Homo sapiens
ggagccaaggcagaaaagcccacccaaaacggagccagggagcaccacgccgccgaggaccacaagagcaaacaa

SEQ ID NO: 205966 - RNA, 116 nt, Homo sapiens
aaccaaagcgcgaacagagaaacagacccaccccagaggagagggacaagaagccacagcgcacaaagaaaaagggcggcacccaccacggccccaggcgccggcagaggaccgag

SEQ ID NO: 205967 - RNA, 64 nt, Homo sapiens
gaaagaagggggcagaagagggccaccgcagaacaagagaccaaccaggaccaccaacagcgca

SEQ ID NO: 205968 - RNA, 81 nt, Homo sapiens
aaggcgcagcgggggaacagcagcggcaagcccagaagaacaggcggcgggcagagcgaggcagaaagaggagaagagccg

SEQ ID NO: 205969 - RNA, 87 nt, Homo sapiens
aaaaccccggggcccccccagaccaaaggaagcgacaagaagcacggcgaggaccgggcccaccccgcacccggcaccacgcggggc

SEQ ID NO: 205970 - RNA, 88 nt, Homo sapiens
accaggcggagccccagccggggcccagcgaacgccaggcagggacagcagggacagccgggagagcaggagagacccgcgagggaag

SEQ ID NO: 205971 - RNA, 39 nt, Homo sapiens
gggaggaggggcaggcccggcgagggaacaggcacgccc

SEQ ID NO: 205972 - RNA, 34 nt, Homo sapiens
aaagcccacacggcgaccaaagacagagacaagc

SEQ ID NO: 205973 - RNA, 78 nt, Homo sapiens
cggagcccgagggacggggacggagagaacacgagcccacagggcagcgcaagaccccgcacggaagcagcaagcaca

SEQ ID NO: 205974 - RNA, 77 nt, Homo sapiens
ggaagaacacccccaccggccaggcgagaaaggcaggacagagcgggagccaccagcgccaaagggaagccaggagc

SEQ ID NO: 205975 - RNA, 84 nt, Homo sapiens
gccggcaggacggaaggggaagaggcccacccggagaaccccacggagaaccagagcgaacccgaacaacgcacaacacaccaa

SEQ ID NO: 205976 - RNA, 67 nt, Homo sapiens
gggagacagcgccaccacgaccgaaaaaggaggaacaaaaacccccggacagccgccgagagagaca

SEQ ID NO: 205977 - RNA, 83 nt, Homo sapiens
cgggggaccccgccaggccgaagcagccacagggaacccagcgagcgcggaacacgagcaagcgggagcgggcccgcgggacc

SEQ ID NO: 205978 - RNA, 84 nt, Homo sapiens
ggggggaaaaacccggacggcacaccccaggaaccaggaaaggaaaagggcggaagaaacgggcagaacaccacggagaaggaa

SEQ ID NO: 205979 - RNA, 40 nt, Homo sapiens
gccacagccaaaaagggaagaacagccgcggagcccaggc

SEQ ID NO: 205980 - RNA, 74 nt, Homo sapiens
cgccacacacagaacgacaccacagcgacaaccggcgaaccacaggagaaagcaccagcaacacacaagccagg

SEQ ID NO: 205981 - RNA, 75 nt, Homo sapiens
ggaccccaaggaagccacggcagacacacaacccgacccgacgaaaccaccacgaacggggcccgcgaacgggaa

SEQ ID NO: 205982 - RNA, 71 nt, Homo sapiens
cacagcaccaccacgaagagaccaacagcacagggaagaaaggaggaagcaaaaggagcggagaggcaaac

SEQ ID NO: 205983 - RNA, 81 nt, Homo sapiens
cggcggccggagcggcgagcaggcccgcgcggcgccgggcgcgacgaggggacaaggaacccccaaaaacaccggcaaagc

SEQ ID NO: 205984 - RNA, 76 nt, Homo sapiens
aaccacgcacacaggaccagacagcacgcaccccgcccacaccccccaacagacgggaacagaacacaacaaagca

SEQ ID NO: 205985 - RNA, 75 nt, Homo sapiens
caagcaggaccacccaccagccaccagagccacccagagccccacgaagacgagcagacccgggacgaggcacgc

SEQ ID NO: 205986 - RNA, 65 nt, Homo sapiens
gagggaggagagagggagagccaaagaagaggccgcccagccccacacgggagcacaccagcaag

SEQ ID NO: 205987 - RNA, 42 nt, Homo sapiens
ccgagccaggaacagacaagacgccgacaccccaggccacga

SEQ ID NO: 205988 - RNA, 60 nt, Homo sapiens
ccggaagggcggggggcgggccggaggggagacgggaggcaggagaaaaccggaagagaa

SEQ ID NO: 205989 - RNA, 72 nt, Homo sapiens
cgcggaacaaggaaacccaccgaggacacgggggggaaacaagcacgggcgagccaggacacgaccacaaca

SEQ ID NO: 205990 - RNA, 60 nt, Homo sapiens
cggaaggggcccgaagcccccgcaggaaccacaacccaaccaggcagaagaagaagagcg

SEQ ID NO: 205991 - RNA, 78 nt, Homo sapiens
agcacccggcggagcagagccagggagacccaacaaaggcggacggaagacgagcaaaaaggacggaggccaccacca

SEQ ID NO: 205992 - RNA, 75 nt, Homo sapiens
cagcaaagcgcgagaacaggaccccccgcccccaagaagagggagagcaagaaaccagaaggacggaggcagcca

SEQ ID NO: 205993 - RNA, 56 nt, Homo sapiens
cacagccacgcacacaggagccaaagaagaccagaaagaacacacaaaggcacgag

SEQ ID NO: 205994 - RNA, 77 nt, Homo sapiens
acggaagcacgaaccaaccgaaaacagaaacaaacacaccaggacccccccgacaaccaacacaccaccaggcggac

SEQ ID NO: 205995 - RNA, 77 nt, Homo sapiens
ggagaagcgcagcgacggcgcgggagagcgcgccagccggccgcgaagcccaaaaggcagagcgaggagagaagaag

SEQ ID NO: 205996 - RNA, 86 nt, Homo sapiens
aagaccagagggcaaaccggcaggcgcccggacacagaagaggacaggaaagagcagccaaagccaaagaagacgaaaaaagggag

SEQ ID NO: 205997 - RNA, 83 nt, Homo sapiens
acccaagcccaaacccagacagcaaccaaaaggaccaaggagaaagaaccgcaacagaacgagcggcccaacagaggacaacg

SEQ ID NO: 205998 - RNA, 77 nt, Homo sapiens
cagcgcgagccaggacccgaaggcggaaaggacgaggcagccacgggggagcgggcaccacagagcggcggagccgg

SEQ ID NO: 205999 - RNA, 55 nt, Homo sapiens
gacagaagaagaaaggcaccgccgaccgaaaccgcaaacacacgacagaggcaag

SEQ ID NO: 206000 - RNA, 97 nt, Homo sapiens
gcgccgagaaagccccgggagaagcagcgccgcccggggcagaccaggcaggcgagaaccacgccgacaacggcggaagaggaacgggaacggggaa

SEQ ID NO: 206001 - RNA, 78 nt, Homo sapiens
ggacggaggagcaggcgagaagagaaggacccagcagccagcgaagccccaaggaagccgggacgcccacagacccag

SEQ ID NO: 206002 - RNA, 79 nt, Homo sapiens
ggcaacccaaagccgcacagcggaaagggaaaagaggggaaaggggaggcacaagccggggcaagaggcaacacagggg

SEQ ID NO: 206003 - RNA, 50 nt, Homo sapiens
cgggggggcgcgcgcggggggaaaaagacaagggcagagcagccggggaa

SEQ ID NO: 206004 - RNA, 77 nt, Homo sapiens
caccccagcaagacaacggaaggcagaggggcgggcaaaggagaggcacaggaagcagaggcaagaaacgaaggcag

SEQ ID NO: 206005 - RNA, 73 nt, Homo sapiens
acagccaaggggagaccacaccaagcgggagacacaccacgccaagggcaggaggaacagcgacacacgacgg

SEQ ID NO: 206006 - RNA, 55 nt, Homo sapiens
gcagaccacagacccacagcgaaagcaacagaggcggccccaggggggaccaaca

SEQ ID NO: 206007 - RNA, 67 nt, Homo sapiens
ggaaaaagccgccacacgccaaagcaggcaggagaagggcaccggggaggaccgcgcgacgcgccgg

SEQ ID NO: 206008 - RNA, 82 nt, Homo sapiens
gaccccacaccacccacacaccagcggcagcccccgaggggaagcgagagaaaaacaagcgccacacggcagaccagaggga

SEQ ID NO: 206009 - RNA, 65 nt, Homo sapiens
gcaagacaagcgcgcggggaaaagacaccgaagacggacaggcaaagaggcccccaagcgagcac

SEQ ID NO: 206010 - RNA, 78 nt, Homo sapiens
gcccagcagcaagaggagagccaaccagcaagagacagagcagacacaagaccggccagccacagagcagagaaagcc

SEQ ID NO: 206011 - RNA, 70 nt, Homo sapiens
aggaagaagaaacccacgaaccaaaagggacggacaaaggaacaggaccaggaaaaagacaagggcagag

SEQ ID NO: 206012 - RNA, 80 nt, Homo sapiens
cgccgccgccgcgccgcggcgcgccggccggcccgcggcgccgcgggagcgccgggccccgacggcacacagagaaaaaa

SEQ ID NO: 206013 - RNA, 67 nt, Homo sapiens
aaagcacggcgccgagaggaaggacacaaggcaagaagcagacaaggaccaggacacagaccggaaa

SEQ ID NO: 206014 - RNA, 63 nt, Homo sapiens
cgcccacagcacggcggggccgcccagcgcaagagaaaggcagaagccccagaggagcccgaa

SEQ ID NO: 206015 - RNA, 78 nt, Homo sapiens
aggacacgcagaaccaccagacaaaacaaccaggacccaggcaccagggacgcaggacacaagagagacagggcacca

SEQ ID NO: 206016 - RNA, 71 nt, Homo sapiens
gaaaggggccaaggaagggagcaccagcccagaaaagaccggaagggaaggccccaaagaccacggagaag

SEQ ID NO: 206017 - RNA, 74 nt, Homo sapiens
ccccaggggaccaggggacgaagggaacaggacagaacgacacaaaagggaagggagccggcagaagggaccaa

SEQ ID NO: 206018 - RNA, 108 nt, Homo sapiens
accccgaccgacacccaaggagccggaccacaccggaggcaggaccggggccaaaagccaaggccacagagggggcaagcccgaacacacacccccaccggagcaggg

SEQ ID NO: 206019 - RNA, 77 nt, Homo sapiens
ggggcgggaccccgccgcggcgggagggacagggcagaccgccagcagcacagcaagccacagagagggccggcagg

SEQ ID NO: 206020 - RNA, 77 nt, Homo sapiens
acggaccgagaccggaccgagagcggaccgagagcgcgaaacgcacgagaaggggggacgcgccgacgagccaagac

SEQ ID NO: 206021 - RNA, 71 nt, Homo sapiens
ggagggagaaagagcccgccacacggaagacaggaagagaaacgccagagaaaaggaagagcaaaagaaac

SEQ ID NO: 206022 - RNA, 84 nt, Homo sapiens
agagcccaccgggaggagaaggaggaggaacgcggcaaccggcacgcaccagagcagcccacaggacggcacccgccccacagc

SEQ ID NO: 206023 - RNA, 85 nt, Homo sapiens
cggcgcccagggcgacagcgcgagagagcgcggccccaggagcaaggcggcaccgggcgagccccgcggccagcgccccaccggg

SEQ ID NO: 206024 - RNA, 71 nt, Homo sapiens
agcgccacgcgcggaaggcagcgcccagcagcgcaggcaccggagacgcgggcagaaaaaggaaaggaagg

SEQ ID NO: 206025 - RNA, 52 nt, Homo sapiens
aagagacacgaaaacggacaaaacaaaccacgccggaaccggaaacacacca

SEQ ID NO: 206026 - RNA, 67 nt, Homo sapiens
ccaaaagcagcccgccacaacaaacagagcaagggaaggcagagaggcaaagaagaagaaggagagg

SEQ ID NO: 206027 - RNA, 76 nt, Homo sapiens
gagagaccgccgaggaagcgccacgaggcacacgaaaacagggaaggagaagaaccacagacaaagacgaaagaaa

SEQ ID NO: 206028 - RNA, 38 nt, Homo sapiens
caggggaacccgcccacggagaaccacggggaccaaga

SEQ ID NO: 206029 - RNA, 72 nt, Homo sapiens
gcggacagagaagaggacgcggagacaagaggcggccacagcaggcggaggacaccggagccgcagccccag

SEQ ID NO: 206030 - RNA, 75 nt, Homo sapiens
cgcccgccgcggcgcccggcggagacgaccgcagccccacaaggcgccaccggaggaggccacccggcagagcag

SEQ ID NO: 206031 - RNA, 67 nt, Homo sapiens
gaaggaccagcaaggaagcacaaaggcaacgggaccaaagagcccccaggacaggcacacccgggaa

SEQ ID NO: 206032 - RNA, 87 nt, Homo sapiens
gagagcggcagggcaccgcgcgaagcggccaaagccgcccagacggccaccggcgggaggaacaaaagggcagccgagaaggcaacc

SEQ ID NO: 206033 - RNA, 74 nt, Homo sapiens
gacgacggagaagccagaggaccaaaggagaaaagaaacacacgcaacagaagccgaagacaggggaaaaagaa

SEQ ID NO: 206034 - RNA, 76 nt, Homo sapiens
gggccaaaacagacccacaacagaacaaggacagggggacacccacaacaccagaagaaggaacccacaacagcag

SEQ ID NO: 206035 - RNA, 76 nt, Homo sapiens
acgagagaacggcacacgcgagcggaggggccacggggccggggagccaccaggagacagcccagacaagcagggg

SEQ ID NO: 206036 - RNA, 66 nt, Homo sapiens
aggaacagagcgagggaggagagagggagagccaaagaaggcagaaaaaaccccaaacacccagag

SEQ ID NO: 206037 - RNA, 79 nt, Homo sapiens
ccccaccggccggggcagaggcgcccagacgagcccaccacggaccacccgcagccagcgagccgccgccaagaggaca

SEQ ID NO: 206038 - RNA, 82 nt, Homo sapiens
gccgccgccgccaccacccacccggacacagagaacagaacggaccagaggaagaggaagaaggaagcaggcaaacaaacga

SEQ ID NO: 206039 - RNA, 79 nt, Homo sapiens
agcggggaggccgcccggcgcagcggggaccggcggcggcgcccaggcacccggcccggaagaggcaggaacgaaccaa

SEQ ID NO: 206040 - RNA, 60 nt, Homo sapiens
acgagaccccccgcgagagcgcaaacacccccagacaaaggggcaaaacgaagggccaaa

SEQ ID NO: 206041 - RNA, 82 nt, Homo sapiens
gaagaccccggagccccagccagggaaccacggagcacgagaaaacggcggggagggaagcggacacacaggacgagaaacc

SEQ ID NO: 206042 - RNA, 75 nt, Homo sapiens
ccccaaaggcggaaacaggcggaccgaccgagcccgggaaagagccgaagaaccccaaacccgagcaaccaacca

SEQ ID NO: 206043 - RNA, 72 nt, Homo sapiens
aaaccagaaacacaggaaggggaaggccaccaaaggagcacccagccaaggccacggggagacacacgggaa

SEQ ID NO: 206044 - RNA, 80 nt, Homo sapiens
cacacgcagaagggggaaagagaccgggacagaacagaaccaagaaggagcgagggaggagcagcgagacagcaagagac

SEQ ID NO: 206045 - RNA, 78 nt, Homo sapiens
acaaagggaagaaggcggccacacggagccaacaccagaagagcaccgaagggccgccccccgggcgaggcagagacg

SEQ ID NO: 206046 - RNA, 82 nt, Homo sapiens
cccccagggcagaaaagcgaccaggcgaggagaaccagggcacagcgcagcggagcgaggaaagcaggcgggcccagaggcg

SEQ ID NO: 206047 - RNA, 58 nt, Homo sapiens
gagcagaggacccggcgggcggcccgcgggcagaacggccgagcgaccaggagaggag

SEQ ID NO: 206048 - RNA, 90 nt, Homo sapiens
aggcagcagcccacccgaccggaggcagagagagccaggacccgagccagggcgagagaagaggaggaaaaggccaaagcgacaagaaag

SEQ ID NO: 206049 - RNA, 70 nt, Homo sapiens
agcggagcaaggaaaccggagaggcggagccacaagcacgcggaagagccagcgccgccagaacaaagga

SEQ ID NO: 206050 - RNA, 72 nt, Homo sapiens
cagcgcccaagcggaaagaaaggcgggccacaaggcaaccagggagaggagccgcaagccgaacaaggaccc

SEQ ID NO: 206051 - RNA, 76 nt, Homo sapiens
agcgggccgcagccaagcgccgccgggaccagagaacacccgcgagggcccaggccgaaacaaccagagagcacgg

SEQ ID NO: 206052 - RNA, 85 nt, Homo sapiens
ccccggcgcagacaggacccccgcgagccaccagaacgagacagcccccaaagggagcaccgcggacgccccagggcacaccgcg

SEQ ID NO: 206053 - RNA, 83 nt, Homo sapiens
gacggaaacgaggaaaccgggaaagccaccgaaaagggaaaccggcaagcagcccagccgagcagccccagaccgcgccgccc

SEQ ID NO: 206054 - RNA, 77 nt, Homo sapiens
agagacacagaggagccacacccccaggcagacaaccaacagggcaaaaccgccaacaagacccgcaaagaaaaaaa

SEQ ID NO: 206055 - RNA, 73 nt, Homo sapiens
caagcccggagcagaggaggacgagacgcagaggaccaggggagcggacgcagaagacaaacccaagagagca

SEQ ID NO: 206056 - RNA, 75 nt, Homo sapiens
gggaaaaggccagcaacaggagaggggaagaaaagcagcagcaagagaacggacagcaacaggaaaccagcaggg

SEQ ID NO: 206057 - RNA, 79 nt, Homo sapiens
caaagaaaacaggaagaacagaaagcacagaagccagagacagagaacccaaacaaaaggagaacagagcaaacagaag

SEQ ID NO: 206058 - RNA, 77 nt, Homo sapiens
gagaccagcagcagcacgggaacagaccgaacacccagcaccagggaaagaacgagcagccaacagagggaaacacg

SEQ ID NO: 206059 - RNA, 82 nt, Homo sapiens
cgggggcggcggcggccagcgccagccagaggagcagccaagaagccccccaggggcccgcagaccaacaacaagccacagc

SEQ ID NO: 206060 - RNA, 70 nt, Homo sapiens
gaagacagggggcccaaacgggagacaacccccgaaggaggaacaaagggcaaaggacacaccgcacaaa

SEQ ID NO: 206061 - RNA, 67 nt, Homo sapiens
ccccaaaagacaggcccaccgaagggcaggcagggccaaagacccagggacaggacgggcaacaggg

SEQ ID NO: 206062 - RNA, 88 nt, Homo sapiens
gcgcggcaggagcggaccgcgagcggcagcggcggaggagcggagcagaagggcaggagggcgaaggccaggcaaaagcagaccggaa

SEQ ID NO: 206063 - RNA, 77 nt, Homo sapiens
caccgcaccagaaaccaggaggggacgacggcacgggccgccaggcacagagaaggcaaacgggagggcgaggacac

SEQ ID NO: 206064 - RNA, 77 nt, Homo sapiens
cggaccggcacccggacaggaggagccagggcccggcccgaaaggagagccgaaaaccgccgccggggccagcaaga

SEQ ID NO: 206065 - RNA, 94 nt, Homo sapiens
ggacccgcgggacccgcagccccgcgcgggcaccagcacgagccagggagccgccgggaccggcccgggagacgacaacccaaaccgaaaaggc

SEQ ID NO: 206066 - RNA, 68 nt, Homo sapiens
cgaaaagcgcagcgagcggagccgccggagagaccggagacaaaaagaggccaagaccaagaggacag

SEQ ID NO: 206067 - RNA, 81 nt, Homo sapiens
gccccccagcgccacagcaaggacacgaggcaccacccagcacacgccaagaaccagaggcaggaagaagaaaaacgccga

SEQ ID NO: 206068 - RNA, 54 nt, Homo sapiens
cacaaaccggcccaacaaccacaaggaaaaacaagacgcagcccaaaccgcccg

SEQ ID NO: 206069 - RNA, 67 nt, Homo sapiens
gcaaaccacacggagccaaaggagaccaaaccggcagaaggagacgcacgaagcagaacaaaaaaaa

SEQ ID NO: 206070 - RNA, 74 nt, Homo sapiens
ccggaggacgaaacgcgaaacccgggccaaaggcagaaggaacacagcaacagaagccaggcaaggaacgcgga

SEQ ID NO: 206071 - RNA, 87 nt, Homo sapiens
cgacggcaggaagaaaacgagccaggaacaaagagcaaggggccgcaaggccaggcgcgcagaggcacccaacggcacagaccccac

SEQ ID NO: 206072 - RNA, 77 nt, Homo sapiens
agaagagagaagccaccagcaaaaacaggccgacggcgcaaggccacggcaagcaccgggagcagcagcgaagccag

SEQ ID NO: 206073 - RNA, 80 nt, Homo sapiens
gcgccagaccccacgaggccccgggcagcgggccggccacggcgggagagcggcaaagagacggggcaccgcgagccagg

SEQ ID NO: 206074 - RNA, 55 nt, Homo sapiens
gggagaggacaagaccacgagccagggggaagagaccaccggaaaccgagggcgg

SEQ ID NO: 206075 - RNA, 79 nt, Homo sapiens
gcccggccgccgaaccgccacgccagcacgccaacccggacggacaacaccggggagcgcggacagccccagcacagag

SEQ ID NO: 206076 - RNA, 79 nt, Homo sapiens
gggcgagaaggcgggaagccgaaggcagccacaggggaaaagagacgcaaaccacgaggacagagaagagagaagccac

SEQ ID NO: 206077 - RNA, 83 nt, Homo sapiens
cgcagaggccgccacgccgcgccacagaccccagccagaacagagcgaagggaagggagagcgaaacgagaacccaggacaag

SEQ ID NO: 206078 - RNA, 72 nt, Homo sapiens
cggggggcacggcgaaggagcaaacgaaaacagcaagaggccgcaaaaacagcacaaggcggcccaccaagg

SEQ ID NO: 206079 - RNA, 84 nt, Homo sapiens
acacccaggacccgagcgcacccggaccccaaccagccccgcaacccggaccagcagaaaccagaggggaccacagagaagcgc

SEQ ID NO: 206080 - RNA, 74 nt, Homo sapiens
ggacccgccagaggaccaacagggacggagcggagaaaaggaaccggccccgggggacccggacaagcaagggg

SEQ ID NO: 206081 - RNA, 59 nt, Homo sapiens
caggcaggaggacggcccgccaagaaagagaaaacccgccaggccaagcaacccccaag

SEQ ID NO: 206082 - RNA, 63 nt, Homo sapiens
ccgacaagcaagccgaagagaaaggggaggccgagcaaccgcacagagccggcgaccccaacc

SEQ ID NO: 206083 - RNA, 37 nt, Homo sapiens
gcagcgacgggaagagagacggaccgaaagggcagac

SEQ ID NO: 206084 - RNA, 76 nt, Homo sapiens
ggcggggcggcccaccaacaggaacagggcagacgagcggaggacacccaacccgggcgggaaaacggcacaaggc

SEQ ID NO: 206085 - RNA, 102 nt, Homo sapiens
ggacaacaggcaggagaaagggagcgcaccccagggccaacccccaaacgaacagaaaccggggggagaagaacccccaggaacgcaaaggaaccccgagca

SEQ ID NO: 206086 - RNA, 78 nt, Homo sapiens
acggggcacgccaccccccgcacaggggcgggaccaagagggaacaggcacgccccacccgccagccgagcccccgac

SEQ ID NO: 206087 - RNA, 55 nt, Homo sapiens
acagaacagggcagaggggaagagagacaacacaaaacacacagcggcggcaagg

SEQ ID NO: 206088 - RNA, 93 nt, Homo sapiens
ccccaccgcccgggcccgaggaggcagccaagccgagccgccacccggcggcggagaacggaaaagcaccaggaagcagagaggaccgcagaa

SEQ ID NO: 206089 - RNA, 69 nt, Homo sapiens
acgcaaggagcggaagaagagaccaaacaacaccgcaaacaacggggggaaaaaaccagccgaacaaaa

SEQ ID NO: 206090 - RNA, 80 nt, Homo sapiens
ccagccaggcccagccccgaagggcacaccggagaagcgaacaggagccccagaccaacaaaacaaggacagagagccaa

SEQ ID NO: 206091 - RNA, 61 nt, Homo sapiens
ggcccggagcaggacagacccccaggggagaccaggcgagccaggagcgggggaacacaaa

SEQ ID NO: 206092 - RNA, 63 nt, Homo sapiens
ggaggccgcggagcgccagccaagaagacacagaagaacgcagcccggggagcagcaccccac

SEQ ID NO: 206093 - RNA, 78 nt, Homo sapiens
aagcccagagcaaaggggacagaggaaagggagagaccaccaccagaagaccgaagaacggcaaagagaaaagaagca

SEQ ID NO: 206094 - RNA, 77 nt, Homo sapiens
caccagcacggaccaggaggcgagcaacaggagagaaacaaaccgggcaaggcaggcccggcaaacggaaggcaagc

SEQ ID NO: 206095 - RNA, 78 nt, Homo sapiens
accaagaacaaccacagaacgaggccagcgcagaagacgagaagccaggaggagaagcggcccggcaagaacgaggag

SEQ ID NO: 206096 - RNA, 74 nt, Homo sapiens
gccacagggaaagccggccaggcacgagaagagaagcccagagcaaaacaccccaaaccagaccaccgacgccg

SEQ ID NO: 206097 - RNA, 80 nt, Homo sapiens
gcccagacaccagcagcccccgggccaccgccccagcgccaccaaagaccgcgacgccagaggcacagggccaggcacac

SEQ ID NO: 206098 - RNA, 83 nt, Homo sapiens
ggagagagccagccgagcagaagcgagaggaccgggaacccaacaagagaaaaccccagaaggaagaccgaggaggcaggaga

SEQ ID NO: 206099 - RNA, 82 nt, Homo sapiens
aaacaaggcaggacgcaacgagcacagaccagccccccgcgccccaccagccgggacacgacgaaaggaagacaccaaacca

SEQ ID NO: 206100 - RNA, 75 nt, Homo sapiens
cagagcggagaagccccagaccagaaagaagaggcccagcacaagcggaagccccagggggggaaaacggaaccc

SEQ ID NO: 206101 - RNA, 82 nt, Homo sapiens
gccccaggccaagagggacccacccggcggacagcccagagcaagcacacggaggcccgggagccagaccgggagcccgccc

SEQ ID NO: 206102 - RNA, 59 nt, Homo sapiens
ggggggagagaacccaaccagggggaaacacagaacgcaggaccggagaagaacaagcc

SEQ ID NO: 206103 - RNA, 81 nt, Homo sapiens
gaaaagccaggcggcagcaccccgagccaccccaggcgcccagaccaagggaacggagcaaaaggagaagccaaaccaaga

SEQ ID NO: 206104 - RNA, 70 nt, Homo sapiens
gggaagccgggccccagcagggcccagagcgccagggggccgcagccggccaggggacccgaagggggcg

SEQ ID NO: 206105 - RNA, 36 nt, Homo sapiens
ggcgcaaaagaaaaggcgagacccccaaaacaaggg

SEQ ID NO: 206106 - RNA, 83 nt, Homo sapiens
gaagacggggcccgggaccacaggccccggcccagaggccgagaacacggggcgggccagaacacacggacgcgggggggccc

SEQ ID NO: 206107 - RNA, 102 nt, Homo sapiens
cggaggcggaggcaagggcgcacggcgacaaccgcgagggccgaggcgggaacagggaggagcaaaagaagggaccaccacagccaaaacaaggagaaggag

SEQ ID NO: 206108 - RNA, 90 nt, Homo sapiens
gccgcaccagcagagagcccgcacggaacagagcggaaaagaccgagcaggccggggccaaggaagagcgcccggggccgccagaccgag

SEQ ID NO: 206109 - RNA, 74 nt, Homo sapiens
cggaggccaggccagcgaagcaagcgagaccagcaccgaaaggaggacccgaggcccccccgaccgggggagcg

SEQ ID NO: 206110 - RNA, 61 nt, Homo sapiens
ggcacagcaaagcgaggaccagaccggccgcaagacacgaccccggaaaacaagagcaagg

SEQ ID NO: 206111 - RNA, 84 nt, Homo sapiens
gcgcgcgcgacgcgagcgcgacaaccgccgacgaccgcagcggccaaggccaaaaaagacgagcgaagcccaacgcaaggagag

SEQ ID NO: 206112 - RNA, 63 nt, Homo sapiens
ggccagagcagacgcagcgagagagcaagggccagagaaggaggagaaggagacaggcggcaa

SEQ ID NO: 206113 - RNA, 58 nt, Homo sapiens
gaaaccaggcgcgacaagcgcgcacgggaaacaaaacaaaccagccggcgggcgccac

SEQ ID NO: 206114 - RNA, 84 nt, Homo sapiens
cgaaaacaggggccaaagggagagggaagccacaacaagccaaagaagaaggccgggggagcacccagaacagcagcaaggcaa

SEQ ID NO: 206115 - RNA, 75 nt, Homo sapiens
accacacgaggccggagcaaagcacaacagagggacgaaagacaaagagccgagacgcggggagacccagggcag

SEQ ID NO: 206116 - RNA, 77 nt, Homo sapiens
ggcccacggagccggccagggagcgggaaaccggcgcaggcaggaaccgcaccccagcccagccccagagccagggc

SEQ ID NO: 206117 - RNA, 67 nt, Homo sapiens
gcccagcccccaagagcgggaacagggacacacaggaagacgaacacggaacgggcgagaagaaagc

SEQ ID NO: 206118 - RNA, 57 nt, Homo sapiens
cacgcagagcgaaggaggcgcccgaggcccaggaacaccggagggcggccccggagg

SEQ ID NO: 206119 - RNA, 72 nt, Homo sapiens
cccggcaacagaagaaggcaagcaccagcacccagagagaagacgcaaccaacaaacagaccgcgcagaaac

SEQ ID NO: 206120 - RNA, 32 nt, Homo sapiens
aacaaagccagacgcacggggcgcagaagagc

SEQ ID NO: 206121 - RNA, 75 nt, Homo sapiens
acagaaaaggaagaaagggacaaagagaggagcaggggcgagcaccaaagccaaggaagcccagaagaaagagca

SEQ ID NO: 206122 - RNA, 59 nt, Homo sapiens
gcaaaggacacgcaaccccggcagcccccccagaaccgccccccagagagacccaggag

SEQ ID NO: 206123 - RNA, 84 nt, Homo sapiens
aaggaggaaaagcaggaagcggaaaggaaggacgcaccacgaaaagggaaacaaagcgaagaggcaacagagacccgagcggaa

SEQ ID NO: 206124 - RNA, 77 nt, Homo sapiens
agcaaccagaccccggagacgagaagcagaaccagagaccacagaagaaggaagggccacccaggacaggggcaccc

SEQ ID NO: 206125 - RNA, 79 nt, Homo sapiens
cccaccagccagacccagaacgcgggaaccccccagccaggccccggggcagaccccggaggcaacggcagccagacac

SEQ ID NO: 206126 - RNA, 65 nt, Homo sapiens
ccggggacaccagcagccgcgcggagcgggaggaggaccgaaaggagaagacagaggagccagac

SEQ ID NO: 206127 - RNA, 71 nt, Homo sapiens
agcgcgggaacggcgcggaagcaaagggggagcgccaggagagaagagacccggccaaaacacagcaagac

SEQ ID NO: 206128 - RNA, 78 nt, Homo sapiens
agaggaagaacaagaagagaaccgaagcaaggaacaacagccggaacaaggagccacaccgcccaaccacaggcacac

SEQ ID NO: 206129 - RNA, 66 nt, Homo sapiens
caaacgcagcaccaagaaaacagcgcgggacaaccaacacaaccaaagagaagaaaacgcaaagaa

SEQ ID NO: 206130 - RNA, 76 nt, Homo sapiens
cagcaggcagggagagaggggcggaaagcagacaggccgcaccaacaagaagggcagagcagcccccgagcgagcc

SEQ ID NO: 206131 - RNA, 79 nt, Homo sapiens
ggcccaaaccgcaggagggcggcccccggccgccaaccggcgccgggggacggcgcggacacaccggaacaaagaaaac

SEQ ID NO: 206132 - RNA, 70 nt, Homo sapiens
ggcaggaacgggcgaacagggcggagaacggaaaagcaccaggaagcagagaggaccgcagaagggaagg

SEQ ID NO: 206133 - RNA, 66 nt, Homo sapiens
ccccccgcgcggcgccgccaacgcgcccccgagacaagcaaacaacggaaaggagggggaagcaac

SEQ ID NO: 206134 - RNA, 80 nt, Homo sapiens
gccaccagcgggagaggaagcgaaaacgaccgggaccggcaagccgaagcacgaggcccagcaaagcgagacggaggggg

SEQ ID NO: 206135 - RNA, 51 nt, Homo sapiens
ggccaccaaacccggacagggaaagaccaaaggcagaaccaggcccaggcc

SEQ ID NO: 206136 - RNA, 82 nt, Homo sapiens
gaggggaggcaggcgcggcagacggcgacagggcggcggcgccaggcagggcgcagaacggccgagcgaccaggagaggagc

SEQ ID NO: 206137 - RNA, 78 nt, Homo sapiens
acaccccaggaaaaagacagcccgcagcacgaccagcaggaacgaacaagcacaagcccggcggagcccaccaccacg

SEQ ID NO: 206138 - RNA, 84 nt, Homo sapiens
ccccacgaggccagggccgcgagcgccgagccgcgcaggaaagaagcgaccgcggcggcgggcggagaacggaaaagcaccagg

SEQ ID NO: 206139 - RNA, 70 nt, Homo sapiens
ggggacgcggacgcacgcaaccacgacggcagagacaggagaggagagccacgcccacagacccgggcga

SEQ ID NO: 206140 - RNA, 70 nt, Homo sapiens
gcaacccccccccggcgccacaagcgagccaggccagcagccgaaccagggccggagcgagggagagcag

SEQ ID NO: 206141 - RNA, 74 nt, Homo sapiens
cagcggcaaaagcccgccgccccggggacaagaaacagagcaaaaaccggaaagcacaggcacaggagaccacc

SEQ ID NO: 206142 - RNA, 77 nt, Homo sapiens
ccggaacgaaagcaggacggaggagcgaccaccgcgagaaccagccaaaacacacgaacagggaacaagaaacaccg

SEQ ID NO: 206143 - RNA, 42 nt, Homo sapiens
aaagacaaaggaaagccgagccacacaggacaggacccaaca

SEQ ID NO: 206144 - RNA, 66 nt, Homo sapiens
caacaggagggcggcggcaagggggcgaccaccggacagaacaaggccgaaaagcaccggaagaaa

SEQ ID NO: 206145 - RNA, 53 nt, Homo sapiens
ccccacagcagcaggagaaacacaccaaccccaaccgccagccagccgaagaa

SEQ ID NO: 206146 - RNA, 82 nt, Homo sapiens
gcagagagagagcgcgagagaggagagggcagacggacaagagcgcggaacaggacgccccgaaccgaggccaaaagaaagg

SEQ ID NO: 206147 - RNA, 72 nt, Homo sapiens
cggaaaccacgaacacagcggagaggggccagggcaagggaagagcggccaagagagaaacacaagagaaca

SEQ ID NO: 206148 - RNA, 79 nt, Homo sapiens
cggaacagcaggaaaaaaggacaaaaggcgaagggaaaaagaaagcgcgcggggggaccacagagagacggggcaccag

SEQ ID NO: 206149 - RNA, 67 nt, Homo sapiens
aggcccggcaacagaagacaccaccgagcccaaccggcaccacagcacaacacccaccagcaaaagc

SEQ ID NO: 206150 - RNA, 66 nt, Homo sapiens
gcgagaagacaccggcagcgagacgacgggaccgaaggaccccgccagagacaaccgagcgccagg

SEQ ID NO: 206151 - RNA, 67 nt, Homo sapiens
gaaaaaagagaaaaggggacgaccgaagagaacgcccccccaaaggccccggacgggcaggcagcca

SEQ ID NO: 206152 - RNA, 73 nt, Homo sapiens
cacgaaaccgaaacacgcagaaagagaggcaaaccgacaccagcgacacaagcgcgagggaaccacagaggac

SEQ ID NO: 206153 - RNA, 82 nt, Homo sapiens
gcgcccccgcggggcgaaccccgggcagcccgggaaacccaagcagaaagaacagggaagaagcgcgagcgaagcaggggca

SEQ ID NO: 206154 - RNA, 54 nt, Homo sapiens
aagcgccagaaaacaacggaccaaagacagagacaagcggggaagaacggcgga

SEQ ID NO: 206155 - RNA, 58 nt, Homo sapiens
agacagaagagggagaccggagaccgacgacggcagcacaccaggcccaggaaagccg

SEQ ID NO: 206156 - RNA, 72 nt, Homo sapiens
ccgacgaccacaggaagcagaccccgaaccagcccaaaaccggaagcagacgaggggacaacgaaggaggca

SEQ ID NO: 206157 - RNA, 61 nt, Homo sapiens
ccaggagcagacagagaagcgcgcagcaggacccgaagaggcagaagccaccaagcgggcc

SEQ ID NO: 206158 - RNA, 76 nt, Homo sapiens
cggacgcgggacggaagcacacgcggcgaggccaggagaaaaccaggcagcacgcccgggccccccacaccggcca

SEQ ID NO: 206159 - RNA, 83 nt, Homo sapiens
ccgggaggaacggcccggaaacaggaggaccccgaccgccagggcccgccagcgacgcaaggacagagaggagccgcccagcc

SEQ ID NO: 206160 - RNA, 78 nt, Homo sapiens
agccccgagagcggaacagggacccaggccgagccccggacagcagccccaggcccagcggccaggcccggccgaagc

SEQ ID NO: 206161 - RNA, 72 nt, Homo sapiens
ggaggaggcaacgccgcggagaagacagaggagccagaccaagagacagcacaggcgagcgagcagagacac

SEQ ID NO: 206162 - RNA, 67 nt, Homo sapiens
ccagagagacggggcacgagcagaagggagcgcccgcccgcgcacacaagcccagggccacaaagga

SEQ ID NO: 206163 - RNA, 47 nt, Homo sapiens
cgccggccgagaaggcagaggcgaggaaggggacaggggcaccccgc

SEQ ID NO: 206164 - RNA, 78 nt, Homo sapiens
ggaacgcggggccagggagcgggacgggaggcgaacggcgccacgcagggccaggcaaagggaggacgagacacagac

SEQ ID NO: 206165 - RNA, 78 nt, Homo sapiens
ggcgcccgacccaacgcggcgacggcgggcgcgcacgacgacggcggacgcagcggcgggggcgggaaccccgccaga

SEQ ID NO: 206166 - RNA, 75 nt, Homo sapiens
gggaaaggggcaaaggaagcagcagggcgaccggcgcccaggagcgcaggccggggcccgggaggacccccaacc

SEQ ID NO: 206167 - RNA, 81 nt, Homo sapiens
ccagccgccccagccagccgcaacccagccagccaccgccaccgcgaccacacggaagcacagcccgacagaccgaagaaa

SEQ ID NO: 206168 - RNA, 70 nt, Homo sapiens
ggccaagagaagagcgaacagccaccggcccggggcgaaacgccagggagaaacagcaagccaaaaggaa

SEQ ID NO: 206169 - RNA, 83 nt, Homo sapiens
ggaacagcacaagaggcggcggcaccggccagcgcagcacaggggccacacccaccagcaggcagcaagaaaaccaaccgggg

SEQ ID NO: 206170 - RNA, 75 nt, Homo sapiens
ggacaaggcacgccagacggagacgacaccaagaggaaaaaccaggcaaggaagcacaagcgacaagaggagcgg

SEQ ID NO: 206171 - RNA, 71 nt, Homo sapiens
ggggaccgcacacccaagacaaagcaggaagcacggggaagaggcggcaaaaacaaccagagagcggcaga

SEQ ID NO: 206172 - RNA, 71 nt, Homo sapiens
aaaacggcgaagcccaccagacggagcgaaccaccgaagaaggcccggaggcgcccgcgggccagcgcgcc

SEQ ID NO: 206173 - RNA, 79 nt, Homo sapiens
gcaggagagggcccgacaacgaagagagacagggaaacgaaaaccaccgggcaccacgagcccacgagagaggacagcc

SEQ ID NO: 206174 - RNA, 77 nt, Homo sapiens
ccggagacagccccacagccccgagaccggacgcccagacaggcgcccagcgcccggagcacaggacaggcggaaac

SEQ ID NO: 206175 - RNA, 73 nt, Homo sapiens
ccacaaaccacgacagcagagggagcagaaacgggagaaaggaaagaagaaggcaacaagcaaggaagacgac

SEQ ID NO: 206176 - RNA, 79 nt, Homo sapiens
cgcgcgcgcccgccacggcgccgagccgcggccgagggcaacgaggaacaggccaagaaacaacacagccaaggccagc

SEQ ID NO: 206177 - RNA, 78 nt, Homo sapiens
caccagggcgccccgcgagagccaggaagccaggagcaggacgcagaagacgcagggccaaggcagagaaaggacgcc

SEQ ID NO: 206178 - RNA, 65 nt, Homo sapiens
gaagcccaggagggaaagcgcccgcggagacaaaaacaggaagagaaggagggagccccaaggca

SEQ ID NO: 206179 - RNA, 44 nt, Homo sapiens
agggcggcccgaagcggaagcgaggaaaagccacagccccggaa

SEQ ID NO: 206180 - RNA, 80 nt, Homo sapiens
gagcacgcgcgggagcagcagccgcggcgagccgcacagggcaacacacgcaccgcacggcccccgcccacaaagcgcca

SEQ ID NO: 206181 - RNA, 71 nt, Homo sapiens
cgaagagaagacccaacacgcagacgcccaacagaggaaggccccgggggcccgggaaggccaccgccccc

SEQ ID NO: 206182 - RNA, 65 nt, Homo sapiens
acaccgaaggcgacccacgggggccgcacgacacacgcaggaggaagagcaagcaggcccgaggg

SEQ ID NO: 206183 - RNA, 69 nt, Homo sapiens
gacggggaaaggaaagcagcccgaaaagaaggacggaagcgcagggcgccaagaaccagagaagcccgg

SEQ ID NO: 206184 - RNA, 53 nt, Homo sapiens
gcccgaacaaggccccaacaggggggccgcaaggccaggcgcgcagaggcacc

SEQ ID NO: 206185 - RNA, 52 nt, Homo sapiens
aagaaaaagcggcggcccagggagaaccaggaacagaaagacaacggacaag

SEQ ID NO: 206186 - RNA, 73 nt, Homo sapiens
gcggagcggaggcacccgaagcgcccggggagaccacaagaagggcgggggccccgcagacccagcagcgggc

SEQ ID NO: 206187 - RNA, 72 nt, Homo sapiens
cgaaggggagccacaggagagcgcccaggaaagaccacagcaagaccacgcccccagccgggggaccaggcc

SEQ ID NO: 206188 - RNA, 97 nt, Homo sapiens
gcagacgggagcgcaaggcgccccaaggccagacaaaacacgcagccgggcgcgaagagcgggggcaacccaggcaagaacgggacgcgagggcgga

SEQ ID NO: 206189 - RNA, 68 nt, Homo sapiens
gcaagaagaagcagaaagacaccagccagcccgccaagcccgaaggacacacaaagaaaccgaaaagc

SEQ ID NO: 206190 - RNA, 59 nt, Homo sapiens
aaggaaaaggaaaacacagcaaaggcagaaacaagagagagcaagaaagaacaggccag

SEQ ID NO: 206191 - RNA, 105 nt, Homo sapiens
gcgcggcccgggcccggccgagcgggcacgagcggaccccgcccaggccgggagcgcacaagagccagagccgccagccccaagcaaagacacagaagagaggaa

SEQ ID NO: 206192 - RNA, 78 nt, Homo sapiens
agagaagaaaccaaagaacggaaaaaaacagcggagaagagaaacagggagcgagcacaaacgacacacgcaaaccac

SEQ ID NO: 206193 - RNA, 80 nt, Homo sapiens
aggagacgagacgaggccggcaacccacagccagcaaagacccaaaacgcaagccaagaggagccacagccaagaggccc

SEQ ID NO: 206194 - RNA, 80 nt, Homo sapiens
acagcagcccacaagcgagacccaacacagaagggaacaagcggacagaaaaagagaacaagccccggccagaaagacca

SEQ ID NO: 206195 - RNA, 78 nt, Homo sapiens
cgggcggcggagcggcggaagaaggaacgcaaggcggggaaaaaaaggcagcacacagacgcagcaacgggcacgcaa

SEQ ID NO: 206196 - RNA, 79 nt, Homo sapiens
cgcagagcagcaaggcccaaccagacgcagagccggggcaccacaacgacacacccagcccaggaaacccaagaagaaa

SEQ ID NO: 206197 - RNA, 73 nt, Homo sapiens
cgccaacggcccaccacccagggccgcgcgcacggagaaaagagccggaagcaaaccccaggaccaaagcaaa

SEQ ID NO: 206198 - RNA, 75 nt, Homo sapiens
gccacgacaaaagcggggcacgacaaaagaaccagaaaaagagaaggaggcgcgagacagagcgcgaagcgggcc

SEQ ID NO: 206199 - RNA, 80 nt, Homo sapiens
cggacgccgaccggagggggccggggagcccgaccggaccgcggagccaaccgaaaaccagggcgaaaaaagaaagcaag

SEQ ID NO: 206200 - RNA, 67 nt, Homo sapiens
agaaaccgcagaggagagggcagccacagcaggaacaccaaccaggagcaaagaaaaaggaagaaac

SEQ ID NO: 206201 - RNA, 48 nt, Homo sapiens
cagacggacagacccacaacaccaggcgccagaacaaagggcaaagga

SEQ ID NO: 206202 - RNA, 70 nt, Homo sapiens
gacccgggaccagcaggagagacaaaggcaacggaggacaccagaccgaagaccgcccccgacaaagaag

SEQ ID NO: 206203 - RNA, 70 nt, Homo sapiens
gccgcgcgcgcgcgcgcgccgggccagcacaaggcggccgaccaagggaccagcgcagcacccgaacgcg

SEQ ID NO: 206204 - RNA, 88 nt, Homo sapiens
ccaccggagagaggccgcgccgggcagaggaccagaggagcgagagcagcaagaaccacacccagcagcaagcagcggaagggaaacc

SEQ ID NO: 206205 - RNA, 51 nt, Homo sapiens
cggagggagagggcagcagccaggggacgagcagcccccgcgcgcgggcgg

SEQ ID NO: 206206 - RNA, 75 nt, Homo sapiens
gggcacgaagaaggccagcgggccaggaagcgcaccaggagggggcgaggaagagacaggcgggggagaagaagc

SEQ ID NO: 206207 - RNA, 91 nt, Homo sapiens
cgccgcccccggcccgaccgccgcccgacgccacgcccggcccggccgcgcccgcggaaccagaccagggccggccaacaaaagcccgggc

SEQ ID NO: 206208 - RNA, 70 nt, Homo sapiens
cgacgggcacccacagacggcgaaggcagccacagcgcccagagagggagaagaaccaggaggccagcgg

SEQ ID NO: 206209 - RNA, 40 nt, Homo sapiens
cggcgcgagccaagcgcgcgccgccaggccagcagaaaac

SEQ ID NO: 206210 - RNA, 78 nt, Homo sapiens
gcaagaacagagagagaggggacagacgagagaacgagggagccaaggcgacccacaggaaacgggagcggggggaag

SEQ ID NO: 206211 - RNA, 55 nt, Homo sapiens
caacacccagcagccagggaaccccaggcagaaaaggcggcccggcagccacgga

SEQ ID NO: 206212 - RNA, 43 nt, Homo sapiens
gacacgaagaggaggaagcccagggaaggaggagacgcgaagg

SEQ ID NO: 206213 - RNA, 66 nt, Homo sapiens
agcaaaaaaaagacacgggaccgaggccgaggagcgaaggacaggacggcaagaagcaagaagaca

SEQ ID NO: 206214 - RNA, 62 nt, Homo sapiens
gaacagagccacccaagaggaaacaccaagaaccaaaacgcgaaaggagcaaaggagaagga

SEQ ID NO: 206215 - RNA, 85 nt, Homo sapiens
cagaaagcagcccaaggggaggagagccacgcaggaccacagcgcagcaaagaacacagagggaaggcagagccggggacccaga

SEQ ID NO: 206216 - RNA, 82 nt, Homo sapiens
gcccgaccggccgcgacagcgaacagcgcggccgcagacaaaggagagaggcaccaccagaccaaagagagcgagaaccaaa

SEQ ID NO: 206217 - RNA, 63 nt, Homo sapiens
ggggagccggcggaagccgaggacgagacccgccgggggaggcacgacgcgggccggaagcgg

SEQ ID NO: 206218 - RNA, 76 nt, Homo sapiens
gccacaacaccggcaggaaccaccaggacagaaggaaaaggaagcaagagcaaagaaggccacaagagcagcaaaa

SEQ ID NO: 206219 - RNA, 76 nt, Homo sapiens
gaggagcagaagagcccaaaaccaacgaaccaaaagcaaccgcgaagagcaggaccgcacaggcgcaggcgcaagg

SEQ ID NO: 206220 - RNA, 78 nt, Homo sapiens
gcacagaaaggagacggagcagaagaaaaagggagagaccagaggaagaagccccccagagggcggccgaaacagaag

SEQ ID NO: 206221 - RNA, 71 nt, Homo sapiens
agggaccaggaaccagggcacccaacaaggccgccgggcaagcaaagccccagcacggaacaagagaccca

SEQ ID NO: 206222 - RNA, 64 nt, Homo sapiens
cgccagcacaggaggaggaacgcacccgcccagcgacccgccgccgacccgggggcagcagggg

SEQ ID NO: 206223 - RNA, 54 nt, Homo sapiens
gccaagcaggcagaaccagccacagcagacgggggcacaggcagagggaggaga

SEQ ID NO: 206224 - RNA, 68 nt, Homo sapiens
cagcagagcgacagagcccccggaaagagccgcccgagagacaaacccccaccccgaaaaccgaaccc

SEQ ID NO: 206225 - RNA, 80 nt, Homo sapiens
aacagccaaaggggacacccggaggcggcgcagcagcaccgggagaagagcagaggaggccgcagaagaacgagaccaag

SEQ ID NO: 206226 - RNA, 63 nt, Homo sapiens
acacggaagaaaagagcgaagacagcccccaccgaggccagagagccaccaaagaagaccaga

SEQ ID NO: 206227 - RNA, 78 nt, Homo sapiens
gcagggaacagcgcgggccgccaaggcccccggccggccccgcccccggccgagcgacggacagagccagaggacccc

SEQ ID NO: 206228 - RNA, 73 nt, Homo sapiens
aacgaaaaaaacacagaaacaaaggagggaggaaacaaaagcagaagagcagcgcaacaacccgaaagcccca

SEQ ID NO: 206229 - RNA, 72 nt, Homo sapiens
aagcggcagagaaagaacccaggagcccccgcagggccccggagcccacacggagcagcccgagagccggac

SEQ ID NO: 206230 - RNA, 42 nt, Homo sapiens
gagcggacggaaagcaaaccaggcgagacagcaggagcacca

SEQ ID NO: 206231 - RNA, 72 nt, Homo sapiens
accggcagcacgccccgggacgggggaggacaggagacaggaagagagaggaggacagaggacgagcacgac

SEQ ID NO: 206232 - RNA, 72 nt, Homo sapiens
ccacgcccgagcaaaaaagaaaaggccccaacagagccccagcaagggggcggggaagagacacagaaggga

SEQ ID NO: 206233 - RNA, 59 nt, Homo sapiens
cccggaccaacagagagaaagccagaaaggagcagcaggaccgagagcagaacaagacg

SEQ ID NO: 206234 - RNA, 53 nt, Homo sapiens
caaccaaaagggccagggagaaccacaaagaacaagaggaggaagaaaagggg

SEQ ID NO: 206235 - RNA, 69 nt, Homo sapiens
caccaaggaaagagaaggcagaaaaaccgagcagagcacaggccagcacaagccaggccccaagcgagg

SEQ ID NO: 206236 - RNA, 63 nt, Homo sapiens
cggaacggcaccacaagcaacacagcacccggcggcaaaccaaacaaaaccagagcacgggga

SEQ ID NO: 206237 - RNA, 68 nt, Homo sapiens
gaaacaaagacggaagggaagaccgacaccggcgcagccagcgaacccacgaccgacggcagggcaaa

SEQ ID NO: 206238 - RNA, 43 nt, Homo sapiens
gcccgacagggcccacccagcgaaacccaaccgaaggaaccag

SEQ ID NO: 206239 - RNA, 82 nt, Homo sapiens
caaacccaggaaaaagccaagagagaccggagaacgcgacagaacgccaaaagacgaacacaaagggaaagaggagaggcac

SEQ ID NO: 206240 - RNA, 66 nt, Homo sapiens
accgcggaagaagaaagccaagcaaagaaggcccgccagcaacagcaggagcgggaagagggacga

SEQ ID NO: 206241 - RNA, 59 nt, Homo sapiens
cccccggccgccggcagcggccgcgccgcgccacccaagcccggaccaagagacgagga

SEQ ID NO: 206242 - RNA, 81 nt, Homo sapiens
gcaacccacacaagcgaaggcgcgcaccggaagcaccagcgaggaagaaagaaacagagcccaagaccacaaacaaaaaag

SEQ ID NO: 206243 - RNA, 78 nt, Homo sapiens
cggagacgcggcccggaccagccacgggagaagggcagcacggcagaaaaaagccgcaaaggcgaagcgcacaaaacc

SEQ ID NO: 206244 - RNA, 72 nt, Homo sapiens
caggaggcggcgcaagaagacgggagccggcacgccggagagcgaggagaccgaagaaaaggcaagccacac

SEQ ID NO: 206245 - RNA, 71 nt, Homo sapiens
ggcggacgagaagagaacacaccggggaagggcaccggggccagaacgcggagacggacaagaagcgagcc

SEQ ID NO: 206246 - RNA, 75 nt, Homo sapiens
cggagcgaccacagacccgagcgagcccacaccgccaagcagcggccacgacacgaaggcagcgggagcccccaa

SEQ ID NO: 206247 - RNA, 54 nt, Homo sapiens
cgccgcgacacccccgcaccggggccggccaggccccaagcgaggaagcacaac

SEQ ID NO: 206248 - RNA, 80 nt, Homo sapiens
aggcagcggccaaacaaagcagccaaccaacaacagcagaacaagaagggcaaccaggggggaaggagggagcggagaac

SEQ ID NO: 206249 - RNA, 84 nt, Homo sapiens
cgacacgagcagcgcagggaagcaagagcaagaggccacaagaggaagcgaagaagaggacgccgccagcgagccagcagggag

SEQ ID NO: 206250 - RNA, 62 nt, Homo sapiens
aaaacaccaaccaaaagacaccggacacgcaggacgccgccagccaccggcgcgaagccaga

SEQ ID NO: 206251 - RNA, 81 nt, Homo sapiens
aaacacgagcacagcaagggcgcacgaggcggacccgacgaagaccaggcaggcccacagcgccacagaaccgcccaaaaa

SEQ ID NO: 206252 - RNA, 81 nt, Homo sapiens
aggccccaagcccgaggcccagaggaggagggaggccgcagcggagacgagggcggcgggagacccccgaccggcagcagc

SEQ ID NO: 206253 - RNA, 38 nt, Homo sapiens
gccagcacgggggaccgaccaagccggcaccaccccag

SEQ ID NO: 206254 - RNA, 36 nt, Homo sapiens
ccgcgcgccgcgcgggcggggcaaccaaaagccaga

SEQ ID NO: 206255 - RNA, 71 nt, Homo sapiens
ggcgacagaagcccaaggcgaagcccagaagccaagcacgaaaacaggaaggggaagaagagcgagaagag

SEQ ID NO: 206256 - RNA, 72 nt, Homo sapiens
aagaaaagccaaaaagcgaaacagcagagaagaaagaaggagaagcgaaaaaacaacccgcgcacagaaggg

SEQ ID NO: 206257 - RNA, 58 nt, Homo sapiens
aaaggccacgggaggaagacccaaaaggggaaaacgacccccaggaaaaagaaaagga

SEQ ID NO: 206258 - RNA, 81 nt, Homo sapiens
cagagggagccaggcagagacccgggaaaaggagaagagaaggaagccaaggagcccgcaaccaagggcaccccaccacca

SEQ ID NO: 206259 - RNA, 91 nt, Homo sapiens
caggcggaggccccagggaagcgcagaaagcaggcgaacccgcggcgcaaaacggcccacggagacagaaccagcccccgggccgggggcc

SEQ ID NO: 206260 - RNA, 69 nt, Homo sapiens
cgcagacccccaagaggaggacaaaaggaagacccggacacggagaaacacggaggaagaaaacccaga

SEQ ID NO: 206261 - RNA, 70 nt, Homo sapiens
ccgcgggaccagaacggccagagccgcacaaccacaggggcccgacaagagcagacacaagagaaagacc

SEQ ID NO: 206262 - RNA, 74 nt, Homo sapiens
agcaccgacacgaaaacccggacccgcaccgcagcggcgaggaagaaacaaggcgggccgcgagaccaccaggg

SEQ ID NO: 206263 - RNA, 75 nt, Homo sapiens
aacacgacggagacggggcgaaacacccaaaaggcagagggaagcaacccaggaagaagaccggaagaaagacgg

SEQ ID NO: 206264 - RNA, 87 nt, Homo sapiens
ggaaaccaaaaagacggccaagggccacaaaagaacaacaaccagacgaccgaacggacagaccggaaccaagccggaccaggaggc

SEQ ID NO: 206265 - RNA, 33 nt, Homo sapiens
cacgcggaaacacggcacccacaaaagcgaaaa

SEQ ID NO: 206266 - RNA, 75 nt, Homo sapiens
aggggggccagaggggagcacagagcgagaccaggaaagaagggggcagaagaggggaaaagagggccggacaga

SEQ ID NO: 206267 - RNA, 69 nt, Homo sapiens
cgaagacaaaccaggaagcaggagccaagaagcaaagggagccgaaccaacaggaaacaccaaaagaag

SEQ ID NO: 206268 - RNA, 86 nt, Homo sapiens
gacaccgcgacaccccaacaaacaccagcgcggccggaaccaaaaagaagccccagagccggggccaggagccccaagcgccccag

SEQ ID NO: 206269 - RNA, 73 nt, Homo sapiens
acgacgggccacagcagccggcggcggcagagggcggaggccccagggacacaaaccagaaacgcaagaccgg

SEQ ID NO: 206270 - RNA, 67 nt, Homo sapiens
gcagcgagcccgggcaagagaccgcgcgggggaagcagaggggaaaggacagcccaggccaagacag

SEQ ID NO: 206271 - RNA, 81 nt, Homo sapiens
cccgaggcgaggaggagcgcggcggggacaccagccaggagagaaccagaccgggcggagacaagccagccggacgacagc

SEQ ID NO: 206272 - RNA, 79 nt, Homo sapiens
acagccagaacggaaaccacggacaaacaccccaagaaaaagaagcaagccccggaggccgagaagcaaggcggacccc

SEQ ID NO: 206273 - RNA, 56 nt, Homo sapiens
agcgaccacccacacaaacccgggacgggccgagagagcccacaggcggggagcgc

SEQ ID NO: 206274 - RNA, 76 nt, Homo sapiens
gcgccggaggcaggcaggcgacaggcagaggagcggcgggaacgggagagaggaggccgccccaggccaggaccca

SEQ ID NO: 206275 - RNA, 79 nt, Homo sapiens
ggaagaaaagaaaggagccgaagaaccacggaaggaggggcagagggaaaaagaaaagaaacaagacaaccagaaggag

SEQ ID NO: 206276 - RNA, 65 nt, Homo sapiens
aggccgcagagcggaaccaaaggacaaggcaacaccgggcgcgcacagaagggacaacggaggaa

SEQ ID NO: 206277 - RNA, 48 nt, Homo sapiens
aagaaaacaaacagcaaccaaaaccgacggaggaagaccccagagaaa

SEQ ID NO: 206278 - RNA, 77 nt, Homo sapiens
ccggcggccacgcccgccggaccgcgcccaggccccccagacacaagacacccaagaagcccagcagacccaacgcc

SEQ ID NO: 206279 - RNA, 73 nt, Homo sapiens
gcggcgccggcggcgcgcgacccccgcgcagccaaaccagaaaggggacagcggcgggcagggagcacggaag

SEQ ID NO: 206280 - RNA, 91 nt, Homo sapiens
gcagaggccaggaggacgaggagagacagaagaagcggaggccggcaaagccaaggaagcagcgaccacgccacaccacagcagcagaaga

SEQ ID NO: 206281 - RNA, 70 nt, Homo sapiens
ggcggagcggagggccgagggggacccggccaccccgccaccgagcccagcccgagcacgcggcggaccc

SEQ ID NO: 206282 - RNA, 63 nt, Homo sapiens
agacacccccaccccaccagcaaagccggacacaagagggcaagaaaggcgcgacgggccgaa

SEQ ID NO: 206283 - RNA, 63 nt, Homo sapiens
acgaggcaacgccccagacaggaagggaaggggcggagacgggcggaacgcaggaggccagag

SEQ ID NO: 206284 - RNA, 73 nt, Homo sapiens
caggcgacgcagcacaaaaggacgaaaacgaagagggagaaagcagcagggaacaagaggacagaaaaagagg

SEQ ID NO: 206285 - RNA, 93 nt, Homo sapiens
aagaagggccgggggcgagccggagcgaccccggcaggcagaaaagaaccaggaaggaagcaggcaaaaccagaaccacccagaacacaacaa

SEQ ID NO: 206286 - RNA, 79 nt, Homo sapiens
aaagagcggggcccagggaaaacggagaaaaaacgaaaaaccacggcaagggagcccgcgagccacgacccccgcacac

SEQ ID NO: 206287 - RNA, 61 nt, Homo sapiens
gaagacgggaacccggcgcaaggcggaaccggacaagagaaacaggcccagcacaaaaaaa

SEQ ID NO: 206288 - RNA, 71 nt, Homo sapiens
agagccaaaccagaagaggagggcccagaagaaaaagggcaaaggagggcccaaaaaaggcccggacacaa

SEQ ID NO: 206289 - RNA, 58 nt, Homo sapiens
agcgcgcgccgcgcccggaccccagggacccccccgcggcaggaacgcacccggcggc

SEQ ID NO: 206290 - RNA, 73 nt, Homo sapiens
aagaggaagagagaagaagaagagaggaagagagaagagagaacgagacagccaacaggacacacacaagaaa

SEQ ID NO: 206291 - RNA, 77 nt, Homo sapiens
cgcacaccaccggacaaccgacaaaaggccacccagcaacgcaggccgcacggcaggcagccgaccagggaagccag

SEQ ID NO: 206292 - RNA, 56 nt, Homo sapiens
gaccagcgaccgggcagagggccgaggcaggcaggaggagcaggagaggaagggca

SEQ ID NO: 206293 - RNA, 33 nt, Homo sapiens
accaccgaaagcggcaaccaaaagcccaaagga

SEQ ID NO: 206294 - RNA, 79 nt, Homo sapiens
cgcccgccaaagcgcccagccaacgacccacgcagccgcccgcacagcagagacaaccaggccccaggagaagcggacc

SEQ ID NO: 206295 - RNA, 74 nt, Homo sapiens
aagacgcaaagggacaggaggaggagagagagccgaagacccacccagaggaaaaggaggcccggaagagacga

SEQ ID NO: 206296 - RNA, 85 nt, Homo sapiens
cagcgaagaaaaaaaagcaaaacaaaaaagaggcgaagacgagaggaacgcaggggaaaggaaaagccgcccggacaagagccgg

SEQ ID NO: 206297 - RNA, 72 nt, Homo sapiens
aagaacgcagggaggaaaggagaaagagagacaagcaggggaaagagaagggaggaagaagaggggcaccgg

SEQ ID NO: 206298 - RNA, 66 nt, Homo sapiens
ggacgagcgagcaaggaccgcccaagacgacagacagaagaacgaacgaaggagaacccaacaacc

SEQ ID NO: 206299 - RNA, 84 nt, Homo sapiens
acggggagagccaccggccccagcagaccgaaggacacgcagggaccgacaggccaaagagaccggcccggcacaggagaccag

SEQ ID NO: 206300 - RNA, 71 nt, Homo sapiens
gaaagacggaggaaaggacaagcaggccacgagaaccgaagacagaggcacaaaaggagaaagcagaagaa

SEQ ID NO: 206301 - RNA, 69 nt, Homo sapiens
gaaagagcccaggacaacacaggcaaagggccagaagcaccgcagcggacagcgaacggacggagaacc

SEQ ID NO: 206302 - RNA, 79 nt, Homo sapiens
ccggaaacacgacaagccaaagcaacaacaggccaacgcccggccagcgccacgcgagcgcgcaagggcggcgcgcccg

SEQ ID NO: 206303 - RNA, 68 nt, Homo sapiens
cgaacagaggcacccgaagccaaagggaaaaggccggagaaggcgacggccgaaccacaaagcaaacc

SEQ ID NO: 206304 - RNA, 106 nt, Homo sapiens
gggacaagaacgcagccgccggccgaccaccggaacggacagcccccccaggaacacgaggacccaaagaacaaacccggagagaagaaaaccccagcagggcgcc

SEQ ID NO: 206305 - RNA, 78 nt, Homo sapiens
gggcagcacggaaccacacagggccgccaccaacagagaagacagagcaccaacgagcacaagcagcgcgcccggcgg

SEQ ID NO: 206306 - RNA, 71 nt, Homo sapiens
cggcccccacaccacacagagagcgagagcggcagcccacaagcaggaagaccagccccaggagggaaaca

SEQ ID NO: 206307 - RNA, 75 nt, Homo sapiens
gaaaaagccgcacagccaacgcggggagaagaggaccagacacaagcaagcgcagccaaagcgacggaagaagag

SEQ ID NO: 206308 - RNA, 70 nt, Homo sapiens
cggggcgcccggcgccggccgagaaggcagaggcggacagggcagaccgccagcagcacagcaagccaca

SEQ ID NO: 206309 - RNA, 76 nt, Homo sapiens
cgggcaagcccagagccgccggaaggcccccggcgcgagacccgccggaggaacgccagaaagcagcccaggccaa

SEQ ID NO: 206310 - RNA, 84 nt, Homo sapiens
aggcccaaaggggaagccagcggagccaggggcagcgcggcccgggccgagccaggcagccagggaaagaaacaagaagaaaag

SEQ ID NO: 206311 - RNA, 80 nt, Homo sapiens
gggcagccagggcgggaaggcggaccggaagcgagcaggagcagagcggaagacccaccagaaagagcaaacaacaggaa

SEQ ID NO: 206312 - RNA, 83 nt, Homo sapiens
agcaggagcagacgcgcagggagcaacagccaagccaaagcccgcccccgaggcgcaggcccccggcgccggagacacggccc

SEQ ID NO: 206313 - RNA, 83 nt, Homo sapiens
ggggaccgcaggggcgcgcgaaggagcggaagaaggcaggccaaaccaccgaccagagaacacaaggaacgaaaggaagggaa

SEQ ID NO: 206314 - RNA, 54 nt, Homo sapiens
ggcgaggggcacaggagccgcgcaggcggacccggacgacaccaaagagacccc

SEQ ID NO: 206315 - RNA, 101 nt, Homo sapiens
gacggccacaccacccagaggccggcccaccggggaccagccgccccgacagccggcaggaagcgcgagggcgaggcccccagcaggagacggcacacccg

SEQ ID NO: 206316 - RNA, 74 nt, Homo sapiens
gcccgccgcagcgcggcccagaccacacagcagcagaccagccgcacccacgcccccggggaagccgaagaggg

SEQ ID NO: 206317 - RNA, 68 nt, Homo sapiens
gcggccaaccggcccaaggaccccgccagcccaagaagcgaggacagcaggcccagaagcacagaaaa

SEQ ID NO: 206318 - RNA, 54 nt, Homo sapiens
cgcaaaaagggccgggaaacaaaaggcgaaccggggagacgagaaaacagcgag

SEQ ID NO: 206319 - RNA, 91 nt, Homo sapiens
gcgcgcaacggaacagggaacccgcgaccaagcgaggcggacccgaagcggaccccgaggaagaaacccaaaggacaccagagcagcacgc

SEQ ID NO: 206320 - RNA, 112 nt, Homo sapiens
gaagcggccggaggcagaacggcagcgaagaccagaccagagggaagagggaaccgccgacccaccccagcccaaccacagcaccacacgggaagggccccaggggaccaag

SEQ ID NO: 206321 - RNA, 81 nt, Homo sapiens
agacaacccaagaaaaggcaacggacgacacaacaaaagacacccagaaggcaagcaccacagggcagaagcggaggccgg

SEQ ID NO: 206322 - RNA, 41 nt, Homo sapiens
aacgaaaagcgccagaaagacacggccaaaagaagacccag

SEQ ID NO: 206323 - RNA, 88 nt, Homo sapiens
cggcgcccaacaaccacccacagagcggaagaggcgccgcgacgggaagaggacagagcgccgcgccgggcagcagcgccagaccggg

SEQ ID NO: 206324 - RNA, 77 nt, Homo sapiens
gaggggaccggagccgccagcgcggccagggaaccaagaccaggacaaagaagacccggagagacaagccggaggac

SEQ ID NO: 206325 - RNA, 79 nt, Homo sapiens
gccaggggccggccagagcaggaaaaaagcgaaggcaacaggagcgggaaacggagacacaaacaacaccacccgaacc

SEQ ID NO: 206326 - RNA, 61 nt, Homo sapiens
cggagagggacccgggaaaagaacaacgaccgcagacccaacagaggaagccgcaagaaac

SEQ ID NO: 206327 - RNA, 73 nt, Homo sapiens
gaacaagccgagagggaaacaacccacgaaccaccgccgacggaaagcaacgggaccaccggcgcaggccgcc

SEQ ID NO: 206328 - RNA, 42 nt, Homo sapiens
gacaaaccagccgggcccgagaggcaccccaaggaggacaag

SEQ ID NO: 206329 - RNA, 82 nt, Homo sapiens
agggacaacaggcaggagaaagggagcgcaccccaggggaccaggaaggcacacggaccgcaaaaacaaaggaaagaaagcg

SEQ ID NO: 206330 - RNA, 74 nt, Homo sapiens
aggcgcgaccgagaccccgccccccacaacgggagagcgcgggacacaagggcgcaaccaaagcaccagacccc

SEQ ID NO: 206331 - RNA, 61 nt, Homo sapiens
caaagagcgcacagaacaggagcacgaagaaggagaaagacaaagccccgagaaagaccag

SEQ ID NO: 206332 - RNA, 81 nt, Homo sapiens
ggcagaaagaaaacgaagaggcaaagagaaaaacacacccagacggagaaccgcaggaaagggagacaacagccacacaaa

SEQ ID NO: 206333 - RNA, 76 nt, Homo sapiens
cgcgcaaaccacccaggaaggaccgagaccccacaagacgcaccaacgcaaggccggagaagccagcacacgggga

SEQ ID NO: 206334 - RNA, 89 nt, Homo sapiens
ggaagccagaagaggaggaaaaggccacgggaggaagacccaaaaggaccgaccagggcaaccaaaaagccacaggcaccaggaagagg

SEQ ID NO: 206335 - RNA, 57 nt, Homo sapiens
ccagcgaggacagagccgaccgcggaggcacccaccacgggccaggcgggccagagg

SEQ ID NO: 206336 - RNA, 48 nt, Homo sapiens
cagggcgcccccgggaacagggcacaaccaaggagggccagccacccc

SEQ ID NO: 206337 - RNA, 51 nt, Homo sapiens
gggccgaaggaggagaggcacagaaggaccaagcaaaaccccggaacgcca

SEQ ID NO: 206338 - RNA, 79 nt, Homo sapiens
acagccaaaccccacccaggcacacgcacacaacacaaccagagcagaccagccccacagacaaccgcagaaagcaaca

SEQ ID NO: 206339 - RNA, 54 nt, Homo sapiens
gccacaccagccgggccaggcagagggggagccacggaccagggggacggcgac

SEQ ID NO: 206340 - RNA, 35 nt, Homo sapiens
ccagaggaccagaacaaaccaagcagaaaaccaag

SEQ ID NO: 206341 - RNA, 66 nt, Homo sapiens
cggcgaaacacggggaacaaacggcaagagccagaagcccggcggaaggaagaacaacacaggaac

SEQ ID NO: 206342 - RNA, 63 nt, Homo sapiens
gccgagacacgcagcggcggccagggaccagagaacgcacaaccacggggacgggcagaggac

SEQ ID NO: 206343 - RNA, 70 nt, Homo sapiens
gcgcggaaaggaaacccggagccacaaggaagcccgacagccagagcgccggccagggaagacgcaaacc

SEQ ID NO: 206344 - RNA, 80 nt, Homo sapiens
gccgccgccgccgccgcgggcgccagaaggaagaggcggacggaggagcaggcgagaagagaaggggagcccggggagca

SEQ ID NO: 206345 - RNA, 84 nt, Homo sapiens
ggaacagccagacgagagccagccacacgaggagacggaaccggagaaaaacgaaacccacagacaccagagagccgaacacca

SEQ ID NO: 206346 - RNA, 74 nt, Homo sapiens
cccagccggcgcccccaggccgcgggagacccgcaccacacccaccagccggcgggaggcgggcggcggggcgg

SEQ ID NO: 206347 - RNA, 91 nt, Homo sapiens
ggacagagggccccgccagcccggggcccgcgccggccccagggccacaggaagaacaggcagcagaacccggaggaagaggcacggccaa

SEQ ID NO: 206348 - RNA, 70 nt, Homo sapiens
gaaccaggccacccaagaaacaaacaggaggcagcacggcaggagacgaggagaggacagcaggacaccc

SEQ ID NO: 206349 - RNA, 67 nt, Homo sapiens
cgcggcggcaccgggaggccgggccgagcggaaagcgaacgcgaaaagaaaagccgagagcagccag

SEQ ID NO: 206350 - RNA, 79 nt, Homo sapiens
cgccgccgccacggcgcccacccaacgcgaagacggaacccgggacgacggagcagcaaggcgaaccggcgcggagcgg

SEQ ID NO: 206351 - RNA, 76 nt, Homo sapiens
ccagagagcacacaaaacagggcagccacacccgagaagaggaagagagagagggcccaaaccaccagaaccgaag

SEQ ID NO: 206352 - RNA, 68 nt, Homo sapiens
accaagcagacagccaacaaaaggaccccggcaccagcagcagccgcccgcaacccaggaccgagaag

SEQ ID NO: 206353 - RNA, 83 nt, Homo sapiens
gcagcggggaggccgcccggcgcagcggggaccggcggcggcgcccaggcacccggcccgggaagagagcaggagaaaggggg

SEQ ID NO: 206354 - RNA, 61 nt, Homo sapiens
gcggcggcccgccggggggcagggccacgcgcagagcccgggagaacagaacaaacacggg

SEQ ID NO: 206355 - RNA, 70 nt, Homo sapiens
gagccacaaaaaaggaagcgaaagacaagaagcggaagacccggagaagagcccgggaagagccgcccgc

SEQ ID NO: 206356 - RNA, 80 nt, Homo sapiens
gccgaccgagacgggcggagaggagaagggggccaaagggcgagggcacaaaaaaccacaccccccaccgaggaagagcg

SEQ ID NO: 206357 - RNA, 76 nt, Homo sapiens
gcggagaagcagcggggggccacgcgacaagagcaaacgagacggaagaaaaaaccgacggcccgaaccacagcca

SEQ ID NO: 206358 - RNA, 76 nt, Homo sapiens
ccggcggcgcggaggagcgaggcagcgacaggacgggaacggacaccaaagaggggaaccccggaaccagaggcac

SEQ ID NO: 206359 - RNA, 72 nt, Homo sapiens
aacaaccgagcagcggggccaacacacagaccacccccagaacagaccgaagaacggcaaagagaaaagaag

SEQ ID NO: 206360 - RNA, 77 nt, Homo sapiens
cggaggcagaagcccggcgccgagaggggcaggcgacggccagccggaccggacggaccaaggccgagaaccagacg

SEQ ID NO: 206361 - RNA, 69 nt, Homo sapiens
acagaggaaaaaagagaaaaggggacgaccgaagagaacgcccccccaaagggcgaccaagagagaaac

SEQ ID NO: 206362 - RNA, 70 nt, Homo sapiens
ccgagcgggcggccaagacaagagaaccggccacgcccggccggcaagacgggacccgcacccgacagcc

SEQ ID NO: 206363 - RNA, 68 nt, Homo sapiens
gacaggcgggccacgaagagcacagaacagagagaagggcgggagaaaccaaggaaagagaaaagcgg

SEQ ID NO: 206364 - RNA, 77 nt, Homo sapiens
gcggccgcgcgcccgggacgacggaccggccggcgggcaacagcagaagcgggggaccccgagaacgcagagaaggg

SEQ ID NO: 206365 - RNA, 80 nt, Homo sapiens
ccggaggcagaggggggaccccggacggaccggcagggaggacaggccaggccggagcgcgaagacgcagggaaagcggc

SEQ ID NO: 206366 - RNA, 85 nt, Homo sapiens
ggaaaggacgaaaaggggcggaagaaaaacaaacacacgcaaaggagaaaggaaccgacaggcaacgccagcgggccacgcgagc

SEQ ID NO: 206367 - RNA, 79 nt, Homo sapiens
agccccagcccgacggagcccagaaggggacaacgcgacggcgggacccagggacgccccgcagaagaacaacaaggac

SEQ ID NO: 206368 - RNA, 65 nt, Homo sapiens
aacagccaccaaaacagaagaagagcacaacacagaagaaacggcaagcaaggacgaacacacaa

SEQ ID NO: 206369 - RNA, 76 nt, Homo sapiens
gccgacgcgcgcacggacccgccgcccggccggaggcaaaagaaagagacgcgggcaagacaagggcagcagggcg

SEQ ID NO: 206370 - RNA, 74 nt, Homo sapiens
acccagacggggcgaagaggcgaaagggcgcagagcagcgcaggagacacgcccgccccccgggggccaccaga

SEQ ID NO: 206371 - RNA, 73 nt, Homo sapiens
aaggcccgcgggcgggagaacggaaaaccccaacccgcagcagaggaccgcgaacggcaagggacagaagcgc

SEQ ID NO: 206372 - RNA, 81 nt, Homo sapiens
aggggacagaggaccggggcacccaacagcggagcaacggcccccacgacacaggacagcgccagcccaagccagcagcgc

SEQ ID NO: 206373 - RNA, 68 nt, Homo sapiens
ccacagaaaacagcgaaaaacgaggaaagacagacccaccaaaccagccgaaaggacgaggggcccac

SEQ ID NO: 206374 - RNA, 78 nt, Homo sapiens
ccaacgggacgggcaagacgagagggcccgacggaggggaggaaaagcagcgacacaggagagaacgagcgggagagc

SEQ ID NO: 206375 - RNA, 80 nt, Homo sapiens
gcaccccggccaaggaagaagcccgcaaggcaagaggcacaggcagcgcgggagacacacccgagccggcgccggcaccc

SEQ ID NO: 206376 - RNA, 69 nt, Homo sapiens
agacccggagcccagggaagcagccgaccagccgcggagccgggggcaggagcagccggccacaccgca

SEQ ID NO: 206377 - RNA, 84 nt, Homo sapiens
gcagccaccgcggcccccgcggaaaagaaagccgagggaaaaaccggagaagagaaacaaaaggacagagaaaaggcccaggca

SEQ ID NO: 206378 - RNA, 73 nt, Homo sapiens
aaggaccaagaaccagggccacagagcaaccaaaaaccggccgcaggcacaaaagaagacgggaaaagggcca

SEQ ID NO: 206379 - RNA, 76 nt, Homo sapiens
cccgcgagcggcgggcgggcgggagcgcccaagggggcggagagcgggggggggacccaaagacaggaccacgcac

SEQ ID NO: 206380 - RNA, 53 nt, Homo sapiens
gcacccccggccggcgcgaggccaggcagaggggcgggcaaaggagaggcaca

SEQ ID NO: 206381 - RNA, 66 nt, Homo sapiens
caggggggggcaaacccgagagaacggaggaagcccagacccacgccccgcgcaggcagcccgccg

SEQ ID NO: 206382 - RNA, 64 nt, Homo sapiens
caccgaaggaccaggcgacagcgcgcggccagccccagagcaggaggggcggcaggaccaagag

SEQ ID NO: 206383 - RNA, 59 nt, Homo sapiens
aggcccacgccagacacgacgcggcaggaacccggcccagagaagcccccccagaccca

SEQ ID NO: 206384 - RNA, 63 nt, Homo sapiens
aacacagcagaaacaaagaagcagcgcgaaagagcggcaaagcacgccacggacgcacgaggc

SEQ ID NO: 206385 - RNA, 69 nt, Homo sapiens
cccagcggcccccaaggcacgccgaaaaagcacccggacaaggaacgccaagccagaccgacaccacgg

SEQ ID NO: 206386 - RNA, 47 nt, Homo sapiens
cgcacacagcccagcagccgaaaggagccccgcggccaagcgcagcg

SEQ ID NO: 206387 - RNA, 77 nt, Homo sapiens
gggcgcagcaaagaggaagaacaaagaaggccgcggcaaagagagagcagagggccaagccccgagaaaggcgcccc

SEQ ID NO: 206388 - RNA, 69 nt, Homo sapiens
cagaccgagacgcaagcacacagggacgcgagcagccagcccagaaacgcgcccacaacacaaagccgg

SEQ ID NO: 206389 - RNA, 49 nt, Homo sapiens
gagaaggcagaggcgacaccgggaagggcacgacaggaaaagacgacga

SEQ ID NO: 206390 - RNA, 47 nt, Homo sapiens
ccggggggaggaggggcaggcccggcggaagaccagaccagcgcagc

SEQ ID NO: 206391 - RNA, 82 nt, Homo sapiens
gcgcgagaagcgcagcgagcccagggcccccacacccacggaggaagcagccgcggcccgccgggaggaacaccgcaccggg

SEQ ID NO: 206392 - RNA, 75 nt, Homo sapiens
gagagccgcggggagaaggccacacccaggcgcggggccacgcccagacccaaaaacgacagccaggacgagcgc

SEQ ID NO: 206393 - RNA, 73 nt, Homo sapiens
cgagggaaccacgcacggacagaagcaagagcgaaggagaaaggcaacaaggcccgagcggggaacacgagag

SEQ ID NO: 206394 - RNA, 94 nt, Homo sapiens
aggagggcgaggacacacggcggagcccagcggcgccgaaaccaaggaccccaaggagggaagccaagacaggcagagacagaaagccaccagc

SEQ ID NO: 206395 - RNA, 54 nt, Homo sapiens
ggaggagcggagaaccggagcggccaacggcaggagggaagaaagaagagccac

SEQ ID NO: 206396 - RNA, 57 nt, Homo sapiens
acagaccgccacaccagaaagagaaggagaccgaccagagaaacagaggagaacggc

SEQ ID NO: 206397 - RNA, 67 nt, Homo sapiens
ccgcggaaaagacagagaggggaagaaaaacaaggcggaacaaggaggggcaggcgcggccgacccg

SEQ ID NO: 206398 - RNA, 68 nt, Homo sapiens
cacccgcgcgccgccgccgaggagaaaggaaagcaggaaaacggcgcaaacggagaggcgcaccgaag

SEQ ID NO: 206399 - RNA, 73 nt, Homo sapiens
acaagacacgaaacagaaacaacgaacgagcaaggaagggccaaggcagaccccacaccggagaacgcaacca

SEQ ID NO: 206400 - RNA, 83 nt, Homo sapiens
gcagggaccgcggcggaacgggcagggaaaccggagcggcagagcaggaggggagagggccggcacagcaagaagagaggagc

SEQ ID NO: 206401 - RNA, 38 nt, Homo sapiens
ccaggaggaaaacacaccaaggaagcgggaccaacgaa

SEQ ID NO: 206402 - RNA, 83 nt, Homo sapiens
aagcgacggagaacagcacccagacccgcgaccgaagaacacaggaaggagagacacgggaggcagccgagcccaaaccgcgc

SEQ ID NO: 206403 - RNA, 38 nt, Homo sapiens
gcaacgggggcacagagagacaccaaaccacgcaagcg

SEQ ID NO: 206404 - RNA, 81 nt, Homo sapiens
gaagccaggccaggccggccaccgcgccgcgccgcgccggcccagggagccccggcaagcaagaacggagaaacccgcgac

SEQ ID NO: 206405 - RNA, 82 nt, Homo sapiens
gagccccggggcacagccaggagaggcccaagcccaggccgggaacggcagacgcagcagagagaccaccagcgagcgcagg

SEQ ID NO: 206406 - RNA, 64 nt, Homo sapiens
gaggcccagaaagggagcgaccacgaagcccagagagaaccgagccaccgcaacggaggcgaac

SEQ ID NO: 206407 - RNA, 69 nt, Homo sapiens
aaaccgagccaaaagcggcaaggcaacaggagaaccaacgacaaacgcagaacaaagccaaaggcccga

SEQ ID NO: 206408 - RNA, 60 nt, Homo sapiens
cggaccaaagcagcgcaacccagccacagaaccccccacggaaaggacgaaagaaagaag

SEQ ID NO: 206409 - RNA, 58 nt, Homo sapiens
cgaacagaaaccccccccccagccaccaagagaagagagacggggcgccagggccagg

SEQ ID NO: 206410 - RNA, 32 nt, Homo sapiens
ccacccccgaacccccaagcaaaagcggaagg

SEQ ID NO: 206411 - RNA, 51 nt, Homo sapiens
cccaaagaaggcccgcagaccgaaggaagcacagcagaggaaaggcacccg

SEQ ID NO: 206412 - RNA, 55 nt, Homo sapiens
agaaagaggccacccaagaaacgccaaaagggcgagccggccagggggcccacaa

SEQ ID NO: 206413 - RNA, 59 nt, Homo sapiens
cgcagcacggggaacgagccccacaaagggaaggccgaagacgcaaccaaccaaaacag

SEQ ID NO: 206414 - RNA, 66 nt, Homo sapiens
agcgccacacgaagggaacgcccagaaggcgcagccacaggagggagcaggaaaaaggcggagagg

SEQ ID NO: 206415 - RNA, 110 nt, Homo sapiens
cacacccagagccagggcagaacgccacagacgcacaaccccacgaggcgggggcagcacagcggcaggcaccgcaggaaggacccgaccgcacggagggccccacacac

SEQ ID NO: 206416 - RNA, 78 nt, Homo sapiens
cagcaagacccggacgaagccacaaccaggagaagaagaaagccagccgaaagaagcagcccaccgggacaagaggcc

SEQ ID NO: 206417 - RNA, 83 nt, Homo sapiens
ggagcagcgaccccggcccggaggaggccagcgggacaagcgggccaacacgcccgggaggaagcgccacaagcggaggggaa

SEQ ID NO: 206418 - RNA, 69 nt, Homo sapiens
ggacacgcgccaacaacaacgcagaacacccaccaaagacccggcaccaacagagcgaacgaagcggaa

SEQ ID NO: 206419 - RNA, 48 nt, Homo sapiens
acagacaagaagagagagagggccgcaaaggaggacaagcgccggcac

SEQ ID NO: 206420 - RNA, 85 nt, Homo sapiens
ccgaccccgaccagagcgcgacggcagggcgaggcacggggagggacgaaggggccgaccccagccaaaacagagggagacgaga

SEQ ID NO: 206421 - RNA, 73 nt, Homo sapiens
ccacccaggggacaccgggcccaggaaaagaacaagaagcaccccaggcaaagaacgcgaagagacccccagg

SEQ ID NO: 206422 - RNA, 84 nt, Homo sapiens
gaccgagaccggaccgagagcggaccgagagcgcgaaacgcacgagaagacgcgagaaggaagaagaacacaacagaaagagcg

SEQ ID NO: 206423 - RNA, 79 nt, Homo sapiens
cccagcaaagaggacaaaagagcggaggagcggcgaggagcgcgggcaacccgggcaggcggcgcagcggcaccaccag

SEQ ID NO: 206424 - RNA, 85 nt, Homo sapiens
gacgacggcgggagccagcacggggaaaagagcaaagaagaagcagcgagggacaaagccaggcgcaaggaagcaaagagggaag

SEQ ID NO: 206425 - RNA, 37 nt, Homo sapiens
cagagaggaagacaacgagaagccgaggccgccagcg

SEQ ID NO: 206426 - RNA, 87 nt, Homo sapiens
cgggcgcgcggccgaagccagcccgggggcggcaggagagggacgcgcggcggcagcgagcgcaggagaacggaaaaagcccagaaa

SEQ ID NO: 206427 - RNA, 80 nt, Homo sapiens
gcgggaaccgccagcaaaccacacaggaagaaaacaccggagcccaagacaccaaaacagacgcaggcaagaggcagaag

SEQ ID NO: 206428 - RNA, 71 nt, Homo sapiens
aacgaagagggaaacagccacaagggaagacacaccgagaagacagacccagggaccccgcgaacaggaga

SEQ ID NO: 206429 - RNA, 72 nt, Homo sapiens
cggggaacgacggcccagcaggcggggaagagaaagggacgccgccagccaccggcgcgaagccagaccaga

SEQ ID NO: 206430 - RNA, 77 nt, Homo sapiens
gcagaagccgcaacaggaaagcagcccgaaaaagacgcgagaagccacacgacagcccgggcccgaccccaaacccc

SEQ ID NO: 206431 - RNA, 78 nt, Homo sapiens
aggagacccagccgccagggcgcaccaagacaagaagacaggcccggacgcccccagggccacgacgccccgggcgca

SEQ ID NO: 206432 - RNA, 74 nt, Homo sapiens
caaacaacagggacacagaaaacagagggggacgagcccagaagccagacaccgacgcaaggagcggaaaagca

SEQ ID NO: 206433 - RNA, 81 nt, Homo sapiens
cagaaagcaaacaacaccgccaggaagagccgccgaccagggcagccagagggggaagccgaacggggaggaggcaagaaa

SEQ ID NO: 206434 - RNA, 73 nt, Homo sapiens
gaaaccacggccaacaggaagaaaggagccccgcccggcccgaaagccgcagcgacagcgaaaagggcaagac

SEQ ID NO: 206435 - RNA, 74 nt, Homo sapiens
cagaacgccgacggccccaccacgggccgggcgcggggccaacagcggaacccggagaagccgcgggagcggaa

SEQ ID NO: 206436 - RNA, 42 nt, Homo sapiens
gcccccaagagcgggagacaggagacaaacgggagccgagcc

SEQ ID NO: 206437 - RNA, 73 nt, Homo sapiens
gcagaagagagggggccccccaccagcccccacgggaacgacaggcgggacgcaaagcagaccgcagaaaggc

SEQ ID NO: 206438 - RNA, 87 nt, Homo sapiens
ccaacaaagcaaggcccccgcagggaagaaggagaaagggccaaccccgaagaagcaaacagaaacgaaggagacagagaagaacga

SEQ ID NO: 206439 - RNA, 65 nt, Homo sapiens
gaaaaggagcagagcaaaagccacaaaaagcccgccccagcgacacggagaccacgaggcgaggc

SEQ ID NO: 206440 - RNA, 79 nt, Homo sapiens
cagccacacaagcgagcaaaagcagcaagagcaggaggggcgcaaaacgagaacaaagccaagcgggcaaacagaacaa

SEQ ID NO: 206441 - RNA, 80 nt, Homo sapiens
ccaggcccgagccaagaagagcggggccaaaaaaggaaggggagccagaaacggcaaacacagcaagaaagaaaaacaag

SEQ ID NO: 206442 - RNA, 74 nt, Homo sapiens
ggggggacccgcccaaccccgccgaacacaaccccagagccggcagcgggccccccgccgcggcccaccaccgg

SEQ ID NO: 206443 - RNA, 81 nt, Homo sapiens
gaaccaacagagcggaacggaaggcacaggaaaagaagaggaagagaaaggcgaaggcaacccaagagggaaaaagggacg

SEQ ID NO: 206444 - RNA, 69 nt, Homo sapiens
caccgagagcacccagagggaggccagaagacgcggcaggcaaagagagaccgcacccagaccaacaca

SEQ ID NO: 206445 - RNA, 84 nt, Homo sapiens
cgcgagcggcgcgcgggacgaaggcagcagcggacaggagaaccaacgccacacccgcgccccaggccacaagaagaaaccacg

SEQ ID NO: 206446 - RNA, 72 nt, Homo sapiens
cccaggcgaggcggcagacccacaccgaaggcagagacacgggacccaggccacgggccggggcccccaccg

SEQ ID NO: 206447 - RNA, 51 nt, Homo sapiens
ccacagagacagagacagacgcaacaggaaggccgaagcccacgccaagcg

SEQ ID NO: 206448 - RNA, 77 nt, Homo sapiens
aggagacgagaggacgggaccaggcgaagcggccgagcaggcgagcgaacgacgacaccacgccacccaagagagag

SEQ ID NO: 206449 - RNA, 69 nt, Homo sapiens
ggccacagcggccggggaacgacggagcagagcaagcagagggccgcccgcggcaggggcgcagggcga

SEQ ID NO: 206450 - RNA, 53 nt, Homo sapiens
gccaaagagcaacaacgagcgacaccaaaggcgcagaacagcgggaaaaggca

SEQ ID NO: 206451 - RNA, 58 nt, Homo sapiens
ccccgccacggaggaacggcagagcggaagcccaggcggcgcgccgcagccgacccgg

SEQ ID NO: 206452 - RNA, 64 nt, Homo sapiens
acacagcaggaccacccgggacaagggaacgggcgagcaagcaagaagccaccgcagagcaaga

SEQ ID NO: 206453 - RNA, 112 nt, Homo sapiens
gccagagaaggccgaagcacggaggacccggcacgaggggcacccagccggccggagcagcccgaagagggggaagaagcgcgcagcgagcacacgaacgccaaaaagggga

SEQ ID NO: 206454 - RNA, 79 nt, Homo sapiens
agaggaggccccccagccagggaacagcaaacgaggccccgagagcccaccagcacaggaaaaacccacagcagaaccg

SEQ ID NO: 206455 - RNA, 83 nt, Homo sapiens
cccagggccggcccccccaggacaacccagaggcaacaaaggcgagacccagcgggaggaagaagaggccgccagcagcagag

SEQ ID NO: 206456 - RNA, 67 nt, Homo sapiens
cccgggccccggcgcacgaagggcggaagagccacggcgcggccaagcggcagcaacccccggcgcc

SEQ ID NO: 206457 - RNA, 78 nt, Homo sapiens
gaccccaagaagaccacagagggacccggacaaccagaggcagccagcagggggagaacccaagcaaacccacaacac

SEQ ID NO: 206458 - RNA, 68 nt, Homo sapiens
aggaacggccaaaacggacaaacccacaagcgaaagaacacgagaagaagaacaggacgaaggcgcga

SEQ ID NO: 206459 - RNA, 73 nt, Homo sapiens
ggcccaaagacacagggcggaacagcagagaacaaaggaccgcaaacgaagacggcagcacagcaggcacagg

SEQ ID NO: 206460 - RNA, 52 nt, Homo sapiens
gccgccaaaggaccgagcgaaggccagaacacagaagccacgagcaaggggg

SEQ ID NO: 206461 - RNA, 73 nt, Homo sapiens
ccgcaccaggagcgaagagcgccgacaaggcaggaacgcagaccacacgacggcacgggaaaaaccaacacgc

SEQ ID NO: 206462 - RNA, 57 nt, Homo sapiens
acgcagcaggagcaggggacgaaggacccaacgaggaaaaggcagcaggcacaaaaa

SEQ ID NO: 206463 - RNA, 70 nt, Homo sapiens
ggccagagaaggagaacaagaggaagcacacggaagagcgaaaaagagaaagcaccgcagaccagggccc

SEQ ID NO: 206464 - RNA, 75 nt, Homo sapiens
aggaccacagcaagacgacaagcacgagccccacagcgacaacccacgggcgcccaggaggacggcagcagggcc

SEQ ID NO: 206465 - RNA, 82 nt, Homo sapiens
acacagcacggcagcccacacaagaagcacccgcgcaggccgcaccacgggccaagaccagccaagcccaggaccagaaaac

SEQ ID NO: 206466 - RNA, 73 nt, Homo sapiens
gcaacaccagacaccaaggacagcccgcaagacagacaacccgcagagcccaaacagggcagcaggcagcagg

SEQ ID NO: 206467 - RNA, 77 nt, Homo sapiens
gaccgcccggcgggcagcgccacccggcaggccacgggcgccagggagaaggaggagcagaacacaggggacaggga

SEQ ID NO: 206468 - RNA, 76 nt, Homo sapiens
cgaccagcccccagaacagagccaaggcggaagaggagcaaagaagaacgaggcagcacaacaaaaacaaagaaaa

SEQ ID NO: 206469 - RNA, 40 nt, Homo sapiens
agacaaacacgaagaacaaagcgaccaagaagggacaggg

SEQ ID NO: 206470 - RNA, 72 nt, Homo sapiens
cgaaggagcaacggcgcacagaaaaagaagaggcccaccagacagagaccaggggcacaacgccaagagaga

SEQ ID NO: 206471 - RNA, 61 nt, Homo sapiens
gggaacgagaacccaagggcaggagcggagagacgaggagcagagaaggagacaccgaagg

SEQ ID NO: 206472 - RNA, 57 nt, Homo sapiens
ccagcccacgcaccgcaaggggacacgcaagagacgcaccgagagaagcgcagcacc

SEQ ID NO: 206473 - RNA, 85 nt, Homo sapiens
ggacaggagacagacgcgagcggcgcggaccaaaaccgcgaccaagacagaacgaagcgcgcggcaggcgcgcgccgccccaggc

SEQ ID NO: 206474 - RNA, 79 nt, Homo sapiens
aaaaggcagcggaaagaagaaaagaaacggcccacaagacccagccccacacgaagaaagcaaggcaaaccagggggcc

SEQ ID NO: 206475 - RNA, 75 nt, Homo sapiens
ggccacagccccagcgaccagaaacacaagagcaagagggacagccagggaggggacagccgaaagccacgaaga

SEQ ID NO: 206476 - RNA, 72 nt, Homo sapiens
cccaggaggcccagaagaccagagccccggcagaaacggacacaaccagggggcggagagagcaggggcgcc

SEQ ID NO: 206477 - RNA, 73 nt, Homo sapiens
accagcggccccagcgaagccccacagcaaaggcaccaccgccgggagagcagggcgagaacaccgacccaca

SEQ ID NO: 206478 - RNA, 72 nt, Homo sapiens
gaaggaccaagaaccagggggcaggacagcgaggaccgaacaacaccggcgagcgacgagcacccgcgaaca

SEQ ID NO: 206479 - RNA, 86 nt, Homo sapiens
gggccgccgcgccaggagcaggggcgcgagagcagcaaggccagaaagagagcacaagcccaggaacggggagaaacgccagacgc

SEQ ID NO: 206480 - RNA, 69 nt, Homo sapiens
gaaggccaaacaaaacgcgcaagaaagcggaaaacgaacacccccgggaaggggcagcggcaagcaggg

SEQ ID NO: 206481 - RNA, 80 nt, Homo sapiens
cccccagcgccgaagcacccggaagggaaggccagaagcacaaagcgcccgaggcagaaccgagaggcccccggaggcac

SEQ ID NO: 206482 - RNA, 78 nt, Homo sapiens
ggaggccgagggcaaggcgccagaccaagggaaacgaacaaccgccaaacagcaagaggacggaagaagagagacaga

SEQ ID NO: 206483 - RNA, 74 nt, Homo sapiens
ccaagaagaggcaggacagcaaaggcccccgcgggcgcacacaggaaggcggagggaagaagggaaaacggaga

SEQ ID NO: 206484 - RNA, 70 nt, Homo sapiens
cccaggagcacgccgcacaggccgcgaacggggcaaagggagaggagccaagcccaacgggacgggaaaa

SEQ ID NO: 206485 - RNA, 81 nt, Homo sapiens
ccagaccacaaagaggaaaggacgccaggacacacggcacaaggggagccaccgagcccaagcggagggcggaccgaccac

SEQ ID NO: 206486 - RNA, 67 nt, Homo sapiens
cgagaggaaacagaccaaagaggcaagagagagaacaaggccggggagagcccagcaaaagacaaaa

SEQ ID NO: 206487 - RNA, 80 nt, Homo sapiens
gcagaacccccgcagagaaaggaacacaccagcgggcacagcacagcagggaggcgagaagagggaaaaggaaccggccc

SEQ ID NO: 206488 - RNA, 61 nt, Homo sapiens
agcggcgggaggccacgggagccgaaacggcgaggaaagagaggagccccggaaagaaaag

SEQ ID NO: 206489 - RNA, 76 nt, Homo sapiens
gcgccggacggggagaggggagcgccggggcggcccaggcgagcgggagacgagacccaacaggcagaagccaaag

SEQ ID NO: 206490 - RNA, 73 nt, Homo sapiens
gggaggcccacagggagaacagggcagaacgaggggaggaaagcaggcccacccccccccagacgcgagaacg

SEQ ID NO: 206491 - RNA, 57 nt, Homo sapiens
ccacgcaagacgcggacggccaggacgggcccccacagcggcaagcagaagaggaac

SEQ ID NO: 206492 - RNA, 83 nt, Homo sapiens
cggagcaacgagcgcagcgccgagcggcgggaggggaaggagcagccacccgggcagaaaggccgggcgaagggccaagaccc

SEQ ID NO: 206493 - RNA, 83 nt, Homo sapiens
aacaaggaggcaaccccgcccggaccaaggcacagagaaccagccaagacgaaaggcccaaggacaacacaagaaccaccagg

SEQ ID NO: 206494 - RNA, 82 nt, Homo sapiens
agcggcaccgaggccggggccaacgagccaacgccaggcgccgcccacagaaaccaagggagggaaccgggaacggcgcggc

SEQ ID NO: 206495 - RNA, 88 nt, Homo sapiens
gcccacgagaaacaaagacaaccgcaccagacaagccgggaagacaagcagaccccccagaggggcgaggaagccgcagagccccgga

SEQ ID NO: 206496 - RNA, 38 nt, Homo sapiens
ggcgaggccccagaccacacgcggaacacgggcaacgg

SEQ ID NO: 206497 - RNA, 42 nt, Homo sapiens
ggccgccgacagacgcgagaaggggaagcacagcaaccccca

SEQ ID NO: 206498 - RNA, 73 nt, Homo sapiens
cacacaccggacaggaacaccagcaggaaaaaagagcggcagaaggccaaacggccgagcaggcgagcgaaga

SEQ ID NO: 206499 - RNA, 73 nt, Homo sapiens
aagggcagccgcggccaccccggaagggccgccggcggcgggcgccagggaaggaccgcacacaagccgcacc

SEQ ID NO: 206500 - RNA, 90 nt, Homo sapiens
gcggaggcgacggggcggcccggagccggcgcgaaccggcccccgcagcgggacccgggggcggcgaagaggacccgcaggcgcaaggag

SEQ ID NO: 206501 - RNA, 88 nt, Homo sapiens
ccgcgcgaagcggccaaagccgcccagacggccaccggcgggaggaacaaaagaccagacaaagggagcaccagccagaccgggaaga

SEQ ID NO: 206502 - RNA, 81 nt, Homo sapiens
aagagaacagcacccggacaaccaggaaaaaccagaagagaaaaaacaaaggggagaggcaccccgcgggacgaccggaca

SEQ ID NO: 206503 - RNA, 96 nt, Homo sapiens
gggcccaccccaccgccagcggaacccggggacacgacgccccaaaccgccaggagaaaaaaggcacgagcccgggcggacaggggaaacacaggg

SEQ ID NO: 206504 - RNA, 85 nt, Homo sapiens
gagcgccgaaggacaagaacagcgccgcaccagcagcacgagccagggagccgccgggaccggcccgggagacgacaacccaaac

SEQ ID NO: 206505 - RNA, 77 nt, Homo sapiens
ggccggcacgcgcccaaaggaaagaccacagcaagaccacgcccccagccgggggaccaggccgaacgacccggaca

SEQ ID NO: 206506 - RNA, 78 nt, Homo sapiens
gaagagacaccagcgcgccgggacaaagcaggagagacccgccaggcaaaggcaggacaaagcggaggcgccagcaca

SEQ ID NO: 206507 - RNA, 75 nt, Homo sapiens
ccacacgccgccacccccaccggagggcggaaaacaccccaaaagccaaaagggaaaggaaaagaccaacaacag

SEQ ID NO: 206508 - RNA, 62 nt, Homo sapiens
gaaagagaagccccggagagccgcccacccacgcaacccagacagaagagccgggaaagcag

SEQ ID NO: 206509 - RNA, 60 nt, Homo sapiens
cggacccggaagagaagagggggcaagaaagaaagaccagggacacagagagccacggcc

SEQ ID NO: 206510 - RNA, 85 nt, Homo sapiens
gagacaccagcccgaaacaccaccaagcgccgcgccaggacggcagccagacgagcagggccgcagcaggccgcagcgccaaaga

SEQ ID NO: 206511 - RNA, 74 nt, Homo sapiens
cggcccggcccggccccgaggccggcaacggagacccaagggaagacaaacccgccccccggggaaacggccgg

SEQ ID NO: 206512 - RNA, 82 nt, Homo sapiens
ccaaaccgagagccagaacgaacaagccaacagagaaccccaacaaaggaaaaaggaaaacaaagcaaacaaaagagggaaa

SEQ ID NO: 206513 - RNA, 76 nt, Homo sapiens
cccgacgcagcacagaggaccaccgacccaaagagagcgcccagccgaaagagggcagacaagcagaccggaagac

SEQ ID NO: 206514 - RNA, 55 nt, Homo sapiens
cccaccccagagaaagaccaggccagagcgagaagagagaggagagcaagaaacc

SEQ ID NO: 206515 - RNA, 62 nt, Homo sapiens
aaccgagggcccagacacacgccccgagggcagccccacccacgcacgggacagcgagaggc

SEQ ID NO: 206516 - RNA, 87 nt, Homo sapiens
gccaggcgaccggagcgaacgccacgccgggcaggagcgagaacccgagcagcgccagagcaacacaccgcgccccagcacgcaggc

SEQ ID NO: 206517 - RNA, 72 nt, Homo sapiens
aaaccaacacaagaccagaagcgagacgacgggaccgaaggaccccgccagagacaaccgagcgccaggaga

SEQ ID NO: 206518 - RNA, 76 nt, Homo sapiens
cggacccaggggaaagaaggacggacacggagccaagaggaacaagaccaaggacaaagccgaaccagacccacag

SEQ ID NO: 206519 - RNA, 75 nt, Homo sapiens
cccggacggcacacccacgaccggccaaggacggcagaagcaggacgagggcggccccacagagccacacaagaa

SEQ ID NO: 206520 - RNA, 74 nt, Homo sapiens
ggaaaaaacgaaacggagagacagccgacaccgaaggagccagcgccccgaagaagggaccacgacaagggagg

SEQ ID NO: 206521 - RNA, 81 nt, Homo sapiens
caagacgacggaccacacgaggggacacaagccggaaaggccccgagagcaaccggggaaggcccaaagcacaacgagaga

SEQ ID NO: 206522 - RNA, 80 nt, Homo sapiens
gaagaagggcccaaaaggcagaaaaagggcaaagacacggaccaagaagccaacaggaaaccagggaaaacacaaaacac

SEQ ID NO: 206523 - RNA, 80 nt, Homo sapiens
acgggagcaccaccaggagcagcgaagaaagcacgccacagccggccaaaccagccagcaagacaccacaagagaaacga

SEQ ID NO: 206524 - RNA, 76 nt, Homo sapiens
agccacccgggagaggaagagcgaggaggaacgcgcaaggcaaagcaccggacgccaccagcacggccccgaacgg

SEQ ID NO: 206525 - RNA, 79 nt, Homo sapiens
aacgacgcacgacaaggagggcggaacggcggaagagagaaccgagccaccgcaacggaggcgaaccggcaggagaaag

SEQ ID NO: 206526 - RNA, 69 nt, Homo sapiens
acaagcaagcagggggaagcaagcccccaacaagcaaaggaacgacagagccgcggcacccaggcggag

SEQ ID NO: 206527 - RNA, 76 nt, Homo sapiens
gggaaagaagcaggggaagggccagcccgcaacccccggcgaccacgggcccggcaacagcgcagcggggacaccg

SEQ ID NO: 206528 - RNA, 97 nt, Homo sapiens
cacagcgcagcgccgacggacccggaaaaccggcccccaacgacaaaagggcgggaagccagagaccgagaggaaaaggacgccgccaaaggaaggg

SEQ ID NO: 206529 - RNA, 69 nt, Homo sapiens
cgccgggagccgacagccgcgccggggaggcaggcgacaacagaggagaaggcgaagaaaacagccaag

SEQ ID NO: 206530 - RNA, 65 nt, Homo sapiens
ggaagagaaagagcgagaaccacaaagggccaccccaaagcgcaaagagagaaggaccaagaacc

SEQ ID NO: 206531 - RNA, 84 nt, Homo sapiens
ccacgcccccccaggacgagccaaccccaccacgccgcggccggggcccgaccgcggggacccagcgccggccccggcggaggc

SEQ ID NO: 206532 - RNA, 65 nt, Homo sapiens
cacagcagcgacgacaccacccagcagcccaaacgcaaggaagcgagagccaccaaagaagacca

SEQ ID NO: 206533 - RNA, 83 nt, Homo sapiens
aaggacggggccacgggagcgcggaggacgccgcccacaccgcgagcgccaacacaccacagagcaccagaagggagaacgcc

SEQ ID NO: 206534 - RNA, 75 nt, Homo sapiens
aaaaaaggcaaagaggaacgcggccacgagacgggggggccagaagaaaagagggggcaggggccgggccgacaa

SEQ ID NO: 206535 - RNA, 75 nt, Homo sapiens
cgacgggggaagcaccgcacccggagccgggggggcggccgaccacgccgcgaggcaaacgcaagggaaaaaagg

SEQ ID NO: 206536 - RNA, 77 nt, Homo sapiens
ccgccccggacaggaggagaaggccgccaagacccagaccagggaaaagagcagaacggcacccgccagccggccga

SEQ ID NO: 206537 - RNA, 87 nt, Homo sapiens
cgcaagcccacgaaagaaagccacgagggaagccgggcggacggagcagacggaggaccgaagcgaggcagggcagggacagggcca

SEQ ID NO: 206538 - RNA, 71 nt, Homo sapiens
ccacaacagggcggcaacaggggcgagaaagggccgaaacggaggcccgccacggccaggagcccggccgg

SEQ ID NO: 206539 - RNA, 78 nt, Homo sapiens
cgaagcgagggcgaagcacgacacagaaggggaggggagggaaaggcccaggaaaaaggaaacgaaagagcccagaca

SEQ ID NO: 206540 - RNA, 77 nt, Homo sapiens
gcgcgagcgcgaacagaagagaggaagaaaggacagggagagaagccaagaaagacagcacccaagaccgaagaagg

SEQ ID NO: 206541 - RNA, 68 nt, Homo sapiens
ggaccgacagagacaaaacagaggcaccaagaaagaccgggaggaaaacgggaagacccaccgccagc

SEQ ID NO: 206542 - RNA, 85 nt, Homo sapiens
gggagccgggcgggaccggcgcggcgccgggggcaccgcgccgccgagagaggaggcagagagccccgcgacgagagagacagag

SEQ ID NO: 206543 - RNA, 63 nt, Homo sapiens
gacccgaggccagcagggaaagccccgcagcaacaggaaagaccacagcaagaccacgccccc

SEQ ID NO: 206544 - RNA, 66 nt, Homo sapiens
aagaagacgacggagaaggcacaagaacaaggcgaaaaaggcaacaggcaggggacccagcgacaa

SEQ ID NO: 206545 - RNA, 58 nt, Homo sapiens
acagacccgagcgacagaaaaccagacgagagacagaagacgaaagggcaagaaagag

SEQ ID NO: 206546 - RNA, 77 nt, Homo sapiens
gagcccggcaaagagcagacaccaggaaaccacgccggaggggaaaaaaaggcggcccgggacgggccggcgccacc

SEQ ID NO: 206547 - RNA, 95 nt, Homo sapiens
gccaccccaggcaaccaggcaggaagagcggccagaggccagcaggccacgcaagacaaaccgaaaccaccaaagcgggagaaccaaaacggagc

SEQ ID NO: 206548 - RNA, 75 nt, Homo sapiens
gacccaccacgaacacagcgacaccgaacagcgagcacacggcagacacaagaggcaaagcagggaacaaggaga

SEQ ID NO: 206549 - RNA, 119 nt, Homo sapiens
acgagagaaccggagcgccggcaagggcagcgccaccccaacggaagaagacgcccccagcacaggcacagcagcggccaagggaggaacccgacacgggcacggagcaaagaagggaa

SEQ ID NO: 206550 - RNA, 80 nt, Homo sapiens
cgggcgcccaagcgacagcgcagaggggcaggagccgggagccaccgcgaagcgagccgacgaggcggcccaggcacacc

SEQ ID NO: 206551 - RNA, 72 nt, Homo sapiens
cagcaccaggggaagcgggacaacggggaaacacggcaccgggggcggaaaagcagaaaggaaagggaagag

SEQ ID NO: 206552 - RNA, 87 nt, Homo sapiens
ggaaagagccggaaaaggagcagaccggacgagacagacagagcgcccgccgagagcaggagcccaaagaagaagacagccgaagcc

SEQ ID NO: 206553 - RNA, 60 nt, Homo sapiens
gaagcccacaacaaggcagggaggaacgagcaggaacgaggaagagaaaaagacaaacag

SEQ ID NO: 206554 - RNA, 78 nt, Homo sapiens
accaagcgcccggaacccagggcaggacccgccgcagcagcaggggacgaagggaacccgccgggcggcccggcaccc

SEQ ID NO: 206555 - RNA, 76 nt, Homo sapiens
ccgaagcaggccgaagacgggacaggccggacacccaacagcacgcagacaaggcaccaacagaacggccccaaag

SEQ ID NO: 206556 - RNA, 50 nt, Homo sapiens
gcagggaaccgggggccagcggagcggaggcagacacacacggggggaga

SEQ ID NO: 206557 - RNA, 85 nt, Homo sapiens
caccggcagccacgccacagagcggcacaggcccacacgccaggcacgaaaacgaacgcaagcacaggaccagaaacgaaaggca

SEQ ID NO: 206558 - RNA, 81 nt, Homo sapiens
cccacggcagccaagcgcacagaggcagcgcgcccccgagaacaccgggccggaagcccacccaagaacgggccccccgcc

SEQ ID NO: 206559 - RNA, 82 nt, Homo sapiens
caacccgccacacccggggccggcaccccgacccacaggacagccgagaaggcgcgcccccaccccagaagagcagcgccaa

SEQ ID NO: 206560 - RNA, 67 nt, Homo sapiens
gcaaaaaccagagaagaggggccccaccccacgggcgccaggagaagcaggaacgacaacgagcccg

SEQ ID NO: 206561 - RNA, 72 nt, Homo sapiens
aagaggaacagacccaacggaaacaaagccccgcacccagccgaaggcaggggcaaccggccacgcaacccc

SEQ ID NO: 206562 - RNA, 88 nt, Homo sapiens
ccggagacgcgcagacccgcgacccggagcagccggaggcgggaagcgaaaaagaaccccgcagcaccgcagaccggaggaagccggg

SEQ ID NO: 206563 - RNA, 78 nt, Homo sapiens
cgagggcccaagaagaggggacccaaacccaaaacccccgaaggaggagacaaaaaggagacaaggaagaagaacccc

SEQ ID NO: 206564 - RNA, 74 nt, Homo sapiens
gaaggcagaggaggcgcaagacgcgaccaaagccgacggggcaagccccggcaaccacaacgccacaggagcca

SEQ ID NO: 206565 - RNA, 71 nt, Homo sapiens
accaaagagagacgaccacaccaaaccacgaaccagaacccagagaaacagagggcaaagaggaccaaaga

SEQ ID NO: 206566 - RNA, 73 nt, Homo sapiens
caccagccaagaccaagcgcgaaagcgccaaaaggacagcaggcgcgggccccggggccgcggcgaaaggacg

SEQ ID NO: 206567 - RNA, 88 nt, Homo sapiens
ccgcagccgccgccaccgccgccgccggggccgggccccccgccgcgccccgggaaggagacacaacacgacaacaaaccagcgcagc

SEQ ID NO: 206568 - RNA, 107 nt, Homo sapiens
aaaaagaggacccaaaaaagagagaaaaggccaaagagagggcgaacaagcaaggcaggagcacggagaagagaacgacgaacagaaaaagcccaaagagagaacag

SEQ ID NO: 206569 - RNA, 58 nt, Homo sapiens
gaggaagaggacaacaccggaggagggcacccagcaccaggcacgcaaaagaaaggag

SEQ ID NO: 206570 - RNA, 71 nt, Homo sapiens
gccgcccgggccagcggccgcgcacccccggccggaggcaccagcgaggcacgcggaccccagggccggcc

SEQ ID NO: 206571 - RNA, 53 nt, Homo sapiens
cagggcaggcgccccaagagcaggccaggccacacaagccccagccaaaacca

SEQ ID NO: 206572 - RNA, 62 nt, Homo sapiens
gcggggccggggcgccgggccggccccccaggccggagaagccagcacacggggagcgagcg

SEQ ID NO: 206573 - RNA, 71 nt, Homo sapiens
ggggcaaaaggaaggaaggccccagggacggggcccgcagggcccggcccccgaaaggaggccaagaaccg

SEQ ID NO: 206574 - RNA, 76 nt, Homo sapiens
aaaacgggggagagccacggaagccgacagacaaccaggaggaagaaccaacagagaaaaaaaccagaaacaaccc

SEQ ID NO: 206575 - RNA, 77 nt, Homo sapiens
cacggagcaaagacaaagaccccaccaggaccagaaaacgccaacccagacaggacccaaacacaggaacgccaaga

SEQ ID NO: 206576 - RNA, 60 nt, Homo sapiens
acaaacgccgcaccaggcgagcagcgcccccggccgaaagaagaaaacccgagcagagaa

SEQ ID NO: 206577 - RNA, 58 nt, Homo sapiens
gggccggggcaaagggagacacggaggaggaaggaccgagcgcaggaaccaggccagc

SEQ ID NO: 206578 - RNA, 36 nt, Homo sapiens
aggagacgaaccaagaaacagagcgggccaacagac

SEQ ID NO: 206579 - RNA, 75 nt, Homo sapiens
cgcggccgccgacgagccaccaagagaaaaagggaccaggccaacccccaccccggacccggcaggccaccagga

SEQ ID NO: 206580 - RNA, 76 nt, Homo sapiens
gggaacaacacaaagcacaccgccaaacccaggccagagcacagggcagcagaagaagccgaaagacagacgagcg

SEQ ID NO: 206581 - RNA, 83 nt, Homo sapiens
aaagccgaacaggcagggccagacccaggcgcggggaggcccagcccgccgcagggccaccccgcggcccaccgccgccgccc

SEQ ID NO: 206582 - RNA, 69 nt, Homo sapiens
cccgaggcgcccacgacaaggaaagagaagagcccaccgaaggggggcaaaaagcccggaggcggagcc

SEQ ID NO: 206583 - RNA, 77 nt, Homo sapiens
aaccgcgcaacgagcgccgggagcgagcaaaacaagacgagaaggaacagaaccaacaaagcaaggcaaagcagaaa

SEQ ID NO: 206584 - RNA, 65 nt, Homo sapiens
gagcggagcccgggacaggaggcgacaggaagggaggagcccacgcagaccagagaccgcccgac

SEQ ID NO: 206585 - RNA, 104 nt, Homo sapiens
gcggaccggagccagggaaccaggggccgggcagagcggagcggagcgcgcgcccgccccgccgggaggaccgcgagccaacccacgagaacaacccaggcccc

SEQ ID NO: 206586 - RNA, 73 nt, Homo sapiens
gaaagcaaaaagcaagaaagcagaggaaacaacccggcgaggagagcaaggaacaggcaaggcgcaccacgag

SEQ ID NO: 206587 - RNA, 87 nt, Homo sapiens
gcgaagcgggcgagcggggggacgccggcggagacgcgggcgagccccggcacccacaggcccgaggcccaggcccacaggcagaga

SEQ ID NO: 206588 - RNA, 78 nt, Homo sapiens
gcaggcgccccgacccagaggagcccagccaaggaaccagcaccagacagaagacgcagaagagcagcgaagagcaaa

SEQ ID NO: 206589 - RNA, 78 nt, Homo sapiens
gaagggaagaaaaccaacaaagcaacgagagcgcggaacaacagagaagaggagagaccagagaagagaacaagcgga

SEQ ID NO: 206590 - RNA, 63 nt, Homo sapiens
aagacgacgaggaagagcccgccgaagggaacgcgccaggccacgggccagagaacaggaagg

SEQ ID NO: 206591 - RNA, 79 nt, Homo sapiens
cagaaggaccgggagcacagccgccgagcagaaccagagaagaagagggaagagacggagagcagaagcaccccggacc

SEQ ID NO: 206592 - RNA, 83 nt, Homo sapiens
cgggcgggccgggcaagcccgcgggcgcaagaaccgcggcagagcgcacggggcggacgcagagacgagaaaaccaagcagcg

SEQ ID NO: 206593 - RNA, 77 nt, Homo sapiens
ccagcacaaggcaaagacgggaccagcggcggggagaaaaagacgaccaagaacacaggaacacagcacccacccac

SEQ ID NO: 206594 - RNA, 49 nt, Homo sapiens
gaaggcaccaaaggcagacgacccggagacgcggaggcaggcaccgaag

SEQ ID NO: 206595 - RNA, 59 nt, Homo sapiens
gcgccacagggggcagcacagacacaacgccgggccagaggacccggccccacgcagca

SEQ ID NO: 206596 - RNA, 75 nt, Homo sapiens
ccgaaaaaaccgcccgcaggagcggaaaccacaagcgaaaccacagaaacaaccgaaccagagacagcgaaagcc

SEQ ID NO: 206597 - RNA, 67 nt, Homo sapiens
gggcaggaagaccaggaaacagacaggagccaaaccggagcagggacagcgcgggaacaaacaagca

SEQ ID NO: 206598 - RNA, 36 nt, Homo sapiens
gaggacaagcaggcaaagcgaggccccccacccggc

SEQ ID NO: 206599 - RNA, 74 nt, Homo sapiens
gaaaggaggaagaagacaccggggacagacaggcccacaccgccgacgaaagaaagacggaccccagaaaagca

SEQ ID NO: 206600 - RNA, 57 nt, Homo sapiens
cagaacagagaagaaagcagggccacaagacagggcagccggaaacaggaagcaagg

SEQ ID NO: 206601 - RNA, 74 nt, Homo sapiens
gaagagaaagagaaccaggaggcgcaaaaaaagagaaaccagaacaaggcaaaaaagaacgcaagagaagcacc

SEQ ID NO: 206602 - RNA, 105 nt, Homo sapiens
gcgggaaggacgggcgcggacccagaggggacggcgccgcaggagaagccggaggaaggcgcaaggcgaggaagacgaacgaccgaccgcccccgcacaaacccc

SEQ ID NO: 206603 - RNA, 59 nt, Homo sapiens
gcgaaacaaggcagagcacgggacgcaggaacccaggcccgccacaaaaacggcagcag

SEQ ID NO: 206604 - RNA, 74 nt, Homo sapiens
gaccgagaccggaccgagagcggaccgagagcgcgaaacgcacgagaagggaagcgcggcccccgggaccaaag

SEQ ID NO: 206605 - RNA, 82 nt, Homo sapiens
cgacgcacagaggaacacgccggggcccaaccacaagacgaccaaaggaggaaggaccggcccaaggggcccagagaacaag

SEQ ID NO: 206606 - RNA, 67 nt, Homo sapiens
acccccccccccccccaagaaacagcggggacggagagggcagaagagcgagaagaagcccaccggg

SEQ ID NO: 206607 - RNA, 71 nt, Homo sapiens
acccaacgcccgcgccgccgacaaagggagacacaggcaaggaagcggagcaagagagcacacagggagac

SEQ ID NO: 206608 - RNA, 45 nt, Homo sapiens
gagaaaggaagggccccgagacaggagaagcccccacagggcgga

SEQ ID NO: 206609 - RNA, 64 nt, Homo sapiens
ccggcgccccgcacgcccgggaagcgcgcaccgccaagcagcaaggcgccaccggaagaaacgg

SEQ ID NO: 206610 - RNA, 71 nt, Homo sapiens
gggcaccagcccccgcggccgaagaaagggcaggcgagagagggggaacaggaccaacggaacaacacagg

SEQ ID NO: 206611 - RNA, 78 nt, Homo sapiens
agcggcgaagagcaaccagaccagaaaagacgagaaagcacaggggaggagagagaggaccaccaggcaaccaaagcc

SEQ ID NO: 206612 - RNA, 70 nt, Homo sapiens
ggcagcgacaagggcagaccagcaaagcgcagagcaaccgaagcccgagaagggaaaaagacccgagaag

SEQ ID NO: 206613 - RNA, 49 nt, Homo sapiens
aaaccaacaaaaagaaggaaccaagggacgcgagagcccacgaagagcg

SEQ ID NO: 206614 - RNA, 79 nt, Homo sapiens
gggaaaacacaccggagacggggggaaacaggcgaggcggcggcgcccggagggcagcgagagaccaaaccgccagaca

SEQ ID NO: 206615 - RNA, 73 nt, Homo sapiens
cgggcagagcgagccggagaagagggggcccggggggaggaggggcaggcccggcggcagcaaagaccagaac

SEQ ID NO: 206616 - RNA, 71 nt, Homo sapiens
cagagacggagcgacagggccgaacagcacacaaaaagcaaagacgagaaagaggaagagaacaggaaaga

SEQ ID NO: 206617 - RNA, 71 nt, Homo sapiens
ccgggagcgcgagcggccaggccggcgccggccggcgccccggggcccaagccaaaccccgcgaggcaacc

SEQ ID NO: 206618 - RNA, 76 nt, Homo sapiens
ggcacccacacggccggcccggacggcgaacgccccggcccgcgcaaccggagacaccgaccgcgaccccccgcca

SEQ ID NO: 206619 - RNA, 56 nt, Homo sapiens
caggcgagccacgccaccgggcacggagcgaggcaggaccaccgcacccaggcgga

SEQ ID NO: 206620 - RNA, 38 nt, Homo sapiens
acaggccccgcccagaaaaacgccgggaccagggcagg

SEQ ID NO: 206621 - RNA, 89 nt, Homo sapiens
cccgcgcgagggaggaagagaacacccaccggcacaacacacaaagaacccccgagggcgggaaacggcaagagaccagaggacccaaa

SEQ ID NO: 206622 - RNA, 58 nt, Homo sapiens
ccaccgggccccacaccaagagacaggaacgaagaaaagcggaaaaaagggaggccag

SEQ ID NO: 206623 - RNA, 67 nt, Homo sapiens
ggacagccagaagagaccagggccagcgaaccggccgagacgcaacagagaaacgagaagagacaga

SEQ ID NO: 206624 - RNA, 76 nt, Homo sapiens
ccgccagaccacagcacagccgggaaggggagccaccagccccccggcaaaagcagaccggaaaacccaccggcaa

SEQ ID NO: 206625 - RNA, 46 nt, Homo sapiens
gcagggccggccaaagcaagacaggagcgcagaggcggagacagag

SEQ ID NO: 206626 - RNA, 73 nt, Homo sapiens
agcccgaccggaccgacagacggcgcacccagcgacaggccgcgcaagccagaacacgaggacccaaagaaca

SEQ ID NO: 206627 - RNA, 82 nt, Homo sapiens
aaaggagccaccaaagcagaagaaacagagagggaagaccaggacacaccagaccacccgagaaaggcgggggagaaacgca

SEQ ID NO: 206628 - RNA, 78 nt, Homo sapiens
gcacgcaaggaggaaggcagagaagaagggcgaaagcaccaccgggaaagcaccgggaggaaagagagccacacgaag

SEQ ID NO: 206629 - RNA, 79 nt, Homo sapiens
agcggccggaggacagcgggagagagaagagccagagggacacgcgggcacggccggagggcaaagaaaaagggcccgc

SEQ ID NO: 206630 - RNA, 76 nt, Homo sapiens
ggaagaagcaaagcgaaaacagagcacaaagccaggggcgcaggcccaaaccagccccacccggggaacgaaacac

SEQ ID NO: 206631 - RNA, 61 nt, Homo sapiens
ggcggaggcggggggaccggcgggcgggagcacagaccagcgcgcgaccggagccccacag

SEQ ID NO: 206632 - RNA, 76 nt, Homo sapiens
cagagcgcaggaaagacaagccgggagcagacaagagcgagacaggaggggggccgcagcgcagggacacgacccg

SEQ ID NO: 206633 - RNA, 82 nt, Homo sapiens
gcccagacgcacccgagcagagcccggcggacacgagcgccagaccgccggcaccgccacagcaaccagggaccaggaggaa

SEQ ID NO: 206634 - RNA, 74 nt, Homo sapiens
agaagaagacaagaggaaagagccaggaagcgagcccagcccagcacaggggagccaccgaagcccaaaacacg

SEQ ID NO: 206635 - RNA, 67 nt, Homo sapiens
cgcagggcgcccccgcccacagacaaggcgggcaaaaccaggaaacagaaaaaccaggagcgaggag

SEQ ID NO: 206636 - RNA, 114 nt, Homo sapiens
aagaaaggagcaaagcaacagaagacaaggcgcacacacaagaaaggcaacaaaaccacgcagccccggaccgagaggccaaaagaccgagggagaagaaaaaagaagaaagac

SEQ ID NO: 206637 - RNA, 121 nt, Homo sapiens
ggcgaggaggcaagaaaagcggcaaccagaccgcagaacccaaaggcggcacagaacagaggcagcaccccccacagcacggaaagaagaaaaaagcaggcacccgaaacaaaggagacca

SEQ ID NO: 206638 - RNA, 76 nt, Homo sapiens
cggaaggagaaggaagaggagcgcaacacagaagcggagcccaggcaccccccagcgccacggaccgcaaaagcaa

SEQ ID NO: 206639 - RNA, 31 nt, Homo sapiens
cagacaggcaaaaacacggaggggagaaggg

SEQ ID NO: 206640 - RNA, 71 nt, Homo sapiens
ggaaggaccgcgagaaaacacaaaccgaaaggaaagcagccaggcccggggccaagagcaacaagaaacga

SEQ ID NO: 206641 - RNA, 70 nt, Homo sapiens
caaaagacgcgggcacaaccaggggacggcgcgcaccgcgaagacccacaagccggcaccaggggggcgc

SEQ ID NO: 206642 - RNA, 60 nt, Homo sapiens
cgccgccgggagcggaaacagcggcagccagaggcagaacggagagacacaggcggggag

SEQ ID NO: 206643 - RNA, 77 nt, Homo sapiens
cggacgccggagaaaaaaacacaaccccacagggccagcgaaaagcaacaggcagcagcaaggaaacagaacagcgg

SEQ ID NO: 206644 - RNA, 79 nt, Homo sapiens
ggagacccagccggcgggcgagcagggcgccccagcagggggcccgcggcccagcccgggcgcggggcccgcccccccg

SEQ ID NO: 206645 - RNA, 78 nt, Homo sapiens
accggaccgagagcggaccgagagcgcgaaacgcacgagaagaaggacaagagcggggaggaccggggaccgacacgg

SEQ ID NO: 206646 - RNA, 72 nt, Homo sapiens
ggacgcgagaaaaacagggacaagggcaacagccagaagggcacgaagaacacaaagcaaaaaggaaaagaa

SEQ ID NO: 206647 - RNA, 79 nt, Homo sapiens
cggggcagaacaccgaaaaccgccgaagcagcaaaggaagcagagcaggcgaagaaagcaacaagggaggaaggaccag

SEQ ID NO: 206648 - RNA, 71 nt, Homo sapiens
accagcgcaaagacgcccggcccaagagcccaaacacccagaaaggcacagggaggggacccagaaaggca

SEQ ID NO: 206649 - RNA, 75 nt, Homo sapiens
caggaagcacgccacgggagcacagggaaagcaacggcgcaagcggcggcggcgggcagaggacacacagagcaa

SEQ ID NO: 206650 - RNA, 82 nt, Homo sapiens
gaggacccggaggggggacgccagagccggaacggcccacaccagaagccacagcagcaagaggcagcgagaagaaaaagaa

SEQ ID NO: 206651 - RNA, 92 nt, Homo sapiens
cccacaccacccagacacgaccgaagagcaccaggacgaacaagagagacgaagacagacaacaacacacccagcccaaagacggcgagaga

SEQ ID NO: 206652 - RNA, 74 nt, Homo sapiens
ggcggaaaaccaccaaaaccggcagcgagccgagcaacagaaaggcggaaaaaggaaaccacacaaaggaaaag

SEQ ID NO: 206653 - RNA, 43 nt, Homo sapiens
ggaacagcccggccaccaaggaaaaacagcacaagaaaaggaa

SEQ ID NO: 206654 - RNA, 64 nt, Homo sapiens
acacacgagaacgcgcgcagaggccagggagaagagcaaccggacacagaaggggaaggaaacc

SEQ ID NO: 206655 - RNA, 86 nt, Homo sapiens
gaccacgacgaggccggggcacccgcggcccaggagcccgccggcccggcccccggccgcccgggccgcgccgccgcgccgccgcg

SEQ ID NO: 206656 - RNA, 80 nt, Homo sapiens
gcgggccgccgagcggacccggaccggggggccaggcgcagcgccacgggagccggggcagacggccgaaaccgccgagg

SEQ ID NO: 206657 - RNA, 68 nt, Homo sapiens
gggaggcgggcaaaccccacgagggcagcggcaaggagcgaagcagggaaccggggaaaaaaccccca

SEQ ID NO: 206658 - RNA, 80 nt, Homo sapiens
acagccgcccgggagcaaggacagagcgggagccaccagcgccaaagggaagccaggagcccgggggcacggggagaaga

SEQ ID NO: 206659 - RNA, 41 nt, Homo sapiens
caaggaagccacaaacagacagcccaggccggcaccggacc

SEQ ID NO: 206660 - RNA, 79 nt, Homo sapiens
cggccaggagacgcgggcggcagggccagaagcccccaggaggagaacgagcaacggaagccagaagaagcacccccag

SEQ ID NO: 206661 - RNA, 73 nt, Homo sapiens
cggaaaaaccggagacgccaaaaaggacgcaaaacgggagagcagagagagagcacgagcaaagaaaaacaac

SEQ ID NO: 206662 - RNA, 54 nt, Homo sapiens
aggacagacaccacccacaggaagcacaaacaccagcccgaacgagacgagaaa

SEQ ID NO: 206663 - RNA, 79 nt, Homo sapiens
gaccgaggggacgccgcccgccgcccgccgcaggccacccgggaacggaggagggggagcagcagccccgagaaggaag

SEQ ID NO: 206664 - RNA, 73 nt, Homo sapiens
gggagcaagagggcggaggccacgaacacgccggagccgccaggcagccgggagcaccaccgcagcggccgga

SEQ ID NO: 206665 - RNA, 60 nt, Homo sapiens
ccggggcgccacgggggccagaagcagaaggagccaaaaaggggagaggaagaaagaaga

SEQ ID NO: 206666 - RNA, 77 nt, Homo sapiens
gggacaggagcaaccacccagccacccgaccacacacaccaggaaaaaggacgagcaggcccgagaggaaacgccaa

SEQ ID NO: 206667 - RNA, 77 nt, Homo sapiens
caagccaacaacgggcagggcaggcggcggcaagggaagcagagccccgggccgggaaggggaaacggccacgcagg

SEQ ID NO: 206668 - RNA, 70 nt, Homo sapiens
aggaccccggcacaacccgacgacacacacaggagagaacaaggagcaggccaacggccagaagaacgag

SEQ ID NO: 206669 - RNA, 78 nt, Homo sapiens
gaccgcggcagaagaaagcaagacccaggacaccccgaagccgagaaaggaacaagacaccaagggaaggaaacacaa

SEQ ID NO: 206670 - RNA, 74 nt, Homo sapiens
acaccccgggggccccgagcaaaccagggcgaacccaggcacccagagacggagcggaaaccaaggaagaaaag

SEQ ID NO: 206671 - RNA, 77 nt, Homo sapiens
gaagaaaagaaaaggaggagcgaaaaagaaaccacggggcccggagggaaagggagcagcaccggccacacccacag

SEQ ID NO: 206672 - RNA, 77 nt, Homo sapiens
caccgccccaacccacgagaggacagcccaggcagaccaggggaccccacgggaaagcccaggagagagccagccga

SEQ ID NO: 206673 - RNA, 56 nt, Homo sapiens
aaaacagaacgcggagcacagcaagcgggagcaggcagaccaaaggaacagaagcc

SEQ ID NO: 206674 - RNA, 79 nt, Homo sapiens
agagccaaggaggaaggggccggagaagaggggcaaggccaggcccgagagacagaggcagccgggggcaagcagccca

SEQ ID NO: 206675 - RNA, 88 nt, Homo sapiens
cgggccggcgcgaggcgcccggcacaacgaccccagcaggcccaggcccaagccagcccggagagaaaagaccgaggaggggcccggg

SEQ ID NO: 206676 - RNA, 74 nt, Homo sapiens
aacaaagcgcgcagaaagggcgaccaccaaaaaaacgcagagcggacaccaagagggggcagaacaggaagaac

SEQ ID NO: 206677 - RNA, 78 nt, Homo sapiens
aagagagcaacgccagagcccagggcccagaggaccccagccgcgcccgggagagcaaggcaagagaagagcacccag

SEQ ID NO: 206678 - RNA, 72 nt, Homo sapiens
gacacggggaagcgcaaaaacaagacggggcgccccacagaggggcgacgaaccaaagaagagccacagaaa

SEQ ID NO: 206679 - RNA, 80 nt, Homo sapiens
gggcgggaggcggagggcgagcgcaagaggacaacagccccgcaaaggaccccaccccccagaagaggagaagaggaaac

SEQ ID NO: 206680 - RNA, 78 nt, Homo sapiens
gccagaaagccacgggcaggaggacccagcagggaccgggaacacgagagaacgcgaaccccaaagaaagaagaaagg

SEQ ID NO: 206681 - RNA, 76 nt, Homo sapiens
agcacagagcgagaccaggaaagaagggggcagaagagggccaccacgcaccggaagcgagaccaggaggagcgcc

SEQ ID NO: 206682 - RNA, 72 nt, Homo sapiens
ggaagcagggacgaacaaaacagcggaaaagggcacagaccaggccagggccccacgcggggacggggccag

SEQ ID NO: 206683 - RNA, 105 nt, Homo sapiens
gagaaccacccggaggagacggggcagacaacggagcccggggcgagcacacagagaggggaagggcagcagcagcagagaaccaaacccaaagcgaacacaaag

SEQ ID NO: 206684 - RNA, 76 nt, Homo sapiens
ccgccagccaccacgcaccccccccgcaagccacacccagagaaggacggagaagcgaaagccagaccggcaagag

SEQ ID NO: 206685 - RNA, 83 nt, Homo sapiens
caaggaacccacagacggcggcagggggacccaggagccccaaaaccacaggggagccgccaccaaaagcagacggaaaaccc

SEQ ID NO: 206686 - RNA, 53 nt, Homo sapiens
cgggccgcagccgcacgcaaggacagacccgagaaaccggacagcagaggaaa

SEQ ID NO: 206687 - RNA, 72 nt, Homo sapiens
ggccagcccaggacaagaacaaagggcggggagggcacaggcacgaacagacagagaaaccaaacaacaggg

SEQ ID NO: 206688 - RNA, 88 nt, Homo sapiens
aggcgccgagagggcgggccagggccgcacccggagaccgcgggcacgcgcaccaggcggagaggcaagaacagaggaaaccaaagcc

SEQ ID NO: 206689 - RNA, 68 nt, Homo sapiens
aaggagaaacccaagagcagcggcagcaagaggaaaggccgccccggaggaagaaaagggagccaaga

SEQ ID NO: 206690 - RNA, 77 nt, Homo sapiens
ccagcaagacccaacaaaaaagaaacagcaaacaagaggaagagcaaccagggagcacagaaacggccaaaaccaaa

SEQ ID NO: 206691 - RNA, 79 nt, Homo sapiens
gaaggccgcaacgacaaaaccaggggggacaagaacggcggacccgggggaaaccgcaaaagccaccaacaacaccagg

SEQ ID NO: 206692 - RNA, 57 nt, Homo sapiens
accacagaacgaacagcgcaacagaaaccccggaccgccgcgccccccaacgaccag

SEQ ID NO: 206693 - RNA, 83 nt, Homo sapiens
gccgagacggcgcggcaagcacaagcccgggggaaaggcagcgcgcagcagcggcacacaagccaaacagagagaaggcggcg

SEQ ID NO: 206694 - RNA, 82 nt, Homo sapiens
cggcgcgggaccaagacaaccccggcacgaggcgccaccccaggggccagggaacgacccagaggccacggcacagacgggc

SEQ ID NO: 206695 - RNA, 54 nt, Homo sapiens
gcgaagacgccaaaaaagacacacgcccaagagcgggaacgaggaagcagaaag

SEQ ID NO: 206696 - RNA, 85 nt, Homo sapiens
gacccccggggcacagaggaggcaccccgaagccccaaggccgggccggaggggaacacggaagcggcgcacgagggggagcggg

SEQ ID NO: 206697 - RNA, 74 nt, Homo sapiens
agcaacagcaaaacccccaccggacgccaccagaacgaggaggaagaaaacaggcagcgccaaaggggaagggg

SEQ ID NO: 206698 - RNA, 75 nt, Homo sapiens
cgaacgcaagcaaaaaaggcggggcacgagggcaagcaggccacggcagagggaaccgacacgccccggacagcc

SEQ ID NO: 206699 - RNA, 81 nt, Homo sapiens
caccaaacggagaaaggccaacccaaacagcgaggccaaaaagagaggaggaagaagacaaagggcgagcagccccccccc

SEQ ID NO: 206700 - RNA, 60 nt, Homo sapiens
ggcggccgccagcacaagcgcacccgcacagaagccaggggaccagaacgcagccagccg

SEQ ID NO: 206701 - RNA, 73 nt, Homo sapiens
cgcgaaaaggaagcggaaggcaaggcagcaagccgcggggccccaacccgggcagaccagaggcgcagacgca

SEQ ID NO: 206702 - RNA, 73 nt, Homo sapiens
cagcgggcacgagaaaaaagggcagggagaaagaagagagaccagaaacgagaggagaagaaaccagccagac

SEQ ID NO: 206703 - RNA, 82 nt, Homo sapiens
ccagaagagaaagagagaagccaaaccccaggcaggagagggcgaggagccagacaggcgggaacaaccaggacacgagaaa

SEQ ID NO: 206704 - RNA, 75 nt, Homo sapiens
gccaaaagaaacccagggaccagcaccagcaggcgggcaggcagagagggccggcacaggaccaggcgacacccg

SEQ ID NO: 206705 - RNA, 87 nt, Homo sapiens
cggcggcggcggcgccgggcccggggggggacagcaggcgagaaaccaggcgagcggaagaagcaacgaccaagaggaggaacacgc

SEQ ID NO: 206706 - RNA, 70 nt, Homo sapiens
gagaagaggcagcaggaacaaacagacagaccaggcggcaaaaacagaaaaacccaggccgggaaggccg

SEQ ID NO: 206707 - RNA, 38 nt, Homo sapiens
caggaaaagacccaccccaagcaagccacagcgaggaa

SEQ ID NO: 206708 - RNA, 71 nt, Homo sapiens
cgaggcagcgacacaagcggacagaacagacgggacccccagccaaaggcaaagagcccagaggcccggaa

SEQ ID NO: 206709 - RNA, 84 nt, Homo sapiens
gaggagggcgcgcggaggggaaaggcgccgaaaacaagccggaagggcccagagacacagagccaagcggcagaaagggaacaa

SEQ ID NO: 206710 - RNA, 85 nt, Homo sapiens
gcgaggacggggaggacgcgccgcggccaggcagggaggagaccggcacccagacaggggcgaaggcagaggacgggggaccaag

SEQ ID NO: 206711 - RNA, 77 nt, Homo sapiens
cgcccagcccccaagcggcccgcgagcaaacgccgcggccccaggagggaagggcaacaacccaccgggggaaacac

SEQ ID NO: 206712 - RNA, 52 nt, Homo sapiens
gcggcacaacacaaggccaaaaagagagaaaaaccagaaagaaaacagacgg

SEQ ID NO: 206713 - RNA, 79 nt, Homo sapiens
aaagagagggggggaccgaccgcaacagaacggacccgggccggagcaggagccccaggccagaccgggccacgaggcg

SEQ ID NO: 206714 - RNA, 39 nt, Homo sapiens
ggaggcagaccacgagaagccagccggaagggggaagac

SEQ ID NO: 206715 - RNA, 78 nt, Homo sapiens
acgcggccccccccccaacccgcccgcggccagcacccgcccgccgccggcgaccagccacaaggagaagagaaggag

SEQ ID NO: 206716 - RNA, 74 nt, Homo sapiens
gcaaaccagcaaagaaagaaacaagaaccaaagagcaaccagaaaaggaagaacgagacgccaaacaagaagaa

SEQ ID NO: 206717 - RNA, 80 nt, Homo sapiens
gacagaccacggcacggacccgcccgcacaggacacgaggcgcgacgccacagaccacggcccagagaagcaagaaccga

SEQ ID NO: 206718 - RNA, 82 nt, Homo sapiens
ccgcagcagacagggaccggcgcgcaggccacgacccccagagcaacggaaagaacgccggacaacagcggcgaagaaggca

SEQ ID NO: 206719 - RNA, 72 nt, Homo sapiens
gaacgccccccgggcggcggggagggagccgaagcgcacagacacagagagccacaaaagaaggaacgacgg

SEQ ID NO: 206720 - RNA, 85 nt, Homo sapiens
ggagcgcaggcaagcaacgagggagagcgcggcgcacagagcggccgacaaggcaccaagcgcaggccgcccccggacacagcgc

SEQ ID NO: 206721 - RNA, 61 nt, Homo sapiens
gggagaggcacagagcacaggcaggaacaacaccagacagagcagcaaccaggggaaacca

SEQ ID NO: 206722 - RNA, 82 nt, Homo sapiens
gaaaaccggccacaaaaccagagcggagacacccaggaggcagaagccagacagagcgggagccaccagcgccaaagggaag

SEQ ID NO: 206723 - RNA, 49 nt, Homo sapiens
gcagcgcccagcagcgcagaccccgcacgagagcggagagccaccaagc

SEQ ID NO: 206724 - RNA, 75 nt, Homo sapiens
ccagaccagcagacaaagccccccaaacaccacaagggcgaaaccagcgaagacacagccacccaaaccgccccc

SEQ ID NO: 206725 - RNA, 37 nt, Homo sapiens
aaaagacaagagaccggaagagaggagagggggcaaa

SEQ ID NO: 206726 - RNA, 71 nt, Homo sapiens
aggggccgacaaaagcgcagcaagacggccgcgcggcccgcagggaggcgaggaggcaagcagagacgggg

SEQ ID NO: 206727 - RNA, 79 nt, Homo sapiens
aacgcggaacgacaaggacgaacagcggggacgccccagcagaccgcccaggagaggaaagcaggaggaaagaccaccc

SEQ ID NO: 206728 - RNA, 73 nt, Homo sapiens
ccaggaaaagccccgacacggccaccggccagacacgggaaaagaacagaggagccacagagaacagaagaaa

SEQ ID NO: 206729 - RNA, 76 nt, Homo sapiens
ccaggacgcgagaagggaggcgccaggggggcagggaaaggaggagaagaacaagaggccaacagcagacgggagg

SEQ ID NO: 206730 - RNA, 79 nt, Homo sapiens
gcccaaacccggaaacccagcggcccagccggcagcccccgcgacgagcccccaacgagccaccaacaggaacagaccc

SEQ ID NO: 206731 - RNA, 75 nt, Homo sapiens
ccccgggggcagagggcagcaagaggcgcgcagagggcgcaggcggcaaggaagaggcccggaaagggaaaaacc

SEQ ID NO: 206732 - RNA, 71 nt, Homo sapiens
caaaaggcgacgcacacaacccccgaaagcacaacggcaagcggagaagagcaaggccgaaccgagaggaa

SEQ ID NO: 206733 - RNA, 74 nt, Homo sapiens
ccaggaggaccgggagaggcgcgggaggcgaggaggcggcggcggagacggccgcagaaagcaacaaagcgaga

SEQ ID NO: 206734 - RNA, 73 nt, Homo sapiens
caagccggaggagaagcaagaaggcccggacacagcaaaccgggccacagaccgggaacgggcgggcgagaca

SEQ ID NO: 206735 - RNA, 78 nt, Homo sapiens
gaacgggccaaagaccaggagagacgagcagcccagggagcgggagacagaaacgaggccgaagagcgaagacacggc

SEQ ID NO: 206736 - RNA, 77 nt, Homo sapiens
aagaagaagagaccaaaaaaagaaaaaggaagaccacacccccgacagggggaggagagacaagaagaagggaccga

SEQ ID NO: 206737 - RNA, 99 nt, Homo sapiens
gcgagccagcgcgccgcagccccccaagcggccgcgagaagcagcgggggggcaggcgacgaaggaacaagagagagaaccaaaaaccgccccgaggca

SEQ ID NO: 206738 - RNA, 70 nt, Homo sapiens
aggcccaggccaaaagagaccaaaaacggaggccaccgagccccagagaagaagacgggagaagagaacc

SEQ ID NO: 206739 - RNA, 43 nt, Homo sapiens
cccagcaggacccagcacgggccggaccggacaaaggccacgc

SEQ ID NO: 206740 - RNA, 85 nt, Homo sapiens
cgcgccggacggcgggccccgggaccgggcgggaacccgcggggagcgggacacgaacgggcgacagcgaccgaagaacagagcg

SEQ ID NO: 206741 - RNA, 71 nt, Homo sapiens
gggcgagaccaggagaccggcagccccagcgacccaagaaccggaacgcccgggaagagcaggcaccagcc

SEQ ID NO: 206742 - RNA, 79 nt, Homo sapiens
ccaacgagggaaacaaaaaaaagaccagacagagaagccgggacaacaggccaggccacgaacacaggcaaaacaacaa

SEQ ID NO: 206743 - RNA, 69 nt, Homo sapiens
ccagggaggcaggggcagaaacagagaaggaacaggggccaaggagaccgcacgccggacggagcccac

SEQ ID NO: 206744 - RNA, 81 nt, Homo sapiens
ggcgaccgagcgggcccggagccaccggcccaggcgcggggaggcccagcccgccgcagggccaccccgcggcccaccgcc

SEQ ID NO: 206745 - RNA, 84 nt, Homo sapiens
ccgccgccaccgccgccgccggggccgggccccccgccgcgccccgggaaggaggaccagagaacggggacaagccgccggacc

SEQ ID NO: 206746 - RNA, 88 nt, Homo sapiens
cagcaacacagaagccgacaaggcgcaagcgaaaacagaccgcgagcccagaggacccagagagggaccagggccaaagaagagccgg

SEQ ID NO: 206747 - RNA, 73 nt, Homo sapiens
ccgccggcgcgcgagccacacaacccgcgccggccgcgggaaggagaggaaagcaccggggaagaaaacagcc

SEQ ID NO: 206748 - RNA, 81 nt, Homo sapiens
gaggcccacagaaaagccacaacccaggagcaggggccccgagggagcgcgccccggccgccaccgcgaaagggacccagg

SEQ ID NO: 206749 - RNA, 39 nt, Homo sapiens
cggagacgggggagacacaggcaccccagcccagccagc

SEQ ID NO: 206750 - RNA, 81 nt, Homo sapiens
gaaagagccgacggacggccggcgagggcacgggggccagcaggcgaaagagaagcaaaggaagaagcgaagcaacggaga

SEQ ID NO: 206751 - RNA, 73 nt, Homo sapiens
caaagcgaggccagagaaagagaagcggcacccccaggaagcgcggaacaacgagcagagcacaggaagcgcc

SEQ ID NO: 206752 - RNA, 52 nt, Homo sapiens
cacccagccagcacacacgaaagacagagcaacgaacaccacagacgaaagc

SEQ ID NO: 206753 - RNA, 73 nt, Homo sapiens
cgaacgaacccagaagcccgcggaaggcagcaagaaacagaccgaagagcaagaaacacgagaacagcaccca

SEQ ID NO: 206754 - RNA, 60 nt, Homo sapiens
aagaaggacacggggggaggcggaggaacaccggaagacccagcagcgcagaaagcaaac

SEQ ID NO: 206755 - RNA, 81 nt, Homo sapiens
agcaccacagccaccacaccaagacaccaggggagaccagcggacggccaaggaggaggagcgcagcacccagggaaggca

SEQ ID NO: 206756 - RNA, 73 nt, Homo sapiens
acccacccacgccaggaccccgccaaggagccccacgagagcaggaaaaggggagaaacggcacacgggacag

SEQ ID NO: 206757 - RNA, 80 nt, Homo sapiens
gaaaagacccagaaggaaaagagagaagacagaagaacaagcaaagagaaacagcccgccggcgccagcgaccagggcag

SEQ ID NO: 206758 - RNA, 81 nt, Homo sapiens
cgaaagaagaaaacaagcggacacgggaaaaccgaagccgaagaggccaagacccacagcaaaagaggcggcaaggcagcc

SEQ ID NO: 206759 - RNA, 68 nt, Homo sapiens
caagagcagccaaccaaaaggaacgcggaagcggcgcaccgaagaggcgaacgaaacagacggcagga

SEQ ID NO: 206760 - RNA, 79 nt, Homo sapiens
cacgggcggggagcgcccacgccaaagaacgcccaacccgacaagagacgaacaccagaaaggggccacggagggaaga

SEQ ID NO: 206761 - RNA, 54 nt, Homo sapiens
gagagcacccaacacccacgccaaaaagggaaaaaagagagccacgacgaaagc

SEQ ID NO: 206762 - RNA, 71 nt, Homo sapiens
cccgaccccaggccgaggaccgcgaagcccagagcacccaaggaccacccccacaggccccaggaaccaca

SEQ ID NO: 206763 - RNA, 78 nt, Homo sapiens
cagagccgagggcagaggagaaggcggaaggcccacaccccacccaggaggaaggaacagagccacagagaaaaagac

SEQ ID NO: 206764 - RNA, 60 nt, Homo sapiens
gcaccggccgagccacggagcaaggggccaggacccaaagacaggaccacgcaccagcag

SEQ ID NO: 206765 - RNA, 79 nt, Homo sapiens
ggagcgcgcgggagcccgggcaccagagcgacgggcaggaaggagggggcgcacaaacgaggagcaaaggaccgccaag

SEQ ID NO: 206766 - RNA, 74 nt, Homo sapiens
ggggagcgaagcgcgcgggggggaaggcgccaaggccagaaaggaggaacagcgacagagcgcagcagaaggag

SEQ ID NO: 206767 - RNA, 94 nt, Homo sapiens
cggccgacgcccccccccgcccggaaagcgcccagccaccagcaaccccccaggcggcgcccagcggccacacgccccaagcgccacgcccggg

SEQ ID NO: 206768 - RNA, 72 nt, Homo sapiens
gcaacaggggccagccacaggaggaaaggccagaccacagaagggcggaaaacgaggaaacaccggacccac

SEQ ID NO: 206769 - RNA, 79 nt, Homo sapiens
caagaaggcgccccggaacaacaccgggggcggaaggcagccagacaggccaggacagcggaggccaccacccaaaaga

SEQ ID NO: 206770 - RNA, 82 nt, Homo sapiens
gaggcgacgcacaggcgcaagacacaccggaggcgacggccaggccacaggaagggaaaaggccgaggcacagcgggaagac

SEQ ID NO: 206771 - RNA, 83 nt, Homo sapiens
cccgaccgggagaggacaagaccacgagccaggcggacgaaagaaagaaggagcaccaacgcaaagaaaaagaccaagaagac

SEQ ID NO: 206772 - RNA, 81 nt, Homo sapiens
ggcgggggacaagcggcgccccagagcggacgagggagcaggcgaagcgagccagggaagcgaaccaggcgaacaagacga

SEQ ID NO: 206773 - RNA, 62 nt, Homo sapiens
ggccgggaagcaagacccaaccagagccgcaacaggccaggcagcgcgaccaaacgaaaaag

SEQ ID NO: 206774 - RNA, 33 nt, Homo sapiens
aggacgacaagcacccagccgaggaagcaggca

SEQ ID NO: 206775 - RNA, 61 nt, Homo sapiens
cagggcgccggcggagggaaggcgcgggaggccaaaacagaagaggcaaagcccagccaca

SEQ ID NO: 206776 - RNA, 56 nt, Homo sapiens
ccccggccccggcccgcccggcccgaccccgaggaaccagcgacagaccgggcacc

SEQ ID NO: 206777 - RNA, 82 nt, Homo sapiens
cgcggaggccgccgcagcaaggccgagccgagcaccgccaccccccagaaccaccagcaccacaccgaaagagacaaaaccc

SEQ ID NO: 206778 - RNA, 87 nt, Homo sapiens
cgagcaaccgcaggaaaaccgggaaaaaccgccccaggacagcaacgccagagagcccacgaacggcgggaacagaaagccagaggc

SEQ ID NO: 206779 - RNA, 75 nt, Homo sapiens
gaagcagagaagccgaggagaacccaggagcaggaaaagcagaacagccgcggcccaagaacggacgcacacaga

SEQ ID NO: 206780 - RNA, 80 nt, Homo sapiens
gcaccagccaggcgcagacccccgcgccaggagcacccaggggacgagcccccgggcacaaagaacccgaaagacaagcc

SEQ ID NO: 206781 - RNA, 62 nt, Homo sapiens
cggaggccgacaggacgggcgccgccccgcgcggcagggccgccaggcacagagaaggcaaa

SEQ ID NO: 206782 - RNA, 79 nt, Homo sapiens
gcgggcagacaggaccagcacgggagaggcaggacaccagcccgggcccagcagagaggccggcagagacagagcggaa

SEQ ID NO: 206783 - RNA, 75 nt, Homo sapiens
cgggaagcaggacgcgccgcgccccaaggacccccggggacagggggggcccggggccggcccggccacccgccc

SEQ ID NO: 206784 - RNA, 83 nt, Homo sapiens
cgcgggccgaagcgcccggagcgggagcgagcggcgcggcccggaccacagccgcgcaacgggcgaccccgagggaacagagc

SEQ ID NO: 206785 - RNA, 81 nt, Homo sapiens
acccgccgacgcccagccgcggggcccgcacggaccccaccaaccaccggggcccaggagaaggcagaaaaggaggcacgc

SEQ ID NO: 206786 - RNA, 69 nt, Homo sapiens
acaaacagcagggagaagagacaacaagacagagccggcggcggggacaacacaggagagcccggaaca

SEQ ID NO: 206787 - RNA, 75 nt, Homo sapiens
aggaccgggccgcaggccaccaagaccgggaacaagcaaacaagcagaccggaagaccgacggaagaccacaccc

SEQ ID NO: 206788 - RNA, 40 nt, Homo sapiens
ccgcaaaggccggcaggaggcaccagaggaaagccaacgc

SEQ ID NO: 206789 - RNA, 54 nt, Homo sapiens
ccgcaccccgggccaggaaacaagccagaaccagagaacagcagaggcccagga

SEQ ID NO: 206790 - RNA, 88 nt, Homo sapiens
gcgcagcccggaaagccggcaagacgagaaagcaggacgcggcagagcgcaagccgacacgaggcgggccacagccacgagcagagag

SEQ ID NO: 206791 - RNA, 75 nt, Homo sapiens
caccagcaaaaacgaagcaacagcccgaacgacaggcgagacaccaaaccgaccagcggacccaaagacaggacc

SEQ ID NO: 206792 - RNA, 70 nt, Homo sapiens
ggcagcagaagggcgacgagaccaacaagacgagggcgcagcacagcagcccaacacgaagaccgccaga

SEQ ID NO: 206793 - RNA, 74 nt, Homo sapiens
ccgcacaccgccggagcccgcagcaggcacgcgcacagcagaaaccaggcccaagaaggaaaaaagaaaacaaa

SEQ ID NO: 206794 - RNA, 66 nt, Homo sapiens
agagagaccgccacagcagaagaaaagaaggaacgaagcagagcccaacaggggagccgagaagcc

SEQ ID NO: 206795 - RNA, 63 nt, Homo sapiens
gcgcgaggacagccgcaggagccgggacacggcaggccaggcaccggcccgaccagccacgac

SEQ ID NO: 206796 - RNA, 38 nt, Homo sapiens
aaaaaggaggggaccgaggaacagcgcgacagagggag

SEQ ID NO: 206797 - RNA, 49 nt, Homo sapiens
cgcagccacagcgaggagcgaggaaaaagaagaggaagaggagcccaaa

SEQ ID NO: 206798 - RNA, 72 nt, Homo sapiens
aaccaggggagagcgacccaaacaaaggggcagcaaaggaggcaccgaacaggcacaaagaagccccacaaa

SEQ ID NO: 206799 - RNA, 69 nt, Homo sapiens
gagcccgaaccgccagcagaagaaacggcacaagccacgaacgacgcacggaggccacaacaccacacc

SEQ ID NO: 206800 - RNA, 79 nt, Homo sapiens
accccaggcgggccaaggaaggccggagaaggaaagaccacagcaagaccacgcccccagccgggggaccaggccgaac

SEQ ID NO: 206801 - RNA, 79 nt, Homo sapiens
gggcggccgcgcccgcgcggcaggaggggacggccgggccggcgagcgggacgacccgggacagcccacggggcagacc

SEQ ID NO: 206802 - RNA, 70 nt, Homo sapiens
cgcggaagcggggcgcacaccaccggacaaccgacaaaagccgacggccagaaggagaaaaaagagcccc

SEQ ID NO: 206803 - RNA, 73 nt, Homo sapiens
ggggcggagaaacaacagaagaacgagcagaaagaacagaccacccgaaagggccggaaacgcaggggccagg

SEQ ID NO: 206804 - RNA, 59 nt, Homo sapiens
ggacccgaccgccgcgcgggggccaacaagcaggcccaagaggcgccagagaccacaca

SEQ ID NO: 206805 - RNA, 41 nt, Homo sapiens
ggaacaaaaggcagcaagcgcaggacaggagagacaacgga

SEQ ID NO: 206806 - RNA, 75 nt, Homo sapiens
aggccgccgcgacacccccgcaccggggccggcaaaacaaacggagagaggagggagaaacaaaggccaaagacg

SEQ ID NO: 206807 - RNA, 66 nt, Homo sapiens
ccgcgccacaggagaaacccacccgccggaggaggcccccagccacgggaacaggagggccggccc

SEQ ID NO: 206808 - RNA, 56 nt, Homo sapiens
cgcagaggcaaggggccaccaggaggccagggggcgccagggccaaccagaagacg

SEQ ID NO: 206809 - RNA, 84 nt, Homo sapiens
gagagcgagggcggggcggcaccggcgagccagcgccaggccacagggcaccacaacacgcccacccaggaggcggccggccaa

SEQ ID NO: 206810 - RNA, 78 nt, Homo sapiens
agaagaaaagagcaaggagcagcagccacaaaagaccaaaggcgcagaacccagcgaacacaaacgaccaggagcggg

SEQ ID NO: 206811 - RNA, 82 nt, Homo sapiens
agcacagagaaagagaagagaagagaaaggcccggagacgaccccagcccggcacaaacaggaaggacagccagcccagccc

SEQ ID NO: 206812 - RNA, 81 nt, Homo sapiens
cagagcgaggaccagacggccgccgacaggagccgggcaggccccgaagcggggggcaacaacgccggccacacggggggg

SEQ ID NO: 206813 - RNA, 85 nt, Homo sapiens
cacaggagaaggcgacaggaaccagccgggggccaaccgaggagccacgcagcagcgacgagagaacagcccccaggagaggcag

SEQ ID NO: 206814 - RNA, 79 nt, Homo sapiens
accgaagaagaagacgagaaaagaacacagaagcaaggcagcaagcgcggcgagaagcccccgagccgagcggaagcgg

SEQ ID NO: 206815 - RNA, 81 nt, Homo sapiens
gacagggcaaaggacagaccagggcggggaacagaccagggaaggggaggagaagagccgggaaaaacacagcaagaacca

SEQ ID NO: 206816 - RNA, 96 nt, Homo sapiens
caaccagacaagaggaaccgcgccccagaaggcagaggaacacaacaggacccagagagggaccagggccaaagaagagccggggggcaggcggac

SEQ ID NO: 206817 - RNA, 82 nt, Homo sapiens
ccggaagagcgccacagagaccacgcaggacagccggacgagccgccgcagggcgaaggcgaggacccccagcccccagagc

SEQ ID NO: 206818 - RNA, 40 nt, Homo sapiens
gcacccacccaaagcccacgggggaccaggccacagcggc

SEQ ID NO: 206819 - RNA, 55 nt, Homo sapiens
cgagcccagggggcacgcggaaacgggcccagccagcagagccacgccagagcac

SEQ ID NO: 206820 - RNA, 40 nt, Homo sapiens
cacgccggacaaggagaggagggagcccacaagcccggag

SEQ ID NO: 206821 - RNA, 83 nt, Homo sapiens
gggccgccaccaacagagaagacagagcaccaacgaggacccagacagccagccacaagcagccgcccccaggagcacgcagg

SEQ ID NO: 206822 - RNA, 64 nt, Homo sapiens
acccaagcacacaggcccacgaccgaagggacagggaaagagacggaggaggagccgacaccgg

SEQ ID NO: 206823 - RNA, 72 nt, Homo sapiens
gaaccgccacccaggcccaagaagaggaaacagagcagaaacgaaaggagaaaaaccaagaaagcaaaggaa

SEQ ID NO: 206824 - RNA, 57 nt, Homo sapiens
gacagaccggaggaggacgcagcaacacaaggaacaaagaccaggaacggagccgag

SEQ ID NO: 206825 - RNA, 79 nt, Homo sapiens
gaaaggaagcaagcagcagaagagccaaggaaaaacagcaagaacccaaaagggaaacaagaacgcaagaaggaaggga

SEQ ID NO: 206826 - RNA, 59 nt, Homo sapiens
gaacagcaagaaacaaacgcacccagaaacaagggcaaaacaaccgaaccccgcacaga

SEQ ID NO: 206827 - RNA, 57 nt, Homo sapiens
cgcgggaggaaacccacacaacgagcacaccggagccagaaccagggggaaggcccc

SEQ ID NO: 206828 - RNA, 87 nt, Homo sapiens
ccgcggaaaccgccaggccagaaacgccacagagaaacacaaagcagccgggaccgaagcagcccaagaagccgcagccgccgcgac

SEQ ID NO: 206829 - RNA, 74 nt, Homo sapiens
accaacgagacacagccgggcaacggcacggaggagcagaagagcagcagcccacggggaggcggaagccccaa

SEQ ID NO: 206830 - RNA, 69 nt, Homo sapiens
aggagggaaaccaagcaagacggccaaccacgaggacaccacagccaaacgcaggcggaaaaaaggaac

SEQ ID NO: 206831 - RNA, 78 nt, Homo sapiens
gaccacaccggccccgcaagaggagccaggaccacaccaaggagaagaagacccgggcagagacggggagcccccaga

SEQ ID NO: 206832 - RNA, 65 nt, Homo sapiens
ggagcgagaaagccggccccagcaccaccaagagcagcccgacggccaggaggcgaagagacgag

SEQ ID NO: 206833 - RNA, 53 nt, Homo sapiens
ggagcacccagaacccggaaaggccagccaaggacggcaacggggagaggcga

SEQ ID NO: 206834 - RNA, 75 nt, Homo sapiens
acgaggaccaacacccgggcaaagagaacggcggcagaaaacaagggaggacacccaacgcgagaccagcgggaa

SEQ ID NO: 206835 - RNA, 75 nt, Homo sapiens
agaagaaagaacaaacaagggaacagcagagcggcgaccaccagaagacaagggggcccccaaagggaagccaaa

SEQ ID NO: 206836 - RNA, 81 nt, Homo sapiens
aaggggccagggcagagggcaccgagcggcggagagccgggagaaacacaaagaggcccccccagccggcgaccagccacc

SEQ ID NO: 206837 - RNA, 50 nt, Homo sapiens
gcaacgaagaagacaggccaacccagcggcaccagaagaaagaagagacc

SEQ ID NO: 206838 - RNA, 77 nt, Homo sapiens
agcggaccggggcagaccaaacggcaaggaagaagaccaaaggacaaaaaagacggagagagaacaggccaacggga

SEQ ID NO: 206839 - RNA, 58 nt, Homo sapiens
aaacggcagcgagacggccggccgaacaaaggcagggagggaaccgccggggccaaca

SEQ ID NO: 206840 - RNA, 78 nt, Homo sapiens
aacgccaccagcgaacggagaggagccagagccccacgggaaggagagcagccagcaggccgaccccgggacacaccc

SEQ ID NO: 206841 - RNA, 68 nt, Homo sapiens
cccgccacccccgggccaacacaccagcggcagcggcagacaccagcagcaggaacgggcgcaccacg

SEQ ID NO: 206842 - RNA, 61 nt, Homo sapiens
gaagacggaggcccccgccaacgcagccagggacccagacaggagcgcgggaagaagccgg

SEQ ID NO: 206843 - RNA, 83 nt, Homo sapiens
cggaggcgacggggcggcccggagccggcgcgaaccggcccccgcagcgggacccgggagcggaccccgaggcgcaagcgaac

SEQ ID NO: 206844 - RNA, 81 nt, Homo sapiens
ggagccgcgggccagaccaccgggaagacccgcaccgcgagggggcacccgccagcggcaagagccgcgcagaaacggcac

SEQ ID NO: 206845 - RNA, 109 nt, Homo sapiens
gcaccgcgccccccacccggacggccaacaccaccggcacaggacggccagaggaacccgccacaagaccaaaaaaaaaagagccaacagggagcggcggacgggccac

SEQ ID NO: 206846 - RNA, 62 nt, Homo sapiens
ggggggacgcgccaggcacagcagcagaccgccagagcggaacgaccccagagcgagcccgc

SEQ ID NO: 206847 - RNA, 85 nt, Homo sapiens
ccgcaaccgccagcaccgggaagagaaagaaaagccgaaggcaccagacaggcccggccaacgcaacagggagcccacgcaagag

SEQ ID NO: 206848 - RNA, 75 nt, Homo sapiens
ccgcgccgacggcgccaaacacagggccaaagccgacagaaaaggaagagacccagcgaacaagaggaagacgag

SEQ ID NO: 206849 - RNA, 40 nt, Homo sapiens
cccgcgcgcggcgcgacagagcccgcggccccaaaaagcg

SEQ ID NO: 206850 - RNA, 56 nt, Homo sapiens
cacccgcaggggcagacagcacaaccagcgagcgagccacccccggcgcccgcggg

SEQ ID NO: 206851 - RNA, 70 nt, Homo sapiens
cgggaagcgagaaaacagacagagcagaagaaaccaagacggcagagaggaaggggaagcaggccaaccc

SEQ ID NO: 206852 - RNA, 83 nt, Homo sapiens
gcacccccagggcggcacgcgcagggggcaccgaaacagggcgcgcggagccaggacagcggagcagcgcggaccccgcgggc

SEQ ID NO: 206853 - RNA, 75 nt, Homo sapiens
gaaacaaagaagcagcgcgaaagcagcccagaagaccagcaccggaaggaggcccccgccggacgggagcaagcg

SEQ ID NO: 206854 - RNA, 78 nt, Homo sapiens
cccaaggcaagacccaaggcgacgaccgacaggggggaaagaaagcagaagaacgagggccacaccaacaaacagaga

SEQ ID NO: 206855 - RNA, 70 nt, Homo sapiens
agggcagacaggcgcgggaagggacaagggaaacacgaagggaaaggccgagcgggggcaaagaaagacc

SEQ ID NO: 206856 - RNA, 36 nt, Homo sapiens
gaagacaacaagcaagagccaagcccccgaaaccga

SEQ ID NO: 206857 - RNA, 71 nt, Homo sapiens
cgcgagccacaccacaaagaagcagccagagagggagagacagaacaacaagaaggagaaagacacaacga

SEQ ID NO: 206858 - RNA, 78 nt, Homo sapiens
cgcccacgggggagcgagccggagacagccggggccgcaccacagacacgaagaccgcaccacaagccaggaaggggg

SEQ ID NO: 206859 - RNA, 60 nt, Homo sapiens
gagaagccaccagggagcccacggcacagccccaggggcgggccacgcgcggggcggcgc

SEQ ID NO: 206860 - RNA, 57 nt, Homo sapiens
gacggcccagaaaaggaagagacaaaccgcgagaacaaggccagaacgaagcacaac

SEQ ID NO: 206861 - RNA, 79 nt, Homo sapiens
cacagcgcgggagccacgcagaggacgccggaacacccggaagccgagaaaggcacccgacccgcccgcagcagggaca

SEQ ID NO: 206862 - RNA, 71 nt, Homo sapiens
ccagagagccacccacaagacgccacaggccggcaacgccaggacaagaaaaccccaggacacagagcggg

SEQ ID NO: 206863 - RNA, 79 nt, Homo sapiens
gggccccgagcccgcggcggagccacccgcacacgcacccaggggcagccgcaagggcacgacgccccacgggagcaag

SEQ ID NO: 206864 - RNA, 72 nt, Homo sapiens
ggacagcagccgggcagggcagagacaggcaacagacggcaacgaaaggcacaaaaacgcaacacaaagagg

SEQ ID NO: 206865 - RNA, 56 nt, Homo sapiens
cgggaacccccacgcggccagcgaaaacgcccagaagcacccaagccagggagcgg

SEQ ID NO: 206866 - RNA, 79 nt, Homo sapiens
agaaggaacaagccagagaaggcccgaggagagaacaggggacggaaagagagccgcagcgcagaacaagggaaaaaag

SEQ ID NO: 206867 - RNA, 72 nt, Homo sapiens
gaacgaaaaccggaagcagagcggagccacgaccccggcgggaggagcaacaggagccagggcccgggccac

SEQ ID NO: 206868 - RNA, 85 nt, Homo sapiens
ggacgacgggaccgggaccgcgcggacccggccgggagaagcagcagcgcaagcccccagacaggccaacaagggccccaggcag

SEQ ID NO: 206869 - RNA, 86 nt, Homo sapiens
gcagcccacagacagccccagccgggcccagccccagcagagaccagagaagccccccaccagccccaacagcaacaacaggacca

SEQ ID NO: 206870 - RNA, 83 nt, Homo sapiens
gccggccagcgccggaaaccaacaagggcaaagaaaaaggagagaaaaagaggcaaaacaacaagaagaaaagagaaaaaaga

SEQ ID NO: 206871 - RNA, 60 nt, Homo sapiens
gccggccccgcccacccgcaaacagacccagcccgcggaaggcgaccacaggcaaacgag

SEQ ID NO: 206872 - RNA, 64 nt, Homo sapiens
cgggccaggcgcgcccggaagcaggagcggccaacagccggagcgaccccccagaccggccgcc

SEQ ID NO: 206873 - RNA, 81 nt, Homo sapiens
cgcagaccgcagaaggccggagacaccagcaggggagcccccgagcgcccgcgacgcagcacggacccacaacgaggccag

SEQ ID NO: 206874 - RNA, 79 nt, Homo sapiens
caggacaagagaagcacaaaacagcagacccaagagcagcggaaaagaccagcacagggaaacaaagcaaagaacagcg

SEQ ID NO: 206875 - RNA, 78 nt, Homo sapiens
ggagggggccaagcaccccaggagagaagcagaagaggaaaaacacaccgacagcagaacacacgcgaaaggaaacca

SEQ ID NO: 206876 - RNA, 75 nt, Homo sapiens
gggccacggcgccaccgacggcagaggaccgcccgcgcacagagcagggcggcccggcacgcagccagcgacggg

SEQ ID NO: 206877 - RNA, 80 nt, Homo sapiens
agaagcaggagaggacaaggagaggagcggccaccgggagcaggagagggccagaagacaaagggccagaggccaggcac

SEQ ID NO: 206878 - RNA, 51 nt, Homo sapiens
agaagacaaaggaccaggccccaagaaggggaagagcgagcaaaggaaaac

SEQ ID NO: 206879 - RNA, 76 nt, Homo sapiens
cgccccagagcggcaggagaagcacgaagcaccaaaacagaccggcaacggcaaggcccaagagggccaggaagaa

SEQ ID NO: 206880 - RNA, 76 nt, Homo sapiens
cgcaacgccacgacagaaggcgccaggcgggaaaccggcccagcggcgaagagacgaacgaagcaagacagcagca

SEQ ID NO: 206881 - RNA, 76 nt, Homo sapiens
accaagacccgacacaaggcagccccacagcaggggacagcacagcgaaccagaaaaggaaaacgggaccaacggg

SEQ ID NO: 206882 - RNA, 80 nt, Homo sapiens
gagagcgagcgagggggggcgcgccggaaaccggagcgcgcagcaggaggcaggggaagcacaaaagcgcacccgcgcca

SEQ ID NO: 206883 - RNA, 88 nt, Homo sapiens
cacaggaacgagggacaggaccaggagggccccaacgagcccacggagacccagaggagcgcgacaacaaggagaaggccaacaacgg

SEQ ID NO: 206884 - RNA, 67 nt, Homo sapiens
gacgcccggcaaaggagcgcaagagagaagggagcggccagaggaccaagacagaccggaagcaccg

SEQ ID NO: 206885 - RNA, 103 nt, Homo sapiens
cacgaaccaagccaaagggccccccggaaaaaggaacaagacacaaccaggacagagccacgaaccccaggacagcagacgcaggggcagcgcggaccgggaa

SEQ ID NO: 206886 - RNA, 56 nt, Homo sapiens
ccaccccagacaggggaacagggcacagcccacccaggaaggaagacccacaagag

SEQ ID NO: 206887 - RNA, 75 nt, Homo sapiens
cccaagaagaccacagagggacccggacaaccagaggcagccagcagggggaggaggcaagggcgcggcgcccaa

SEQ ID NO: 206888 - RNA, 56 nt, Homo sapiens
caccggaagcgggaaagacaccggcgaacaacccagcgggacaaaacccgcagacc

SEQ ID NO: 206889 - RNA, 76 nt, Homo sapiens
gccgagccgagaggcaagacaacacacccagaaggggcggaacaccaaccaggaccacccagcaagcagccagcca

SEQ ID NO: 206890 - RNA, 70 nt, Homo sapiens
cggggccggggaacacacagacaagagacgaaaccacccacacaaggagggcaaaagaaaagaggaggcg

SEQ ID NO: 206891 - RNA, 66 nt, Homo sapiens
aagcgaccgcccagcccgagagcgggaacagggccaagggacaaagagggccgggggcgagggcag

SEQ ID NO: 206892 - RNA, 72 nt, Homo sapiens
agcacaagccaaggacgcaagacacgagaccagaagccaagaaacgaggagagccaccaccaaggagacacc

SEQ ID NO: 206893 - RNA, 59 nt, Homo sapiens
aagaaggagaggggagaaccccaggcaacggccccccgcggggccggagaagggcccgg

SEQ ID NO: 206894 - RNA, 76 nt, Homo sapiens
acccgcccagcgggggggcagcagaagcccagagcccagacgcaggacgagaagcgagaagcgaacaaaaaaaaac

SEQ ID NO: 206895 - RNA, 84 nt, Homo sapiens
cgacgacccagagcacgggcccccggacgcgagcccgcccccgagagaacgcgcacccaaggagcgggacgcgcgggcccagaa

SEQ ID NO: 206896 - RNA, 55 nt, Homo sapiens
ggcaaacgacagacaaaagaggaaggagagaaaaggcgaaccgaaagagaaaacc

SEQ ID NO: 206897 - RNA, 78 nt, Homo sapiens
ccaccccgaagagcacaaccgggcgcccggacgggggcaagcggaagaacaaaaccagccaagcagaggagaaaaaga

SEQ ID NO: 206898 - RNA, 37 nt, Homo sapiens
cagcggccggaggcagcccagaggagcccccgcgccc

SEQ ID NO: 206899 - RNA, 79 nt, Homo sapiens
ccgcggaggagccgccccggccgcacgggcgagcaccaaagccaaggaagcccagaagaaagagcaccccccggaagca

SEQ ID NO: 206900 - RNA, 69 nt, Homo sapiens
gccagcccagcaaagacagccgcaaaaacacagaagcagccagccaggagcccgcccaacagccgacac

SEQ ID NO: 206901 - RNA, 76 nt, Homo sapiens
ggaacggaacagaggaacagaaacgaaagaccacagcaagaccacgcccccagccgggggaccaggccgaacgacc

SEQ ID NO: 206902 - RNA, 65 nt, Homo sapiens
gaaggacggcagcggccggagccaccccgaagggaccgagagcagggacaaggaagggagcaaac

SEQ ID NO: 206903 - RNA, 60 nt, Homo sapiens
gcccagcaccggcgaagccgggccaaaggacgaagaacccacagaggcggcaaggaagag

SEQ ID NO: 206904 - RNA, 53 nt, Homo sapiens
cgaaaggaagcgccagaaagagagaaccagcaaaggcgcagagggcaaggggg

SEQ ID NO: 206905 - RNA, 76 nt, Homo sapiens
aaacaagcgaaaaggaaggcggaaaaagcgcaaggggaacagacaagagggacacaggcgaaacagagaggaagac

SEQ ID NO: 206906 - RNA, 111 nt, Homo sapiens
gcggggacccagcgccaccacaacagcagcaacccgggcagcgccaagccagcaagcaagagaaaggacagagaaccgagaaaaagaccaagcgaccgggggacgcggcga

SEQ ID NO: 206907 - RNA, 73 nt, Homo sapiens
aagacagagggcgagggccacgaggggccaaggcgaccacaaagcgaagaaaaggaggaggccccgaaaccga

SEQ ID NO: 206908 - RNA, 50 nt, Homo sapiens
aacgagcacaggaaagagagaagaagaaaggaaacgcagagaagaaacac

SEQ ID NO: 206909 - RNA, 85 nt, Homo sapiens
agagaagcagccggaaagcccagaacagcacgagccccggcagggagcaagccgaggggaaagaaggaccacgaacaaagagaga

SEQ ID NO: 206910 - RNA, 68 nt, Homo sapiens
gacgggaacaaaagccaggcacaagaaagcgaaaaaccgacagaagaaaaggcccaccgggcagacaa

SEQ ID NO: 206911 - RNA, 67 nt, Homo sapiens
acggcgaacaaagccgaagagggaaaacaaagaaccaagcacacggccgaggagagcccagagacaa

SEQ ID NO: 206912 - RNA, 71 nt, Homo sapiens
cgcccgaaggagcacgcaggagaagaagaaccagaagcaagaaaagaccggaagggaaggccccaaagacc

SEQ ID NO: 206913 - RNA, 77 nt, Homo sapiens
aggaaagcacagcagaaacacaaagcagcccaaccaaagggcgaacaagaggcgccagcgggcgcgccggaagaaca

SEQ ID NO: 206914 - RNA, 52 nt, Homo sapiens
ccgaggagccagggcggacaacaaggcgcgcgacgggaccacaggcgaccgg

SEQ ID NO: 206915 - RNA, 67 nt, Homo sapiens
ccgagagcgggacacagaaaaggccaagagccagggaaaaagaacagaacagaagaaaagaagacgg

SEQ ID NO: 206916 - RNA, 83 nt, Homo sapiens
ggccgagaggaagacgagccgggaggaacggcccggaaacaggaggacgacccaaagacaggaccacgcaccagcagagaagg

SEQ ID NO: 206917 - RNA, 76 nt, Homo sapiens
gaaaaggaaaggaacagcgagcggaccccgaccccgaggcgagacggaaaggcccagagggggaaggagccaggac

SEQ ID NO: 206918 - RNA, 73 nt, Homo sapiens
gacgaagcaacagcgaacaaaaaagggacaggccaaaccagaaaggggacagcggcgggcagggagcacggaa

SEQ ID NO: 206919 - RNA, 77 nt, Homo sapiens
acgcaccagagccagggcgcaggagcagcagcacaggcaaggcggggccggcagggagagccacggacagacacgcg

SEQ ID NO: 206920 - RNA, 80 nt, Homo sapiens
cagagggagacgggaaaggagaggcggcgcccaagcaggcgacgagcccgcccgggccgacgcagcggaggaggaaacac

SEQ ID NO: 206921 - RNA, 38 nt, Homo sapiens
caaggagggcaaagcgccgcgcaccgggcagagaacac

SEQ ID NO: 206922 - RNA, 69 nt, Homo sapiens
cggaacccaacgccaacggagacacacacaccagacacagaaaaggcacacacacccgcaggagagcgc

SEQ ID NO: 206923 - RNA, 89 nt, Homo sapiens
ggcgccgcggcgagacggagacggaccgagccacgggcccccgcggccgcagcaccggaggagaaaccccccaggcaagaggcgcagga

SEQ ID NO: 206924 - RNA, 75 nt, Homo sapiens
ggcggccgggaggagggcgaagccaccaaaccaggcagggagcacgcgggcaggcagcccagcaaacccaggcaa

SEQ ID NO: 206925 - RNA, 54 nt, Homo sapiens
aaacccaacacgacccggggccaagggcaacaagggcggaagagcgcgggaggg

SEQ ID NO: 206926 - RNA, 86 nt, Homo sapiens
cggagacaacagaaacagaaacgagggaaacagaagagaagaaggagagggccacggacagccaagcaccccaggaggcccccgga

SEQ ID NO: 206927 - RNA, 58 nt, Homo sapiens
gcagaaaaggagacggaaccgggccagccgccaacaggccagaacgaagcacaacagg

SEQ ID NO: 206928 - RNA, 52 nt, Homo sapiens
ccgaaccgaaccgaggcaaaagaaagggcagccccgggcaaccagcaagccc

SEQ ID NO: 206929 - RNA, 73 nt, Homo sapiens
ccacagcaagagcaccggcgaccgcaccacaagggacgagaccaaacggaagagaaccaagccgccacaggga

SEQ ID NO: 206930 - RNA, 54 nt, Homo sapiens
ccacccgcgcccccccaccacccccagcggaaccaaggacagagcgaagaaccc

SEQ ID NO: 206931 - RNA, 75 nt, Homo sapiens
cagccccgaacacgaccccagcagcagagcgagaaccaggcgccggaggccccagaggagcagagcgaggcaggg

SEQ ID NO: 206932 - RNA, 72 nt, Homo sapiens
gccgaggccacacaacgggcacccccgacgccccacccgcccaaagggaagaggccgagcaagacacaacgc

SEQ ID NO: 206933 - RNA, 70 nt, Homo sapiens
aggaagccacggcagacacacaacccgacccgacgaggccgcaagagacaccacaaaaggacacccgagc

SEQ ID NO: 206934 - RNA, 112 nt, Homo sapiens
cgcagagccagcccccgaccccgggccaccgggcccccgggccgccggcacccgccaccaccgcgggaggccgaagacaagccccggcacaggaggagagaaaccagccgag

SEQ ID NO: 206935 - RNA, 86 nt, Homo sapiens
ggcggcgccagcgagagcggcggggaggaaagagagacgaaaccgaaggccaccagaagacaaacacaacccagagcagaagcaga

SEQ ID NO: 206936 - RNA, 96 nt, Homo sapiens
caggccagcaccaggagcgcgcgaaacagcggcgagggacgacaggccaggggcagggaaggcaaaccagaagagaagaaaacaacaaaaaagggg

SEQ ID NO: 206937 - RNA, 78 nt, Homo sapiens
gaagagacaggaggcagagccaaacacccaggaggagagaaagaacccacgcaggacgacagaagaggccggacaaga

SEQ ID NO: 206938 - RNA, 63 nt, Homo sapiens
ccaagcacagccgcgagaggaggaccgaccccaggccgcggccgaaccaggaggccccacggc

SEQ ID NO: 206939 - RNA, 80 nt, Homo sapiens
acgccagcgggacgaggaccgagaccgcggccgggaccgaggaacccggccggaaacggaggggacggccaagacgcccc

SEQ ID NO: 206940 - RNA, 84 nt, Homo sapiens
caaccacggggaaaaggcaaaaacccacaccgcaacccagcgagagaaaggccccgagccccggccccaaagacccaaaacaga

SEQ ID NO: 206941 - RNA, 69 nt, Homo sapiens
ggggaagcccgcccggggagcgcagccaccaggacccaacaagcggggaaagagccagccaccacgaaa

SEQ ID NO: 206942 - RNA, 77 nt, Homo sapiens
gacacaccaaccgacgggagacgacggcgagaaacacgccccaaaccagaagcaaaccccaaagccaagaaagcgaa

SEQ ID NO: 206943 - RNA, 75 nt, Homo sapiens
gcacagccacgcagcaacgacaaaacggaagaacgcagaagacagcaacagacccaggacccggccccgccgccg

SEQ ID NO: 206944 - RNA, 74 nt, Homo sapiens
cccgggaacaaaaacaaacaggagccgcggggcccgcccagaacagaaggcgaacagacaagcagagggagcca

SEQ ID NO: 206945 - RNA, 80 nt, Homo sapiens
ggaaaacggagcgcagacacgaacgaggagccaggagggaaaacgacaaccagccgcaggcgaaagcacgaaggacagca

SEQ ID NO: 206946 - RNA, 72 nt, Homo sapiens
aagcacaccacgagcgacccggaaaacgacagaagcacgacaacaacgggcagcaagccacaacggaaagga

SEQ ID NO: 206947 - RNA, 58 nt, Homo sapiens
gcaagagccccccagcgcagcccaccagccccggcacggccagcccaccccccagccg

SEQ ID NO: 206948 - RNA, 80 nt, Homo sapiens
caacgagaccgggaggggcagccaagcagggaccagacagaaggccaggcgagacgcaacacgccacaccccgcggcgga

SEQ ID NO: 206949 - RNA, 82 nt, Homo sapiens
gagccgggcccgagacagaggggcaggagcagagagcgagccaaggcgccaacgggagcaccgacggagaaaagaagaccac

SEQ ID NO: 206950 - RNA, 64 nt, Homo sapiens
aagagaaggcccagagacggggaacacccacaacggagaaaaagaagaaaagcacagacaacgc

SEQ ID NO: 206951 - RNA, 81 nt, Homo sapiens
cccaagacaaagcaaccgaccccacaaagaaggaggcagccaacgcagggcaaggggagagccaggcgcagagcccgcaac

SEQ ID NO: 206952 - RNA, 70 nt, Homo sapiens
cgaaggggcggcgcgcgccgggcgccggaggagaagacagaggagccagaccaagagacagcacaggcga

SEQ ID NO: 206953 - RNA, 80 nt, Homo sapiens
ggacccaggcccggagggacgcagagcaggcagcacagggggacgcccacacagcaccggagaggaccagagaacggcac

SEQ ID NO: 206954 - RNA, 79 nt, Homo sapiens
accagggaacgggcacagccgcaggaaagagagcagaagacagcagccacagcccgggggcagccaggcacgcaaggcc

SEQ ID NO: 206955 - RNA, 56 nt, Homo sapiens
ccccccacgcaccgcacaacaagaggccggcggggcgacagaaacggcaagagagc

SEQ ID NO: 206956 - RNA, 67 nt, Homo sapiens
cggcacccccaggaagcgcggagcgaggggggcccacacgagaacacgcgggcgggaaacagaggga

SEQ ID NO: 206957 - RNA, 77 nt, Homo sapiens
acaaggggcagaaaccacaggcgaaccaaaccgaaagccgacaggccagagagaaggcgcgagggcgccacaccaaa

SEQ ID NO: 206958 - RNA, 109 nt, Homo sapiens
gcgcagacggcgcccagcaacacagaagccgacaaggcgcaagcgaaaacagaccgcgagcccagagagcgaccaagccagaagaacaaccagaaacaaacaaccagag

SEQ ID NO: 206959 - RNA, 88 nt, Homo sapiens
cagcacccaccccggagggggaccacaagacccacgacaggagggcccccggacccgggagcggacccggggcgggaagcccgaggcg

SEQ ID NO: 206960 - RNA, 73 nt, Homo sapiens
gggcagagaggcaacgaaccggccacgacaccggagacaggcgcgagaagacacccgcaaggcagccaagccc

SEQ ID NO: 206961 - RNA, 80 nt, Homo sapiens
ggggcagccggccaacgagaagaccggaagaaccgcaccccgagccagaaacccaggaccaggcaacagcgaagcaaaac

SEQ ID NO: 206962 - RNA, 76 nt, Homo sapiens
agacgcccaagccaaaggagccaagcagacaaagccaagaaaaaagaagaggaaagagagaggggcgccaaccagc

SEQ ID NO: 206963 - RNA, 58 nt, Homo sapiens
ccccgcacacacacccaaggggaggacgcgagcggaagagaagcaaaaagacaaggag

SEQ ID NO: 206964 - RNA, 75 nt, Homo sapiens
gaacggagccccgccagacgccccaaacaaacagccgcgaacacaaagagcagacaacgacaaaccgcgccagcg

SEQ ID NO: 206965 - RNA, 106 nt, Homo sapiens
cgacagcaaggggggccacgaggaacaaagacagcccaccaggaagagcgaaaacacccgaggaggccgcgaggcacagaagaccgggagacgcaggaaagaaaac

SEQ ID NO: 206966 - RNA, 89 nt, Homo sapiens
agggagcaccacggaccccaaggaagccacggcagacacacaacccgacccgacgacaacacagcacccggcggcaaaccaaacaaaac

SEQ ID NO: 206967 - RNA, 81 nt, Homo sapiens
gggggagaagaaaggggccgggggacggaggagccccggcggagaccacgcaaggccacagcgagcccccagcagccgcac

SEQ ID NO: 206968 - RNA, 79 nt, Homo sapiens
ccggccccagggggcgcgggccagacagagcagaacagccccgcggcccggggagaaggcgagccgaacacccgaaggg

SEQ ID NO: 206969 - RNA, 73 nt, Homo sapiens
acccgacgcccgaccaccacggcacgcggcccaacagaaggcaccacgaaaggggacggccaggacgcacaga

SEQ ID NO: 206970 - RNA, 82 nt, Homo sapiens
cagggcccagaagccccgaagccaccacgacaccgccccggacgcacagccaggccaaaagaggagcccagcccgcaccaaa

SEQ ID NO: 206971 - RNA, 82 nt, Homo sapiens
caagcccgcagcacagcagccccggaggcgccaccgcaccaggaggagacacagcgggaggcccagaaggaagaagaccaaa

SEQ ID NO: 206972 - RNA, 69 nt, Homo sapiens
acaccgccggaaccgacaagacaggaaacggagagagaaaaggagaaggagggagagcgacgacaggac

SEQ ID NO: 206973 - RNA, 55 nt, Homo sapiens
cgcggcccggcggaaaggacagcaggcacccacgaggcggcgacggaaagccccc

SEQ ID NO: 206974 - RNA, 80 nt, Homo sapiens
acccgagggcaccggacaggccaggcccccaggaggacccgcgcccaggaaagccaaaggaccccacgaaaacggacgca

SEQ ID NO: 206975 - RNA, 74 nt, Homo sapiens
acaagcccgagcccgaagagagaaggcaaagaacccggggaaagggaagcacggcaccccggcacagccgagcc

SEQ ID NO: 206976 - RNA, 85 nt, Homo sapiens
gaaagggggaccgaccaggacgacacgaaggaggaagaagagacgaagagacagcggagaacaaacgagaaggagacccaaccag

SEQ ID NO: 206977 - RNA, 60 nt, Homo sapiens
cccccgccacagcaagagagagcagcggaacagcagggccagggacaggaaccagcggcc

SEQ ID NO: 206978 - RNA, 77 nt, Homo sapiens
agggaagcaaagaaacacaccacccaggcaaacgaccaaagacaagaagaccaacacggaacagaaagaaggagccc

SEQ ID NO: 206979 - RNA, 93 nt, Homo sapiens
agcggagcacgggcaaggcggagaggacggagcggcgagcccccgcggcgacaggaacggcccaaaaaggaaggaggaaaaagagaagaaaag

SEQ ID NO: 206980 - RNA, 51 nt, Homo sapiens
acagcggacggccggcgcgaaagccagcgacgaccaggggaaaagggagac

SEQ ID NO: 206981 - RNA, 76 nt, Homo sapiens
gcgcagcccccgccgagccgccccgagcccgccgccacacccgagggaaacgagcacggagcgcccacggagccac

SEQ ID NO: 206982 - RNA, 75 nt, Homo sapiens
gcggagcggagggggggcgccaggaacacccgagagccaagcccagagccagccaagggccacgaccggaaccaa

SEQ ID NO: 206983 - RNA, 73 nt, Homo sapiens
acacgaaacaccgagagaggaaacccgggacgacagcagaggcgacaaaccagaccagagaaaaaagagcgag

SEQ ID NO: 206984 - RNA, 83 nt, Homo sapiens
acggacacgagaccagcacccaagagccaacaggccagcacagaggagcccaggaggaggaccccccgaccccagcaagagac

SEQ ID NO: 206985 - RNA, 77 nt, Homo sapiens
gcggcgagccgcgggcgaccagcagaagccaccaaagagaccgggaaaaggaggcagaaaagagggccacaaaaaca

SEQ ID NO: 206986 - RNA, 80 nt, Homo sapiens
gggcagcagcacggcagccacgacgccggcacccaaccagagaggaagacaacgagggaaccgagcaagggggcgagagg

SEQ ID NO: 206987 - RNA, 80 nt, Homo sapiens
gaggcccaaacccgggaaggacggcaccgacacgcaaagaagagcccccgaccagaggaagcgaagggccccgccaggac

SEQ ID NO: 206988 - RNA, 55 nt, Homo sapiens
cgaggcagggaaagaagcccaaaggggcaggacaagacagaaggccaagggaggg

SEQ ID NO: 206989 - RNA, 64 nt, Homo sapiens
ggcagccaggcccccacagcccgcaggccaggcaccaacgcggaacaggaggaggaccagaagc

SEQ ID NO: 206990 - RNA, 81 nt, Homo sapiens
agcgggcacccgcacgagcaacagacgagcgcgccaggccgacagccgcggccgggcccgagaagacgaccccgacgcagg

SEQ ID NO: 206991 - RNA, 71 nt, Homo sapiens
aacaaggcgaccgcagccccccgcccggaggccgggaagcagcgcgcagacaggacaaccagcggaggcac

SEQ ID NO: 206992 - RNA, 79 nt, Homo sapiens
gagcgggccgccgaagcagcgcgcccgggccacccccggaccccggagaagcagaggaaaagaggggcgcacccaacgc

SEQ ID NO: 206993 - RNA, 72 nt, Homo sapiens
caaaccaccacaagagaagaccgcccaagcgcccggaggcccacagcagggggcagacccgggccagccgcc

SEQ ID NO: 206994 - RNA, 78 nt, Homo sapiens
ggcgaagcacacagccacagcccggggaggcagccacgagccagcagggagccaggagaaagaggaagagcaacagcc

SEQ ID NO: 206995 - RNA, 81 nt, Homo sapiens
ccgaccgggcagcggcgaggggacggagccggacaggagccgccgccgccaacaggaagaagacggcacgggacccccagc

SEQ ID NO: 206996 - RNA, 71 nt, Homo sapiens
agcacgcgcaacaacgggccgagcaacagccaggaccaagcagaccaagaggaaaccgagaagggaagcca

SEQ ID NO: 206997 - RNA, 86 nt, Homo sapiens
gagcacgccgcgcagcccggccgccggcccccaacagcgccgagagcagcaccagcagaagagggcccgaccacggcaacccagag

SEQ ID NO: 206998 - RNA, 39 nt, Homo sapiens
cccagaacagcacgagccccgaacaagcacaagcccggc

SEQ ID NO: 206999 - RNA, 57 nt, Homo sapiens
ggaaaccagacagaaggcccacaagaagggacagaagggcggggggaaaagcggcgc

SEQ ID NO: 207000 - RNA, 85 nt, Homo sapiens
cgggaacagccagcaaaggcaggggaggaagccacccgaggcaaagggcgggaaacagcggcgcagcagccaagcgcggggcaga

SEQ ID NO: 207001 - RNA, 62 nt, Homo sapiens
gcgcccagccccaggaaggacccaggacacccggaagccggaaaggccagcgcagccacggg

SEQ ID NO: 207002 - RNA, 60 nt, Homo sapiens
agagaaaagaagcaagaacaaggaaccacgagccgacggcagcccagccacagaacggag

SEQ ID NO: 207003 - RNA, 74 nt, Homo sapiens
caacgccacgccaggcccaggacgccagagacagaacaacagccccagcccccagcagccgacaggaggcccgc

SEQ ID NO: 207004 - RNA, 77 nt, Homo sapiens
caccaacagagaggagaggacaaagaccgcagacacagggcccacacccaagccacggaacccagaacaggccaagc

SEQ ID NO: 207005 - RNA, 51 nt, Homo sapiens
cagggagggaaggcaagagccaacccaaaaccaaacaagggaggcgaggac

SEQ ID NO: 207006 - RNA, 67 nt, Homo sapiens
cgcccggaggcccacagcagggggcaggcgcaaaaggccacgccggagggaacgaaccacagcacgc

SEQ ID NO: 207007 - RNA, 56 nt, Homo sapiens
acgcaagacgcccggcccggaccggaaacaggcacagaacagaaggaaaggacgaa

SEQ ID NO: 207008 - RNA, 69 nt, Homo sapiens
gcggcaacgagaaacggcccagaacacggcaaaaagcaaagaaacaaaagacaaccgcccagaaacggc

SEQ ID NO: 207009 - RNA, 75 nt, Homo sapiens
caacagccgcgcgggcacaacagcggcccaccggcccgcggacacaagaagagggggccaaaaaggagagaagag

SEQ ID NO: 207010 - RNA, 65 nt, Homo sapiens
ggcgagccgcgagagggccggcaggcccgggaaggacaaagccacagacccaagcagcggaacag

SEQ ID NO: 207011 - RNA, 37 nt, Homo sapiens
ccgagcagcggaacacagagccccggagcccccgacc

SEQ ID NO: 207012 - RNA, 114 nt, Homo sapiens
gaggggaagccagaagcagaccaaggacagaagaaaaacaaccaaaccaaaggcgaaccacaagaccaagaacacggggcgcaaaacaggcacccgagggaccaaagaacagaa

SEQ ID NO: 207013 - RNA, 84 nt, Homo sapiens
cggaagaggacgggcgccgccagggcgcccgcgccggcagaggaggcgagcacccgccagggagaggaacccccgcgcacccag

SEQ ID NO: 207014 - RNA, 83 nt, Homo sapiens
gcgaaggccgggacccggccccggcccacaggggggggcaaacccgagagaacggccgaggccgccggagccccagacacccc

SEQ ID NO: 207015 - RNA, 90 nt, Homo sapiens
caagaggaacaagaagaaagaaccaggacgaaaggaaccagacaagcaaagaaccaggacaaaaaggaagacccaccgacagagagccga

SEQ ID NO: 207016 - RNA, 75 nt, Homo sapiens
ggaagagccggccaagaccggaccaaaaagaaccaggcaccaacccgaaacgagagcccagacagagaaagcaga

SEQ ID NO: 207017 - RNA, 87 nt, Homo sapiens
acccaccagaaggaaccaaccggacacaaacaagcagcaggaggacaccaaagccccgagcacacgcaccccggggcggcagcgcca

SEQ ID NO: 207018 - RNA, 95 nt, Homo sapiens
cggccagggcgcagcgagcgcccgagcggcgcgcaccaggcggagccccagccggggcccagcgaacgccagggggacagaggagccaaaggcca

SEQ ID NO: 207019 - RNA, 90 nt, Homo sapiens
cagacacggaccgcgggccagccgccaaagaccccgccgggcggaaaacaccccaaaagccaaaagggaaaggaaaagaccaacaacagc

SEQ ID NO: 207020 - RNA, 72 nt, Homo sapiens
agcagggcagggaaaagcgccgggcggaccagcagggcgcgcagaggaggcggggacggcgcagccccggcg

SEQ ID NO: 207021 - RNA, 88 nt, Homo sapiens
ccgcccccacgcacacccgagcccgggggcgcacggacaaaacccgcaccgcacccccacccagccggagacccgcaccaaggaggag

SEQ ID NO: 207022 - RNA, 75 nt, Homo sapiens
gccccgcgccgccgcgcccacggccccgccagcaaggcggcgcgcccaggaggagagcaagaagaacaccagacg

SEQ ID NO: 207023 - RNA, 51 nt, Homo sapiens
caaccagaggcagccagcagggggagcccggccgacaaccaaggggacaag

SEQ ID NO: 207024 - RNA, 84 nt, Homo sapiens
ggagaaggaggaggagagagggaaggggagcgaagagccaagaggcccgagcgcagcagcagccagaccagagcggagccccag

SEQ ID NO: 207025 - RNA, 50 nt, Homo sapiens
aaaggcagccggagcacagcaggagaacgggaaagcgcacaagccaccgc

SEQ ID NO: 207026 - RNA, 69 nt, Homo sapiens
caacgcaggcagcaccaggacaaaagaagggcagcacaaaggaaagccccaaaccccggaacgggaagc

SEQ ID NO: 207027 - RNA, 68 nt, Homo sapiens
agcccgacggaaccaacgccacgacccagaaggcggaccacaaggagccacaacaaaacagaagcgca

SEQ ID NO: 207028 - RNA, 66 nt, Homo sapiens
cagacgcagggcgcccccgaccggaccgcacaagcagcagcagcggcaccaagcgcggggacagag

SEQ ID NO: 207029 - RNA, 59 nt, Homo sapiens
gagccaccaaaaccacaggcgcccaagacccagcagcagaaaccgcccccaaagccaga

SEQ ID NO: 207030 - RNA, 82 nt, Homo sapiens
ggcccaagacacggagacaacgagccgcagagagccggacaaaccagacacgggaggcagacccgcagaccaacgaaaacca

SEQ ID NO: 207031 - RNA, 75 nt, Homo sapiens
ggggcaacacaagaacagaagaccagcacagccagagggggggccagcgagacgccacccgagcgccccaacaga

SEQ ID NO: 207032 - RNA, 100 nt, Homo sapiens
ggacggccaggagggagcaaaaagcgggagcagaccacccgggaggcacccgagcagagcacagaagaagcggcgggagaccaggagcaccgggagcagc

SEQ ID NO: 207033 - RNA, 76 nt, Homo sapiens
ccacgcaccggccagcagcccgccaggcccagcgagcgacggcaaaagcagaaccaccggaccgaggcgacaaccg

SEQ ID NO: 207034 - RNA, 70 nt, Homo sapiens
gggccggcggggcacggggggcgacggccaagcggaacgggaggagaaagcacaggaggcacaacaaggc

SEQ ID NO: 207035 - RNA, 74 nt, Homo sapiens
ccgcggcgggcgcggagagggccccggagcggcgcggcgggccggcggcgcgagcagggacaaggaagggagca

SEQ ID NO: 207036 - RNA, 76 nt, Homo sapiens
ccaccgaagacacaccccacaggaccccagagcgacagcccgggacaccaagaaagaacggccaagaccgccagca

SEQ ID NO: 207037 - RNA, 34 nt, Homo sapiens
gccagggggccgcagccgcagaaagacaccagaa

SEQ ID NO: 207038 - RNA, 74 nt, Homo sapiens
agagcccaaaagaagaggcacaggcccaggcagaccgcagcaaaagggcgaaccaaagaaggaaggcgacccaa

SEQ ID NO: 207039 - RNA, 71 nt, Homo sapiens
ggaccaggcagcacaaccgccagaaggaagacaaggacagagcagccaggccacgagccagaaccgagaca

SEQ ID NO: 207040 - RNA, 84 nt, Homo sapiens
gaaagcaggaacccggcagcaaggggagccgccacgggaaagcaaccccgggcaggccccagcacggcccgcacacccccagcc

SEQ ID NO: 207041 - RNA, 82 nt, Homo sapiens
gacggaaggcgagccgggcccgagacagaggggcaggagcagagagcgagccaaggcgacacacaccagagggagcaccgac

SEQ ID NO: 207042 - RNA, 54 nt, Homo sapiens
ccgagcgcccccagcacgagcgccccaggaggaacaggagcgggagggaggcag

SEQ ID NO: 207043 - RNA, 56 nt, Homo sapiens
ggaacaaaagccaggcacaagaaagcgaaaacacgagaaaggagaagaacacggga

SEQ ID NO: 207044 - RNA, 71 nt, Homo sapiens
caagccagcgcgggggcaggagggaggacggcccacgagacccaccggaacaggacaggagagacaacgga

SEQ ID NO: 207045 - RNA, 74 nt, Homo sapiens
gcgcgcgcagaagcccggaggcggaacagagacgcaggcaagagcgcggaggagagagccaaaagaagggggcc

SEQ ID NO: 207046 - RNA, 77 nt, Homo sapiens
gcggacaagcgaggaagcaagggcgcgacaagagacggacaaaaagacgagagggaaggccaggccccaggccccag

SEQ ID NO: 207047 - RNA, 61 nt, Homo sapiens
agcagagcgccaagacggagcaaaacacaacccagacacccacgaccgaccagacgccccc

SEQ ID NO: 207048 - RNA, 74 nt, Homo sapiens
cgaagaaagacagaccggcacccggcaaccagaaacacaggccaagacagccagcacaacaaccaagacaggac

SEQ ID NO: 207049 - RNA, 74 nt, Homo sapiens
gaacccgggaggcggagggcgaaacgaaccggcccagaagacaacagggcaagcaaaaaaggccacagaaaagg

SEQ ID NO: 207050 - RNA, 59 nt, Homo sapiens
acaaggccaagcacccccgcaccagccacacaccaggacgggccacgaggcaccggccg

SEQ ID NO: 207051 - RNA, 61 nt, Homo sapiens
gagccgagcccacggagcgagagagaaccccagagggcgcggaagccccagcaaacaagac

SEQ ID NO: 207052 - RNA, 52 nt, Homo sapiens
gagaagccaccagcaaaagagacccggacagaggaaggcggccagaagagga

SEQ ID NO: 207053 - RNA, 59 nt, Homo sapiens
ccacacccacagagaacccagacaacaggacgccgccaagagggaacaggcacgcccca

SEQ ID NO: 207054 - RNA, 68 nt, Homo sapiens
gaaccgccgccacggggcgcgggaaaagccccgagaggcccgggccggcgaggcgagccagccaccac

SEQ ID NO: 207055 - RNA, 91 nt, Homo sapiens
ccacaacgccgacgcaccacacgacggcgcagggcagggaagaaggagaaagggccaaccccgaagaagcaaacagaaacgaaggagacag

SEQ ID NO: 207056 - RNA, 78 nt, Homo sapiens
aacacaacaaaagaaaccaacaccgcaggcgccggccgagcccgggaaaacgacagcagcagcagggccggaagacgc

SEQ ID NO: 207057 - RNA, 73 nt, Homo sapiens
ccgagagccgcccgggccagcggccgcgcacccccggccggaggcaccagcaaaccgggagaagccggccagg

SEQ ID NO: 207058 - RNA, 69 nt, Homo sapiens
caacaacaccaggaagccccggccaggcggaaaaaaacccacggaccacgcaggggagccagccaccca

SEQ ID NO: 207059 - RNA, 73 nt, Homo sapiens
ggccgaaggcccgcggcgccccggcgcaggaaggggaaaaccgccgccacccaagacagcggggcagggcaga

SEQ ID NO: 207060 - RNA, 82 nt, Homo sapiens
cgcgcggcgcggagagagacaagagccgccagagcgcggccgccaagacaagccgagaccaccaggagcagagcggaggcaa

SEQ ID NO: 207061 - RNA, 78 nt, Homo sapiens
caccaagagccgcgcgcccagccgcgggggaccacacaacgagggaagagcgcaccacgcgaaccgcccccccaccgg

SEQ ID NO: 207062 - RNA, 90 nt, Homo sapiens
ccaaagcggacagagagggcaccggaagaagggagagccggggagacaggagagccgcccagaacccccggaagggaccagcgcaaagag

SEQ ID NO: 207063 - RNA, 70 nt, Homo sapiens
ggaagagccagcgccaaggcggaaaagcccaagaaacaaacagggaacggcgagggaacccaggaaggag

SEQ ID NO: 207064 - RNA, 57 nt, Homo sapiens
caacacgcagccagaaacgaaaaaacccaaaccagcccaggcccacaggggcccccc

SEQ ID NO: 207065 - RNA, 58 nt, Homo sapiens
ggggcgggaggaaccgacgggaacgaaggcggacggcacggcgaacggccgggagagg

SEQ ID NO: 207066 - RNA, 72 nt, Homo sapiens
caagaacgagagagaagcagccggaaagcccagaacagcacgagccccgaccacgccaccgggcaagagaag

SEQ ID NO: 207067 - RNA, 83 nt, Homo sapiens
gggagcccggccggagcgggcggagacgccgggcagccgaacggagggcgacggagggagagacgaagaggagcagaaccaga

SEQ ID NO: 207068 - RNA, 74 nt, Homo sapiens
ggaagccccccggaaaagccacagcaaggaagggcgaagggaccgcagaaaaaccccaagcacccgaaggagag

SEQ ID NO: 207069 - RNA, 80 nt, Homo sapiens
agagccagagagagcggacgacagaacccggccgacccggaccaacaaccccaaggcaaaagaaggaccccagcaggaaa

SEQ ID NO: 207070 - RNA, 76 nt, Homo sapiens
acagcagaaacgcaccaggccaaagaaagagaagggaagaacccaagacacacacagcggagcaacaaggagggaa

SEQ ID NO: 207071 - RNA, 82 nt, Homo sapiens
gcgggacccgcagccccgcgcgggcaccaggggcagggaagccgggagggcccaggcaggaacacaagggcgggcagaaagg

SEQ ID NO: 207072 - RNA, 70 nt, Homo sapiens
gcgaagcaaagaggaagcgaaggcagcacgaacgagcaccaagcgcccacggaccaccaagccacagcca

SEQ ID NO: 207073 - RNA, 75 nt, Homo sapiens
caaacagccagccgcagcgggggcacggccagcagcccacagggcagagaagacgggggagaaggcgggaagagg

SEQ ID NO: 207074 - RNA, 44 nt, Homo sapiens
caaacccccaaggaaggaaggaaaaacggcgcagaacaacccgg

SEQ ID NO: 207075 - RNA, 77 nt, Homo sapiens
gaaaggaacagaaacaagagaggaacggagcaagaagcgacacaaggagaaaagaacagccagcagacgaaaccaga

SEQ ID NO: 207076 - RNA, 53 nt, Homo sapiens
accgcgacggcagcagagcaacaggcgggaaccaaccacccgagcagcaccac

SEQ ID NO: 207077 - RNA, 79 nt, Homo sapiens
ggggccacccgcccgggcccccgacgcccggcccgcaggaccaccaagaggcgcggggacagcccagcacaacccccgc

SEQ ID NO: 207078 - RNA, 80 nt, Homo sapiens
agaaggaccaagaggcagcaggaccgcggcggcgaacacaggaccaccaaaaccagaagcagcgaaagaaaacgaacaaa

SEQ ID NO: 207079 - RNA, 98 nt, Homo sapiens
ccaggccacccggaacgcgcgcacccaccgggcccgcgggccgccccaccccacagggcgggccaacacgcgggggacagacagcagagcccaacgac

SEQ ID NO: 207080 - RNA, 86 nt, Homo sapiens
ccgggccgcggacgcagcacagaccaaacagagcagaacgaaacagcacagggggaagaaaccccccaggaaaggaaaaaggaaaa

SEQ ID NO: 207081 - RNA, 85 nt, Homo sapiens
accacgggcggccccagaagagccaggacaaaaccaggcagaaccaacacgaacccaagcacaaacaagaaaacgagcaggcacg

SEQ ID NO: 207082 - RNA, 40 nt, Homo sapiens
ccgcccagagcgcggcgggcccgaagccagcagagagcgg

SEQ ID NO: 207083 - RNA, 80 nt, Homo sapiens
aagaacaagacccaagaaggaagaaagagaaagaaggaagaaccaggcgcaggagacacagaagcacacaaggaagacag

SEQ ID NO: 207084 - RNA, 73 nt, Homo sapiens
gggacagaaagaagagcgagcccaaaggcaggcccggcaccgaggccgaaacccaaggggcgcaggaagaagc

SEQ ID NO: 207085 - RNA, 59 nt, Homo sapiens
gaggaggacccggcagaacagcacacaaggccgagcagcaaggcggaggcaaggcggac

SEQ ID NO: 207086 - RNA, 80 nt, Homo sapiens
aggaaagcagacagacccaccaagagggcgggagaaccacgaggagaggggcaaggaggagccccggaggaggaggaaga

SEQ ID NO: 207087 - RNA, 76 nt, Homo sapiens
gcccccccccgcccccccagggccggccgggagggcggccgcagcaggagcagagcgaggcagggccccagagaca

SEQ ID NO: 207088 - RNA, 80 nt, Homo sapiens
agcccaaagggagcccaggcacagacacacacacgcccacggcaagagaaacaagcgcaacacccaggaccagcccgcgc

SEQ ID NO: 207089 - RNA, 82 nt, Homo sapiens
ggcggcgggaggcgggcgcccgggccgcgcggcgccgcgccggcggccgccagcaggagccacgcacaccgagaaaaagcga

SEQ ID NO: 207090 - RNA, 76 nt, Homo sapiens
ccaccggagccggcgcagccccccaaccagagcgccggagcagcccagaaccaggagcagaaccaccggcagaaaa

SEQ ID NO: 207091 - RNA, 85 nt, Homo sapiens
cgccgccaagcccggcccggcccgacaccgcgggccgccagacgggaaggggaccagaagcagcagccccagaagccccgaagcc

SEQ ID NO: 207092 - RNA, 80 nt, Homo sapiens
cacacggcaccggacaagggcgccgaggggcgcaccagaacgcccgcgcacgagccaggaaggagccgggccccggagag

SEQ ID NO: 207093 - RNA, 68 nt, Homo sapiens
gcggacgccggcgcgcagcccaccacaaaccaaacgagcaagaaggagcgaggcagagccacaggaga

SEQ ID NO: 207094 - RNA, 105 nt, Homo sapiens
gcggggggggaacgcggggaaggcgaggcacgaccccacccccgaggcccgaccggcgccaaccaaggaaaaggaagcccggaagacaaagggaaggagccacag

SEQ ID NO: 207095 - RNA, 76 nt, Homo sapiens
agcgaaagcacccagaggagaaaagcccaaagcgagccaaagggccggaggaagcccagaacccaggccccaccaa

SEQ ID NO: 207096 - RNA, 71 nt, Homo sapiens
ggacgaggcaaaccccaaaacaggacacaccaagccaagaaggacggggacgcaccaaagaagacagacac

SEQ ID NO: 207097 - RNA, 79 nt, Homo sapiens
gacgcaggcgcaggccaggcagcaagaagggaaaacaaagcaagacaccagaagccaacccagagaaccgaagaccaca

SEQ ID NO: 207098 - RNA, 85 nt, Homo sapiens
cgcggcccggccccgggcccggccggcgagaccgaaggagcagacgaggcacgagcgccagcgcgagacagacggggcgcagaag

SEQ ID NO: 207099 - RNA, 83 nt, Homo sapiens
acacgggaccgaaacaggccggggcacagcacagcgccggcgcaagccacgaggcggccccagcgcgggcgacaggccgacac

SEQ ID NO: 207100 - RNA, 76 nt, Homo sapiens
aaaaaccgcaagaaaccacagggcgacacccagggcaaaggaagacccagagagaagacagacgccacaaagagag

SEQ ID NO: 207101 - RNA, 78 nt, Homo sapiens
aggcacgaaaaaacccagcgaagaccacagaaaccaaaaaaaaagcggggaaaacaaaaaaaagaaggagggaagagg

SEQ ID NO: 207102 - RNA, 79 nt, Homo sapiens
acggccaacaaggccgggccgacagcacggggcagacaccgcccgaacacacaccgacggagcccgcgcgagccccggc

SEQ ID NO: 207103 - RNA, 77 nt, Homo sapiens
gcggccccgaggaagcaaggccgcggggggagaccccaccaccgggcggagaacggaaaagcaccaggaagcagaga

SEQ ID NO: 207104 - RNA, 89 nt, Homo sapiens
gaggaaacgaaccagaccaaaaggacaaaaggaaggaagagcaaaaagccagagagccagaggaaaggcacagaccccacaggccccgg

SEQ ID NO: 207105 - RNA, 70 nt, Homo sapiens
caagcggaaagaacagaaaggaaaggaacccagcaacaagagccagccccaggacccgcgggccgcagcc

SEQ ID NO: 207106 - RNA, 79 nt, Homo sapiens
gcacaggaccagggagacacacaccaggcagcccacagcaagcacgccgacacaaagggaccgccaggcaccccccaaa

SEQ ID NO: 207107 - RNA, 70 nt, Homo sapiens
agcaaaaaaaaaagggaaaaacaggggaacgaaacgcacacccggccccagcagccacagcggaggcccc

SEQ ID NO: 207108 - RNA, 59 nt, Homo sapiens
cagggcgacggcacagccagaggcaaccgccgagcaagaagcaccggcagcaaaagaca

SEQ ID NO: 207109 - RNA, 76 nt, Homo sapiens
cgcgagcaagcccccgccgcaccgcacgacacacacggaggacggggcgaggacgcaaccaccaccgacccgagcc

SEQ ID NO: 207110 - RNA, 77 nt, Homo sapiens
ggcacgccggcgcccgcaccccggggcccaggaagggcggcccagccgccgcccgccagcggacccgcggcaccgcc

SEQ ID NO: 207111 - RNA, 79 nt, Homo sapiens
aggcacagagagcggggggaaacaaggcaaaagccaggaagaagaaaaaaagaagaagagggaaaaaaacaagaacagc

SEQ ID NO: 207112 - RNA, 77 nt, Homo sapiens
cgggccgagagccgccccgaacgggggcccccccgccggacagaggaagacaccaccggacaccgaccaggccgccc

SEQ ID NO: 207113 - RNA, 53 nt, Homo sapiens
gcgaagcccagcgggccggacggggcggggggaacgaaggagaacagacagca

SEQ ID NO: 207114 - RNA, 66 nt, Homo sapiens
aagggcaccaaacacccagaacaacaaagagaaccggggaacagaccggaggaaccgagcggaaca

SEQ ID NO: 207115 - RNA, 86 nt, Homo sapiens
gccgggacccggccccggcccacaggggggggcaaacccgagagaacgggaaacgcgccacagccacacgggccgcacacccgcaa

SEQ ID NO: 207116 - RNA, 75 nt, Homo sapiens
cgggcccccccccaggccaaggaaaaccggcgacccaagcaggcggcgagccaaggggaaaggagcaagaagaca

SEQ ID NO: 207117 - RNA, 40 nt, Homo sapiens
agggaggccagcgggggagccaggcggaaagcgccagcgg

SEQ ID NO: 207118 - RNA, 73 nt, Homo sapiens
gacacaggggagcaggcggaggcaaggggaagagcggccaagagagaaacacaagagaacaccaggcagcacc

SEQ ID NO: 207119 - RNA, 70 nt, Homo sapiens
gcccgccccccgcccaccgaccaggagacacagacacggcggcgaggcccggaccgcggcaggacggggg

SEQ ID NO: 207120 - RNA, 82 nt, Homo sapiens
gccgccccgccggcacagcgggaagagcgagggaacaggcacgccccacccgccagccgagcccccgacgcagcacaaagcc

SEQ ID NO: 207121 - RNA, 74 nt, Homo sapiens
agagcgagcgagggggggcgcgccggaaaccggagcgcgcagcaggaagcacacacacccgcacgagaccccgg

SEQ ID NO: 207122 - RNA, 92 nt, Homo sapiens
gggagcgggagggaaccccaggccccgaggcggacgggagagccaggagcgagcgagagcagaggcccgccaagcgcccccgggcacgagag

SEQ ID NO: 207123 - RNA, 72 nt, Homo sapiens
aagagccagacacagagggccgaccaacgaccacccgaccccagcaagcccgggcgaaccgccgcgccaggc

SEQ ID NO: 207124 - RNA, 83 nt, Homo sapiens
agaccggccggagccccagggccgaggagagcagccagcgggacagaaggaggaagagggagcaccacggaccccaaggaagc

SEQ ID NO: 207125 - RNA, 76 nt, Homo sapiens
aagaaccggcagcgaacaaggagaaagccacaacagggcggcaacaggggcgagaaaggaacgaaaccagaacaga

SEQ ID NO: 207126 - RNA, 62 nt, Homo sapiens
caagcagcaacagcggcagcacacccccggacagcaagacggagcggaaccgccagaccaca

SEQ ID NO: 207127 - RNA, 81 nt, Homo sapiens
gagcccaggcaagagcccgcgagaagggacagagaaagaagcaagaaaaaccagccaaaagagagagaaagagaaaagcaa

SEQ ID NO: 207128 - RNA, 62 nt, Homo sapiens
ccgggaggcgcccacccccaccaccgaccgcgcacaaagagggaaggagagaaggagagaga

SEQ ID NO: 207129 - RNA, 68 nt, Homo sapiens
caggaggaccagcagcaaaagaaggagggccccaggaaagagaagggagcccggacaggaccaacgga

SEQ ID NO: 207130 - RNA, 62 nt, Homo sapiens
gccaggaagcggaggagccccggaggcagagcggcgccaggcaaaagcagaccggaaaaccc

SEQ ID NO: 207131 - RNA, 80 nt, Homo sapiens
ccaaccgggccccccagcagacgcggcaaaagcagaccggaaaacccaccggcaagaccacacccgaggggagcccagga

SEQ ID NO: 207132 - RNA, 79 nt, Homo sapiens
gaagagaagcagaggccagcggaggaccgcccacagagaagccgcacccggacgaaggagccaagagaccaaccaagga

SEQ ID NO: 207133 - RNA, 62 nt, Homo sapiens
gcaggaaagccagccggcgagagcagagacccaaaggcaagggaacagccaagggggaagaa

SEQ ID NO: 207134 - RNA, 68 nt, Homo sapiens
gaaggaccaagaaccaggcaggccagcaggcagcgcacgggcccacggaacagcaggggaggcgagac

SEQ ID NO: 207135 - RNA, 74 nt, Homo sapiens
cgcccagccccccagagcgggaacagagcagaaaagcgagaagagagccccggaacggcccagcaaaaaaccaa

SEQ ID NO: 207136 - RNA, 108 nt, Homo sapiens
cggggcgcccccggcgcaggggagcgaaggcgaggggcagcggcaggagagccggccgcgacaggacgcgagaaccagccaaaacacacgaacagggaacaagaaaca

SEQ ID NO: 207137 - RNA, 79 nt, Homo sapiens
gagacagaaaaagagagcaggaaggcacaaaggaggaggaggaggacgacgacgaggggaacgaaaggcaaggaccgaa

SEQ ID NO: 207138 - RNA, 95 nt, Homo sapiens
agccaccaagaggcaacagacagaggaccaggagcaccgcccaggcaacaaaccgggagacaggcacacccacaaccagacacgcagagagggcg

SEQ ID NO: 207139 - RNA, 59 nt, Homo sapiens
cagacccgagcaagacgccaggaccggaagcagagaaaggcaagacccagagaaaggaa

SEQ ID NO: 207140 - RNA, 100 nt, Homo sapiens
agaccgcacagaaagaccaccggacacagcaggacgccagaaaccaaacgaacaaacaaggaccggcgacccacccccagacacaccggaggacagcaag

SEQ ID NO: 207141 - RNA, 79 nt, Homo sapiens
ggaggcgagcgcgccgcccggagccgcgcacacgggacgccaacagccagcccaagcgaaccagaaagcaccacggacc

SEQ ID NO: 207142 - RNA, 85 nt, Homo sapiens
ccgagcgcagcccccaaagccgcgcgagaggagccgggacacgccagcgcgggcccagaagacgaccccgacgcaggccaggagc

SEQ ID NO: 207143 - RNA, 58 nt, Homo sapiens
aaaaggacacacggaacacggcaaaaccgacagagacgcagacaaggagggcggaaag

SEQ ID NO: 207144 - RNA, 75 nt, Homo sapiens
caaaggaccgcccccagagagaggaacaccagaaaggaaaagaacccagagccagggcggagccagaacagccac

SEQ ID NO: 207145 - RNA, 73 nt, Homo sapiens
caagcggacgggagacaacaccgccacgagaaggccggcccacagcccaaaaagaaacaggaccgaaagccag

SEQ ID NO: 207146 - RNA, 57 nt, Homo sapiens
caggaggccccagcgcagcagccccgcccagagcaacccacaagagcgacccgcaag

SEQ ID NO: 207147 - RNA, 79 nt, Homo sapiens
gacgccggaacacccggaagccgagaaagccaaaagaccaagggacagggaaaaaggcgccaaagcacagagcaagcgg

SEQ ID NO: 207148 - RNA, 69 nt, Homo sapiens
gggaaggggaaaccggaccacacgcgccgaagcggagcccagaaaacaacccggccaagggcgaggggc

SEQ ID NO: 207149 - RNA, 68 nt, Homo sapiens
ccggcgccagaggcccggacgacagcccccaggcccaagccaggaccacgcaccgggaggggaagcgc

SEQ ID NO: 207150 - RNA, 55 nt, Homo sapiens
gaaaacccggcgccgaaagcaccgggaggaaagagagccacacgaagaacacggc

SEQ ID NO: 207151 - RNA, 64 nt, Homo sapiens
aaagacaagagccaagcaccgggaccggcggagcggaggcagacacacacggggggagagggag

SEQ ID NO: 207152 - RNA, 76 nt, Homo sapiens
gggacacaggaccggcccaccaccagacacaggaaagacgcccaccccgccgcggggccagcccgggagaccagca

SEQ ID NO: 207153 - RNA, 77 nt, Homo sapiens
cggaaggggaaccccaaggaacagaggggccccagcccaagagccgcacggaggccgaggccgccacagcacaagag

SEQ ID NO: 207154 - RNA, 61 nt, Homo sapiens
caagaccgggacacccgaagcgggaaaggccccggggaagggaagcaggggcggggcgggc

SEQ ID NO: 207155 - RNA, 36 nt, Homo sapiens
aaacacgcagaaagagagacagcgcacgaaacacac

SEQ ID NO: 207156 - RNA, 73 nt, Homo sapiens
gcagggcacacccgcgaggaaggagaggaaggggagaagaaaaagcagcaaaagagaagcaggaggggaacac

SEQ ID NO: 207157 - RNA, 94 nt, Homo sapiens
gcgagcggacagaggcaaaaggaaaaaaccaaacaagcaggaaaagggaccgaaaagcccgccgggaccgagagaccagcccgaccgagcgggg

SEQ ID NO: 207158 - RNA, 70 nt, Homo sapiens
agggagcccaaaacaagaagcaggaagaaaggcgggccaaagaacggcgaccgaggaacgcaaacgcgaa

SEQ ID NO: 207159 - RNA, 74 nt, Homo sapiens
ccaccgggcaaaccgcggacagaggaaaacccaagacaaggaagggcaaagcccacagcacaagaggcgggcgg

SEQ ID NO: 207160 - RNA, 43 nt, Homo sapiens
cgcgggagcccggcgccggagcccaagaagccggagggaggga

SEQ ID NO: 207161 - RNA, 77 nt, Homo sapiens
gacaggagaaccgcacgaaagaggagcaggaagcacccgaggaggagaaagagaccccagaaaaggaaagcgcacaa

SEQ ID NO: 207162 - RNA, 77 nt, Homo sapiens
cgccgggacgggcaagaccacaaacgaacccccgacaagaagagggccgaaaacaggaacccagagaccaagagggc

SEQ ID NO: 207163 - RNA, 103 nt, Homo sapiens
cacagccgcagcggagcccacgagaggcagcgccaggcggagcagaccaccggccgcccggggagaggaaccaaccaccaaaccccaggaaccacccaacggc

SEQ ID NO: 207164 - RNA, 88 nt, Homo sapiens
cgcgggacgaaaacacagggcccaaggcacacccaggggccgcaaggccaggcgcgcagaggcacccaacggcacagaccccacacac

SEQ ID NO: 207165 - RNA, 78 nt, Homo sapiens
gaccgggcgggaacccgcggggagcgggacacgaacggacccacaggaccgcgaacaaggaggccacaaaacacccgg

SEQ ID NO: 207166 - RNA, 58 nt, Homo sapiens
ggccgacccggggcccgggaccccacacaagggcagcaaacccagcgaagggaggagg

SEQ ID NO: 207167 - RNA, 76 nt, Homo sapiens
cggaaaacagcgcacaagaggaaaacaggaagagccggaaaacaaaacgcaaagaaccaagcaacacagaaaacca

SEQ ID NO: 207168 - RNA, 79 nt, Homo sapiens
gacgcgacgcgccccgcccccccgccggcccccccacggcagcgagaggaagaaaggacacaaagcagaagaaaagcca

SEQ ID NO: 207169 - RNA, 88 nt, Homo sapiens
caaaggccaggagagaaagagaaagagaggagccaagaagaaccggagccaagaacccaaggagggagcaggggccaagaaggagcca

SEQ ID NO: 207170 - RNA, 48 nt, Homo sapiens
cgggaagggacaaaacagaggcaacaagcggaagccgcagaaggaccg

SEQ ID NO: 207171 - RNA, 77 nt, Homo sapiens
ccgcccccgcccgcagcccgggccaccccaggagggaagaccgacgcgcaggcggccccggagaaggcccggaggag

SEQ ID NO: 207172 - RNA, 59 nt, Homo sapiens
ggaaaaaaacaagcccaggacccacgacaggaaaggcagacacaagacgagcacccccg

SEQ ID NO: 207173 - RNA, 66 nt, Homo sapiens
cgacggcggcagcaacagaagacaggaggagggagacaggggcaaaaaacggcagggaagaggcga

SEQ ID NO: 207174 - RNA, 81 nt, Homo sapiens
cggcccagacgcccggagagcgcgccgccgccgccgccgccgccacgagcccacagcagcccggcacacaaagggagaaag

SEQ ID NO: 207175 - RNA, 60 nt, Homo sapiens
ggccaagaccagaaccagcccgggaaaggaaagaacagaggcccggaaacacaagaggaa

SEQ ID NO: 207176 - RNA, 57 nt, Homo sapiens
ccaaccgcccaggaaggacaaagaaaagcgaccggaaaacacgcaaaaaaaacacac

SEQ ID NO: 207177 - RNA, 74 nt, Homo sapiens
gcggccagacgacacccaaccgggccagaagcaggcgcccacagagccaagggccagaaccacacggccacgac

SEQ ID NO: 207178 - RNA, 77 nt, Homo sapiens
acgagaggagaaccagagaagccgagaaggcgcgaagcacaggaggagaaaacacgaaccccggaaggaagagcagg

SEQ ID NO: 207179 - RNA, 66 nt, Homo sapiens
cgggggaacagcagcggcaagcggaaggccaaagacagacgggcccagcacacagggacaacgcca

SEQ ID NO: 207180 - RNA, 61 nt, Homo sapiens
agacagggccagaaccagagaaggaaagcaaagcgaccaagaaaggcagacccggcaccac

SEQ ID NO: 207181 - RNA, 43 nt, Homo sapiens
gccgaggaggcagcgcgaccccgcacgacaaccagaaacacac

SEQ ID NO: 207182 - RNA, 75 nt, Homo sapiens
accgcgccccccacccgcccggcagaagcacgcgaaaagaaggagggacgccacgcgacgcggcgcgggaaccac

SEQ ID NO: 207183 - RNA, 72 nt, Homo sapiens
gacaaaagggccaaagaagggagagaggagccgaggccagagcagaaaccagcccaggaacccagcgccccc

SEQ ID NO: 207184 - RNA, 83 nt, Homo sapiens
gaagcggaggaagggaagaggaccgaaccggccgaagaggccgcaggggagagcaggggagaagcccaccacgcaacgggacg

SEQ ID NO: 207185 - RNA, 52 nt, Homo sapiens
gggcgaaccacccacagaccagccggaacaagagacccggcacaacgcagac

SEQ ID NO: 207186 - RNA, 95 nt, Homo sapiens
gcccagccccgcgcggccgccagccaagccgccggaggacgagccggacgccgacggcacgagcggacgacgcagcacacaggaccccgcgagcc

SEQ ID NO: 207187 - RNA, 65 nt, Homo sapiens
gagagaggccggagcagcgcccccggacaggagcgacaacaaagaacagccgagcggagaaaaag

SEQ ID NO: 207188 - RNA, 75 nt, Homo sapiens
ggccccggcccacaggggggggcaaacccgagagaacggcaggccgaccacaccgagacgcaaaaaggagcacac

SEQ ID NO: 207189 - RNA, 66 nt, Homo sapiens
gacaacaaaacaagacgcccggacaagagaaaaaagacccacaggcgaagaacaaaagcgaagccc

SEQ ID NO: 207190 - RNA, 64 nt, Homo sapiens
agacacacccgacccagggggcccccaaagggaagccaaacacaaaggaagaagcccggagacg

SEQ ID NO: 207191 - RNA, 73 nt, Homo sapiens
gccaccacagacgaaccgacggggacagcagacagaggagaaacgaaggagaagaaaaccccaaaagaggaaa

SEQ ID NO: 207192 - RNA, 81 nt, Homo sapiens
aagaagcaggccgcgcggcggggggcgcgccagggaccagggagggaggaggagcgggcgcggaggcgcggcgggagccag

SEQ ID NO: 207193 - RNA, 59 nt, Homo sapiens
gccgggaggaacggcccggaaacaggaggacagggaacaggcacgccccacccgccagc

SEQ ID NO: 207194 - RNA, 82 nt, Homo sapiens
aaggcggggcgacccggggggcgcgcccagagccccgcgcagcccagggaaggccacccgaggcggaggggacggacgcccc

SEQ ID NO: 207195 - RNA, 78 nt, Homo sapiens
cgggaaggaaagaagaacaacagacgagaagagaagggagcaccaggagacgccagaaggagagaacggggacaaggc

SEQ ID NO: 207196 - RNA, 58 nt, Homo sapiens
cggaaggcagcgcccagcagcgcagccgggacaccacagcaagaggaacgggcacgcc

SEQ ID NO: 207197 - RNA, 43 nt, Homo sapiens
cggagagaacacgagcccacagggacaggcgcaggggcaggca

SEQ ID NO: 207198 - RNA, 77 nt, Homo sapiens
gcaagggagaagagaggccacaaaaggaaaaacaacagccgacccacaaggacagacgagacaggacaaagcagaag

SEQ ID NO: 207199 - RNA, 80 nt, Homo sapiens
ggaaggccgcgaaagggcaaagcccgggacccagaggacagccaaggggggaagacggacaggcccgggccgagggagcc

SEQ ID NO: 207200 - RNA, 76 nt, Homo sapiens
ccgagagcgggacacagcaacccgacgaagacgccaaacaaggaaaagaagaggaagccaccaagaagaggacccc

SEQ ID NO: 207201 - RNA, 77 nt, Homo sapiens
cacggcaaaccaacaaggaccgacgaaaacggaaggagaggaaggaaagcacagacaggagcacaagcagaagcccg

SEQ ID NO: 207202 - RNA, 41 nt, Homo sapiens
gagggacacggaccgaaggcccccacagggcaggaagccgc

SEQ ID NO: 207203 - RNA, 88 nt, Homo sapiens
aggagacaaggcaaggcccaacaaagccccccagcccccacgagaaaaccacccaaagccaaagggcagcccaacggccccgaacggc

SEQ ID NO: 207204 - RNA, 69 nt, Homo sapiens
ccccgaaggaagaacaagggaaagccagaggcacaagagggaagaggaaagcacaaagacacccaaccc

SEQ ID NO: 207205 - RNA, 77 nt, Homo sapiens
cgcacccccggccggaggcaccagcggcccgacccaggcaagcgagcaggcgagcaggagcccacagccgagcagcg

SEQ ID NO: 207206 - RNA, 74 nt, Homo sapiens
aggagacaagagcaaccagaaagagagggacaaggggaccggcggaagcggaacaaacaacggcggaccgcccc

SEQ ID NO: 207207 - RNA, 81 nt, Homo sapiens
gagggaccagaccaaagaacagaggccagaacaagccgggagaggaacagcgcgccgggcgcacgaacagcagaagacccc

SEQ ID NO: 207208 - RNA, 52 nt, Homo sapiens
ggcggcccaccccagagcaccggcaggaaacccagacgacaaggaaggccaa

SEQ ID NO: 207209 - RNA, 79 nt, Homo sapiens
acccacagaacaccggcaaggaccagcaggacagccagcccagagaggaaggacaacgaaccgcaaagaggagagcaaa

SEQ ID NO: 207210 - RNA, 56 nt, Homo sapiens
agccggacacccacagacaaagcagaacaaaggaaccccaaccaggccagggggcc

SEQ ID NO: 207211 - RNA, 83 nt, Homo sapiens
agacgccaggacccacggaagccagaaaggagacgacaccaagaggaaaaaccaggcaaggaagcacaagcgacaagaggagc

SEQ ID NO: 207212 - RNA, 70 nt, Homo sapiens
gcagcagagaacacgggcacacaggaagaaaacacgaagaaacgcaggagcccaccgcgagcccccagga

SEQ ID NO: 207213 - RNA, 75 nt, Homo sapiens
caaccggagagggcccaggaccaagggacagccaaagaccggagcggagagagaagaaacaggccacagagaaca

SEQ ID NO: 207214 - RNA, 70 nt, Homo sapiens
cacggaccgccggccgggcggccccgccacccacaggaacaagcacacagagacggggacggcaacaaca

SEQ ID NO: 207215 - RNA, 79 nt, Homo sapiens
gccccgaaaacgaggaagaaggaccaaaacagcagcccgcgccgaagcgccgaacgcccaaaggggaaagccgagacag

SEQ ID NO: 207216 - RNA, 68 nt, Homo sapiens
gcaaaaagcacccagacaggccacgaacgcacagagcggcacggagagaggaagcacgcacccagcgg

SEQ ID NO: 207217 - RNA, 69 nt, Homo sapiens
caaagaaaacgaggagcagcacggaagaaaaggggcggaaggagaaaagccacagcgccggaccagaaa

SEQ ID NO: 207218 - RNA, 72 nt, Homo sapiens
caggaaacaaagcaacggagagaagaagaagagccagccacgaggggaagcacgagcaagaagggagaaaaa

SEQ ID NO: 207219 - RNA, 63 nt, Homo sapiens
gcgagaaagcccgcgacaggccaaagcaggcaccgcacccaggcggcggccagggcagcaagc

SEQ ID NO: 207220 - RNA, 76 nt, Homo sapiens
gcgcccggaagaaaggcagaagaccggaaccgagacgggccccaagaaggcaaaccggacggcagggaagcggaag

SEQ ID NO: 207221 - RNA, 76 nt, Homo sapiens
cggcagcaagaacagagagagaggggacagacgagagaacgagacacacgcgcgaaggagaaggacggaaaagaac

SEQ ID NO: 207222 - RNA, 56 nt, Homo sapiens
ggccaaagccagagacagagcacaaagggagaccagcacgagccgggcgggacgcc

SEQ ID NO: 207223 - RNA, 38 nt, Homo sapiens
ggggaaaacccccgggaccagcagaaagagaaggcaga

SEQ ID NO: 207224 - RNA, 78 nt, Homo sapiens
cccggcccagagagaaggcaagaggggaccggcgcgacacgaaccggagagcaagggaggaagagagaaggccacgcc

SEQ ID NO: 207225 - RNA, 89 nt, Homo sapiens
cccagaacccaagaagccggaaccgggcgccagcccgaaaggaggagacggcaacccagccgcgcaacgaaaacaaacggaagagaggg

SEQ ID NO: 207226 - RNA, 73 nt, Homo sapiens
cacaaagaagaaaacggcaaagacagcaggccaaggcagaaaagcagaaaaccaaagccggaaaggggacacc

SEQ ID NO: 207227 - RNA, 79 nt, Homo sapiens
ccggagacccgccgcgagggcccgccacaaaaacggcagcagagccaaaccaggacggaccagagaaggagagaagcca

SEQ ID NO: 207228 - RNA, 72 nt, Homo sapiens
gaggagaaaaggcggacagcagcgcaggcaaaaaacaggccccagcggcggaggaaagagagccagccagcg

SEQ ID NO: 207229 - RNA, 78 nt, Homo sapiens
ccgccccgggcaccaaccaggaaaaaccgaaccgcaggggcaggcccaacccaggcccagaaacaccagcagagaacg

SEQ ID NO: 207230 - RNA, 70 nt, Homo sapiens
cagaaacaaacccaacaacggaaaacaacgcccggaggagagaagagcaagagaaggaccaagaaccagg

SEQ ID NO: 207231 - RNA, 68 nt, Homo sapiens
agaagcgggcccaggacaagacagaagcagaaacggggggggagggggacccggaagaggagaaacag

SEQ ID NO: 207232 - RNA, 69 nt, Homo sapiens
caagggcagaacgaacaggaacaaagccagacgagccccgcgacaagagaagcaccagaagacgcaggg

SEQ ID NO: 207233 - RNA, 73 nt, Homo sapiens
ccagggcacagcggaggcgacacccagagagcccagaccgaaacacacaagaggagggaagcaccaaacaaac

SEQ ID NO: 207234 - RNA, 79 nt, Homo sapiens
agaagaagcaggagaacgaaacggagccagagaaggcagaagcggacaaacaaaagcagagaccgacgcgacaggcccg

SEQ ID NO: 207235 - RNA, 39 nt, Homo sapiens
gaggagcaggcgagaagagaaggagccggcacaggaccc

SEQ ID NO: 207236 - RNA, 60 nt, Homo sapiens
aggccaggcacgcgcagaggaggcccgggaggccaggccagagggaccaacgaaggcaaa

SEQ ID NO: 207237 - RNA, 76 nt, Homo sapiens
gaggcccacaacaccgcagcgggccacacaagggcagcggaagaagagaagggagggcagaaggaacaaaacgaaa

SEQ ID NO: 207238 - RNA, 82 nt, Homo sapiens
gggccggaacgagacgcacgcccaaccgcccagacagcccagcccgggccagcagcccggcccgcgcgcccgcggcggcgcg

SEQ ID NO: 207239 - RNA, 67 nt, Homo sapiens
ggcgcaggaaccggagacccacaggaggggcgacgacgccggaccaggccagagaggggccaccggc

SEQ ID NO: 207240 - RNA, 73 nt, Homo sapiens
ggaaaggcagggcgagaggcaggaaggggaccccgacggagagacaaagaagacggagggggggccagccacc

SEQ ID NO: 207241 - RNA, 78 nt, Homo sapiens
gaccagcaggaacggcccgccagcaagaggaaaagcagagacacccggcacccaggacgggacgcccgagcggggaac

SEQ ID NO: 207242 - RNA, 72 nt, Homo sapiens
gggaacgaaacaagaacaccaggaggaagacaaaagagagagcagcacgaggcagcacaagggcggggcgca

SEQ ID NO: 207243 - RNA, 80 nt, Homo sapiens
agcagagcaggaaaacgaagaaggcaaaaccaagaggaaaagaggaaacaccaacagagaggaaggacacaggcagaaac

SEQ ID NO: 207244 - RNA, 35 nt, Homo sapiens
ggccgcccccgcacgggcaacacgcaggacacacg

SEQ ID NO: 207245 - RNA, 77 nt, Homo sapiens
cgacagccccccgaccagcggcagcaagcggcaccagggccagccaacacccgggggccgggaacccaacaagggag

SEQ ID NO: 207246 - RNA, 68 nt, Homo sapiens
gaacgccaacccaccacgcgccaagacaagagggaaaacccagaggaaccaaagcccccaggcccgcc

SEQ ID NO: 207247 - RNA, 68 nt, Homo sapiens
aagaggagccaagcaaacagaagcgcggccaagcaccgacggaagacacgggcccagacccaacagaa

SEQ ID NO: 207248 - RNA, 37 nt, Homo sapiens
gagagcgcgaaacgcaggaagaaccggcaccggaaga

SEQ ID NO: 207249 - RNA, 69 nt, Homo sapiens
ggcacgccgcggcgcaggacacacgaagccgagaggggaggcaagcaggggggcaaaggaaagaaggca

SEQ ID NO: 207250 - RNA, 71 nt, Homo sapiens
gcgccggcgcgggcgcggagcgggggacggagcgcgcaacgggccaggaccagacaccagaaaggaggcac

SEQ ID NO: 207251 - RNA, 75 nt, Homo sapiens
agcaacagcccgaacgacaggcgagacaccaaaccgaccagcgagggaacaggcacgccccacccgccagccgag

SEQ ID NO: 207252 - RNA, 68 nt, Homo sapiens
aagcgaaccaaagaagagacaaaagagagagcggaaacgagggaaaggcgggcccgaagcacccaaaa

SEQ ID NO: 207253 - RNA, 60 nt, Homo sapiens
aggaaaagggagagcccagggaccaagaaaggcccagggaccaaagcccggacaaggccc

SEQ ID NO: 207254 - RNA, 55 nt, Homo sapiens
cccaaggacacacgggaaggagcaaagacacagcaacgagggaagaaccaggcag

SEQ ID NO: 207255 - RNA, 66 nt, Homo sapiens
aaaagggagggggcgcaaaaaccagacaccccacaccaccacccagacgaccaaaagggcacccca

SEQ ID NO: 207256 - RNA, 89 nt, Homo sapiens
ccgcgggagcgaaaaacaagcgggaaccaaaaagaacagaaggggcaggcacaggagacacagggcgccccgcacgccgacgggggcac

SEQ ID NO: 207257 - RNA, 63 nt, Homo sapiens
cagacaagaccaacgaacccccagccccagaaaacaaagccacggccagacagaggaagcaag

SEQ ID NO: 207258 - RNA, 88 nt, Homo sapiens
aagaaagaaagggaagaagggagacaaaggaaaacaaaggcgcgccagcaaagcacggacagagaaggaggagaagcgagccaggcca

SEQ ID NO: 207259 - RNA, 82 nt, Homo sapiens
aaccggcaccgcacaccggaccaggaaacggaggcgggacaaacagaggaggcagagcccgcgcggggcagacccacgcgga

SEQ ID NO: 207260 - RNA, 60 nt, Homo sapiens
ggaaaagcaccacaaccaggacaacgagaagccaccagaacggcagccgggacgggggcg

SEQ ID NO: 207261 - RNA, 97 nt, Homo sapiens
acgcgccgcggccgggcagggaggagaccggcacccagacaggggcgacggcagaggaaaggaacccgacacaggacaagaagcggaaccagggccc

SEQ ID NO: 207262 - RNA, 101 nt, Homo sapiens
aaggcgagggggcagaaaacacccagccccaaaaccccgggagggaccggaaaaagaacacggcgacccgcagggcaggggcaagggagccggagaaaccc

SEQ ID NO: 207263 - RNA, 77 nt, Homo sapiens
gccaccaccgaaacgccaaaaaggcggaaaccccacaagcggccaccaccaaccggaagaacaaaaccagaaagacg

SEQ ID NO: 207264 - RNA, 60 nt, Homo sapiens
caggcaaaacccaaccaccgggaccgaaggagggcacagaaggaaggaaaccaccaccgg

SEQ ID NO: 207265 - RNA, 82 nt, Homo sapiens
gggagccagaccggcaccgaagaccgaaagggccgagaaagaagagaggaagaagaggaggaggaggaagaggaggaagacg

SEQ ID NO: 207266 - RNA, 74 nt, Homo sapiens
acagcggagacggaacgggagaagaggcaaagaaacaccaaggacaccccacaaaaccagccagaccagaaagg

SEQ ID NO: 207267 - RNA, 67 nt, Homo sapiens
gggagacgcgcgcccagaagaggcgagaagccgcccgcaggggcgaggaagcgccccgaaaccccca

SEQ ID NO: 207268 - RNA, 74 nt, Homo sapiens
gaaaacgagcacacccggaaccccgcccagcgccgcaacacacgacccccccggccccgggaagggcggggggg

SEQ ID NO: 207269 - RNA, 78 nt, Homo sapiens
gcgcagccgagagccgggggagcggggccccacacccccccgggggggggcaggaaaggagggcgaaacacaagcacc

SEQ ID NO: 207270 - RNA, 89 nt, Homo sapiens
cccccggccgaaaaggcgaccgccccaaggaaccacgacagaagcgaaggggacagggggagaaccgccagggaaacccgggggacaga

SEQ ID NO: 207271 - RNA, 51 nt, Homo sapiens
cccgcccagccccagagagcgggaacagcgcaggcccgccacaccaaggag

SEQ ID NO: 207272 - RNA, 108 nt, Homo sapiens
gaaaaccgaagggaaggccagcagcgcgcggagaagaacggggagccagcgcccccgaagacaccaacagccgaaccagaccccacccagcacaccccccaggcgccc

SEQ ID NO: 207273 - RNA, 90 nt, Homo sapiens
cgggagaccccaaccgcagagcgcccgagccggacgagcgggagaggacaccacacaaaaaacaggaaaagagaacaggcacccagcagc

SEQ ID NO: 207274 - RNA, 70 nt, Homo sapiens
aggaaagggacccgaaccgccccagaccccaaacaggagaaagcaaaacccaacccccagcagagaggag

SEQ ID NO: 207275 - RNA, 87 nt, Homo sapiens
gggaagcacgcgaggcgcccggagccggaaagccgggcgggagcccccggccagaaggcagcgggggcacagcgagggggcagaccc

SEQ ID NO: 207276 - RNA, 84 nt, Homo sapiens
acgacggcgccacaccgagcgcgaggcgcggagagcaacgccgggacagcgcaaggagccaggagcaggggcgcggcagaggcg

SEQ ID NO: 207277 - RNA, 77 nt, Homo sapiens
ccgcacgagggcacccacaccacgacaccgaaaacccaccgagcccgccaaaggaaaggacagaagccacaaaacac

SEQ ID NO: 207278 - RNA, 85 nt, Homo sapiens
cgacgaggcgagcgggggccgggcagaacaggacagggaggaccaacgcaaagaggagacaccacaaaaccaacccgacgacaga

SEQ ID NO: 207279 - RNA, 75 nt, Homo sapiens
ccgcccgccgccggaagcggggggaccgcacggacacgaagcagcacaggaggccaccaacagcagcaaccgagc

SEQ ID NO: 207280 - RNA, 76 nt, Homo sapiens
ggccgggacccggccccggcccacaggggggggcaaacccgagagaacgggggacccccgcagccgaagcaagcca

SEQ ID NO: 207281 - RNA, 78 nt, Homo sapiens
caagaccaagcgcgaaagcgccaaaaggacagcaggagagaacaaggagcaggccaacggccagaagaacgagcaaaa

SEQ ID NO: 207282 - RNA, 58 nt, Homo sapiens
ccaaggggagagagggaacagaaaggagaacaccacagacagccgaaaaaaaaggaga

SEQ ID NO: 207283 - RNA, 79 nt, Homo sapiens
agcggcgagggaaaagcgaggcaaggcaggcggaacaaccggacggcacccccggcaaggggagcaccccaggaccaac

SEQ ID NO: 207284 - RNA, 70 nt, Homo sapiens
cggacggaggaggcagaagcgcgcgagcccgggagccgaaaagcgaagccagcaaagagacgacggccaa

SEQ ID NO: 207285 - RNA, 53 nt, Homo sapiens
gcgccccggcggagaccgggccccggcaaaagcaggggccgcaaggccaggcg

SEQ ID NO: 207286 - RNA, 60 nt, Homo sapiens
gcccacccaagccggagaggggcccgaggccagaccgggacaggaaggaagaggagacca

SEQ ID NO: 207287 - RNA, 76 nt, Homo sapiens
cagaaaaccacggacaggcgccggaagcacccaacaggaggaggcgaggaagacaaagacgaagaacacaggcgcc

SEQ ID NO: 207288 - RNA, 34 nt, Homo sapiens
ggccggaacccgaaagggaaaggcaacgcaccgg

SEQ ID NO: 207289 - RNA, 76 nt, Homo sapiens
aaccgagcaacgcggccccagccgcggagacacaacaacagaggcagcaacgagaaccagaaaccgagagcagggg

SEQ ID NO: 207290 - RNA, 69 nt, Homo sapiens
accaaaacccacgggcacaacgggggacggaagacacgcaacccggcagccccggaaggaagaagccgg

SEQ ID NO: 207291 - RNA, 68 nt, Homo sapiens
gagaagaggcccgcgaagacaaaaaacccaagaacccaagacgcagcaaagagacaaaacaaaaccca

SEQ ID NO: 207292 - RNA, 70 nt, Homo sapiens
gaacccggcacaccacacgaggggaaggcccggagaagaaggggaaaacaggagcccaaaagaaggaaga

SEQ ID NO: 207293 - RNA, 82 nt, Homo sapiens
gcgccgccaccacgcgcgggcgggcagccccgggccaggccgcggccggggcaggagcgcagggaggggcggccacggcaaa

SEQ ID NO: 207294 - RNA, 79 nt, Homo sapiens
cgcccgccacccgcgcgccgccgccgaggagaaagcagggcagaaaagaacagacccagaagaagcgaaaggggagaaa

SEQ ID NO: 207295 - RNA, 42 nt, Homo sapiens
aaagcccagcagacagaacaggccggacacccaacagcacgc

SEQ ID NO: 207296 - RNA, 79 nt, Homo sapiens
gagcaacaccgagagaggaggagccagacgacaagcacacacaggcgcgaaacggaaaaaggagcacccgaagaagaca

SEQ ID NO: 207297 - RNA, 75 nt, Homo sapiens
aacaaccagaaggcagaaggaagcaagccgggaagcccaaagcaagggagaagccaaaaggacaggcagagggcc

SEQ ID NO: 207298 - RNA, 52 nt, Homo sapiens
gggccaggacaccaggagaccacggggggaaggaagcgagacccggcgcgag

SEQ ID NO: 207299 - RNA, 56 nt, Homo sapiens
gggggggcaaacccgagagaacgggagcccaagggccaagcgccaccaaccgagca

SEQ ID NO: 207300 - RNA, 38 nt, Homo sapiens
acgcagagccacgccggccagccaggacgccccccccg

SEQ ID NO: 207301 - RNA, 72 nt, Homo sapiens
cagggaacagcaagccacccaaaggaagaaaggacagcagaccacagcccggcaggcccaaaaacccaaagg

SEQ ID NO: 207302 - RNA, 84 nt, Homo sapiens
gggagagccccgcagaagacgccgacgagggggccgagacaacaagaaggggaggaacaaaagcgcaaaccggagccagaaaca

SEQ ID NO: 207303 - RNA, 46 nt, Homo sapiens
acaccgagccagcaagcccccaacgaacccgcccagcagccgaaag

SEQ ID NO: 207304 - RNA, 71 nt, Homo sapiens
agacgggccaagagcagaccgggcgaagggagaggacagcagggaggcgggacgcggcacagcaaggccga

SEQ ID NO: 207305 - RNA, 75 nt, Homo sapiens
gaggaggcggccaaaggggccggacgcgagagaaaaggccaggaaagccacaccccaacccaaccgcagcaaggg

SEQ ID NO: 207306 - RNA, 78 nt, Homo sapiens
ggccaacaacagccagcgaacagaggaccagcaacaaacaaaaacaaccaccagcgagcaaaaaggcaaagaccaaga

SEQ ID NO: 207307 - RNA, 39 nt, Homo sapiens
gagccccagggacagaagcgccccgagccaagaaccgcc

SEQ ID NO: 207308 - RNA, 71 nt, Homo sapiens
aacacacgcaaagcagagaaagcacagcagaaggcaacaccacaccagggcggcaggcgggcaggcacgac

SEQ ID NO: 207309 - RNA, 76 nt, Homo sapiens
aagaaagcaagacccaggacaccccgaagccgagaaagaagcgaaaccacaacacccaaaagcaaggaagaccacg

SEQ ID NO: 207310 - RNA, 66 nt, Homo sapiens
gaggaagcgaggccagacagcaagagcacccgacccacaggccagagaggaaggggaggagcacag

SEQ ID NO: 207311 - RNA, 80 nt, Homo sapiens
accaaggaaagcagaagacaagaaagggccgagaaagaagagaggaagaagaggaggaggaggaagaggaggaagacgag

SEQ ID NO: 207312 - RNA, 76 nt, Homo sapiens
agacgcagagcagaacaggaaggaacagcaagcaggccccgaaacggccagaaggcgacaagagaggagggcgaaa

SEQ ID NO: 207313 - RNA, 71 nt, Homo sapiens
aagccacagcgcgacaggaccgacaggggaaagaaaagaggcccggaagagagccaccacgacggcagcga

SEQ ID NO: 207314 - RNA, 79 nt, Homo sapiens
caccagggccaaagacccccaggggaagaggcaggccccgaggagccgggagcgcaagaggaacagaagacaccaccaa

SEQ ID NO: 207315 - RNA, 70 nt, Homo sapiens
aagggcgaaggagccggcccaagagcaaacaggaccagaagccaaagaggcgagggcccgcaaacaaggc

SEQ ID NO: 207316 - RNA, 58 nt, Homo sapiens
ccaacaagaccaagcccgcggacgccaggggccagacccacgcacagacaggcgagcg

SEQ ID NO: 207317 - RNA, 77 nt, Homo sapiens
ccaaggcaacagacacaagcagcacagcaaggcaacaccaccccaccaagggagcaggaagaagagagccaagcgaa

SEQ ID NO: 207318 - RNA, 78 nt, Homo sapiens
agacgcaccggaaaaccaccaggccagaccaacacccccagggcccccgacccaaaagggcaccccccagcggcccga

SEQ ID NO: 207319 - RNA, 77 nt, Homo sapiens
ggggacagacagggccaacgcagacccgcaggaaaacgcgcaaaccgcccgcgacgccaccggcgcagcacgaggag

SEQ ID NO: 207320 - RNA, 55 nt, Homo sapiens
aacaaccaccaagaaacagaggaaaggagcgagaaaccaacaaggcgaaagccca

SEQ ID NO: 207321 - RNA, 80 nt, Homo sapiens
gcgagggccagcaccaccccacggccagggccaccaaccccaacccggagagcggcgagaaagagacggcgccgaggaag

SEQ ID NO: 207322 - RNA, 63 nt, Homo sapiens
aaagaaagcgaaaaggcccgaagccaaaaagaggcgcagcaacccggccaaccagaccgaaac

SEQ ID NO: 207323 - RNA, 91 nt, Homo sapiens
cccggacaggccgccaacagacagggcggaggccacaccacgaggcgagccaagagcgaggcagccgccggaccacccgcagacacgacag

SEQ ID NO: 207324 - RNA, 71 nt, Homo sapiens
gggggcccgccaccccgggcgggcaacgccccccccggacagaaggccggccgggacccgaggcgagaggc

SEQ ID NO: 207325 - RNA, 69 nt, Homo sapiens
cacccaaacacagcaaggaccgaacccaaccacaggagcaaaacccacacaagaaggagaaggcacgag

SEQ ID NO: 207326 - RNA, 76 nt, Homo sapiens
gggaggccccagcgcagcagagcgccaagacggaacagcacaccgagcaagaaacagaaggaaggacggaacaagg

SEQ ID NO: 207327 - RNA, 97 nt, Homo sapiens
cagggaagcgcagaaagcaggcgaacccgcggcgcaaaacgaaacgaaggaggcccaaccacaaaaggagccgacggaacccagacggagaacaaaa

SEQ ID NO: 207328 - RNA, 71 nt, Homo sapiens
acaccaagcccgcagagccccagagggaacgcgggaaaggagacccagccaaaaggagaaacgcaagacgc

SEQ ID NO: 207329 - RNA, 57 nt, Homo sapiens
aaacaacaaccggacacagaggggacccaagggagagagggaacggcgaaagggcag

SEQ ID NO: 207330 - RNA, 76 nt, Homo sapiens
ggacacacagaccgagcgggcaacaccaggcaccagcaaggggggcacacacagaaacgaaggaggcccaaccaca

SEQ ID NO: 207331 - RNA, 68 nt, Homo sapiens
agaaacgagaacggcgcaacagggacaaagggcccaaagcgcgcccgccagaagaaccaccagccacg

SEQ ID NO: 207332 - RNA, 71 nt, Homo sapiens
gaagaacaagcggccccgggacagacagggaagacagacacaggaacaacccaagaaagaacaacagaaga

SEQ ID NO: 207333 - RNA, 61 nt, Homo sapiens
ggaccagggggagggaccaagaacggagaaaacgggccggaggaaaagggcggcaggggac

SEQ ID NO: 207334 - RNA, 77 nt, Homo sapiens
ccgagccgcccccgcagcgcgcgcagcgaagaacgccaacggcccacacggcgaaggaacagccacccgcccaagag

SEQ ID NO: 207335 - RNA, 68 nt, Homo sapiens
gaacaaaccagaggaagcccacacacgccagcagaccaccccgggagggaaaggccaggcaggacgac

SEQ ID NO: 207336 - RNA, 54 nt, Homo sapiens
agccccaagcgacaggggagggacccagggagaaagaagagagaccagaaacga

SEQ ID NO: 207337 - RNA, 76 nt, Homo sapiens
acacgggcgccaggaacgcggaacagaaccaaaggcaggacagccagcagggaaaacagggcggcacccaggcgaa

SEQ ID NO: 207338 - RNA, 79 nt, Homo sapiens
caggggaacagacagaaggagcaggaaccaaaggggcagaggcaggaacacccaacgaaagcacacaagagaaaccaaa

SEQ ID NO: 207339 - RNA, 72 nt, Homo sapiens
cgcccccgaaaagcaaggcggcaagccagaagcaccgaggacagaacaacagaacgcccgcgccaagcgggg

SEQ ID NO: 207340 - RNA, 79 nt, Homo sapiens
aaggaacacggggaaccccgaaagccagcacacaccccgcaggacccgccagcaggcccaggaggcaagagcgagaaga

SEQ ID NO: 207341 - RNA, 82 nt, Homo sapiens
ggagggaggggcagaggagaaccgacgaaccggggcgacagcaagaaggagccagcacagaggcaaaagaaccaacaaaggc

SEQ ID NO: 207342 - RNA, 80 nt, Homo sapiens
ggaggaagaggaagaggcgaaggcggcggaggaggagggcggagaacggaaaagcaccaggaagcagagaggaccgcaga

SEQ ID NO: 207343 - RNA, 81 nt, Homo sapiens
gcggagcgaggcgcgcccggagcgcagagaccggaagcacagccccgaggggcgaagccaccaaagccgaaaggcagagcc

SEQ ID NO: 207344 - RNA, 84 nt, Homo sapiens
agaaacccgggagcccaagacaacgaccccacagaaacaagccaccaggagaagcaaaagaggccgggaaagccaagaccaccc

SEQ ID NO: 207345 - RNA, 66 nt, Homo sapiens
gagaacccacacagccgcacgcccggccagcccgggaaaccaccaacagacggaccccagcagcca

SEQ ID NO: 207346 - RNA, 79 nt, Homo sapiens
accgacaaaccgaccgaccaggagccacagggccgaccacacggagagaacagaggccggacccgcacagagaccagcg

SEQ ID NO: 207347 - RNA, 83 nt, Homo sapiens
gcgccggcagaggaccaggcaccaccggccccggaagcaggaggccacgcgcagccccggaagagccacccagacccaccccg

SEQ ID NO: 207348 - RNA, 87 nt, Homo sapiens
agggggcgcggcgcggaacccgcggggcggcggcgacggcggcccggcagaacccgaaaggaagaggaagagagcgcgcggcgagcg

SEQ ID NO: 207349 - RNA, 73 nt, Homo sapiens
gagcggggacgaacagacgagaaaggaccaccgggcaaagcccaccacggcagcaggcaggcgcacagaaaag

SEQ ID NO: 207350 - RNA, 76 nt, Homo sapiens
gagcggggaagaaccgaccgcggcccccccccagcccggcgaccacaagaacaccaacaagagaaacggagagaag

SEQ ID NO: 207351 - RNA, 58 nt, Homo sapiens
aggaacagaccaacggacaagggcgcaacccaacccagagaaaaggcagaccgacccg

SEQ ID NO: 207352 - RNA, 72 nt, Homo sapiens
ggccccaaacgggccagaaggcgcgaggcgggaacacgaagacagcaacggcagaaaaagcggggaaaacaa

SEQ ID NO: 207353 - RNA, 78 nt, Homo sapiens
aggcgcgggcgagccggcgacggacgcggcgcgcgaccgacacgaagacaagcagaccggaagaccgacggaagacca

SEQ ID NO: 207354 - RNA, 76 nt, Homo sapiens
gaagaaacccggaaggggaagaggaaagcaaaggcgcaggaaggccccagaaaaccagaaggcaccgacaggaaag

SEQ ID NO: 207355 - RNA, 74 nt, Homo sapiens
gagcccagggacacacgcccagggccagggcaccagaacggcagcaagaggacagccagcagacaggcagcaga

SEQ ID NO: 207356 - RNA, 76 nt, Homo sapiens
cagcacgccaacccggacggacaacaccggggagcgcgggaggggcaggagaagccaagagggggagggcagagag

SEQ ID NO: 207357 - RNA, 63 nt, Homo sapiens
ccggcgggaaggaaaaccgcgcagagagacggacgccgcccgaacacacccgagcccaccgcc

SEQ ID NO: 207358 - RNA, 77 nt, Homo sapiens
aaagagcccccagagagaaaggagagacgaggcgaaagaaacgggccccaaagccccgaaaaccggaacgacagccc

SEQ ID NO: 207359 - RNA, 38 nt, Homo sapiens
gcgaccccaagaccacaaaagccaccgagcgaagaccc

SEQ ID NO: 207360 - RNA, 73 nt, Homo sapiens
agaccggcacagcaggcacacacggcgagcaacagggagagaacagcacacagaggcgcaaggggaagagaaa

SEQ ID NO: 207361 - RNA, 61 nt, Homo sapiens
cgggaccagcccaccccgggcccggggccagcagcagaaagccagacggaaagcgaagaga

SEQ ID NO: 207362 - RNA, 65 nt, Homo sapiens
ccagaaaaagacgacgcccggaagaggcgaaacgcaagagagaagagaaggaaaggacggcgaac

SEQ ID NO: 207363 - RNA, 82 nt, Homo sapiens
gggagaaggcgcaacgcggcgcggagcagcagcagggaagcaagcagaagacaaaccaaaaaaaacaacggagacccacaca

SEQ ID NO: 207364 - RNA, 76 nt, Homo sapiens
cgcagacggccagccgaaaccacggcggaaaacggccaccaaaggggaagacaacaagcacacagaccccaccagg

SEQ ID NO: 207365 - RNA, 58 nt, Homo sapiens
cacaccaacagaaaccagaggggaaacgccgccaaaagcaagagccacggcaggaagc

SEQ ID NO: 207366 - RNA, 39 nt, Homo sapiens
gaccgcagcgagggaccagcgagggaagcggacacacag

SEQ ID NO: 207367 - RNA, 76 nt, Homo sapiens
aggaagaagacaccggggacagacagggaggaagcagagacgcaggaggaccaagcaccaaaaccaagccagagca

SEQ ID NO: 207368 - RNA, 79 nt, Homo sapiens
caaccccgcccaacacccaccgagaagcagccccagagaaggagaagagagagacgcgccgggagagaaacacaagccg

SEQ ID NO: 207369 - RNA, 72 nt, Homo sapiens
aagcagaccgcagaggaagaaagcggaaagagcgacaaacaaagaaagacggacgccaccgagcagcgaaaa

SEQ ID NO: 207370 - RNA, 60 nt, Homo sapiens
ccggcgccccggcgcgaagaggcggaccggacggccgaggagaggaagacgaggaagcag

SEQ ID NO: 207371 - RNA, 77 nt, Homo sapiens
ccagaccgaaccaccaccacagacccccaccagaaagcaaacgagggcacacggcgggcgaccaacgacgaagagca

SEQ ID NO: 207372 - RNA, 72 nt, Homo sapiens
agcacggaccaggaggcgagcaacagggacacagaccagggagggcaagaccggaggagggaaagccgaacc

SEQ ID NO: 207373 - RNA, 76 nt, Homo sapiens
gaccaggagggaagcccaacccgcgcaggacgcgaacccgccacgcggccggaaacgggcacaaggacaggcaaga

SEQ ID NO: 207374 - RNA, 80 nt, Homo sapiens
ggcgcaggaaccgaccagacgggaaaagaaacccgaggaagaagaggggaaagagaggaacagaagagaaggaagaacag

SEQ ID NO: 207375 - RNA, 73 nt, Homo sapiens
ggaacagcccaagaggaacaaagacggagagcccagagacacgcccagaaggggaagacccccagcgaacaga

SEQ ID NO: 207376 - RNA, 60 nt, Homo sapiens
cggccgacggggcggcgggagcagacaacaggcacaaagagagaaggaacacccacaggg

SEQ ID NO: 207377 - RNA, 73 nt, Homo sapiens
gccccccaggcccacaaccagcccagcagcagcaagcagccagaaccagagaacagcagaggcccaggaaaca

SEQ ID NO: 207378 - RNA, 68 nt, Homo sapiens
gacccccggggaaaggaagcgcacgcccaggggaggaaccccaggcacaaagaggcacaggggagccc

SEQ ID NO: 207379 - RNA, 83 nt, Homo sapiens
gcaccgaaccggagaccgaggaggagaagaggaaaaggggagcaggaggcgacaagaggagacgaagaagaggaagaaggggg

SEQ ID NO: 207380 - RNA, 81 nt, Homo sapiens
ggggcggccgcggcgccgggcgccgaggcaagaggaggaacgacgagaagagaggaagagagagacgcaacggagaggaag

SEQ ID NO: 207381 - RNA, 93 nt, Homo sapiens
ccgggagccgccggcaccgccggaaccggcgcagaaagccacacgcccaggagaagagaagcgcaggaagaaacaacggaggaagagcaaaga

SEQ ID NO: 207382 - RNA, 36 nt, Homo sapiens
aggaccccaggaaaggcaggcaccagacaccacgga

SEQ ID NO: 207383 - RNA, 68 nt, Homo sapiens
agaaaaagagacaaacacgggaggaagagagaacggcacgaaagaacccccccaccaccggaaggccc

SEQ ID NO: 207384 - RNA, 78 nt, Homo sapiens
gcacgggagccagcccgcaggaggcgcgccggcgagcgccgcccgaggcggcgcgggcccgacggcaccaggacaagc

SEQ ID NO: 207385 - RNA, 76 nt, Homo sapiens
aggaagaacggcaaggagcgaaggaacgccccaaacagcgaaagagaggacacaggcagagaacacagccgagaag

SEQ ID NO: 207386 - RNA, 83 nt, Homo sapiens
ggcgacgcggggccaggcaggacccaacgacaggcgccccggcccaacgcccagcccaccagggcaggagcgccagccccccg

SEQ ID NO: 207387 - RNA, 62 nt, Homo sapiens
ccaccgcccagccaaccacagaaaacaacccagacagcgaggcagacccaaagaacgcaggc

SEQ ID NO: 207388 - RNA, 87 nt, Homo sapiens
agccgcagcggagcccacgagaggcagcgccaggcggagcagaccaccggggaccagaagcagcagccccagaagccccgaagccgg

SEQ ID NO: 207389 - RNA, 51 nt, Homo sapiens
gcggaacgggagaaagcacgggaggagagggcacagcgcgagcgccgcgcc

SEQ ID NO: 207390 - RNA, 56 nt, Homo sapiens
gcagggcgccaaagcgagagagggaagcgcccggccgacccaaagacaggaccacg

SEQ ID NO: 207391 - RNA, 79 nt, Homo sapiens
caggacaccaggcccgaacgaaaagccaggaaacagccagacagagaagagaaggggggcaaggcaacaggaagaggga

SEQ ID NO: 207392 - RNA, 79 nt, Homo sapiens
aggaaaaggagcgagcagacgacaagccgggagcgggcggccaaccagaagaaacggacggccaggacccgggcgccac

SEQ ID NO: 207393 - RNA, 73 nt, Homo sapiens
ggggcgccccacagaggggcgacgaggaggccgagaccccaagacgagggccaccgacccagagccgggaccc

SEQ ID NO: 207394 - RNA, 61 nt, Homo sapiens
gccgggccagacacgacaccaccaccccaccccggacggcggaaaacccgaagcagaagcc

SEQ ID NO: 207395 - RNA, 60 nt, Homo sapiens
acggaaggacaagcacacaggacaagcaaagccaacagccaggcggagcgcaaggcggac

SEQ ID NO: 207396 - RNA, 79 nt, Homo sapiens
caccgaaaagacaggcgagaggaacccgcgcccagaagggaaggccacggacggggaaacgcaaggcaaccccgcaagg

SEQ ID NO: 207397 - RNA, 79 nt, Homo sapiens
gcgcggagaccggaccgcgccacaaggagagccggaagaaaacccgagcgcacgcaagaacaaggccaaaaaaccaaag

SEQ ID NO: 207398 - RNA, 73 nt, Homo sapiens
ggaacggggggagagaacccaaccagggggaaacacagaacgcaggggggccgagacaacaagaaggggagga

SEQ ID NO: 207399 - RNA, 67 nt, Homo sapiens
agcccaaggagaggcagagacccacgcgagaaggagacgccgagagcagaaacccggacgacggaga

SEQ ID NO: 207400 - RNA, 68 nt, Homo sapiens
caggggaaacaaaaccgaggaaacaggaccacgcacaccgaaaaggggaggcgggggcgcacaggggc

SEQ ID NO: 207401 - RNA, 69 nt, Homo sapiens
agcccagcccagagaggcccacaaccaagccacaaaagacacgccacaaccgagacggaacccacaggc

SEQ ID NO: 207402 - RNA, 81 nt, Homo sapiens
aaaggcccggggcccgggacgagggaagcgcaaaccagcaaaagcagaaagcacggaccaaaccagcgaaaaggggagaaa

SEQ ID NO: 207403 - RNA, 76 nt, Homo sapiens
aagaaaaaggaggaacagagggggaaaagcacagaaagcaagaaaagaaccgcgaaccagcaaggcagaaaaaaac

SEQ ID NO: 207404 - RNA, 68 nt, Homo sapiens
cgcacgcgccggagacagggagaccaagagacagacaccgccccgagacgagcacggaacggaaacag

SEQ ID NO: 207405 - RNA, 80 nt, Homo sapiens
cgcggaggcaggacaggaagggaccggggccaggcgggcagggcgggcagcggccgagccagcggacgccacccggagga

SEQ ID NO: 207406 - RNA, 82 nt, Homo sapiens
ggagcggcacgccagcccgcgacgagccagaagccagacagacacagcacagcagccacgaagagcaaagcaagccgaaaaa

SEQ ID NO: 207407 - RNA, 103 nt, Homo sapiens
gaccgggggccagaaggcgaagggagagagaaaaagccagggaagaacacagaaggaggcacccacagaaggagaacaagcagagcaccggacacgaggagaa

SEQ ID NO: 207408 - RNA, 74 nt, Homo sapiens
gagaagggaagaaaacccgcccagcaagcaggacacgaccaacaagcgagcccgagggagaggagcgacaaaca

SEQ ID NO: 207409 - RNA, 71 nt, Homo sapiens
acaggccaaaagagaccagagacagacaacaccacagcacaaagaaacggagagaagaccaagaggcggag

SEQ ID NO: 207410 - RNA, 82 nt, Homo sapiens
ccagacgcaaaggaacaagcgccaccaaggaagcccggcaaacgagacaccacgccgccgcaagccagaagagccaggaaaa

SEQ ID NO: 207411 - RNA, 76 nt, Homo sapiens
gaaagcaaacgagcagggcaaggcacgagaggcgaccaagaagggggccacaagaaaagcaagggaaagcagcacg

SEQ ID NO: 207412 - RNA, 58 nt, Homo sapiens
gacccgaaagccgcgggaaaagaccaaaacagggaaggaagaaccaggagggaaaacc

SEQ ID NO: 207413 - RNA, 70 nt, Homo sapiens
aggccaagagcccaacaccacccgagagccccaagagcccaaaaggcagagcgaggagagaagaaggagg

SEQ ID NO: 207414 - RNA, 83 nt, Homo sapiens
cagcacacagcgcggccaaacagacgcgacgaagaaaaggggggacaggcacacaggccacaaggccggcagcccgcaggaca

SEQ ID NO: 207415 - RNA, 37 nt, Homo sapiens
gaggcacccagccacaccggagaaaagcccagaaccg

SEQ ID NO: 207416 - RNA, 94 nt, Homo sapiens
caagacacccaccgccccaggaaacaaaccaagaaaaccaaaacaggaaaccggacggggaagaaaaaccgaggccagacgaacggaaaagcaa

SEQ ID NO: 207417 - RNA, 82 nt, Homo sapiens
aggccgcccagggcacgccgcaaggcccaagagccaccccaggcgaacggccggagaaccagagaggacccggagcaggagg

SEQ ID NO: 207418 - RNA, 71 nt, Homo sapiens
accacagaaggacgggagaacaccccacagggaagaggggaaaaaaacccggagccagagcagaccaagag

SEQ ID NO: 207419 - RNA, 72 nt, Homo sapiens
gaagcggggcagaccaagcaacacagaagaaacgacaccagagagacgcagcgaacgcagccaaagaaaccc

SEQ ID NO: 207420 - RNA, 50 nt, Homo sapiens
acagagggcacacggcacagaccagggggaaacccgcccagggcgggaga

SEQ ID NO: 207421 - RNA, 71 nt, Homo sapiens
ggcggccacggggaggcgaggacgacggggcgagaccccgcccggaccgcaggcagaaccacgagcccagc

SEQ ID NO: 207422 - RNA, 66 nt, Homo sapiens
gagaaaccacccccgagccccgacccccccaagcaagcgagagaggaacgaggggcacagaaacca

SEQ ID NO: 207423 - RNA, 35 nt, Homo sapiens
ggcacaccgcacaaggcgccggggaaggaaccaga

SEQ ID NO: 207424 - RNA, 63 nt, Homo sapiens
aacaaggagccagaagcagccagaggaagcaaggaaaccacgaaacagcgcgagccggacggc

SEQ ID NO: 207425 - RNA, 74 nt, Homo sapiens
aagcggagcgaccgaccaggcaaccacgggaggaagcgcagaaaggaagagaagaagaagcagaaagggcagga

SEQ ID NO: 207426 - RNA, 76 nt, Homo sapiens
agaaggaaacaacagaacagcaaaagcgaaggccaaacacacaggaacgccagaccccagccgagggaggcaacag

SEQ ID NO: 207427 - RNA, 68 nt, Homo sapiens
gggaagaaagccccaccgagcacagggccagcgacacgggaagacagaagaggacccgcgagcgcaaa

SEQ ID NO: 207428 - RNA, 75 nt, Homo sapiens
ggcgccgcggagaccccgcggcccggcagggggaacgggaggggggccagaacagaaaagcccaggaagccagcc

SEQ ID NO: 207429 - RNA, 52 nt, Homo sapiens
ccaggagcccgagagagaaggaaaaccagacgagagacagaagacgaaaggg

SEQ ID NO: 207430 - RNA, 76 nt, Homo sapiens
accaagggaaccccaaaccaccacacggaaaggaggcaggaaaaggaagagcaaaaacaaaaacccagcagacaaa

SEQ ID NO: 207431 - RNA, 73 nt, Homo sapiens
aaggaggcacagaagcccgaagacaaaagcagaacagaagcagcaccggacagaacagagagaagggcgggag

SEQ ID NO: 207432 - RNA, 90 nt, Homo sapiens
gcacgcggccgggagcccccggagcagcagcccgccggcacgcgagccccagcaagggccagcggagcgaagccacagaacaaaaacgac

SEQ ID NO: 207433 - RNA, 64 nt, Homo sapiens
acagaacggaagacgagcgacgaagacagccgggcagccggacggcggcggcggccaggagggc

SEQ ID NO: 207434 - RNA, 68 nt, Homo sapiens
acaagggcagagggaacaggcagcaggaagcacggcgggcgaaacaggagaagacagaggagccagac

SEQ ID NO: 207435 - RNA, 75 nt, Homo sapiens
cgcaccccgagccgagggccgcgcgcggccgacaggacgaaaaggcccaggccggcggaaaacccaccgccaaaa

SEQ ID NO: 207436 - RNA, 79 nt, Homo sapiens
accgccccaacccacgagaggacagcccaggagcacagcaagcgggagcaggcagaccaaaggaacagaagccagggcc

SEQ ID NO: 207437 - RNA, 74 nt, Homo sapiens
gaacagaacacggcagcacacaaccccaaaggacagaaggagacagaacccagacagggggagcgggccagggc

SEQ ID NO: 207438 - RNA, 74 nt, Homo sapiens
aaagaccggagagaagcgagagggacaagaaacgcggaaagacgcaggagagaccagcagacagaacgagcaga

SEQ ID NO: 207439 - RNA, 73 nt, Homo sapiens
agagggggaccccagccaccacgacaagagcgcacgcagcagggacgcaccaaaacggacagccgaagacagg

SEQ ID NO: 207440 - RNA, 78 nt, Homo sapiens
caccagagaccggacccgccaggccaccagcccccgggccaagagcagcacggagacagagccacacaccggggcgag

SEQ ID NO: 207441 - RNA, 47 nt, Homo sapiens
agcagcaacgaccaagaaagaaggccgagaaagaacaccacaagaag

SEQ ID NO: 207442 - RNA, 83 nt, Homo sapiens
gaaagggacgccggggccgggccaggagcagagagacggcccgcacccaccaaacagaacgaggaaccgcccccacgaaggcc

SEQ ID NO: 207443 - RNA, 81 nt, Homo sapiens
gccggccgcaggagcgcgcaccccgcgcgccccggaagccagagcgggcgggggaggcccaggccgaccaagaagacagga

SEQ ID NO: 207444 - RNA, 88 nt, Homo sapiens
gaggggccgggaacccgccggggagaggcacccgagacccacggagaccgcgacgaagagcccgggcccgccacagaggggaacgaac

SEQ ID NO: 207445 - RNA, 77 nt, Homo sapiens
aggaggagcggggcagcaggacagggaaaagagacgcaaaccacgaggacagagaagagagaagccaccagcaaaag

SEQ ID NO: 207446 - RNA, 76 nt, Homo sapiens
gcgagggcgaggacggggacccgcgaaggaagcgaccaccggcgagaggaggaccggacaggcagcggaagaacag

SEQ ID NO: 207447 - RNA, 76 nt, Homo sapiens
gaaggaaaagaacaccggaaagaccgacgcagaagagaagcgagaacagccagagagaacgggacaggggggccca

SEQ ID NO: 207448 - RNA, 68 nt, Homo sapiens
ggcaaaccgaggaaagcgggacgggaggcgagacaagcagcgcgggcacagggagggcggaccaccca

SEQ ID NO: 207449 - RNA, 84 nt, Homo sapiens
agaagggcggacccgaagaaggacggcgacccgccgaagcaccgcgggcgcgcgggaagccagcacaacagacacccggccaga

SEQ ID NO: 207450 - RNA, 83 nt, Homo sapiens
gaggcggcccgcccggaaggcaagcgcagcaacaacagagagcacgggccaccagcccccgggccaagagcagcacggagaca

SEQ ID NO: 207451 - RNA, 62 nt, Homo sapiens
gccaaggagaaggcagaccggagaaagacgaccgccaaccagggagaacacagagaaaaacc

SEQ ID NO: 207452 - RNA, 94 nt, Homo sapiens
ccagcggacggggaaaagcaagcagggaggaaaaagaacggaggaacccacaagggcaaaagagacggacaagcaaggcaggagaaagcaagca

SEQ ID NO: 207453 - RNA, 89 nt, Homo sapiens
cccagcagggaccggacagaccccaagaagaagcggaagaggagccgcggaaccaagacacaaggaacagaagacaggaccaggaagcc

SEQ ID NO: 207454 - RNA, 79 nt, Homo sapiens
acgacccgccgagcaaaaaaagagcccggaaggaagagacagagacagagcaaaaccaggaaggagggccccggagcag

SEQ ID NO: 207455 - RNA, 73 nt, Homo sapiens
aaccaagagggaaggagacagggaagcaaagcgcaacagaaacagagagaacggacaaggagaaacaagaaaa

SEQ ID NO: 207456 - RNA, 84 nt, Homo sapiens
agcaaaaagacccccaagagcagagagggcaaaagagcaaacagaggcaccccaaaaaaggaagaaagaacaccaaaagggaac

SEQ ID NO: 207457 - RNA, 73 nt, Homo sapiens
cgggagacacgagaaagacaacaagggagggcacagccaagacaacaaccaagcaccaggaaaaccgagaaga

SEQ ID NO: 207458 - RNA, 68 nt, Homo sapiens
cagcggaccagcccggaaccaagacaggcgcccagggcacaaaggggcgcgaagccggccaacggaaa

SEQ ID NO: 207459 - RNA, 78 nt, Homo sapiens
aggagagaacccaccagccaccagaccacacaacagcaccagcaccagagacgggacggagggggcaccggggacgcc

SEQ ID NO: 207460 - RNA, 99 nt, Homo sapiens
cgggagagcgccccggggacaacacgcccgggagacgagaccgaaccggcaccgcacaccggaccaggaaacggaggcgggcagaagggaaaccccaaa

SEQ ID NO: 207461 - RNA, 70 nt, Homo sapiens
agcaggaaagaagaaaaagaaagggcagccaaagaagacacgcggaagcgagggacaagacggacagaaa

SEQ ID NO: 207462 - RNA, 74 nt, Homo sapiens
acaaacacccaccacagcagagcaccccgcggagccccagagaaaccaggccggaagaccaggagggaccgaag

SEQ ID NO: 207463 - RNA, 62 nt, Homo sapiens
cacacggaccaggagcagaggccaggaaaggaaacgaaggagagcgcgcgccgcgcgcccgc

SEQ ID NO: 207464 - RNA, 65 nt, Homo sapiens
acccaccccagaacaccgaccagggaacgcaacaaagcaccgggccgaaccagaggggcagagaa

SEQ ID NO: 207465 - RNA, 82 nt, Homo sapiens
gcaggaaccaccaggacagaagacgaggacgcgcacaggaaaggacgcggaacaagcaggcagccaggcagcagaaggcagg

SEQ ID NO: 207466 - RNA, 116 nt, Homo sapiens
cgagccggccgagagagacggcgagggcgcccggacaagaacccacagaaggacaagggaggagcaagaggggagggaaaaggaaaagcgcgaaagagcaccagcccggaaaaagg

SEQ ID NO: 207467 - RNA, 72 nt, Homo sapiens
cgaccacgccccggggcagcaggcgaccagcgccacgccggcccagaaagggggccaccccagcgcaccccg

SEQ ID NO: 207468 - RNA, 73 nt, Homo sapiens
gcaggcacagcacgggcagagccaggaccccgcgcccacccaacaaggcaggcgaaacagcaggagagggaag

SEQ ID NO: 207469 - RNA, 54 nt, Homo sapiens
gaacacagcaccacacgcccccaagacaacgaagggacaccagggcggacacgg

SEQ ID NO: 207470 - RNA, 51 nt, Homo sapiens
aggagaggccgagcccgaacaggccggaaggggggcgacgcggaaggcaca

SEQ ID NO: 207471 - RNA, 73 nt, Homo sapiens
agggccaggaagaagaaggaagcagagaagaggggagaggcagagaagaagcccgagccccagacccaagccc

SEQ ID NO: 207472 - RNA, 62 nt, Homo sapiens
gacgggcaggccgaaggggagaagcagaccgcaccaggcgggaccccgaaaaagcccaaaca

SEQ ID NO: 207473 - RNA, 72 nt, Homo sapiens
gagaaaaccgggcgcagccagccgagcccggaagccggcaagacaagcgaggcgccagccgagaaaaccacg

SEQ ID NO: 207474 - RNA, 77 nt, Homo sapiens
aggacggcccacgagacccaccggaacagagcaaaaaacggcacccgaacagacacaaaaacagcccaccaaagaac

SEQ ID NO: 207475 - RNA, 85 nt, Homo sapiens
gaccacgcaggcggagaggccaaggaggaggcgcaggaggccacacagcagcagcagaaggccaaagacagagaccccgccacca

SEQ ID NO: 207476 - RNA, 53 nt, Homo sapiens
aggcgagaaggggagccagcaacacccaacacaaagcggaagaacacagaaac

SEQ ID NO: 207477 - RNA, 57 nt, Homo sapiens
aaggagcggcccgcacgccaaaacgagcaaccggacgacaccaccaagagccagaga

SEQ ID NO: 207478 - RNA, 50 nt, Homo sapiens
gcggaacagcacaccaggagagaagcgacagccgcaggaaacacccaagg

SEQ ID NO: 207479 - RNA, 87 nt, Homo sapiens
acgccgcggacccccgcgaccgcgcggaccagggcgacaaagggacccgagcagcccgacggccaggaggcgaagagacgaggaagc

SEQ ID NO: 207480 - RNA, 84 nt, Homo sapiens
gcgagacccacgaggcgcggcccggaggcccagaaacgggccgcgccaccaagagacgacaacccccccggcggaagcccccga

SEQ ID NO: 207481 - RNA, 74 nt, Homo sapiens
ccgggaccagcgagcgacaggacacgcaggggagaaccggaggaagcagagcaaggcaaggccagggacagaca

SEQ ID NO: 207482 - RNA, 65 nt, Homo sapiens
cgcggagcccaagaaacgggcagccaggcccccacagcccgcagagagaggagacacaagaggac

SEQ ID NO: 207483 - RNA, 75 nt, Homo sapiens
agccaagccccaacacagcacagaagccggaggaaaggaaaaaagaaaccacagaggaagaagaagccaaacacg

SEQ ID NO: 207484 - RNA, 59 nt, Homo sapiens
cggcagaacagccgggcgcaaagccacaagccaggcgaacccccccaaaaaaaacgcgc

SEQ ID NO: 207485 - RNA, 98 nt, Homo sapiens
gcagcacgagccaggaacgcgcagccccgagcgccgcggacgcgcacgagggacggggaaaggccgcaggaagccggggcaggcccaagaagccaaaa

SEQ ID NO: 207486 - RNA, 75 nt, Homo sapiens
cgaaaggagcgggccggcaagggagacccacagcggggccgggccccgaccacccagagaaaggaaaggagccag

SEQ ID NO: 207487 - RNA, 110 nt, Homo sapiens
cagcagcagccgccgccagagaggcccgcccaccagcgcccgcccccgccccgcacaagacgaacgaaccacggcaacagccggggagggcggacgggagaccggacgac

SEQ ID NO: 207488 - RNA, 76 nt, Homo sapiens
cagccggagcggaggagacgggccgcacccgccccccgcgcccgccaccggccgccgcccggcaaaacaagggcgg

SEQ ID NO: 207489 - RNA, 81 nt, Homo sapiens
gaaaacacgagggcaaacgcacacgagggcacaggccgcgacaagacacgggagcagcaagaaggcgggaccccagccaag

SEQ ID NO: 207490 - RNA, 72 nt, Homo sapiens
gcgccggacgggacgcccccacgaacccaggcagcaggggcaaagaaaaaggagagaaaaagaggcaaaaca

SEQ ID NO: 207491 - RNA, 77 nt, Homo sapiens
ccaaggccagaaccaggaagaggagggggaaaggccaaaacagaagaggcaaagcccagccacagcagcagcccagc

SEQ ID NO: 207492 - RNA, 102 nt, Homo sapiens
cgaggggcgaggcgcggagcccgggacgcgcgacgcccgcgccccgacagggaaagcggaaccaccaaaaggaggagacaacgaccagaaaacggagcagcc

SEQ ID NO: 207493 - RNA, 77 nt, Homo sapiens
accccaagaagaccacagagggacccggacaaccagaggcagccagcagggggagccggaacaagaggagaccaaga

SEQ ID NO: 207494 - RNA, 72 nt, Homo sapiens
aaaaaagacccaagaaagcacggacagcggaaaagcggccccaaggcgaacaaagaggagggacagccaaga

SEQ ID NO: 207495 - RNA, 75 nt, Homo sapiens
cgcacgacggccacggagggggcacaggaccgcaccaaggcggcaagcgcagaggcgcgcgggggcacagcccag

SEQ ID NO: 207496 - RNA, 67 nt, Homo sapiens
gggggggaagccgcagcggaaagcaggagcacaggggaccacgcggagggggaaaaacgcaacagga

SEQ ID NO: 207497 - RNA, 61 nt, Homo sapiens
cgcgagcgaacgaccaagaggggcgacgcagagccgagcgaagcgcaccgcgcgccgcgcc

SEQ ID NO: 207498 - RNA, 75 nt, Homo sapiens
aaaagaaaccaacaccgcaagcaaaaaacggcacccgaacagacacaaaaacagcccaccaaagaacccaggcga

SEQ ID NO: 207499 - RNA, 74 nt, Homo sapiens
agccaacaggcaaaagagggccgaacccaccgagccccggggaggagagcgccggaacgccgaccgaaaccacc

SEQ ID NO: 207500 - RNA, 85 nt, Homo sapiens
cgcccgggacaggccagacccaggagccccccgggaggagcagcagagaggcggaggaaaccacggcgcagcccgcccccacaga

SEQ ID NO: 207501 - RNA, 90 nt, Homo sapiens
ggagggcgaaaaaaaagaaggaacccaaagaaccaccccaaacaggagaaacggcgaggaaagagaggagccccggaaagaaaaggacag

SEQ ID NO: 207502 - RNA, 81 nt, Homo sapiens
gccccaccggggagacgaggcccgcggcaggcggggccaggcccgagccagaaggaggcccacagagccccccacacagca

SEQ ID NO: 207503 - RNA, 67 nt, Homo sapiens
caccggcgcccaaccccaaagaccgggcccggaggaggacgaaacccccgggccaggccaaccacga

SEQ ID NO: 207504 - RNA, 114 nt, Homo sapiens
ggaaaggccgcaccagcagagagcccgcacggaacagagcggaaaagaccgagcaggccggaaagcggaacagcacgcgagaccgagcccagcaaagggcaggacgcgagaaga

SEQ ID NO: 207505 - RNA, 59 nt, Homo sapiens
gaccgcccccagaggccgggccgcacccccagccgaggccgacagcagaaccagacccg

SEQ ID NO: 207506 - RNA, 72 nt, Homo sapiens
aaagaagacccgccaaccggaacgaaagggcaagccagagaccagaaacccgcgggccacccccaaccagga

SEQ ID NO: 207507 - RNA, 85 nt, Homo sapiens
ccggccagacaaacagcccgcccgaccccgcccgacccggccgccccgagcggagccggagcccaaggagaagacaccggaccac

SEQ ID NO: 207508 - RNA, 78 nt, Homo sapiens
caggacggagagggagaagagacagggcccccgcacccgggcgaggcacgggcagcgaagcgcgcagccgcgaccgcc

SEQ ID NO: 207509 - RNA, 74 nt, Homo sapiens
caagaggagaaaaggaacccaaacagagccacccccacccaagagaacggggagagggaagaaacaagcccgaa

SEQ ID NO: 207510 - RNA, 77 nt, Homo sapiens
cgaggaagcgggccgggaggagacagagagcccggacaacagggggagaggcagacagggcaggaaaccccagaaag

SEQ ID NO: 207511 - RNA, 72 nt, Homo sapiens
ccaaaaaaaagaggagcagcaggcacagcacgggcagagccagccagaccggaggaagacggccgaggagga

SEQ ID NO: 207512 - RNA, 74 nt, Homo sapiens
gcagagaccgggcgagcgacccaggaaggagagagcacagacagggacccgagacaggggcaagcaagcacaaa

SEQ ID NO: 207513 - RNA, 57 nt, Homo sapiens
gcagacaacaaagaaaacgggaagagcacccggagagcaggcgaccccaagaaggga

SEQ ID NO: 207514 - RNA, 86 nt, Homo sapiens
cagggaagcgcagaaagcaggcgaacccgcggcgcaaaacggccccgagccccggccccaaagacccaaaacagagacacccccca

SEQ ID NO: 207515 - RNA, 102 nt, Homo sapiens
acacacagaggggcagccaaaagaagaaaggagaggaaacgaggccgcgaggagcgcgcaacagcagagaagcagcagaacgggaacaaacccagccgcgac

SEQ ID NO: 207516 - RNA, 77 nt, Homo sapiens
cagcggaagcaaaaacaggcgccaggagacacagggagcaaaaacggggaaagagagggaggacacggacgacaccg

SEQ ID NO: 207517 - RNA, 48 nt, Homo sapiens
accccgcagaccccccggcccagcaggaacgcccggaagaaccacaac

SEQ ID NO: 207518 - RNA, 49 nt, Homo sapiens
gagaaaaaccggacgagcgagcaaggcgcgggcacagggagggcggacc

SEQ ID NO: 207519 - RNA, 78 nt, Homo sapiens
gaagggcaggagacacagaaggagaagcaaccacaagccgacagaagaggagcacggcggcggaggaagaaagaccga

SEQ ID NO: 207520 - RNA, 71 nt, Homo sapiens
acagggacagcagggacagaacaaacggagaaccaggaggcaccagaagaaagaagagaccaagcgcacag

SEQ ID NO: 207521 - RNA, 60 nt, Homo sapiens
ccaacaccgggaggcgcaccagcaaggcaaggagggcgccgcaccaggcggacagcagga

SEQ ID NO: 207522 - RNA, 44 nt, Homo sapiens
cccaggaaccacagagggaccggagcccccaacaagcccaagag

SEQ ID NO: 207523 - RNA, 77 nt, Homo sapiens
aacacacacacagcgacagcacaagaaggggcggacggcagagggcccccaaaagcagaaacagcgcagacaaaaag

SEQ ID NO: 207524 - RNA, 53 nt, Homo sapiens
gacaaaaacggcccggagaggagacgggaagaaagcaaacgacccaccagaag

SEQ ID NO: 207525 - RNA, 84 nt, Homo sapiens
caccgcagcagcccacccaggagaacacgagacccgcacaaaaccccgccccccaggccacacaggggccgagacgggggggaa

SEQ ID NO: 207526 - RNA, 71 nt, Homo sapiens
caaggggccgggagcgaccaacacaagggggccgcaaggccgaaggcaggcacccacaccgacacacagga

SEQ ID NO: 207527 - RNA, 71 nt, Homo sapiens
cgggcgcggcgcacgccgcccgcccaggagaggcaaaaaccaagggaaagaggagaggggccccgagaagg

SEQ ID NO: 207528 - RNA, 81 nt, Homo sapiens
gacaccacgaaaaggaaggccaagaccaggaaaggaaggcaccccccgaccagcagaggcagacgcagccgccggagggcg

SEQ ID NO: 207529 - RNA, 75 nt, Homo sapiens
aaaagagcccagggccgccggggccaacaggaggcaacaccaacaggacagccagagaccgaacagagagaacaa

SEQ ID NO: 207530 - RNA, 69 nt, Homo sapiens
ggccacacaacggagagcgcaagcccagcgggacagagagaggaacaaacaggcaaggagcgccacgga

SEQ ID NO: 207531 - RNA, 63 nt, Homo sapiens
agccaggaggaaaacacaccaaggcccgagcgaacaagaaagcaaggacagggggggcagcgg

SEQ ID NO: 207532 - RNA, 74 nt, Homo sapiens
caggcaggcgcgagaaggacgcgcagccaccccaggaagaccgcaggaaagcaggaaggcaagaaagccaagga

SEQ ID NO: 207533 - RNA, 73 nt, Homo sapiens
gcgggaacggcgcggaaggcagggcagcccccaccaccggaagggcgaagaggagagaccgggaggaaacgcc

SEQ ID NO: 207534 - RNA, 75 nt, Homo sapiens
agggacccgccccagaacagaaaacgaaggaaggaggacccgaggagagagaagacggaaaggaaacacggaagc

SEQ ID NO: 207535 - RNA, 98 nt, Homo sapiens
ccggcggccccaccagcagacgcagccgagacaccagcccgaaacaccaccaagcacagaaagaccggacacccgcacacagggaagagaaggacaga

SEQ ID NO: 207536 - RNA, 39 nt, Homo sapiens
ggcccccgagagaaaggagacacaaacggagcgggagaa

SEQ ID NO: 207537 - RNA, 69 nt, Homo sapiens
gaacccgaggacagaaaaccggagagaggagaggaagacgaggaagcagaagaacaccaagcccaccaa

SEQ ID NO: 207538 - RNA, 61 nt, Homo sapiens
cgcagccggggaccgcccggccgcgagccggcgcagacgccgaagaaagaaacgccagacc

SEQ ID NO: 207539 - RNA, 77 nt, Homo sapiens
ccaggccgagaaacacaccccggggcggagcgacaggggaccagaccaccgcgcaacagcaacgagcgaccaccgac

SEQ ID NO: 207540 - RNA, 68 nt, Homo sapiens
gcagccgagcacacgccgccgccgccgcacgggccggaagcgcaacgggaggacgccgaaaccccagg

SEQ ID NO: 207541 - RNA, 79 nt, Homo sapiens
ccacgcacgaaagcccaggccaaaaagagagcaaccacggaggagggcggacgggagacacagaggcaggaaaacggcc

SEQ ID NO: 207542 - RNA, 54 nt, Homo sapiens
gcgaaacggaagaggaaagcagacaagccagcggagaaagagccagaaggcccg

SEQ ID NO: 207543 - RNA, 67 nt, Homo sapiens
gaagaacacagagagagaagccaggagccaccaacaccaaaaaggcaaggaaaccgaagagagaagg

SEQ ID NO: 207544 - RNA, 56 nt, Homo sapiens
ggggcgggagagccccgcagaagacgccgacgaggccccagcagaacacccacacc

SEQ ID NO: 207545 - RNA, 74 nt, Homo sapiens
agcaaccaccaggcagagacagccaacaaaaacaggcgagaaaacgcgcgaaaagcaggagaagagaaacagga

SEQ ID NO: 207546 - RNA, 86 nt, Homo sapiens
ccgggaggacacacaagcggggcacccacagccagcaggcaggaaaggcaccaaaccgggaggaaccacccagggaaaggaggcca

SEQ ID NO: 207547 - RNA, 61 nt, Homo sapiens
gggaccaagaacacccagaacccagaagccaccaagaggcagaagagacaacacagaaacc

SEQ ID NO: 207548 - RNA, 72 nt, Homo sapiens
gccgagagccgcccgggccagcggccgcgcacccccggccggaggcaccagcgcgcaaggaagaagagacgc

SEQ ID NO: 207549 - RNA, 65 nt, Homo sapiens
ccccgacaaagaaccggcgcagcaggccaacgaaagcgccaacccacggacccaaacagcgaggc

SEQ ID NO: 207550 - RNA, 65 nt, Homo sapiens
ggcgccaagcaacgaggcaggccacggaaacgacgagaggacagaaaggccaccacagccagaag

SEQ ID NO: 207551 - RNA, 74 nt, Homo sapiens
ggggcgggggcaagggcgcccgcggacagaaccaaggagagacacacggaacaagagacaaaaaaagaagcaca

SEQ ID NO: 207552 - RNA, 74 nt, Homo sapiens
agacaagcagaaaaagaggagagaaggcgaggaagcccaagcacaaaggagaagacgcccaagccaagaaaaca

SEQ ID NO: 207553 - RNA, 62 nt, Homo sapiens
acagcagcccaccaagcacagacaagcaggccagcggagcgaagccacagaacaaaaacgac

SEQ ID NO: 207554 - RNA, 61 nt, Homo sapiens
cggggaccgcacacccaagcaagaggagccaggagcacggggggaacaagaccgccgggac

SEQ ID NO: 207555 - RNA, 72 nt, Homo sapiens
cggagaccacgcaaggccacagaaaaggggaagaaggccaaccgggggccaagggggaagggaggcagcagg

SEQ ID NO: 207556 - RNA, 77 nt, Homo sapiens
gcaacaacacagaggcagccggcgccgagacagccaggccagccgccagcgacaagggggcgacgcagcccagcccg

SEQ ID NO: 207557 - RNA, 74 nt, Homo sapiens
ccaccaaaacaggcaaacggaacgccaccaccaacagaaaaaagcggggagccaaagcagcagaagaaaggcac

SEQ ID NO: 207558 - RNA, 78 nt, Homo sapiens
aggggggaggaccggaaggcaaccaggggggggcacggaggggagacaacaggaggagaccgggggggggaagccaga

SEQ ID NO: 207559 - RNA, 81 nt, Homo sapiens
ggagaaagcagagcgacgcgcgccgcacggaggcaagaagaaacccaccgcaaagaggcaggccggaaggaccaggcaggg

SEQ ID NO: 207560 - RNA, 69 nt, Homo sapiens
cgccagcccaggaaaggcgccgaagaggggaagaacaggcagcacaggcaccccacgagagaagccagg

SEQ ID NO: 207561 - RNA, 80 nt, Homo sapiens
ggcggcacgaaggacagacagacgcccggacccagcagccaacaaggggaagcgagagaagcagcaacgcggagcaagag

SEQ ID NO: 207562 - RNA, 68 nt, Homo sapiens
caggccacggcacagcgggccccagaagaaggaagccagggcccccaggccccacaccgcacagacac

SEQ ID NO: 207563 - RNA, 76 nt, Homo sapiens
agagaaaggagaaggaaaaagaaagccaagaagggaagcgaagggcgggagacagcagggcaggcgaggaacccag

SEQ ID NO: 207564 - RNA, 77 nt, Homo sapiens
aggccagaccggcccgggccgggccaggaggacacgcgcagggcccacgacgagacaagcgggcgcaaagacaccgc

SEQ ID NO: 207565 - RNA, 77 nt, Homo sapiens
gcccaccgggaagccggggggcccggaaagagagagcaggcgaagaggaacgaaccgaaacagccaacccgcaacaa

SEQ ID NO: 207566 - RNA, 59 nt, Homo sapiens
cagcccacaaaggcaccgggagcaggaaaccaggcgcgcacgaagccccccaggaggac

SEQ ID NO: 207567 - RNA, 74 nt, Homo sapiens
agcagcgagaaaccagaaaacacggaacaaagaacgagggcaaacccacagacaaccagagccaaagggcaccg

SEQ ID NO: 207568 - RNA, 57 nt, Homo sapiens
ccgggaggagggacaaagcaaggaggaggcagggccagcggcggccgaacccgggcc

SEQ ID NO: 207569 - RNA, 64 nt, Homo sapiens
gccagaggacggagaagacgaggaagaggagaggccgggaagaaggagggacacagcagcgcgg

SEQ ID NO: 207570 - RNA, 71 nt, Homo sapiens
aaccaagaacaagcacgcagcaccccagccaagaaaacaacaaagggcagacaacaacgagaaggcaagca

SEQ ID NO: 207571 - RNA, 92 nt, Homo sapiens
gaaaaccaacgcccccccagcacacagaggagagcgacgagaagggcaagaaacacggcagggcagagagcgaaacgcgaagagccgccaac

SEQ ID NO: 207572 - RNA, 83 nt, Homo sapiens
aagcgccgcgaagcgccgccggccccgccgccaagaggagcgagcggacccgcgagggagcacagcaagcgggagcaggcaga

SEQ ID NO: 207573 - RNA, 74 nt, Homo sapiens
ggggggaggaaaggaaaccaaagcaagcaggaaaagcagggcagacagggacagaaacaccggccagcgcccac

SEQ ID NO: 207574 - RNA, 76 nt, Homo sapiens
cagagaaccgcgaagggagcggccccgagacgcgccggcgcgggcaacaacccgccaacccccgagagcggaacac

SEQ ID NO: 207575 - RNA, 82 nt, Homo sapiens
ggaaagaccacaggcggagcaccccaggagagaaggcgaggaagcccaagcacaaaggagaagacgcccaagccaagaaaac

SEQ ID NO: 207576 - RNA, 59 nt, Homo sapiens
aaccccaccggacccggaagcagacccacaggcaaaacggacgggggcaggacccgcgg

SEQ ID NO: 207577 - RNA, 73 nt, Homo sapiens
aggagaaacagacggccccgaggaggcccacgcggaccggcagcgccaccggaccaccagacaaggacacggc

SEQ ID NO: 207578 - RNA, 59 nt, Homo sapiens
ccagacccggaaaccccgaaacagaagccaacaggagagacggaaggagccgagcagga

SEQ ID NO: 207579 - RNA, 76 nt, Homo sapiens
gagcgacagaggagggaaacgcggagccaggccgagaggaacaaccagccaaagcaaccagaaaccgacacgaaca

SEQ ID NO: 207580 - RNA, 82 nt, Homo sapiens
acagcacacacccaggccagcgcgcaggcccggaggagcgggaggccagaaacaaagagcagacagggagcagacgcgggag

SEQ ID NO: 207581 - RNA, 59 nt, Homo sapiens
gagagaaggcacggcggcgcagaaaaggagccaccaacagagccaggagccaggaagca

SEQ ID NO: 207582 - RNA, 68 nt, Homo sapiens
gggagagcggggaagggggaaaggcaccaggacaagcaaagcccaacaaagaaaggacagcaagaaga

SEQ ID NO: 207583 - RNA, 75 nt, Homo sapiens
cgacagcgacacccagcggcagcccgacacaacccaggagagcggaagccggcagaagaagacccaccaaggggc

SEQ ID NO: 207584 - RNA, 47 nt, Homo sapiens
agaacacacggaccgagagaggagggcaggagaaaggagaaaaagag

SEQ ID NO: 207585 - RNA, 86 nt, Homo sapiens
ggccgggccccgcagcggaaccggacccagcccgagccgccccacacccacaggggagccagcgccccagaacagcacgggcagag

SEQ ID NO: 207586 - RNA, 84 nt, Homo sapiens
cgggcacccgcacgagcaacagacgagcgcgccaggccgacagccgcggccgggcccgagagccacacaaccacaaccccaaaa

SEQ ID NO: 207587 - RNA, 61 nt, Homo sapiens
caaaaagggacagcagaggcggagccgagaagcgggaacagaggaagccacaacggagccc

SEQ ID NO: 207588 - RNA, 60 nt, Homo sapiens
gcaagaacaagacccggcaggagccccaggccgcggcgagccgcacagggcaacacacgc

SEQ ID NO: 207589 - RNA, 61 nt, Homo sapiens
cggaggccgaggacccggggccgaggagcgggaagaggcgggcgggacgagaagaagccac

SEQ ID NO: 207590 - RNA, 60 nt, Homo sapiens
gacgaggagcccggaagagaccagaaaggccagggaacgggaggcggcacacgacggcag

SEQ ID NO: 207591 - RNA, 77 nt, Homo sapiens
gaagccgacgcccaccagcgaacccggcccccgacggccgcagaacgggaccagccgcggagcaagacccacaaacc

SEQ ID NO: 207592 - RNA, 86 nt, Homo sapiens
cgggaggagcggcagccgcgaggaggcgcgggagggcgagaacgaccccgagacggggcaaggaggaagagcaggaccgcgggaca

SEQ ID NO: 207593 - RNA, 83 nt, Homo sapiens
agggaggggagaaccgcaaggagagcagccagagccacgagaagagccaaggaagagaaaccagcaggcgaagcaagcacagc

SEQ ID NO: 207594 - RNA, 78 nt, Homo sapiens
gaggcacgagcggggacgcgggccgcagcgcggagcagaaagcagaacccgcagaggcagcgacggaagcccgcgccc

SEQ ID NO: 207595 - RNA, 55 nt, Homo sapiens
accagcaggcaagcccacaggccaagacgccacaggcacacggacacccacggcc

SEQ ID NO: 207596 - RNA, 60 nt, Homo sapiens
ggaaaggagcccgggcgcgggggcggcggcagggggcggagcgacggcccgccacgggcc

SEQ ID NO: 207597 - RNA, 71 nt, Homo sapiens
ggacaaaaccaccgaagcccaggcagcgggacaaccgcaccagggcaaaagcccacagagagagccaggac

SEQ ID NO: 207598 - RNA, 69 nt, Homo sapiens
ggcccggagggaccaccggccccaggggaaacaggacaagaccacgccaggcacacagaaggccaaaac

SEQ ID NO: 207599 - RNA, 80 nt, Homo sapiens
gcacacaaccagaagccagggagaaggaaggaggaggagaacacaggggcccccagaagccgccgaacgccgcacccccg

SEQ ID NO: 207600 - RNA, 61 nt, Homo sapiens
cccaaacaggagcggagcagccaaagagcgcgggaagcggaggccacgcacagcgcaggaa

SEQ ID NO: 207601 - RNA, 72 nt, Homo sapiens
aaagacaagagcagcacccaaaagaccaggagccacaaaggagacagccaccacgccgagggcacccggaga

SEQ ID NO: 207602 - RNA, 73 nt, Homo sapiens
ccggccaggaacacagacgggggcgagcggacccgcagccccaaaagggaaggagagaaggagagagacccag

SEQ ID NO: 207603 - RNA, 67 nt, Homo sapiens
ggcgaagccccagaaaggaaagccacgcaggggccaagaagcccagggccgaagaggacggcagagg

SEQ ID NO: 207604 - RNA, 74 nt, Homo sapiens
gacaaagacaggaagaaaaagagaaccaagcacccaccaagggcagcggaagaagagaagggagggcagaagga

SEQ ID NO: 207605 - RNA, 48 nt, Homo sapiens
ggaaaagcagcgccccagaaagaagcggcaagcacgcaggcccaacga

SEQ ID NO: 207606 - RNA, 57 nt, Homo sapiens
agaaacacggaacgggaagacgaggcagacaagccaaaagagggcgaaccaaagaag

SEQ ID NO: 207607 - RNA, 80 nt, Homo sapiens
caagaagggccgagcacagcaagcaagcaaagaaaccccaaagccagcaagaccacagcagcacgcaccagccagcgaac

SEQ ID NO: 207608 - RNA, 75 nt, Homo sapiens
cagaccagcagggaccgggcacagacaacccccaccgcaaccagaaacaaaggcacccagcgcaagccagggacc

SEQ ID NO: 207609 - RNA, 77 nt, Homo sapiens
gaagccacagggaaaaaccaaagccccgcgcaaagaccgcagaggggaaaaccggacagacaagccccgagggacac

SEQ ID NO: 207610 - RNA, 58 nt, Homo sapiens
ggcgagggacaaaaggcgaagacgccaagaccacgaaggcccgcgaccccgggaagcg

SEQ ID NO: 207611 - RNA, 77 nt, Homo sapiens
ggcacgagcggccgcggccaggcgacgccacccaagacacaaacggcgacacaggacgggagaacagaagagcagac

SEQ ID NO: 207612 - RNA, 61 nt, Homo sapiens
ccgaagaaaacagcgggaagagacagccaagagccgacaaaaggacaaggggcgaagcccg

SEQ ID NO: 207613 - RNA, 79 nt, Homo sapiens
gcgacacgaccgcccgcgagagagagaaagacgcgaggggacgaggaagacaggggggcccacgcggaggacgcagaac

SEQ ID NO: 207614 - RNA, 63 nt, Homo sapiens
acgcacgcgcccggacaagcgcgggacagaggcggcccacggcgcagcgcggggcgcacgacc

SEQ ID NO: 207615 - RNA, 59 nt, Homo sapiens
cgaaccagaaagccagggaggcggcagaccagaagaagccccgaaggcaaacccggcac

SEQ ID NO: 207616 - RNA, 52 nt, Homo sapiens
cggaaagcagaagcgcgcagcaacggcgggagacggcccaccgaaggaaaca

SEQ ID NO: 207617 - RNA, 78 nt, Homo sapiens
aacccagcacgggagccaagcccgccgcaggaaaaacagaagagccgagggagcaacggccacaggaagcgcggaaaa

SEQ ID NO: 207618 - RNA, 65 nt, Homo sapiens
cagggaagaaaacagggagagaagcacgagaccgcgagcaacagcagaaaagagaagagacccac

SEQ ID NO: 207619 - RNA, 77 nt, Homo sapiens
cccgaaaccagcccacgccaggcaaggaaacggaggaaaacaacagaacaacaaaaggaaaaaaaagagagagagac

SEQ ID NO: 207620 - RNA, 70 nt, Homo sapiens
gccgaccagaagaggcacacgccagacagacaggaacgagggccgacacgaggacaggacagggaagagc

SEQ ID NO: 207621 - RNA, 84 nt, Homo sapiens
aaaagacggcaggaggaagagagagagaggacaagcagaccggaagaccgacggaagaccacaccccgagggagcccaggacac

SEQ ID NO: 207622 - RNA, 86 nt, Homo sapiens
ggaccggcgccccggcgcgaagaggcggaccggacggccgagcagcgcacccacaccagaaagcggcgggcacaggggaaaaaaca

SEQ ID NO: 207623 - RNA, 74 nt, Homo sapiens
agaagaagaagggcgcaggcgcagcaggccggagggccaaccagaagacggagcaggcaaaggagaaaagccaa

SEQ ID NO: 207624 - RNA, 79 nt, Homo sapiens
ccggcgagacagccgaggcaggaagcccggcggacgaccaagacacccaggagaaagacagcggggaaaagaaaaagga

SEQ ID NO: 207625 - RNA, 64 nt, Homo sapiens
cggagaaggccaacggcacaacgccacggggcacacccaagcaagagggaaagggccccaagag

SEQ ID NO: 207626 - RNA, 88 nt, Homo sapiens
ggcccagggcgccacgagccaggagaccaaggaccagccaccacggagaacacaccgggccaagccaccaacagaagacccaggccag

SEQ ID NO: 207627 - RNA, 77 nt, Homo sapiens
aaagcggcacgacaacaaaaccacagagaggggagagcccaagcagccgcagaggaccaagaagaacccaacaacgc

SEQ ID NO: 207628 - RNA, 110 nt, Homo sapiens
gccgaaaccggaggcccggggggcccagccccgagggagccggggcgccgggcccgggccgggcagcaaggcgccaccggaagaaacgggaggggaggagccgggaaaga

SEQ ID NO: 207629 - RNA, 84 nt, Homo sapiens
ggcgggccgccgagcggacccggaccggggggcggcgacggcggcgcgaggaccgaccgggcccgcggacgaagaaggcacccc

SEQ ID NO: 207630 - RNA, 95 nt, Homo sapiens
gcggccgcgagacggcgcgagaacgagcgcagggagcggaggaaaagggccaggaccgcggcaagcgggagcggacccacccaagccaccgaacc

SEQ ID NO: 207631 - RNA, 69 nt, Homo sapiens
ggaacagaccaagccgccgcagaacgccacagaaaggagaaagcgaaagaagcaaggagaaaagcagca

SEQ ID NO: 207632 - RNA, 90 nt, Homo sapiens
ccgacgcacgggcggccggggcccgggaccgggagcccgggaccgggagccggggggccaccccgaccggaggagcggcgcaggccggcc

SEQ ID NO: 207633 - RNA, 56 nt, Homo sapiens
cagacaagaacacaacccaaacccgcccgggaccaccacacgaaaccaaggaaaaa

SEQ ID NO: 207634 - RNA, 78 nt, Homo sapiens
ggccgccgggcccgggcaggggcggggcaacgcggaaggcaacaagaaaaacgaaaagcgcaggaggaggacagaaaa

SEQ ID NO: 207635 - RNA, 79 nt, Homo sapiens
ccgacggggccaccgcggcggcgcccgcaccgcgcccgcaaagagcagcaccgaggccccccccaccccccgcccgcgg

SEQ ID NO: 207636 - RNA, 82 nt, Homo sapiens
ggcaaaacgcgaacaacccacagaagcccaacagcggcccagcaggagggcggggccgcggcagccacccccacagcacgcc

SEQ ID NO: 207637 - RNA, 72 nt, Homo sapiens
ggcccccgccggagcgcccgacccgcgggccgggcgcagccgccgccccgccccagaagcggcggagaaacc

SEQ ID NO: 207638 - RNA, 86 nt, Homo sapiens
ggaagggcgggaccaacagggagccagcgagcccgcagaggagaagcagagccggcgcaagagaagcagggcgcgggagcggaggg

SEQ ID NO: 207639 - RNA, 59 nt, Homo sapiens
cgcaagaacccagggcagaaaggagggcccacggccccacggggcgacgagccacgggc

SEQ ID NO: 207640 - RNA, 62 nt, Homo sapiens
ccagggaccaaggaccaaaacccaaagaaaacccacacagcaggcaaccaaacgggcgaaca

SEQ ID NO: 207641 - RNA, 108 nt, Homo sapiens
gaaagccccgagaacaacaagaagacacagacaagagaaacggcacaaggagcagggaacgagaagacccgagaaaaaacgcaccccggcaacggccagcaaaaaaag

SEQ ID NO: 207642 - RNA, 88 nt, Homo sapiens
agagagcgggggggggaccgccggcacgcgacccccccgggcccaaacaacagaaccggaagaccggaaggcgcgagaaagaacggga

SEQ ID NO: 207643 - RNA, 79 nt, Homo sapiens
accagcagagcaagaaaaagagcccggaaagaagaaggagaggggagaaccccagcacgacagaacgccagggaagaaa

SEQ ID NO: 207644 - RNA, 81 nt, Homo sapiens
ccggggcgcggagggccgagggagggccgagccagccgcggccggaggagcccccaggccagggaaaacgggaacacaagc

SEQ ID NO: 207645 - RNA, 89 nt, Homo sapiens
agggaccggagggaagaagggcgaagcggccaggcccgggcggacgcagagccagagcgccccagaggagcagagggccggaaaggaag

SEQ ID NO: 207646 - RNA, 76 nt, Homo sapiens
cgagggccagcgacacgcgccacagggagaacacgaggaaaacaaccacaggggccacagacagcaccaggaacag

SEQ ID NO: 207647 - RNA, 73 nt, Homo sapiens
gagcaacaccaacaaaaaacaggcccagccccggcaaaagggaaagcaaggggaagggcccaagaagacaccc

SEQ ID NO: 207648 - RNA, 99 nt, Homo sapiens
cgaacagaaggaacgacgcggaccagaagccagagcgaggacgccggcaggggacggaaagagagccgcagcgcagaacaagggaaaaaagggcaaaaa

SEQ ID NO: 207649 - RNA, 74 nt, Homo sapiens
agagcagaagaccaggcacgcccgagcaagagaagagcgacagccgggacaggaaaaagacaagaccacaagac

SEQ ID NO: 207650 - RNA, 60 nt, Homo sapiens
gcgaccagacccaggacgagacgggcaagaaccgacacgcccccgggccaccaggggagc

SEQ ID NO: 207651 - RNA, 77 nt, Homo sapiens
gacgcagggcgcccccgcggggcgaacgggagcgcaggcaacagccaccggaagaaggaggagaaggcacggccagg

SEQ ID NO: 207652 - RNA, 82 nt, Homo sapiens
agcacgagccaggaacgcgcagccccgagcgccgcggacgcgcacgagggacggggaaagacgcgccaagcaaagacagaag

SEQ ID NO: 207653 - RNA, 56 nt, Homo sapiens
cggggccgggcagcgagcccacacagagacgaggacgcgcacaggaaaggacgcgg

SEQ ID NO: 207654 - RNA, 78 nt, Homo sapiens
caaccgaaggaaaaccaagaaaggacggacaaggccacagagcacaggagaagagaagcaaaagggaaaccgaacaaa

SEQ ID NO: 207655 - RNA, 79 nt, Homo sapiens
cggcgggaagagaagacacgagcacaaacgagggagcccaggcggcaggagagcaaggggcaacgaaggagacacacgg

SEQ ID NO: 207656 - RNA, 90 nt, Homo sapiens
caccagccgcccaagccgcacagccgcggcggcagcagcaggagagggaggcggaaccaacccccggccagggaggggccgggggacgag

SEQ ID NO: 207657 - RNA, 78 nt, Homo sapiens
ggcgccggcgggggggcccgagaaccagaaaccgagagcagggggcagaaacagacaagaaaaaaacacagcaaagca

SEQ ID NO: 207658 - RNA, 67 nt, Homo sapiens
aacacccagaacaacaaagaggcagagaggcggaccccgcgggcgcgcggcccgaacccagcgagag

SEQ ID NO: 207659 - RNA, 80 nt, Homo sapiens
cgacacagcaagccggaggacccccccagagaccaggagagggacagccacggggaagggacacccgacagccgggcgcc

SEQ ID NO: 207660 - RNA, 71 nt, Homo sapiens
ccggcagaacagcagggcaaagaagagcaaggaacaggaacagacgaacgggggcgcaacagaagcagccg

SEQ ID NO: 207661 - RNA, 78 nt, Homo sapiens
cacaacaggggagcagcccacacgcagagaccagggcaagagacccccgaggagacccgcaggaacaccagagagaag

SEQ ID NO: 207662 - RNA, 78 nt, Homo sapiens
ggaaaagccacacgaggagggccaagacgggagagccacgggcccccggcaacgaacggcccgcagaaaaaccggcag

SEQ ID NO: 207663 - RNA, 74 nt, Homo sapiens
gcaggggaggcagcgaggaaaaacacaagagaagaacagcagcagaaaaaacccccaaggagacaagaacggac

SEQ ID NO: 207664 - RNA, 77 nt, Homo sapiens
cgaaccacaggaccagagggcgcgaggcaaggcgagacaaagaggcacccccacggcggaccagcacagaacagaaa

SEQ ID NO: 207665 - RNA, 78 nt, Homo sapiens
aacagggccgcggacaagcggccaaggagaaccaggacaccggcgcgcaggcccagcgcagacggagcgagcggcgcc

SEQ ID NO: 207666 - RNA, 65 nt, Homo sapiens
gcggcgcgggacgcgaggccggggaaagcaggcaggagggagagcgccgaagaaccaccccccgc

SEQ ID NO: 207667 - RNA, 37 nt, Homo sapiens
accgccgcccggcagggggaggcagcggcggcccagc

SEQ ID NO: 207668 - RNA, 72 nt, Homo sapiens
ggacagcagaaaacaaggagaagcacggaccaaagcagcgcaacccagccacaggagaacgaagagaaagga

SEQ ID NO: 207669 - RNA, 125 nt, Homo sapiens
aggaccaggaacacccaagccagcggaggcggcagaaaaagaaggaaaacccaaagcaaaagcccaaaggggacagccaaacgaaaaagaagaaggaagagaagaaaggcaaaggcccagacagc

SEQ ID NO: 207670 - RNA, 55 nt, Homo sapiens
acgagcccccaggccgagaagcgggacaaagaaggacaagaacacacggagaaga

SEQ ID NO: 207671 - RNA, 51 nt, Homo sapiens
gacccggagggcgagccggcaccagggcccaggacaagggagagacagagc

SEQ ID NO: 207672 - RNA, 80 nt, Homo sapiens
cagaaaacaggagaccaagccaaacaaggcacgcagggcggcggcggacccgcgcacgacccagagccacgcacccaggc

SEQ ID NO: 207673 - RNA, 69 nt, Homo sapiens
acaaacagagaacgacgggggaagcagcagccaggaagcagcagcggagaaacaccgccgcggagaggc

SEQ ID NO: 207674 - RNA, 64 nt, Homo sapiens
ccgaacaaggcaaaagggggggcagcacgccgaaggagagaccagacaacaggccagggaaggg

SEQ ID NO: 207675 - RNA, 77 nt, Homo sapiens
accccggaaggggcccgagaggaacagcgcccccgggcccccacgacaggggcccagcgaaggggggagaaggcacg

SEQ ID NO: 207676 - RNA, 40 nt, Homo sapiens
cacggggaacacaccggccaaaacgcggaaccagcccaca

SEQ ID NO: 207677 - RNA, 86 nt, Homo sapiens
aagaacccgccgcacccggcccagcgacccgaccccgcgcgacgacccgccgccgccgggcggaggcgacagcgaccgaagaacag

SEQ ID NO: 207678 - RNA, 66 nt, Homo sapiens
cccggggaaagaggcgggagagggaggagcccagaccgggcgacccgcccacccgaaagagcgaaa

SEQ ID NO: 207679 - RNA, 75 nt, Homo sapiens
aagaggagccaagccgcaaggccagagcagccagaaggaaacacaggaaacaggcacaggcggagaacaaagggg

SEQ ID NO: 207680 - RNA, 77 nt, Homo sapiens
cgacccagcaggggacccagccggaacgaggccacgggacgagggagaagcgaccggagagacccaggaggacacag

SEQ ID NO: 207681 - RNA, 80 nt, Homo sapiens
ggaggagggcagaaggggacagggaaaagaaagagaccaaagaacgaagagagagaaacgaaaaagaggaaggagcgagg

SEQ ID NO: 207682 - RNA, 69 nt, Homo sapiens
aacacgggacaggcgcccgagcccaccacccagcacacgcagcgggcccgcacacacagcacaggagac

SEQ ID NO: 207683 - RNA, 75 nt, Homo sapiens
ggaacaagccaaacggacaggagaacggcgccacaagaaagagcaggacaagagaaaggaagcaagaccagagag

SEQ ID NO: 207684 - RNA, 74 nt, Homo sapiens
aaaccaagaggcacaaacagcaacaggacaaaagaacaacagacaaggcaaggaccggggaaccagaagaggcc

SEQ ID NO: 207685 - RNA, 43 nt, Homo sapiens
cgcgggcgcaggaaggcgagcagagggagacacagggggaacg

SEQ ID NO: 207686 - RNA, 69 nt, Homo sapiens
agagacgggaacacgagcgcgggcaacggagacagaaaccaggaggccaagcaagggaaaaagacagaa

SEQ ID NO: 207687 - RNA, 74 nt, Homo sapiens
aaagaaagaaagaacaaggccgcccagagaagcgaaaaggcgaaacgggaacaaagagcagaagaccccacagg

SEQ ID NO: 207688 - RNA, 79 nt, Homo sapiens
aaagcagcaggaaagaacaggaaagaacaagaagagggcagggcaccaccagagaaggagaggccagaaagggaagaag

SEQ ID NO: 207689 - RNA, 69 nt, Homo sapiens
ggggcccgaagggagcgggaggaggcgcaccccacaggaagagaccagaagagcaggaggaaacaaagg

SEQ ID NO: 207690 - RNA, 67 nt, Homo sapiens
aagaaagggaagagacacaagcaagaggaaaggccgccccggaggaagaaaagggagccaagaggca

SEQ ID NO: 207691 - RNA, 77 nt, Homo sapiens
acacgaaaagagagcagaaggagggaggaaggccccacagaaacgcaaaaggccaagcgagaagagaccggaacgcc

SEQ ID NO: 207692 - RNA, 55 nt, Homo sapiens
cgggcccgccagccccagcggcgccgagaaagagccaccaaagaacaacaagagc

SEQ ID NO: 207693 - RNA, 54 nt, Homo sapiens
cccgcgcggcgcggggaccgcggcccgggcgggaaacgccaaaagggggaggag

SEQ ID NO: 207694 - RNA, 76 nt, Homo sapiens
aaggcgccgaaagacgcagccgacgcagcggcccccaaaaacaggcagcaaacgaaagcagccgaaacagagcaag

SEQ ID NO: 207695 - RNA, 63 nt, Homo sapiens
cgcccagcacaccaccgcgggagacacacgcaccaccgccaggggccagaacacccaacagcg

SEQ ID NO: 207696 - RNA, 42 nt, Homo sapiens
ggacagacagcgcacaacagacagacacccccccacaacggc

SEQ ID NO: 207697 - RNA, 101 nt, Homo sapiens
cagcgccaaaagccagaacaagaagcggaggcgggcaagcccgaagcgaaggagaaggccagagcacacaaagaaagggggaaaagcaagggcggacaaaa

SEQ ID NO: 207698 - RNA, 43 nt, Homo sapiens
cagaggagcgaaagagagagaaggaagaggcccagcagaaggg

SEQ ID NO: 207699 - RNA, 73 nt, Homo sapiens
gcaagagcgcggagccccggaaggagcgaggacacacaggagggacaaaggggaagacaagaaacggcagagg

SEQ ID NO: 207700 - RNA, 78 nt, Homo sapiens
gacacgcgacggaacagcgaaacgccgcggcccccagaagagcacccagcagcccaaggagaccagaacccgcacgac

SEQ ID NO: 207701 - RNA, 72 nt, Homo sapiens
cgggccgggagccgcgagcggcgccgcccccgcggagccccgcagcgggccccaggccggggcgagcgggcc

SEQ ID NO: 207702 - RNA, 82 nt, Homo sapiens
ccccaagacccaggcacacaacaggagagaggagaaagaagaaacgcagaaccacgaaacaagcagcacaaaagcaaacaac

SEQ ID NO: 207703 - RNA, 115 nt, Homo sapiens
ggccaggcagcccgacccgggaccagcgacccccgccagcccagagagccgagaccacaggaaaccgaaacgccagagcagaaggaaaacacccccagaaccccgcaaaaacgca

SEQ ID NO: 207704 - RNA, 71 nt, Homo sapiens
ggacgcgcagagaaaccagacaaaaaaaacaagaagaagagagaagccggagcaagagagaaccaggccaa

SEQ ID NO: 207705 - RNA, 84 nt, Homo sapiens
ccggcgcgccgccgcgaggcgcgcgccgcgcaagcccccaaagccgcggcgagccgcacagggcaacacacgcaccgcacggcc

SEQ ID NO: 207706 - RNA, 65 nt, Homo sapiens
ccccgcgagaaggaggagccccccgcccggcagcgccccgcgagaagaaagaacggccaagccaa

SEQ ID NO: 207707 - RNA, 75 nt, Homo sapiens
gggcgcgccaccggcccgcaacaccaaccgcgggcgggcgggcacaaggagacagaccgccccagcagcaagacc

SEQ ID NO: 207708 - RNA, 75 nt, Homo sapiens
ccgcgcaccgacccgacgcgccggcccacgcgcggccaagaaccggaagcagcccagcagggaagaagaggacag

SEQ ID NO: 207709 - RNA, 68 nt, Homo sapiens
ccacggacgccacagagggaagaccccaaggaagaagaagaacagcgccagcgccgggaccgccaacg

SEQ ID NO: 207710 - RNA, 89 nt, Homo sapiens
ccgccacaaaaagagggccgaggcgcagaaaaggagcgagccccgcgagcggacggagaaccacccccaccgcgccgccccccacaccc

SEQ ID NO: 207711 - RNA, 69 nt, Homo sapiens
gcaaaggaagcgcgaacagcagcgcaggacccagaagaccccagacggggagcgcagcagagggagcgc

SEQ ID NO: 207712 - RNA, 84 nt, Homo sapiens
ggaagcacacccgcggggggcccgaggccgaggggcccaggcagagcccggagaaaagccacaggaaagagcacacgggagcgc

SEQ ID NO: 207713 - RNA, 77 nt, Homo sapiens
ccagcccagagggaggcccacagggagaacagggcagaacgaggggaggaaagcagggacagccaaagaccggagcg

SEQ ID NO: 207714 - RNA, 78 nt, Homo sapiens
agccaggaacgaccgcgagcgcacgcgcgcccgaagggcaacgccgcccaacgcaccaaccagcggacacacggaaaa

SEQ ID NO: 207715 - RNA, 81 nt, Homo sapiens
accaaggcagaggcaccagagaccaaaaagaagccaacccagcggaacaggaaaacacaacacgacccgcaagaaagacca

SEQ ID NO: 207716 - RNA, 73 nt, Homo sapiens
ggaagccgcagcggaaagcaggagcacagagaccacagaaggaaggaagaagacaaagagcggaaggcaggga

SEQ ID NO: 207717 - RNA, 77 nt, Homo sapiens
caggccgccgagcccccgaccccgaccgcggggccggacaagaaccgaccgagagggagaggggggcggcagcggaa

SEQ ID NO: 207718 - RNA, 58 nt, Homo sapiens
ccacacccggcgagggacgaaagcgcccgaaggccaaccgccgaaaaaaggacaaagc

SEQ ID NO: 207719 - RNA, 74 nt, Homo sapiens
gcaaacaggccagccacaccaggaagagggaccagacacgccgacccagagcaaccccaagccgaagaacgccg

SEQ ID NO: 207720 - RNA, 86 nt, Homo sapiens
cacggcagcacccaggaacacgaagccccgggcaccccgggggagcaggaaagggcaggccacgcagaacaaaagacgcacagaga

SEQ ID NO: 207721 - RNA, 75 nt, Homo sapiens
ggggacgagcaaaggaagcgcgaacagcagcgcaggccgacggcgcaaggccacggcaagcaccgggagcagcag

SEQ ID NO: 207722 - RNA, 76 nt, Homo sapiens
ccagcccgccggcggcggcggcagaagggacaggaaaaaagcagcagccggcaaacccaccgagacgccagaaaga

SEQ ID NO: 207723 - RNA, 70 nt, Homo sapiens
cgcagacagaaagaaggggccggcaacaccagacaccaaggacagcccgcaagaggaggcacccgggaag

SEQ ID NO: 207724 - RNA, 57 nt, Homo sapiens
cacagaagcccgcccggaggaaaaggggccgcaaggccaggcgcgcagaggcaccca

SEQ ID NO: 207725 - RNA, 81 nt, Homo sapiens
caccccggaacagcgccgaggcccaaggcagaggcgaggcggaagggcaccccacccgaaggaacacgacagaaaaaggcg

SEQ ID NO: 207726 - RNA, 53 nt, Homo sapiens
acacaggcaagcgcgaggaacacaagcggggggggaggaggagccgacaccgg

SEQ ID NO: 207727 - RNA, 53 nt, Homo sapiens
aaggaccagagccagacacgaaggcggaccggaagcgagcaggagcagagcgg

SEQ ID NO: 207728 - RNA, 80 nt, Homo sapiens
aaaaagacccgaacggaccagcagcaccaggacaaaagaagggcagcacaaaggaaagccccaaaccccggaacgggaag

SEQ ID NO: 207729 - RNA, 74 nt, Homo sapiens
cacgggaacccaagaaacaaacccagacgggcagaagagagagaaagaaaaggcgacggcggagacagaagaga

SEQ ID NO: 207730 - RNA, 100 nt, Homo sapiens
ccgcccccagggacgcgagaagggcccgggcgccagaccccaccgcaaagcgacaaagaggggggccaagcagaccaagaggagcggacagaagggaacc

SEQ ID NO: 207731 - RNA, 76 nt, Homo sapiens
ggcacaacggcaaagggccaaaaaggggggacgcgggcgagaagccgggcagcggaaggaacaccgaaggccagga

SEQ ID NO: 207732 - RNA, 75 nt, Homo sapiens
gcaccagaacaggagcccacccagcagaacacagaagagaacccgaacacagcaggagcaagcgggggcaggagc

SEQ ID NO: 207733 - RNA, 52 nt, Homo sapiens
gcagggcaaaccagaaagacgacaacgaagagaggaaagaagcggaaaggag

SEQ ID NO: 207734 - RNA, 73 nt, Homo sapiens
cagagagagagcggaacgggagaaagcacgggaggagagggaaggagcgaggcagcgggaggcaggcggagac

SEQ ID NO: 207735 - RNA, 71 nt, Homo sapiens
ccgccccggcccgcgggccggcccggcacagggggaaggggaagcaggccaacccagaacacaccccagcg

SEQ ID NO: 207736 - RNA, 96 nt, Homo sapiens
gcgaggggacggagccggacaggagccgccgccgccaacaggaccaagagaagcaaagggagaaacaacgcaaaaacacaggcccagaaacagcag

SEQ ID NO: 207737 - RNA, 85 nt, Homo sapiens
gaggggccacgcgggcccgaggcgcaccaagggcgaaggagccggcccaagagcgaagaagcaggggagaggccgagcgaagaac

SEQ ID NO: 207738 - RNA, 81 nt, Homo sapiens
gaccgaacccacggagcccagcaacaccaaccccccacgaaccggcagggacaggacaaccgagaagacagcgcacagaac

SEQ ID NO: 207739 - RNA, 71 nt, Homo sapiens
cggagaggccggccgacccgagaacagggacgggggacaggaaagaacacaagacacagcacggaaacaaa

SEQ ID NO: 207740 - RNA, 80 nt, Homo sapiens
gaaggggaaggcggagcccccaagacacggacaggaaaagccagagagcggcagagaagaagggaggcccaaagagcaaa

SEQ ID NO: 207741 - RNA, 73 nt, Homo sapiens
ggcggagcgcaggggagaaccggaaggaacgcagcaccagcccacgagacccaagcaaaaccacagcaggaaa

SEQ ID NO: 207742 - RNA, 91 nt, Homo sapiens
cggcggcggcgcgcagcggcaggcggagagacccgccgccagggggacgaccaccagccaggccggggacaaacaggcaaccgacggggag

SEQ ID NO: 207743 - RNA, 72 nt, Homo sapiens
cagaaaaagcacacaaggaagggggaccagcggccacccaggacgaggcggggggaacccgcacaaccaaca

SEQ ID NO: 207744 - RNA, 87 nt, Homo sapiens
acggagcaaggaggaaaacacacggaccagaggagcgagagcagcaagaaccacacccagcagcaagcagcggaagggaaacccaga

SEQ ID NO: 207745 - RNA, 81 nt, Homo sapiens
ccggggccaagggcaacaagggaagcagagagcaaccaagcaccaccaagcccacagcagcaggaacaagagaggcagggg

SEQ ID NO: 207746 - RNA, 73 nt, Homo sapiens
caaacggaccagaccgaccaccaaaagaggggggaaggcaggcaggcaaacccacacgacaggagagcagaga

SEQ ID NO: 207747 - RNA, 65 nt, Homo sapiens
gaaaagagcccacaaggaagaacaaagacgagccagacccccagcaaccggccaggaccagccgg

SEQ ID NO: 207748 - RNA, 86 nt, Homo sapiens
cccgaaccccggcccgaacccagggaggaagcccgaaggagcagacacgggccaggcccagcccgacaccccagacccacaaccac

SEQ ID NO: 207749 - RNA, 68 nt, Homo sapiens
cgggcgggccgggcgacgccggggggggcggcccgcagcgaaggaccgggcgccagggaaggaccgca

SEQ ID NO: 207750 - RNA, 76 nt, Homo sapiens
ggcgaacaaaagaagcggaagccgcagaccggaaccaggaaaagcggccaggaccaccaggcggccacgggccccc

SEQ ID NO: 207751 - RNA, 56 nt, Homo sapiens
caagcgaaggcgcgcaccggaagcaccagcgaggaagccgggggccaaaaccagac

SEQ ID NO: 207752 - RNA, 76 nt, Homo sapiens
agccagggagagaacgggacaggagaggaaacaggaagcacaagccagcagacgacaacaggcgcaggagacacag

SEQ ID NO: 207753 - RNA, 78 nt, Homo sapiens
acacaccaccaagagggaaaaagaaccccacagaccaagcccggccggccacggcggccgccccaccacggcccaccc

SEQ ID NO: 207754 - RNA, 81 nt, Homo sapiens
ggggggagcggcggccacggcaccggcggggggcacgaggaaagacagagacaacgcgaacccgccaccccccccccagcc

SEQ ID NO: 207755 - RNA, 82 nt, Homo sapiens
cagcggcgcagcgaagcaggaacaggcaaaacccaaggcggggcgcccggcccagagggaccgacgacaacccaggcaccgg

SEQ ID NO: 207756 - RNA, 53 nt, Homo sapiens
acagggaaaagcaaaggggcaagcaaagcacagggcacccgcacagcaccaag

SEQ ID NO: 207757 - RNA, 86 nt, Homo sapiens
gaaaaggagcaacgaggggagccaagaccacgaggggcggacgcacagaacacacaagaccacgcaacaacgggaagggaggccaa

SEQ ID NO: 207758 - RNA, 82 nt, Homo sapiens
gccgggaagaacagcaagagaaagggcagcaagacacgaagccgagaaagagcagcgacaacaaggaggccccggcaagagc

SEQ ID NO: 207759 - RNA, 73 nt, Homo sapiens
caaccaagcaccggagaaaacccacggccggcccgcggccgccaagggagggcccggcccggccacgcccaag

SEQ ID NO: 207760 - RNA, 78 nt, Homo sapiens
ggacagggcgaaagccgaccacccggcgaagcggcggagaaaccaccacaaacacgaggccagcaacgaccaacaaga

SEQ ID NO: 207761 - RNA, 78 nt, Homo sapiens
agcgccccccgggaggcgccgccgcaccccgcaacccgcagagaggacccggcccgacggcagaagaaaacccaagca

SEQ ID NO: 207762 - RNA, 72 nt, Homo sapiens
aaaacacagagggcacacggcacagaccaggaacaagagacaacaagacggaacacgaagaggaagagagaa

SEQ ID NO: 207763 - RNA, 72 nt, Homo sapiens
aagcaccccaccaaggggacgacagcgcgagggagcgcgggcggaggcaaaccccacagagccacacacaga

SEQ ID NO: 207764 - RNA, 85 nt, Homo sapiens
ccaagagaacaagggaaccagccaaaagcagagagacgaagagagaagcagggcagaaagagcggaaacgagaagagcaaacaca

SEQ ID NO: 207765 - RNA, 81 nt, Homo sapiens
gcggacggcccggagagacgaaccgaagcgggcgggcccccccacccagagaaggcacaaagagcacacggaacgccaggg

SEQ ID NO: 207766 - RNA, 33 nt, Homo sapiens
gaccagggccacagaggaagaccaacgacaggc

SEQ ID NO: 207767 - RNA, 81 nt, Homo sapiens
cagcgcaggaggacgaccggggggcaggaggcacccggggcagggcccaggagacaccagcgggggcgccgcgcagggaaa

SEQ ID NO: 207768 - RNA, 69 nt, Homo sapiens
agaggggcgaccaacccgcggaggcaaccacgggagggagaagggggccggccaagggcgacggaaccc

SEQ ID NO: 207769 - RNA, 85 nt, Homo sapiens
gaccgccccgggccacgcggaagcagccgcccggagaaacagacggcccaccgaggacaccgcgccagcggggcgaggaggacac

SEQ ID NO: 207770 - RNA, 50 nt, Homo sapiens
aaccagccgccggaacaggccaggcgcgggccaccccacggggcaacaag

SEQ ID NO: 207771 - RNA, 72 nt, Homo sapiens
gggcgccggccacagcgaggcggcgagcggccggaagaagaagaacacaggccaccggagcagcaacaagaa

SEQ ID NO: 207772 - RNA, 76 nt, Homo sapiens
gccagaggaccaacagggacggagcggagaaaaggaaccggccccgggggggaaaaccggcaaaacgcggcgaagg

SEQ ID NO: 207773 - RNA, 85 nt, Homo sapiens
cgcagcggcggcagcggagagcgagagaggggagcaggcacagccagggcgaaagaagaccccgccaccggcccccacgcaccac

SEQ ID NO: 207774 - RNA, 78 nt, Homo sapiens
gagagagccagaaacggaacaggagacgaacacacaggaagaacgaagcacagcggaacaagcgaaccacaaagaaac

SEQ ID NO: 207775 - RNA, 74 nt, Homo sapiens
agaacggaggggaacacaaaaagcaacggggcggcacacaaggagcgaagggcagggagaacgccaggcacagc

SEQ ID NO: 207776 - RNA, 69 nt, Homo sapiens
agacagcagacgcaccaaagggacagaaccaaagaaaccggcaaccagagggacaggaaaaacaggacc

SEQ ID NO: 207777 - RNA, 55 nt, Homo sapiens
ccaacccagagcccccggcagggacacaagggcgcaaccaaagcaccagacccca

SEQ ID NO: 207778 - RNA, 81 nt, Homo sapiens
cggcgcccgcggccagccgcaagacccgccacaagcaacgcgggaagagaagcagagagcgcagaagacaggacaaaaagc

SEQ ID NO: 207779 - RNA, 66 nt, Homo sapiens
caaggaacgaggacacgaaaccacgccgcccaccccaggagcacccacgggagaccggggggcaag

SEQ ID NO: 207780 - RNA, 76 nt, Homo sapiens
aacagaaaaaacccgcggaaaggagcaaaccccacaagacggaaagggcgggaccaaagcccccccaccaagaagc

SEQ ID NO: 207781 - RNA, 95 nt, Homo sapiens
gccgccaggaagcgacgacgagaggggaggaggcggggaagggaccgagcccagaacccggacgggcagacaccaggagaagacgcccagaccgc

SEQ ID NO: 207782 - RNA, 76 nt, Homo sapiens
aagacaagccagcagccgccagacaagagaaacgaaaccgaagcgacagagaggagaacggaggaggaagaacacc

SEQ ID NO: 207783 - RNA, 81 nt, Homo sapiens
cggccagacacagggaaagcggaggccagacaacacagggacacaacaaacacaaccgccacagaagcacaggcaacccca

SEQ ID NO: 207784 - RNA, 82 nt, Homo sapiens
ccagaccaagagaggcggggaccgcagcagcgagaaaggagccggggaccccccaaagacaaggaccggggaaacaggggca

SEQ ID NO: 207785 - RNA, 82 nt, Homo sapiens
gaacccagacaacaggacgccgccaaggccacgaaagcgccccagggaagcagacggccagagcgcagcccgggaccgagcg

SEQ ID NO: 207786 - RNA, 78 nt, Homo sapiens
gccaggcaaacagacgaaagaggagggcaaggccagaggaaaaggccagagcgcccccgagacccacgagccaccagc

SEQ ID NO: 207787 - RNA, 63 nt, Homo sapiens
ccacaggggggggcaaacccgagagaacggggcccgacccgaaaagcgcagccaaccagacgc

SEQ ID NO: 207788 - RNA, 78 nt, Homo sapiens
acggggaaagaagaacccaccaaaagacagcaggcggcaccacgcggggccaaggccggggcgagcgggcagaagccc

SEQ ID NO: 207789 - RNA, 73 nt, Homo sapiens
gcaggacaacagacggcagcacacagccgacagacacgcccccgggcaaccgagaagaccaaacagacaaaca

SEQ ID NO: 207790 - RNA, 53 nt, Homo sapiens
gcgacggcaagcgacaccgaacaaagagcgggaagacgcagacaaaaagcgac

SEQ ID NO: 207791 - RNA, 58 nt, Homo sapiens
acgggagccgccaccgaggacggcagacgacccagacaccaaggcaacacggacaggg

SEQ ID NO: 207792 - RNA, 83 nt, Homo sapiens
cccccggcacaggcagcggaggagcccgaccgacccggcaaaagcagaccggaaaacccaccggcaagaccacacccgagggg

SEQ ID NO: 207793 - RNA, 69 nt, Homo sapiens
caagaagcaaggcacccaacagcaaaaacccaccacagcggagaagagaacccgaccgaagaaggaaca

SEQ ID NO: 207794 - RNA, 73 nt, Homo sapiens
aagaaacgccaaagagagccaaagagcaagcagaacaggaccccgacaacagagcagccccgccagcaagaag

SEQ ID NO: 207795 - RNA, 36 nt, Homo sapiens
ggagaaaggcaaagagacgagcaagagggagaagac

SEQ ID NO: 207796 - RNA, 88 nt, Homo sapiens
ggcgaagcgggcgagcggggggacgccggcggagacgcgggcgagagacgagagggacaggagcgagcaagcccagagcggccgccag

SEQ ID NO: 207797 - RNA, 67 nt, Homo sapiens
cccggagaggaccgcccaacaagagagcagggaacagccaccgaaaccaagagaacggagaaacgag

SEQ ID NO: 207798 - RNA, 60 nt, Homo sapiens
acgccaccacgccgcggaggacaccgacacaaacaaagcaaacagaaggcacacaacggg

SEQ ID NO: 207799 - RNA, 44 nt, Homo sapiens
ggacagacgcacagacaccgcagaaggacagaaaacgggcccca

SEQ ID NO: 207800 - RNA, 78 nt, Homo sapiens
cagagaaccagaaaagccacagaaacagagaaacaagcccggagaagcacaaaaagagaaagagagacgagcgcacag

SEQ ID NO: 207801 - RNA, 62 nt, Homo sapiens
ggggcggaggcccggcgggagcccaggagacgaggcccagcagaccaggccccgccccagcc

SEQ ID NO: 207802 - RNA, 83 nt, Homo sapiens
gcagccaccacgaccgcccggggcggcgcaccagagggaacacaggcggccccgcaccgcccacccagcggggccccaaccca

SEQ ID NO: 207803 - RNA, 87 nt, Homo sapiens
agaaaggaaagagaggcgacagaggagacacaccgaagaaacaacagagagccaacagaagggaagaaggcacgcacccgaggacaa

SEQ ID NO: 207804 - RNA, 69 nt, Homo sapiens
agggacacaacgcgccacgaaggccaggccagggaggggacggaaagagagccgcagcgcagaacaagg

SEQ ID NO: 207805 - RNA, 77 nt, Homo sapiens
ccgcggccgcgccacccacgggggcacaggcaggggccccccgcccgacggccgcaccaaggaggaccacgacagcc

SEQ ID NO: 207806 - RNA, 81 nt, Homo sapiens
aggagggaacccccgcgcaaaggaggcaaaagaggaagccaacacagcacagaagagcaacaagcggaagaccacaacgac

SEQ ID NO: 207807 - RNA, 77 nt, Homo sapiens
caaacggcaccaagagagccgaaaaccagccccgcccacacacaccaacagaacccgggggacccccagcacaaagc

SEQ ID NO: 207808 - RNA, 73 nt, Homo sapiens
ccgcccgccacacgaggccgccagcagcgacaaacgcccacaaagcgcgaaggagccggaaggggcaccagca

SEQ ID NO: 207809 - RNA, 66 nt, Homo sapiens
aaccgggaggcgacgcacacgagcggaggcgaagcgaagagagagaaacgaaaaagaggaaggagc

SEQ ID NO: 207810 - RNA, 70 nt, Homo sapiens
aggggagacccgccgcagagggacagggcagccggagcgcgcgccagggccgaaagaagaaggggaaaga

SEQ ID NO: 207811 - RNA, 55 nt, Homo sapiens
agcagcagacgcagcgccagccgcaccccagcgccaaggagaaggaccaagaacc

SEQ ID NO: 207812 - RNA, 66 nt, Homo sapiens
cgagccgccaaacagcaaaaacgcaggagacagaacgggcgaagccgccaaagacaaaaccagcaa

SEQ ID NO: 207813 - RNA, 72 nt, Homo sapiens
ccaaaagcacagaaaccaaaaaccgcaccaacgggaacgggacacaccacaggaagggaaggcgccaacaac

SEQ ID NO: 207814 - RNA, 78 nt, Homo sapiens
cgccaagggggaccgcgcggcggccgcgagccgcggagcgggccaggcgaaaggaaacgcaaaacaggggaagaaaca

SEQ ID NO: 207815 - RNA, 71 nt, Homo sapiens
aaccgaagcgccagccagaaaagaggcgcgcaggcaggcacaaggcccaggcacaggccccaggaggccca

SEQ ID NO: 207816 - RNA, 33 nt, Homo sapiens
aggcgaggagcaacccacccgagaaaagcacag

SEQ ID NO: 207817 - RNA, 49 nt, Homo sapiens
gcaaccagagcggaagcccaaacgggaagacagaaggaagggagcgcgc

SEQ ID NO: 207818 - RNA, 32 nt, Homo sapiens
cacggccagcaaggaagagacagggcacaggc

SEQ ID NO: 207819 - RNA, 65 nt, Homo sapiens
cgagagccgcccgggccagcggccgcgcacccccggccggaggcaccagccgcggggaccacgag

SEQ ID NO: 207820 - RNA, 49 nt, Homo sapiens
cgcgagcacgggcggagcgaacggccgcaagcgcaagagaaaaagaacg

SEQ ID NO: 207821 - RNA, 70 nt, Homo sapiens
aacgaacaggcaaagcccaaaaggcaaggcacaaggcgaacaagaggcgccagcgggcgcgccggaagaa

SEQ ID NO: 207822 - RNA, 69 nt, Homo sapiens
aaacggagggaaccagcccaagcagagaagagagacgggccccccccgccccacacgccaaaccaagga

SEQ ID NO: 207823 - RNA, 84 nt, Homo sapiens
ccagcagaccgaggcacagacgccagagagccggacccaaggcccggaccagggagcgcaggcagcggacagaacagagaaccg

SEQ ID NO: 207824 - RNA, 71 nt, Homo sapiens
ccccggagcgcaagcggccaggagccaggccagaagaggccgcccaggccccgcgggcaagaagaaggcgg

SEQ ID NO: 207825 - RNA, 75 nt, Homo sapiens
cgcggagccgcgcccccggccccagcagggccaggccgacgagaggcacacccagcagggcaaaagggaacaggg

SEQ ID NO: 207826 - RNA, 70 nt, Homo sapiens
gagagaaagaaagaaaagagcagggccagacagccaccgaaggggcccagggaccgggaccgcgcaccgc

SEQ ID NO: 207827 - RNA, 77 nt, Homo sapiens
gaaagcaaacaagcaggaaaaaaccgccaggaagaaggcaccgcccagaaggaaacagcgaaagcacaggaaagccg

SEQ ID NO: 207828 - RNA, 40 nt, Homo sapiens
gcccggcagacgcagaaccaagcagaaggaacagcggcgc

SEQ ID NO: 207829 - RNA, 75 nt, Homo sapiens
ggagagaggagaacgaacaccggaccgccagccaagacacggcaagggaggaagaagggcgccgaggccgagccc

SEQ ID NO: 207830 - RNA, 81 nt, Homo sapiens
ggaggccgaggcggcccaagagaggaggacggaagggggaaggggacacagaagccgcagggggagaggcaccagcaacag

SEQ ID NO: 207831 - RNA, 69 nt, Homo sapiens
cccccacgaagaccgccggcgaacaggggacccgcagagaaggccaagcaacaggcgcacgcggaggag

SEQ ID NO: 207832 - RNA, 71 nt, Homo sapiens
cagggccacgagcaccgcgccggcccagcaccccgagaaccgcaggagccagagggacgggcgaaccgaga

SEQ ID NO: 207833 - RNA, 79 nt, Homo sapiens
gccagccgcaccagccgcccaagccgcacagccgcggcggcagcagcaggagaggggccaaaccaggcccgccaccccg

SEQ ID NO: 207834 - RNA, 79 nt, Homo sapiens
cagcgcccagcccccaggcgaggagaagggaagaccaaagcaagggaggagaagccagccccgcggcgggcgggaagga

SEQ ID NO: 207835 - RNA, 58 nt, Homo sapiens
ggagaacacaggaacaggcgcggaggcccccagaggagaaggcaacaagcggaacccc

SEQ ID NO: 207836 - RNA, 75 nt, Homo sapiens
cggccgaaggcgaacgccgcggccaaggagccgccaaagccagacggccacagagcgaaaaaaaccaacacgcaa

SEQ ID NO: 207837 - RNA, 77 nt, Homo sapiens
ccagcccggccccgcgccgcaccagccgccagagagcaccagcaccgccagcgcaaggagggggaccgggaacccac

SEQ ID NO: 207838 - RNA, 73 nt, Homo sapiens
cgaaaaaaacgcgccaaaccgggcggagggcggcggccccaccccgggcgggacaggaggaagccggcagacg

SEQ ID NO: 207839 - RNA, 88 nt, Homo sapiens
ggagggcgcgagaagacaaagggcacagacccacaagaggagaacgggcagagcacagccgccaagcggggcgccccccgacgcccga

SEQ ID NO: 207840 - RNA, 90 nt, Homo sapiens
ccggccgagaggaagacgagccgggaggaacggcccggaaacaggaggaccccaccgggggacggcacggcaggcggacgcccggggccc

SEQ ID NO: 207841 - RNA, 107 nt, Homo sapiens
gccggaccgagggaggacaagagcaagaccccggaacccgaagcgggaaagggaaccgacaccaaagcacgccaacagacggagggcgcgacacggcgaagcacggc

SEQ ID NO: 207842 - RNA, 81 nt, Homo sapiens
cccgaggacacgggagcagaaggcagaaagcggggcagaaagcccacacggaggcccaggaccaccaagagagacaagaag

SEQ ID NO: 207843 - RNA, 71 nt, Homo sapiens
cgacacacgacggacaggggcaaggccgaggggaacagcacacagagaggaggcggaagcacgccagcagg

SEQ ID NO: 207844 - RNA, 88 nt, Homo sapiens
ggggacccacagacacagccggggcgggagccgcccggggcagggccgggagagcgggccggcgcggaagaggccggcggcgggacgg

SEQ ID NO: 207845 - RNA, 63 nt, Homo sapiens
aggcgagagcggcagcagcaccagcccaagagaaggacagagcgggagccaccagcgccaaag

SEQ ID NO: 207846 - RNA, 79 nt, Homo sapiens
aaaaaaacccgacagcagagacagagaggagccaacccccaggggccggacaagggagggcaagaacccaggaggaggg

SEQ ID NO: 207847 - RNA, 73 nt, Homo sapiens
cagacaaccgggaaaggaggagcggccagaaagcgacagcgaccaacagcccagagagaagccccgggaagaa

SEQ ID NO: 207848 - RNA, 71 nt, Homo sapiens
caacgacggggacacagcagaagcacaccaagaaaaggcgcaaccgaaagaccacccaagaagaccaaggc

SEQ ID NO: 207849 - RNA, 83 nt, Homo sapiens
gggcggagacagaagaggcgccaggacgaaggcccacgggcaagagaaccagagagcacagagaaagcgggaaacggccaaac

SEQ ID NO: 207850 - RNA, 74 nt, Homo sapiens
aagcaggagggcgcgaacgcccgccgcgggaagaaagagcggcccgcgcagaacagcggggagaaaacgaccga

SEQ ID NO: 207851 - RNA, 76 nt, Homo sapiens
gaaagcaggaaaaacaacagcacacagcaaaagagacagacggacaacagcccaacaacacccaacgagaagaggc

SEQ ID NO: 207852 - RNA, 77 nt, Homo sapiens
cacagccaagcccaagcaaaagccaacagagcagcagcacgggcagcagaagcccccgagggagagcagcccgggcc

SEQ ID NO: 207853 - RNA, 78 nt, Homo sapiens
cacccccccggaccccacccacacccccccccaccgcagcagcacccgacagggggagaagggaagcgccaagaagca

SEQ ID NO: 207854 - RNA, 74 nt, Homo sapiens
caacaggcccacgggaaggcaccgcagaggcagcaggaaggagggccacacaccaaagagacggcagccccaca

SEQ ID NO: 207855 - RNA, 73 nt, Homo sapiens
accagccaaaggggccaagaaccagagcggaagacgaaagcgcgcgcgcagggagcagcacccccaccgcagg

SEQ ID NO: 207856 - RNA, 87 nt, Homo sapiens
cgagagggcccgacggaggggaggaagcggcacagcaaacacacaagagccagcaaagggagcagcacagaggcagaacagacagca

SEQ ID NO: 207857 - RNA, 70 nt, Homo sapiens
aaaaacccgaacaccagggagaagcaaagacggcaagggcagccgagcacccacgcaacgcccgcaccaa

SEQ ID NO: 207858 - RNA, 72 nt, Homo sapiens
gccacccgagacgcggcgcgcacgcccggccgcgggacaagagaaaaaaagggcgggcgaacaaaaagagca

SEQ ID NO: 207859 - RNA, 77 nt, Homo sapiens
gccgcgaacaccaccaagggaggcacagcgaagcgacccccgcggagggacaaggccaacgcagccgagccagcagc

SEQ ID NO: 207860 - RNA, 78 nt, Homo sapiens
cacgggccagggcagggccacccaggggggacacagcgagccacgcgccaggaagcccggccaaggagccaaccgcgc

SEQ ID NO: 207861 - RNA, 33 nt, Homo sapiens
caaccgcaggcacccaagggcggacaacacaac

SEQ ID NO: 207862 - RNA, 81 nt, Homo sapiens
aaaaaggaagaggagaaggaaagcccgaacccgcagagcccgacaaggagcggcagaccgagacagagaggccgagaagga

SEQ ID NO: 207863 - RNA, 80 nt, Homo sapiens
ggagggcccggaagaggaacagaaagaggcagaaggggccgggccgaggcagagaacaccaaagaaacgacgcagggcaa

SEQ ID NO: 207864 - RNA, 76 nt, Homo sapiens
aggccccaggaaggcaaaaagcaggaagcgcggcgcagccagacgcaaaaaggagccaccaaggaaaaagagaaga

SEQ ID NO: 207865 - RNA, 73 nt, Homo sapiens
ggaggagaggagaacacagcaacacccacggcaccgccggccaggaggagagcgcaccaccaaaaaggcaaac

SEQ ID NO: 207866 - RNA, 96 nt, Homo sapiens
aaagagccccgaaaaccacccagccgccggggccggcacgaggaggggccgcgccccacaaagggaaggccgaagacgcaaccaaccaaaacagcc

SEQ ID NO: 207867 - RNA, 76 nt, Homo sapiens
gcgacgcgcagccacgcaggagaccagagaaggcccgggcgcacgaccgcggcccggcagcacccgaggaggagcg

SEQ ID NO: 207868 - RNA, 82 nt, Homo sapiens
aagaaacgaagcccgaagagaagcaagagagccaaacgaaggcagccaggaaaggcaggagagcgaaagagagcggaaaaac

SEQ ID NO: 207869 - RNA, 90 nt, Homo sapiens
acgacgcggcgcgcgccaagacgccgccaaccgcagggacgcgccaaggccacggccgagaggcagaggaggggacacggggacgcccgg

SEQ ID NO: 207870 - RNA, 117 nt, Homo sapiens
ggaacagacacggggaagcgcaaaaacaagacggggcgccccacagaggggcgacggcaggacaaaaccgaggagaaaaggaggcagcaccaaggaaaccagcacccacagaagcca

SEQ ID NO: 207871 - RNA, 66 nt, Homo sapiens
aaagcagcaggaagcgaggaaaaaaccaaagccaggacaaaggcggccccaggggggaccaacaag

SEQ ID NO: 207872 - RNA, 51 nt, Homo sapiens
agacaagggaaaaacaccccccagcaaaccaaaacaggaagcgagacagcg

SEQ ID NO: 207873 - RNA, 75 nt, Homo sapiens
gcccccggcccgcgcgcccgcacccggccgccggggccgcccagggcggagaacggaaaagcaccaggaagcaga

SEQ ID NO: 207874 - RNA, 67 nt, Homo sapiens
aaaagggccaaagaagggagagacaccgccgcccagccacaggaccgacaccgaaaaaggcaaccac

SEQ ID NO: 207875 - RNA, 57 nt, Homo sapiens
cccacggaccagaaccaccaagcaagacacaggacagcgagccagaggcaggggaca

SEQ ID NO: 207876 - RNA, 76 nt, Homo sapiens
caaaacaagaaagcaacccgaagaagggcaacagcaagaaccagcggcacggagagaagaggaaggaagaggaggc

SEQ ID NO: 207877 - RNA, 77 nt, Homo sapiens
gcgcccgcgacagaggagggaggaaaacaaccgagggcagacagaagaggcggccacccacgagccgacggcaaacg

SEQ ID NO: 207878 - RNA, 78 nt, Homo sapiens
cccaacccggaccggggacgcacggaccaaaaacccgcaacagcccccgcccaaaaaaagcggggaaggggggcaaaa

SEQ ID NO: 207879 - RNA, 77 nt, Homo sapiens
caaaacagggccaaaaaagccaccaagaaggaagaaccgccaaaaagagggaaaaacgggcgccaggaacccggaca

SEQ ID NO: 207880 - RNA, 72 nt, Homo sapiens
gccaggaaacgacacacaaagaaagaggagccggggacaccggcccaggggcacgggcacagcccagaagac

SEQ ID NO: 207881 - RNA, 54 nt, Homo sapiens
caacagaggcgaagaaggccaaggaaaaggaacagagagagcagaaccgaaacg

SEQ ID NO: 207882 - RNA, 83 nt, Homo sapiens
gccaccagcccggaccaccaggccaagaaccgcagggacagaaacaggggcagaaacccacgagcgaacaccggagccccgca

SEQ ID NO: 207883 - RNA, 80 nt, Homo sapiens
cccaccccacaggcccacgacccagacccagagaaaggccacgcgagccaggcagggagccccagagagacaagccccaa

SEQ ID NO: 207884 - RNA, 68 nt, Homo sapiens
aaaagacggggacggacgacagaacaacggcccagccccacaggacaaagagaaagcggcgcgacggg

SEQ ID NO: 207885 - RNA, 83 nt, Homo sapiens
aagacgaacaaacagcaagaaagaccacaagaccaagaaccaggagcggcagaccgccgccaggaggaggcacgcagcccgag

SEQ ID NO: 207886 - RNA, 72 nt, Homo sapiens
aaagggccaagacggagcagaaccgagaagcgggaagagccgacccaggacccagcccagcgagcggcgaga

SEQ ID NO: 207887 - RNA, 67 nt, Homo sapiens
aagaaggacagagaagccacgcgcaagggagaggagaaaggcagggcaaagccaagccggaacacca

SEQ ID NO: 207888 - RNA, 61 nt, Homo sapiens
agaagagacaaggaaggagaagcgcaccaaacagagccagaagggcccagaaagcgggcac

SEQ ID NO: 207889 - RNA, 74 nt, Homo sapiens
aaagggcgggggcaaagcggagaccggccagcagaagaggaccagacgcccgggggggcggcggcccacagacc

SEQ ID NO: 207890 - RNA, 101 nt, Homo sapiens
caggaccgaaagagccagcaaaagacgagacaacagggcccgagaaacaacggcgaccgaccgaccgcacggaagaagaaccccacacaaaccagcccagc

SEQ ID NO: 207891 - RNA, 124 nt, Homo sapiens
cccgcgccccaacggggcggccgcgacccccggcaacccggagaaggcacagagcggccgcgccagcgaaggcgggaggcggcagaagcagccagaggagggcacaggcggcgcggagcgcgcc

SEQ ID NO: 207892 - RNA, 81 nt, Homo sapiens
cgagacccgccacacgaggcggaaaacaccccaaaagccaaaagggaaaggaaaagaccaacaacagcgcaggacacgaga

SEQ ID NO: 207893 - RNA, 79 nt, Homo sapiens
gagggggccccaacccgcgcggcaagaagacggcgcggcaaccggggagcccgccaggaccgggcaggagcgacccgca

SEQ ID NO: 207894 - RNA, 82 nt, Homo sapiens
gcgggcccgaggccccggccaggcacgcaggaaccacaccacacggaggccagcgcggcccagagcaccacgcgccaggcca

SEQ ID NO: 207895 - RNA, 82 nt, Homo sapiens
ggcgggcgcgcccggccgcgacgcccgggacccagagcgggcagcgccagccacgcagagaccggaagaagacaccacgaca

SEQ ID NO: 207896 - RNA, 75 nt, Homo sapiens
caaaaccgaaccagaagacgagagccaacgcaaccaggcgcaggacacacagagagagagagggccaccaaggcc

SEQ ID NO: 207897 - RNA, 64 nt, Homo sapiens
ggcggccacccccgggaagagaaaaagagcggggccaggacccggcaaaagagaggggcgccag

SEQ ID NO: 207898 - RNA, 78 nt, Homo sapiens
ccagaccggcgggaaccggcccgcccacaccacaggccccagggaaaggaccgaggcaggaaagaggccagacgcagg

SEQ ID NO: 207899 - RNA, 77 nt, Homo sapiens
aacgagacgcaaggggacacgccaaaccgagcacagaaagagaccgcccgcccaacggaggggggagaaggcaccgc

SEQ ID NO: 207900 - RNA, 59 nt, Homo sapiens
cgggcgggccccgagagcagcagcgggcggggcgcggggggcgcgagcggacaccccga

SEQ ID NO: 207901 - RNA, 64 nt, Homo sapiens
caacaacacacagaaggcagggagggaggggaaagacccacaccaagaggcaccacccgcaacg

SEQ ID NO: 207902 - RNA, 80 nt, Homo sapiens
gacgaaggggacacacgggccacacgccccgcccacccggaccgccccaaagacccagggaggaccgagcagccgaacca

SEQ ID NO: 207903 - RNA, 80 nt, Homo sapiens
ggggaagcgcaacccgacccggaggcgcgaggggcccgggggcaggccggcaaagcaccaggcacagcaagcgccgaaag

SEQ ID NO: 207904 - RNA, 73 nt, Homo sapiens
gaagaaccaaaggcagaaaagaaagagcggagcaacaccccgcaccgggaaccgcggaacccgcaggccacgc

SEQ ID NO: 207905 - RNA, 78 nt, Homo sapiens
accacgcaacagcaccggggacagcgagcggcacagaagaccacgcccagaccggaacagaacagcagacgccccccc

SEQ ID NO: 207906 - RNA, 75 nt, Homo sapiens
acggcaggacgcgggcagagagcggacccgcgacgcggggacacaagcagacagggaagggaagcgaccacaaag

SEQ ID NO: 207907 - RNA, 83 nt, Homo sapiens
cccgccccaccaggagcccaccgcaccgccccaccgaggaggacccacgaaggaagaaggacagaagaccacagaaacagcca

SEQ ID NO: 207908 - RNA, 61 nt, Homo sapiens
cggcgccccaagaccaccaagccagaacgccacgggccgccccagaccgagcgaagccggc

SEQ ID NO: 207909 - RNA, 78 nt, Homo sapiens
ccccggccaggaacacagacgggggcgagcggacccgcagccccaaaaagcagaccccacgagcgaaagggaaaaaac

SEQ ID NO: 207910 - RNA, 71 nt, Homo sapiens
aaggaacccggcccccagggccacggcagcgggcgcggccgcaaaaagagcccgaaagacaggaacccaag

SEQ ID NO: 207911 - RNA, 80 nt, Homo sapiens
ccccaaaaagcgaccagagcagccagaggcaggaagaagaagacgagacagggcgaaccaggggaagagaccccgaagag

SEQ ID NO: 207912 - RNA, 62 nt, Homo sapiens
ccccgcccggcgcgagccccaggccggcagcagagcgagccaaggcagcaaggagacgacag

SEQ ID NO: 207913 - RNA, 86 nt, Homo sapiens
agagcaaagggaagagcgccagggcaccagccggggaaaggagcgcagcgcccgggcggaggagcagaaaacccaacacgacccgg

SEQ ID NO: 207914 - RNA, 78 nt, Homo sapiens
gagaaggaggggcaggaaagcagcgggaccagacagcccagaagaaaagagggcacaagccaaagagaccgaagaaga

SEQ ID NO: 207915 - RNA, 77 nt, Homo sapiens
gcaggggcccagcccacagaacccagcaccccagcgccggcggcaccgaagaaggagaggcgcaaccccacccagga

SEQ ID NO: 207916 - RNA, 39 nt, Homo sapiens
ccagggcaggggccgccccaggcgcagaaacagggccca

SEQ ID NO: 207917 - RNA, 66 nt, Homo sapiens
ccaacagaaccgaaagaccgagaccagacaaaaggaccaggcgccccgacccggccaaccaccacg

SEQ ID NO: 207918 - RNA, 72 nt, Homo sapiens
gagccgcccccgggcaggaagggcgcgcaggaacaagaagaagggcaaccacagagccaagaaaaagaaacg

SEQ ID NO: 207919 - RNA, 84 nt, Homo sapiens
gaaacggacacgagcaagaccggaccggcaccaccaggaaccacaggcaggagagccaacaaaggcaccaagaccaaggaggag

SEQ ID NO: 207920 - RNA, 79 nt, Homo sapiens
ggcgcggagcgggcagccgccgccaccccgcggccgcacccccgccccagagaagaccacagaaacagccaaccccagg

SEQ ID NO: 207921 - RNA, 74 nt, Homo sapiens
cggaaacgacacaaccaggcaaagcacagaaccgaacacagggagggccaagaacccccgaagagggaaagcgg

SEQ ID NO: 207922 - RNA, 66 nt, Homo sapiens
aaaggccagaccaaggccgcaagagagaggggaaagacgacagaacaagagaccaggcgacacaaa

SEQ ID NO: 207923 - RNA, 58 nt, Homo sapiens
aaggaccaagaaccagcggaagccgcagaaggaccggccagaagcaagccggagaaca

SEQ ID NO: 207924 - RNA, 81 nt, Homo sapiens
cagccgcccaagccgcacagccgcggcggcagcagcaggagagagccggcagagagcagggggaacacgcgcagggacgac

SEQ ID NO: 207925 - RNA, 71 nt, Homo sapiens
cgcagagcgaagacaagcgccgagaaagaaggcccaaaagaggacagcccaggccaagacagcagccacga

SEQ ID NO: 207926 - RNA, 77 nt, Homo sapiens
cgacgggagaaggccggggagccccgacagggggacgggcagaggggcccggggcagcggggaggaagaggggccca

SEQ ID NO: 207927 - RNA, 76 nt, Homo sapiens
ggaaagaacaaaccgcacgacacaggaaaggacaaaaccagaagcagggaaaaccggcgcagagccaaaaggaacc

SEQ ID NO: 207928 - RNA, 76 nt, Homo sapiens
aaaacgacggacgggaaggcgccccaggaaggcgcacacaaagggccggaagggggcggccacgaccaagaagaag

SEQ ID NO: 207929 - RNA, 85 nt, Homo sapiens
ggccgcacagaaggaagaaaagccaggcaagggggcaggaggcagcagagaaagccacagaacacgcggcccagcaaggcaagca

SEQ ID NO: 207930 - RNA, 62 nt, Homo sapiens
ccaaaagaacacagcacgggaggggaacgagaagccacacgcagccacaggaaccagccagg

SEQ ID NO: 207931 - RNA, 77 nt, Homo sapiens
caagagcagaggacccggcccccaaagaccgagggagcagccagggaccgacacagggacaagagaaaaaaagggcg

SEQ ID NO: 207932 - RNA, 78 nt, Homo sapiens
caacgacccacaagcgagcgaggcggccaaggggaccaaaacaaaacgagagcaagaggaaagaaaaagaacagacgg

SEQ ID NO: 207933 - RNA, 74 nt, Homo sapiens
gcgaaaccacagcaaccaaaaacgagcagaagaaacacaagcaaggaaggaaagcaggaccgagcaccgcagac

SEQ ID NO: 207934 - RNA, 77 nt, Homo sapiens
aaggcaagacccacccaagcacacccaaggacagcagcccaccaagcacagacaagcaacgcccaaaagaaacagca

SEQ ID NO: 207935 - RNA, 81 nt, Homo sapiens
ggaggcgcggccaacggggccacaaggagacaaggacggcagcaagggacaacagggggcaacccgggcagggccagacag

SEQ ID NO: 207936 - RNA, 77 nt, Homo sapiens
cacaccccggacaccgcgccacacgcgcaaggaagaagagacgccgcgcggcagacaaggcccggcaggcaaagcgg

SEQ ID NO: 207937 - RNA, 79 nt, Homo sapiens
cgacaaacaccacgagaaccgcagcccacacggagaacacccacgaagcaccgccccacgccgagccgccacacaggca

SEQ ID NO: 207938 - RNA, 53 nt, Homo sapiens
acagggcccaccagagaaggaacagaacagacaccaccgaaacgcgccaagca

SEQ ID NO: 207939 - RNA, 80 nt, Homo sapiens
ccagcgagaaggagggagaaaggcgggcccgggaacaggggaaacaaagaaagcagacaagaaggagcgggcgggcacgg

SEQ ID NO: 207940 - RNA, 77 nt, Homo sapiens
cccccgaggcccgaccggcaacaaaaagcccgcccagaagccaagcacggaaggaaaaaacaccaagaaagagaccc

SEQ ID NO: 207941 - RNA, 77 nt, Homo sapiens
cacgggcagcacacacgaaagagaagccccggagcgccgcgccaggacggcagccagacgagcagggccgcagcagg

SEQ ID NO: 207942 - RNA, 80 nt, Homo sapiens
gcgcgaagcggccaaagccgcccagacggccaccggcgggaggaacaaaagaccaggaccgcaccgccgaagccgagagg

SEQ ID NO: 207943 - RNA, 81 nt, Homo sapiens
ggaacccaagagccagaaaggagcagggcaaaagcagaccggaaaacccaccggcaagaccacacccgaggggagcccagg

SEQ ID NO: 207944 - RNA, 80 nt, Homo sapiens
ccaagcaacacaagcacccccggccggccggcagggggcgccacggcgacggggcaggggagacgagagcaccaacgaca

SEQ ID NO: 207945 - RNA, 86 nt, Homo sapiens
agaggaggccccccagccacgggaacgccaacccagggagcccccaaggcacccaacccagacaacccagcaaggccaaggaccag

SEQ ID NO: 207946 - RNA, 52 nt, Homo sapiens
ccgccagcgaagagcagaaaccaaccaggaggcgcccaagaaacagcccggg

SEQ ID NO: 207947 - RNA, 81 nt, Homo sapiens
gacaagggaggcgccgccagcggccgggaccgaacaggcgcaacgacggacagacggaaagagaagcccaaaagaaacgca

SEQ ID NO: 207948 - RNA, 75 nt, Homo sapiens
gccgaaaacagacagaacagaacccaaaagccgacaaccccagaaacagggaacaaagagcagaagaccccacag

SEQ ID NO: 207949 - RNA, 74 nt, Homo sapiens
ggaggagcaggcgagaagagaaggaaaagggaggaagcaccgaggagaggcacgcaggcaaccggggacagacc

SEQ ID NO: 207950 - RNA, 78 nt, Homo sapiens
cagcaggggcggccaccccaaccaggggaccggggagaccggccccgcggacccccgggcccgggcccgggccccggc

SEQ ID NO: 207951 - RNA, 72 nt, Homo sapiens
gagaagcaagaaggcccggacacagcaaaccgggccacagaacaccgaaaagcggaggacaccgaaaaccca

SEQ ID NO: 207952 - RNA, 74 nt, Homo sapiens
aagcacaaaaaacaccgaagccagaagacggaaaaaacagcaaacacccggaagacagcaaaaggcaggagcca

SEQ ID NO: 207953 - RNA, 73 nt, Homo sapiens
caggcaggcccgagcacgcgcgggagcagcagcacacgaccgcgagagggcgaagaacgccaaaacccaccaa

SEQ ID NO: 207954 - RNA, 68 nt, Homo sapiens
gccccgcgccgccgaccccccggcgccgcgccggcggcggaagaagagagggcgaaggaggccacaca

SEQ ID NO: 207955 - RNA, 71 nt, Homo sapiens
aacaagaggaagcaggaaaaacaaagaagacccaggagccccagaagagagcaaacacagagaagaccggc

SEQ ID NO: 207956 - RNA, 105 nt, Homo sapiens
ggcggcggcggcggcgcgcgggggcgacgcgcgggaacaacgcgagcggcgcgcgggacgaagggccgcaagagacaccacaaaaggacacccgagcgcggaaaa

SEQ ID NO: 207957 - RNA, 83 nt, Homo sapiens
ccgagaggggcaggagaaggaccacagaccgcgcgcccacacagccccgcgggagacacacagaagacgaaagacgaaagaag

SEQ ID NO: 207958 - RNA, 71 nt, Homo sapiens
gggagaggccggggcgcaccgcgccacgaaggaagacccggagcggcgccaagaggggcaaagacccagcc

SEQ ID NO: 207959 - RNA, 71 nt, Homo sapiens
cggaagccccgcgcccgcgccagagacgacgccccagagagcacagaccagagcgagaacaccaagagagg

SEQ ID NO: 207960 - RNA, 75 nt, Homo sapiens
gaagacaagaagccaaagagcggaggcggcccgcggacaaacaggaagaagagagcaggagaaaaaacaccaacg

SEQ ID NO: 207961 - RNA, 70 nt, Homo sapiens
caaggggcagcagcggaagcggaggaggaccagcccaggagaggaaccgagaacacgacacccgcacaga

SEQ ID NO: 207962 - RNA, 72 nt, Homo sapiens
caaaagcaacaaagaggggagaaaaaccacaccagagaaaaaggagcacagcagggccaagaggaaaaggcc

SEQ ID NO: 207963 - RNA, 82 nt, Homo sapiens
caaagaagggagagaggcaaccagcagcaaccagaaccccgaccccacccgaagagaggaacaggagccagcacccgccggc

SEQ ID NO: 207964 - RNA, 81 nt, Homo sapiens
gcaagcgagcgagcgcagagcccggggacggcgaggccccagaccacacgagaacaggaacaacccagacacccgggccag

SEQ ID NO: 207965 - RNA, 82 nt, Homo sapiens
ccccagccgcagccacaacaccggcaggaaccaccaggacagacaggccgagagaagaaaaagacccaagaaagcaacgaaa

SEQ ID NO: 207966 - RNA, 71 nt, Homo sapiens
agggaacccggacggaaaaccaagagaacagcacagggacaagcaaggcacacacaagaacaggaagaacg

SEQ ID NO: 207967 - RNA, 68 nt, Homo sapiens
cgggcgggaccaacaaagacgccgaccaggagcaacagacaacggaaaacagcgacccgggccgaggc

SEQ ID NO: 207968 - RNA, 102 nt, Homo sapiens
ccagaacacgggagaaaaaggaaaacgcggaaaaccgacacaacagaaaaacaaccaccagcgagcaaaaaggcaaagaccaagaccaccaagaagcgcccc

SEQ ID NO: 207969 - RNA, 75 nt, Homo sapiens
cgcaggcacaaaaggcgcccacagccacgggaccggcgcagggcacgagcaaaaaaaagccccgagcaacaaacc

SEQ ID NO: 207970 - RNA, 86 nt, Homo sapiens
gggaagacggccgacggcggaagcgcccggagagaagagcggcagcggagcgacccagcaggccggcgcggaagaggccggcggcg

SEQ ID NO: 207971 - RNA, 82 nt, Homo sapiens
gagaagaggagcacgcccaggacagggccgagggggcaccccgccaggacaaaacgccaggcagagaccccggccccccagc

SEQ ID NO: 207972 - RNA, 85 nt, Homo sapiens
acaacgggcacaaaaacaaccagggcacaaccagggcagcagggcacccgcgaggagggcaaaaagaagagaagaggaaaaaggc

SEQ ID NO: 207973 - RNA, 76 nt, Homo sapiens
cggccacgcagacaaaagggaacacgacaacagacgaaggacacggaaacgaacaagcacacgacaagccacagaa

SEQ ID NO: 207974 - RNA, 77 nt, Homo sapiens
ggggggaccccgcccagggcccagaggacccaacaccagaagacacacaggaacccaggagaaacgagagggacagc

SEQ ID NO: 207975 - RNA, 79 nt, Homo sapiens
cgcccgacgggcgcagcagccggccgcaccgacaccaggaccaacggaacagaaccggcaagagcaaaccgaggagccc

SEQ ID NO: 207976 - RNA, 75 nt, Homo sapiens
cccagagggaggcccacagggagaacagggcagaacgaggggaggaaagcaggggccagagcaggccggggcacc

SEQ ID NO: 207977 - RNA, 83 nt, Homo sapiens
agggggcccggggggaggaggggcaggcccggcgggacaggcacaaggcagccacccgcccaggaagagaggagccaggaaga

SEQ ID NO: 207978 - RNA, 69 nt, Homo sapiens
caggggagaaaaaaagggaagccaccgcaaaaggggacgcaacggccacagccaagggacaccaaagcc

SEQ ID NO: 207979 - RNA, 91 nt, Homo sapiens
cgagaccggaggagaggccggacggcgcgggcgccggcgaggagagcccgcggcgcagggaagaagcccagcggaggcgaacggcccccgc

SEQ ID NO: 207980 - RNA, 75 nt, Homo sapiens
agaaggggcccagcgcacagagaagagcacacccgaagcaggaacacggaccacgcgcaaagaacagccacagca

SEQ ID NO: 207981 - RNA, 77 nt, Homo sapiens
aggagggagaacacaggaacaggcgcggggacgccgcgcaccccagaggagcgccaccgccaagagcagcagaacgg

SEQ ID NO: 207982 - RNA, 83 nt, Homo sapiens
aaaaagacaggacgacaaaacaccagagagacccgagcaaggaaaacgaggaccccggaaagggacagggcagcggccgagag

SEQ ID NO: 207983 - RNA, 85 nt, Homo sapiens
ggcagccggcagcaggcgccggacgcgagcgaggcggagaagggacacggcaggcgccagggagcccaaagcgcggcccaaggcc

SEQ ID NO: 207984 - RNA, 63 nt, Homo sapiens
cacagcacagccgggaaggggagccaccagccccccggacaagaaaaccccaggacacagagc

SEQ ID NO: 207985 - RNA, 80 nt, Homo sapiens
gaggaagcgcaagcaccccccgggagccacggaaaggcagagacccaaggagcagacccgaaacagcgaagagcgcagag

SEQ ID NO: 207986 - RNA, 69 nt, Homo sapiens
agacagccgaggcaggaagcccggcggacggcaacagaccggacaaggcagcgcaaaaaccaacagggg

SEQ ID NO: 207987 - RNA, 78 nt, Homo sapiens
gcaggaggcggggcaccaccacggcccccagggggaaaaacagaccaagccaagagaaagaagagagaaaccacagca

SEQ ID NO: 207988 - RNA, 71 nt, Homo sapiens
gaaggagaccacaggaaggaaggcgaaaaaccgaacccgacaggcacagccagggcgaaagaagaccccgc

SEQ ID NO: 207989 - RNA, 65 nt, Homo sapiens
aagacgccaaaaacagggaaagggccagcacaggagagaggccaacccaacagaagcgccacaca

SEQ ID NO: 207990 - RNA, 63 nt, Homo sapiens
acgaaggggacgggagcggcggcgggggcacagccaggcacagcggcccagcggaccccgcac

SEQ ID NO: 207991 - RNA, 77 nt, Homo sapiens
caccccccagaacaaaaagcgcgaagggaaccaggaccgggggcccaagaaaagcccaaagaacgccaaagagacgg

SEQ ID NO: 207992 - RNA, 72 nt, Homo sapiens
gagcaagagaggaagaagaacgacccgcccggggcagcagcggagaaaaagaaagcggcgcgccaacagacc

SEQ ID NO: 207993 - RNA, 65 nt, Homo sapiens
cggccacggccccccgccagaagccagagcgaagagaacaaagggaagcggggaacaaaaaacag

SEQ ID NO: 207994 - RNA, 78 nt, Homo sapiens
gccggaccaaacccaggcaaagaagagaaaaaaaccgaagggcacaaaccagggaagaacaaagggagcagggagaaa

SEQ ID NO: 207995 - RNA, 70 nt, Homo sapiens
agaaaaaccaccaagaagcccaacggacgcgcgagcaaaggcaaagaaaaagccagccgaggacgggaac

SEQ ID NO: 207996 - RNA, 68 nt, Homo sapiens
acacccaaaagagcacagaaccaagggaagagaacacacggaccgagagaggcaacgaagcaagagcc

SEQ ID NO: 207997 - RNA, 34 nt, Homo sapiens
gagcgacgaagcacaaggccaccaggcccaggcg

SEQ ID NO: 207998 - RNA, 81 nt, Homo sapiens
gcgacgagacccgaccagcgggggcgcggcggccgcgcagccacccaagacacacggcagggaaccccaccccggaaggcg

SEQ ID NO: 207999 - RNA, 55 nt, Homo sapiens
agaacgaggccaggcgaggagagcgaacaaccccagaagaggcaaggcgccggca

SEQ ID NO: 208000 - RNA, 90 nt, Homo sapiens
gggaagacgcggcggcggcggcggaggagagccgcagagcgcgcagaccccggccgccggccaggaacggaggaaaaaaaaacaacaaaa

SEQ ID NO: 208001 - RNA, 67 nt, Homo sapiens
gaagcacaacaacaggaacccagacagcgcggggccggaggacgcggggaaccagaccgggccagac

SEQ ID NO: 208002 - RNA, 81 nt, Homo sapiens
ccgcccgcaagaaaacaagcagccgcacgacgcacggcccaggaccgcacaagagggccccggaggccgccagcagagccg

SEQ ID NO: 208003 - RNA, 88 nt, Homo sapiens
ggagcgggagccggcgggcgaagagccgccgcccggcccgcgagcaccagcagcgggggccaaggagacgcaggcagaaggaaagggc

SEQ ID NO: 208004 - RNA, 76 nt, Homo sapiens
ccccggcaaccgcacgcaacaagggcagggcaagcagagcgaccagccgccaaagacggagcgccggcccaggcgg

SEQ ID NO: 208005 - RNA, 71 nt, Homo sapiens
gccacagccccacccccgaaaagcgccgcccaaggcccaccccccgacaggcaggcgaccacggaacccag

SEQ ID NO: 208006 - RNA, 73 nt, Homo sapiens
cgggcacacaacaggaggagaaggagcaacaccagcaacacagccggccgaggaagagagacaccaaagcggg

SEQ ID NO: 208007 - RNA, 74 nt, Homo sapiens
caccgcccccacacggcccacacccacacgcaccgccggccgcggggccggacccgagggcagggaacccgacc

SEQ ID NO: 208008 - RNA, 73 nt, Homo sapiens
acgggagcggcccccggggccccgggagccccccaggcagaccaagggaaagaagccaggccagcaaaggcca

SEQ ID NO: 208009 - RNA, 81 nt, Homo sapiens
ggaaaaagaaaggaacagaaacaagagaggaacggagcaagaagcgacacaaggagaaaaggccccagccccagccaaacc

SEQ ID NO: 208010 - RNA, 106 nt, Homo sapiens
cacagccaccccgagaggcacaggagaaagcaaccaaaacacagcccaacaggggacaacgcgacggcgggacccagggacgccccgcagaagaacaacaaggacc

SEQ ID NO: 208011 - RNA, 79 nt, Homo sapiens
aggcgaacccgcggcgcaaaacgagacaagaccagccagcggccccgagaaacccaagaacagaccgccaggaaggaga

SEQ ID NO: 208012 - RNA, 57 nt, Homo sapiens
cagcgggaccgcgcgaccggcgcccgcccgcggagaacgaccaagcacaaggagaac

SEQ ID NO: 208013 - RNA, 52 nt, Homo sapiens
aagccagcacaccaccacaacaggcacccacccgcgagacccccaagagaca

SEQ ID NO: 208014 - RNA, 69 nt, Homo sapiens
gagagacagaagccacaggccaaagccgacagaaaaggaagagacccagcgaacaagaggaagacgagg

SEQ ID NO: 208015 - RNA, 66 nt, Homo sapiens
ccaccgcaggggcaccaaaacacacaccgaaacccacgaaagcaagccagcaccaggggcagggcg

SEQ ID NO: 208016 - RNA, 78 nt, Homo sapiens
ggcggcggcgcaaaaaggcgaaagccgagggaagggggacgagccaagaagggaaacaaacagaagcgcacgagaacc

SEQ ID NO: 208017 - RNA, 65 nt, Homo sapiens
ccgaaccccggcgaacagcaaggcacaaggaacaagggggcgcaacagcccaggcagcacggcag

SEQ ID NO: 208018 - RNA, 103 nt, Homo sapiens
ccgagcagagccccgggccccggccgcggggcccggcgaagggcagacaagcagaccggaagaccgacggaagaccacaccccgagggagcccaggacaccac

SEQ ID NO: 208019 - RNA, 74 nt, Homo sapiens
gcggagccgcgcccccgggacccaaagacaggaccacgcaccagcagagaaggaaagcaaaccgaagcaggcgg

SEQ ID NO: 208020 - RNA, 79 nt, Homo sapiens
cgcagaaagacagagcacgaaaggcaacgcgaacccagcccgcgacacacacagagcacgcccacaggggggggccaag

SEQ ID NO: 208021 - RNA, 79 nt, Homo sapiens
aggccagcgcccagagaggcacgagaaaggggaccagcaccaagaccaccagaaagaagaacaccggagaggcaagcaa

SEQ ID NO: 208022 - RNA, 40 nt, Homo sapiens
caccggcgccggaggccgaagacagaaggcgcgggagaaa

SEQ ID NO: 208023 - RNA, 56 nt, Homo sapiens
gcgccaggcccagacgccaacgcaggagcacccagggacggacagcaacggagagc

SEQ ID NO: 208024 - RNA, 74 nt, Homo sapiens
ggccggaaagcaagcagcaaaaggcggggcgcgcgggacgcggcgcccccggagaaggaacgggaagggcacag

SEQ ID NO: 208025 - RNA, 78 nt, Homo sapiens
ccgggacggaccgggagggggcaaaagcagcgagagcaagcagaacggaacgcgaggaagaaagcaaaggaccacaca

SEQ ID NO: 208026 - RNA, 95 nt, Homo sapiens
ccggcgcaggggagcgaaggcgaggggcagcggcaggagagccggccgcgacaggacggagggaaggccaggacaggggaacaggcacacgagcc

SEQ ID NO: 208027 - RNA, 70 nt, Homo sapiens
ccggcacaacccgacgacacacacagaacacgcgccggaagaagaggaagccaagccaggaaaaacccag

SEQ ID NO: 208028 - RNA, 80 nt, Homo sapiens
acgcaccggaaaaccaccaggccagaccaacacccccagggcccccgacccaaaagccgagagggacagacgggccagcc

SEQ ID NO: 208029 - RNA, 81 nt, Homo sapiens
cggcgacaacacccggccccgagacagaagccggcaccaaccagcggacacacggaaaagggacgggaaaagccgagaaag

SEQ ID NO: 208030 - RNA, 70 nt, Homo sapiens
acacacaaagcgcgccaaacaggaccacgcaaggaacaacaggccaagcaacaggcgcacgcggaggagg

SEQ ID NO: 208031 - RNA, 79 nt, Homo sapiens
gcccccacgggcggcgcagggggaggggagccacgcgccgacaaggcacaccggaaccccaagaggaaaacaaaggcgg

SEQ ID NO: 208032 - RNA, 82 nt, Homo sapiens
gcaagaccaagaccgcaggaaggacggggccacgggagcgcggaggccggcacagccacaccgagaagaccggcccaagaac

SEQ ID NO: 208033 - RNA, 79 nt, Homo sapiens
cgggccgcggcaggagagcccgcacgcgccacccacggagccaaccagaccaaggcagaaggccaccacgcccccgaac

SEQ ID NO: 208034 - RNA, 71 nt, Homo sapiens
cccaacaggggcagaagcgaaacccaaaagaacccgggcgagcaacggcccaaccaacccccggaccgcaa

SEQ ID NO: 208035 - RNA, 81 nt, Homo sapiens
agccgcacagaaagcggagcacccaaggcaaaggcggcaggcacagaggcaagaaagcaccgggaggaaagagagccacac

SEQ ID NO: 208036 - RNA, 37 nt, Homo sapiens
ggagagacccagagaacaagccagacagacacagcac

SEQ ID NO: 208037 - RNA, 83 nt, Homo sapiens
cgcccaccagcgcccgcccccgccccgcacaagggggccgaggccaggcagcagacgacggagaccggaaggaacaagccggg

SEQ ID NO: 208038 - RNA, 67 nt, Homo sapiens
cgagacacacagcaccgggcacgagaagaacccacagcaaacagccccacgcgccacaccaaggcag

SEQ ID NO: 208039 - RNA, 56 nt, Homo sapiens
gcccgccccgccgcccgagccggcgccaaggagaggaagacagacaaggcagaaga

SEQ ID NO: 208040 - RNA, 65 nt, Homo sapiens
aggcgacggcagaggaccccggagagcaaggaagaaagcagcccaggcaacgcgcccaagaggac

SEQ ID NO: 208041 - RNA, 39 nt, Homo sapiens
ccaggcccacgaaacaggccccgggaccaaggacacgca

SEQ ID NO: 208042 - RNA, 103 nt, Homo sapiens
gggcagcggaccagccagcggacccgaccaggagggagcggaaaacggggcccgggccggggcacagcaaaccaaacagcccagcagcccagcagcccagcca

SEQ ID NO: 208043 - RNA, 38 nt, Homo sapiens
gaacagaaagagaagcggagccagagaagcagcagaag

SEQ ID NO: 208044 - RNA, 78 nt, Homo sapiens
caggacacgaaccgccagagggcggcagcggcaccacggggacgcaaagaaaccacggaagccaacacacccaaggcc

SEQ ID NO: 208045 - RNA, 45 nt, Homo sapiens
caaccacgccaaccagccgaaggcagggaggggaaccaggggccg

SEQ ID NO: 208046 - RNA, 75 nt, Homo sapiens
ggcaggaccaaaagggaaaagcaccgagcaaggcaccggcaccggaccaacacgaaggagaaccgcaggccccgc

SEQ ID NO: 208047 - RNA, 74 nt, Homo sapiens
cgcggagcggcacgcccccccggccacaccacaagcgcacgcacgccgcaagaaaaaggcgcagcaggcaagag

SEQ ID NO: 208048 - RNA, 74 nt, Homo sapiens
acggaaacgaggaggagcggccaggaaagccaagacaggccaaacggagggaggagaagacagagcgaacagaa

SEQ ID NO: 208049 - RNA, 83 nt, Homo sapiens
gaccaggagagacagggccacgaacccgggaaagcaacggacaagcaaggggccaaggagccaaggaggaaacccacaacaga

SEQ ID NO: 208050 - RNA, 58 nt, Homo sapiens
gggagagaacccaaccagggggaaacacagaacgcagggacaaacagagcaacgaaca

SEQ ID NO: 208051 - RNA, 83 nt, Homo sapiens
ggaagccagaggcgggccaagggcccgaagaggaaggagaaggaaagagcagaaaggagcggcggcacggagaagagccacgc

SEQ ID NO: 208052 - RNA, 76 nt, Homo sapiens
gaagccagacgggaagggagcagacagcagcgaagaagagaaaccaacaaaccagaagagaccagccacagcggca

SEQ ID NO: 208053 - RNA, 70 nt, Homo sapiens
gacaagaaacccagagaacgcccccgacaccacaaggcacacaagccgaagccaacacgcccagaacagc

SEQ ID NO: 208054 - RNA, 78 nt, Homo sapiens
ggacacgacgacccaccgagagagcgcagcaggggagcaccacgccgccgaggaccacaagagcaaacaaaaaacaga

SEQ ID NO: 208055 - RNA, 86 nt, Homo sapiens
aagaggaggacagcgcacacagcaagcacgagacaggacccagaccagccaaagagaagaagaaaggaagcaaaacaaagaaaaaa

SEQ ID NO: 208056 - RNA, 66 nt, Homo sapiens
caacgaggcagcggggccaagcggagggaaggcggcgagaagaggaggaacaagagccagagacca

SEQ ID NO: 208057 - RNA, 74 nt, Homo sapiens
aggcagccagaaccaagcggagagagcagcccggcagacgcagaaccaaaaccccgaaccaaacagagcccaag

SEQ ID NO: 208058 - RNA, 81 nt, Homo sapiens
gcggagagcccacaaaaaagcaagaaagccgccagccaggcacgagccacgccaagcaccccacagccagcggcagggcag

SEQ ID NO: 208059 - RNA, 70 nt, Homo sapiens
agcggcagaacgcacagagggagagcagggggagaaagacccagggcaagcacccacggggagcccgggg

SEQ ID NO: 208060 - RNA, 74 nt, Homo sapiens
aggcgagaggaagacgacgaggaagagcccgccgaaggcgagacaaaggaaaacccaccccggaggagcagacc

SEQ ID NO: 208061 - RNA, 83 nt, Homo sapiens
ccgagaccggaccgagagcggaccgagagcgcgaaacgcacgagaagggccacacccccggagaccaagagaagaaacagcgg

SEQ ID NO: 208062 - RNA, 83 nt, Homo sapiens
gcgcgccacgaccaccggccgcgggcccggaacacgagaccgaccgcccccaggaggggaggcacacaggaccccgcgagcca

SEQ ID NO: 208063 - RNA, 74 nt, Homo sapiens
agagacaaagcagggacagcagagagcacaggcaacagagagaggacggaacacagcaaagcacaagcagaagg

SEQ ID NO: 208064 - RNA, 65 nt, Homo sapiens
gcaccgcaggcagacaaaagggccaaagaagggagagaggcaccaagcagccgaagagaaacaag

SEQ ID NO: 208065 - RNA, 74 nt, Homo sapiens
gaggaacgagccagcaggcacccaaaggcgcccagaaaccaaccaggcccacaacaggccgcgcccggcccccg

SEQ ID NO: 208066 - RNA, 36 nt, Homo sapiens
cgggaggaggagggggcaagcagaagaggaacagaa

SEQ ID NO: 208067 - RNA, 79 nt, Homo sapiens
gaagacacaagaagaccgagcaaagagaccccggaacgcgacgccggaccgcgaagagacgagaggggcacggaagggg

SEQ ID NO: 208068 - RNA, 69 nt, Homo sapiens
agaacggcgacagacaagaggcgaaggaaccgggaaaacagaagcacaaaaaaacagaccagcccgaaa

SEQ ID NO: 208069 - RNA, 70 nt, Homo sapiens
aggcgcgaaagcacgagaggaacagaaaggaacccccaggaaacaccaacaagagaaaaaacccacaccc

SEQ ID NO: 208070 - RNA, 60 nt, Homo sapiens
gggacggcccgcggacgccagcaagagcagagaaagaccacggacaaaccccagaccgag

SEQ ID NO: 208071 - RNA, 79 nt, Homo sapiens
gaacggggccccaggaccccacaacaccagaacaaaaggcaggcaacaagggagaacccaaagacaagcgaagggagaa

SEQ ID NO: 208072 - RNA, 75 nt, Homo sapiens
cgacaaaggccaaccaacacagaagagccaagagaaaccaccaagagccaggaaggcaaaggccgagagagagcc

SEQ ID NO: 208073 - RNA, 62 nt, Homo sapiens
ggcgacgaccgacaggggggaaaggcccacgacgaccaagaccacccccgagcaagaagcca

SEQ ID NO: 208074 - RNA, 86 nt, Homo sapiens
ccagccggacagccggcggacgagaggaccgccgaagagcaccagagcgcaccccccgagggaggccccagaccgacgaggagaga

SEQ ID NO: 208075 - RNA, 75 nt, Homo sapiens
cgacaaacaggaaaaccagacccaaagagaagagaagcaaggaaagaagacaagaagaagccaaagcaaaaacaa

SEQ ID NO: 208076 - RNA, 123 nt, Homo sapiens
cacgcagcacaccggcacaccggggaagcggcccacaccacaaagcccccgccacggaccggagccggggccagcagcccgcgcccaggacggcgcgcagccgcaggagcgggggcgcggggg

SEQ ID NO: 208077 - RNA, 72 nt, Homo sapiens
ccaccgcccccgacacggggcgacacagcggccgagagacgacgagacaagggcaacgagacacccagcggc

SEQ ID NO: 208078 - RNA, 66 nt, Homo sapiens
ccagaagaggccacccagccaccagaagccgggaaagacaagcaccgccccggggaagacggaaga

SEQ ID NO: 208079 - RNA, 79 nt, Homo sapiens
cacacgaaggaagcagcccccaccgaagacaacagccggcaccagcacgaggaagcgaagaagcgccaccgaggacagc

SEQ ID NO: 208080 - RNA, 47 nt, Homo sapiens
ggacaagcgcccgaacggcaagacccaacgggaggggaaacacagag

SEQ ID NO: 208081 - RNA, 72 nt, Homo sapiens
acagaggaccaaagcggaccagagacaggcaaggcaagaggagggagagaggaaagccaaagagcgaagaga

SEQ ID NO: 208082 - RNA, 76 nt, Homo sapiens
gcagcgcgccgcgcaacaccgggaggcaaggagcaccggcggcagagaaggacggagaagcgaaagccagaccggc

SEQ ID NO: 208083 - RNA, 99 nt, Homo sapiens
cccgacgcagcacagaggaccaccgacccaaagagagcgcccagccgaaagagggcaggcaccggagagcgaagcaccagaaggacacagaggaaagaa

SEQ ID NO: 208084 - RNA, 77 nt, Homo sapiens
cccgcagagaaaaaaaaagcacaacccagccagagggagcagcgcagagacggccgaaaaacgaggggacagaagcg

SEQ ID NO: 208085 - RNA, 84 nt, Homo sapiens
gaccacgcagagcacaccggccaacagacgagccacccaaggcaacggacaacaaccacacagcgcagaagaggagccccgagc

SEQ ID NO: 208086 - RNA, 84 nt, Homo sapiens
aaccccccacaacagcagaggccacacagggcaagcagagcagccagcacagcagcaaccagcagcagcaaggcagcaccgaag

SEQ ID NO: 208087 - RNA, 68 nt, Homo sapiens
aaaaaaacggggggggggcaccaccaacaacgggagacaagggacaaggcccaggaggccaccagcac

SEQ ID NO: 208088 - RNA, 77 nt, Homo sapiens
cacacagggacccacggccagagcccggagcaggaaaaacacagagacagacggcggcagacccacccagggaaccc

SEQ ID NO: 208089 - RNA, 132 nt, Homo sapiens
gcccgggggaggaaccagggggccgggcagccgcggacccgccaagaagcgcccacgcagcagccgggccccggggacggcaggcaaaacccacaggggggccgcacgcggcgggaaggcgcacagcagggg

SEQ ID NO: 208090 - RNA, 77 nt, Homo sapiens
caaggaacaagggcaagcagcgggggaagaggaacgaaaggaaaagagacgcagacagggcagccgaaggaggccgg

SEQ ID NO: 208091 - RNA, 65 nt, Homo sapiens
aggagggaggaaaacaaccgagggcagaaaacggcgaggaaagagaggagccccggaaagaaaag

SEQ ID NO: 208092 - RNA, 83 nt, Homo sapiens
gcaggaacagaggcgcgcgagggcagccgcggcccgggagccaaacccaccaagggacgaagcgcaccacgcagagaagggac

SEQ ID NO: 208093 - RNA, 75 nt, Homo sapiens
gccgcaaaaacccagcgcaagagcgagaaccggcgccagaaggacccgaccagaagaaccaccgggcccagaagc

SEQ ID NO: 208094 - RNA, 64 nt, Homo sapiens
ccgccgccaccgccgagagcacgcaaggagcaggcaaaagcagaccggaaaacccaccggcaag

SEQ ID NO: 208095 - RNA, 73 nt, Homo sapiens
gaaacaaaaaaggcagcccagaagggaagaagagagaagcaagcccggcacacgagacgacgggaccgaagga

SEQ ID NO: 208096 - RNA, 67 nt, Homo sapiens
acccgcgaaagcaggaaagggcaaaagcggcaaagggaaaaaggcgaggaaacaaacgagagccgcc

SEQ ID NO: 208097 - RNA, 73 nt, Homo sapiens
gggacaaacgcacagacagcagcgccagacaaccagagcgggagaagaaaaagcagaaaggaacagaaaacaa

SEQ ID NO: 208098 - RNA, 82 nt, Homo sapiens
cgcacgacaaccagcagccgagagagcacacgacgaaggaggacagggaacgaagacccggagacacagagcaccaacagcc

SEQ ID NO: 208099 - RNA, 65 nt, Homo sapiens
accccggcaagccggagacgaggagaagacccaggaggacaacagccggaagcacggggcccaga

SEQ ID NO: 208100 - RNA, 77 nt, Homo sapiens
cgcagcagggacgcgggcacgggaccggcgaggacgggcagcgcaagaccccgcacggaagcagcaagcacaggcag

SEQ ID NO: 208101 - RNA, 76 nt, Homo sapiens
acgggcacagggaagcgccggaaaaaccaaagggacagagagaggcagaagaaaaagcacccccaagcgagagagc

SEQ ID NO: 208102 - RNA, 78 nt, Homo sapiens
cgccgaggcggcgagccggcgccggggacgaggagaggaccaggaggaggaggcagagaacgccaacgaagccaacgc

SEQ ID NO: 208103 - RNA, 79 nt, Homo sapiens
agcgaacacccagaaacggggccaggaggcggggagcgcgaacaaacagaccgggagccgcgaggagaaccggcggacc

SEQ ID NO: 208104 - RNA, 52 nt, Homo sapiens
agccacgcgagggaccagcaacaacacacagcagccacccgcagccaggagg

SEQ ID NO: 208105 - RNA, 76 nt, Homo sapiens
ggaaaaaagagacagagaggagccaaacccccaggaagaccgccggaccaaacagagggccccacgccaccaccag

SEQ ID NO: 208106 - RNA, 75 nt, Homo sapiens
gcagaccacagagaaccgagcagaaagagggaaaaaacccagggggcaggaagagaaacggcagacccaccgacc

SEQ ID NO: 208107 - RNA, 69 nt, Homo sapiens
aaaaaaggaagagaggccaaaacaccaacaagagagaggggaaaaaccgaaggcacgaagacagcccca

SEQ ID NO: 208108 - RNA, 60 nt, Homo sapiens
cgaaggcccacaggacaggagagaaagacggaacagggagacaacggaccaccaaaagga

SEQ ID NO: 208109 - RNA, 80 nt, Homo sapiens
aggaaagggaggcaccacacacaaaaagacaccagcggggcagaagaggggcagaaaagaggcacacagcgcgcgcaggg

SEQ ID NO: 208110 - RNA, 80 nt, Homo sapiens
cagagagaagggaagccacagaagaaagcgcagcaggcgaacggaaggacacccaagagaaaggagagaacgaaagacac

SEQ ID NO: 208111 - RNA, 87 nt, Homo sapiens
cgggcccgcgcgcccggccaagaggcaaaggggaggacgcagcaaaccaccagaagagagccagccggcagcggcaagccaagggca

SEQ ID NO: 208112 - RNA, 63 nt, Homo sapiens
cacgcaaagacagaaagccagggcaaagaccaggaggggcggggagaggagacggcagggagg

SEQ ID NO: 208113 - RNA, 81 nt, Homo sapiens
aaggaaaaaaccggccgaagagaggcaaaaaggggcacagaaacacaggccggccaacaggacggaaaaacagaaaacaag

SEQ ID NO: 208114 - RNA, 78 nt, Homo sapiens
aggcgacaggggaacagacagaaggagcaggaaccaaaggggcgcggaagagggagcgcgaaggagcgcaccagcacg

SEQ ID NO: 208115 - RNA, 125 nt, Homo sapiens
cacccaagcagacccaccaccacccagcccagcccagggcccaccggccaccacgagacccggcgccccaaggaaggaagcccagacgccgggaggcaggagacccgccagccccggcccacgcc

SEQ ID NO: 208116 - RNA, 96 nt, Homo sapiens
gcccgaggcgcggggagcgaacaagacccaccggcgcgccccgccaaagaacccccgccgcgggcgcaccaaaacgaagcgcgacaggcagaaagg

SEQ ID NO: 208117 - RNA, 83 nt, Homo sapiens
gggaggggggagcacgagaagaacgagagcgaaagagccggaggaagggccagaaggcagccgagccggaccgcaagccacaa

SEQ ID NO: 208118 - RNA, 77 nt, Homo sapiens
gaggaggaggaggaggaggcgggcgcgccggaaggccggaagaggacacaccaacaggcagcgaagacacgggacac

SEQ ID NO: 208119 - RNA, 50 nt, Homo sapiens
agcagcgcagcgaccggggaccggagcgacgccagcgggaaaacggcaca

SEQ ID NO: 208120 - RNA, 71 nt, Homo sapiens
agaaccgacaaccaagggccccgcggaccaaggaagaacccgaagcaccgggaggccaacagacccaaccc

SEQ ID NO: 208121 - RNA, 80 nt, Homo sapiens
cggccccaacgcgccccgggacgcacacggcaccaaacaaagaagccaaggaagcggaggcacgggcaacggcccccaga

SEQ ID NO: 208122 - RNA, 64 nt, Homo sapiens
gcaacaccaaaaacaaaacgaaccaggacggcaacagcgcagccgggcacacagcaacaccccc

SEQ ID NO: 208123 - RNA, 68 nt, Homo sapiens
accagcgccagcccagaggacaacaaaaagaaacaggaagaaggaaaagaacggcccaggggaaaaga

SEQ ID NO: 208124 - RNA, 74 nt, Homo sapiens
ggggacggcgacagcgccgaacagaaccaaaggcagacccagaagagcacaaaacagagaaaagggaagggccc

SEQ ID NO: 208125 - RNA, 55 nt, Homo sapiens
gccccaccgcgagcgcgaccaccccacacagaccgcgccccaggcgaccacacac

SEQ ID NO: 208126 - RNA, 71 nt, Homo sapiens
gcacagagcccccggaaggagagcgcgggcgggcgcgccccaggccggggggggcacagagccccggaaga

SEQ ID NO: 208127 - RNA, 75 nt, Homo sapiens
gagagcccgagaagccgggcgccgaggagagccgggggcgcgcggggagacgaggacgcgcacaggaaaggacgc

SEQ ID NO: 208128 - RNA, 88 nt, Homo sapiens
ggaagcagccaccagaagcagggaaaggaaaaccccagcgcaagggaaaccaccaagaagcaagaggaaaaggagaagaagggaaagg

SEQ ID NO: 208129 - RNA, 66 nt, Homo sapiens
ccaaagaaccccaggacaggagccagggcagcggaccacacaagcaggccgcgacccgagccggaa

SEQ ID NO: 208130 - RNA, 76 nt, Homo sapiens
acaaggaaaagccaaagaaagggaaggggaaaaagaagcagacagcccacgagacaagacccagcagagagaaaac

SEQ ID NO: 208131 - RNA, 68 nt, Homo sapiens
ggacagagggcaaaaacaggccaacgccaacaaagaaaagaacagagaccgcggagccaaacaaggcc

SEQ ID NO: 208132 - RNA, 77 nt, Homo sapiens
aggggaaaaacgaacagagacgaggcggaacagagaaaagaaaggcagaacaagaagggcaaccaggggggaaggag

SEQ ID NO: 208133 - RNA, 74 nt, Homo sapiens
ggccaccacaggccgaaggggcgggagaacagcgggagggaggcacgcaggaggcaaaccagaagagaagaaaa

SEQ ID NO: 208134 - RNA, 76 nt, Homo sapiens
agcgccgcacgacccagggaagggcacaggcccccaccgagacacaacaaagaaaagaccaacgaaacccacaaag

SEQ ID NO: 208135 - RNA, 69 nt, Homo sapiens
gagcaggggagaccccggaacaaacaacacagaagacggaaacgcacggagaagaggcgacaaaaagcc

SEQ ID NO: 208136 - RNA, 70 nt, Homo sapiens
gacagcaccacgcccggggggacgcccccaccacaccgggaggaggagggagacaggggcaaaaaacggc

SEQ ID NO: 208137 - RNA, 54 nt, Homo sapiens
agacaacagggccacagcgaggacagggagggcgaagaagccggggggggcaca

SEQ ID NO: 208138 - RNA, 75 nt, Homo sapiens
gaacaacaaacaacagcaaaagaaagccgcacagacagacaccccaaacaaagcaggcccagcggggcgagggag

SEQ ID NO: 208139 - RNA, 75 nt, Homo sapiens
ggacgacaccccccgcagcaacggaggaacagccgaaacacggcaaagaagggagaggaagaaagaccaaacgag

SEQ ID NO: 208140 - RNA, 78 nt, Homo sapiens
cccagaagaggcggaggcgggggggccaccacagagcccgcagggacacagcagaacaagcaacccccggcacgaaaa

SEQ ID NO: 208141 - RNA, 77 nt, Homo sapiens
cgcagacggacaggagcccagacaagcgccggccggagcaaccccccacgcaaaagcaggaccgccggagcacgccc

SEQ ID NO: 208142 - RNA, 70 nt, Homo sapiens
agcgaaaggaaaacgacgccaggcaaaaaagaaggaaaaacaccggggaaagcagcccacaagagcacaa

SEQ ID NO: 208143 - RNA, 82 nt, Homo sapiens
ccgcagcggcgcagcccacgccagacgaccccacccgcgccgcgacccgacggcagccggcccgggcgcccccagacacgga

SEQ ID NO: 208144 - RNA, 49 nt, Homo sapiens
aacgagaagagcagaagggcccagaccaagccccaccaacagaagagcc

SEQ ID NO: 208145 - RNA, 78 nt, Homo sapiens
ccgcagcccgaacagcccacagaacgaaacagaagcgcccagaggaccgcccgagcagaccccgaaagccccaccgga

SEQ ID NO: 208146 - RNA, 78 nt, Homo sapiens
ccagcccgcagcaagggcaagccaggaccaaaggcaccgagcccagccacagagcgagaaggaaaaaacagggaagag

SEQ ID NO: 208147 - RNA, 83 nt, Homo sapiens
caagccgacagacccaaggggcaaagagagcagcacgccaaacagggggagccggagccgaagggagaccaccgacgaggcag

SEQ ID NO: 208148 - RNA, 54 nt, Homo sapiens
aagccgacgagacggagaggaggcacacaccaacgaccaaaaggaacggcacgg

SEQ ID NO: 208149 - RNA, 40 nt, Homo sapiens
cgcagccccgccagccacccccagggcggggacagagagc

SEQ ID NO: 208150 - RNA, 62 nt, Homo sapiens
agccgcggagacggcggaagcggagagcaacagcgcgccggcaaaaggcagaccgaaaaaac

SEQ ID NO: 208151 - RNA, 76 nt, Homo sapiens
aggacaacgaagaagaggaaagacgccaggcaaacccagcaggaagccacgggcgaaacagaaaagaaaggaagag

SEQ ID NO: 208152 - RNA, 77 nt, Homo sapiens
cagaaggacacacccagccgcggagggagaaaggccgagaccgcaggcggccgccgggagggggagcagagcgacgg

SEQ ID NO: 208153 - RNA, 76 nt, Homo sapiens
aagccgaggcgcagagacggggacacgaaaagcccagccacgggggacagcgagcgggcggacaccagaacgagga

SEQ ID NO: 208154 - RNA, 83 nt, Homo sapiens
cgggaggggcggagggcaagagcgccgaccgggcggcgaggaaggcgccccggagacaccaggcgccgagaaggccagcagag

SEQ ID NO: 208155 - RNA, 44 nt, Homo sapiens
ggagcgcagcagcccggaagcgcgaggcgcagggccacaccgaa

SEQ ID NO: 208156 - RNA, 85 nt, Homo sapiens
accaggagagcccagagccggcaggagccagaaagccagaggcgaacacaggggcaaaggagcagagaacgacaagccacacgag

SEQ ID NO: 208157 - RNA, 56 nt, Homo sapiens
ggaaaaaaggcaaaagacacaacagccccaccaagcacccagaaggaaccgacaag

SEQ ID NO: 208158 - RNA, 70 nt, Homo sapiens
gaggcaggcgggcgagcagccagggggaacgacagaaggggaggcggaacaaggaaacagaagacagccg

SEQ ID NO: 208159 - RNA, 82 nt, Homo sapiens
cggaaggggcccgaagcccccgcaggaaccacaacccaaccagggcccggggacacgagcggccccagcgcccgcacaaggc

SEQ ID NO: 208160 - RNA, 77 nt, Homo sapiens
cacggcgacgccccaggggaaaacccccgggaccagacggagcgcgccccaccgcggccgccggggacacagagccc

SEQ ID NO: 208161 - RNA, 78 nt, Homo sapiens
gaaaagcagccgaaaggagaggacacgcagagaaacaagacgagagaggagcgcgggccgagagcggagagcgggacg

SEQ ID NO: 208162 - RNA, 70 nt, Homo sapiens
cgcagggcgcccccgagggcaccaagagcgaaggccaacaagaggaacaaagaagggaacaacgagagga

SEQ ID NO: 208163 - RNA, 75 nt, Homo sapiens
ggcaagaagacaggaggacaggacagcccccacaggcgcgaaaaaggagaccaaggaagagaagggaagcacaga

SEQ ID NO: 208164 - RNA, 79 nt, Homo sapiens
gaccacccaccaaccgcgaagcccgaggcagcccaagccgggcccgcacgaacaaggacaaccggaaccgcgaggacag

SEQ ID NO: 208165 - RNA, 116 nt, Homo sapiens
gggaggcaacggccaaccggcaagaccagacgggaacgggagacaagcgcagcgaggcgagaacaggggacccaaaccaacagggccccagaaccagaaccccggccaaaccccac

SEQ ID NO: 208166 - RNA, 71 nt, Homo sapiens
agagccacacagggcagaaggaagcacgggcgagaggacagccgacggaccagagcgagcgccagagcccc

SEQ ID NO: 208167 - RNA, 74 nt, Homo sapiens
ccccaccgccggcgcgggaaacgggcgaagcgacgagccgcgaggagggaccaaaccggaaaacagaaagaaga

SEQ ID NO: 208168 - RNA, 74 nt, Homo sapiens
ggaggcggggggcccaagcaaggccggaagaagagcgcagagcggagaccaggccaaaaggagggaaaacccac

SEQ ID NO: 208169 - RNA, 70 nt, Homo sapiens
gcagcaacccgagccaagcaggaaggcccagcaaagagaagaaggaagagccaggcggagcgacaaaacg

SEQ ID NO: 208170 - RNA, 57 nt, Homo sapiens
caccaccgaggaccaccagagcagcacggaacaaagggcaaaggacacaccgcacaa

SEQ ID NO: 208171 - RNA, 72 nt, Homo sapiens
agagggccgggacagcgcgcgcggccaggaacaacagaagagaaaaagaaaagacccagaccccacccagca

SEQ ID NO: 208172 - RNA, 69 nt, Homo sapiens
agaggcgcacgaacagaggcacgggaaaaaacgcagcaaacaccaggagaaagcccaggcacggaacag

SEQ ID NO: 208173 - RNA, 72 nt, Homo sapiens
gagaccaaagacccccagagggcgcaccaagagagaggccccgcccaagaccccagcaaaggccggggcggg

SEQ ID NO: 208174 - RNA, 71 nt, Homo sapiens
caaccggacaagccgcccccgcaggaccacgcaccccaacccacagcgccgggagcgccgccaggacaggc

SEQ ID NO: 208175 - RNA, 37 nt, Homo sapiens
gaaaaacggcgaagcaccggaagcagaccagaacaag

SEQ ID NO: 208176 - RNA, 85 nt, Homo sapiens
ggaagaccgcgagcaaggagcgcggaacggggagcgccggagcagcggacccaggcagaaaaggcgacggcggagacagaagaga

SEQ ID NO: 208177 - RNA, 73 nt, Homo sapiens
ggcaaaggcagacaggccggcagagaaaagagacaggggccaagcgacagagaagcgacggaacagaaggagg

SEQ ID NO: 208178 - RNA, 63 nt, Homo sapiens
gaagaacaaacacccgagcgcgagacaccaaacacaaagcgacgcgaggaaaaaaaacgacac

SEQ ID NO: 208179 - RNA, 76 nt, Homo sapiens
cgagcggcaccccccaggggggaggagcggaacaggcacgaaccccacacgggacaggacacgacgccccacgcca

SEQ ID NO: 208180 - RNA, 74 nt, Homo sapiens
agaagagccgcccccaccagacgaggccaccagccagggaacgacacacagcaacgaagcaggggaggagggaa

SEQ ID NO: 208181 - RNA, 75 nt, Homo sapiens
cgcgcaccacgggccgacaaacgccccgcccaagaccagccgaaaagacgaggcgaggaggcgagacacccaacc

SEQ ID NO: 208182 - RNA, 69 nt, Homo sapiens
gacacgcaacccagaccacccacaggagcaacagagcccagaaaccaggcgccaggaacagcgggaccc

SEQ ID NO: 208183 - RNA, 53 nt, Homo sapiens
gcagcaccgggcagcgagacgaaaaacgccgcaggcaggcaggcagaagacaa

SEQ ID NO: 208184 - RNA, 68 nt, Homo sapiens
gaagagagaaaagagagaaccccaaccggggaggaaaaccgacgaaggggcgacgagaggccaggggc

SEQ ID NO: 208185 - RNA, 102 nt, Homo sapiens
ggaacaggccagcgaaaggggcggccccccgcagggcagaaaggcaaagacccggaagaggaacacagcgaagagccacgaaaagccagagagagaagcccg

SEQ ID NO: 208186 - RNA, 78 nt, Homo sapiens
cccgcaagaagaacagagacagcagccaaacccccagcaccaggacaaaagaagggcagcacaaaggaaagccccaaa

SEQ ID NO: 208187 - RNA, 81 nt, Homo sapiens
gcagacccagcagggccaggcacaccagagaggcacggagaagccccccaccgcagggggcgaacaagggacacgagcacg

SEQ ID NO: 208188 - RNA, 87 nt, Homo sapiens
ggaagcggaagcgcagccacaaggccgcaggggagccgagagccacagagagacaagagagacaccccaaccgacaaagagcaccag

SEQ ID NO: 208189 - RNA, 83 nt, Homo sapiens
ccgacccccccgccggggagggcccagcgcaccgacaggaaggagggccccggagcagccacaccaccgaggccccacccagc

SEQ ID NO: 208190 - RNA, 83 nt, Homo sapiens
cccaaagccccaaggagaagaacggagacgggggcccagagagagggagcccacacgggggccgggaaggaaaagcagcggac

SEQ ID NO: 208191 - RNA, 36 nt, Homo sapiens
agccacagcaccccgaaggagccacggaaagacaaa

SEQ ID NO: 208192 - RNA, 76 nt, Homo sapiens
gaaggaaccgaagaagacaggaaaacgcaggcgaaaaccaaagcagcgagagaagagacgcccggcaaacaagcac

SEQ ID NO: 208193 - RNA, 77 nt, Homo sapiens
gacacgacaagaagcgaaggagcccaggcgcgcccaagccccacgacacccaaccccaccagcccggccgaccaaga

SEQ ID NO: 208194 - RNA, 115 nt, Homo sapiens
ggcgcacccgccccggcggcgacgacgggcgcccccgagccgccgccgcgccggagccccacaggccgaacccagccaccaaagagagaagacccacgagcgccgagggaccgaa

SEQ ID NO: 208195 - RNA, 60 nt, Homo sapiens
cgcacgccagcagcaagggagccgccaccaaaagcagacggaaaacccacggggaagacc

SEQ ID NO: 208196 - RNA, 41 nt, Homo sapiens
gaccccgccgcggcgggagggagcaggccgggcccgccagg

SEQ ID NO: 208197 - RNA, 61 nt, Homo sapiens
gccccgcaccagagcggggcaccgagccgggaagcccggggcggcgacggagcacgaccca

SEQ ID NO: 208198 - RNA, 99 nt, Homo sapiens
gcggccccggcggggcaagagcgggggcgggaccccgccgcggcgggaggggcagccacccagaggcaaagcgcccacagcccagcccaagccacccgc

SEQ ID NO: 208199 - RNA, 76 nt, Homo sapiens
gagagcagggcacagagcgggacccaacaggcacacaacagcagaggagcgggaagcagagccaagggggacaaga

SEQ ID NO: 208200 - RNA, 89 nt, Homo sapiens
ggaaacaccagcgcagggaagaggaagcgagacgaggagcacaggaaccgaaggaggagaggaggagcaaaaaggacagagcacagagc

SEQ ID NO: 208201 - RNA, 85 nt, Homo sapiens
gcaaggagaagcgcacgacgggaccacaaggcccgcaggaggggagccgccaccaaaagcagacggaaaacccacggggaagacc

SEQ ID NO: 208202 - RNA, 77 nt, Homo sapiens
ccaagagcgggacacaggcgacagggggaccgcggcgcgagggacgcaccgccccaggacggggagaaagagcccca

SEQ ID NO: 208203 - RNA, 69 nt, Homo sapiens
acaaagaagaggcgggcggagggcacaccagaggggacacacagcaacgaagcaggggaggagggaaga

SEQ ID NO: 208204 - RNA, 76 nt, Homo sapiens
cagacaccgccgagccgaagcgggagcaggcgagcccggcccccaaggaaggcaccaccccagaggccagagcccg

SEQ ID NO: 208205 - RNA, 82 nt, Homo sapiens
gaaccggcgcgccggcgcgcggcgcggacaggcccaaacgggcgcggaggcgcggggcgccccgaggagcggggaggccggg

SEQ ID NO: 208206 - RNA, 70 nt, Homo sapiens
caaggggccagaggacagaggacagaacccccgagggcgggaaacggcaagagaccagaggacccaaagc

SEQ ID NO: 208207 - RNA, 40 nt, Homo sapiens
ggaaccgcccaagcaaacggggagagagaacgaaacccaa

SEQ ID NO: 208208 - RNA, 81 nt, Homo sapiens
gggaacaaagagaagacacaccaccacgccaagcggacaaaacagggcgacgcaacagcacgaggccccgacaggcggcgc

SEQ ID NO: 208209 - RNA, 73 nt, Homo sapiens
aaaagaaacaagaaggagaacaaaagcaaagccccagacggacggaagagcccagcggcccaacacccaggac

SEQ ID NO: 208210 - RNA, 76 nt, Homo sapiens
aaacggagcacaggaacgaaaaccagcgaccacaagccgagcgccccccaaggggccaaggaaccgaacccaaacc

SEQ ID NO: 208211 - RNA, 57 nt, Homo sapiens
cacaacgaaagaaagcaaacaagaggagaacaaaaccagccaagcagaggagaaaaa

SEQ ID NO: 208212 - RNA, 90 nt, Homo sapiens
gagaggacccaggccaacaacccaagggagcgcacgacccacgcggaacggagcggagaaaaaaaggcaggaaagagaaagaagcgagga

SEQ ID NO: 208213 - RNA, 76 nt, Homo sapiens
gacacagaggagccacacccccagcacgcagaggggcgggcacgcacgacagcgggcagagcgcacaaacacgcac

SEQ ID NO: 208214 - RNA, 58 nt, Homo sapiens
gccagcgagcccgggcacccgcggaccagaacagaaacgggaggaggcacgagaccag

SEQ ID NO: 208215 - RNA, 62 nt, Homo sapiens
gacaaaccaacagaagggcaaccaggaccacaagagccaggccacacggagcaaaggacaac

SEQ ID NO: 208216 - RNA, 79 nt, Homo sapiens
cccaagggccgaggaggacaaaggccgagccaggccacccggcacaaccagggggcggggaagagacacagaagggagg

SEQ ID NO: 208217 - RNA, 72 nt, Homo sapiens
ccacccagcacaccccgcgaaaggaggaggcacagaagggcggcgaaggcgcgccacggagccacccaagcg

SEQ ID NO: 208218 - RNA, 82 nt, Homo sapiens
acaggcgcgacacagaaggacaaagaggccaggagacacgccaccgccggcggcccccggccaggccaccccccaggagaca

SEQ ID NO: 208219 - RNA, 34 nt, Homo sapiens
gccagcgaacgcagggcaaggagaccaaggaccg

SEQ ID NO: 208220 - RNA, 105 nt, Homo sapiens
caacaacaacccgaggaggagcggcagcaagcggggcgccacgcccgaccccgccccaggaccgagagagcgacggaaagaccgaccagaagagaagacgaaacc

SEQ ID NO: 208221 - RNA, 69 nt, Homo sapiens
cgagaaaccggacagcagaggaaacgagggacaacacagacccaccagcagacgaaaccaggcccaaaa

SEQ ID NO: 208222 - RNA, 78 nt, Homo sapiens
ccagcccccagaaaggaggacaacgggacccagaagaggggagcccacaccggaggagaggaaagcaccgccaagcgg

SEQ ID NO: 208223 - RNA, 37 nt, Homo sapiens
gacagcaagggacaacagaagagggacggggcaccag

SEQ ID NO: 208224 - RNA, 59 nt, Homo sapiens
ccgaggaggcccggggagcgaaggagcgcagcaccagccgggagaacccaacccaaagc

SEQ ID NO: 208225 - RNA, 80 nt, Homo sapiens
cgagaccaccggaggaagcggcgcgagcgccccgccacgcccgggcagagccagaaggagagccaagcgccagagaacag

SEQ ID NO: 208226 - RNA, 74 nt, Homo sapiens
gggcgcgccggcgccggaccccagcaaagaaccccggaaaaggagacagaagcgcaagaacccgacaagaagga

SEQ ID NO: 208227 - RNA, 85 nt, Homo sapiens
gccgagcgcggggaaccgacgaccggcgccaaacagaacacaggaggggcagcaagggaagaaagccgaaggagaaaacaccccg

SEQ ID NO: 208228 - RNA, 83 nt, Homo sapiens
aaaaagaaagaagaacaaaacgacaggagcacccaggaaggggcccagaagcagaaccaagagacccggagcagagcacagcc

SEQ ID NO: 208229 - RNA, 83 nt, Homo sapiens
agaaaaccgacaacccccagaaagccaagccggaacgccaagacacaaggaaaacaaggagaaacggaccgaaaaagccggga

SEQ ID NO: 208230 - RNA, 78 nt, Homo sapiens
cgccccgcccgaaaggaccccaacgcccgccgccgggaaaccacgccgggacgggggagaaggaaaggcagaccgaga

SEQ ID NO: 208231 - RNA, 78 nt, Homo sapiens
ggcggcgcgcgacccccgcgcaggccgaagaccccaagaagagagagaagaaccagacacgcgaagaaaaaaggaaca

SEQ ID NO: 208232 - RNA, 84 nt, Homo sapiens
cggcgccggcccggcggcgaggaaagcaggaggaggggcggcggcgggaagagaaaagaaaagccaaccaagaccccaaaacgg

SEQ ID NO: 208233 - RNA, 64 nt, Homo sapiens
gaacgagcccccagcagccacccggccgggaaccggggacccaggaaggggaaaaagagagaaa

SEQ ID NO: 208234 - RNA, 87 nt, Homo sapiens
gggaaacagcaaacagcaaccaacccagcgacggcgaggaacggcaaaccccggccggggagaagccaaaacagcgagcagggggca

SEQ ID NO: 208235 - RNA, 37 nt, Homo sapiens
cccaagggcgggaacagaggaagagaaacaccaagga

SEQ ID NO: 208236 - RNA, 72 nt, Homo sapiens
caagggggggcacaaaagcaacacggcgcaaaaaccagacaccccacaccaccacccagacgaccaaaaggg

SEQ ID NO: 208237 - RNA, 87 nt, Homo sapiens
gggcgaccgggcaccagcaggacccgaggccaggagccaggggcccagaagccgaacacaaccccagagccggcagcgggccccccg

SEQ ID NO: 208238 - RNA, 81 nt, Homo sapiens
agaccgcaaggccgcccgggaacgcgacgcgagagaaggacccacggcgcgcgaaggccgagacgcaccagagccggaccg

SEQ ID NO: 208239 - RNA, 74 nt, Homo sapiens
cagccccgagagcgggaacagaccaagggaacggaagccccagcccgcgcgagccaggcgcccacaggagaaca

SEQ ID NO: 208240 - RNA, 70 nt, Homo sapiens
gggcccgcccgccgccggaagcggggggaccgcacggcacccaccaaggcccggaggccccacaacaggg

SEQ ID NO: 208241 - RNA, 81 nt, Homo sapiens
gacaacagcagaaggagccagcagggacaaggaccagaagaaacgcaccggaaaggccaccaggaaaaagaccagaaggcc

SEQ ID NO: 208242 - RNA, 84 nt, Homo sapiens
gggagccgcaccaccaacgcggccgacaacagccggcgccgccacgccacaacacagcagcccccaggagagcaggaaaagccg

SEQ ID NO: 208243 - RNA, 74 nt, Homo sapiens
aaccccaggccgaaaacaaacagcggaaaaacacagaaaggcgaaagcagggaagagacgagacagaggcacgc

SEQ ID NO: 208244 - RNA, 64 nt, Homo sapiens
gagaaggccacacccaggcagcaagggcaccgcgagcaagacgaggagcgccaggaaagaggca

SEQ ID NO: 208245 - RNA, 81 nt, Homo sapiens
aagaaccagcacacccacggagcggggcacaaagcccccgggggaccgagcagggagacaaaacaccgaagcgacccacag

SEQ ID NO: 208246 - RNA, 83 nt, Homo sapiens
agaagccggcgggagagcgagcgccggaagaaccaagaagcgcgcaagacgcaacacaaacgagaaagacagcccgaacggag

SEQ ID NO: 208247 - RNA, 52 nt, Homo sapiens
gcacccgcccacgcggagaggggggcagaagaaggacacggaaacagagccc

SEQ ID NO: 208248 - RNA, 70 nt, Homo sapiens
aggggacccaggcgcccgcacgcgaggaaaagagggccggacagaggcagcagcccggcgaacaaaggca

SEQ ID NO: 208249 - RNA, 69 nt, Homo sapiens
ggcgcccacacacggcgagaaagcgaccagcggccagaggacccaaccgccaagacccggggagaccac

SEQ ID NO: 208250 - RNA, 56 nt, Homo sapiens
acggggccaccaggacaagcgggcagaacagcgcggcaggggaaaaaagcagcgga

SEQ ID NO: 208251 - RNA, 69 nt, Homo sapiens
cacaacggggaggcaccaggagaagagaaacacacagaggggggacaccgccgagcaggaagaaaaacg

SEQ ID NO: 208252 - RNA, 65 nt, Homo sapiens
ccagaaaagaacagggggggggcgggcaggccggccacagacaagaaggaacaccggcagcacac

SEQ ID NO: 208253 - RNA, 80 nt, Homo sapiens
gagaggaaaaacacaacccaagaaacgggaaggacgagacgagaccgggacggaagacggcaaagacgagaccgagaacg

SEQ ID NO: 208254 - RNA, 94 nt, Homo sapiens
ccaaccacaaaaaaggagaaaccgccaccagggacccgacaaaaccagggaaaacgaggcgccacaaaaaccagcccacacagcgcagaccggg

SEQ ID NO: 208255 - RNA, 75 nt, Homo sapiens
gcagcgagccggagagcgggccaccacgggacccaccgcccggcgccccagccgccccgacggagccaagaccga

SEQ ID NO: 208256 - RNA, 77 nt, Homo sapiens
gggccccaacacccagagacgaaagaaggagccgccgcgccaggcggaggcagcgacacgacggccacgcaaaccgc

SEQ ID NO: 208257 - RNA, 78 nt, Homo sapiens
ggaggagcgaccccaaagaccagacccaggccaaggaagcacgggaagaacagaaaagagaagcaccacggaaaccac

SEQ ID NO: 208258 - RNA, 86 nt, Homo sapiens
cggcaggcagggccgggccaccccggaaccaccggcccggacggcccagcgggcgcgccagagcggaaagggccaaaggcagaggc

SEQ ID NO: 208259 - RNA, 70 nt, Homo sapiens
ggaacacagggcaaagaaacggcaacagccggacccaacagaggcagacgagggaagaaaggaggaccag

SEQ ID NO: 208260 - RNA, 85 nt, Homo sapiens
cgcccacgcccagcagcagcagcaacagaagggagggcaagcagaaagcagaggaaaacgaacaacacccaaagccaaagaagaa

SEQ ID NO: 208261 - RNA, 70 nt, Homo sapiens
gggccgagagccgcccgggccagcggccgcgcacccccggccggaggcaccagcacagcacaaggggggg

SEQ ID NO: 208262 - RNA, 75 nt, Homo sapiens
gaccgcggcgggccacgcgcgacgccgcgcgaggggcgggaggaagacccagccccccaggacacaagcacaggg

SEQ ID NO: 208263 - RNA, 79 nt, Homo sapiens
ccaagaagcaagggacagaaggcagggagcacgcgggcaggcagcccagcaaacccaggcaagaacggagcaaaaaacg

SEQ ID NO: 208264 - RNA, 50 nt, Homo sapiens
gccccccccgccacgggggaaaaccagaaccgaaaacccagaccaaccag

SEQ ID NO: 208265 - RNA, 70 nt, Homo sapiens
cgagcaccccaacgggcaggagaaaacgaaggcaaagcgagcaagaaaaaggacccgacgggcggagcga

SEQ ID NO: 208266 - RNA, 65 nt, Homo sapiens
cggagcggcgagagcccccacggggacaagagaaaaaaagggcgggcgaacaaaaagagcagagg

SEQ ID NO: 208267 - RNA, 85 nt, Homo sapiens
acccggcaccccacagcccagggaaggcaccaaaagggggggcaggaaagcaaaagaggcggcaaggcagcccaggcaaagaaga

SEQ ID NO: 208268 - RNA, 81 nt, Homo sapiens
gacgaaccgaagcgggcgggcccccccacccagagcccagggcccacaacggcaggccacagcgggaaaggggagcccgaa

SEQ ID NO: 208269 - RNA, 84 nt, Homo sapiens
gcgcgcgcgccaggccccggaccgagcgcaaaggccacccagaggagaaggccaccccgccggaggcacaggccagaggggccc

SEQ ID NO: 208270 - RNA, 63 nt, Homo sapiens
cgggccacgcggaaaacacgagaaagacagcaaagaaaaggagaagaaaggaaaaaaacaacc

SEQ ID NO: 208271 - RNA, 70 nt, Homo sapiens
agagccccaaaggcaggcgagcgagaacagggcgaacacgagagcgaaagacaaagccagacagcggaag

SEQ ID NO: 208272 - RNA, 77 nt, Homo sapiens
agcaagaaccacccaggaggacggcccaagcacaaaacaagaccaagcacagaagaacgggccccaagaagacaaag

SEQ ID NO: 208273 - RNA, 73 nt, Homo sapiens
agaaaagaaagaacaagaaaaaaaagccaaaacgaagcaggccggaggcccacacagcccagaggagggggga

SEQ ID NO: 208274 - RNA, 34 nt, Homo sapiens
aggaaaaacacacccggcacagccacaccgagaa

SEQ ID NO: 208275 - RNA, 80 nt, Homo sapiens
gaccccaggcagcccaagggaccagaagccaggagaggcgccgggacgggcgcacgccacgcaagaccaacacgcacagc

SEQ ID NO: 208276 - RNA, 62 nt, Homo sapiens
agcagcaagcaaggccaaaacagcaaagcaccacaggggaaaacaagcagaaccggggacca

SEQ ID NO: 208277 - RNA, 54 nt, Homo sapiens
ggcagcagagcgcacagccagcaggcagacagccagccgcaagcggcaaacggg

SEQ ID NO: 208278 - RNA, 62 nt, Homo sapiens
gccagcggaaccacccaccgagggaccagagcaccaacgagggccaaagccaggggccaaaa

SEQ ID NO: 208279 - RNA, 37 nt, Homo sapiens
cccccacaggggagacagagaaaaggaaccacagaag

SEQ ID NO: 208280 - RNA, 93 nt, Homo sapiens
ggcccccagcccccaccgcgcgccaggacccgaggacagcaccgcgcaggagcggcggaccagggcggcgcaagaggagccaggagcacgggg

SEQ ID NO: 208281 - RNA, 75 nt, Homo sapiens
aaggagaacggggcgcaccagaggaaaagccaagagagagggacccaacaggaagagaggcccagaagaggagga

SEQ ID NO: 208282 - RNA, 69 nt, Homo sapiens
caccagaccgcgagggagcgcagagaggcccgaagaccccagacccacgaccgcccgcgcaggagacgc

SEQ ID NO: 208283 - RNA, 69 nt, Homo sapiens
cgcaagccggcacacagggagcacccggccgcaagcccggccggagcagccggaagacagcacaagaag

SEQ ID NO: 208284 - RNA, 47 nt, Homo sapiens
accagacaacgccagaagaacaaaaccgcaggccaccaggcaggcca

SEQ ID NO: 208285 - RNA, 79 nt, Homo sapiens
gcccagcgcgagacccaaaagcaccgcagacaccgggaagagggccggagccgcaccaggccacggcgcgcccggcccc

SEQ ID NO: 208286 - RNA, 76 nt, Homo sapiens
agccgaaaagacgcagaagcgggcaaagaccgaagaaacccccgcgaagccaaaacagaagaggcaaagcccagcc

SEQ ID NO: 208287 - RNA, 73 nt, Homo sapiens
cagcggggagcacggcgagcagccaggccaggagaggagggccagacaaggggaacacaagaggagagaaggg

SEQ ID NO: 208288 - RNA, 69 nt, Homo sapiens
cgaaggccgcagacgacccgagggagcgaacggaggcccgacaagagaggcggagccacccccacaacg

SEQ ID NO: 208289 - RNA, 80 nt, Homo sapiens
ggcggcggcggcggccagagagcagcagccgccggccgcccgcccccagccacacgagaaccacacgcagaacaagcagc

SEQ ID NO: 208290 - RNA, 66 nt, Homo sapiens
gaagcggccagagagaacagcgcagggcacggaaggggcccagcacagggcgggggcggagggcaa

SEQ ID NO: 208291 - RNA, 86 nt, Homo sapiens
cacagaaccgaaaaagagcgggcgacaagcaggaggacagaagacaggagggcaagaccggccaagcacagggagggggccgagcg

SEQ ID NO: 208292 - RNA, 71 nt, Homo sapiens
caccaggaggcagccaaagaagacccagaggacacaaccaaggaaagagaaaggagaccacaagaccccgc

SEQ ID NO: 208293 - RNA, 83 nt, Homo sapiens
caggccaaggaggccacaacgggagcaggcgccagacgagcacggaagcacaagcagaaggagaacagacagcacgggggagg

SEQ ID NO: 208294 - RNA, 78 nt, Homo sapiens
ggccagcaacaccgccgcagcaagaggcggcacagagccgaaaacagccaacaaacacggaccaagaacccaccacag

SEQ ID NO: 208295 - RNA, 92 nt, Homo sapiens
agagccagcaaaccccgaagagccgccccagggaacgcgcaacacaaaggaccgcaacaagggaaaacaggcaacgggaagccgcgggggag

SEQ ID NO: 208296 - RNA, 90 nt, Homo sapiens
ggcgaaagaaacaaggggccagggcagagggcaccgagcggcggagagccgggagaaacacaaagagaccgagcaccagccggcgccagc

SEQ ID NO: 208297 - RNA, 78 nt, Homo sapiens
gaaagaaccggcaagcacaaccagcagaaagaccagccgaaccggggcagcgcgcaaggaggagcagcgagagcggcc

SEQ ID NO: 208298 - RNA, 79 nt, Homo sapiens
cgagagaccacgggacgcgacgcgccccgcccccccgccggcccccccacggaaggggacaaggagaggaggagacccg

SEQ ID NO: 208299 - RNA, 70 nt, Homo sapiens
gaacaaagggaggagagagaacacagaaaccgacccgccagggaccaaaaagagcccacagcccaaaaac

SEQ ID NO: 208300 - RNA, 72 nt, Homo sapiens
ggcaaccagacgggccaagaaccccgaacaggcccaagggccggcagagagacaaccccaggcgcacggagc

SEQ ID NO: 208301 - RNA, 87 nt, Homo sapiens
aaagaagcacagaagcaaaagcgcagcaaagcgggaagacaaaaaacgcacaaggcagagaagagagcagcaccagcagaagagggc

SEQ ID NO: 208302 - RNA, 77 nt, Homo sapiens
aggacgaacccgggcagccgcccggccagcaccagaacggcagcaagaggacagccagcagacaggcagcagagaag

SEQ ID NO: 208303 - RNA, 74 nt, Homo sapiens
gaccccacccccacccgagcagccagagcggaccggggcagaccaaacggcaaggaagcgcaggggcagcacgc

SEQ ID NO: 208304 - RNA, 62 nt, Homo sapiens
gacacccaagccgcacagacaacggcaagcggagaagagcaaggccgaaccgagaggaaggg

SEQ ID NO: 208305 - RNA, 73 nt, Homo sapiens
cacggccacacgcccagcgagcgccccacacaggggagagaggcacggcccccgggacggccgccggagcaga

SEQ ID NO: 208306 - RNA, 75 nt, Homo sapiens
gaacagaggagaaagaagcccagcccaccggagacacaggaacaaacgagcacgcaaccagcgcaggcaggcgag

SEQ ID NO: 208307 - RNA, 65 nt, Homo sapiens
gcacccagggggcagccgcccacggccaccacggcgcgaggacgccacgacaccagcacgggagg

SEQ ID NO: 208308 - RNA, 77 nt, Homo sapiens
cgagccgcccgcccgccgagcagccagagggagcagagcaagagaaaagaacaagaagaaagcagacgaggacacac

SEQ ID NO: 208309 - RNA, 75 nt, Homo sapiens
cgcgcaggcacccagcagagacagcaaccggccacgaggaggggccaggccacacaagccccagccaaaaccagg

SEQ ID NO: 208310 - RNA, 65 nt, Homo sapiens
caccgccaacaacgagaacgcaacaccgacaacagggaagaaacagagcacaaaggcaagcagag

SEQ ID NO: 208311 - RNA, 59 nt, Homo sapiens
ccccgagagcaggacacagagaaggagggggcagagcacggcaggcagaaggggccaac

SEQ ID NO: 208312 - RNA, 99 nt, Homo sapiens
cgcagccccgggagacaccaccgaagcacgaacacagccaagagaacagccgcgaggcgcagccaagggccccccgccgcaccaaaccgggccgaagga

SEQ ID NO: 208313 - RNA, 83 nt, Homo sapiens
gacccaagacgggcgaacagaggggaaagacagagaagcgaagacagagacgggaaagacagggagagagacacggagagaga

SEQ ID NO: 208314 - RNA, 75 nt, Homo sapiens
gaaaccacgacccacagaaagccaaggacagggccaaaggagacaagcagaacaccggagcagaccggaaaccag

SEQ ID NO: 208315 - RNA, 77 nt, Homo sapiens
ccccgccggaccccacagcaacaaggcagcaacaacccaaaagaagaaagagggaagagccaagcccaagacaacgg

SEQ ID NO: 208316 - RNA, 76 nt, Homo sapiens
gggacacaggcgccccgcagaccagggagcgacgaaggcccagccgcgcccggagaaggcgaaaggggaaaacgac

SEQ ID NO: 208317 - RNA, 60 nt, Homo sapiens
cagcgggaacaagaccagcgggagcagagacaggaagcgccaagacggaacacaagaaaa

SEQ ID NO: 208318 - RNA, 75 nt, Homo sapiens
agcggcagaaaagcggagaagcgagaaggggagccacacccggagggcgaccagcacggccccaccgcaaaccac

SEQ ID NO: 208319 - RNA, 82 nt, Homo sapiens
agcggcgcagagggcaccagcggcgcaggaccaccaagggacccgaggccggagcaggccggcgcggaagaggccggcggcg

SEQ ID NO: 208320 - RNA, 75 nt, Homo sapiens
ggaaacaggagaacaggaaagaaggaacgaggcccaaaagggggccggccgcgacaggggcccgccaagaggcac

SEQ ID NO: 208321 - RNA, 60 nt, Homo sapiens
aggccccagcggaccgaacaggcacagccacagccgcaagccaagagcagcagaaaagaa

SEQ ID NO: 208322 - RNA, 73 nt, Homo sapiens
gcgaagaagaaggcgagagcgcagacaccggaaagagaggcacaaggccgaaagagagcggacaacaaaagaa

SEQ ID NO: 208323 - RNA, 67 nt, Homo sapiens
gcgcccggggccggcggccaggggcgcgaccccccgggagagaaggcgcgcaggagagcgcagagac

SEQ ID NO: 208324 - RNA, 70 nt, Homo sapiens
acagggaacaaaaccaacaccaagaggaacccaacggaagaaacaaaacagcccaccgcgcagcaaagaa

SEQ ID NO: 208325 - RNA, 80 nt, Homo sapiens
caacgggggaaaaagacgcaggaaggggaggaccgcacacagcagcacagaacacacgagacgaacaagcagcaacagag

SEQ ID NO: 208326 - RNA, 37 nt, Homo sapiens
gagaacacaaggcaccaaaagcaccgagaggaggaac

SEQ ID NO: 208327 - RNA, 51 nt, Homo sapiens
ggaacgggcgaaagagcaaaacgagggggcagcgccgccagcgcccgggcc

SEQ ID NO: 208328 - RNA, 48 nt, Homo sapiens
cgcgagcacccggaagcaccaggggccagccccaccccaaccaagaca

SEQ ID NO: 208329 - RNA, 70 nt, Homo sapiens
ccggaccaagaccggcaccgaggaccgaacagacacgcgccccaagagagagacagagaggaccaacccc

SEQ ID NO: 208330 - RNA, 66 nt, Homo sapiens
agcgaaaacagcaagcgagcgaaaggaagcagacaagcgacaagcaaggcagcaagccgcggggcc

SEQ ID NO: 208331 - RNA, 85 nt, Homo sapiens
aagcgaaggcaaaaccaaacaccccagcccacagagagcaaaacacaagagagcagggaggagcccgaagaggaaggagaaggaa

SEQ ID NO: 208332 - RNA, 68 nt, Homo sapiens
gaccagaggaccagaaaggagacccagaaccggcggccaaggccgaccaaagacacgacagacacaga

SEQ ID NO: 208333 - RNA, 74 nt, Homo sapiens
acaaaagcgcacaggaagaacaaagggcacaccaccgaacccaccccagccacaccaccacaagcgggccgcca

SEQ ID NO: 208334 - RNA, 64 nt, Homo sapiens
cccagggggaccagggaaccaggccccgggaaaaaaggcacaccgggccgagcggcgccacacc

SEQ ID NO: 208335 - RNA, 74 nt, Homo sapiens
gcaagccggaggagaagcaagaaggcccggacacagcaaaccgggccacagaggagcggccgggcagaagagag

SEQ ID NO: 208336 - RNA, 73 nt, Homo sapiens
caaagaaagcagcgacaacccaggagccagaaaaaccgggagaagcggacagcaagaagcacccaagggccac

SEQ ID NO: 208337 - RNA, 71 nt, Homo sapiens
agaggggcacagaaaaacgaagaagagagaaaggagagacaaaagcggggagcgagggcagcaaggaagac

SEQ ID NO: 208338 - RNA, 72 nt, Homo sapiens
cgggaaaggccgcgggggcaacggagaaaacccggaaccgcgacggcggcaggcccacccccaacgcgcagg

SEQ ID NO: 208339 - RNA, 80 nt, Homo sapiens
cagccagccagcagccgggcaccggcagcacaagccaggcgccgcgccgggggccaccagcagaacgcagaaccagggac

SEQ ID NO: 208340 - RNA, 81 nt, Homo sapiens
gcagaggaggcagggccccagggaaggccaggcccaaggaaccacaagcagcaaggcgccaagacgagagcccaaacacag

SEQ ID NO: 208341 - RNA, 64 nt, Homo sapiens
ggagacccagacggaagagaggacacagaagagagaaagccgaagacaggagcgaggggcgacg

SEQ ID NO: 208342 - RNA, 65 nt, Homo sapiens
cgacgggacgcaggagacagacgacgaagaccgcaggaaagcaggaaggcaagaaagccaaggac

SEQ ID NO: 208343 - RNA, 61 nt, Homo sapiens
cgaaaagcagcaacgagaagaagccaccaaggagcaggaaaacggcccaacgccccacacg

SEQ ID NO: 208344 - RNA, 84 nt, Homo sapiens
cccccggaccgagccgacgccgcggggcagcgggccggcgccggcgcggaaaaccaacggcccggaggaccacagcccaggggc

SEQ ID NO: 208345 - RNA, 73 nt, Homo sapiens
agccggaaagggagcccgacgacgggagaagcggagcaggcacgagcgcggcgcgagagaacccaccgcaaga

SEQ ID NO: 208346 - RNA, 82 nt, Homo sapiens
ggccacccgagaagggagacgacgcgcgggccgcgagcggggcgacccgagcccaggaccgggggccgggcgaggaggccgg

SEQ ID NO: 208347 - RNA, 76 nt, Homo sapiens
gaaggacccacggcgcgcgaagccgcagaacaaagccgccgagaggaccgcccggaagcgcggcagagcaccgaga

SEQ ID NO: 208348 - RNA, 41 nt, Homo sapiens
cgagggcacagccaagaaagcacaaaagaccccacagcgag

SEQ ID NO: 208349 - RNA, 67 nt, Homo sapiens
acaccaaaaagcaaacggaccagaccgaccaccaaaacccgccgacacagccaccaagaaggcacaa

SEQ ID NO: 208350 - RNA, 89 nt, Homo sapiens
aaacccgagcaagcagccacccacccggccccaaggcgggaacaagggaaccacagcacccagccgaaccgcggggagcccccaccccc

SEQ ID NO: 208351 - RNA, 68 nt, Homo sapiens
gcgaaggcagccacagcgcccagagaggaggggaccagcgcgcagggggacaaaggcccagaggacaa

SEQ ID NO: 208352 - RNA, 65 nt, Homo sapiens
gaaaaccacaagcaggccaaagagagaggccccccggcacgcccacagcgggacccgacagccgg

SEQ ID NO: 208353 - RNA, 57 nt, Homo sapiens
cggacagcaggaccgccccagggaagggggaaagagaagccaagcacacagagcagc

SEQ ID NO: 208354 - RNA, 81 nt, Homo sapiens
agcaacaaaacgaaaaacacaaccccagggaaagaccacagcaagaccacgcccccagccgggggaccaggccgaacgacc

SEQ ID NO: 208355 - RNA, 72 nt, Homo sapiens
gacagaagaggcgccaggacgaaggcccacgggcaaggcgagccccaacagaccgggaggaacggggggcgg

SEQ ID NO: 208356 - RNA, 73 nt, Homo sapiens
ggcgggcgccagcacaacagcggaggcccaggcaaccaacccaggagaaggaagacgcgcaagagcggagaga

SEQ ID NO: 208357 - RNA, 50 nt, Homo sapiens
gggcgaggaggcccacccagccgccaagacgcaccaaggcccaggaacca

SEQ ID NO: 208358 - RNA, 81 nt, Homo sapiens
gaccgagagcgcgaaacgcacgagaaggagagagagaggaggcgccagcaaaccccaaacaccaccccccgagaaccacag

SEQ ID NO: 208359 - RNA, 83 nt, Homo sapiens
cggagaaggcgcggccgggccagccgagaaggaggcccggccccggacaggaggaggacccagggacgccccggaggacgagg

SEQ ID NO: 208360 - RNA, 79 nt, Homo sapiens
ccgggcaaggagcaaagaaggacacagcacacacacgccagccccgagagcgcagacaggggggccaagccagagccag

SEQ ID NO: 208361 - RNA, 81 nt, Homo sapiens
ccggaggcccggccacccgagaagggagacgacgcgcgggccgcgagcggggcgacccgagggacgaaaacccgaggcacc

SEQ ID NO: 208362 - RNA, 73 nt, Homo sapiens
ccggaaggccaagaaaacaggaacgaggaggagggacagccaagagcaaacaccagaacacgggacacggagg

SEQ ID NO: 208363 - RNA, 70 nt, Homo sapiens
aaaaagcgcccgagacgggcccgccgaaagcccacaaacagccacacagaaaagaaagaagacaggcgaa

SEQ ID NO: 208364 - RNA, 76 nt, Homo sapiens
gcgagaggaccaacggagcgcgaggcgggcgcggagaagcgcggagcgccaaggggccaagggagagcggggcccc

SEQ ID NO: 208365 - RNA, 71 nt, Homo sapiens
accgcaacaggagcagacggagaaagagaccacgagcccgaacagagccgaaagaagcagaggaagaagcc

SEQ ID NO: 208366 - RNA, 80 nt, Homo sapiens
gcagaagcaaaaagaagcgagacaaaggaacgacggaaaaggcgcagcccagcccgaaagcagaacgacgccggcgagcg

SEQ ID NO: 208367 - RNA, 77 nt, Homo sapiens
gcaccccgcgcgaccggccgccgagcggaaagaccacagcaagaccacgcccccagccgggggaccaggccgaacga

SEQ ID NO: 208368 - RNA, 85 nt, Homo sapiens
cggcgcagaccaggcccgggccaccacccaccaagcaagaagccaccgcagagcaagagaacaaacggagaaaagaaagaaaggg

SEQ ID NO: 208369 - RNA, 61 nt, Homo sapiens
ccgggaggcagcagagggaagcggacggccggcccgggccagggcccagaaagccaagacc

SEQ ID NO: 208370 - RNA, 78 nt, Homo sapiens
ggccacccagcggggagcacggcgagcagccaggccaggagagcgagagccgcggcagcccaagcgaacaccgaaggg

SEQ ID NO: 208371 - RNA, 76 nt, Homo sapiens
agggccccgggcccggcccggagaagccacagccgcaaagacaggaggaggggcccggacacacgagcaggaaaac

SEQ ID NO: 208372 - RNA, 70 nt, Homo sapiens
ccccgagggcgggacacagggcacagaaccaccgaccagaaggaacagggacgggggcagggacaaggga

SEQ ID NO: 208373 - RNA, 67 nt, Homo sapiens
acacaaaagaaagcgacaaggaacaagcgggaccagcaggccgcccagcgcaggccaaaccaacaaa

SEQ ID NO: 208374 - RNA, 36 nt, Homo sapiens
gccggcgagggacgccgcagaaagagcgaggccgga

SEQ ID NO: 208375 - RNA, 80 nt, Homo sapiens
aggccgccacaaccgccagacaaccggagccacgccccacgaccgccaggaaacccgaacccagcggagagccaaaggga

SEQ ID NO: 208376 - RNA, 37 nt, Homo sapiens
ggacagccggaacaaagaaccacaaagccgcccacac

SEQ ID NO: 208377 - RNA, 69 nt, Homo sapiens
aacagagcagcaagcgccaaaaaggcgcgggaagcaagagagccgaccccgggggaagagccaccagaa

SEQ ID NO: 208378 - RNA, 75 nt, Homo sapiens
cagaaggcgaggccgagggggggggaagacaacccggagaacacccaggggacgcccagaccaaacaacaaacag

SEQ ID NO: 208379 - RNA, 69 nt, Homo sapiens
agggacaccgcgacccacaccaagaggcgccagcggaaaccacgccaagaaggcgaggcccagaagcac

SEQ ID NO: 208380 - RNA, 79 nt, Homo sapiens
agagcagcgacaaacgcgagccgccaagcaacagccacggaagaaagcaggggggcccacgcggaggacgcagaacacg

SEQ ID NO: 208381 - RNA, 70 nt, Homo sapiens
caaaaaacagccaccgagcagccgagcgcgagaccacaggcaaagacacggcagggggcacaaaccacgg

SEQ ID NO: 208382 - RNA, 78 nt, Homo sapiens
gacaccaaaaaccaggccgccaccgcggcaaaaagaggccccaggaccggcgaggccccccccccagcagcaaaggga

SEQ ID NO: 208383 - RNA, 82 nt, Homo sapiens
gaagcaccacagccaccacaccaagacaccaggggagaccgaggcgggggaagagaagcgaaggagaacgaaggagcgggaa

SEQ ID NO: 208384 - RNA, 76 nt, Homo sapiens
gaccccagaagaggagagagagcaagagaggaagaagaacgacccgcccggggcagcagaggaaccaaccagaggc

SEQ ID NO: 208385 - RNA, 85 nt, Homo sapiens
ggcccccaggcccgcgggaagggcaaaccaggagaaaggggccgcggagagcggggcccaggcccgcagggcccagaggagcgcg

SEQ ID NO: 208386 - RNA, 82 nt, Homo sapiens
gaacccgagaagcaggaccaacagcacgaacagcagcaggagcaagagaagcggagcgagagaggcacgcgcgcggcgccac

SEQ ID NO: 208387 - RNA, 65 nt, Homo sapiens
acacccaggggagaacagacaaaccccacaagcacgcaacggagcggacagggggaagaggcaga

SEQ ID NO: 208388 - RNA, 70 nt, Homo sapiens
cgagaagccagcaccacaggggccagaaacgaacaagacggaccaaggagaaaaccgagaacaggggggg

SEQ ID NO: 208389 - RNA, 73 nt, Homo sapiens
gcaagggggccgaagcaaccagagagcggagggcgaaacacagaaaaccgcaacgaaaacagcccgaaccaca

SEQ ID NO: 208390 - RNA, 54 nt, Homo sapiens
ggcggagcccgcagaccgcagaaggccggagacaccagcagaccggggagaaaa

SEQ ID NO: 208391 - RNA, 68 nt, Homo sapiens
agcagccaacagcagaaggcaagaggacccaaaaaggaagaacagacgcagaaaaagaaaaagacaca

SEQ ID NO: 208392 - RNA, 62 nt, Homo sapiens
gaaaggaagagcgccacagcccagaaaggggccaccagagaagcgagccgggaagagggccc

SEQ ID NO: 208393 - RNA, 72 nt, Homo sapiens
aaacggagccgaagccagcagaaagaagccgccagcaccgggaagaagcagggagcagaaagcgagaaaaga

SEQ ID NO: 208394 - RNA, 83 nt, Homo sapiens
gcagaaggccgggccccaaccggacacacagggcagcgaaacggcgaggaaagagaggagccccggaaagaaaaggacagacc

SEQ ID NO: 208395 - RNA, 59 nt, Homo sapiens
cccgcaagggggcacacacaggaggaaagcggacagaagaagccaaaacgccaagaaac

SEQ ID NO: 208396 - RNA, 74 nt, Homo sapiens
ccgagagccgcccgggccagcggccgcgcacccccggccggaggcaccagcgggacgcggacgcaacagggaaa

SEQ ID NO: 208397 - RNA, 77 nt, Homo sapiens
cgcgccgaccgcgccaggacagacgcacagacaccgcagggaagacagccgccaccaggcgcccccccagcaaccac

SEQ ID NO: 208398 - RNA, 81 nt, Homo sapiens
cgaagcccaccggccccaacgcacagccagggagccaagcgccgcccggccgaaacagcaaacgacacagaagaacagagc

SEQ ID NO: 208399 - RNA, 86 nt, Homo sapiens
cgagaccagcccgccaacaggagcgcagaggcggagacagaggggccaacccgcgagcgcggaaggacaccgggaccggggaaggc

SEQ ID NO: 208400 - RNA, 78 nt, Homo sapiens
gccggagccgcggcggcggagcggggagaaagcccgaacgcgggaagaacgaagaaggacaaaaaggagaggcgacgg

SEQ ID NO: 208401 - RNA, 84 nt, Homo sapiens
cacggagccggcacacccaccaggcggcgccaggccccccggacagaccacccagcccgacagggaccgcgaggaccagccgcg

SEQ ID NO: 208402 - RNA, 79 nt, Homo sapiens
cggggccggcccgcaaggcgcccccccagagagccagaaagaaggggcacccgaggaggaagagggcagggcccacgga

SEQ ID NO: 208403 - RNA, 76 nt, Homo sapiens
ggacccccccaccgcgggaggagacccagcggcgccgcggagggaccccaggacaccacgccaccagcggagggag

SEQ ID NO: 208404 - RNA, 57 nt, Homo sapiens
cacgaagaccgggcgccagggccgccgccccgcccggggggggcggaggggccgaag

SEQ ID NO: 208405 - RNA, 79 nt, Homo sapiens
ccaggcgaagaagcgcagccgcaccggccaaggacgcaaacagcagacggaagaccccacggcaaaaccacacccgagg

SEQ ID NO: 208406 - RNA, 55 nt, Homo sapiens
caaggacacaaggaaagacacagagcgagcccagccccgcggaaccaaggccccc

SEQ ID NO: 208407 - RNA, 66 nt, Homo sapiens
gggagggacccgcgccggaacagggaaggaaaagcaacaggggaaggcagccggcacccgcacaac

SEQ ID NO: 208408 - RNA, 79 nt, Homo sapiens
acacccccaccggccaggcgagaaaggcaggaaggccaaccgcgacgggccccaaacggaaccgaggcccggcccggac

SEQ ID NO: 208409 - RNA, 75 nt, Homo sapiens
aagggcgaggcacaccagcaggaggcgccagaaagaacaacccgaacgcaaaagaaggaaaagcagaacagccgc

SEQ ID NO: 208410 - RNA, 67 nt, Homo sapiens
aacgcgcgcccccgaaggcggccaacggccaggacgcccccgggccaaacggcagcaaaaacagaca

SEQ ID NO: 208411 - RNA, 67 nt, Homo sapiens
cgggaagcgaccgcaggcgggcccccgaccggaaaaacgaagagccgaagaacaccagccccagaag

SEQ ID NO: 208412 - RNA, 80 nt, Homo sapiens
cagaacagcagaaaaagcggccgcagggccagaagaaacaggccaagaagcgagagaagaaaaacagaaaaagccaagac

SEQ ID NO: 208413 - RNA, 75 nt, Homo sapiens
acgaaccaggacggcaagaccggaaggaaacacaaaagagccaaaagaccaaaccaggcacaagcccccgaacac

SEQ ID NO: 208414 - RNA, 70 nt, Homo sapiens
gcaaccgaccccgggccaagcggccacacccagccccccagagcgaccacaggagaaagcccgaacgcgg

SEQ ID NO: 208415 - RNA, 76 nt, Homo sapiens
gggacacaagcgagcagcccgggagggaacacaagaaccggagaggaggaagaaaggagcagagaggcgcccaagc

SEQ ID NO: 208416 - RNA, 75 nt, Homo sapiens
gacgaaagaaaaccccgagggaaacaagaaaacacaaagaggcagcaaagaagggaagaacccaagaggacagcg

SEQ ID NO: 208417 - RNA, 72 nt, Homo sapiens
ccccagaagaggaccgcggaaaagcaaggcaaaccagggggccacacagagcgcagagggaaagacggcaga

SEQ ID NO: 208418 - RNA, 76 nt, Homo sapiens
accgaagccacggccaagcccgacccagccgccggacaacaaagagccgggggggcgagcccgccgagagcgccaa

SEQ ID NO: 208419 - RNA, 70 nt, Homo sapiens
cacaaacggaaggaccagacggcggagaacggaaaagcaccaggaagcagagaggaccgcagaagggaag

SEQ ID NO: 208420 - RNA, 90 nt, Homo sapiens
gccgggcccggccacagccgcagcggagcccacgagaggcagcgccaggcggagcagaccaccggcaggaggcaaagggaccccaagaaa

SEQ ID NO: 208421 - RNA, 82 nt, Homo sapiens
ccggcacagaaaccccgccgcccacgcagaacagaaccgggcccggagcccgaccagagcggcccagccagggccgcaccca

SEQ ID NO: 208422 - RNA, 70 nt, Homo sapiens
gaggagcaggcggagcacccaccacggagggaaagaccaggcagcgacgaagacacgcaagcgacacggg

SEQ ID NO: 208423 - RNA, 77 nt, Homo sapiens
gagcaacaccaccggacccgggcaaggacacagacaaggcgaccagccagcccgggagacagagggagccagcagac

SEQ ID NO: 208424 - RNA, 87 nt, Homo sapiens
aggccaggagcggcggggccgcaccgagaaggagcaggggaaagagagacgaagagaccgcagaagcgaaaaggagggaaagaaagg

SEQ ID NO: 208425 - RNA, 77 nt, Homo sapiens
cacccaccaaacagaacgaggaaccgcccccacgaaggccccagagaaagcccagcccaaaagaagggagcgacggc

SEQ ID NO: 208426 - RNA, 64 nt, Homo sapiens
aaaaaaaaacacgggcggacggaacgcacaccaaagcaagagccggagggcgggaaacgcaaca

SEQ ID NO: 208427 - RNA, 91 nt, Homo sapiens
gagggagcaagagggcggaggccacgaacacgccggagccgccagaaggagcgacgaaaggaagaagccaggggcgcggggcggggaggcg

SEQ ID NO: 208428 - RNA, 76 nt, Homo sapiens
ccgcaaagacaggaggaggggcccggggcacggcggaccccgggacgagagaccggccgggcagcgccggcacaga

SEQ ID NO: 208429 - RNA, 55 nt, Homo sapiens
agcccaccacccgaagacgaagcgccacgcagagccccgccaggaagacacgccg

SEQ ID NO: 208430 - RNA, 78 nt, Homo sapiens
gaggccccaggcagagagacaggggacccagaaagaagcacaaaacaaacgacagcagcagagaaacacgcaaagccg

SEQ ID NO: 208431 - RNA, 80 nt, Homo sapiens
acaccagaagacgacagcaaccaggaccaagcccaccaagggacgccagcacccaaccgccacagcagaagaaaccggaa

SEQ ID NO: 208432 - RNA, 59 nt, Homo sapiens
gaggaagagcgaggaggaacgcgcaaggcaaagcaccgggggccgagacaacaagaagg

SEQ ID NO: 208433 - RNA, 68 nt, Homo sapiens
gcagcccccgggcacgaccccggacacgggcaggcagggcccagccccggaaggcaggaaggggacgg

SEQ ID NO: 208434 - RNA, 56 nt, Homo sapiens
ccccgggagcccagccaccacagacaggaagcccggggcggcgacggagcacgacc

SEQ ID NO: 208435 - RNA, 75 nt, Homo sapiens
ggaccgagcccggaccagccaaaaacggagaaaacagccaacgcccggaaccgcaaagcgacggaccagaggaag

SEQ ID NO: 208436 - RNA, 93 nt, Homo sapiens
aacccggaccccaggaaaccagaagagagagaacgaaccccaggacggcccgaaggcaacccgaaaccaagccgcccggaacccacggaggag

SEQ ID NO: 208437 - RNA, 73 nt, Homo sapiens
gccggaggcggccgcaccggggcggagaacggaaaagcaccaggaagcagagaggaccgcagaagggaaggag

SEQ ID NO: 208438 - RNA, 75 nt, Homo sapiens
gcgcggacgagccgccggcccgccggggccggggcggaagagaccgagaccaggaaccaggcaggggaacggagc

SEQ ID NO: 208439 - RNA, 76 nt, Homo sapiens
gccagggcagcaccgggcagcgagacgaaaaacgggaggcgcaggcggaaggccggaccggcaggaggaaagccgc

SEQ ID NO: 208440 - RNA, 49 nt, Homo sapiens
caagcggcgacacacgacggcgaaggcacccgcgccccagagccacgaa

SEQ ID NO: 208441 - RNA, 72 nt, Homo sapiens
ggccagccgcaacgggacccacgaaggacagaggcggggcaaccgaggagcagcaaaggaccaggaagggga

SEQ ID NO: 208442 - RNA, 85 nt, Homo sapiens
gaaccgggacccgggcgcccgcgcccgccccaacccagccacagggcggaaaacaccccaaaagccaaaagggaaaggaaaagac

SEQ ID NO: 208443 - RNA, 72 nt, Homo sapiens
caagaaacgggggaagcagagcgcacaaagggaaagggaccacaagaaccaaagcaacgagagacaaaacag

SEQ ID NO: 208444 - RNA, 84 nt, Homo sapiens
gaggaggaccggggagaaagaacaggccgcgagaaccaaacccaaggcaccagaaagccacggccaacagaaggacccagcgag

SEQ ID NO: 208445 - RNA, 108 nt, Homo sapiens
ccacaagaagaagagccgcccccaccagacgaggccaccagccagggaacgcaaaagcagaccggaaaacccaccggcaagaccacacccgaggggagcccaggacac

SEQ ID NO: 208446 - RNA, 79 nt, Homo sapiens
cagcccagcaagaagcccacgaaggagccccgggcagcagcacaccgcccagaaaaagcggaggcgggcgggccccagg

SEQ ID NO: 208447 - RNA, 69 nt, Homo sapiens
cagaccgccccgaagccccacgccaaccaaggccagcgccagaacccgggccgcccccaacacagggcc

SEQ ID NO: 208448 - RNA, 85 nt, Homo sapiens
cccggagcccccggcggcgccaccagaccgggagccggccccggccccggagcagacacagcccaccggccgagccccaccggcc

SEQ ID NO: 208449 - RNA, 84 nt, Homo sapiens
gagcgaggaggaggcggagcggggcccgacggcaaaagcagaccggaaaacccaccggcaagaccacacccgaggggagcccag

SEQ ID NO: 208450 - RNA, 73 nt, Homo sapiens
aaaagaaaagacaccgcacgaaaggggcacgcccacggaagccccccaaagcgagggacacaagaccccacga

SEQ ID NO: 208451 - RNA, 82 nt, Homo sapiens
accagaggccggggacaaggcgaccaggccgcgggaagcgcggacgccccaccaacggcgcggacccgaccgcggaacccgc

SEQ ID NO: 208452 - RNA, 80 nt, Homo sapiens
gcgaggaggaaaggaggacgagacccccccagcgcccgccccagcacccgaagacgccgacaacgcagagcaggccgagg

SEQ ID NO: 208453 - RNA, 52 nt, Homo sapiens
ggcagggacagcgcaggcagcaggacaccccccaggcacagccacaccccag

SEQ ID NO: 208454 - RNA, 72 nt, Homo sapiens
gaccaaagagcgaagcgcagaagcccgaagaaaacagcgggaagagacagccaagcggcccgagaaaccccg

SEQ ID NO: 208455 - RNA, 74 nt, Homo sapiens
aaggacccccacaacgagcgcccggagggcacacagagaaaaaaagggaacaaaacacagcaagcagacaaaag

SEQ ID NO: 208456 - RNA, 84 nt, Homo sapiens
ggaaaagaacagagaggaaagaccggggaagaggaggcgaggaggcggagggcgagaagcacccagagcacacgcaagcaggcg

SEQ ID NO: 208457 - RNA, 73 nt, Homo sapiens
ggcacacacaagaccgcacgacaggcacaggcgcacacaagagagaccagcccccaccaaagaggacccgaag

SEQ ID NO: 208458 - RNA, 65 nt, Homo sapiens
aaaaaaaggagacaccagagagccggccaagacacccacccaaggggccgcaaggccaggcgcgc

SEQ ID NO: 208459 - RNA, 78 nt, Homo sapiens
cccggcacgacaccgccccaacccacgagaggacagcccaggcacgcacaaaaccagaacgaccacaggaacaaggag

SEQ ID NO: 208460 - RNA, 74 nt, Homo sapiens
ccccgccgcgcaaaaaccgaggaaggagagggaccggaccaggccagaaaggaggcccacagccgaccgagcgg

SEQ ID NO: 208461 - RNA, 108 nt, Homo sapiens
ggcagcggaggacgggaccgggaaccacgggggccgcggccggaccgagcgcccgacccggcgagcccagagcaggggaccccaccggcgccggcaggcgcccacagg

SEQ ID NO: 208462 - RNA, 75 nt, Homo sapiens
ggccagaccgaagcgggaagacgcaaagccaacaagagaccacggggggcaagccgagcggcaacgaaacaggag

SEQ ID NO: 208463 - RNA, 70 nt, Homo sapiens
ggcagggaagggaacgcacggcagacaagaaagccaaacgaggagaggaaggaccagaggagacaacaaa

SEQ ID NO: 208464 - RNA, 51 nt, Homo sapiens
caagaagcacgaccacagaacggggcacccggacccagaggcgagccgggg

SEQ ID NO: 208465 - RNA, 68 nt, Homo sapiens
gaaccggcgcgcccgaaggcggggcacgccaacgcaccaccacgggaaaaacacacgccacacgcgac

SEQ ID NO: 208466 - RNA, 90 nt, Homo sapiens
cgccccgcggagcccgagcggcccagagcgcggcgcggaaccgagcccagcgcggacgcaggagaagaacgccccggagcgcagcagcca

SEQ ID NO: 208467 - RNA, 77 nt, Homo sapiens
ggggagcgaggacacaccacgaagccagcagaagaggaccagacgcccgggggggcggcggcccacagaccgccacc

SEQ ID NO: 208468 - RNA, 71 nt, Homo sapiens
cgccacgaagaagagacgccacaaaccccagggaagaggaccaaagcgaacagcaggcaggggcagaaggc

SEQ ID NO: 208469 - RNA, 70 nt, Homo sapiens
aggaccggcgagggcacaggaggcggagcaagcggggagaaaccgaacgcggcagaacggaggcaggcag

SEQ ID NO: 208470 - RNA, 39 nt, Homo sapiens
ccaaggcccccagcgggacgacgcagccagagcagcaag

SEQ ID NO: 208471 - RNA, 54 nt, Homo sapiens
agcggaggaagaggacaggccgccacagcgagagacaacagaaaaacccaaaaa

SEQ ID NO: 208472 - RNA, 66 nt, Homo sapiens
cggcgcggccgacggcgcgcgcccgcgcgcgcggcggcgcccgcgggggagacggggacacccacc

SEQ ID NO: 208473 - RNA, 80 nt, Homo sapiens
gagcagacacgcaaagaagcccgaggcgcaagagacaacggcgcgagggcggcccgcagaagagcacagaaggagaaggc

SEQ ID NO: 208474 - RNA, 64 nt, Homo sapiens
ccacagccccgcgccgccgaccccccggcgccgcgccggcggcgggggcgaggaagagacaggc

SEQ ID NO: 208475 - RNA, 82 nt, Homo sapiens
gcgacagacgaagaaaaggcggacaggaagggagaacgacgccaacagcagcgaagacagccccccagcccggcgccccgcc

SEQ ID NO: 208476 - RNA, 65 nt, Homo sapiens
cggggacccacgggccaaaaagcacagaagaggccgggaggaagaaacccccacgcaagggagca

SEQ ID NO: 208477 - RNA, 85 nt, Homo sapiens
ggaaccaagcaacacaaggaacaccacaccacgggcccacaggagcaaaacaacagagcagaacccaggaaggaaaagaggccaa

SEQ ID NO: 208478 - RNA, 83 nt, Homo sapiens
caagggcgacccaaggaaacgcggcgacccgaggaggaaggcccgcgggcccaaggaccgcgaggcaagaacgccccggcaag

SEQ ID NO: 208479 - RNA, 49 nt, Homo sapiens
ggaccaagaaccagccccaggcgggggaggaggaggggacgaggcagaa

SEQ ID NO: 208480 - RNA, 63 nt, Homo sapiens
agggacacaagaccagccaagacaacaagaacgccgccgccgcacaaggcagagaggcggacc

SEQ ID NO: 208481 - RNA, 68 nt, Homo sapiens
gacgcaccgcaggcagacaaaagggccaaagaagggagagagacccagcggccagcgccaggggggag

SEQ ID NO: 208482 - RNA, 74 nt, Homo sapiens
gaccacgcgccggccagcagcacccagccgaaggagcacccacccggacagcccagagcaagcacacggaggcc

SEQ ID NO: 208483 - RNA, 70 nt, Homo sapiens
accaaaccagcaagaggggaaagaccaagcaaggaaccagcgagcaaacgcaaacacaacagaaaaaaga

SEQ ID NO: 208484 - RNA, 54 nt, Homo sapiens
cgggccccagccccaccggagccgaaggggagaaagaaaaaaggagccagaaga

SEQ ID NO: 208485 - RNA, 73 nt, Homo sapiens
ccagacacacaagcccagaacgaagaaaagacgagaagccccccgagggccggaaggcgccaccaggaggcac

SEQ ID NO: 208486 - RNA, 36 nt, Homo sapiens
ggcgccaggagggcggcgaaaccaagggagggaacc

SEQ ID NO: 208487 - RNA, 64 nt, Homo sapiens
cagagaggagcagcaccaccacaagggccggccgagacgcacacgacgacagccgccccccgag

SEQ ID NO: 208488 - RNA, 68 nt, Homo sapiens
gggagccaacagcagcaacagagccggaagggcccaccaagccgagaacaccaggaaacagcccaggg

SEQ ID NO: 208489 - RNA, 78 nt, Homo sapiens
gccacgaaccgcgcgccgcgagagccaagaaagaacaggcgacgcaacgaaaggccaaagagaagaggaagcccggag

SEQ ID NO: 208490 - RNA, 71 nt, Homo sapiens
ccccccgcgccccccccagggccccggcgccgcccccgacgcgccaggaggcagcacggcaggagacgagg

SEQ ID NO: 208491 - RNA, 79 nt, Homo sapiens
gaggggaggaggaggaggacagggaaaggagcggggagccccgcgccacagccagacgagacggaggcacacgcggcca

SEQ ID NO: 208492 - RNA, 70 nt, Homo sapiens
ggcacccagcaccaagcggaaaaccgcaaagcagaggaagaagccagaagagaagacaacaaaaaagaga

SEQ ID NO: 208493 - RNA, 80 nt, Homo sapiens
ggggaccacgaaaggagcaagagcaagacaccggacaccgagggcccccaaaaggaaggaaaacacccggcagggaagga

SEQ ID NO: 208494 - RNA, 68 nt, Homo sapiens
gccaacaagaggaagcaggaaaaacaaagaagacccaggacaggagaagaggggaagaagaaagccag

SEQ ID NO: 208495 - RNA, 80 nt, Homo sapiens
cccgaccggagcccagcggggggagccggagccccccagccgcgccagcaggaaacccgcagcagggaaaaaccaaaaac

SEQ ID NO: 208496 - RNA, 73 nt, Homo sapiens
ggcaccccgagacccggggcagacgcccacccagaaagccagaccaacgagcgagcacgcgccaaggaacaag

SEQ ID NO: 208497 - RNA, 100 nt, Homo sapiens
agagcagcaggggcaggagaacaaagcacacagacacaagggaagcgaggaccaggaagagaaagaagagcgagaaagaaaacagaaaaagagaagagag

SEQ ID NO: 208498 - RNA, 74 nt, Homo sapiens
aaagccaacgacaccaaggaggacccaaaggagcagaagccgaaggaccagaagaagaaagggaggacggcccc

SEQ ID NO: 208499 - RNA, 84 nt, Homo sapiens
cccgggaggggccggccccgcgccgcgcgcgggcccccccccgcgccggcgagaggaaccagcaccagacagaagacgcagaag

SEQ ID NO: 208500 - RNA, 73 nt, Homo sapiens
aacccaaagcccgacgcaggacacaggcggagagccagggcgcgcaccccagaaaggcggaagacggccagcc

SEQ ID NO: 208501 - RNA, 72 nt, Homo sapiens
agaagaacagcaaaagcaaagcaggaaccgaaagacgacgcaccgaaacgaagagcaacgaagacaggagag

SEQ ID NO: 208502 - RNA, 77 nt, Homo sapiens
aaaccaacacgacagcaaccaacggcgcggaaggaaacccaccagagaaggcgcggccacccaggacccgggggagg

SEQ ID NO: 208503 - RNA, 71 nt, Homo sapiens
gagaggagcgggaaacgggagggaaccagcaacaagccggggaccaacgggaacaggccaaggagaaaccc

SEQ ID NO: 208504 - RNA, 82 nt, Homo sapiens
cagcccccaaggagcgggacccagccgaggaagaacgaccgaagagagggacaacccccagcagcaaagaggaagacagagg

SEQ ID NO: 208505 - RNA, 70 nt, Homo sapiens
gaaagcgaagcggaaaaagaagccagagccaccgccacgcgaaggacaagacgcgacaaacccagaaagg

SEQ ID NO: 208506 - RNA, 59 nt, Homo sapiens
caacaccaacggccccagccacgcaccaaaagacagacggcacaagacacagaagcaca

SEQ ID NO: 208507 - RNA, 59 nt, Homo sapiens
aaaagggaaggccccaaagcagaccccaggcaaggcagcagaaaaaggacgaggggcca

SEQ ID NO: 208508 - RNA, 78 nt, Homo sapiens
cgacgacccagacagggaagaaccgaggcaaagagggaaaggggcccagacagcggagcagcgcaagcaagccacacc

SEQ ID NO: 208509 - RNA, 76 nt, Homo sapiens
aacacgacacccaggaggcacaggcaaacaacagcagcagaacaacagaaaaaagaagaaaccccacaacaaaaca

SEQ ID NO: 208510 - RNA, 78 nt, Homo sapiens
acgagcgcgccaggccgacagccgcggccgggcccgagcacgagacgacggagagggacaaacaaccaagggagggaa

SEQ ID NO: 208511 - RNA, 75 nt, Homo sapiens
ccgcgcagcagcgaccacgcaccagaacagaagaggaacgacagcgccaccccccagaaggcgacaacagaaggc

SEQ ID NO: 208512 - RNA, 79 nt, Homo sapiens
aagaacgagccccacagcaggcgagcccccaagccacgcacgaaaaacccagacagagagaacggccggaggggaccca

SEQ ID NO: 208513 - RNA, 51 nt, Homo sapiens
agccgagaggcaagacaacacacccagaagagaaggagacccggacccgcc

SEQ ID NO: 208514 - RNA, 88 nt, Homo sapiens
ggcggggcgcccggagccggccccgcccacccgcaaacagacccagcccgcggaaggcgagagacggggcacggagccaggaggccga

SEQ ID NO: 208515 - RNA, 83 nt, Homo sapiens
ggaccgggccccagagacagcgaacccaaggacgagggcacagaaaaacaaaaagaaaagagagagaaaagagaagcaacaga

SEQ ID NO: 208516 - RNA, 60 nt, Homo sapiens
ggcggagcccgcagaccgcagaaggccggagacaccagcagacagaagcgaaggggacag

SEQ ID NO: 208517 - RNA, 72 nt, Homo sapiens
gaaacagggacaaaccacacaaccagggagcgaggagcgaccgagggccacccggcagagagggcagaaggc

SEQ ID NO: 208518 - RNA, 73 nt, Homo sapiens
ggaagcagccaaagcccggaggaaaacagccgggcagagcagcagaggaggaaacagacaaggacgggccacc

SEQ ID NO: 208519 - RNA, 82 nt, Homo sapiens
acgcacagccagggagccaagcgccgcccggccccaggacccccagcacagccagcagcggaacagcgaaccagcagcggca

SEQ ID NO: 208520 - RNA, 75 nt, Homo sapiens
acggccagggggccacccgcagggcaagccaagagacggcagagacaacgaagagaggaaagaagcggaaaggag

SEQ ID NO: 208521 - RNA, 89 nt, Homo sapiens
cagacgccagcgggacgaggaccgagaccgcggccgggaccgaggaggccacaagaggaagcgaagaagaggacgccgccagcgagcca

SEQ ID NO: 208522 - RNA, 75 nt, Homo sapiens
ggaaaccaccgccaggcggaccccaccccgggcaagagcagcggaggcagcgaaggagcagggggcggccccacg

SEQ ID NO: 208523 - RNA, 84 nt, Homo sapiens
gcgaacaagacgacaccgccagcaccgaccaccgaggcggagggggagaacacccaggcagcagggagaccagaccaggacaga

SEQ ID NO: 208524 - RNA, 75 nt, Homo sapiens
ccgggggagcgccgaaaagcaccggagccgccgcgcagggagccaggacaggagaggaaaaccaagcggaaacag

SEQ ID NO: 208525 - RNA, 61 nt, Homo sapiens
gcgagcaggcaccacccgagcacacaaaaggcccaaggcccgaccgccaacaaaggaacga

SEQ ID NO: 208526 - RNA, 78 nt, Homo sapiens
cagaaacgacgggaaaacagaagcgggcgacaggccaggggaagagaggagagaagcgggggccaccgccccgacggg

SEQ ID NO: 208527 - RNA, 71 nt, Homo sapiens
cccgagaacggcggcagccggggccccccggagcggcggacgacagagaaaagaggagaggacacagaaaa

SEQ ID NO: 208528 - RNA, 71 nt, Homo sapiens
gagggagcgcagcacagcggggggaggaggggaggcgagaggcccgggggccaagccgaccacaaagaccc

SEQ ID NO: 208529 - RNA, 63 nt, Homo sapiens
aggcggagacgggagcacagggaacaccagaggcgggaccacgggcagcgcccagggagcagg

SEQ ID NO: 208530 - RNA, 77 nt, Homo sapiens
ccagacgcgcggccaaggccacccaagaacggcccgccaccggagacaacgagaggaggacccgaacacggaagaaa

SEQ ID NO: 208531 - RNA, 74 nt, Homo sapiens
cgcacaaccaccgcgaaccgccagaccaaagcaacggaacaacccgggaggaaaaggacaaggcaagcggaaag

SEQ ID NO: 208532 - RNA, 83 nt, Homo sapiens
gcgggaaccaacaccaacaggaggcaacaccaacaggacagccagagaccgaacagagagaacaagagacgcagccgcacaga

SEQ ID NO: 208533 - RNA, 83 nt, Homo sapiens
gagaagggggcggcgggcggcgggcggcaaaggagcagccagagggccgggcccagcaccgaccgccaggggccccccggcac

SEQ ID NO: 208534 - RNA, 77 nt, Homo sapiens
gccccgccccgggaggacccgaaaagccagcaagcgagaccaacaccaacacgagggcggcggaaaaagccgccaca

SEQ ID NO: 208535 - RNA, 72 nt, Homo sapiens
cgcggagaacaacaaggagcagggcacaccaagccagaaggcgaggcgcacggcagaaagccaacaggccca

SEQ ID NO: 208536 - RNA, 65 nt, Homo sapiens
accagcgccaggagacagacacacagcacacgggggaggccaagccaagcaccaggcgccacacc

SEQ ID NO: 208537 - RNA, 78 nt, Homo sapiens
accagccagaacccccagggccgaaagccaccgacccaaaacaaccaagaccagccaccggggccaggaccggaagaa

SEQ ID NO: 208538 - RNA, 82 nt, Homo sapiens
caaggcgcgccaccgcagacagcggcaagacaagcacggaaccgcccgagacgcaaaagcagaccggaaaacccaccggcaa

SEQ ID NO: 208539 - RNA, 68 nt, Homo sapiens
acagaaccaccaggagagcaagcggggccaggacacacgagcaagaagaccccaagagcagccacgga

SEQ ID NO: 208540 - RNA, 81 nt, Homo sapiens
cagaagaaaaccaaggcgaaggggacgcaaaagagggcacaaacagcagacaaaaggaaaaaggcgagggaacgaagaagc

SEQ ID NO: 208541 - RNA, 73 nt, Homo sapiens
ggagggccacacacaacgagagcagcgaaccgccaaacccgcagcaccaacagaggcccacgcggaccggcag

SEQ ID NO: 208542 - RNA, 87 nt, Homo sapiens
gcccagaggcgagcccggggaggaagaggccccagccccagccaaaccccccacacgaaccagcaagggaggggcgagggcagcgcg

SEQ ID NO: 208543 - RNA, 71 nt, Homo sapiens
gccagggcaacacacaaggcgaacaagaaacaagggacgaacaaaacaccgaggaaggacacacacaacac

SEQ ID NO: 208544 - RNA, 80 nt, Homo sapiens
ccgggaggagaaggaggaggaacgaaaagagcggaccgcccagcacacaaggcagcagcgccccgcacgcccgcaagcgg

SEQ ID NO: 208545 - RNA, 71 nt, Homo sapiens
gagaccgagaaaaaaggacaaccgcgcgggacccaaacggaaggaacggaggcggaaacagaagacagccg

SEQ ID NO: 208546 - RNA, 71 nt, Homo sapiens
ggacaagaaccaaccggccggccaacggaaaagcggcgagggaagaaaagggaaccagcggagcgggacaa

SEQ ID NO: 208547 - RNA, 61 nt, Homo sapiens
gccaccacagaaacaaaagcaacaaagagggggccgagggaagcacgaggggcgacaggac

SEQ ID NO: 208548 - RNA, 62 nt, Homo sapiens
ccacaagccacaggcacccagggaagagcgggccaacagggcgacagcaagaaggagccagc

SEQ ID NO: 208549 - RNA, 76 nt, Homo sapiens
gcacaggaaaagaaaaccggagaccagggcaacccagacgaggcagggcgaagagaagcggaaaaggaggcccaac

SEQ ID NO: 208550 - RNA, 64 nt, Homo sapiens
ggggagacggagggcagccggaagaccacagcagccaaggcggcgggggcccgggcagggcccg

SEQ ID NO: 208551 - RNA, 89 nt, Homo sapiens
agggggcggcggccggcgggcaaaggacgccaggaggaagggacaaaaggcgggaaaaccgccacaaagcccccaagccacaagcaacg

SEQ ID NO: 208552 - RNA, 81 nt, Homo sapiens
aacaaggggcaccaaacgcggcaacgcccccgggacagcacgccccggaccccaaaaaggccaaagaagagacgaagcaaa

SEQ ID NO: 208553 - RNA, 83 nt, Homo sapiens
ggggccccgcagcgacaacaggaggccggaagacccaaagcgaggacaccaggcagaaagagcccacaagacaaaaaagcaga

SEQ ID NO: 208554 - RNA, 79 nt, Homo sapiens
ggcaaaggcggaccgacaccacgacgacgggccacagcagccggcggcggcagaggaaccggaacagaagacagggaag

SEQ ID NO: 208555 - RNA, 71 nt, Homo sapiens
ggaggcaccacaacacagaaagggcgcaaaaagaaagaaaacaaaagccagccaaaaacagaccgaaaaac

SEQ ID NO: 208556 - RNA, 65 nt, Homo sapiens
aagcaagaaagacacaccgagcccaacaacccgagcccggggccaagaggaaacagaagagaagg

SEQ ID NO: 208557 - RNA, 34 nt, Homo sapiens
gccagcgaagacgaggggaaggaacaaagcagag

SEQ ID NO: 208558 - RNA, 82 nt, Homo sapiens
cagaagcagggcgaaccagagaaaacggcaaggaagcggccacagagccgaacacagcagagggggacaagcccacggagac

SEQ ID NO: 208559 - RNA, 85 nt, Homo sapiens
gagcccaaggcaagacccaaggcgacgaccgacaggggggaaaggggaccgagacccgacgagagagacgaggggaagagaggaa

SEQ ID NO: 208560 - RNA, 82 nt, Homo sapiens
ggaggggccgggaggcagaggggcaggggccaaccgaaccacaccggacgaagcagggcaacaggcagaaccggcccaggcg

SEQ ID NO: 208561 - RNA, 58 nt, Homo sapiens
ccaacacgaagggcgagaaaagggacccacaggaccaagcaccacacggaggacgaaa

SEQ ID NO: 208562 - RNA, 71 nt, Homo sapiens
cgaaggaggccaaggaagaagaagaaacagccaagacgagaaaggaagaagcgcggcaaggccaagaaagc

SEQ ID NO: 208563 - RNA, 71 nt, Homo sapiens
accgcggacacgagggcgaacaccagcgaaacagaaggggacaagggcaaaagggaaagcaaggggaaggg

SEQ ID NO: 208564 - RNA, 65 nt, Homo sapiens
gcagagccgccccagcagcaggggcgccaggcgagggaggcggccggagccaaaccgaagagcgg

SEQ ID NO: 208565 - RNA, 58 nt, Homo sapiens
ccggaggcggcgcagcagcaccggaccggccgggccgcagcacacaccggccacacca

SEQ ID NO: 208566 - RNA, 76 nt, Homo sapiens
gccgccgcaaacccagaccgagaaaagccaggaaagagaagaaggggaagcagaaaaaaaaaacagagaagaccag

SEQ ID NO: 208567 - RNA, 77 nt, Homo sapiens
agacagagaggagccaaacccccaggaggggcagcagcaggacagggaacccgggagacagcaacagacggaggaac

SEQ ID NO: 208568 - RNA, 75 nt, Homo sapiens
cccgccccccaggaggggcgagagggagccgcagcgagcaggggagaagcagaccgcaccaggcgggaccccgaa

SEQ ID NO: 208569 - RNA, 75 nt, Homo sapiens
aaagccaaaacacgacaggcgccgcgcccggggagacagaaacgaggcgcccccagcagcaggaggacgacgaca

SEQ ID NO: 208570 - RNA, 71 nt, Homo sapiens
acgggaggagaacaccggagaggagcaaccggaagggacaaaagaacaaaaaaggagaccgccagaaaaca

SEQ ID NO: 208571 - RNA, 54 nt, Homo sapiens
gcgcgcgagcggagcaccgcgggaaagaaaaggcacccaaaagcccagagggac

SEQ ID NO: 208572 - RNA, 93 nt, Homo sapiens
gacgccacccacggaccagcagcgccgagggaaacccggagaccaaaccggcaaaaccaaggaggcaagagggagcaggaaaaaccagcaggc

SEQ ID NO: 208573 - RNA, 80 nt, Homo sapiens
aggcccaccagccccgccaaacaggcgagaaccacgccgacaacggcggaagaggaacgggaacggggaagaagagcggc

SEQ ID NO: 208574 - RNA, 69 nt, Homo sapiens
aacccgcaagaggacgcagcggagcggaggcagacacacacggggggagagggagggggggacacggcc

SEQ ID NO: 208575 - RNA, 50 nt, Homo sapiens
cgggacagacaccacaacgcgcaccccagagccgagacacacggaagcca

SEQ ID NO: 208576 - RNA, 58 nt, Homo sapiens
ggcgagcagaggacgacaggccgggagccccgagaaccaagaacggaagaccagcccg

SEQ ID NO: 208577 - RNA, 71 nt, Homo sapiens
cggaaggccagaacacagaaccccgccaaaagcaaagggaacaccacaaaaaacgaggcaggcgaaagagc

SEQ ID NO: 208578 - RNA, 70 nt, Homo sapiens
aggcggaccgcccccgccaacgaagaccgagaccaggccccccgggccgggcacgggcgccagcggcacg

SEQ ID NO: 208579 - RNA, 76 nt, Homo sapiens
gacgaagaaagcagcagcggaggcggggaccccaaaggcggaagaacgccccagcccagacacggaacaccggcgc

SEQ ID NO: 208580 - RNA, 83 nt, Homo sapiens
gggggcgcagggaaggagggcgccgagcaacaaccgccgagcggcgacgccggaccgcgaagagacgagaggggcacggaagg

SEQ ID NO: 208581 - RNA, 58 nt, Homo sapiens
ggccggacccaggccagagggcggggagaaccaggcagccaacagccgaccgagcacg

SEQ ID NO: 208582 - RNA, 79 nt, Homo sapiens
ccacagcacagccgggaaggggagccaccagccccccggaggcacaaaaagaacaaccagaaggaacgcagagaccgac

SEQ ID NO: 208583 - RNA, 64 nt, Homo sapiens
gaaccagaagaggccacccacacagaaccaagcaaaagcggcaggcgacagaggcggcccagga

SEQ ID NO: 208584 - RNA, 74 nt, Homo sapiens
gcagagcggcaacgggagaaggaaccacacggggaagacaccagagacgaagggagacagcccgggggacgaga

SEQ ID NO: 208585 - RNA, 59 nt, Homo sapiens
gggggcgacgcaggagcaccgcagcaccaggccaggaggggaggcaccgccccaacccc

SEQ ID NO: 208586 - RNA, 62 nt, Homo sapiens
gcgaagcaccaaaccgccggaaccaacaaggaacaccacagacggcacgcacggagaaagga

SEQ ID NO: 208587 - RNA, 88 nt, Homo sapiens
ccgcaccggggagccccgccaccgcaagagccgcagcagcgccccgcagggcggagggggcagggcagaaggaccaggggcgacgagg

SEQ ID NO: 208588 - RNA, 87 nt, Homo sapiens
gcgccgccgccagggcgcagggccgggccgccgcgcaccgcagcgccggggcacgacacaaaaacaggacaaccagggaagcagaag

SEQ ID NO: 208589 - RNA, 84 nt, Homo sapiens
acaggaagaagcgaccgagggacgggagcgaggagggcggagaacggaaaagcaccaggaagcagagaggaccgcagaagggaa

SEQ ID NO: 208590 - RNA, 88 nt, Homo sapiens
ggggggaaagacaccagggcccgcaggaccacaccacccggcaagaacgccacacggccccgccccagaagcacacggccggacccaa

SEQ ID NO: 208591 - RNA, 45 nt, Homo sapiens
agcaccacgcagccagaaagcgaggcgcaaggaagaagagacgcc

SEQ ID NO: 208592 - RNA, 63 nt, Homo sapiens
aagaaggccaaaccagcccggacagacagagggaggagaacaccaaacagaggaacaggcgga

SEQ ID NO: 208593 - RNA, 58 nt, Homo sapiens
acagaaagagcaacagcagggcaacaggagaggagccaagcccaacgggacgggaaaa

SEQ ID NO: 208594 - RNA, 78 nt, Homo sapiens
gcgccacccacggcgcaggccccgcgcccgggggggaacccacacccgcccccagggccaccgcaggacgccgacacc

SEQ ID NO: 208595 - RNA, 88 nt, Homo sapiens
acgcggaggcggcagcggcgggccgaggcgaaggagcggccgggagcccgccgcgcggagcgggaagcccgcagccgagcacagagcc

SEQ ID NO: 208596 - RNA, 58 nt, Homo sapiens
gcccaggaaccaccaccgccaacaccggccgcaaaagagaagacacaggggagaaaag

SEQ ID NO: 208597 - RNA, 64 nt, Homo sapiens
gaaacacacaacaccgggccaaaaaagaccgaagcccgccagcagagggaaggcgcccgaaaca

SEQ ID NO: 208598 - RNA, 75 nt, Homo sapiens
gcacgggcgccaaaaagagacaccacagggcaaccgccacacacgcagcgacaggcagaggccaccccccaagcc

SEQ ID NO: 208599 - RNA, 38 nt, Homo sapiens
cacaccggggcaccaaacaaagaaacgagcaccaggag

SEQ ID NO: 208600 - RNA, 76 nt, Homo sapiens
agaagggagaccacagcaagacgccgggaccccggaaaccagaaagcaacacagccggaagaacaacaaaagaaaa

SEQ ID NO: 208601 - RNA, 72 nt, Homo sapiens
ggaggcacaagaaaagggaccaacggaaccacaagagaaacgcacgagaccgaacccaaggagaggaagagc

SEQ ID NO: 208602 - RNA, 68 nt, Homo sapiens
ggacccgggcgggccccacccgggcagcagagcagcaccagggcgggaggcgagaaaccggaaggaca

SEQ ID NO: 208603 - RNA, 70 nt, Homo sapiens
ccagaagaaggaccggaagcacacaacaggaaaacaaaagaggagaaagcgcggcaaagccgccggcaca

SEQ ID NO: 208604 - RNA, 78 nt, Homo sapiens
ggcgcgccgcacccggacggaccgccacgcgcccgggagacgcccgcgccgccggagagacagagagaggagaaagcg

SEQ ID NO: 208605 - RNA, 57 nt, Homo sapiens
gaaccaacacacgaaaagagagcaaaagcgaggagaaaaccagacgagagacagaag

SEQ ID NO: 208606 - RNA, 67 nt, Homo sapiens
cccgggagagcaagaaagggcacaaaagacacaggaggcaagccgggcaacagcaaggcagcacaac

SEQ ID NO: 208607 - RNA, 40 nt, Homo sapiens
gccccccggacccgcaggagccacacaaccacaaccccaa

SEQ ID NO: 208608 - RNA, 81 nt, Homo sapiens
acaccggcaacgcggcacggcccagcgcgcgcgggaaagaaaaacgagaggacacagagcaccaacaccggccccaagagg

SEQ ID NO: 208609 - RNA, 51 nt, Homo sapiens
ccaagcaaccaccagcagcccccagagcggaacacagcaaaccggccgcac

SEQ ID NO: 208610 - RNA, 72 nt, Homo sapiens
ccacaccgcaggagggcgaacgagcgaggcgcggaccagaacgcaccccgccacggcgaggacagaaaacgg

SEQ ID NO: 208611 - RNA, 58 nt, Homo sapiens
cccaggagcgggaacagaacagaggaaggcgacagaccaggaacgcagagagagccaa

SEQ ID NO: 208612 - RNA, 78 nt, Homo sapiens
gccgcgccgcgccgcgccgcaccccgagcgaccggccagggcaggacagcagcccgcaacaggccggccagcccccca

SEQ ID NO: 208613 - RNA, 66 nt, Homo sapiens
cgacgacaaacaagaaacagcaagcaaacaggggcaggcaaaccgacaccagcgacacaagcgcga

SEQ ID NO: 208614 - RNA, 80 nt, Homo sapiens
cggcacaaggggggaggaaggaggcaccgaggggcacaagacccgacaggcccaggcaccaccaccagacccgacccaac

SEQ ID NO: 208615 - RNA, 70 nt, Homo sapiens
aaggcgacagcccgccaagacagaagacaaacagaccccagaaagaagaagaggaaagcccgacaaggaa

SEQ ID NO: 208616 - RNA, 70 nt, Homo sapiens
gccacggcgggccgcgggaggacaccacccacagcgccggcagggaacgcgaggacagagcaaggcgggc

SEQ ID NO: 208617 - RNA, 77 nt, Homo sapiens
gcagcagaagacagaagcagaagcccaggggagagagccaagcaagccaggaacagggcgagacgaacaacgcgcgc

SEQ ID NO: 208618 - RNA, 75 nt, Homo sapiens
agacaaagaaagcgaaaagccccagggccaccaggaaaaacacacgccacacgcgaccagagaggagacgaacga

SEQ ID NO: 208619 - RNA, 65 nt, Homo sapiens
gaagccgacagacaaccagagcaaccggcagcacacgaaaggcagagcaagccagagacacaacg

SEQ ID NO: 208620 - RNA, 57 nt, Homo sapiens
acggagaaggcagagagcagagacacccgacggggaaggaagaaaacgccagagaag

SEQ ID NO: 208621 - RNA, 53 nt, Homo sapiens
gaggcgacggccgcggcgcacaggaaccccaaacccaccagaaaagccccagc

SEQ ID NO: 208622 - RNA, 69 nt, Homo sapiens
ccagagaagaaagagacacagcccaggacggacaacaccaaccaagaagacagcaaagaaggaaccgaa

SEQ ID NO: 208623 - RNA, 71 nt, Homo sapiens
aacggagagacaacaagggccacggacgaaggaaaaaggggagcgcgaggaggccaggcgggggcccaccg

SEQ ID NO: 208624 - RNA, 81 nt, Homo sapiens
aacagggaccggaagagcccacggacacacaggaacgggggccacgcacggagaaggcagcgcaagccacaggaacgagcc

SEQ ID NO: 208625 - RNA, 81 nt, Homo sapiens
caccgcgcgaagcggccaaagccgcccagacggccaccggcgggaggaacaaaagcgggaggccaccgccccaccagcagg

SEQ ID NO: 208626 - RNA, 82 nt, Homo sapiens
ccccgcggcgggaggagccgccccgagaccgcagaagccggcggacagcgaaggaagagggaggaggacccagcccgaagag

SEQ ID NO: 208627 - RNA, 60 nt, Homo sapiens
cccaagaagggaaaccgaggcaaaaacaaggccgagagacaaagcccggaccccgggccg

SEQ ID NO: 208628 - RNA, 53 nt, Homo sapiens
ggaacccgggccccgccaggacacagagccacaaaagaggaaacaaacaggaa

SEQ ID NO: 208629 - RNA, 75 nt, Homo sapiens
agaaggagccaaacccaaagaggaagcacaggagaaccccacaccagaaccgaccgaaccggagcacccgaggga

SEQ ID NO: 208630 - RNA, 86 nt, Homo sapiens
agaacgccggacaaccgacgcacacaggaaacccagcacaggggaaaaggccaggccaggagcggagcaaagagacccaccaaaaa

SEQ ID NO: 208631 - RNA, 55 nt, Homo sapiens
acgggcacacggagggagaacgaggcgcccaagaacaaaccaccgggagaaccac

SEQ ID NO: 208632 - RNA, 81 nt, Homo sapiens
cgcggccggcaggaccagcgcgaaagagaccggacgcagccgccaccgagacgagagagcggagggcgaaacacagaaaac

SEQ ID NO: 208633 - RNA, 61 nt, Homo sapiens
gccagccgaggggagaagagcccagagaacgggagcggcccgcggcgagagaggcaaaaag

SEQ ID NO: 208634 - RNA, 73 nt, Homo sapiens
aggaggccgaccaaggacgagaccaaccccaagcaacagccaaccagaaaaccagaaacaccggcagggagca

SEQ ID NO: 208635 - RNA, 68 nt, Homo sapiens
gcacgggagaagccccgcacagcagagagcaacccgaaaagggaaacacaagaccggaggccacggac

SEQ ID NO: 208636 - RNA, 77 nt, Homo sapiens
cggggcgaggaacacgggaagcaggagcgaaagcgccggaagggcagcagaaagcaacagaagcagaagaaaggcgg

SEQ ID NO: 208637 - RNA, 83 nt, Homo sapiens
ggaccccagggagagcgggcagccccaggggacagcagggaccaccacaaggacagaaaagcacaggaccaggaggccaccgc

SEQ ID NO: 208638 - RNA, 78 nt, Homo sapiens
gagaacggccaccagacaaccccaagcccgggccacccgcgcgggggcgaggcggagcagggggggccgaagaagcca

SEQ ID NO: 208639 - RNA, 71 nt, Homo sapiens
gcgaggacacgccccacaccccagaaccacggcgggacaaagcacaaggcacggacaggagcaaaagaaga

SEQ ID NO: 208640 - RNA, 74 nt, Homo sapiens
gaagacagagggaaaagaaacaccacagcagcgacggcccaagcgaaaagggacaaagcccccagaggaaccgg

SEQ ID NO: 208641 - RNA, 75 nt, Homo sapiens
aaaggggacgccaaggcacgcaagaaaacgaaagcaggcaagacagaaggcccggggaaaaacagagaaaacaga

SEQ ID NO: 208642 - RNA, 54 nt, Homo sapiens
ccgaaaggacaggcacaacaggaggaggcccacgcggaccggcagcgccaccgg

SEQ ID NO: 208643 - RNA, 79 nt, Homo sapiens
gcagaggggccaggaccgcaccgggggggcggggcagcaacgaacgacgccggaaaaaagaagggacacccagccgcag

SEQ ID NO: 208644 - RNA, 74 nt, Homo sapiens
gaggcccagaagaacaaaggggacgggcagagaaacggacagagagaggcagaagaaaaagcacccccaagcga

SEQ ID NO: 208645 - RNA, 74 nt, Homo sapiens
gaggcccccagccagggaaccgagagcaggcccggccgagaggacaaccggggagaacgcggaagaacacaccc

SEQ ID NO: 208646 - RNA, 74 nt, Homo sapiens
aaaccgcgcgcaggcagaagaaggagccagcagagcgccaggcgaccccgcacacacacccaccagccacggca

SEQ ID NO: 208647 - RNA, 74 nt, Homo sapiens
gcccaagaccacagcacccagaaacaagcgcccagacgagcccaccacggaccacccgcagccagcgagccgcc

SEQ ID NO: 208648 - RNA, 62 nt, Homo sapiens
gaggcgcgggaccccaggagggggacaggaggcgcggggcccaggggccgcaaggccaggcg

SEQ ID NO: 208649 - RNA, 71 nt, Homo sapiens
ccacacacgggaaacacaaaacagaaggacggagaagcgaaagccagaccggcaagagcggaagaaagcac

SEQ ID NO: 208650 - RNA, 52 nt, Homo sapiens
gagcaagaaaacaagcgaagaccgaacaggaggcagcacggcaggagacgag

SEQ ID NO: 208651 - RNA, 85 nt, Homo sapiens
gcccagacacacacaacccaaccaaaaaaaccccaagcccccaggagacagacagggaggaagaaaaagcagagcggagcggaga

SEQ ID NO: 208652 - RNA, 60 nt, Homo sapiens
gaaaccaccaaacaggccaggagggggccacaccgaacccagccgggaggccaaggccag

SEQ ID NO: 208653 - RNA, 78 nt, Homo sapiens
cgcccgcaaaacgggcgcgaccggcggaccgcgcccaaaccagggcagaagcagagcaggacaagacccaaaagggca

SEQ ID NO: 208654 - RNA, 75 nt, Homo sapiens
ggagcccagagagaaagccaggccgaaagagacccgaaaaggcgcggccgcgaaagggggcagaagcgaaaacgc

SEQ ID NO: 208655 - RNA, 52 nt, Homo sapiens
cgccgcgcacagcccggacagaaccagcagcacggcggcccaacccacagga

SEQ ID NO: 208656 - RNA, 69 nt, Homo sapiens
ggcaaagaaaaaccgggggaccaacagcaggcagaagccgcccaagagaggccccacagaaccagggga

SEQ ID NO: 208657 - RNA, 72 nt, Homo sapiens
cccgggaaagagcagcgacgggagacagccgggcgcgcaagagccgcgagaaggggccagcaaagacggagc

SEQ ID NO: 208658 - RNA, 74 nt, Homo sapiens
gggcagaacaacgaacagaagcacaaccagagccggccccggacaagagaaaggagcaagaaccaacgaaccag

SEQ ID NO: 208659 - RNA, 69 nt, Homo sapiens
gccagcaaacgcacacgacagcaacaagacacggagcaaggaggaaaacacacggagcagacaagggcc

SEQ ID NO: 208660 - RNA, 78 nt, Homo sapiens
aaaccggagggggaaaaaacccaaggcgcaaaggccccgagccccggccccaaagacccaaaacagagacacccccca

SEQ ID NO: 208661 - RNA, 76 nt, Homo sapiens
gagaagagaagaaagcgcaggcaggcagggaacacacaagagacggaagcagaaagaccccccaaagacacacgga

SEQ ID NO: 208662 - RNA, 103 nt, Homo sapiens
aagaaaccgaaagcaagcaaggcaaccagcgaagggggaagaaaaaggacgaacgagagccaacagaagcaacgggacaggcgcagcggacaaccacgagcag

SEQ ID NO: 208663 - RNA, 78 nt, Homo sapiens
aaggagccacagaaacggaggagagaacagagacacggcccgaacgaaccccagaaacccagaaaacagggaaaacgc

SEQ ID NO: 208664 - RNA, 75 nt, Homo sapiens
ccgcgccgccgcgccgcgccggcagagcacaacagggagaagacagcaagaccccgaaccgagcagacgaggcaa

SEQ ID NO: 208665 - RNA, 74 nt, Homo sapiens
cgaggaggaacgccaaggaaggaccgaaccccacccgaccaccgagccacacagcacagcacacaccacagggc

SEQ ID NO: 208666 - RNA, 83 nt, Homo sapiens
agcgccgggagaggccggcagccccgggacacccccgcaagcgagcaggaaccgaacaagacagaaagcgggacgcgcaaccc

SEQ ID NO: 208667 - RNA, 76 nt, Homo sapiens
gggcgcccgaggggccgagcgagcagccagagggaacccggcgaagaaccgcggggagagaaccggagggccgccg

SEQ ID NO: 208668 - RNA, 78 nt, Homo sapiens
agcgcacacgaagagaagcaaggcccaagacccaggcgagaacggcaacagggagaaaaagaacaaaaacaaccagga

SEQ ID NO: 208669 - RNA, 49 nt, Homo sapiens
ggcccccaagagaccaggccccgggaaaaggagcgaagaccggacggaa

SEQ ID NO: 208670 - RNA, 61 nt, Homo sapiens
cccgggagacccaggcgggacagagggagccaggcagagcacccgagggacccgaggagcc

SEQ ID NO: 208671 - RNA, 84 nt, Homo sapiens
cgacaccaagaccaggacgccggcggaagacgggcgacgcacgaggcacacaggaaggaggggagcagggacgcgcggcggcgg

SEQ ID NO: 208672 - RNA, 73 nt, Homo sapiens
aaaggaacagccccagcccggccccaggaacgccccaaaagcacgcacgaaaccggcaagccagcggagggga

SEQ ID NO: 208673 - RNA, 77 nt, Homo sapiens
ccagccaacccggcagggacaccagaggccaacgcgcagaagagagccgcccgggaggccccacggagacaaaagac

SEQ ID NO: 208674 - RNA, 50 nt, Homo sapiens
gcccgcggagggaaaaggacaccccgcgggaaaagcccaaggaggccaag

SEQ ID NO: 208675 - RNA, 53 nt, Homo sapiens
ccccgagagcaagaacagggaccaaagcagaggggcgcgaaaggggagacggg

SEQ ID NO: 208676 - RNA, 124 nt, Homo sapiens
agcagcggagccgcccagaaggaccgacagggagcagcggagaacacaggaaccggccacggcccaggcgaacggccggagaaccagagaggacccggagcaggaggagaaagagaagcgccag

SEQ ID NO: 208677 - RNA, 83 nt, Homo sapiens
acaaagacgagaccgagagaaccggaacacagccggcccaggcgagagagggcccaaaggccaggcaaagaaaaagccagccg

SEQ ID NO: 208678 - RNA, 60 nt, Homo sapiens
caaccaccacggaacccgacccagcaccaaccgcagcggaggagcaccggaacacagaag

SEQ ID NO: 208679 - RNA, 51 nt, Homo sapiens
gggaaccccagcggcggcgacgagaagagcaccccccagagcaccgaccca

SEQ ID NO: 208680 - RNA, 39 nt, Homo sapiens
cacaggagaggagcgagcagacagccccagcgccccagg

SEQ ID NO: 208681 - RNA, 73 nt, Homo sapiens
ccgcccaggccccgcaggacaacccccaagaaagggagcccagaacgaaacaacccagcagagacccacaaac

SEQ ID NO: 208682 - RNA, 59 nt, Homo sapiens
cggccgcagcgcagcgccagccagacccccgggggaaacgaggcagcggacaacacccc

SEQ ID NO: 208683 - RNA, 76 nt, Homo sapiens
agccgagggcaggacagcgccagaagcagaggcgcaaagaagcgaaaagcaaaccagccccagaaaagaaaagaag

SEQ ID NO: 208684 - RNA, 80 nt, Homo sapiens
accccacgcggggggggccaagagacagggcacaccaaacccacgaggcggggagggcgggagccacggggcgccaggca

SEQ ID NO: 208685 - RNA, 77 nt, Homo sapiens
cccaccagggagcccggcgccccgcccgccaaaaggggagcagcccgggaaaggaacgccgcagaaagaagaagggg

SEQ ID NO: 208686 - RNA, 40 nt, Homo sapiens
ggccgagcaggaggcgccacaggggggaaccgaagagcaa

SEQ ID NO: 208687 - RNA, 80 nt, Homo sapiens
caaagagccagaggggagacacgccaaagccccaaggcgccggaacagagcagcgcagacccaagacccggaagcggcca

SEQ ID NO: 208688 - RNA, 72 nt, Homo sapiens
caagaagcggaacagccgggagaaacccgaccacagcaaagaaggccaagaagacgacacaaaaggagcacc

SEQ ID NO: 208689 - RNA, 59 nt, Homo sapiens
aggcaacacagaggccggagacaggaggacccgaaaaccccgagaggcaaccaaaaaaa

SEQ ID NO: 208690 - RNA, 74 nt, Homo sapiens
agaaaggacacgcagaacagcagcacaaggaaaacgagagaaacgaaggcgagagaaacagcaaggcccgagcc

SEQ ID NO: 208691 - RNA, 83 nt, Homo sapiens
gggaagggccccccccacggcagccaggccaaagaccagaaccggaggagccagaggaagccagcagaccgcagaacggcccc

SEQ ID NO: 208692 - RNA, 80 nt, Homo sapiens
cgcccaagccggacggggacgagcggcagagacaggccaccgcacccaggggaggagggcacaagaagccacgcagcccg

SEQ ID NO: 208693 - RNA, 85 nt, Homo sapiens
gcccgaccgcacgaaacgcccgaaaacagggccggccgcagagcccaccggaaggagaaggaagaggagcgaccacacgaagggg

SEQ ID NO: 208694 - RNA, 47 nt, Homo sapiens
gcaacgcgccaaacaaacgaccccgaggacaccccagacagaccccg

SEQ ID NO: 208695 - RNA, 75 nt, Homo sapiens
gcaggcggccgcagcaacccgccgggcaagcagaagaggaacagaagaagcagagcagagacggagcagcagccc

SEQ ID NO: 208696 - RNA, 76 nt, Homo sapiens
gcggaaagaaaaaagaacacagagaaaacggaagaaccaggaacaacagaagcacggccgagaccgggaggaagcg

SEQ ID NO: 208697 - RNA, 76 nt, Homo sapiens
ccaaccgggagcagcggccgggccgaacaccgaaacgcaagaggcaagaccccagacccgcagagaccgcgcgcaa

SEQ ID NO: 208698 - RNA, 69 nt, Homo sapiens
gagcagagcagcaaacaggaaagaccccgaaaagaaagaaagcgagccagccaaaggaaaaacccagaa

SEQ ID NO: 208699 - RNA, 78 nt, Homo sapiens
aacagagccgagaaaggaagggcgggaccaacagggagccagacgaaggagcaagggcaacacccggagagaagagcc

SEQ ID NO: 208700 - RNA, 76 nt, Homo sapiens
aaaaccaacgagcccccgcacgggcgccggccgagcccgggaaaacgacagcagcagcagggccggaagacgccac

SEQ ID NO: 208701 - RNA, 64 nt, Homo sapiens
aaaaagacagcccgcagcacgaccagcaggaacggacggaggggggaggagcaggcccccaccg

SEQ ID NO: 208702 - RNA, 42 nt, Homo sapiens
acccgcgggggcgagcgcccggagcaccaaagggccccagag

SEQ ID NO: 208703 - RNA, 72 nt, Homo sapiens
gaggcacgaccccacccccgaggcccgaccggccggggggggcacagagccccggaagacagcccccagcga

SEQ ID NO: 208704 - RNA, 86 nt, Homo sapiens
gcccaacaacggagaaaccccccaccagaagaggcagaaacggggacacaagcgaaaggcaacggcgcacagaacaaaggacgagc

SEQ ID NO: 208705 - RNA, 92 nt, Homo sapiens
agagcgcaccaccaacccacgggaggcaaggccgacaggcgaagcaccggaaggggaccgacggggagacacagagcaccagccagaggaga

SEQ ID NO: 208706 - RNA, 73 nt, Homo sapiens
aggagagccacgagcagccgaggggagcgggagaggagcgcggcggcaggcccggaggaggagcggcggaggc

SEQ ID NO: 208707 - RNA, 74 nt, Homo sapiens
ccagcacgaagcggagaaggagacgggaccccgacggcaagcgaggggaggaagcaaacaagaaacaggaaggg

SEQ ID NO: 208708 - RNA, 79 nt, Homo sapiens
gaaccgcaccccacacgacccacaggagccccaggagcccagacaccagccccccaccagcgagcaggcgacccaaaag

SEQ ID NO: 208709 - RNA, 72 nt, Homo sapiens
gggaacgagggcgagcagaggacgacaggccgggaggggcagacaccccacaggcaccagcagcaacgaaca

SEQ ID NO: 208710 - RNA, 90 nt, Homo sapiens
cgaccggaccgcggagggagcgggagcgaggcgaggagaggggagcggggggcgccgcgccaagggaagcgccacgcagagagcaaggcg

SEQ ID NO: 208711 - RNA, 69 nt, Homo sapiens
aagaaagacagaagcagacgcgagaacaggcccgaaaggcaaaaagcccggagagagagaagagagaac

SEQ ID NO: 208712 - RNA, 75 nt, Homo sapiens
cacgcgcccagcccaaccgaacgcccccagcacccgagccccgaccccgcagcggagcgcagccgaccccaagcc

SEQ ID NO: 208713 - RNA, 76 nt, Homo sapiens
caaggccagccccacccacccaacgcacaagacgccaagagggaccaagaaaggcccagggaccaaagcccggaca

SEQ ID NO: 208714 - RNA, 84 nt, Homo sapiens
ccagagcgccaggaaaaaccgaagaagggaacccagaggacagagccaaaagaccaggcccagcgacaggaaaaggaaaccggg

SEQ ID NO: 208715 - RNA, 77 nt, Homo sapiens
gagccaggaggcaggaggaaggaaggggaaaagacaaacgagcgcaacccccgaaacggaacgagcgaaagacgagc

SEQ ID NO: 208716 - RNA, 78 nt, Homo sapiens
cgcccaaagccaaacaacagcccagaggagaacaaggccgggcgccagcaacgacagggacaagggagaagaagccac

SEQ ID NO: 208717 - RNA, 91 nt, Homo sapiens
ggcaaacacagccccagagccggggcaccagcagcacagagccccagagagccccgcagggccgccccgcgcgagagcccagccccgccgc

SEQ ID NO: 208718 - RNA, 64 nt, Homo sapiens
ccgaagcagccggcaacgaaccaaaacgccacggaggaggcaagcaaagggcgagaggaaggac

SEQ ID NO: 208719 - RNA, 70 nt, Homo sapiens
gaacggacaccggcccgcccgcccacccccccgacaagaccccgcggacgaaggaaagacaaggccccag

SEQ ID NO: 208720 - RNA, 74 nt, Homo sapiens
accaggaggcagccaaagaagacccagaggacacaaccaagcaaggaagcgagccaacaggagccgaaaccgga

SEQ ID NO: 208721 - RNA, 71 nt, Homo sapiens
aaccccggaacaagaaccacgcccgcaccagccacgcgggagaggagagagaaggaggagcccagagggag

SEQ ID NO: 208722 - RNA, 81 nt, Homo sapiens
gcgacggcggagggcccggccaccaggaccaaagggaagcccaggcccccggagccaggcccccgggcagcccggcccacg

SEQ ID NO: 208723 - RNA, 76 nt, Homo sapiens
gaagcccaaggcgaagaaagaacgaaggcaacgcaagggaacggagacaagaaaacgcagccggcggaagaggacc

SEQ ID NO: 208724 - RNA, 68 nt, Homo sapiens
ggcggcgccgcccggccgccgcaccagccgccacccgcccaggacagaacgacacaaaagggaaggga

SEQ ID NO: 208725 - RNA, 59 nt, Homo sapiens
gaagccggcccgaagccgacccccgcaaggaagcgcaggcgagacggagcgcggcgccc

SEQ ID NO: 208726 - RNA, 82 nt, Homo sapiens
gagccagcaacggcggcgagcaggccgagagcacagaccagcgcgcgaccggagccccacagcggcacaggccccagccaag

SEQ ID NO: 208727 - RNA, 78 nt, Homo sapiens
acgacacagaaaccaaccgacgcagcacaagaacgcagacccccagaacaaggccaccaggagcccggccacccgcgg

SEQ ID NO: 208728 - RNA, 70 nt, Homo sapiens
cccagaacacaagagccgcccccaacaccaaagggagaccacgaaggagagaagagaggccggggacggc

SEQ ID NO: 208729 - RNA, 53 nt, Homo sapiens
gcagcacccgccccccagccaggaccgaagcggagcacaccagaaaagacacg

SEQ ID NO: 208730 - RNA, 55 nt, Homo sapiens
gccaaacggaaagcaggggggacccggaccgcgcgaagcgggcgcgcacagacgg

SEQ ID NO: 208731 - RNA, 82 nt, Homo sapiens
gaaagcgggagagggaccggaacggcggcgacaaggggcccgaacagagggggacacccggacgcaggcccggccaggagag

SEQ ID NO: 208732 - RNA, 61 nt, Homo sapiens
ccaaggcccgcgggcgggagaacggaaaaccccaacccggcgcagccaaacggagcaggga

SEQ ID NO: 208733 - RNA, 58 nt, Homo sapiens
ccaggagcccgagagagaaggcgagcaggcgacccaaaagagcgaaggaaaaccagca

SEQ ID NO: 208734 - RNA, 72 nt, Homo sapiens
gaaggagccgggaacgagagagaaaggagagccacaagggagcaccagccgaagcagaagcgcccagaccca

SEQ ID NO: 208735 - RNA, 75 nt, Homo sapiens
ggccccccaaccaggcaagaaggggcaggaccagcgcccggcaggcgccacgcgccgcagaccgaccggcacgca

SEQ ID NO: 208736 - RNA, 66 nt, Homo sapiens
gagcccgccgccgaccgccgcccgccacacccgccgccaggccagccgccgcagggaagacgccgg

SEQ ID NO: 208737 - RNA, 70 nt, Homo sapiens
aaccaaccaggagccaaccgggaagggaaccggaaaagacaagggggcaaaggaaagaccacagcaagac

SEQ ID NO: 208738 - RNA, 85 nt, Homo sapiens
aagcaaaacagagcggaggaaaagaaggcacggaaggcgggagagagaacggaaaggagccaaggaaaacaaaagggcgagccag

SEQ ID NO: 208739 - RNA, 56 nt, Homo sapiens
cggcccgacgcggagggccggcaacggccacagcaccggggcaaagccgcagcgca

SEQ ID NO: 208740 - RNA, 89 nt, Homo sapiens
aaaccagaagaagaaaaaagcaccaacaaaccagaccacccaaaggagaaacaccaaaaggaaccgcaggaagaaccccagcacaagaa

SEQ ID NO: 208741 - RNA, 78 nt, Homo sapiens
cgcaaccggcgacagccccaaggcaacaagcccacccgaaaccacaaggccgagcggagacccagaggaaggggcgcc

SEQ ID NO: 208742 - RNA, 69 nt, Homo sapiens
gacccccagcacaggcagcaggccgggagagaagagcacccgaagaagacaagacaggggaaagacagc

SEQ ID NO: 208743 - RNA, 52 nt, Homo sapiens
cccagcgggcgccgcgcacgcggagagcggccagggcagacgggggcgccgg

SEQ ID NO: 208744 - RNA, 80 nt, Homo sapiens
cacggagagccaagacaaaagcaggaaacccagaggagggaaggacaaagcggacacagggacaggagaagcggaaacca

SEQ ID NO: 208745 - RNA, 58 nt, Homo sapiens
ccccggagaacaccgcccaccccaggccgcagagggggagcagaccggaagacccgac

SEQ ID NO: 208746 - RNA, 71 nt, Homo sapiens
ggaggacaagagagcaaaggccccaaccacccccagcgagagagaggccaaccccggcccagccgcagaca

SEQ ID NO: 208747 - RNA, 79 nt, Homo sapiens
cggggcggggaccgccgcccgggcggaaggccaaagacagacgggcccagcacacagggacaacgccaggggcacacgg

SEQ ID NO: 208748 - RNA, 70 nt, Homo sapiens
ggggcccaagggcaccagaagacggaagggaggcgaagacagcaacaaagcgcccgaaaaagccccgcac

SEQ ID NO: 208749 - RNA, 79 nt, Homo sapiens
gcagcggcgcagcccacgccagacgaccccacccgcgccgcgacccggagaggaaccgcacccaaggacggcggaggcc

SEQ ID NO: 208750 - RNA, 70 nt, Homo sapiens
gaacaacagaagaagaaagcgaaggcagccgccgcaaagggacgacgaagggacagccagaagggaagac

SEQ ID NO: 208751 - RNA, 69 nt, Homo sapiens
aagaggcccccagaccagaaaagcggccgcacaaggcacagggagccggaaaccaaggggaagacacac

SEQ ID NO: 208752 - RNA, 73 nt, Homo sapiens
ggcgaagacaagagagccagaaacgcccgacacgacagaaaagaggaagcacacaagggagcagcaacaaagg

SEQ ID NO: 208753 - RNA, 58 nt, Homo sapiens
agcccgcacggcaacgcaaacgccgccagagcaggagacagcgcgagaacagcccaga

SEQ ID NO: 208754 - RNA, 75 nt, Homo sapiens
cggaaaccggagcgcgcagcagcagcagccgcccaaaacacaaaccaaagaagaaacccgaaggaccacagagaa

SEQ ID NO: 208755 - RNA, 75 nt, Homo sapiens
cggggcggcccaccccccacgcaccgcacaacaagaggccggcggggcgacaggggacgacaggaaacaccggag

SEQ ID NO: 208756 - RNA, 88 nt, Homo sapiens
cgccgcggacaagcacgagggcgcgccgagacgcccgagaagcggcaaggagagcagaagacacacaaggaaagccaagacaaacccg

SEQ ID NO: 208757 - RNA, 70 nt, Homo sapiens
cccgagggacgagaccgaacaggggggggcacagcgccccagggagagacgaaagaacgggccgggcggg

SEQ ID NO: 208758 - RNA, 82 nt, Homo sapiens
gcagacccgacaggggaggaccaagcacgccccaaagacgagggcacgcacgggaaccaggacacacgagacccaccggaga

SEQ ID NO: 208759 - RNA, 98 nt, Homo sapiens
ccaagaagggacccaaaaagacggacagcccacgggaacaagaggggacagaaaggccccggagccgcagaaccaggcgaggccagcagcaagacacg

SEQ ID NO: 208760 - RNA, 78 nt, Homo sapiens
acggcccggggccgacccggcccgaggggaagcagccaggacagccaggaaggcaggaacagaccaacccccggcccc

SEQ ID NO: 208761 - RNA, 79 nt, Homo sapiens
caagacaccagaaacaagggcgcccgcggagaaggggcaacgccaaaagaacggcgaagaggcaacagagccacagaag

SEQ ID NO: 208762 - RNA, 37 nt, Homo sapiens
aggggagcagccacaggggccgccagacgaaaaggca

SEQ ID NO: 208763 - RNA, 125 nt, Homo sapiens
gggaccgagcgagcgaccgacgcgccacccgccgacgcccagccgcggggcccgcacggaccccaccaacagagggcggcgggcggaacgccgaacaagcagaagggggcgccggcggggccgcc

SEQ ID NO: 208764 - RNA, 66 nt, Homo sapiens
gcgacgggccgccacggacgcaggacagcccagagcaagcacacggaggcccgggagccagaccgg

SEQ ID NO: 208765 - RNA, 76 nt, Homo sapiens
accggacaaagacgcaacggcgaggaagagacgacagcaaggcgggccagagggcaggaccgggggacggccagac

SEQ ID NO: 208766 - RNA, 88 nt, Homo sapiens
gcccgccagaccagcaagaggaggggcccggagagggggaagggcccaaagccagaaggacggccggagcagcagaacaagagcggag

SEQ ID NO: 208767 - RNA, 80 nt, Homo sapiens
cacagccggcgcacaagcgcccgaccccccggacacccgcccagcgagagccagccggaggacccagcagcaggccaccc

SEQ ID NO: 208768 - RNA, 99 nt, Homo sapiens
aaggaaaagagcccggaaagaagagacagcgaggagacaacccccagacgggcggcagagaagagaagagcacagcgggaggaaagggagagacaagag

SEQ ID NO: 208769 - RNA, 76 nt, Homo sapiens
cgcggcgcggcggcggcgccgccgggcgggcggcggagagaaccagcagagaaaagaaggagaaggaaaagcccaa

SEQ ID NO: 208770 - RNA, 44 nt, Homo sapiens
ggccgggggcgcccccccccccagcgccgacaccagggaccagg

SEQ ID NO: 208771 - RNA, 90 nt, Homo sapiens
cggagaaacaggcgccgcgggcccgcgcccggccggacccgggcccgagggaggaagcccgaaggagcagacacgggccaggcccagccc

SEQ ID NO: 208772 - RNA, 64 nt, Homo sapiens
ggaaaaagaaggaaacaaggaccaaaagcaaaaggaaagagggaaaggggaccaacgggaacag

SEQ ID NO: 208773 - RNA, 58 nt, Homo sapiens
aaaggaaagacaggcacgccggacaaaacaaggagcaccaagcccaagaagccgccag

SEQ ID NO: 208774 - RNA, 78 nt, Homo sapiens
ccgcgcagcggcccggcggggcccggcaccaggaccaccgcggcagcacgcggcgggaccaagaaaggcccagggacc

SEQ ID NO: 208775 - RNA, 87 nt, Homo sapiens
ggaagagcaggggcacagagagaggagagagaccagagagcaaaaagcggaaccacaagaagaaagcaacgacaagaacccacacgc

SEQ ID NO: 208776 - RNA, 83 nt, Homo sapiens
cacagaacagcacgaccagaggggaagccaagcaaacgcagaaggacgcccacgagcaaccaagaggcaaggccagagaaggc

SEQ ID NO: 208777 - RNA, 72 nt, Homo sapiens
gaaggaaagacaggagcaagcggacgggaaacgcgggagaaacagagggcacagaaggaaggaaaccaccac

SEQ ID NO: 208778 - RNA, 91 nt, Homo sapiens
ccccacccgaacacagggcccccagaccaggcgccccaacagccgcccaaaagacaagcagggcaggcagcagcagccagaggccccccga

SEQ ID NO: 208779 - RNA, 59 nt, Homo sapiens
cagaggagagagcggcgcggacaaaggggcaccacaagccgaacagccagccagcaaaa

SEQ ID NO: 208780 - RNA, 81 nt, Homo sapiens
gcgcacacagcccccacaccacggaagggaagcgggagcggggccgcaccgcgaggaacccgagcccaccggcagcaccgc

SEQ ID NO: 208781 - RNA, 72 nt, Homo sapiens
aggaaaacgaaggaaaaaggcaacccgcgaggaggaaaaacgacacgcgccccagaccagcggcgccggagc

SEQ ID NO: 208782 - RNA, 78 nt, Homo sapiens
ggaaggcgaggacgaggacgaggacgcaaggacccaaagacaggaccacgcaccagcagagaaggaaagcaaaccgaa

SEQ ID NO: 208783 - RNA, 70 nt, Homo sapiens
gcccgagagagaaggcaagcacaaccaagcagaagagagaggagggcacaaaggaggggcaaccgaccgg

SEQ ID NO: 208784 - RNA, 68 nt, Homo sapiens
gcgaccccaaaggcacgcccccggggcaaaggacaaggcacgaggcgcggcgaccaccacagcagagc

SEQ ID NO: 208785 - RNA, 55 nt, Homo sapiens
cgcaaagggcaggaaacaaacaggacccccgccagcagggaacccaggagcagga

SEQ ID NO: 208786 - RNA, 78 nt, Homo sapiens
gcagaggggcgcagagcaagccgacgagaagcaagaacaccgccgacacgagggaccacgcaaacgaagcacgccaac

SEQ ID NO: 208787 - RNA, 73 nt, Homo sapiens
ggacggaaaccagaacgaaaacccgcccaacaggggagagccacaagaagagggcgaacaacagagcacaaaa

SEQ ID NO: 208788 - RNA, 77 nt, Homo sapiens
gaccccagcccacaacccacgcgcaccggaaaagacccgcaaccgcgcccgggccgccggacaaaacacgggggacc

SEQ ID NO: 208789 - RNA, 73 nt, Homo sapiens
gagccccgggacggcgggaggccagcacagacagggaaacagaccacacccggaggaggacgggcgaaagagc

SEQ ID NO: 208790 - RNA, 107 nt, Homo sapiens
gccaacacgggagcggaagaacagccgaagaagggcccccggaagaaccgaaggacacacaggacaaaaagcgagcccgagaacacagggcgcggcagcgaaacagc

SEQ ID NO: 208791 - RNA, 86 nt, Homo sapiens
acgcaaggcaggaaggaacggagaagcggccacagagggcgcccaacagagcaccggccagaacaagccaaggagccaagacgaga

SEQ ID NO: 208792 - RNA, 51 nt, Homo sapiens
cccccagaccacaccggggcccgccggcagaaaacacagagaaaacacgga

SEQ ID NO: 208793 - RNA, 75 nt, Homo sapiens
aaggcagagggacggccgggaccaccagagggaaagcggggcggaaggaaaacacccggcagggaaggaaggaac

SEQ ID NO: 208794 - RNA, 38 nt, Homo sapiens
cagggaacagaccggaaaagaaagcagcacaaagcaca

SEQ ID NO: 208795 - RNA, 50 nt, Homo sapiens
ccgggagacaccccgcacacacacccaaggaacagagacagacccggggg

SEQ ID NO: 208796 - RNA, 57 nt, Homo sapiens
aagaagacagaacgcccccaccaccgcaaacacccgccaaggaacccgcggggcaga

SEQ ID NO: 208797 - RNA, 91 nt, Homo sapiens
gagaggcgagcgcccggaggggagagagcggaggacagccgagaggaggaacgcacaccagcaccagcccaccaaaccagcacgaccccgg

SEQ ID NO: 208798 - RNA, 76 nt, Homo sapiens
gcaaagaaaaaaccagcccaacaacacaccaaaaaaaccaggagcagcaagacagggcaaggggacgcgagaaagg

SEQ ID NO: 208799 - RNA, 76 nt, Homo sapiens
cggggaccccggcagccacccaccgccgccgcccccagccgccgcccgccagcggacccgcggcaccgccccgcgc

SEQ ID NO: 208800 - RNA, 87 nt, Homo sapiens
cgacgccgcaacccggggaaagcagccaccaggagagaacgccgcgccgcgcgacaacggcccggcaggcaaggccggccgcgggcg

SEQ ID NO: 208801 - RNA, 79 nt, Homo sapiens
gggggaggaggagacccccccaccgcacgcacaaacgggcagaaagaaacacggagaaaagcagaagcccaggacgccc

SEQ ID NO: 208802 - RNA, 73 nt, Homo sapiens
ggacaaaaaggcccaacacaccgagaccaaacagcaacgggaaaggaggaaacgggaagcgaagggaaagaac

SEQ ID NO: 208803 - RNA, 76 nt, Homo sapiens
ccagggcaaggcaccaaggacgccacacacacggccgccggaaaaaggaaagccaggccagaagaaggaaggccgg

SEQ ID NO: 208804 - RNA, 84 nt, Homo sapiens
ggcaggagcagaccaaaggcacaggaagaagcgcaggaaccggcggaccgaggcggcagcgaggaagcacgaccaagccgagga

SEQ ID NO: 208805 - RNA, 73 nt, Homo sapiens
gaggggagggacgaggggggccggagcaggagacagaagaaagagaccccaaaggcacccgcgagcgcaaccc

SEQ ID NO: 208806 - RNA, 81 nt, Homo sapiens
gagaagcggaccgcccgccaggccgcacacaagcggcgacccgggccacagaggaagccacgagcagccggggaagggcac

SEQ ID NO: 208807 - RNA, 65 nt, Homo sapiens
accaaccagaacacacgacagcagcagacaccacgaaccaagccagggaagaaaaccaggagacc

SEQ ID NO: 208808 - RNA, 94 nt, Homo sapiens
agaagccaaagggacacgaaaggagaacacgaacccaggaggaggaggggggagccgagagcgccagcccccagccgggcaaaacaggaaaacg

SEQ ID NO: 208809 - RNA, 71 nt, Homo sapiens
gccgaacagacagacacaggagcacaaacagcagacaaacgaccgaagaacggcaaagagaaaagaagcag

SEQ ID NO: 208810 - RNA, 73 nt, Homo sapiens
acaacccgggcagggcggcaaccgagacacaaagggaaagcgggcgggaaaccaacccgcaaggcagaaccag

SEQ ID NO: 208811 - RNA, 41 nt, Homo sapiens
ccagccagccagcaaccggaccggaccgacagcccccagga

SEQ ID NO: 208812 - RNA, 121 nt, Homo sapiens
gaaggcgaggagacggagcacggcccccgaggacggaggcacagcgcagcgacgagagggagcgagaagaggcgacaccagggcccaaagaacaaccgaaaggaagaaggaaacacgccca

SEQ ID NO: 208813 - RNA, 80 nt, Homo sapiens
cgcccggggcgaggcagggccagcagcaggcgggagggcggagaacggaaaagcaccaggaagcagagaggaccgcagaa

SEQ ID NO: 208814 - RNA, 78 nt, Homo sapiens
acacggccaccgcccagcgggagaggagcccaccaggacgaccgcgccgcccagcacgccagccgggggggcccgggg

SEQ ID NO: 208815 - RNA, 77 nt, Homo sapiens
ggggcgggcggaggaaggggcacgagcaagccgaggggaaggcgaagcgcaggggagaagcagaagaggaaagagcg

SEQ ID NO: 208816 - RNA, 67 nt, Homo sapiens
cccggccgccggcagcggccgcgccgcgccacccaagcaggagcgagaacccgagcagcgccagagc

SEQ ID NO: 208817 - RNA, 54 nt, Homo sapiens
agagaggaagaaaagggaagcacggccacagggaagcccgggggggcacaacgg

SEQ ID NO: 208818 - RNA, 73 nt, Homo sapiens
cccccccagcggccaacaaggcgagccggaccgggcaaccagcaaccgcccaagacaacgaggcccagggggc

SEQ ID NO: 208819 - RNA, 85 nt, Homo sapiens
gcgcccggccgggccgagcgccgagcagggagaagagcaaccggacacagaaggggaaggaaaccccaagcagcagaggggcagc

SEQ ID NO: 208820 - RNA, 71 nt, Homo sapiens
cgcagggcgcccccgcaacccacaggcgcaccgaggagaccacaaaccaggaaccacaccgcagaacacca

SEQ ID NO: 208821 - RNA, 81 nt, Homo sapiens
ccaggacagaagggccaaggagggaaaggagaggcgcaagcagcaggggagaccgagcgaaggcagagccaacaggacaag

SEQ ID NO: 208822 - RNA, 76 nt, Homo sapiens
aggagaggcaagaaggagaaacgccccgaggaaaaacagcacagccaaaaaacaacaaagggaaccaagcaggaag

SEQ ID NO: 208823 - RNA, 72 nt, Homo sapiens
cacaacgcaggaccggcgccgaaggcccgccaggcgcgggacaaccaacacaaccaaagagaagaaaacgca

SEQ ID NO: 208824 - RNA, 38 nt, Homo sapiens
cccggaggcggacacgcggaggagcgccgggcccaggc

SEQ ID NO: 208825 - RNA, 92 nt, Homo sapiens
cgagcggaccacgaggcgagacaccaggagccagcagcagcagaggaaaaaagagaccgagagaaagcagcagaaaggggggagagaaaaag

SEQ ID NO: 208826 - RNA, 68 nt, Homo sapiens
acagccggaacgccccaaaaaagagagccaacggaccacaacagagaaccaaggacgggaagcagaaa

SEQ ID NO: 208827 - RNA, 78 nt, Homo sapiens
cccgcgccccgagagaggcggcgagagcgagacaaaacagggcaaggcgcccagaagcggcgacgcaaccccccggcc

SEQ ID NO: 208828 - RNA, 83 nt, Homo sapiens
gagacgcccagaagggagaccagcagaacccaccaggccaagcaggggacagcacgagggcagcacacaacacccccccagga

SEQ ID NO: 208829 - RNA, 71 nt, Homo sapiens
caacagcccgcgcgggcgcggggacccccgacccccagagacaacccccaagggaagagggaggaagggaa

SEQ ID NO: 208830 - RNA, 83 nt, Homo sapiens
accacgggaggacgggagaggacaggaacccagaaacagaggaagagccggaacaagagaagaaagagcgcaaaccaggggag

SEQ ID NO: 208831 - RNA, 64 nt, Homo sapiens
gaagccaacagcgaggccagcggaaccacccaccgagggaccaggagacgacaccaagaggaaa

SEQ ID NO: 208832 - RNA, 76 nt, Homo sapiens
gaaagagccgcacgcggggagggggaaagcgcaggaaggaaagggacaaagagcgaagccgaccagcgccaggaaa

SEQ ID NO: 208833 - RNA, 75 nt, Homo sapiens
ggagcggccgggggaggcaggggcgcggcaggcgaccaaaacgaggaggcacgcacagggaagcaaaccaaccag

SEQ ID NO: 208834 - RNA, 42 nt, Homo sapiens
cccggaacaggaggagaagagagagaaaccccgcaccaaggc

SEQ ID NO: 208835 - RNA, 78 nt, Homo sapiens
gaggccgagaccagacgcggagccaggccgaggggcggacgcggccggccacaccaacaagacaagaaccaaacagaa

SEQ ID NO: 208836 - RNA, 75 nt, Homo sapiens
ccgccacagcacaaacacacgggacacaagccgcaacaggaggagcgaccgaagcacacgcagccgagccacccg

SEQ ID NO: 208837 - RNA, 109 nt, Homo sapiens
cccccagaggaaggaggcagcaggaggggcacagccagccaggagaagaacaaagcgagaccacagagacacggcgggacagcacgggccaggggagggcgccggccgc

SEQ ID NO: 208838 - RNA, 78 nt, Homo sapiens
cgcccagccccgcagccagggcgaacccccgcaggaaaccgccagaagcgcggcgagaaaacagacgcagcaaaccca

SEQ ID NO: 208839 - RNA, 55 nt, Homo sapiens
ccagccagggagcgaaaacggcagcaaggaaaaggaagggaaaacaagaggaaaa

SEQ ID NO: 208840 - RNA, 52 nt, Homo sapiens
aggccgagcaaggagagaacgcgagggaagccccaagggaggaagaaaccga

SEQ ID NO: 208841 - RNA, 79 nt, Homo sapiens
cgcgaggcccagaagcccaggcggaggcacaagaaaagggaccaacggaaccacaagaggcacagagcacaggaaggag

SEQ ID NO: 208842 - RNA, 69 nt, Homo sapiens
gcagcccagaccgccaccagggcaagaagaccggaaggagagaaagccagaccggaaaagaagaacgga

SEQ ID NO: 208843 - RNA, 53 nt, Homo sapiens
acagagacagaacgaccgggaagagcgcaaaaaacgggggccaggacagcccg

SEQ ID NO: 208844 - RNA, 76 nt, Homo sapiens
gccccaggcagcgggcggcgccagcggagaacagcccgaccacgccaggcccggcaaaggccaacagcaaaaaagc

SEQ ID NO: 208845 - RNA, 81 nt, Homo sapiens
ggaaaccccgcccacagcacgagaaggggcagaccaacaccacccagcaaaaaccccgacgaacgcgccagggagcgccag

SEQ ID NO: 208846 - RNA, 57 nt, Homo sapiens
acggcagacacacaacccgacccgacgagagaaaggagcccagggcagaccgggaga

SEQ ID NO: 208847 - RNA, 59 nt, Homo sapiens
gcagacgaagaccaacgaaagaaaacacacacacacaagcacgcagccagaggggccag

SEQ ID NO: 208848 - RNA, 69 nt, Homo sapiens
ggaaacaaggagaccgagcggaaagaaaagggagcgaagaaagcaggggaggaagcagcaaggcgcgac

SEQ ID NO: 208849 - RNA, 82 nt, Homo sapiens
gagaccaggccgggggacgccggagaacggcccaaccgccggacgcagcgaaggccaaggcccaccagcgagcagcccgcgc

SEQ ID NO: 208850 - RNA, 75 nt, Homo sapiens
gcagacagaggagcggacccccgcggcgcgcagcccagcagcgggccaaggaaagcggagggagccccagaggac

SEQ ID NO: 208851 - RNA, 55 nt, Homo sapiens
gccccgaagagcgggacacagaaggaagcacaacacgggaagaaaagacagcaca

SEQ ID NO: 208852 - RNA, 70 nt, Homo sapiens
cgcggagcccggccccgcaccaggaggaggacgacagcacgacagcagcgcgccagcaggagaaagcagc

SEQ ID NO: 208853 - RNA, 72 nt, Homo sapiens
aacggggggcgaaggcaaggcacaaagcccgacagggcaacacccgacaaaggagaagaagaaaaggccgcg

SEQ ID NO: 208854 - RNA, 81 nt, Homo sapiens
cacggcccaacagccccccaaggacggccccagagccgggaggagggagcgccgacccgcggacacggcgccgccggagga

SEQ ID NO: 208855 - RNA, 69 nt, Homo sapiens
gacaaaccggagaaggagccaagaaagagaaggcaggcacaacaacaggcgaccgcaggccgagcaccc

SEQ ID NO: 208856 - RNA, 56 nt, Homo sapiens
cggcggcgcccgcaccgcgcccgcaaaggaagaaagcacgggaaaaggccgggccc

SEQ ID NO: 208857 - RNA, 75 nt, Homo sapiens
ccaggcgacgcccaccaagagagaaaaggaacagccgaagccaggggcaagcgaaaccacagaagaaaggaggaa

SEQ ID NO: 208858 - RNA, 61 nt, Homo sapiens
aacaaaagggggcaagaggaggagaacaaagagggaaggagaacggagccgccgcccccag

SEQ ID NO: 208859 - RNA, 69 nt, Homo sapiens
gccgggcgagaggagcgggcgcccccccgccaggcggggaccaagagaagagcagaggaccagcaccgc

SEQ ID NO: 208860 - RNA, 129 nt, Homo sapiens
gggcagcgcccggaccggccgagaggaagacgagccgggaggaacggcccggaaacaggaggacggcagcgggggcagagacggggaacagggccacccacacggacgccaacgcgggggcagaaccgg

SEQ ID NO: 208861 - RNA, 69 nt, Homo sapiens
gaagaacagaacaacaacagaagaagaacagcccaagaaaagaggaggaggagagggaaccagagcgcc

SEQ ID NO: 208862 - RNA, 78 nt, Homo sapiens
acgccgcagagccaggagacggcaccgagacagccgcaagaccggcaggagcggcccccaggacaaagacaaggaagc

SEQ ID NO: 208863 - RNA, 72 nt, Homo sapiens
agaaaaccagaagcacaaggacagagcacccaccacaggaggacagggacaagcgcacagcggagaaagcag

SEQ ID NO: 208864 - RNA, 78 nt, Homo sapiens
gaagcccccccaggcccaacgaagagacgacacaaggagacgaggggaagaggcggcccagggcagcagcacacaaac

SEQ ID NO: 208865 - RNA, 80 nt, Homo sapiens
gggagcgcgaacgagcgacggcggaacccggggccgggacgcagcccggcggcagcagggagcaaaaggacggaagcaag

SEQ ID NO: 208866 - RNA, 66 nt, Homo sapiens
gcggccgggagcccccggagcagcagcccgccggcacgcgagccccagcaagccagaacggaagac

SEQ ID NO: 208867 - RNA, 63 nt, Homo sapiens
acaccggcaagggacagaacaggaaacccaggcccaacggcaggggagcaagaagaaagcccc

SEQ ID NO: 208868 - RNA, 75 nt, Homo sapiens
ccacacagcaaacacacggacgagcacgcaaccacgggcccccgcgcgcagggaaaagaacaggaagagaaacca

SEQ ID NO: 208869 - RNA, 60 nt, Homo sapiens
gcggggaaccaaggagacgcccggcacgcagagcccagaggcccggaaggcgcaaaaggg

SEQ ID NO: 208870 - RNA, 71 nt, Homo sapiens
gagagggacaccggccagagagagggaagacgacccagaaagagggacagaaaccacagcccaaaaaggga

SEQ ID NO: 208871 - RNA, 79 nt, Homo sapiens
ccgaagacccccagcagcagacccaagaagacagaccccgaggagacgcacgagccagggagccgccgggaccggcccg

SEQ ID NO: 208872 - RNA, 57 nt, Homo sapiens
gaccgggccgaaggggacggacgcccccacgaccaagaagccagccgccgacagccc

SEQ ID NO: 208873 - RNA, 81 nt, Homo sapiens
gggggagggacgggcccgggcaccccgcaggacccggccagaacagcgcaggccaagcagaaggcagccgcggagcgcgca

SEQ ID NO: 208874 - RNA, 83 nt, Homo sapiens
ggcccgaagcaagaacgcgggccaggcccagcagggccacggccaacccgaaaaaagcccgagcgcggaagaaaccgccgaga

SEQ ID NO: 208875 - RNA, 79 nt, Homo sapiens
caggcggcggccgagggcgcgcggaccccccgcgagagccggcggcgcccagcggccacacgccccaagcgccacgccc

SEQ ID NO: 208876 - RNA, 82 nt, Homo sapiens
gcgcagggcaagccggcggcggcagcgcgcccagcacgcgacccaagcaggaggcaggcggcgccgggcccaggcggaggca

SEQ ID NO: 208877 - RNA, 92 nt, Homo sapiens
gcgagcagcggggagcagaaaacagccaggaacccaggaaaaggcaagggaaaggagaagaaggaacggcgggacccacaagagagccgggg

SEQ ID NO: 208878 - RNA, 59 nt, Homo sapiens
aaggcgacccggggaaagacagcccacagccagaagcgaggaagagccaaacaccggag

SEQ ID NO: 208879 - RNA, 82 nt, Homo sapiens
cccagagcggagagcccaggagccagccccgacagcgaagacccgaaacagaaaggagcaacagcaaagaccacgaggggca

SEQ ID NO: 208880 - RNA, 77 nt, Homo sapiens
agacagcggacgggaaaaggccagagagaaaagaaaagggagagggagccccaacgggaaaccaaaaagaaaaaaaa

SEQ ID NO: 208881 - RNA, 75 nt, Homo sapiens
agcccagcgcaagccaccaacaggaagagggaagcccccgaaggagaccagcgacgcggacccagcggcccacgg

SEQ ID NO: 208882 - RNA, 51 nt, Homo sapiens
cggaaaccgagccagggcgagccggcgacaacaggccacagaggaaggaaa

SEQ ID NO: 208883 - RNA, 91 nt, Homo sapiens
gcggaggcggcagcggcgggccgaggcgaaggagcggccgggagcccgccgcgcggagcgggaaaagaagaccccggagcaggcccgaaag

SEQ ID NO: 208884 - RNA, 81 nt, Homo sapiens
agagaagaagagaagaaagcacaaaccggccagggccagcgggacggcaccgccgagaacgggaccacccccgagcccccg

SEQ ID NO: 208885 - RNA, 79 nt, Homo sapiens
gacacggggcagacacaacacgaggggcgccgcgggacgcagaggagaggcagcccacggaagggccaaggcgaacaga

SEQ ID NO: 208886 - RNA, 73 nt, Homo sapiens
agagcacgagcacgggaagggccaccagaggaccaagccagacgacgagaacaagacggaaagacgagggaga

SEQ ID NO: 208887 - RNA, 50 nt, Homo sapiens
gcgacgacagaggaaccgcaggcggcgcacgacacgggaaaaggggggca

SEQ ID NO: 208888 - RNA, 82 nt, Homo sapiens
ggacaagcacgagggcgcgccgagacgcccgagggcaaacagcacagaagaaggcaaagaaagaacgcagaacagcagcaaa

SEQ ID NO: 208889 - RNA, 80 nt, Homo sapiens
gacgccaccagccaggcccgagcgccaggaggaggaagaccgaccgccgccgcgcaccgcgccagaaggcacaacagccc

SEQ ID NO: 208890 - RNA, 75 nt, Homo sapiens
ggaagccggacccgccagagggacgacagggaggagggagaacacagcaaccgaccaggccgccccagcacgcgc

SEQ ID NO: 208891 - RNA, 72 nt, Homo sapiens
gcccggcagacgcagaaccaggggaagcagaccaagaagacagaaggggcccgccaccgcaaagcagcaaac

SEQ ID NO: 208892 - RNA, 51 nt, Homo sapiens
cgcaccgcaagcccccccgcaaagaaacgggaccaccaggaggccccaggc

SEQ ID NO: 208893 - RNA, 69 nt, Homo sapiens
ccggaaccacgcaccagacaacacagggcaggaaaagaagcaggagcgcacccacggaaagacgaccac

SEQ ID NO: 208894 - RNA, 63 nt, Homo sapiens
ccgaggccgaaacaaggaaaaaagcagagagaacacaagccaagccgagacacagccaacaga

SEQ ID NO: 208895 - RNA, 60 nt, Homo sapiens
caacagccagggccaggcgcagacccccaagaggaggggcagaccaacaaaaggcgggaa

SEQ ID NO: 208896 - RNA, 79 nt, Homo sapiens
ccgcgaggagagacgcccagggggcagaggaaccaagaagaagcaggggagaagaagaggagcaacaggaagggaagac

SEQ ID NO: 208897 - RNA, 57 nt, Homo sapiens
acccgcaccggaaggccacgccaagaacaggccaccagggggaaaaaccaggaaaga

SEQ ID NO: 208898 - RNA, 82 nt, Homo sapiens
ggggcgacccagaggagagcccaaacagacgacgcaaagaaacgaaggcagcaaaaagaagagcagaaacgaaggaaaaggc

SEQ ID NO: 208899 - RNA, 77 nt, Homo sapiens
gagacgcacagggggacgggacaagcccagggcgcggcacggacacaagcgacccaagagcccacgggccgagcaag

SEQ ID NO: 208900 - RNA, 83 nt, Homo sapiens
ggggagcggcggacggcaggcggggcggaggcggggcgcgggcgggaccgagagaagaagaaggaggccgcggccagaaaccc

SEQ ID NO: 208901 - RNA, 82 nt, Homo sapiens
cggcccacacccccgccacgcccgccacgagaccggccagagcaagacaaaaagaccaacaaggaacgagaagacaggcaaa

SEQ ID NO: 208902 - RNA, 75 nt, Homo sapiens
agcgggaacgcaggacccaaagccacgcaccccgcgccgccgccccccaccaaggaagcccaagccccaccagac

SEQ ID NO: 208903 - RNA, 75 nt, Homo sapiens
agaggcgagagcggcagcagcaccagcccaagagaaggcaagaacggaagcacgggcggaggaaagcacaagcag

SEQ ID NO: 208904 - RNA, 56 nt, Homo sapiens
ggggcacaagcccgagaagccaagaagaggaaaccagaacacggcaagagcagcca

SEQ ID NO: 208905 - RNA, 81 nt, Homo sapiens
ggggaaggcacacaacgacccggacagcgaccgcaagaagccgccccgaggccccggcgcggcgcgagggcgcggggcgcg

SEQ ID NO: 208906 - RNA, 74 nt, Homo sapiens
gccgcgggagagggcagccgagcacacgccgccgccgccgcacggacaaaacagggagggcagcgcacgaggga

SEQ ID NO: 208907 - RNA, 75 nt, Homo sapiens
agggcagagggagaaggcaaacccgagggaccaacaagacaccaggaggaggaaaaacaggggccgaaagaagag

SEQ ID NO: 208908 - RNA, 58 nt, Homo sapiens
ggccccggccgggagacgaggcccgcaccggccagcaagaccaccgcccacgaagccc

SEQ ID NO: 208909 - RNA, 57 nt, Homo sapiens
gaaaacaggaagggcaagaggggcgggccacagacagcccgcagcgcgcacaagacc

SEQ ID NO: 208910 - RNA, 71 nt, Homo sapiens
acagaagccgccagcgagccccacacagagaagaccaagagacagaagggacgggacgaggacccggggaa

SEQ ID NO: 208911 - RNA, 55 nt, Homo sapiens
gcccgacagaggcacagggacgccgaagccaaccaggggccgcaaggccaggcgc

SEQ ID NO: 208912 - RNA, 59 nt, Homo sapiens
aggagcagacagccggcaacaagggaacgcaaggcggggaaaaaaaggcagcacacaga

SEQ ID NO: 208913 - RNA, 82 nt, Homo sapiens
gagacagaagaggcgccaggacgaaggcccacgggcaaggccccagcaggcagcggaaccggagaacagccgcccgccaagg

SEQ ID NO: 208914 - RNA, 80 nt, Homo sapiens
cgaaaaggcagcaccggcagccacgagagaagaaagaaaaagaaaccgccagcccagagacacgaaagggacagagaggg

SEQ ID NO: 208915 - RNA, 81 nt, Homo sapiens
gacccggagcagaagaagcaggaccgcggggagcgaagcgcgcgggcccaccagaccaggggaggaggagaaagggagaag

SEQ ID NO: 208916 - RNA, 85 nt, Homo sapiens
gccaaccgcaaccagacgccagcgggacgaggaccgagaccgcggccgggaccgaggcgagagccgcggcagcccaagcgaacac

SEQ ID NO: 208917 - RNA, 54 nt, Homo sapiens
gcgaagaccggaccgggggcaccggaccgaggccgaccgggccgaggcgaacca

SEQ ID NO: 208918 - RNA, 56 nt, Homo sapiens
gggaggaggacgcggggaagggagaaggagaaagaccccagcaaggaccgacaaag

SEQ ID NO: 208919 - RNA, 71 nt, Homo sapiens
aggggaggccagcgaaaacacaagaaggcccgcccccgggagcagagccaaggacaaacaaacgcgggccg

SEQ ID NO: 208920 - RNA, 68 nt, Homo sapiens
aggacgcagaaggaagccgaaaagcacgcaggaagcccaaacgggcacagggcaggagaagcgcggac

SEQ ID NO: 208921 - RNA, 70 nt, Homo sapiens
ccccggcacgacaccgccccaacccacgagaggacagcccaggaaaagaaggaggccagcgggacacaca

SEQ ID NO: 208922 - RNA, 76 nt, Homo sapiens
cagaagacgccgcagccagcgcccagcagagcagcagcccaaaacgccaaagcacacagcccagcgaaagacaacc

SEQ ID NO: 208923 - RNA, 73 nt, Homo sapiens
ccggccccgagacagaagccgaacgcagaaaacaccagaagaacccggcggaggcagaaagggaaaaaagagg

SEQ ID NO: 208924 - RNA, 75 nt, Homo sapiens
acaaggacgcgcgacaacaaaaacagaacaaagaagccacagacaaagagggaggaacaaacaacaaaggaaggg

SEQ ID NO: 208925 - RNA, 63 nt, Homo sapiens
ggaaggcgcgaggaggaaaggaggacgagacccaacagaggaagccgcaagaaacgggacgac

SEQ ID NO: 208926 - RNA, 63 nt, Homo sapiens
aagcacaccgaaagccacagcaagaagcaacggggcggcacacaaggagcgaagggcagggag

SEQ ID NO: 208927 - RNA, 63 nt, Homo sapiens
gcaggacggaaagaacccggccagacggcgaacagcccagcggccagaagaaagagagaccag

SEQ ID NO: 208928 - RNA, 74 nt, Homo sapiens
cggacccaccacccacaagagccaaggaaagaagccgcagcaggccccgaaacgagaggagaaaaacagcccca

SEQ ID NO: 208929 - RNA, 78 nt, Homo sapiens
aaaagcaacaaagaggaggagagaaggcgaggaagcccaagcacaaaggagaagacgcccaagccaagaaaacacccc

SEQ ID NO: 208930 - RNA, 73 nt, Homo sapiens
aacaaagccaaggaaaccccaacacagagccaagcgccaaaccggggagaaaagcgcaagacccaagaggaca

SEQ ID NO: 208931 - RNA, 48 nt, Homo sapiens
ggggcaggaggcgcggacacgcaaaccacacaaggaggaggcggcagg

SEQ ID NO: 208932 - RNA, 79 nt, Homo sapiens
cggccgccaagagaagggcacccgcacggccggcccggagaacagcccaccaccacccgagcgcagcccagagacccca

SEQ ID NO: 208933 - RNA, 51 nt, Homo sapiens
cggaaaaggccacccgcgccggaccgaaagacaacaacgcagagaagaacg

SEQ ID NO: 208934 - RNA, 65 nt, Homo sapiens
gacggaaagaccaacggagacaaaacagccaacaagccgcacaccgccgcggacccaagaacgag

SEQ ID NO: 208935 - RNA, 38 nt, Homo sapiens
cccacccccagcggaaagggaagccgaacgagcgggga

SEQ ID NO: 208936 - RNA, 107 nt, Homo sapiens
gccggccaagccacgccgaccagggaggaccggacccccgcaaggcaaccgggaggggaggaaaccgccagaagcgcggcgagaaaacagacgcagcaaacccagac

SEQ ID NO: 208937 - RNA, 71 nt, Homo sapiens
cggggcagaacagaacacgaaaagccaggggaccccagcccaacgccaaacgagccggacccggaggacgg

SEQ ID NO: 208938 - RNA, 70 nt, Homo sapiens
cacccgccaccagcgacaagaaggaccagagaaaaggcacagaacaggcggagaacggaaaagcaccagg

SEQ ID NO: 208939 - RNA, 72 nt, Homo sapiens
aaggagggcggcgcgccgagcgggggcggcacggggccgggacgcacggagacagcaagaaggaggaccggc

SEQ ID NO: 208940 - RNA, 88 nt, Homo sapiens
ggaggagaacccaccaagccccgcaggagccaccagacggagcagagcaggacaggccggcccccgcagaggccaccgcggccggccc

SEQ ID NO: 208941 - RNA, 74 nt, Homo sapiens
aaaggagcgggccggcaagggagggaaccccaccaccgacggaccaagcgcacaaacagacaccaggcgcggaa

SEQ ID NO: 208942 - RNA, 66 nt, Homo sapiens
cggccgaaacagaaaacaagagaccacagaagccccaggggcaggacagggggaaccagaaagccc

SEQ ID NO: 208943 - RNA, 60 nt, Homo sapiens
acaaaaagcaaagcggaggaccaaaggaagaggaaaagcgaaggcagccggaggaagaag

SEQ ID NO: 208944 - RNA, 53 nt, Homo sapiens
ggcccggccccccgcgcacggccagcgcagggagcacaagcgggaggggccgg

SEQ ID NO: 208945 - RNA, 77 nt, Homo sapiens
gggagcggccggacacccaccccgcccccaggcagcagaccaagggaggaccgcgcacaaagcggacaacaaccaag

SEQ ID NO: 208946 - RNA, 78 nt, Homo sapiens
cgaccagcagagaagagggaggccgagaggcgcgcaaccgccccaggaagaagacggcacgggacccccagcacaggc

SEQ ID NO: 208947 - RNA, 109 nt, Homo sapiens
gcacaccggcggagacgggcggccggccgacccccgcgcgacggcgacgcgggaggccaggcaggacggagcccgcgcgcggcgccaccagcggcagaaggcggacgcc

SEQ ID NO: 208948 - RNA, 73 nt, Homo sapiens
agaagcagacggaaggagggaaaagggacccaacggccaagacggacccccacggcgagcggggggagagagc

SEQ ID NO: 208949 - RNA, 81 nt, Homo sapiens
cgcggggcagcggcggcggcggcgcggggaccgaggccgacgcccgccgcggccggggaacaggccacagccaggagcgca

SEQ ID NO: 208950 - RNA, 75 nt, Homo sapiens
gggaacagggcaaaaaagaggaaagccaaagcagggaacacggggaacagcccgcaggacaagcgagaggaggaa

SEQ ID NO: 208951 - RNA, 98 nt, Homo sapiens
cggaccggccgagaggaagacgagccgggaggaacggcccggaaacaggaggacgcggaagaacgacgcccgcacacaagcgagaacggggaagaccc

SEQ ID NO: 208952 - RNA, 56 nt, Homo sapiens
ccagcaggccgggcgcagcggaaggagagacaggaagggcacagaaacggcgcgag

SEQ ID NO: 208953 - RNA, 51 nt, Homo sapiens
cgggcaccacaggcaagagcgggagggacaggagaacaggcacgaccccac

SEQ ID NO: 208954 - RNA, 72 nt, Homo sapiens
cggcgccccggacaggacgggagaccccagcacagcggcagcccggcaagccgaaacggcagaccccaaaag

SEQ ID NO: 208955 - RNA, 71 nt, Homo sapiens
gccggaccagacagcaccccggaccagcccggggcccgagaaaaagaagcaggcacgaggaacagcagaag

SEQ ID NO: 208956 - RNA, 80 nt, Homo sapiens
cgggcgggccccgagagcagcagcggagacgcggccacgccagaacagccacagccagcaaagagaagggaagaagacga

SEQ ID NO: 208957 - RNA, 66 nt, Homo sapiens
caaccgaagggggcgaacagcaaaccacccagcaggaaaccaagagaagggcacggaaaaaggaga

SEQ ID NO: 208958 - RNA, 74 nt, Homo sapiens
ccaacaaagagaagagaaaccaagcccggcccagaaggggaagacccccagcgaacagagacccaaaaagaaga

SEQ ID NO: 208959 - RNA, 74 nt, Homo sapiens
acgggggcgacccgcgccgccagggacgaacagcggggacgccccagcagaccgcccaggagaggaaagcagga

SEQ ID NO: 208960 - RNA, 72 nt, Homo sapiens
ccccaggcgccgcacgcggggcagcccgaggcgcaccagaagaccgcgacggggcgagccggcagaggagcg

SEQ ID NO: 208961 - RNA, 78 nt, Homo sapiens
ccgggagccaggaagagaacaagacgaccaaagccagaccccaacagcaagcgcagcagccaggccacacaaagcaac

SEQ ID NO: 208962 - RNA, 52 nt, Homo sapiens
gacaccgccaccgaccaccccgacccgaggggaagcgcagccagccagcgaa

SEQ ID NO: 208963 - RNA, 74 nt, Homo sapiens
ggaagcgaaagaaaaacaggagaagaaggccgacacggagggggccaggacaaccaaaggggacggcaaaaggg

SEQ ID NO: 208964 - RNA, 72 nt, Homo sapiens
caagaaacccaggacgagaacagcaacaggacaccagaggagagaagccgaaagaacaggacccaggggcca

SEQ ID NO: 208965 - RNA, 63 nt, Homo sapiens
cagaaggggaaggacggaagccaggaccgcgagacaaccaagcagggcacagaagggcaaagg

SEQ ID NO: 208966 - RNA, 85 nt, Homo sapiens
ccccggcccacaggggggggcaaacccgagagaacggggacacggccaacacgggaaggaaaagcgggaggaagcagaaccacgg

SEQ ID NO: 208967 - RNA, 54 nt, Homo sapiens
ggggcgcgccacgcccagggggacgcggaagagacagcagaacaagagccagga

SEQ ID NO: 208968 - RNA, 65 nt, Homo sapiens
ggaaaacggaccacaccaacaaggcacacacaaacgacccaacccaacacgaggcaccggggacg

SEQ ID NO: 208969 - RNA, 42 nt, Homo sapiens
ggcaccaaggcccgggaaggagacagcacgcccgaagagacc

SEQ ID NO: 208970 - RNA, 76 nt, Homo sapiens
ccccagcggggagcacgcgccaagaacaagacccgcagaggagaagacaaggccggaaggcgaggaggcacgagca

SEQ ID NO: 208971 - RNA, 84 nt, Homo sapiens
cgaaggccgggacccggccccggcccacaggggggggcaaacccgagagaacggaaaaaaggagcgcaggccgaggagaagacc

SEQ ID NO: 208972 - RNA, 75 nt, Homo sapiens
caggaccagcagggcgggcaggcccacacagggcgaaaccaagaggagggaagcaggcagacgcgaggccggcca

SEQ ID NO: 208973 - RNA, 75 nt, Homo sapiens
cgggaaaaacgaccgcaagaccagggagaagagcagagaggagagcgaagagaacccagcagagcagcaggaaag

SEQ ID NO: 208974 - RNA, 48 nt, Homo sapiens
ggccagacgacaacaaagaccaaaaacagagcgccaaaaggccaagag

SEQ ID NO: 208975 - RNA, 73 nt, Homo sapiens
gacccacagcaccccgaggcccgacccaggaacgagcagagcgacagcgaagcgcagcaacacaagccccagg

SEQ ID NO: 208976 - RNA, 88 nt, Homo sapiens
ccaccgagacggcgaccgggcgccgagacaccagagccacaaggccaccacacgggcgcggggaacgagggggacacaccaccaggac

SEQ ID NO: 208977 - RNA, 63 nt, Homo sapiens
aaaccccagacgcgccggagggccagggcgcacaaaagagcacaaaagcaccaaggcgcacaa

SEQ ID NO: 208978 - RNA, 83 nt, Homo sapiens
gagcccgagccgaggccgagacgccagaggagcagcgacggacccagagccagggcggccccggccccaacccacgaggcagc

SEQ ID NO: 208979 - RNA, 86 nt, Homo sapiens
gggagcaggacaagcaggcggagacaggcagggaagagagaccagaaaggacaggacggcggagccagccccgggcaacaaaggga

SEQ ID NO: 208980 - RNA, 74 nt, Homo sapiens
agaagagaacaccgggaggagggaggagacccgaagcaaggccaagggcagacagagggacccaggcgccaccc

SEQ ID NO: 208981 - RNA, 63 nt, Homo sapiens
gcagcggccaagaaagaggaggagcccaggccgcccggccagagagggaaacccgggcgccca

SEQ ID NO: 208982 - RNA, 73 nt, Homo sapiens
cgccgcaccgcgcaggagccagccacagggaaggagggaaagagagagcccagggggcccagggcgccaagga

SEQ ID NO: 208983 - RNA, 40 nt, Homo sapiens
accacgaaaccaaggagcgagacagcaagcccccaccaga

SEQ ID NO: 208984 - RNA, 81 nt, Homo sapiens
ggaccgaaacagaaacggaacaccaaggcgggcgcaaagacaccgccagaagaccagaggaccccggaggaagcagccgaa

SEQ ID NO: 208985 - RNA, 74 nt, Homo sapiens
cgggaccaacgcaccagagccgagaaacgcgaaaaggaagcggaaggcaaaacaagcacgacagggaagaccca

SEQ ID NO: 208986 - RNA, 78 nt, Homo sapiens
ccgcccggcccggcaagggcccggaccaaggcacagcaccgcggcagaggaacagacacggagaagaccgcccaggaa

SEQ ID NO: 208987 - RNA, 68 nt, Homo sapiens
gcacgagggccggcccgcgggcaggcgggcgacaaaccccgggggaccacccaccgggggaggcagcg

SEQ ID NO: 208988 - RNA, 58 nt, Homo sapiens
ccacggaacaaacacggaaacaaggacagaagcaggagaagccagggaaacgcagaga

SEQ ID NO: 208989 - RNA, 64 nt, Homo sapiens
aagacagccgccccccccccgaaagagaaacacagaacggagagacaggcgaaggcacaaccac

SEQ ID NO: 208990 - RNA, 88 nt, Homo sapiens
caaaaccggaccagcacgaggggaaccggaaggacgagccgcacccaagcagccgccagagcagcacagacagcgaaccaaacccgga

SEQ ID NO: 208991 - RNA, 82 nt, Homo sapiens
cgagaggcggcccgcagcagaccacagcaccgggaccccagcgacccggagaagacccgaggcccgcccgggagaagcccgc

SEQ ID NO: 208992 - RNA, 69 nt, Homo sapiens
ccggcacgagcccagcccccggagcacagggaacaccagaggcgggaccacgggcagcgcccagggagc

SEQ ID NO: 208993 - RNA, 76 nt, Homo sapiens
ggggagggaaagggaagacacgaaaaaagagaaagggccaacgagcacacgacgaaggaggacagggaacgaagac

SEQ ID NO: 208994 - RNA, 73 nt, Homo sapiens
aagcaaacaccgcgcgacacacaccaaaggaaagaacgaagaggcggggcagcaaaggggggagaagagcccg

SEQ ID NO: 208995 - RNA, 101 nt, Homo sapiens
gcccggccgccaggccggagcgcgaagcggccacccgcccccccgccgcccccgggagcgcgccgaccacgccagcgcgcgggcccggcccaggcgcacgg

SEQ ID NO: 208996 - RNA, 56 nt, Homo sapiens
gcgaggggaagaccaagacaggccggaacccgaaaggcacagggaacaccagaggc

SEQ ID NO: 208997 - RNA, 57 nt, Homo sapiens
aaagaagaacgagacagacacaggaaggccgcaagggaaccccccaaccacccaccc

SEQ ID NO: 208998 - RNA, 56 nt, Homo sapiens
gaacgacaacccgggggagccagagccggagaaagcgggaacagcacaaggaggga

SEQ ID NO: 208999 - RNA, 88 nt, Homo sapiens
cgcgccgacacgggcggggacccgccgcgacaccggcgcaggggacagagagccgaaagccgggcaaggggaaagaaggccgaagaac

SEQ ID NO: 209000 - RNA, 73 nt, Homo sapiens
cgcaagggagaacggaaaggaaacaaaagcacagacaagaagcgaaaagaggaggaagcgcgggcaacacaac

SEQ ID NO: 209001 - RNA, 72 nt, Homo sapiens
ggaggcgcgagagcgggaagaggcggcagacagcgggacaacggcaagcggagaagagcaaggccgaaccga

SEQ ID NO: 209002 - RNA, 74 nt, Homo sapiens
cacaccccagcggggaagaccaacagacaaccaccaaaggggaaacagaaacaagcccgccgcagcaagagaga

SEQ ID NO: 209003 - RNA, 68 nt, Homo sapiens
gcccgcgcaccagagcccaccgggaaaccgagcaaggcggccaaccagaacggaaagccaggcacgcc

SEQ ID NO: 209004 - RNA, 48 nt, Homo sapiens
cgcaagcccgcagggacgaggccccaagggcaacgcggggcgagccac

SEQ ID NO: 209005 - RNA, 75 nt, Homo sapiens
gaccggacaccgagaacgggaaaggaaggcccggaggcgcccagggaacagcaaagaaaagaccgcacagagccc

SEQ ID NO: 209006 - RNA, 83 nt, Homo sapiens
cggggcccgggaccacaggccccggcccagaagggcgggcaccaacggacggcaccgcgggccccgcggcgccagcaccgagc

SEQ ID NO: 209007 - RNA, 81 nt, Homo sapiens
ccccggcccccccacccgcgggccgcggcgcccggggaaagccgggccccgagggcggaccgagcaaaagaagcgaaccgg

SEQ ID NO: 209008 - RNA, 80 nt, Homo sapiens
gagcgagcagaacacacagagccaccagaacccccagcggaccaggcccaggaagagcaagaaggcagacaaagccaggg

SEQ ID NO: 209009 - RNA, 56 nt, Homo sapiens
ccccgcccggcggggaagggagggcacaaggcgcgacgagcggagcggccgagccc

SEQ ID NO: 209010 - RNA, 87 nt, Homo sapiens
cgcagcgcgcccagcggcccaggcgccgcggcgaggagcgagcgcgcgaggggcggccgaggccccccaaagaggcggacaaggggc

SEQ ID NO: 209011 - RNA, 61 nt, Homo sapiens
aaacaagaagaaacaagcacccgccgggccgaaccggaagggcaagcggccgcgagaaccg

SEQ ID NO: 209012 - RNA, 73 nt, Homo sapiens
ggccggcgccggagacgagccggaacccaccaaaacggaaaaagggacgcccagcgcaagccgcggcgccccg

SEQ ID NO: 209013 - RNA, 70 nt, Homo sapiens
gaccgcaaggcccagaagccaagaaacccacagaggaaggcgggccaaggccagcggcaaagcggggccc

SEQ ID NO: 209014 - RNA, 73 nt, Homo sapiens
agcggcgggaggccaccgccagcgcaccaagcccgaggaaacaaagaaaaaagagcgaacggaacaggaggca

SEQ ID NO: 209015 - RNA, 69 nt, Homo sapiens
cagagaagacacacccccaaaggcacaacccgaggacgagcaacaaagaacgaacccccaaacggaaaa

SEQ ID NO: 209016 - RNA, 61 nt, Homo sapiens
ggaacccgcccccagggagggaacaaagcccacaagcaccgaaaacaaaccggcgaggaga

SEQ ID NO: 209017 - RNA, 86 nt, Homo sapiens
gaagcccgagcgacggaccccacacacccgacgaaccgagcacgaaaacaggaaacccaggcccaacggcaggggagcaagaagaa

SEQ ID NO: 209018 - RNA, 76 nt, Homo sapiens
gcaggacagcggagaaaagggccaccaggggagaaccggggaaaagaccaggaaggaagaccagcgggcagaggaa

SEQ ID NO: 209019 - RNA, 82 nt, Homo sapiens
caagggacgcgacaacggccagacgagcaaggcgcgaggcaccacagcgaacacaacccccggggccggccagaacacaggg

SEQ ID NO: 209020 - RNA, 58 nt, Homo sapiens
cggacccaaaggaaagcagaaaggcaccgcggaaccgagcagcaggagcggacggacg

SEQ ID NO: 209021 - RNA, 82 nt, Homo sapiens
ccagaaggcgccgggcagaggaccggaggccgggaagccaacgaccacacgcagacgaccgaaaacccagccagacaaaaga

SEQ ID NO: 209022 - RNA, 74 nt, Homo sapiens
cacagagacacaaccggagcccagagccacgcaaagcgacaccgaaagaaccgagggaaggagagcccacaagg

SEQ ID NO: 209023 - RNA, 73 nt, Homo sapiens
ggggacgccccggcaacccaggggcggccacgaccaccaggcgccagcaagccacacccagaaccagcagccc

SEQ ID NO: 209024 - RNA, 104 nt, Homo sapiens
acgagccagagggaaccaccggacggcggaaaggcccaggcgccccgcaggggcgcgacgagagaccgcgcacacgggcccagaagcagcccagaccccgcgag

SEQ ID NO: 209025 - RNA, 34 nt, Homo sapiens
caccccagagaaagaccaggggggaaggagacgc

SEQ ID NO: 209026 - RNA, 77 nt, Homo sapiens
agcgccaaagccagacaagacaggacacgggccccaaggggcacccccgagcccccgcagaaccaaggcagcaaggc

SEQ ID NO: 209027 - RNA, 77 nt, Homo sapiens
acagacaccgagccagcaagcccccaacggccccagggacagcggaggaagaagaagccgcccaagggccgccacag

SEQ ID NO: 209028 - RNA, 73 nt, Homo sapiens
ccacggcacggagcaccagcacagcaggcaggcagcccgaggcccacaagcagagaagagaacacacccagaa

SEQ ID NO: 209029 - RNA, 48 nt, Homo sapiens
gaaaaccacgcccccagagcgagagaacgcaccgggggcagacaccac

SEQ ID NO: 209030 - RNA, 68 nt, Homo sapiens
aacccacgacaaaaagaggagagaacaggagagaaaaccggaagagagccggacaccaagcaacgaga

SEQ ID NO: 209031 - RNA, 74 nt, Homo sapiens
aggaaagccagacaccacgagaggccgagacaggaagacaaagcgaagccagccggccaagacagcgaagccac

SEQ ID NO: 209032 - RNA, 70 nt, Homo sapiens
gcagaggaagagaaagaaccacaccaagagacccaagaggacgaaacagaaccaggacgcgagaaaggcg

SEQ ID NO: 209033 - RNA, 66 nt, Homo sapiens
aggaaccggaaaacaccacccaaaaacgggcccggacgccaccaacaacagcagcacagccagccc

SEQ ID NO: 209034 - RNA, 73 nt, Homo sapiens
ccacgcggccagcgaaaacgcccagaaaggacagagaaaaaaaaaggaagcagcaagcgcaagagacaaaggg

SEQ ID NO: 209035 - RNA, 84 nt, Homo sapiens
gcgggagaaggcgcaacgcggcgcacccacggcagggcaaccccaccgcggaaggcaggcacacagacgagaacagagaggacc

SEQ ID NO: 209036 - RNA, 74 nt, Homo sapiens
gaaagaggcggcggcgcgccgcggccggccacgcggaaaaagaacagaggccaacccgacaagaggaccaaggc

SEQ ID NO: 209037 - RNA, 70 nt, Homo sapiens
ggaccgcgggacaagaaaacagcgcccagagccaggagaagcagaacgggacaccaaaccggaaagaaga

SEQ ID NO: 209038 - RNA, 76 nt, Homo sapiens
aaaaagagaagcagacccagaaccacaccaaggagacagacgagccggcgcagaaaagaaggagcgggcgccaaag

SEQ ID NO: 209039 - RNA, 73 nt, Homo sapiens
cgagcgagggggggcgcgccggaaaccggagcgcgcagcagaccacgagaaggaaagagcgcccggcagcgcg

SEQ ID NO: 209040 - RNA, 82 nt, Homo sapiens
acagggaagggcgcgagcggggacaaagcgggagccgccagcgaccgaggccggcggagccagccccgacgccacaaccggg

SEQ ID NO: 209041 - RNA, 52 nt, Homo sapiens
aaggccccacgaaggcaacagacggagcggaaccgccagaccacaagaaaag

SEQ ID NO: 209042 - RNA, 68 nt, Homo sapiens
ggaagaccacggagcagcgcaggagaaaaagggagaagcagaccgcaccaggcgggaccccgaaaaag

SEQ ID NO: 209043 - RNA, 51 nt, Homo sapiens
ggaaaaccgacacaacagacaggcccacagaagccggcaaaccccgacggc

SEQ ID NO: 209044 - RNA, 92 nt, Homo sapiens
aagcaaaagaggaagcagcgccagcagcaaaaacggagcagaaaggaggccagcaagggaacagagcgcgggccagagcacggaacgacgaa

SEQ ID NO: 209045 - RNA, 74 nt, Homo sapiens
caaacaccaaaacaagccaagcagccagaagagaaggccaagcagggcccgaaaagccccccgacgggccgccc

SEQ ID NO: 209046 - RNA, 61 nt, Homo sapiens
cgggcgcccggcccggagcgccgcgggccgccgcggcgcagggcaaccgccaccaacgcgg

SEQ ID NO: 209047 - RNA, 85 nt, Homo sapiens
cggacgaccaggcaccgcgcgggcagagcccacgcaggagacgggaggagcgacaacggagcacacccaccccgcgcaagggcag

SEQ ID NO: 209048 - RNA, 57 nt, Homo sapiens
aggagacaaaagcacaggaggaccccaggagcaagcacaagcaaaaccacacacgga

SEQ ID NO: 209049 - RNA, 77 nt, Homo sapiens
caagaaagaaacacagacgccaagcaccgcaaggccggagacgggaagcccaacgcgaagaaaagaagccagcggag

SEQ ID NO: 209050 - RNA, 107 nt, Homo sapiens
agcgcgcaccccggaacagcgccgaggcccaaggcagaggcgaggcggaagggcaccccacccgcagaccggggaaccagcaccccagaaggaggagagccagagcc

SEQ ID NO: 209051 - RNA, 54 nt, Homo sapiens
gaagcggagagcaacagcgcgccggaagaagagagggcgaaggaggccacacag

SEQ ID NO: 209052 - RNA, 77 nt, Homo sapiens
cgagcaggccagcccgagcagcccaggcccagcccgcgacgacgagccagccggccagcccaccccaagccccaggc

SEQ ID NO: 209053 - RNA, 55 nt, Homo sapiens
ccagaagaagaaccccaaaggacggacagcagaaaggcggaaaaaggaaaccaca

SEQ ID NO: 209054 - RNA, 86 nt, Homo sapiens
gacgagacacgcaaggaggcagacgggggcaaccggacagagaagcccaagagaagcaggaggagcagcgcagcggcagggccggg

SEQ ID NO: 209055 - RNA, 65 nt, Homo sapiens
gccggcccaggggccaccaaggagagaggggaccgggccggagcgccgagcgggggaaacgggac

SEQ ID NO: 209056 - RNA, 68 nt, Homo sapiens
cccacagggaagagggaagagagaaggccacgcccgaccccaagcaacaacggggcagggacaggcgc

SEQ ID NO: 209057 - RNA, 80 nt, Homo sapiens
gcccccgccccagcccgccggcggcggcggacaagcagaccggaagaccgacggaagaccacaccccgagggagcccagg

SEQ ID NO: 209058 - RNA, 81 nt, Homo sapiens
ggcggggccgggccggagacgcgcccgcgcgcaggggaagcgggcaggacccaaagacaggaccacgcaccagcagagaag

SEQ ID NO: 209059 - RNA, 77 nt, Homo sapiens
ccgaccagcgcggccgccggacgcccccccgcagcgccgagagacgccccaccaggcacaggagccccggccccaca

SEQ ID NO: 209060 - RNA, 74 nt, Homo sapiens
gcggcggcgcggcccaaaaggacccaaagacaggaccacgcaccagcagagaaggaaagcaaaccgaagcaggc

SEQ ID NO: 209061 - RNA, 69 nt, Homo sapiens
ggggagacccggggacccccgacgccaggcagcgcccccaaacggcacccccagcaggacagcacaccc

SEQ ID NO: 209062 - RNA, 41 nt, Homo sapiens
aggaagagaagaaaggaggagacagccccagcacagaggaa

SEQ ID NO: 209063 - RNA, 81 nt, Homo sapiens
ccggcgcccacccgccgcccgccaggcacggccggaaggacaggcaagacccaggacggcggcgcaccgcagcccgagcgc

SEQ ID NO: 209064 - RNA, 82 nt, Homo sapiens
caagagaagacgcagccacaccacaagcagcagcggagagagaccccaggccaaaagcgagacaagacgaaaggacgccaca

SEQ ID NO: 209065 - RNA, 82 nt, Homo sapiens
caaccgacggcgagccgcagcccacccaacgcgccgccggcacgggccgccgcaccacagcaccgagggaccaaagaagcca

SEQ ID NO: 209066 - RNA, 79 nt, Homo sapiens
ccggaagggcaggcacagggcaagggcccgccccaggagagccgcccgagaacaagccccgggggagcggcagcacccg

SEQ ID NO: 209067 - RNA, 57 nt, Homo sapiens
acgaagaacccacagagggacccaagcagcccaagcgccgagccccacggggaggcc

SEQ ID NO: 209068 - RNA, 52 nt, Homo sapiens
caaccccacaggacccaagggaaggaacaagcagggcgcccccagcggagcg

SEQ ID NO: 209069 - RNA, 87 nt, Homo sapiens
caaacgaagcgggaggggcgaaacgaggaggagaaacgcggccgggccgggaaagcaggcaggagggagagcgccgaagaaccaccc

SEQ ID NO: 209070 - RNA, 66 nt, Homo sapiens
gggaagcagccgaccagccgcggagccgggggcagacagcaagaaagcaccagccaagcagaaggg

SEQ ID NO: 209071 - RNA, 71 nt, Homo sapiens
cacagggcccgcgaaaaagccagaaaacagacaaagggagccaaaggaaaaaagaccccagacccgcagaa

SEQ ID NO: 209072 - RNA, 83 nt, Homo sapiens
gcccgcgaggagccgccgcgcgcccgcgcccccgcgcgacgccaggcgcaaggaagaagagacgccgcgcggcagacaaggcc

SEQ ID NO: 209073 - RNA, 50 nt, Homo sapiens
ggggacccgagcccgacagcccagccagggaccaggaggagaagcaacca

SEQ ID NO: 209074 - RNA, 74 nt, Homo sapiens
cgcaacacaggaaaacagagaaagaaggaaggagggccgagaacccaggagaaacgagagggacagcaaggaag

SEQ ID NO: 209075 - RNA, 73 nt, Homo sapiens
gggggagccgccgccggaggcccccaaaacacaagaggacggagaagcgacgaaagaagccgggacaaggacc

SEQ ID NO: 209076 - RNA, 64 nt, Homo sapiens
gcgccacggccacggcgcggcaccggggcgccgggggcgagaccggaccaggacagagagcggg

SEQ ID NO: 209077 - RNA, 33 nt, Homo sapiens
cacagccagcaacaccgaaggagggccccggag

SEQ ID NO: 209078 - RNA, 72 nt, Homo sapiens
gaccacaaaacggaggagagagaaagcaaggcaaaccagggggccacacagagcgcagagggaaagacggca

SEQ ID NO: 209079 - RNA, 88 nt, Homo sapiens
ccgcaacggcaacccaccccaagcagaggcagaaacagggaaaccaacgcagagcaagccacgaagggcaccagcggagaagccccac

SEQ ID NO: 209080 - RNA, 77 nt, Homo sapiens
cgagagccgagagagcacgcacgagaggcacggagcaaacacggcagcacacggaaagcgggcaaaaaaaaaaaaag

SEQ ID NO: 209081 - RNA, 73 nt, Homo sapiens
cgcacacagcaagcacgagggaacacgacagccaaaggagacacagaaggaagggagaaggggacgggaaaaa

SEQ ID NO: 209082 - RNA, 76 nt, Homo sapiens
ggcgggcgcggcggccgcgggaagaccgcaggaaagcaggaaggcaagaaagccaaggacgaaacccacacggagg

SEQ ID NO: 209083 - RNA, 87 nt, Homo sapiens
gacaagcgccccgacggagcgccaggacgccggaaccaaaaagaagccccagagccggggccaggagccccaagcgccccagcagca

SEQ ID NO: 209084 - RNA, 76 nt, Homo sapiens
aggaagaaccaccgagaagagaaaaaacaaaaggacggggaccaaaaaggggcaagacgccaagagaaaaggcgag

SEQ ID NO: 209085 - RNA, 76 nt, Homo sapiens
ccaggccagaagccacgacagcccccagggcagggagcccgcacggaaaagcccaccgaaacgcccagcaacaacc

SEQ ID NO: 209086 - RNA, 79 nt, Homo sapiens
cggagaagcaggggggccaggaggggagaggaggcaggcccgcgaggaaggagccagacgacaggaaaacccgcaagga

SEQ ID NO: 209087 - RNA, 63 nt, Homo sapiens
gagaggaaagagacccgcagagccacagggcaggcccgggaggagcggggacacgaggacccc

SEQ ID NO: 209088 - RNA, 68 nt, Homo sapiens
gcaacaaaagaaaaagacagcagcgaaaagaacggaagcgaacaggaaaagaaaaccaaaggaagacg

SEQ ID NO: 209089 - RNA, 80 nt, Homo sapiens
cgaaagagccaggcgggcgcggcggcgagaaggcggacccagacagcgaccccagagaagggccgcgacccaggcgggca

SEQ ID NO: 209090 - RNA, 58 nt, Homo sapiens
agcacccccagcgggcaggaggcaggagcgcagccggcagagaggagcccgcaccagc

SEQ ID NO: 209091 - RNA, 60 nt, Homo sapiens
ccgcaacgcggaacccaagaaggcggagagaggaagagacggcgaaccaaacccaccaaa

SEQ ID NO: 209092 - RNA, 74 nt, Homo sapiens
aaaaacagagcaaagagggcacaaaccagcaccgggagaggcagagagcacacgcgcaagcggcaggaagggcg

SEQ ID NO: 209093 - RNA, 73 nt, Homo sapiens
cggaaacgaaacagcgcagccaggaacaggacgaagaccagcgccagggaaagaagaaaaagcggggaagggg

SEQ ID NO: 209094 - RNA, 76 nt, Homo sapiens
acggcagagcccaagagcaacgaaacagccggcaagcccgcgaccaacgaaaagagagcaggcaggaggcagacga

SEQ ID NO: 209095 - RNA, 84 nt, Homo sapiens
cagcagagggagcgccgaaggacaagaacagcgccgcaccagcagggccagacggacacgcacggcgccaacagcaacaaggca

SEQ ID NO: 209096 - RNA, 114 nt, Homo sapiens
agaaccacaaacggaggaagacgaggaggcgcgccaagagaggcacgggacaggcccagaaagcagggagacaccaaagacaacgacaggaacacgaaaacgaccaacaagaaa

SEQ ID NO: 209097 - RNA, 81 nt, Homo sapiens
ggagcaaagaaggacacagcacacacacagaagagacgccaacagaccggggagaagggaccgcgggagcagggaaggaac

SEQ ID NO: 209098 - RNA, 40 nt, Homo sapiens
agaagcgaggagaagaagagggaaacacaaagaagacacc

SEQ ID NO: 209099 - RNA, 73 nt, Homo sapiens
gagaaggcagccgagcaccgagccagcccaggaaaaggagaggacaccgccgcccagccacaggaccgacacc

SEQ ID NO: 209100 - RNA, 78 nt, Homo sapiens
gcggacagcgggggaccggacgcaggaagacgcagccggccgcgcccccacccgggagaggcaaaccaccccggggcg

SEQ ID NO: 209101 - RNA, 81 nt, Homo sapiens
gccccgccaggccgcacagcgccacaccagagaaggaaggccaaccgaaccgggcggcgccagaaaacgaagaggagaaga

SEQ ID NO: 209102 - RNA, 82 nt, Homo sapiens
gggagagcaaacggccagcccagagggccaaagaagacagcaaaacaaccaaccgaagaagaggaggaggaggaagaagcag

SEQ ID NO: 209103 - RNA, 103 nt, Homo sapiens
ggacgcagccagaaaggaacaacccaaaaaacaacaaccggacacagagaacgaaacaagaaggcccaaacaggccaacacaggaagggagcaagaggaccag

SEQ ID NO: 209104 - RNA, 66 nt, Homo sapiens
cagcccgggacaccaagaaagaacgcaagaaagaccagaccgcaaagagagcaccgaaaccagagc

SEQ ID NO: 209105 - RNA, 70 nt, Homo sapiens
gaaacgagccccccaccacgaagccgcagacacccgcggagaccccaggaaacagaaccgaagccggacc

SEQ ID NO: 209106 - RNA, 77 nt, Homo sapiens
ggagaccagcagaacccaccaggagggaagcggcggaagcagcggacacaagaacaaagagggagcagcgagagaaa

SEQ ID NO: 209107 - RNA, 83 nt, Homo sapiens
ggagagcagcaggagggcaggcgaggggcagagccggagagcagccccggcccccgagcagcccagagaagaagaaaagaaga

SEQ ID NO: 209108 - RNA, 78 nt, Homo sapiens
accaagccgacaagcacccagcagccggaacagggccagcaccgcaagcgaggacgcgcccggggcacggccaacggg

SEQ ID NO: 209109 - RNA, 78 nt, Homo sapiens
cagcagccgggggggaggcgcggcggaggagaaaggggacagcccgaccggacgggcacccgaacacccggcacaggg

SEQ ID NO: 209110 - RNA, 68 nt, Homo sapiens
cggacagccagagcggagcccgcgacacacccagagggaaagaccaccccagaacaggcccaaggggg

SEQ ID NO: 209111 - RNA, 76 nt, Homo sapiens
aacaaggcgcgcacggcgcagcaccgcccgcggccaagggccagaggcgcgagggacggggccacgagcaggagga

SEQ ID NO: 209112 - RNA, 54 nt, Homo sapiens
gaggaccccggagagcaaggaagaaagcagcccaggaggagccaagcgggaaaa

SEQ ID NO: 209113 - RNA, 82 nt, Homo sapiens
gggcaagaagccagaaggcaacccagaggaagagcaaagaaaagagaagagcagcaagcccaggccagcggcgaagcagggg

SEQ ID NO: 209114 - RNA, 78 nt, Homo sapiens
ccaaggggcgcggggcacacaaggaggccggaaggaacccccgcaagcaggaacccgaagaacgcaacagaagggcac

SEQ ID NO: 209115 - RNA, 57 nt, Homo sapiens
aagacggagagagagggcagggcggacgaccggaaaggagaaaacggagcggagaag

SEQ ID NO: 209116 - RNA, 74 nt, Homo sapiens
acaaaggcaccaggccaccacagaaacaaaagcaacaaagaggaacagccacggaaaggaagaaggaaccggga

SEQ ID NO: 209117 - RNA, 36 nt, Homo sapiens
aacaggaagcagagagacaaggacaagagaaaaaaa

SEQ ID NO: 209118 - RNA, 79 nt, Homo sapiens
aacagagggaggaagacagccagcaccaaccgcagaaggacaagcagaaaaggaagaacaaacccagaggaaggagagc

SEQ ID NO: 209119 - RNA, 70 nt, Homo sapiens
gcccacacaaaacaaccggcacaccggcagcaccacaaaccgacacgcgggcccagaccaggaggcgagg

SEQ ID NO: 209120 - RNA, 72 nt, Homo sapiens
gcccccaccacgggaggggccaggccacggacgaagcccagaggcaaacgaacacgcgcagcgcagaggccc

SEQ ID NO: 209121 - RNA, 74 nt, Homo sapiens
acccgagcaacccccccgggccccagcagcccccagcacccgccgccagccccagaaacaggcccacaggcacc

SEQ ID NO: 209122 - RNA, 79 nt, Homo sapiens
caggcggacgcccggcacgggccgcgcacggcaagggcagcggcgggggaaagcaccgggcgacacagggcccggcgac

SEQ ID NO: 209123 - RNA, 75 nt, Homo sapiens
aaacccccgggcccggagacgcgacagacggaacacgcgaacacgcaaaaggaagcggcaggcacgggacccaag

SEQ ID NO: 209124 - RNA, 42 nt, Homo sapiens
cgagcgggcagccgcccaagacgccacccagagcagccgaac

SEQ ID NO: 209125 - RNA, 78 nt, Homo sapiens
cgccccaggaacagaggaagaaccccgaaacccagcacaaaccacaggaacagccagaccaaaagcagggcaagagag

SEQ ID NO: 209126 - RNA, 83 nt, Homo sapiens
cacgggccccgcacgcccccgccccagcccaccccaaccaagaccccccaaagacacacggacccaccaccccaccgaccaga

SEQ ID NO: 209127 - RNA, 56 nt, Homo sapiens
gcaaggaacccagcccaacaccaccaaaagacggcagacagagaacgagagaggga

SEQ ID NO: 209128 - RNA, 71 nt, Homo sapiens
ggcacacagcaaacacagaccagagagaagacagcaaaacgccccagggggaaaccgaaaaacaaaaagcc

SEQ ID NO: 209129 - RNA, 70 nt, Homo sapiens
aagggagaaaccggagcacccacagccacaaaacgaaaaggcgacggcggagacagaagagaggagagcc

SEQ ID NO: 209130 - RNA, 62 nt, Homo sapiens
cggccgaggcgggcgcaagagaaggcaccaagagcgccgcgccaggacggcagccagacgag

SEQ ID NO: 209131 - RNA, 77 nt, Homo sapiens
agagagagcgcgagagaggagagggcagacggacaagagcgcggaacaggacgccccgagagaaagaagaaacaaag

SEQ ID NO: 209132 - RNA, 79 nt, Homo sapiens
caagaagagggcacaccgggagacccaacggagaacaccaaagaccgcacagaagcagaagaaccgcccggaggaagag

SEQ ID NO: 209133 - RNA, 77 nt, Homo sapiens
aacaggggcaggacacagggaccaacggggcgccacccagggcccgcgcggggcccagcggaaaggaccagaagagg

SEQ ID NO: 209134 - RNA, 81 nt, Homo sapiens
ccccggcagcagacacagccacgcacgaccggggcgcacccacgacgcgcacaccaccggcagaccggcgccacagcacca

SEQ ID NO: 209135 - RNA, 60 nt, Homo sapiens
gccacaacccagaaacccacacggcaaggggcaaaaccaacggggcgcagaccaagccag

SEQ ID NO: 209136 - RNA, 76 nt, Homo sapiens
cagcggcacggggcaagagcaggccagaaccagcacccggcgagaagccagcagccagccggggagccaccaccaa

SEQ ID NO: 209137 - RNA, 77 nt, Homo sapiens
cacaggagcagcccaggggaaggcaaacaacaggccgacacccacacgcggaacgcagagaccagagagaaacaaca

SEQ ID NO: 209138 - RNA, 71 nt, Homo sapiens
ccagccccccacggacccaaaccagaagaaaaccgaaccgaggcaccggcacggaccaccccaacaccggg

SEQ ID NO: 209139 - RNA, 97 nt, Homo sapiens
aacggaggggcaagagaccggcggcacggcagagacagagacaagagacagggaacaaggaagggagcacacaaagaggccaaaccccaagcagaag

SEQ ID NO: 209140 - RNA, 71 nt, Homo sapiens
gaggcgacacaagaagagggcggagcggagacgggagaagaaaagacccggaccggaggaagccagaggaa

SEQ ID NO: 209141 - RNA, 78 nt, Homo sapiens
agaagaaacccaccaggccaccgggcaaaacagccgaacccccgcacgcccagccgcagccgcagcacccaggcggcc

SEQ ID NO: 209142 - RNA, 57 nt, Homo sapiens
gaaggaccaccaaccaaagaaaccgggggccaggaccgaaagcaagagagcacgaag

SEQ ID NO: 209143 - RNA, 77 nt, Homo sapiens
acagcacggccagaagcgaaaagaaacaccaggcgcggacacaaacaaacaggagagaaaaaccagcagagccagcg

SEQ ID NO: 209144 - RNA, 75 nt, Homo sapiens
agcagggggaggacaagcggcccacggaggaagccagcccgagcaggcccaggggaggaggggcaaccacagacc

SEQ ID NO: 209145 - RNA, 70 nt, Homo sapiens
caacccaaaccaaggcccaggaaaagagcacagaggaagaaaccccaaacaacccaacccaaacacaaca

SEQ ID NO: 209146 - RNA, 83 nt, Homo sapiens
gcggacaacagaacccgagaggaccaaaaggggagcaagaagaaagagcagggaggagggagcgacaggaagaaagaaacccc

SEQ ID NO: 209147 - RNA, 80 nt, Homo sapiens
ccgcccgggaacaagaaacccagagggcagccaaagcgcaaagcacagaaaaggaagagggaagaaggaggcagcagccg

SEQ ID NO: 209148 - RNA, 58 nt, Homo sapiens
aagaaaagcggggcacaaaaagacacaacagaaagaggccaaacccaagcgaaaccac

SEQ ID NO: 209149 - RNA, 75 nt, Homo sapiens
gcgccgcgggacgggaggcccgcgaggacccggggaagcgacgaggaagccaagcaggccggaaggggaaaggga

SEQ ID NO: 209150 - RNA, 49 nt, Homo sapiens
cagcgcaggcagcagggaagagccccagggaggcccacacaaccacagg

SEQ ID NO: 209151 - RNA, 79 nt, Homo sapiens
ggaacggcaaagcagcacacaaagagggcacccagaccgcagggagcccggaagcacccgcagagggcgggcccacgcc

SEQ ID NO: 209152 - RNA, 69 nt, Homo sapiens
caggggcggacggcagcccgaaaaccgggaagcacgaaagggacaggagagccccgcgacaagagaagc

SEQ ID NO: 209153 - RNA, 54 nt, Homo sapiens
cgcccggacccgcggcaccgcgccccacgccggagacagccacaacgacccagg

SEQ ID NO: 209154 - RNA, 75 nt, Homo sapiens
gcagccgagacaacacagcaaagagggcaagagaccacgcggcggaccaagccagcgggcagcaaggccccccgg

SEQ ID NO: 209155 - RNA, 117 nt, Homo sapiens
gcggcccagcgagggcggcccggggcacccgcacgggaagcaggcccgccacaggaacaaggggagaagaagcccagcccacgcgacgaaaaggcccccagcgcgaggagaggacca

SEQ ID NO: 209156 - RNA, 84 nt, Homo sapiens
ccaagagaaaaccccgcccgcagcgacacaccaagcggaggggacgccacgcaacgccggccggcgcggaagaggccggcggcg

SEQ ID NO: 209157 - RNA, 74 nt, Homo sapiens
gaaaagcccagggcggcaaagggccacagggaacagggaaaagacgcgaagaagagaaagaagggagaagaaaa

SEQ ID NO: 209158 - RNA, 76 nt, Homo sapiens
cgcgcgccggcgcaccaggacaaagcgaaagggaaaaaacaaaaggagccacaccgggaaaaaaagcaagacgacg

SEQ ID NO: 209159 - RNA, 85 nt, Homo sapiens
cgccccccccccgcgggcaccgaggacccgcccgcccagccgaacgcacggccggcgacgcagagcgggcgacaccgggccggga

SEQ ID NO: 209160 - RNA, 53 nt, Homo sapiens
gggagaaagacacaggagacccacagggaagaccacaacaagcaagcagcagc

SEQ ID NO: 209161 - RNA, 79 nt, Homo sapiens
agggcaggaaccaccgcccaaagacgcccggcaagaggggagagcccggaacaggacagggggaggagaagccacgagc

SEQ ID NO: 209162 - RNA, 76 nt, Homo sapiens
gccgcagccacaacaccggcaggaaccaccaggacagaagggggacagacaacagagcaacgcaacagggcacaag

SEQ ID NO: 209163 - RNA, 55 nt, Homo sapiens
aacaacaacggaaaaggagaagaacacgcgcagacccgcgcacaagagcagcaca

SEQ ID NO: 209164 - RNA, 54 nt, Homo sapiens
cgccccgcagccccccgcagcacccagccggccacgggaccggagggccggaag

SEQ ID NO: 209165 - RNA, 71 nt, Homo sapiens
ggcaggacaccgacaggaacagggaccacggggaaccccggacccacagaagaagaccagacaaccggccc

SEQ ID NO: 209166 - RNA, 110 nt, Homo sapiens
gaaacccagacaggaaggacaaccacacggcccgcgggcccagacccagcagggaggccacagacccagcaggggccacggggcgcaggcggccccccaggcccaggccg

SEQ ID NO: 209167 - RNA, 75 nt, Homo sapiens
cagccagccgaaagcgaccgaacagggaacgcccccaagcccaaggaaacacggaggccccgcagaagaagaccg

SEQ ID NO: 209168 - RNA, 53 nt, Homo sapiens
cggagcggcgcagccggagggggccggagcaacagacacagccagagacgggc

SEQ ID NO: 209169 - RNA, 72 nt, Homo sapiens
accaaggaaaaaaaaaacggaagcagagaaaccgagagaagagaaaagaccgagggggcagaaacgggacgg

SEQ ID NO: 209170 - RNA, 85 nt, Homo sapiens
gcaggcgggagcgcagagggaaagaaaccaggagaaggaccagaagaaccagaagcggcccagacacaaagccaaggagaacacc

SEQ ID NO: 209171 - RNA, 71 nt, Homo sapiens
ggagagggagccaccccgggcgaccgcaagaaaaggaggaccccagggaacccgagaaggccaacaaaaga

SEQ ID NO: 209172 - RNA, 60 nt, Homo sapiens
cccagcgcgcagggccgccaggggcgccgagccaggcagcgagcgggagcagacagggaa

SEQ ID NO: 209173 - RNA, 76 nt, Homo sapiens
caaagaagaaccaaaggcagaaaagaaagagcagccaaaggcagggaagaaaaagaagacaccagagaaacacgag

SEQ ID NO: 209174 - RNA, 57 nt, Homo sapiens
gaccgagagcggaccgagagcgcgaaacgcacgagaaggcaaccccgcacaaaccca

SEQ ID NO: 209175 - RNA, 58 nt, Homo sapiens
gaagaacaagacacaaagaaccgaggacaaaaaggaaaagcaacggcgcaagaggcgg

SEQ ID NO: 209176 - RNA, 47 nt, Homo sapiens
accggcagccggaggcggcaaggaagaggcccggaaagggaaaaacc

SEQ ID NO: 209177 - RNA, 84 nt, Homo sapiens
aaaacgaacacccccgggaagccaaagaagacgaagagaagcccagcccagcacgagcagccggccacccccaggaggggccag

SEQ ID NO: 209178 - RNA, 75 nt, Homo sapiens
gggccagagagacacaggaagcagagccagggagccaaacgcaaccgaggaacaaggaggcgcgcagccccaacc

SEQ ID NO: 209179 - RNA, 52 nt, Homo sapiens
ggaccaacgggacaaaagggccacccaaagggcgccaccagcaaaaccagag

SEQ ID NO: 209180 - RNA, 79 nt, Homo sapiens
caaacaacgcccgaacaccccgcaggaaaccaagaaaggccgggccgaggccacgggcaagcccgggagggaaagccag

SEQ ID NO: 209181 - RNA, 57 nt, Homo sapiens
gaggaggggagcggggaagcaaccggccaggaccagccggcggccgcaggggacacg

SEQ ID NO: 209182 - RNA, 66 nt, Homo sapiens
cgaggggcgggagggaccagagccacaaccaaaagaagcacaccgcgggcacaaaccgaagaggac

SEQ ID NO: 209183 - RNA, 59 nt, Homo sapiens
aagccccccagcacaccggggagagcaggaggagaccaaacaccagacggaggccggca

SEQ ID NO: 209184 - RNA, 45 nt, Homo sapiens
ggcccccagcccagagcccggaagcagccccaggggccggaccag

SEQ ID NO: 209185 - RNA, 70 nt, Homo sapiens
ggagcggacggcgagcgcgagcggcgcgagaaacccgagcgggaagaagccgcagcaagccgcagcggcg

SEQ ID NO: 209186 - RNA, 81 nt, Homo sapiens
ggccaccacagaaacaaaagcaacaaagaggccaggcaaacgcagaaccaaccagcggagaggagacacaagaacagccag

SEQ ID NO: 209187 - RNA, 80 nt, Homo sapiens
aaccggggcgcgcacccgcaagcggaacccggcggacggacccgcagacggagacggggccggaggcaggggcaaggcag

SEQ ID NO: 209188 - RNA, 56 nt, Homo sapiens
ccgccaaacccaaaccggaacgaaagcggcacggagaagaaggaaaagaacggccc

SEQ ID NO: 209189 - RNA, 70 nt, Homo sapiens
ggacggcacagcccgccgaacccgaaaggagagcacacagggagcagccaggccaggggcagaacacaca

SEQ ID NO: 209190 - RNA, 49 nt, Homo sapiens
ggaaacacccggcggcaggacgaagaaaccgaacaagaacgaaccacac

SEQ ID NO: 209191 - RNA, 63 nt, Homo sapiens
agccgcccaaaggaaaaagggcggaaaagcggggaaagacaccgggacaggggcaaacccgca

SEQ ID NO: 209192 - RNA, 81 nt, Homo sapiens
gggcgcccagcacgaccccgggcagcccaacgagaaccggagggcaccggagggcgacaacccggaaaccacaaaaggaag

SEQ ID NO: 209193 - RNA, 75 nt, Homo sapiens
agaaggaaaaacgggagggaggaccggccagcccccccaaaaaggaaagacaccggcggggcaaaaggaaaggaa

SEQ ID NO: 209194 - RNA, 73 nt, Homo sapiens
cgggacggcagcggccggggacccagcaaggcgaccggcccgaggaccgccgcacgaccaaacgcagaaccca

SEQ ID NO: 209195 - RNA, 79 nt, Homo sapiens
caaagcgagagagggaagcgcccggccggaggcaggggaaaggacccaaggccagccagccccaggcaccagcggacag

SEQ ID NO: 209196 - RNA, 82 nt, Homo sapiens
gaggcagcgagaaggcccagcagagacgcgccaccaagggccccgcggggccggagaagaccggcaccgcaccacgcgcaga

SEQ ID NO: 209197 - RNA, 73 nt, Homo sapiens
gaccaacgggaacaaaacacacacccgcagacaagaacggagagcaacgcacccgcccccaaagagagaagcg

SEQ ID NO: 209198 - RNA, 53 nt, Homo sapiens
gcaggaagcgagccaccagaccaagaaaccggaaccaaaagaagcaacagaga

SEQ ID NO: 209199 - RNA, 70 nt, Homo sapiens
aagggaccaaccgagaaagggcggggaggggacgaaccaggcagcccaaaggcgcccccaagcccacagc

SEQ ID NO: 209200 - RNA, 56 nt, Homo sapiens
cagagaggaaccccaagccaagcccaagacaaaaacgaggcagcagcagcgagccc

SEQ ID NO: 209201 - RNA, 82 nt, Homo sapiens
ggccaccgaacgcgcacgccggcagggaggaccacaggccacccagaagggccccaccccaaggggagggccaaggggagcg

SEQ ID NO: 209202 - RNA, 77 nt, Homo sapiens
ggaaaacaaaagaggagaaagccaagcagggagacggcaagaaaagcacacaccgcgccaagggcgaacaacggagg

SEQ ID NO: 209203 - RNA, 78 nt, Homo sapiens
gccaggggaagacaagccaggggcaaagaaaccccaaagccagcaagaccacagcagcacgcaccagccagcgaaccg

SEQ ID NO: 209204 - RNA, 92 nt, Homo sapiens
ggcggcgacccgcggcggaagggggacagccgagcccggagcccggagcccgggcaagagcgggcaagaccgggcggacccagggcccgagg

SEQ ID NO: 209205 - RNA, 72 nt, Homo sapiens
caccccgggcgcaagacacagcggccgggcccaggaaaccagggcacaggggccaggaaaaccaggaaggca

SEQ ID NO: 209206 - RNA, 76 nt, Homo sapiens
ggccccacacccccccggggggggaccaccagagagcgcggacgccaaaacacagcccgagagccccccggaccga

SEQ ID NO: 209207 - RNA, 74 nt, Homo sapiens
acaaagccaaggaaaccccaacacagagccaagcgccaaaaaaagcgcagcaagaggagccaagcaaacaaaaa

SEQ ID NO: 209208 - RNA, 75 nt, Homo sapiens
aagaagaaacacccggaccccgcaacgcggaacccaagaaggcggagagaggaagacagaaggacagagaagaac

SEQ ID NO: 209209 - RNA, 70 nt, Homo sapiens
cgcgaaacgcccagccaacacaggacacagccccagcagaccgacgacagcaaacaagaaaagccccgag

SEQ ID NO: 209210 - RNA, 74 nt, Homo sapiens
cagaggaggcgcaagacgcgaccaaagccgacggggcaagggcccccaagccggcaggggaacgaggagggagc

SEQ ID NO: 209211 - RNA, 91 nt, Homo sapiens
gaaaagggaaggacaaggaaacaaacacaaacgggacgccagaaggagacacacccgaagagagagaaaaagccaaaggggaaacgccacg

SEQ ID NO: 209212 - RNA, 79 nt, Homo sapiens
acacaaccaaacaggagaaaaagaggcgcagcagccccagccaggcaggaaacacccccaggagaggcagccagaggcc

SEQ ID NO: 209213 - RNA, 87 nt, Homo sapiens
cgaaagcggcacgacgcgccgacacgcggggcggggcgacccggggcccgcagaaggcacaaagagcacacggaacgccagggaagg

SEQ ID NO: 209214 - RNA, 74 nt, Homo sapiens
gcgcgaaaggccgaaaagcaagcaacgcaagggacacaggacaaggagccaccggagaggaagcggcagacagc

SEQ ID NO: 209215 - RNA, 80 nt, Homo sapiens
cggaaggcgcgccaaggagaccaggaagcgagcaccagcagaaagcgaccagagaccgaggaccgcggacgagcacaaca

SEQ ID NO: 209216 - RNA, 76 nt, Homo sapiens
ggaaagaaaagaggcgcccggaggccaaaacgcacaaagagccaaagaccacgggggccaaacaccaggagaaggg

SEQ ID NO: 209217 - RNA, 75 nt, Homo sapiens
cagccagccccgccgaacgagcgggaagcaaagcaggagaggaggagggcccgccccggcggccacaggcaagcc

SEQ ID NO: 209218 - RNA, 80 nt, Homo sapiens
cccggagccggggacggagcagcgcgcgggggcgagcggcagggagcaccgcggacgccccagggcacaccgcgcaccag

SEQ ID NO: 209219 - RNA, 53 nt, Homo sapiens
cagcgaaccccgaaggaggccaagaaaggacgagagccggaaacgaaacagcg

SEQ ID NO: 209220 - RNA, 90 nt, Homo sapiens
cgcgcgcgcgccgcgcaccacgcgccccgcgcggcccgcccggacgggccccgagagcaagccgcccgacacacggccaaaacggaggag

SEQ ID NO: 209221 - RNA, 72 nt, Homo sapiens
acaagagccaaacaagagcgccaaagccacagaccggcgccccggaaagccgcgccaggaaacgcgccccgc

SEQ ID NO: 209222 - RNA, 61 nt, Homo sapiens
aacaaggggacgcgcagcaggagaaaacagagcgcaaaaacagggggaggaacagcaaaaa

SEQ ID NO: 209223 - RNA, 56 nt, Homo sapiens
cgaccgcaacagaacggacccggggccgcaaggccaggcgcgcagaggcacccaac

SEQ ID NO: 209224 - RNA, 58 nt, Homo sapiens
ggcagacccccaagaaggacaagccccgcaaacccgaaacagcgcgaaggcaggaaaa

SEQ ID NO: 209225 - RNA, 64 nt, Homo sapiens
acgcagggcgcccccgacaccgggaagggcacgacaggaaaagacgacgaagaggcaagcaccc

SEQ ID NO: 209226 - RNA, 75 nt, Homo sapiens
accaaggcccccccacccggggggaaaggaggagaaccccgcgaaacgagaggaggagcggcgcagagagagaga

SEQ ID NO: 209227 - RNA, 74 nt, Homo sapiens
gacgcaccgacgagcacagaggacccgaaaccggagagcaccgcgaaaaggcggccgagggcagcgaacacaga

SEQ ID NO: 209228 - RNA, 77 nt, Homo sapiens
cccacggccccggcggccaaacaccggacaaagcagccaaccagagaaaagaggaagggcacccgacccccccagaa

SEQ ID NO: 209229 - RNA, 81 nt, Homo sapiens
cgcgcgccaggccgcccccaggagaaggagcgagcgcaacagccggcgagagagagagaggcgcccaaagagcaacgggga

SEQ ID NO: 209230 - RNA, 81 nt, Homo sapiens
gcaaagagcaaaacggcggagggggcacagcaaagaaagaagacgaagagcagcaaggcgccgcaagaggagaagcgcaaa

SEQ ID NO: 209231 - RNA, 56 nt, Homo sapiens
ccaacgggacaagaagggcgcgcgccccacgaccagacccaggagcacaggagcca

SEQ ID NO: 209232 - RNA, 86 nt, Homo sapiens
gagggagaagacgaggagagcggaaaaaccccaagcagaagacagcggagaacccacgaacagcacccagggagaagaccagaaac

SEQ ID NO: 209233 - RNA, 78 nt, Homo sapiens
caaagaagacgcacccaaaagggccggaccaagggagcaccgaagacgagcagcagcacgcagcagccccagagcagc

SEQ ID NO: 209234 - RNA, 33 nt, Homo sapiens
gccgacccacccgggggacagcagccacgccgc

SEQ ID NO: 209235 - RNA, 87 nt, Homo sapiens
ggagcgcgggaagaagccggcccggggccgcggacgaggaccagcagaggccagcacgagaacccagccacacccaccgcccgggca

SEQ ID NO: 209236 - RNA, 79 nt, Homo sapiens
aggagagcggaagcaggagaaagaagagcccgcgaaggagaaagaaaagcccaaggacaagggcagggaggccaccagg

SEQ ID NO: 209237 - RNA, 78 nt, Homo sapiens
gcaggggcccgggaaagggcagaggcccaacgcagaccgaggcgaagcgcgcagcgccgggcaagaaacaacagcgac

SEQ ID NO: 209238 - RNA, 81 nt, Homo sapiens
cgcagcagaccacgagccccccccagccaacccaagaccaacaccgcacaacggccacaacacaggcagccacgcggggcc

SEQ ID NO: 209239 - RNA, 84 nt, Homo sapiens
gagaaaccccacccccaagaaccaacccccaaaggcgggacagagggcaaacgggccggccacccaagaagaacaagaaaggga

SEQ ID NO: 209240 - RNA, 74 nt, Homo sapiens
cccaagacgccccaaaggaagagaaggcagaacgccaaccaggaaccgaacccccagaggacgaaaccgcacaa

SEQ ID NO: 209241 - RNA, 69 nt, Homo sapiens
gacacggagaggagcggggagggaaaagggcggcaacacggaagagggaacagacaacacggcgaccaa

SEQ ID NO: 209242 - RNA, 80 nt, Homo sapiens
gagcccaccccagcgcgacgcggcgagcccaaaaagcccgcaggggcgagggagggcggcagacggagggaggaaaaagc

SEQ ID NO: 209243 - RNA, 78 nt, Homo sapiens
gccgcccaaggacaggacggggggagaggagagacgaccgagaggggagacaagagaagacccaggaacgggaacgcg

SEQ ID NO: 209244 - RNA, 81 nt, Homo sapiens
gcggcacgggaggcggaggcgccccgccagccgacacggccggcgccggggacgcaaggcccggacagcgagaacgagagc

SEQ ID NO: 209245 - RNA, 74 nt, Homo sapiens
gcaagacggaagcccacccagaagaagaacacccagcgagggagggacggcacaccacacacaggacaccggga

SEQ ID NO: 209246 - RNA, 86 nt, Homo sapiens
cggcgcagcggcggcagcggagagcgagagaggggagcaggaagcgagagaaaagaagaaggcacaaaggaagccaaggagccaaa

SEQ ID NO: 209247 - RNA, 56 nt, Homo sapiens
cgggcagacaaagaaggcccaacggaacacccggggagggccgggaacaggcccac

SEQ ID NO: 209248 - RNA, 101 nt, Homo sapiens
ggcgaccgagcaaaaagacggaagagagccgagcggcggcgcccgagagcccaggagaagcaggccgaggagcagcagagacgcaggccagaccacagcag

SEQ ID NO: 209249 - RNA, 60 nt, Homo sapiens
gaagaaaaaggaagccccaaagccgcacccacggcacgaaagggcagccaagcaggacca

SEQ ID NO: 209250 - RNA, 89 nt, Homo sapiens
gccgcccggcgccggcccgcccccgcagcagcgccaggaccgaaggagaagaaggagaaggggaggagaaggcaagccggaaagagcga

SEQ ID NO: 209251 - RNA, 68 nt, Homo sapiens
ggccccacgaggcagcaagccgaagagcccaaaggcaggcccggcaccgaggccgaaacccaaggggc

SEQ ID NO: 209252 - RNA, 55 nt, Homo sapiens
cgcacggcggagcccgcacgcggcgggcagaacaaagaaccaggaggcagcaagg

SEQ ID NO: 209253 - RNA, 82 nt, Homo sapiens
cggagaggggcggcgccgcgcggccgaggcaggaaaagagcagacaaccagggaagacacaggagacacggcgaagacggca

SEQ ID NO: 209254 - RNA, 71 nt, Homo sapiens
ggaggaggacaggaaaccccgaaagccacagaaagcccgccccagacagggccccggcccgcccggaagcg

SEQ ID NO: 209255 - RNA, 51 nt, Homo sapiens
acaaacggccaagaagggccaccccacagacgccggagaacaccgggcccc

SEQ ID NO: 209256 - RNA, 65 nt, Homo sapiens
ggcgccacgagggagaaaggcggcaaccacgaggcaaacgaaagccagaagccaacaaacccgga

SEQ ID NO: 209257 - RNA, 45 nt, Homo sapiens
ggaacaagaggggcagcaagggccaagacacagagcccggcaccc

SEQ ID NO: 209258 - RNA, 44 nt, Homo sapiens
ggaccaccacgcaaaggcacaaggaccgccagcgggagaccccg

SEQ ID NO: 209259 - RNA, 75 nt, Homo sapiens
acagcgacaaaggcagcagcaggacgcacgggaagaacccccaagggacgagcccagaaacgaacacgggagaga

SEQ ID NO: 209260 - RNA, 70 nt, Homo sapiens
cgaaaaaaccagaacacgccaaggccgaaccccgagaagcaaagacagcaaagcacggggcgaaaagcgg

SEQ ID NO: 209261 - RNA, 73 nt, Homo sapiens
agaagaacccggagagagcacgagagacggggaaacgaaaacagcaggggcgacagcaagaaggagccagcac

SEQ ID NO: 209262 - RNA, 36 nt, Homo sapiens
gcccagacgcaggaccaaggaagggagaaaggagaa

SEQ ID NO: 209263 - RNA, 80 nt, Homo sapiens
gaaacggaggaagaacgccgccaccagccaccaccaagcccgcgccgaccaagagccgacggcgagcgacggcagaagac

SEQ ID NO: 209264 - RNA, 79 nt, Homo sapiens
ccagcgcgcgcaacacaagacaagaacccacgaacgcaaggagggacaggacggaaggagcggaggaagacacaagagc

SEQ ID NO: 209265 - RNA, 66 nt, Homo sapiens
ccgagccgggaccaggcccgggggcggcggccacgccaaggacgggaccaagcaccaagcagagaa

SEQ ID NO: 209266 - RNA, 58 nt, Homo sapiens
gcaaaaacggagcagaaaggaggccagcaagcagagagggggagaaacagccgcaccc

SEQ ID NO: 209267 - RNA, 79 nt, Homo sapiens
acaagaccacaccggacaccaccaccccacgagccgcgcccagacccaccagaaggcaacaagcagcccacgcacagga

SEQ ID NO: 209268 - RNA, 79 nt, Homo sapiens
gcaagcagcgcccacaaccgcggcgcagaccaggcccgggccaccacccaccaagaggaacccgaaggcccgaagacaa

SEQ ID NO: 209269 - RNA, 71 nt, Homo sapiens
caggggggggccaagagcgcccagcggacacagccccggaggaggcaagcgccaggaccgcggggggcgag

SEQ ID NO: 209270 - RNA, 55 nt, Homo sapiens
accgagcgggggagggggccccacgagccggaagagaggcaaggaagagaaaagg

SEQ ID NO: 209271 - RNA, 84 nt, Homo sapiens
cgcaggaccgggcaggagcgaagggcccgaagccagcagagagcggaggcgcaaaccgagccacagagaaaacccgacccacga

SEQ ID NO: 209272 - RNA, 68 nt, Homo sapiens
cgagcgagcgggagcgcggcgccgggaggcggcggagacgcggggccggaggagggacggggcaccgg

SEQ ID NO: 209273 - RNA, 80 nt, Homo sapiens
cgccaccagcgaacggagaggagccagagccccacgggaaggagagcagccagcagacagaagcaaaaagcgggccaggc

SEQ ID NO: 209274 - RNA, 76 nt, Homo sapiens
gagacagaaaggagccaaacccccagaacagagccgacgccccagccggcccagagcacaaacgaagcccaggaaa

SEQ ID NO: 209275 - RNA, 78 nt, Homo sapiens
ccagaacccaacaaggaggccagggcggccagggaacaagagccaacaaggccccaggcaggggggccgcggacagaa

SEQ ID NO: 209276 - RNA, 67 nt, Homo sapiens
cagcggcgacaagcaacagggaccgcccaagacgacagacagaagaacgaacgaaggagaacccaac

SEQ ID NO: 209277 - RNA, 84 nt, Homo sapiens
gccaaaggccacgagcgacccccggagcaccggggccaccaggagggagaggagaaggcagagcccccccaggcagaagcccga

SEQ ID NO: 209278 - RNA, 75 nt, Homo sapiens
caagaacgggaacaaaaccgggaaagaccaaaccccaaagcaggccaaacccaggaggacaacaagaagggagcc

SEQ ID NO: 209279 - RNA, 74 nt, Homo sapiens
aagacggacagcccacgggaacaagaggggacagaaaggaaaagcacacgccggacggaaacccacagccaagg

SEQ ID NO: 209280 - RNA, 67 nt, Homo sapiens
gcaacacggcggaccacacaagcaaaagagagaacgggaaagcgcacaagccaccgcggcccgggcg

SEQ ID NO: 209281 - RNA, 74 nt, Homo sapiens
agggcagagggccagagcccagaaaagaaaaaaacaccagcagcccagcaaccaaaaagaagaccgcacccaaa

SEQ ID NO: 209282 - RNA, 75 nt, Homo sapiens
ggccccaccgggaggcagcagagggaaggcgcgggggacagaagcaaagcccgcgcggagaaggaggagaagacc

SEQ ID NO: 209283 - RNA, 76 nt, Homo sapiens
caccaaagcgcagacacaacaagccaaaacgacacagggggagcagacaaaaggcaacacagaacccgcaaagggg

SEQ ID NO: 209284 - RNA, 80 nt, Homo sapiens
gagggaccagcacagagaccaacgggaagcccacagacagaaaacgcgacgcaccgccaaccggccccgccccccacagc

SEQ ID NO: 209285 - RNA, 80 nt, Homo sapiens
agggccagcgcgggggacgaccagggcgaggccaggaccccaaccgccaggagagcacaaagaagccaggggagagcgca

SEQ ID NO: 209286 - RNA, 79 nt, Homo sapiens
agaaaggggaaccccggagaaaaggccaagaaggcagaggccccaaaagccacgccgaagaaagacaaaaacacaggag

SEQ ID NO: 209287 - RNA, 76 nt, Homo sapiens
cccgaagaacacagccgcaagaaccaggaccggaagggcggagaagcgaaaagacacaagacccggcccagacccg

SEQ ID NO: 209288 - RNA, 90 nt, Homo sapiens
gcgaccccggagggcgagacacgccgccgccgccgccgccgccggcgcggaaggacgaggcgaggcgagaaacgagacaacggcaagcgg

SEQ ID NO: 209289 - RNA, 72 nt, Homo sapiens
caccacaaagccaggcgcagcagggcgaacaagcaaagaaaaagccagccgaggacgggaaccagaccccga

SEQ ID NO: 209290 - RNA, 43 nt, Homo sapiens
gccggggccgggccaggagcagagccggcccccccaggccgaa

SEQ ID NO: 209291 - RNA, 91 nt, Homo sapiens
cccgacccagggcccgcgggccaggagagcgccggcgggcgccagcagaaccggcggggagccgcagaacccagcggcagcaaggccgccg

SEQ ID NO: 209292 - RNA, 82 nt, Homo sapiens
ggaggaaccggagaccccgaaaacggaagcgcagggagaaggaagaggggaaaagcagaagaaggaagcaagagaagaacca

SEQ ID NO: 209293 - RNA, 73 nt, Homo sapiens
aggaacgggggccccgaaaaaagagagggggggaccgaccgcaacagaacggacccgccgcaaacgcggagag

SEQ ID NO: 209294 - RNA, 83 nt, Homo sapiens
gaggagcagacggccagagacacaaggccccggcagcagcagggaaccagaccgggacagagcccgcacgcggacacgcagcc

SEQ ID NO: 209295 - RNA, 69 nt, Homo sapiens
aaaaggcgccgcgaacgggaggccaacagacccaacccagaaggcaccaaacggagggggaacaggcgg

SEQ ID NO: 209296 - RNA, 73 nt, Homo sapiens
ggaacccaaagacgggggcccacgggagggggaagggaacagccccggaagaggagagaccgggacccaagcc

SEQ ID NO: 209297 - RNA, 78 nt, Homo sapiens
acaaaaccgcaacaccacccccgacagggcggagcaggcaggcaggggcagaaggcgacccagcgcagagcaaacaga

SEQ ID NO: 209298 - RNA, 117 nt, Homo sapiens
gagagcccgcgagcaccgggcgcgcgcggccgagcgcggaggcgccccgcgcagcgcgcgcccaaggccagccggcacaggaaaaacagccacccagaccagccccaggggaacagg

SEQ ID NO: 209299 - RNA, 70 nt, Homo sapiens
gcgcacagagaaagacgagacagccacaacgacccagggggagaaaacacaacgggcgaccaggagaagc

SEQ ID NO: 209300 - RNA, 55 nt, Homo sapiens
caagcaggccccaagaccggcggggacaaggggggggaagacaacccggagaaca

SEQ ID NO: 209301 - RNA, 74 nt, Homo sapiens
ggggcgccccacagaggggcgacgcaaagcagcccgaggaggcacgcaaaacaacagggggcaaacaagaccag

SEQ ID NO: 209302 - RNA, 82 nt, Homo sapiens
acggccggaccaagaggcgccgccccccagcaaacgagaaaaacccagcgaccgacgaccggccaaaacagaagaggcaaag

SEQ ID NO: 209303 - RNA, 70 nt, Homo sapiens
caaccaaccagccgccgaaacaccacgccacacaccagcggaggggccgggagaggaaggccccaagcag

SEQ ID NO: 209304 - RNA, 71 nt, Homo sapiens
gaaacgacacacaaagaaagaggagccggggacaccggagcccaaaaggcagagcgaggagagaagaagga

SEQ ID NO: 209305 - RNA, 74 nt, Homo sapiens
aaaggcacaagcaggggcggaagccacacaggccagaacgaggaaagggacacgccagcaggccacgagagaca

SEQ ID NO: 209306 - RNA, 35 nt, Homo sapiens
aaacaggaggacacaaggcaagccgagccggcaag

SEQ ID NO: 209307 - RNA, 80 nt, Homo sapiens
cgcccgggccccccgccgggccgagcacccggaccacggcccaaaggaccagccaaaacccacccaagccacgcaagaaa

SEQ ID NO: 209308 - RNA, 38 nt, Homo sapiens
aaccggagcgcgcagcagaccagacaaagggagcacca

SEQ ID NO: 209309 - RNA, 81 nt, Homo sapiens
gcacgcagcgaacaagaagagagccaccccaacagggcgccccgagaaggcacgccaccggcgcgggcagggccggcccag

SEQ ID NO: 209310 - RNA, 101 nt, Homo sapiens
ccgccaccggccgccgagccacgcggaggcagcaccaccgcccgggcaaggccccgagccccggccccaaagacccaaaacagagacaccccccagccccc

SEQ ID NO: 209311 - RNA, 73 nt, Homo sapiens
ggggacgcaccaacgagaaaaccacccgcgccgaagaaaacaggagccccaagaacccccaccccgcccagcc

SEQ ID NO: 209312 - RNA, 34 nt, Homo sapiens
gagcggagcagacgcgagcggaggcacggcagac

SEQ ID NO: 209313 - RNA, 78 nt, Homo sapiens
cagcgacggccaccacgagcacggcccgcgcacgcccggagagaggaccgaaggagaagaaggagaaggggaggagaa

SEQ ID NO: 209314 - RNA, 71 nt, Homo sapiens
cgcagaagaagcacccagcaagcgagggaccgggacgccacagccaggagaggagccaagcccaacgggac

SEQ ID NO: 209315 - RNA, 79 nt, Homo sapiens
gggacccggacaaccagaggcagccagcagggggagccaagagagagggacccaacaggaagagaggcccagaagagga

SEQ ID NO: 209316 - RNA, 65 nt, Homo sapiens
aaaagacagcgaggagcagcagcagcccagcaggcgcggcccgccagcggcagcccggaagaaga

SEQ ID NO: 209317 - RNA, 84 nt, Homo sapiens
ccggggcgggcgcgccccgcggagccggagccgcagaggccccgggcggaccaggcccagggggcggggaagagacacagaagg

SEQ ID NO: 209318 - RNA, 68 nt, Homo sapiens
ggagcaccaaaagaaaacgcaccgaaagggagaaaggaagggacagagaaaagaggggacgagaaaaa

SEQ ID NO: 209319 - RNA, 79 nt, Homo sapiens
cagccggcaccgccaccccacaggcccccaccaggccgcggcagccgaggaagaacgaccgaagagagggacaaccccc

SEQ ID NO: 209320 - RNA, 54 nt, Homo sapiens
ccacaaggacagagagaacagaaggggcagggcccagggaccggaaagcaggac

SEQ ID NO: 209321 - RNA, 78 nt, Homo sapiens
gagagagggagacgcagcaaaggacagacgacaacggagacagcaagaaagggacggagagcgaaggaggaaaacaag

SEQ ID NO: 209322 - RNA, 51 nt, Homo sapiens
aggccaggagcaacaggggcaagcccaaaaggaaggagcccagaccgagaa

SEQ ID NO: 209323 - RNA, 72 nt, Homo sapiens
gggcggcccgcagcgaaggaccggagcggaggccgggaaacaaccgcagacccacaagcgcgagccggaccg

SEQ ID NO: 209324 - RNA, 79 nt, Homo sapiens
accgcggcgcaggacgccgacacgggccgcgccagaaagcaccgggaggaaagagagccacacgaagaacacggccaaa

SEQ ID NO: 209325 - RNA, 77 nt, Homo sapiens
ggggggcggaggcgccaggggcgaggcagcggcacccgagcgcccagggcgaaggcgccaccggcgagaagacgcgg

SEQ ID NO: 209326 - RNA, 80 nt, Homo sapiens
ccggccaggaacagggacagcacccaccccggagggggaccacaagacccacgacagggaacaacagacaagccgcgccc

SEQ ID NO: 209327 - RNA, 79 nt, Homo sapiens
ggagcggaaaacacgagaaccggcccagaggagaggaaccgcacccaaggacggcggaggcccagcccccgcccggcgc

SEQ ID NO: 209328 - RNA, 52 nt, Homo sapiens
gcgcggccgccccgcgggggacgggacaaccaaagccaagcaacgaaggaca

SEQ ID NO: 209329 - RNA, 78 nt, Homo sapiens
gagaaccggagggcaccggaggagaacacagacagcaggcaaagcccccgacaggggacaggccgcgcaagccgggaa

SEQ ID NO: 209330 - RNA, 77 nt, Homo sapiens
ggcgggccgcgccgcgccgccgcccacaagcggcgccgcgccccggccgcacggaaaaaggaggcggcaacagggaa

SEQ ID NO: 209331 - RNA, 71 nt, Homo sapiens
aagaaaacggacacccccggcagacaggaccacgaaggggggaccacacgccaaaggcacggggcaagcca

SEQ ID NO: 209332 - RNA, 71 nt, Homo sapiens
cggacgggccggccgcccaccgccagacaagagccccgaggcccccagaagcagaccgggagggaaaccca

SEQ ID NO: 209333 - RNA, 76 nt, Homo sapiens
ggcacccgccgccggacaacaccgcccccagccgggcgcaggggaaagcgcgagcgagcacccggagcagcagagc

SEQ ID NO: 209334 - RNA, 83 nt, Homo sapiens
gagccgcccggcgggggggcgggacgacaggcagcaaaagaccagggcgccgcaggacccagcggaggaagccaccacacgcc

SEQ ID NO: 209335 - RNA, 39 nt, Homo sapiens
cgggagcacagccgccgacaacgaaacggaaaccaagcc

SEQ ID NO: 209336 - RNA, 87 nt, Homo sapiens
ccgaccagcgacacgcggccgcggagaccaccgcggcgcggcagcgcgcccgagagccccccccagcgccgaaggcccgacccagca

SEQ ID NO: 209337 - RNA, 56 nt, Homo sapiens
cggccgcccgcacaagccagaggccaacccagggagacagaacagacagaaaaaac

SEQ ID NO: 209338 - RNA, 73 nt, Homo sapiens
aaaacgggcaaaaaaagaacaaccagaaagagcaaaacaagggccccagggggggaaagcacagacacaagca

SEQ ID NO: 209339 - RNA, 82 nt, Homo sapiens
ggagcgggcgcacgggaggggaacgggccgaacgcagacaagccgagaccaccaggagcagagcggaggcaaccagccaaaa

SEQ ID NO: 209340 - RNA, 70 nt, Homo sapiens
gggcaggacccggacccggaagagaagagggggcaagaaaggacaggccccggaacaagaggaggacaga

SEQ ID NO: 209341 - RNA, 86 nt, Homo sapiens
acgacgaacagggcaaaccgcaggcacaacacaagacgaagaacggaagcgccccagaggagagggcggagagacggagaaaacgc

SEQ ID NO: 209342 - RNA, 73 nt, Homo sapiens
gaagaagaagcgacagcagcgcacggaaccgccgacccaggaggagcgagccaggcgacaaaagaacggacag

SEQ ID NO: 209343 - RNA, 71 nt, Homo sapiens
gcagcgcgggcccggccgggcgcgcggcgggcggagagaaagcaaaagacagggcagagaaaaccgagcac

SEQ ID NO: 209344 - RNA, 50 nt, Homo sapiens
aggaccaagaaccaggagaagagaggcagcaaagggaccccacagcagca

SEQ ID NO: 209345 - RNA, 74 nt, Homo sapiens
gggagcgccgggagccgagagggagcgcgcgcccggaagacgacccgagcaacgcaggacgccaccagcacggc

SEQ ID NO: 209346 - RNA, 60 nt, Homo sapiens
cggccgccaggcgccaacaggaccgggagagaccggcggacagcaaaagagccaacaccc

SEQ ID NO: 209347 - RNA, 78 nt, Homo sapiens
ccgaacccaccacaacggacaagcaaggggccaaggagccaaggaggaaacccacaacagaggacagaaggcaaaggg

SEQ ID NO: 209348 - RNA, 74 nt, Homo sapiens
ggggagacggccacccacgcacagcccaaccaagagcggccacagcgggcgcaaagaaagcagagggaagaaaa

SEQ ID NO: 209349 - RNA, 71 nt, Homo sapiens
aagccccacaccagaccacggagggagcggaaaccgacgcagacggccagcaacagaagaaagcaagcacc

SEQ ID NO: 209350 - RNA, 69 nt, Homo sapiens
ccagaggcaggagaggcccagcagagacacaccgaggaacggaaaggacaagaggcccccaccgaacgg

SEQ ID NO: 209351 - RNA, 80 nt, Homo sapiens
cgcgcagaaagacgcagaagcccaggaaaaccagggcggcggcccaccccccggccagagagcagacaaagaaggacagg

SEQ ID NO: 209352 - RNA, 77 nt, Homo sapiens
acaccagcaagcgcggaagaggaccggaggccggaggaagccaggaggccgggaaccagacagggcaaagacaagca

SEQ ID NO: 209353 - RNA, 75 nt, Homo sapiens
gcagccaagaagaacgcagagcacgaaccgaaaaccccccgacacccccgccccgcccaccgccgcccccagcgc

SEQ ID NO: 209354 - RNA, 48 nt, Homo sapiens
gagaccagcagaacccaccagggacccacccagagaccggaaccccgg

SEQ ID NO: 209355 - RNA, 78 nt, Homo sapiens
gcaagggcaaccgcccaggggccagggagccccgaggcgcaccgcgagaagaaagccaaggcagcaggaagaagcggg

SEQ ID NO: 209356 - RNA, 97 nt, Homo sapiens
aaggacaggaagaccaaaagccgagacaccgacggggggagcaaccgaagaggaggcgagaccaggggaacgcccaccagaacggaagcagaaagaa

SEQ ID NO: 209357 - RNA, 78 nt, Homo sapiens
gcaagcacagaaaagaagcaacagaagaagaggaaaggaggacaaaaggaaaaaaaaaaagggaagacagagaggcgg

SEQ ID NO: 209358 - RNA, 80 nt, Homo sapiens
cggcccagccccgacacaggaagccgaggaggcgcgggaccccggagaaagcgcaggcaaagccgcagggaagagccaac

SEQ ID NO: 209359 - RNA, 71 nt, Homo sapiens
gcgcgccccgcggccccgggagacccagcgcccccggcgccgcgccccccgcacgccaaggggcagaagac

SEQ ID NO: 209360 - RNA, 76 nt, Homo sapiens
ggccgagagccaggcggcgcaggcggcggcggcaggcgagcccggaccgcagcgggaaaacccagaaacagaaaga

SEQ ID NO: 209361 - RNA, 73 nt, Homo sapiens
acccggcgcgacccgcgcagcgccaggaagaaaacgccagagaagcagagcagcccggagcgaggggagaccg

SEQ ID NO: 209362 - RNA, 78 nt, Homo sapiens
gcgccagaccccacgaggccccgggcagcgggccggccacggcgggagagcggcaagaccaggcacagacaccacgaa

SEQ ID NO: 209363 - RNA, 56 nt, Homo sapiens
agcgggacccgcagggcaaaggggggaagaacaaggccgcgccggaccagccagcc

SEQ ID NO: 209364 - RNA, 78 nt, Homo sapiens
acacaaaaccccacgcgcgggaggagacgggcccccccagacaggcgcagcaggggagaccacaggacaccgcacccg

SEQ ID NO: 209365 - RNA, 57 nt, Homo sapiens
acccgagacccagacagaggacacgagcaggagaccgaggacgcaaacagcaaagag

SEQ ID NO: 209366 - RNA, 80 nt, Homo sapiens
cagcaccgcagaggcaaggggccaccaggaggccagggggcgccaggaagaaagccaaggaagagaaaccaccagagaag

SEQ ID NO: 209367 - RNA, 73 nt, Homo sapiens
acggaaacgaacgcagcaaacagacaacaaacagaacggcaaaagaacagcgcgagccacaaggcaaggaagc

SEQ ID NO: 209368 - RNA, 71 nt, Homo sapiens
aacggcagcgaccacgggaaggcgccgcgcacgaaggacgaacgacaccgggccccccccggcgaggaccc

SEQ ID NO: 209369 - RNA, 72 nt, Homo sapiens
ggcgggacggagccgacccacccgggggcacacacgaaacgggcaaccggggccagggccagcaccagagag

SEQ ID NO: 209370 - RNA, 71 nt, Homo sapiens
ccagcccagccaaggagccacagccacaggaccgccagaaggccacaggagagacagacggcaccaaacgg

SEQ ID NO: 209371 - RNA, 75 nt, Homo sapiens
caaggggggaagcgcgggcaggcggcccggcggcgcggcgggggcgggaaggaagagccaaccgcgcaacgaacc

SEQ ID NO: 209372 - RNA, 39 nt, Homo sapiens
cgcagagcgcgcagaccccggagccagggcagaaacccc

SEQ ID NO: 209373 - RNA, 53 nt, Homo sapiens
agcggcaagaacagagcaaggcggcgggggagaagggggagagcacaaggcga

SEQ ID NO: 209374 - RNA, 71 nt, Homo sapiens
ggaagggagagccacccaagagacaagcagggaaaggaagacaggacgcgccaacgagacagcaagacaaa

SEQ ID NO: 209375 - RNA, 78 nt, Homo sapiens
ggccagcccccccaccaacgaccagacacggaccggcaccgccgcgacgcagaggcaagaggagccaggagcacgggg

SEQ ID NO: 209376 - RNA, 39 nt, Homo sapiens
gaaagaaggaggaacgaagccggagagacggggcgccag

SEQ ID NO: 209377 - RNA, 61 nt, Homo sapiens
acaacacaaccagaagcggaaacaagcggaaaggacacagacgggcaacacacggaacgag

SEQ ID NO: 209378 - RNA, 76 nt, Homo sapiens
ggaggacacagaaagacagaaaaaacccaggaccaaaacagagaaaggagaccaagcgaagaacaccgcagagaca

SEQ ID NO: 209379 - RNA, 71 nt, Homo sapiens
cgaaagggaagcacacggaccagcagaacagaaacaagcaagaaccagcggcacggagagaagaggaagga

SEQ ID NO: 209380 - RNA, 75 nt, Homo sapiens
cccagccgccagaccgcgccgggagcagaggcgcagcaaacgagagcaaggaaaggaggaagcaagagggaacgg

SEQ ID NO: 209381 - RNA, 76 nt, Homo sapiens
caacggaaacagccacgagagacgagcaacccccgggaagccaagccgcagaccaacgggacccacccccaccacg

SEQ ID NO: 209382 - RNA, 80 nt, Homo sapiens
gcccgccccacccgcagccgcacccccggcggcagcacgaaagaccagccggggggggcacagagccccggaagacagcc

SEQ ID NO: 209383 - RNA, 81 nt, Homo sapiens
acgacgcggaccagaagccagagcgaggacgccggcagaggccgaagaaggagcacgcccccgcccccggagcgcccaggg

SEQ ID NO: 209384 - RNA, 68 nt, Homo sapiens
acacaaagaaaacccccggagacgaggaacagccccaaccaagggaagcagcaggcgcaaaaacgaac

SEQ ID NO: 209385 - RNA, 75 nt, Homo sapiens
aaggagcaaacccagaacaagcacaaccccaaaaaacaccaccaaccaaggaggagccaagcgggaaaaggggca

SEQ ID NO: 209386 - RNA, 79 nt, Homo sapiens
caaccagacgccagcgggacgaggaccgagaccgcggccgggaccgagggacaggagagacaacggaggcaagaaagac

SEQ ID NO: 209387 - RNA, 62 nt, Homo sapiens
cggaaaaaacagcccagacaagcaccccgcccagaagaaaccccacagcggagaaaaaggag

SEQ ID NO: 209388 - RNA, 62 nt, Homo sapiens
ccacggagagcccaagcgggaaaaggaaaccagaagagggacgaagaaaacagcgcagcgcc

SEQ ID NO: 209389 - RNA, 81 nt, Homo sapiens
ggggacgcgcccagacgcagcgcagcccggccaagcccgccgcgcccggaggacgacaaaggagggcgaaaccgcagcacc

SEQ ID NO: 209390 - RNA, 93 nt, Homo sapiens
gaggagcgcagggcggcgcaaccagcccagggcggcggagcgaggggcacagaggcaggcacaaaaccacaagcgacaacagaagacacggcc

SEQ ID NO: 209391 - RNA, 68 nt, Homo sapiens
caaaccacccagacaagccacccaccgagcagggggaggaacagagggacgcaagaacaggaaggggc

SEQ ID NO: 209392 - RNA, 116 nt, Homo sapiens
agcggcgcaccgggcgggccccggacccggagacaccccgcagcacagccgcgaccaagggaaccgccaacacacccgcgggagcggcccccacccggagacggccccacgacagg

SEQ ID NO: 209393 - RNA, 78 nt, Homo sapiens
acccccacgccagcacagcgccccccgaaccacacccacaagcggccgaggggaagaagggagccggcggggaaaacc

SEQ ID NO: 209394 - RNA, 57 nt, Homo sapiens
cgggccacgcccaccggacacgccccgacaagggaccgggcgggccccgcaggaaac

SEQ ID NO: 209395 - RNA, 74 nt, Homo sapiens
aacgccaggacaaaaacaaagcgcgcagaaagggcgaccaccaaaaaaacgaagcaacccaggcacccccaaca

SEQ ID NO: 209396 - RNA, 58 nt, Homo sapiens
cgcagggcgcccccgcccgggaacacagagcaccaagacagccgcccgggggagggca

SEQ ID NO: 209397 - RNA, 70 nt, Homo sapiens
aagaaagggaccacaagaccagaagccaaagaacaagcggagaagaacagagacagaaacacaggcaaga

SEQ ID NO: 209398 - RNA, 72 nt, Homo sapiens
agcacaccgcggaggcgcccagacggagaaaccggcaccgccaagccaaggaagaacggaccccacaccaac

SEQ ID NO: 209399 - RNA, 75 nt, Homo sapiens
gaccagccagagcgagcggcgcgggcccagaccgccgggcaagcaccagagaggggagaaggaaaccggacacaa

SEQ ID NO: 209400 - RNA, 77 nt, Homo sapiens
aggccccccgggaaagaccgaggaagaaaggggaccacaggccaaggggagacaacagccacacaaagcagcaacag

SEQ ID NO: 209401 - RNA, 68 nt, Homo sapiens
ccgccgcgggagagaggacccccccccccccccaaggggacaagaccccccccagggaagaccaaagc

SEQ ID NO: 209402 - RNA, 115 nt, Homo sapiens
gcagccccagcagagcaggaagacagggacagggcggaggcacgcacaggaccacaggagacccccagggcagccagagagacacagcccacgaggacggacagacggggcaggg

SEQ ID NO: 209403 - RNA, 74 nt, Homo sapiens
caaaaacgaacaggaccagagaggacacgagcccagccaggcgagccagcgccaaagaaaaagaacaagaggag

SEQ ID NO: 209404 - RNA, 55 nt, Homo sapiens
acagaaggaccaccgggccgcccaccaggaggaaggcagaacgaaggaaaagcag

SEQ ID NO: 209405 - RNA, 82 nt, Homo sapiens
aacagcagaagagaaagccagaccacggacggaagacaaaagagggagagccgaacaggaaccgagaccggacagaaacgaa

SEQ ID NO: 209406 - RNA, 89 nt, Homo sapiens
ccgacccgcccgcccccgccccacgaagccagaaagaagccacccagagagaaccagcaagcgcagagccgggacaaggagggacacca

SEQ ID NO: 209407 - RNA, 71 nt, Homo sapiens
ggacaaaggggcccagaaccaggcccgaaaaaaccacgaggcccggcccggggccgggcacacgcgcgccc

SEQ ID NO: 209408 - RNA, 75 nt, Homo sapiens
accaccgccgcgccccggcgcccccccgaggagaccacggggggaaggaagcgagacccggcgcgagaaggaacg

SEQ ID NO: 209409 - RNA, 76 nt, Homo sapiens
aggagaacacaaagagaagacaaccaaacccaccaccggcagggcgaaaagccaggagcaaaagacgagcgcgacg

SEQ ID NO: 209410 - RNA, 53 nt, Homo sapiens
ggcacagaacgggaacgacacgagcgcacgcagaaaccagggcgaaggacgag

SEQ ID NO: 209411 - RNA, 70 nt, Homo sapiens
caccacacaggagagagcaagaccagccaggggaaacccggagggaaccaagaagcaccaaggagcggga

SEQ ID NO: 209412 - RNA, 73 nt, Homo sapiens
accaagacgggacagaacgacacgcccaccaagaaagaaccggaaaggggaccgggccaggaaagcagaaaag

SEQ ID NO: 209413 - RNA, 78 nt, Homo sapiens
gacagaacggaccacagaggcaccgccacaggacccaaggccggacaaacaacagaccaaggggcggaaaacccgaag

SEQ ID NO: 209414 - RNA, 69 nt, Homo sapiens
gggaaagaaaagccaaagacaccgaaagcaagaacacgggaggacgcaggccgaaagaagagaaggcga

SEQ ID NO: 209415 - RNA, 55 nt, Homo sapiens
ccgacgggccccgaggccgcgggcggaacagcgcgagccacaaggcaaggaagca

SEQ ID NO: 209416 - RNA, 73 nt, Homo sapiens
gaagaagacgggacccccagccggaggaggcgccgggcccaggcggagacacggcagacggcacgcaaccccc

SEQ ID NO: 209417 - RNA, 72 nt, Homo sapiens
gagcccgacaaccgagcacaacagagggacgaaagacaaagagccgagacgcggggagacccagggcagaag

SEQ ID NO: 209418 - RNA, 75 nt, Homo sapiens
cagacaccaaggaaacacaagagaaacaggccaccaagccaaaacggccacggaaaggggcccagaaggggccag

SEQ ID NO: 209419 - RNA, 77 nt, Homo sapiens
gggccccgcaaagcgcgagacccgggcgggggcaccgagggcaccacgcgcggacaacggcaagcggagaagagcaa

SEQ ID NO: 209420 - RNA, 65 nt, Homo sapiens
ggacgggcgcccagccagcgagacgacgggaccgaaggaccccgccagagacaaccgagcgccag

SEQ ID NO: 209421 - RNA, 96 nt, Homo sapiens
cccccgcccgcccggcgggccgaggacccgaggaagagaggaacggaaaagaggagaggcaggaccggaaaacagcaaggagccaaaaaaacacgg

SEQ ID NO: 209422 - RNA, 70 nt, Homo sapiens
cacaagagacggaagcagaaagggagagagaccggcagagcaaccaaggaacaaagcaccaagagcgccg

SEQ ID NO: 209423 - RNA, 65 nt, Homo sapiens
ggaccgcgaaggcgggggagacgaaaacgcaccggaacgcaagcacagacccccagaagggagga

SEQ ID NO: 209424 - RNA, 70 nt, Homo sapiens
acggcggcgggggagcacccaggggagcaaacccggaagacagaacaggcacacccgacagacacaagcc

SEQ ID NO: 209425 - RNA, 70 nt, Homo sapiens
gggagaggaccacacaaaaccaggcgaacgaagaagcgggccacccacaaaggagaaggggagaacagaa

SEQ ID NO: 209426 - RNA, 51 nt, Homo sapiens
caaaccgaaagcggcgccaagccagcacccggacccggaggccaaggcccc

SEQ ID NO: 209427 - RNA, 80 nt, Homo sapiens
ggggaccggacaagaggcacaacaaacggagagcaaagacacagagaacggagaccaaccgggcgaagaaagaagaaaag

SEQ ID NO: 209428 - RNA, 57 nt, Homo sapiens
ccaagaacaacacgacagagccggcacgacaaagagcaaggccccccgaaaaagccg

SEQ ID NO: 209429 - RNA, 82 nt, Homo sapiens
ggagaggagcgccccaccaagagccgcgcgcccagccgcggccccacgaagagcccagccccccccagccggaagagccccc

SEQ ID NO: 209430 - RNA, 84 nt, Homo sapiens
ccggcgggagcgcgaacgagcgacggcggaacccggggccgggacgcagcccggcggcagcagaaggagcacaacaggcagaca

SEQ ID NO: 209431 - RNA, 73 nt, Homo sapiens
caccaacccggggagcgacacgagccacccagggcacacaaagcgggaaagggaaagccccaaagcagccgca

SEQ ID NO: 209432 - RNA, 76 nt, Homo sapiens
cggcccggagcgcggcccgaggcccgcccagagaaaaagcggggaaaacaaaaaaaagaaggagggaagagggggc

SEQ ID NO: 209433 - RNA, 84 nt, Homo sapiens
aacccagaggaaacgacggagacgcagagggacgaaagaagcgcagcggaggaaggcgaggggagaaggaacggaaaagaagaa

SEQ ID NO: 209434 - RNA, 71 nt, Homo sapiens
cgcgaggaggacgccgcgcccaaggaccgaaggagaagaaggagaaggggaggagaaggcaagccggaaag

SEQ ID NO: 209435 - RNA, 76 nt, Homo sapiens
aaccagagaccggcgaaaagacaagcagaccggaagaccgacggaagaccacaccccgagggagcccaggacacca

SEQ ID NO: 209436 - RNA, 76 nt, Homo sapiens
gggagagagaaaaaccggacgagcgagcaaggaaacccccaaagagaaagaagaagaaaacgagacccaaaaggga

SEQ ID NO: 209437 - RNA, 70 nt, Homo sapiens
caccagcacacaaccgagaccagaaccaggggaaggaggcagacgggcaaaaggaagcgaaaaggagagc

SEQ ID NO: 209438 - RNA, 80 nt, Homo sapiens
gggagcggcggccacggaggcaccagaagaagcaccagggagacgggcgaacacagggaagaaggacggagccagccgca

SEQ ID NO: 209439 - RNA, 78 nt, Homo sapiens
gcacccccggcccagcgcaggaacaagcaggacagcccccaggaggagagcggccaggcggccggccccacagggccc

SEQ ID NO: 209440 - RNA, 80 nt, Homo sapiens
aaaaaagcaaggcccgagacggacgagaggaagcgccgccgagcgcaggaccccggagccaaggcagccccagcgaaggg

SEQ ID NO: 209441 - RNA, 68 nt, Homo sapiens
gcgagggggccaccacaaccggcagaaccagagacagacaacggcaagcggagaagagcaaggccgaa

SEQ ID NO: 209442 - RNA, 63 nt, Homo sapiens
ggacaggggaacaaccaccggacccgcaggagccagaagacgagacgggagaccagaggaaaa

SEQ ID NO: 209443 - RNA, 93 nt, Homo sapiens
gccccgacgacagcgggccgggaaaagggcacgaggccggaaccgcccagccccgaacaccgaccgaggacaacaggagagaagcaaaccccg

SEQ ID NO: 209444 - RNA, 83 nt, Homo sapiens
gaggcggaggcgcccaccccacgggaagacggccccgcagggggagcccgcgccaggggcaggcccagacccacgcaccgaga

SEQ ID NO: 209445 - RNA, 68 nt, Homo sapiens
cgagcggccgcgagcagagccgcccagcccgccagcgcgccgggacggagcagcagccggcccggcgc

SEQ ID NO: 209446 - RNA, 71 nt, Homo sapiens
gaaggccaccacagggccaacaagcagcgagccaccaagaagacagaggagaagaccagagaccacccaca

SEQ ID NO: 209447 - RNA, 32 nt, Homo sapiens
gacccgagggccaaagcccagcgagcgcgcaa

SEQ ID NO: 209448 - RNA, 90 nt, Homo sapiens
gccagccgcaccagccgcccaagccgcacagccgcggcggcagcagcaggagagagagcgccgccgcggcccccgggagacgacccccaa

SEQ ID NO: 209449 - RNA, 91 nt, Homo sapiens
caggccggcggcccccagccgccgcccacgcagcagggacagcagcagggcacagagagcggagcgccaacaccccaggcagcacgggaaa

SEQ ID NO: 209450 - RNA, 100 nt, Homo sapiens
gagcggagggagaacaccaacggaaaaccgagaggcaaaccgagaaccgggccaaggcgacaagaggcaccagaaaaaaaaagacagagaaaagaaacag

SEQ ID NO: 209451 - RNA, 74 nt, Homo sapiens
gcgaggagccaccgaagccaaagcaacggcccgggaaaccccagccccccggaggggaacagagccaggaccgg

SEQ ID NO: 209452 - RNA, 75 nt, Homo sapiens
gagacaggaagcagagggcagggggcaaacaagccgaccggaaaaagggaccgacagcaagaaaaggagaaaaca

SEQ ID NO: 209453 - RNA, 79 nt, Homo sapiens
cccggaacgcccgaccgcacacggccacccgaggaccggccgggccgcagcacacaccggccacaccacaccccacggc

SEQ ID NO: 209454 - RNA, 68 nt, Homo sapiens
cggagggagacaaccggcagaaaaacaccaggcgacagggggaccgcggcgcgagggacgcaccgccc

SEQ ID NO: 209455 - RNA, 65 nt, Homo sapiens
gcggagcaccaaaagaaaacgcaccgaaagggagaaaggaagggacagagcgcaggcgggaggcg

SEQ ID NO: 209456 - RNA, 82 nt, Homo sapiens
ggccccgaagaggaccagggagggaaaagcagacccaagcggagggcgacacgagaacaaaagagcagacagacagcgaaca

SEQ ID NO: 209457 - RNA, 39 nt, Homo sapiens
ggaagaacgggaacccccgcagggagccagaaggaagaa

SEQ ID NO: 209458 - RNA, 75 nt, Homo sapiens
caacgcggacccccaggcccggggcaaagcagcaaagcaccacggacagggcgacagagaagagagaaggcccca

SEQ ID NO: 209459 - RNA, 73 nt, Homo sapiens
gcaccggcggcgcggacgacagcgagacaccgcaccaccagcaaggaagccccacagccaacagaaagcacaa

SEQ ID NO: 209460 - RNA, 77 nt, Homo sapiens
cagcaaagaggacaaaagagcggaggagcggcgagggggggccggagaccacgacagaaacccggagcccaagacgg

SEQ ID NO: 209461 - RNA, 72 nt, Homo sapiens
acgcccccgggcgggagagacccacggccacggccagaggaccccaaaaagcccgggaacgagagcagaacc

SEQ ID NO: 209462 - RNA, 69 nt, Homo sapiens
ggcccacgacgggacacgccccggagggcgaccggcccgaggaccgccgcacgaccaaacgcagaaccc

SEQ ID NO: 209463 - RNA, 80 nt, Homo sapiens
caggcgaccccagcggagcaagaagaaaaggagacagaagagagaggaacccaggaccgccagacggagccaccggccca

SEQ ID NO: 209464 - RNA, 118 nt, Homo sapiens
ggagaaggagggccaagaggcggaagcggaggagcccaggagacccggggacagcacgcccaggccccgacggccaagaaagagcagaccagaaaagaaggcaacgggaacgggagaa

SEQ ID NO: 209465 - RNA, 76 nt, Homo sapiens
aggccgcagacgaaggggaaagggaagcaagagccagacccaaaaccccagacccgcagagaccgcgcgcaaacga

SEQ ID NO: 209466 - RNA, 75 nt, Homo sapiens
gcgacgcggggccaggcaggacccaacgacaggcgccccggcccaacgaaagaggaacagagcgaaggcggaacg

SEQ ID NO: 209467 - RNA, 94 nt, Homo sapiens
accagaccacgaggacacaggcaccacagcgggaggcgagacccgaggagcaggccgccgaggaggaacgaagacgaagaacaggagaaacacc

SEQ ID NO: 209468 - RNA, 76 nt, Homo sapiens
ggagagccgaaccagaagagaaaggccacaacagagcagacgagcagaccgaagcgcaggcaaaacgaagaggcac

SEQ ID NO: 209469 - RNA, 76 nt, Homo sapiens
cgcaccgcacccggccagcccccccccagaccacaccggggcccgccgggagacagggaaacgaaaaccaccgggc

SEQ ID NO: 209470 - RNA, 80 nt, Homo sapiens
ggcgaagcgggccccaggacggccagggcccgcaagcgaaccgagcacagcaccaagccaggggcggcaggaagcccgca

SEQ ID NO: 209471 - RNA, 70 nt, Homo sapiens
ggaagcccagcgacggagcacgccacgggccacgcccaccggacacggacccggaccacccggaaaccag

SEQ ID NO: 209472 - RNA, 82 nt, Homo sapiens
ggggcggcgagaaaaggcccggggcccgggacgagggaagagaagccacggggaccggccaccagcaggaagcagcggaccc

SEQ ID NO: 209473 - RNA, 74 nt, Homo sapiens
agaaaccagcaacaaaaagaaagcgcgaaggcaaagcagaggaagaacagagacaacgaagagaggaaagaagc

SEQ ID NO: 209474 - RNA, 54 nt, Homo sapiens
cggcgccacgcaagggcgaggcagccccaaacaccgggaaagaaccaccagccg

SEQ ID NO: 209475 - RNA, 69 nt, Homo sapiens
agggcggggagcgcggcgggcgcgcgccaggggcggccccggcgaggcaggaggacagggccagcggca

SEQ ID NO: 209476 - RNA, 78 nt, Homo sapiens
agccgaccgggcaaccacaaggcgcccggccaggagagggaccagagggagcggaagcccgagagccaaacaagaccc

SEQ ID NO: 209477 - RNA, 79 nt, Homo sapiens
acccccggccgcccgggcaggggacagagggccagggagcccagggagaccaggagcgacgggggaggagacacacccc

SEQ ID NO: 209478 - RNA, 76 nt, Homo sapiens
cgggggacgagggcccagccgaacacggaaggaaagacacagcacaagcccggggaaacgccacacacagaacgac

SEQ ID NO: 209479 - RNA, 81 nt, Homo sapiens
gcaaccaagcaccgaaacagcaggagggggcgagggaagcaaggccaaagacaccgggcaaccccaggaccagaccaagcg

SEQ ID NO: 209480 - RNA, 32 nt, Homo sapiens
ggaaaagccgacaaagcgcgcagaagaaagcc

SEQ ID NO: 209481 - RNA, 82 nt, Homo sapiens
gacaccccggaagcgggaaaggaggacggaagaaagaccccaaaaaagaaagacccacacagcaaggagaagagaaagcaca

SEQ ID NO: 209482 - RNA, 69 nt, Homo sapiens
gggggagagccacggaagccgacagacaaccaggccacagggaacggggggcagcggccccaacagccc

SEQ ID NO: 209483 - RNA, 110 nt, Homo sapiens
cagcacgcgcgaacagaacgggggcaggcgacaggaaaacgggagcgcgcggcgaaagcgacgggaccggcccagagcaggggaccccaccggcgccggcaggcgcccac

SEQ ID NO: 209484 - RNA, 76 nt, Homo sapiens
cgacccgaaggcgggggccggccacacacggccagcaacagcccaccaaggacccagaaacaaagcccaaccacag

SEQ ID NO: 209485 - RNA, 79 nt, Homo sapiens
gaggacgacgacgacgaggaagaggaggcgaggggcccaaacccagcaaaggcacagcagggggccaaccgaacagcag

SEQ ID NO: 209486 - RNA, 61 nt, Homo sapiens
ccacgccaccgaacagcccacaagaaccagggaaaccagaaggcacgacggccgaacagac

SEQ ID NO: 209487 - RNA, 90 nt, Homo sapiens
gcggggggaacgcgccacagagagaaaaccagaacagggcagggggccgcaggggacaccagaaaacagaaaacagaaaaagaagcacgg

SEQ ID NO: 209488 - RNA, 86 nt, Homo sapiens
ccggagacccagacaacacagcgggccacagacagcccgcagcgcgcacaagacccagaagggaggcgccaaccccgagcacgcac

SEQ ID NO: 209489 - RNA, 76 nt, Homo sapiens
agaagaaacccaccaaaggagaccagcacaacaggaagaaacacccaaagacccacagcgacacaaggagacgcag

SEQ ID NO: 209490 - RNA, 89 nt, Homo sapiens
ccgagagcggaccgagagcgcgaaacgcacgagaagggggacaaggagaagaaaccgccgaccagaggggagcacacaaagaagaaaga

SEQ ID NO: 209491 - RNA, 72 nt, Homo sapiens
acccccgggccaacagcacggagcccagacgcgagggccacaacggacaaaaagacagcagaaagcaaaaag

SEQ ID NO: 209492 - RNA, 80 nt, Homo sapiens
cgacaaacaccagcagcgcagaccgcacaaggaggggcgcaaaacgagaacaaagccaagcgggcaaacagaacaaagaa

SEQ ID NO: 209493 - RNA, 71 nt, Homo sapiens
acgccccacgaccgccaggcgacccacaacggggacccaacggcgaacggaccgggcaaagcaaagaacca

SEQ ID NO: 209494 - RNA, 37 nt, Homo sapiens
accagcaccgagacaaccacccaccagccgggacagg

SEQ ID NO: 209495 - RNA, 68 nt, Homo sapiens
gcccagagcaggcgccaaccaaggagagcggaacgccaggacaccgggagaggaacagccacgaagca

SEQ ID NO: 209496 - RNA, 68 nt, Homo sapiens
gaccagcagcagggaggcaacaagaagcgcaacgcagaaaccacaagagggagaaccccaacccaaac

SEQ ID NO: 209497 - RNA, 77 nt, Homo sapiens
agccacaaaggcccacacaggacagcgccggccacccaaagcacgggggcaacagagacgcccccgcaaaacggccc

SEQ ID NO: 209498 - RNA, 76 nt, Homo sapiens
gccacgaccaccggccgcgggcccggaacacgagaccgaccgcccccaggaggggagaacagcgggggccaagcgc

SEQ ID NO: 209499 - RNA, 71 nt, Homo sapiens
aaccgccgacgaccaacccacagaaagagagaaaaggaacagccgaagccaggggcaagcgaaaccacaga

SEQ ID NO: 209500 - RNA, 82 nt, Homo sapiens
ccgaagacacgcgacccggagacagcccaaaacccggaagagcgccccaggagaaacaagcagccgccgcaaagggacgacg

SEQ ID NO: 209501 - RNA, 78 nt, Homo sapiens
cgaaggacgcggcgccccgccccgccagacccggcggcccggccaacgcaacagggagcccacgcaagaggggccggg

SEQ ID NO: 209502 - RNA, 76 nt, Homo sapiens
cccaccggacgaggccccccaaccaggcaaggggggccccagcccggccgaacgggcgcacgacacaaacacaacc

SEQ ID NO: 209503 - RNA, 82 nt, Homo sapiens
cacccgcaacccagccagccaccaggggagagggcccgaggcaccaacgcaaggacccccccccgcgggcgccccaggcaca

SEQ ID NO: 209504 - RNA, 50 nt, Homo sapiens
ccgccacgaccggcacggccggagcgagggagagcaggaacacagagagg

SEQ ID NO: 209505 - RNA, 72 nt, Homo sapiens
gcacaggcaccagcccgggcagcgagcgcaaaaacgaagccaagcccacaccagggccgagaggacagcgag

SEQ ID NO: 209506 - RNA, 77 nt, Homo sapiens
accggaaaaccacaaagaaagagccgcagacgcacagcaaccaccggacccgaaggccaccacccagaggggccgcc

SEQ ID NO: 209507 - RNA, 78 nt, Homo sapiens
gcacagcagagagaagcgccgccccagggggcaccaggggagaagagagaaaaccacggacaagaaagcgccaaaaac

SEQ ID NO: 209508 - RNA, 114 nt, Homo sapiens
gaggaaaggcgcggcgcgcagagcgaggcgcgggaccccaggagggggacaggaggcgcggggcccagaagagcaacgacaggacacaaggacaccaagaaggagacaccggag

SEQ ID NO: 209509 - RNA, 76 nt, Homo sapiens
agaggagcagcaggcacagcacgggcagagccaggacagggcagaccgccagcagcacagcaagccacagagaggg

SEQ ID NO: 209510 - RNA, 76 nt, Homo sapiens
agcccaagccagcccgccgccaaggacccaggaacacaacagcgagcaacagcacagcaaggagagaaaaaaaaga

SEQ ID NO: 209511 - RNA, 76 nt, Homo sapiens
cagagagggaaaaccggagcagcccaccagaaaagcccgacagaacccacaggagggccagaggacaaagcacggc

SEQ ID NO: 209512 - RNA, 57 nt, Homo sapiens
cgagaggaagcagcgagacgcccggcagacggagcaagggaccccgacggagagaca

SEQ ID NO: 209513 - RNA, 76 nt, Homo sapiens
ccggcccggcccacggccggccgcgcgcgaacccggccgcagggacccgcaggcgacacgaaaggaagcagacgag

SEQ ID NO: 209514 - RNA, 76 nt, Homo sapiens
gaaacgggacggaaccagcaaccccaacaaccacacagcagaacgcggcaaaaaagaaaagaagaagcgaaaccgg

SEQ ID NO: 209515 - RNA, 80 nt, Homo sapiens
cccgggagaagcccagaaaaaagcccagcgcggcgcggggcgcggagcgccggagccgcgcgcgaccacaccgcaggaag

SEQ ID NO: 209516 - RNA, 70 nt, Homo sapiens
cggagaaggcaaagaaggagacagacccagcacggaccccccccccagccgggcgaggccccgaaacgca

SEQ ID NO: 209517 - RNA, 61 nt, Homo sapiens
cgggccgcaccagagcgcccggcccacgacacaggaagaagacagcaaggccagcagagcc

SEQ ID NO: 209518 - RNA, 77 nt, Homo sapiens
cagcaccgcacgcccgcaagggagaaacagagggaggaccaagccacagggggcccaagcccacgaaaacacagaca

SEQ ID NO: 209519 - RNA, 82 nt, Homo sapiens
cccgccaagaccgggaggagaccgcacgcccagcgacagaacagggaggccaagggaggacaccaggcccagcacgagagag

SEQ ID NO: 209520 - RNA, 72 nt, Homo sapiens
ccaaggccggcagagccaggccccccaccaggggccgcggcagggcgggaccccgcccccgcacgggcacac

SEQ ID NO: 209521 - RNA, 72 nt, Homo sapiens
cccaacccaacgaagaaacaaaacccaaaggaaacaaagagccccgggaaaagaaaaaaaacgccccaaacg

SEQ ID NO: 209522 - RNA, 76 nt, Homo sapiens
ccacccaggcacgggccgagccgacccaggaacgcccccccacagaggagcgaaggagaggacagaagaacgcaaa

SEQ ID NO: 209523 - RNA, 91 nt, Homo sapiens
cggaccgagaccggaccgagagcggaccgagagcgcgaaacgcacgagaagcaagccccagccaagacccaccaggcaggggaagaagaca

SEQ ID NO: 209524 - RNA, 50 nt, Homo sapiens
ggaggggaccgccgcgggccacaaccaaagcgggccacagacacagccga

SEQ ID NO: 209525 - RNA, 72 nt, Homo sapiens
gagagcccgaccagagaaaaggcggaagaccgccaaaaaggacacggagccaggcacccggacacgaccaaa

SEQ ID NO: 209526 - RNA, 75 nt, Homo sapiens
cggagagccacaaaaaaggaagcgaaaacaagaggcgcaagaagaaccagacgcggaagaaccagaaaccaagag

SEQ ID NO: 209527 - RNA, 84 nt, Homo sapiens
ccgccgccgccgccgccacgcgcggagccggaggaggaggggagaggccggaggacaccaacagccacaaaagaagacccaaag

SEQ ID NO: 209528 - RNA, 58 nt, Homo sapiens
ggacaacgggacccagaagagcacaccaccgaaaccagcagcacccacagccgaagga

SEQ ID NO: 209529 - RNA, 70 nt, Homo sapiens
ggaacagggacgggggcagggacaagggaaagaaacggcggaaaaacagcgaggccccaccgggacggga

SEQ ID NO: 209530 - RNA, 77 nt, Homo sapiens
gccccgggacgggagaggccggagcgcgccgacccgaggagaaccagcggagagggcaacacgaaaccaaccaaacc

SEQ ID NO: 209531 - RNA, 82 nt, Homo sapiens
ccaagaagacacaaaggacggaggcacggaaacccagcggcggcagaaccagccggcacaaagccgaaccagagagagcaac

SEQ ID NO: 209532 - RNA, 78 nt, Homo sapiens
cgccgcaggacggagaagggccgacggcaggcgcaagggaccagggcgaggagggcggaaccacccaggaggaggggc

SEQ ID NO: 209533 - RNA, 39 nt, Homo sapiens
ggccaccggcggagcgagccagcaagcgcccggaggacc

SEQ ID NO: 209534 - RNA, 77 nt, Homo sapiens
cagcacaagaacgcacccagaaacccccaaagagaaagaagaagaaaacgagacccaaaagggagaaagaagagaag

SEQ ID NO: 209535 - RNA, 77 nt, Homo sapiens
gcaacgccaacgagaggccaccagcagacgagccacagcgccgaggcgagccggaggcagggacccgggcaggcagc

SEQ ID NO: 209536 - RNA, 61 nt, Homo sapiens
gcaacgccagcgcccaggcgcaagcggggccagggggggccccagcccggccgaacgggcg

SEQ ID NO: 209537 - RNA, 79 nt, Homo sapiens
ggagagcacagcggcaacagagggccacaacgagaaagaccgacgaaaagaagaaagaaccgcaaacacgcagaacagc

SEQ ID NO: 209538 - RNA, 73 nt, Homo sapiens
gccccaaacccggacgaaacgaccccaccagccccaaaaggcggcaacagaccagaagcacccagagccgacg

SEQ ID NO: 209539 - RNA, 33 nt, Homo sapiens
gccacgaaccaaaggggggacaaagcgagaacg

SEQ ID NO: 209540 - RNA, 76 nt, Homo sapiens
cacaccggcggcgggacgacgcggacagcgggcggagccgacgagcggcggaagacgaccccgacgcaggccagga

SEQ ID NO: 209541 - RNA, 56 nt, Homo sapiens
gagcggcggagagccgggagaaacacaaagagacaggcccacagaagccggcaaac

SEQ ID NO: 209542 - RNA, 78 nt, Homo sapiens
ggagagcacacaaagcagaaaagccagggacgagccaagggcgaccagaaacaggcaaagaaaccccaaagccagcaa

SEQ ID NO: 209543 - RNA, 83 nt, Homo sapiens
gagaaacaggcggaccaaaccgccgcgcagcccccgcgacgagcccccaacgagccaccaacaggaacagacccgacacgacc

SEQ ID NO: 209544 - RNA, 59 nt, Homo sapiens
gaggaagggcggcggaccgggcgacaggagccaagggaaaacacaccaaacggaacccg

SEQ ID NO: 209545 - RNA, 79 nt, Homo sapiens
cagcagaacaacaaaacagagaaaaaacgccacccaaaggcggccgccacgggacagaggcagagcaacagggacacaa

SEQ ID NO: 209546 - RNA, 80 nt, Homo sapiens
acagcggaccaaggcaccagggcggaccccggggccaggccggaagcagaccccagcagcagacaacgacgaaagaccca

SEQ ID NO: 209547 - RNA, 71 nt, Homo sapiens
gccgcgggagagaggacccccccccccccccaagaacaacaagaaggagaaagacacaacgacagaagaaa

SEQ ID NO: 209548 - RNA, 89 nt, Homo sapiens
cggcccggggccgggagcgcccgaggaacacgccgcagacaaagggagccaaaggaaaaaagaccccagacccgcagaaaaccacagca

SEQ ID NO: 209549 - RNA, 92 nt, Homo sapiens
cgaacagcgggcgggcccggcccgggggccgccccggcgagccgcgacggcgccgcccacggcgagggaggaacaggagcaccacgagagag

SEQ ID NO: 209550 - RNA, 77 nt, Homo sapiens
gccgaacacggcgaccagcgaacaggcaaaagcagaccggaaaacccaccggcaagaccacacccgaggggagccca

SEQ ID NO: 209551 - RNA, 57 nt, Homo sapiens
cggagcggaacgaggagggcgcccaaagcgcagaacgggcgcaccacgccaccccgc

SEQ ID NO: 209552 - RNA, 80 nt, Homo sapiens
aaggccagcgggacccggcacacagcggggacacagccggaaacccacgcgccagggcgcgggggggcagagcaacgcga

SEQ ID NO: 209553 - RNA, 78 nt, Homo sapiens
caggcggcccacggcagcgagggccaacgggccaacgccggcaggggacggcccacgcgaccggagcccggcaccggc

SEQ ID NO: 209554 - RNA, 74 nt, Homo sapiens
gagcaaaaacccaaaccccccaccagcgccaagaggcagaacggggccccgcacccagacaaacaggcccgcag

SEQ ID NO: 209555 - RNA, 72 nt, Homo sapiens
gggaaaaaggaccaaccggcaagggacaacggccaagaagggaaagaaagaaacaaccacgaagaagccagg

SEQ ID NO: 209556 - RNA, 42 nt, Homo sapiens
ggaggccgaggcaggggacagagcgagaaggggagccacacc

SEQ ID NO: 209557 - RNA, 35 nt, Homo sapiens
aaaccaccccaacacccaggccaagaggcgaggag

SEQ ID NO: 209558 - RNA, 74 nt, Homo sapiens
aaaccgggcccaccccagagcacaaaccggccccagaaaccggagagccaacccagcaggcaaaggaggggagc

SEQ ID NO: 209559 - RNA, 42 nt, Homo sapiens
gggaagccaacgaccacacgcaggaccccacacgggcagcgg

SEQ ID NO: 209560 - RNA, 75 nt, Homo sapiens
ccgggccacagggcaagggaagcgggggccgaggcgggcaccagccacagccgcacgccaagagcagcagaaaag

SEQ ID NO: 209561 - RNA, 71 nt, Homo sapiens
gaaggaggagacgaagaaaggagacagagggagacaaagcgggcagaaaagaagacggacccgacagagac

SEQ ID NO: 209562 - RNA, 79 nt, Homo sapiens
gcagcggcacccgggacaaggcagacgggagcgcaaggcgccccaaggccagacaaaaccggaagcagagaccaaagcg

SEQ ID NO: 209563 - RNA, 81 nt, Homo sapiens
gcagaagaaagcagcgaagcacacacagaacaaccaccgacaccaagcaaccacgagagaaggccaggagaacagacacgc

SEQ ID NO: 209564 - RNA, 70 nt, Homo sapiens
acacacgggcggaagccacggaacgaaaacacagaaggcccgggaaacaaaagcgcagaagagaagccaa

SEQ ID NO: 209565 - RNA, 38 nt, Homo sapiens
gcaaagacgcaacggaccgagaaagcgacgaggaagaa

SEQ ID NO: 209566 - RNA, 72 nt, Homo sapiens
aaaggaacccagcagcagcaggacggcaggagacagaggacaggagaagccgcgggagcggaagacaggccc

SEQ ID NO: 209567 - RNA, 83 nt, Homo sapiens
gacgggcgggaaggccgcccgggcccgacgggacgccaagcagacgggaggaagagcagagcagaagagaagaggaggaggag

SEQ ID NO: 209568 - RNA, 77 nt, Homo sapiens
cgcccaaaggagagcaagaccaaagagcccgccaaaggcccaaaaggaacaagcgcgagaaggaacaaaccaggaga

SEQ ID NO: 209569 - RNA, 73 nt, Homo sapiens
acgagcggaccccgcccaggccgggagcgcacaagggcagggcaaagacgggcagaggacagcaggaaaggca

SEQ ID NO: 209570 - RNA, 79 nt, Homo sapiens
ccgccacgcccaaacgcgaagcagccccgcgaggaccacccggcgagaacgcggacaagcaaacaaagaggaaaaagag

SEQ ID NO: 209571 - RNA, 56 nt, Homo sapiens
agagcaccgaaccggagaccgaggaggaagaagaaggacgagaagaagagaagaga

SEQ ID NO: 209572 - RNA, 76 nt, Homo sapiens
gcaccagacggccgccagcggaacaaccgaggaggcccgcgcaaacggaagcgcccaccccacgggaggccgggac

SEQ ID NO: 209573 - RNA, 99 nt, Homo sapiens
gaacagaacggcaagccacagaacccaacacagagccaaagaggaagaaccagccaggggaccacagaaaaccaggggcaagaaacagaaccaaggcaa

SEQ ID NO: 209574 - RNA, 79 nt, Homo sapiens
gcccgcgaggaccacggcaccaaccccggcagagagcaggaagccagcagagcagggaggaaaaccaaggcaacgccag

SEQ ID NO: 209575 - RNA, 61 nt, Homo sapiens
gaagagaaaaacaggacaggacccgaacgagaccgggccgaaaccagcacagccacaaacg

SEQ ID NO: 209576 - RNA, 62 nt, Homo sapiens
gaagcaccgcgggaacagggagcacaaccgaagggaagggaccacagaccagcacgccggcg

SEQ ID NO: 209577 - RNA, 82 nt, Homo sapiens
cccggcgccgaggacccccgagaggagcgggaaggccccgcacccggagaccgggggaagacaagcacaagagaggaggccg

SEQ ID NO: 209578 - RNA, 78 nt, Homo sapiens
cgccgaagaagcacgaaagccccacccgccgcagcaagcagagggagagcacagaaggacagcaggaggacagaaggc

SEQ ID NO: 209579 - RNA, 53 nt, Homo sapiens
ccggcgccgacggcggcacggacgccagaaagagggcaacggccgacgaacac

SEQ ID NO: 209580 - RNA, 77 nt, Homo sapiens
ggccgacagccgcgacggcgagcccgggccgcgcccgaggaagggccgcccagcggcacccacgacgcagcgcccca

SEQ ID NO: 209581 - RNA, 78 nt, Homo sapiens
gagaaggaccaagaaccagaggaaaggcaagggcagaaaagaggggaaaaggccagccgcacgcaggcaaacgaaaac

SEQ ID NO: 209582 - RNA, 74 nt, Homo sapiens
gcgacagccgcgccaggggccagagaacacagacaaaaagggaccagacagcagagaaaaaaaaccgcaaggaa

SEQ ID NO: 209583 - RNA, 78 nt, Homo sapiens
ggccagagaaagcagaggggagaggagagccagcacaagacgaagagggcccagaaaacacgaaccccggaaggaaga

SEQ ID NO: 209584 - RNA, 84 nt, Homo sapiens
ccgcggcgcggagccccggcggccaccccggggccgggcagaagggcccaggaagccaccgacaagagcacagggaaggggaag

SEQ ID NO: 209585 - RNA, 71 nt, Homo sapiens
agagaggccaacggagaggcggccccacgaaagggcagcagcggcaacagacggagccgccgcgcccaggc

SEQ ID NO: 209586 - RNA, 75 nt, Homo sapiens
ggcgaccaaccggcaggcacacgaccagccccgcgaaccgaggcgaggcagcaaccaccggagggcgcagagaag

SEQ ID NO: 209587 - RNA, 37 nt, Homo sapiens
aggccagagcggagacagacgaaagcccaggagccca

SEQ ID NO: 209588 - RNA, 83 nt, Homo sapiens
gccagcagcacagcacggcccgggcgggaaggacaccccaaaaccagcggggggcaccagaagcacaacaagggggacccacg

SEQ ID NO: 209589 - RNA, 71 nt, Homo sapiens
cacacggagcagagcgaaaagagcgcccaaaccagggcagaagcagcaagcaccaacggcgcggcaaagcc

SEQ ID NO: 209590 - RNA, 79 nt, Homo sapiens
cgcgccgcaggagacgagaggacgggaccaggcgaagcggccgagcaggcgagcgaacgacgacccacggcagggcaac

SEQ ID NO: 209591 - RNA, 86 nt, Homo sapiens
acggacaccaccaggggacggcacggacgacagaagcgacgggagaccgggggggggagccccccaaaagaaacagcgccaaccaa

SEQ ID NO: 209592 - RNA, 62 nt, Homo sapiens
cgcacccagcccacaccccacccaccccacacggacacccccaagagccgccgcacccaggc

SEQ ID NO: 209593 - RNA, 45 nt, Homo sapiens
cgcgcggggcagccaagagacgaggaacgcaagcacaggaccaga

SEQ ID NO: 209594 - RNA, 83 nt, Homo sapiens
cggcgcgcgcgcagcgcaggggaggaggacgggaagagaacaacgcagaacaaagacgaaggcacgaaggcaacagccagagc

SEQ ID NO: 209595 - RNA, 83 nt, Homo sapiens
acgggcccgcggcgagcgagcccgaggacggcgcgggccccaccaaagccaccaagccaagaccagcagccaaaggaagaagg

SEQ ID NO: 209596 - RNA, 39 nt, Homo sapiens
ggggaaagagaaaacgggagcaggcaagggaaccaacag

SEQ ID NO: 209597 - RNA, 75 nt, Homo sapiens
ggaccaaaaccgcagaaccaaggaaggcaccgcagagccaagaaagagggaaaagcagcaggcagcccggccaaa

SEQ ID NO: 209598 - RNA, 87 nt, Homo sapiens
ggaaagcacccgggaacaacccaagcgaagaacccaccggcaaacacagagcagcccaagcgagagagagagcagcggggcgaggcg

SEQ ID NO: 209599 - RNA, 79 nt, Homo sapiens
accccgagcagcacgagacgccgacgccagacccccggacacccagccgggcccggggccccgacaagcccaccaggcc

SEQ ID NO: 209600 - RNA, 80 nt, Homo sapiens
aggcccaggacagccaggcaccagcaccaagagaaagaccacagcaagaccacgcccccagccgggggaccaggccgaac

SEQ ID NO: 209601 - RNA, 64 nt, Homo sapiens
cagaccccagcccgagagaggacaagccgaagaccggcgacagcccccgccccacaacgggcag

SEQ ID NO: 209602 - RNA, 76 nt, Homo sapiens
cgcgcgaagcggcgcggggaggcagcggaaggcggcagggaggagcgcacagcacagccaaaaacagaaaccacgc

SEQ ID NO: 209603 - RNA, 85 nt, Homo sapiens
cagggcagacgggaggagagaaagagcaacacccggacagacacggaaggagaacgcacagaggcccaggcgagagcgggaagag

SEQ ID NO: 209604 - RNA, 74 nt, Homo sapiens
gaaaaaagaaacaacacagagagagccaaaggagcgcagggaagcgaagggccgaagacgaaaaaagaaaagcc

SEQ ID NO: 209605 - RNA, 72 nt, Homo sapiens
aacaggacgcaagaacgccgaaccaggaacaacaagaaccaagccacaggccaccccagagaagaggacgag

SEQ ID NO: 209606 - RNA, 84 nt, Homo sapiens
gaagagccgccaagaggccgccaccagaacaggcaaggacgagccgaagccagcagacccaagaaagaaaacagggccagacgg

SEQ ID NO: 209607 - RNA, 75 nt, Homo sapiens
aacaaagcacaaaagcggaagggaacagacacagcaaagcacaaacacaaacaagagagacaaaagagaaaagaa

SEQ ID NO: 209608 - RNA, 79 nt, Homo sapiens
ccgacacacagaagaacggaacgcacccaacacgaggacccaaagacaggaccacgcaccagcagagaaggaaagcaaa

SEQ ID NO: 209609 - RNA, 43 nt, Homo sapiens
aaaggagaccaaccaccagccacgacagcccaacccgacggcg

SEQ ID NO: 209610 - RNA, 72 nt, Homo sapiens
gaagcaagggaccgaagaagccaaagagccgggcagacccgaaaagcggacgacaagggaacagcgaagaac

SEQ ID NO: 209611 - RNA, 79 nt, Homo sapiens
cgcaaaaacaagacggggcgccccacagaggggcgacgaccaagacacccaggagaaagacagcggggaaaagaaaaag

SEQ ID NO: 209612 - RNA, 75 nt, Homo sapiens
agggacaagggcccggcccggggccgcggccaggggcccccggccccggaacgccggacccggaccccgggcaag

SEQ ID NO: 209613 - RNA, 83 nt, Homo sapiens
gagaaaacaagcgagaagaaagcgaagaggcagagcccgaagccaaacagaaacagaacagcccgggcccccacagcccagcc

SEQ ID NO: 209614 - RNA, 79 nt, Homo sapiens
gaacccaagacaccaccagcagacaggccgcaccaacaagaagggcagagcagcccccgagcgagccacgcacgccacg

SEQ ID NO: 209615 - RNA, 74 nt, Homo sapiens
gaaggaaccagccaaaaagcaagagccgagagcgccggaggaccacacccggccacagccgcaggaacaagaga

SEQ ID NO: 209616 - RNA, 83 nt, Homo sapiens
gccgagcaacccccaggagaagagcccaagcagcgccagacaaagagcaagggagagagagagagagaggaagcgaagaaaaa

SEQ ID NO: 209617 - RNA, 71 nt, Homo sapiens
acgaccccaccagagaacagggacaccgaaaacgagaaacgaaagagacacgggggcacaaccgagcccgg

SEQ ID NO: 209618 - RNA, 54 nt, Homo sapiens
gggaagggccaccagaacacaaggccaccaccgaaagccccgaacaacggcgag

SEQ ID NO: 209619 - RNA, 68 nt, Homo sapiens
aaaaaagaaaaccagaagcggagcgggggcccgagaagccgacggagaaagagcggcgagggagaccg

SEQ ID NO: 209620 - RNA, 52 nt, Homo sapiens
gcacacagaaacgcaccagagagaaaccggaaggagggcaacacccagacag

SEQ ID NO: 209621 - RNA, 69 nt, Homo sapiens
gaacgcgacggcggcgcccgcagggggccgaagacaccaggacaacagaaggaaaaggcccacggggga

SEQ ID NO: 209622 - RNA, 61 nt, Homo sapiens
aacgccagccaacccaggaccaaggcaacagaagcagcagaacaaccagcgccaaagaaac

SEQ ID NO: 209623 - RNA, 68 nt, Homo sapiens
gcaagacccccagcgccggaacgggccacaggcagcagcagcacacccccgagcaccgcgggggggcg

SEQ ID NO: 209624 - RNA, 64 nt, Homo sapiens
ccgccagcccccaggagacaaagacaggaggccaacaccacaggaagaggaggacgcagcagag

SEQ ID NO: 209625 - RNA, 65 nt, Homo sapiens
gagaaggaccaagaaccagaccagaaggaaaacacaccaggcacagaaaggccccccgccaagcc

SEQ ID NO: 209626 - RNA, 72 nt, Homo sapiens
agaaacaagcaacgacaggggaaagccagagacacaccgccccaaagggcgagaacagacagcgagggcaag

SEQ ID NO: 209627 - RNA, 41 nt, Homo sapiens
gaagcgacacaaggagaaaagacagcaccaggcccgaagca

SEQ ID NO: 209628 - RNA, 81 nt, Homo sapiens
ccaaccgaggggagagacccaccaagcccaagaaaacccgcggcaacacagaagcgagcccagccccgcggaaccaaggcc

SEQ ID NO: 209629 - RNA, 35 nt, Homo sapiens
ccaagaccacagccccaggaaaaaggaggacaaac

SEQ ID NO: 209630 - RNA, 75 nt, Homo sapiens
gagaccagaggccccaaaggcgccccccagcgaacggggccagaccagcgggaagacacacaaccgcgaccacca

SEQ ID NO: 209631 - RNA, 81 nt, Homo sapiens
gggggcgcccgccgcgccgccacggcaggagggagaaacagagagaggcagagaggccaaagaaagacgagaagaaagaga

SEQ ID NO: 209632 - RNA, 100 nt, Homo sapiens
cgagaccccgcggaacgcccaccgcggagagcagcacgaccccagcacaggaccccaccgagcccaagacaaggagcgaggggcgaacccgccaagcgca

SEQ ID NO: 209633 - RNA, 67 nt, Homo sapiens
gccaagacccagaacgagccgccaaaagagaggagcagaagccaaccgaggcaaaagaaacaaacac

SEQ ID NO: 209634 - RNA, 109 nt, Homo sapiens
cgaccacacagccaacccgagccaagcaaccccacccaggcccgagagcgggacacaaccgccacgaaacgcaccgccgaagcggcaggacaggggcacaaggcaaaca

SEQ ID NO: 209635 - RNA, 37 nt, Homo sapiens
gagcgacccgccacgcggagacgggacacggagccag

SEQ ID NO: 209636 - RNA, 105 nt, Homo sapiens
gacagcgccgccaccgagccgggcccaccccccaccaaggaagaaaaaggcacaaacccagcacagagaagacggcgacaagcaaaagacgacgcagaaaggaga

SEQ ID NO: 209637 - RNA, 73 nt, Homo sapiens
acccgcgggaccgcgcccgccgcccggggagcccggcggcagcgcggagcgagccccagccggaaaccagagc

SEQ ID NO: 209638 - RNA, 79 nt, Homo sapiens
ccgggcgcacccacaaccgaaggagacaaccgaggccgcagagcccagccccggccggagagacagaaagaagaaccag

SEQ ID NO: 209639 - RNA, 55 nt, Homo sapiens
gcccccggggaggaagagggagagcacaggagcacgggagcaggggcagacacgg

SEQ ID NO: 209640 - RNA, 84 nt, Homo sapiens
ccgacccagcaggacagaaaggaaccacggaaggagggggcgacacacaagcaggggggaccgacgagcaggcgagaaggaaga

SEQ ID NO: 209641 - RNA, 80 nt, Homo sapiens
aaggaagcacaggggagaggcaagcacggaccagacacacggcagggaaccccaccccggaaggcggggacacagacgag

SEQ ID NO: 209642 - RNA, 78 nt, Homo sapiens
gaagaccaaaagccgacaccggccccgcacgcccgggaaggagaaaaggagcaggaagaagaaccaggcagacgcagc

SEQ ID NO: 209643 - RNA, 71 nt, Homo sapiens
cgcagaagacgcagggccaaggaaaccgcaagaagcaagcgaacagaagcgcccgggggcaggggacgcgc

SEQ ID NO: 209644 - RNA, 76 nt, Homo sapiens
agaacggacaaagaggaggcagggcaaagaagacgacccggacgaagaggacgccaaagaagggagagaagaagga

SEQ ID NO: 209645 - RNA, 74 nt, Homo sapiens
ccgccgaccccccggcgccgcgccggcggcgggagccaccagcgggcagcacaggaccccaccaccagccggcc

SEQ ID NO: 209646 - RNA, 76 nt, Homo sapiens
acaggcgcgcccagggaccgaggcgcgaggaaaagcgggacgcccagggaaaaaagcacaaagaccaaccaacaga

SEQ ID NO: 209647 - RNA, 69 nt, Homo sapiens
ccagcaagacccccacagacgaggccacaccaacaagacaagaaccaaacagaacccacgaagggagac

SEQ ID NO: 209648 - RNA, 94 nt, Homo sapiens
gcagacgcagccgagacaccagcccgaaacaccaccaaggccccgggggcgccgagggcacaagggcaacgacagaagggcgaagccaacgcca

SEQ ID NO: 209649 - RNA, 78 nt, Homo sapiens
gccccacgagagaacggcacacgcgagcgcccgcagaaaaaccggcaggcacaacaaaaagggccgcagacccaaaac

SEQ ID NO: 209650 - RNA, 70 nt, Homo sapiens
acggacaagacaccacggcccggcagaaggacggagaagcgaaagccagaccggcaagagcggaagaaag

SEQ ID NO: 209651 - RNA, 72 nt, Homo sapiens
aacacgccgacagggacgaagaaaagggggcgggacgcgggggaaaggcagcacccgagagggcacagagcg

SEQ ID NO: 209652 - RNA, 80 nt, Homo sapiens
aagaccacgacacccgaagccgggaaagaagaaggaaccagcaaagcgccacgaagcacaagcaagaggaccagccaaaa

SEQ ID NO: 209653 - RNA, 72 nt, Homo sapiens
gcaccaagaaacaagaaccaacaccaggaacgagaggaggcgcaggaggagccacgccgaagggagcagggg

SEQ ID NO: 209654 - RNA, 79 nt, Homo sapiens
acaaggcccgcgccgcgcgggccgcgaccgcccggcgggcggagaacggaaaagcaccaggaagcagagaggaccgcag

SEQ ID NO: 209655 - RNA, 76 nt, Homo sapiens
aaaggaccaacagaagaacccagaacaacccaagaggacaaacccccagacgaggaaaacagaccacagagaaggg

SEQ ID NO: 209656 - RNA, 74 nt, Homo sapiens
cgggaggccaacggccgcaccgcgcagagagaagcacccaggccacagaggaggaaagagaggggaaagaagca

SEQ ID NO: 209657 - RNA, 72 nt, Homo sapiens
ggccagagaggaaggaccgaaaacaaagagaaagacagaggaagcaaggaaaagaaggaggccagcgggaca

SEQ ID NO: 209658 - RNA, 84 nt, Homo sapiens
cagcggcccaggcgccgcggcgaggagcgagcgcgcgaggggcggccgaggaggggccacggggccggggagccaccaggagac

SEQ ID NO: 209659 - RNA, 78 nt, Homo sapiens
aaggaccgagccgacgcgggccgcgcggggggagccccccagacccgaaaggagacaagaggacagccgcacggaaca

SEQ ID NO: 209660 - RNA, 55 nt, Homo sapiens
ggcaaggcccaacccagcagcgggggacggaagcggcagcgggcagccggcccag

SEQ ID NO: 209661 - RNA, 71 nt, Homo sapiens
aacaaacagcggaaacagaagaaggagccgagaagaagaagcaaccagacacacaaccaccagaaggagag

SEQ ID NO: 209662 - RNA, 75 nt, Homo sapiens
agggccgagcaacaggagggcgaccacaagcaaacaggacccccagcaacccagaagccagacgggagggcaagg

SEQ ID NO: 209663 - RNA, 67 nt, Homo sapiens
agaccaacgccggaaagccaaccacgaggacaccacagccaaacgcaggcggaaaaaaggaacccac

SEQ ID NO: 209664 - RNA, 77 nt, Homo sapiens
ggcgggcgcgcacgacgacggcggacgcagcggcgggggcggacccagaaagcgggaaacaggaaaaaaccaacaaa

SEQ ID NO: 209665 - RNA, 76 nt, Homo sapiens
acaccgagagaggaggagccagacgacaagcacacacaggcgcgaaacggaaaaagcgcccgagcggcgccgacac

SEQ ID NO: 209666 - RNA, 85 nt, Homo sapiens
ggggaggcggcagcgcaaccacgagacggccccaagaaacaacagcaggaagcggcccacgcaccagcccccggccgggacgagg

SEQ ID NO: 209667 - RNA, 85 nt, Homo sapiens
ggaggcggccgcggccccaaggagcggccgcgggcccggaccccgggcccaaggagcggacagcggggggcggccgccggcagag

SEQ ID NO: 209668 - RNA, 72 nt, Homo sapiens
cggggacgcggacgcacgaccgacccccaccaccggcagggagcagcccggacacggcaggcgccggcccac

SEQ ID NO: 209669 - RNA, 89 nt, Homo sapiens
cgaacaccgagaagcgagagaaagagccccgcaccacaaccaggacacggccaaggccggcgagaacgcccgcggcagcgaggggacca

SEQ ID NO: 209670 - RNA, 82 nt, Homo sapiens
cacggaagggaaccgcgggaccgacacacaagcgacaggacggcagaccggggaagaagagagggcgaaggaggccacacag

SEQ ID NO: 209671 - RNA, 73 nt, Homo sapiens
gaaaggcagaggaacaaacgcaagcgaaaagccaaaacgagaaggggccgccgaaaagcaacgggggacaagc

SEQ ID NO: 209672 - RNA, 76 nt, Homo sapiens
ggaagacccgaccccgcaacccagaacccggcgaccacgaaggaggagcccagcagaaaggggagaggacaagagg

SEQ ID NO: 209673 - RNA, 74 nt, Homo sapiens
cgaaaagcgcagcgagcggagccgccggaggcgacacaccccaccgaaccagcagcccccacccaaagggccac

SEQ ID NO: 209674 - RNA, 78 nt, Homo sapiens
gccgggaagcagggaccaggccaaggagaaaagaaagccagaaggaaggaagcaacgaaccaagaaaaaacggaacag

SEQ ID NO: 209675 - RNA, 34 nt, Homo sapiens
aagcaagacgaagaacagagccccccaggaccgc

SEQ ID NO: 209676 - RNA, 83 nt, Homo sapiens
aaagagaagaaaggccggagagcggcggacagcagggagcggccgagccacccaaaaacaggcacgcagaagccagcggacgc

SEQ ID NO: 209677 - RNA, 41 nt, Homo sapiens
cacccacacagacccggcccagacccaacgcaagacacaac

SEQ ID NO: 209678 - RNA, 74 nt, Homo sapiens
ggaaccccgcggcgggagcgcggcggggccgcagaggaggagcagcgacgagaaagagcaagagcccagggaaa

SEQ ID NO: 209679 - RNA, 91 nt, Homo sapiens
gggcgaccgggcaccagcaggacccgaggccaggagccaggggcccagaagggcagagcagagaccaaggagccaggaaggagaagagggg

SEQ ID NO: 209680 - RNA, 56 nt, Homo sapiens
acgagcggggccagagagcacgaggaacgaaaagagaggacgggacgagagcccgg

SEQ ID NO: 209681 - RNA, 53 nt, Homo sapiens
acagcgcgcacaaagagagagacgacagggagaggagaagagaggacgaggcg

SEQ ID NO: 209682 - RNA, 79 nt, Homo sapiens
acggagcaaggaaaagagcccggaaagaagcaacagagaggggagaacccacaggagcacccacgggaacagcccagaa

SEQ ID NO: 209683 - RNA, 43 nt, Homo sapiens
gacaacagccggcgccgccacggccacccaccccaccagagcc

SEQ ID NO: 209684 - RNA, 79 nt, Homo sapiens
ggaacaggcggcgcgcgcggcgcgggacgcgcgcgggcacccacggagccccggggcgcccccggcagggccaaggccc

SEQ ID NO: 209685 - RNA, 58 nt, Homo sapiens
cgccggggcccgccgcagaaagcaccgggaggaaagagagccacacgaagaacacggc

SEQ ID NO: 209686 - RNA, 59 nt, Homo sapiens
aaacagggacaagcgagcccagaccggaaaccagagcaggcaaaacaagcacgacaggg

SEQ ID NO: 209687 - RNA, 43 nt, Homo sapiens
cgcgaacccaggaggcggaggagacccagcacagcagcggggg

SEQ ID NO: 209688 - RNA, 87 nt, Homo sapiens
gacggccaccggcgggaggaacaaaagggaaaggaacacaggcggaagaagaaaggagccacagagggggacggaaggggaagcgag

SEQ ID NO: 209689 - RNA, 72 nt, Homo sapiens
agccgccagagggacgggagccgaggacccagccgagaaacgaaacagccacaccacaaagagacgcccagg

SEQ ID NO: 209690 - RNA, 69 nt, Homo sapiens
gagcagacccgaggagcccgcaggcgcagggagcaggagaagcggagcgaaggggcgggcaggcagagg

SEQ ID NO: 209691 - RNA, 73 nt, Homo sapiens
ggcgcgcgcgcacgcggcacaacaggccccagggcaaagagcggcagaagggaggagaggagggggagggaca

SEQ ID NO: 209692 - RNA, 37 nt, Homo sapiens
gaagagacccagaacagaaggagaagcggagaaaaga

SEQ ID NO: 209693 - RNA, 72 nt, Homo sapiens
agcaaagagggaacagcacgagacgacggagagggacaaacaaccaagggagggaacccagcgccccaagcg

SEQ ID NO: 209694 - RNA, 69 nt, Homo sapiens
aacaccaaaaacaaaacgaaccaggacggcaaacacgacacgccaaaagaacacaacgaaaagcccccc

SEQ ID NO: 209695 - RNA, 79 nt, Homo sapiens
ccaggcgggggaccacagcccaagccagaaggacaggacgcaacgaaaccggcacggccgcccgagagacggggcaccg

SEQ ID NO: 209696 - RNA, 77 nt, Homo sapiens
aagcaagacccaggacaccccgaagccgagaaaggcggcgcccagcggccacacgccccaagcgccacgcccgggcg

SEQ ID NO: 209697 - RNA, 68 nt, Homo sapiens
ccaagccggccagcaagacccgagcccaagggccacgaccggcgcgcgcgaaccgacccgcaacagcc

SEQ ID NO: 209698 - RNA, 43 nt, Homo sapiens
agcagcagcccacgaacagaaagggagaccagcaaaacacggg

SEQ ID NO: 209699 - RNA, 79 nt, Homo sapiens
ggcacgagcggccgcggccaggcgacgccacccaagacacaaacggcgacacaggcacagaagaagccaaaaacgggcc

SEQ ID NO: 209700 - RNA, 67 nt, Homo sapiens
gccccaacacgcgagcacacacaacgcgagcacacccccagaagggcaacggagacagaaaccagga

SEQ ID NO: 209701 - RNA, 74 nt, Homo sapiens
ggcggacaaaaaccagaaaaacgggggagagccacggaagccgacagacaaccaggggccgggagaggaaggcc

SEQ ID NO: 209702 - RNA, 52 nt, Homo sapiens
agaaccggacagaagcgcaaaaaacgcaggcgacccgcggcgagagcccccc

SEQ ID NO: 209703 - RNA, 73 nt, Homo sapiens
cgagcagccagcccaagaacggccgagcgaccaggagaggagcccccgcccgaagaccggggagggcccccca

SEQ ID NO: 209704 - RNA, 79 nt, Homo sapiens
gggaagcaccaaagcgcgccaagaggggagaagggaagcgccaagaagcaacaagcacaggaggagacagcacgcagcc

SEQ ID NO: 209705 - RNA, 77 nt, Homo sapiens
gaagagggcggcgacgggggggacgagcggagcccgggacaggaggggacaaagccgcgaaaaggaacccacaaaca

SEQ ID NO: 209706 - RNA, 73 nt, Homo sapiens
caaggaccccgcccagcccccgagaccgagaagcccagacaggagacaaaccagcaggcagaaaacaacgaaa

SEQ ID NO: 209707 - RNA, 79 nt, Homo sapiens
agcgccgcgaggcggcgcgaagcccccaggagaaagaagccagggggaaggagagagagaggaagagaggggcaccacg

SEQ ID NO: 209708 - RNA, 100 nt, Homo sapiens
gagaagccgaaaagcgcagcgagcggagccgccggagagcagcagaaaacaggcagaaaagcagagagccaggcccgaaaccgaggccaggagccacagc

SEQ ID NO: 209709 - RNA, 68 nt, Homo sapiens
aacaacaccagccaaagaggaagaaacggcacgacgcgcgccaaaacagccagcaaagacaagagcag

SEQ ID NO: 209710 - RNA, 51 nt, Homo sapiens
agcgcagcaagacggccgcgcggcccgcagggcccaccaagccgagaacac

SEQ ID NO: 209711 - RNA, 71 nt, Homo sapiens
aaccagaaaacgggcggcacagcagacccacccagggaaagacaaggagccgggccgagaaaccgaaccag

SEQ ID NO: 209712 - RNA, 62 nt, Homo sapiens
cccgagaccaacccccggccaggcagggcgggggggggcacccccaaaggaagggccccggg

SEQ ID NO: 209713 - RNA, 74 nt, Homo sapiens
ccgccagaccacagcacagccgggaaggggagccaccagcccccgggaaggggggggccccaagaaacagggga

SEQ ID NO: 209714 - RNA, 79 nt, Homo sapiens
cagggaaaccggagaaagcacaaacgggacagcaccgcccagagagagcccagcaacaggagaaccgaaagcaggggag

SEQ ID NO: 209715 - RNA, 53 nt, Homo sapiens
agcccccgagagcgggacaggcgaggcgaagagggagagaacaaggaagacgg

SEQ ID NO: 209716 - RNA, 77 nt, Homo sapiens
ccggccaagaagcccaggcaagaggcgggaagaggcccggggaggggaggagaggagccgggaccggagaagacgcc

SEQ ID NO: 209717 - RNA, 85 nt, Homo sapiens
cccgcgcggcggcggagcggccgccagaagcgcgaacagagacgcgcaaaccgggagcgcaccgagcggagcaggaacagcacag

SEQ ID NO: 209718 - RNA, 39 nt, Homo sapiens
cgcgcgaccccaaaaggcccagagagcgggcaccagaga

SEQ ID NO: 209719 - RNA, 73 nt, Homo sapiens
ggcaaacaggaccacaggcccggaaaaggcccgcgccaaggggaacccaggcagcgccggcccaagagaaaca

SEQ ID NO: 209720 - RNA, 66 nt, Homo sapiens
ggggaccaccccaggaagaagacaacaggggccagaaacagagaggcagaccacagcgggaggacc

SEQ ID NO: 209721 - RNA, 78 nt, Homo sapiens
cggggcgacccggggggcgcgcccagagccccgcgcagcccagggaaggagacccggacagacaccagggagagaaga

SEQ ID NO: 209722 - RNA, 70 nt, Homo sapiens
ggaaagcagccccgcaggagaagcgaaaagaaacccaagaagaagaagccacacacagaagacccaaaga

SEQ ID NO: 209723 - RNA, 60 nt, Homo sapiens
gacacaagaagaggaggaaccagccgaacagcacaagggggggagccgcacgacccgaac

SEQ ID NO: 209724 - RNA, 75 nt, Homo sapiens
cacagccccacccccgcccacggagccggcacacccaccaggcggcgccagacgccagcagcccggacgccacca

SEQ ID NO: 209725 - RNA, 80 nt, Homo sapiens
gaggacaagaggggggccaaagagaccaggcagccgcagcaggacaaaggagaaggagaaacggaggacgcccccacaca

SEQ ID NO: 209726 - RNA, 70 nt, Homo sapiens
gcagcagaaaccaggacagaaggagaaggagacccggaacaagcaaaggacggggaaaccacaagcaaag

SEQ ID NO: 209727 - RNA, 69 nt, Homo sapiens
cacggggcgaggaacacgggaagcaggagcgaaagcgccggaagggcacgccccccccggacagaaggc

SEQ ID NO: 209728 - RNA, 67 nt, Homo sapiens
ggaggcgcggccaccagagcggaaaaaaaagccggcagggccagaagaccaagcccgagagaggggg

SEQ ID NO: 209729 - RNA, 71 nt, Homo sapiens
gcagggcccgccccgcgccggaaagacaacgcgggaacggggacagccggacccagaacagggaggccgga

SEQ ID NO: 209730 - RNA, 72 nt, Homo sapiens
cagagcacgcccaagaacgaacaagagagacggcccagggaagccagaaagaaagaaacagagcccaagacc

SEQ ID NO: 209731 - RNA, 51 nt, Homo sapiens
gaaggaccaagaaccagccagaccagaccgaccaaccggaacgaacacgcc

SEQ ID NO: 209732 - RNA, 76 nt, Homo sapiens
gcggcgcccccaccgggaccgagggacccccccgcggcaggaacgcacccggcggccccacgcagccacccaaaaa

SEQ ID NO: 209733 - RNA, 80 nt, Homo sapiens
ccaaaagggggggcaggaaaggaagcacaaaagcagaaacacaaacgaacccgggaaacacgaacacccgccaaggcaca

SEQ ID NO: 209734 - RNA, 64 nt, Homo sapiens
gggagaaacagcaacagccaggaggccgcacaaccaaaaaacacacccggagaagagcaaagag

SEQ ID NO: 209735 - RNA, 80 nt, Homo sapiens
gccagaaaacaaagacagagagaaaaggaaaggcggaaaaaaggcagaacgccaaaagacgaacacaaagggaaagagga

SEQ ID NO: 209736 - RNA, 83 nt, Homo sapiens
cagaccgccgacgacgcaagcagcgggaggagcaacgccgggaggcccagcccccgcgcggccggaggccggagccccgagca

SEQ ID NO: 209737 - RNA, 77 nt, Homo sapiens
cgaaggggcaggccgaaagccggccgaccgggcaagcccaggacaggggcccgggcggggcccaccagcgaggccag

SEQ ID NO: 209738 - RNA, 65 nt, Homo sapiens
cgcacaaaaccacccagaaaaccggggaccaaagcaggcacccacgggaggcagaggaaccgcca

SEQ ID NO: 209739 - RNA, 84 nt, Homo sapiens
cgccgcccgggcagcgaagccgcccccccgggaaacccaccagagaaggcgcggccacccaggacccgggggaggcagcgaaga

SEQ ID NO: 209740 - RNA, 75 nt, Homo sapiens
gagaagaagcggaaaaaagaaaaccagaagcggagcgggggcccgagaagccgacggggaggcaagcgggaacga

SEQ ID NO: 209741 - RNA, 96 nt, Homo sapiens
ccagccggaagacagagagagaaaagagggacgccaaacacccaaaggccgggcaaaagacaggagaagaaggagaggcaccagccaaaaaaaaaa

SEQ ID NO: 209742 - RNA, 84 nt, Homo sapiens
agacaagaccggagccacggacaggaaagccggagcgaagccaacccccgagcaggagggcccgacccggccacagcccaaccg

SEQ ID NO: 209743 - RNA, 80 nt, Homo sapiens
cggcgggacagagaaccaccagggagaaccacaacaacaggagcggagccccaacaaagccaaaacagaagaggcaaagc

SEQ ID NO: 209744 - RNA, 73 nt, Homo sapiens
caaaccgacccaaacagaagagaaggagaaagaccccagcaaggaccgacaaagggacgcgagagcgaaaaag

SEQ ID NO: 209745 - RNA, 39 nt, Homo sapiens
cagaagacaccacagaggagccagcaccgccgaccgcca

SEQ ID NO: 209746 - RNA, 83 nt, Homo sapiens
cggaagccccccggaaaaggaagagagaagggcacagaccaagacaacgaaccccggccaggacaggcccccacggaaccacc

SEQ ID NO: 209747 - RNA, 37 nt, Homo sapiens
accaaaagaagcacaccgccaaagggggaaacaccca

SEQ ID NO: 209748 - RNA, 78 nt, Homo sapiens
caggggagccagaacaggagaaccagagagagggggggcccagaccggagaagaacaagccgacccaaagccgccgcc

SEQ ID NO: 209749 - RNA, 82 nt, Homo sapiens
aggcccacccggagaaccccacggagaaccagagcggaaaggcagccacagcagaggaaagagggaaagacaaaggccagca

SEQ ID NO: 209750 - RNA, 59 nt, Homo sapiens
gaagggacgaaaaccgagggcaagaagcgcgaggccagcggagcacccggccccacagg

SEQ ID NO: 209751 - RNA, 71 nt, Homo sapiens
acgacagagaggaaggacacggaaagaacaagcgcacgacaagccaagaacgacaaccgcgacaggagcac

SEQ ID NO: 209752 - RNA, 82 nt, Homo sapiens
cccacgccagaagacagcggaacaagaaaagaagaggccgggacagaacaacaggggaccccagcccaacgccaaacgagcc

SEQ ID NO: 209753 - RNA, 82 nt, Homo sapiens
aacacagcaacagaccccgcagacccccaggaagccagagccacacacaccacaggccggagccaggagcaggggcgcggca

SEQ ID NO: 209754 - RNA, 35 nt, Homo sapiens
cccccagcggaaccaagcaagggggaacacaagga

SEQ ID NO: 209755 - RNA, 117 nt, Homo sapiens
acagaaaaagagagcaggaaggcacaaaggaggaggaggaggacgacgacgaggggaacgggcaggacccgaggcgccagcagcagcaagaccgggggaccaggcgaacgaggcagg

SEQ ID NO: 209756 - RNA, 70 nt, Homo sapiens
cggacggcgcgcagaaccagccagcaacagccaaaggccaaccgcaccagcaccccacgcagcaacagac

SEQ ID NO: 209757 - RNA, 80 nt, Homo sapiens
ggacgcagcaaaccaccagaagaggaccacccgcacccaggggacgcacggcccaaccccgagcaaggacgcccacccag

SEQ ID NO: 209758 - RNA, 77 nt, Homo sapiens
ggacccgcggccccaccggcagcggggcacacaagaggggacggaaagagagccgcagcgcagaacaagggaaaaaa

SEQ ID NO: 209759 - RNA, 74 nt, Homo sapiens
aaagagcaccagcaaggacggagggggagcgggccaggaaccccagaacaccagcagaaacaacggcagaaaga

SEQ ID NO: 209760 - RNA, 70 nt, Homo sapiens
aaggagacacgccaaccagcaaagcggcgaacacaacaaaacagcacaagccagaagaaagaggaaacga

SEQ ID NO: 209761 - RNA, 36 nt, Homo sapiens
gggggcaaacccgagagaacggaaccagaagaacaa

SEQ ID NO: 209762 - RNA, 64 nt, Homo sapiens
cgcgcaaagaaggaggaaacacggaacgacgacccacacggccagcgaaaccagggaccccgga

SEQ ID NO: 209763 - RNA, 71 nt, Homo sapiens
ggcgccccggcgcgaagaggcggaccggacggccgaggggagaagcagaccgcaccaggcgggaccccgaa

SEQ ID NO: 209764 - RNA, 61 nt, Homo sapiens
agccacaggacagggggagggcagagggaggggcgcaaaacgagaacaaagccaagcgggc

SEQ ID NO: 209765 - RNA, 60 nt, Homo sapiens
ggaaacagcgacagaagccagcacaccaccacaacaggaggagggagacaggggcaaaaa

SEQ ID NO: 209766 - RNA, 72 nt, Homo sapiens
cagcgcaggaggaagccaagcaccgcagcccagcccagcaggaaagagcacaacagcggccccacaagccag

SEQ ID NO: 209767 - RNA, 86 nt, Homo sapiens
ggaagacgccgcgccaccgagccggaccggagacggggccaacagggacccccggacagccaacaccaaagccgcgggcacagcgg

SEQ ID NO: 209768 - RNA, 74 nt, Homo sapiens
gagcagcggccggaaaagggcccacaccccgagagaaaacaacaacaacaggcaaaaccgacagagacgcagac

SEQ ID NO: 209769 - RNA, 66 nt, Homo sapiens
ggcagacaaaagggccaaagaagggagagagagcaaacagaacaaaaacaagaaaagcgacagagg

SEQ ID NO: 209770 - RNA, 68 nt, Homo sapiens
gccaccaccaggacacgcagggaggagcgggagcacccgagcggaagacccggacaaccggggagggg

SEQ ID NO: 209771 - RNA, 78 nt, Homo sapiens
cgacaccagggcaggagcagcgcacaggcgaaaagaagaaaaacgcgccagacaagaaagcaggacagaggaaagaaa

SEQ ID NO: 209772 - RNA, 77 nt, Homo sapiens
gaccaagggagccccaaacaagggggacggacagagagccgagagcgccggaggaccacacccggccacagccgcag

SEQ ID NO: 209773 - RNA, 66 nt, Homo sapiens
caccaaaaagcaaacggaccagaccgaccaccaaaacggaagccgcagaaggaccggccagaagca

SEQ ID NO: 209774 - RNA, 71 nt, Homo sapiens
ggaagaaaaggggcggaaggagaaaaggacagcccaaggcggaaaagcgaaggaagccacaagcacagccc

SEQ ID NO: 209775 - RNA, 76 nt, Homo sapiens
agaggccacaggacgaaacagcagacagaagagcagaccaccaagaaaccaccgcccagcagaaaaccgaccaaag

SEQ ID NO: 209776 - RNA, 44 nt, Homo sapiens
cagagaagcaaagaagcagggggaggcacccaaaacggccaaag

SEQ ID NO: 209777 - RNA, 84 nt, Homo sapiens
ggcgcgcgcccgagggcgcgccggcccggaccggcgggcacgccccacagccgccaagacaaggggcgcagagcggggggacag

SEQ ID NO: 209778 - RNA, 70 nt, Homo sapiens
aaccgaaagccagcagcggggcaaacccacgagcgaggaggaaagccagccacgggcggacaaggcgaag

SEQ ID NO: 209779 - RNA, 76 nt, Homo sapiens
cccaaaagagggacacaaacaacggcccacaggacacacagaaaggaggagcccaggaccaccgacagcaaggccc

SEQ ID NO: 209780 - RNA, 61 nt, Homo sapiens
aggaaagggaagaaggagaacaaaaggcccaggcagcgcagacgaaacagcgcgcagaagc

SEQ ID NO: 209781 - RNA, 59 nt, Homo sapiens
aaaacaagcgcccaaaacgcggcggaggaagaggaagaccagggccccgccccgaagcg

SEQ ID NO: 209782 - RNA, 77 nt, Homo sapiens
gcaaagcaccgacaacgaggacgccggacgagagaaggacagcgaagggagaaacgacaccaggacggacaaagccg

SEQ ID NO: 209783 - RNA, 76 nt, Homo sapiens
accaaacacacgggaccgaaacaggccggggcacagcacagcgccggcgcaagcacccgaaagagcgaaagcccag

SEQ ID NO: 209784 - RNA, 75 nt, Homo sapiens
cagccgcaagccaaccagccacagcccaccgaggcaccacaggagccgcaggccaggacgccacccgacaccaga

SEQ ID NO: 209785 - RNA, 74 nt, Homo sapiens
agggcgcagacaaggcaggaccgcgcacagaaagcccagacaacccagcgagaaaacccagaggaccccaccgc

SEQ ID NO: 209786 - RNA, 75 nt, Homo sapiens
gggacgcccgggagaggccgcggcggccaggccccagacacagacgagcaggggaaggcgaggacgggcagaagc

SEQ ID NO: 209787 - RNA, 79 nt, Homo sapiens
aaaaccggcaaagaccaaaccacaacagcgcgaacagaggcacccgaagccaaagggaaaagagggaccacaggcagga

SEQ ID NO: 209788 - RNA, 85 nt, Homo sapiens
cgaaggacacgaggaaggggaaggggcaaagcaggccagcaaccaggagggagacgagacaacaacagcagcaacgaacacagca

SEQ ID NO: 209789 - RNA, 71 nt, Homo sapiens
ggacacacgcgaccggcgaggcccaccaagccagcgaaagggaagcaaaggaagaggacccaaccgagcgc

SEQ ID NO: 209790 - RNA, 64 nt, Homo sapiens
acaggccacagacacaaggccagaccacaggagagcggacaaccgacccaacccgacacacgag

SEQ ID NO: 209791 - RNA, 84 nt, Homo sapiens
gagggacgcagagcggccgcgagagaacagcccaccaccacccgagcgcagcccagagaccccaacaccaagaagaacggagcc

SEQ ID NO: 209792 - RNA, 68 nt, Homo sapiens
gaagccgggcgccgcgcgccacgagcgcaaaagccaggaaccagaaacagccaaacaagaagaagaga

SEQ ID NO: 209793 - RNA, 78 nt, Homo sapiens
gcggggcggagcgaccccgcggggcgcggaaacggaacgccaagcgaagaagaacgaaacggaagcacaaagcagcgc

SEQ ID NO: 209794 - RNA, 75 nt, Homo sapiens
cccaagcaaagaccaaagccacagccaagagcccacggacaccacccaacggcccccgcgggcgcacacaggaag

SEQ ID NO: 209795 - RNA, 69 nt, Homo sapiens
agaaaaagaccccagggacagcacaaccgagaaagcagaaaggaagaacaccagaagcagccgaaacga

SEQ ID NO: 209796 - RNA, 82 nt, Homo sapiens
gcacagccggcgcggagcgccgcaggcggcggccgagggcgcgcggaccccccgcgagagccgcaaggaccagaaggaccca

SEQ ID NO: 209797 - RNA, 60 nt, Homo sapiens
gaagcacagcacggacggagaacacggaggccagaccaccacggaaacaaggacgggcgg

SEQ ID NO: 209798 - RNA, 78 nt, Homo sapiens
gaaacacagagaagacgagaacagagaaaggggcacaccacagaggggaagagagaagccagaggccgagcacggccg

SEQ ID NO: 209799 - RNA, 112 nt, Homo sapiens
agaacaggaagcaaacccaagcaaagaccagcgccggaacaccaccgccaggccaggaaggagaggcggccgccggcagcagggaccaggccccaacgccgccacgagcgaa

SEQ ID NO: 209800 - RNA, 122 nt, Homo sapiens
gacgagaagaggagagggagagggcccaggcggaagagcaagagaagaccccacagaaaccagagaagccagaagccacgcaccacaacagcagaacacccacgcccccaaaagacccaagc

SEQ ID NO: 209801 - RNA, 68 nt, Homo sapiens
ggagcgcggcccgaggcccgcccagagacccacaggaccgcgaacaaggaggccacaaaacacccgga

SEQ ID NO: 209802 - RNA, 70 nt, Homo sapiens
aaaccgaccccggaccagcaggacaggaccgcacaggcgcaggcgcaaggggccaggggaccaggcaccc

SEQ ID NO: 209803 - RNA, 56 nt, Homo sapiens
aggcccccgaaacgaagcccacagggcaccagagccagagaagcgagagaaaacgc

SEQ ID NO: 209804 - RNA, 85 nt, Homo sapiens
cgggggcagcgcgagaggcggggacccgccgaacggcagccccaagaacggaaagaacaaaaccagccaagcagaggagaaaaag

SEQ ID NO: 209805 - RNA, 76 nt, Homo sapiens
ggccaaacccgggccccacagcaaccccacaacgaagagccaggggaggcggcaagcaccccccgagacagcccac

SEQ ID NO: 209806 - RNA, 42 nt, Homo sapiens
gggaacagagcagaacgacaaagagaaaaccggaagagaaag

SEQ ID NO: 209807 - RNA, 64 nt, Homo sapiens
accaacggccgacccgcaagagaagggcccaaaggaccaagaaacagcagaaagcccccaacca

SEQ ID NO: 209808 - RNA, 100 nt, Homo sapiens
acaaagagcgaaaaagccaaaagaggaaacgagccgccaaacagccaaacaaccaaggaaaagaagaaaaggaagcacagccaacaaaaacgagaaagca

SEQ ID NO: 209809 - RNA, 75 nt, Homo sapiens
agaagaacggccgcccagggcagggaagccaccggaaagcaccccccagacgcggcgcaagcacagcagcaccca

SEQ ID NO: 209810 - RNA, 80 nt, Homo sapiens
ggaaggccgaagaggacggagcgcgcggggccggaggcgggcgaggaagcggggacgacgagcccacggcacaacggacc

SEQ ID NO: 209811 - RNA, 70 nt, Homo sapiens
aaaagcgaaaagaaacagaggaccagacagcaggaaaagacaagaaaaggcgccaacaacccccagagcc

SEQ ID NO: 209812 - RNA, 76 nt, Homo sapiens
gcgcaggacgggcacagcagagaccaaaggcagggcaaggaaacggccacaaggggaaacccgcccagggcgggag

SEQ ID NO: 209813 - RNA, 31 nt, Homo sapiens
gaggccgcccccgcaaggcgggcgcggacgg

SEQ ID NO: 209814 - RNA, 77 nt, Homo sapiens
ggcagaacaaagcaaaagaacgagacgacgccaagaaacccgggccgggagagcagaaacaccagaggccgcagcaa

SEQ ID NO: 209815 - RNA, 73 nt, Homo sapiens
gcagagcggcgagggggcgcggcccggcccggcagagacagaccgcgcaggcgcggcaagaggaagaccaccc

SEQ ID NO: 209816 - RNA, 75 nt, Homo sapiens
gagccccagagagacaagccccaaggagcccggccccacaccggcacacagcgacgcccagagagaccagcccca

SEQ ID NO: 209817 - RNA, 84 nt, Homo sapiens
ccaggagaaagcccaaagcagccagggagacccaaaccgaaggcagcacggcacacgccaaggacggcccgccgggaggccccc

SEQ ID NO: 209818 - RNA, 83 nt, Homo sapiens
aacccagaccaagggcacaaggaggccaccagcccccgggccaagagcagcacggagacagagccacacaccggggcgagcca

SEQ ID NO: 209819 - RNA, 76 nt, Homo sapiens
ccagcagcccacgcgcagcgcccgcacaccggcagcaaaagagccaacaacacgccacggcgaggccacacgccca

SEQ ID NO: 209820 - RNA, 74 nt, Homo sapiens
ccccaccccgaaacgccccgaaaagacgggcaacagcccaggaccacaagccagaaaacacgcggaaagaaaga

SEQ ID NO: 209821 - RNA, 38 nt, Homo sapiens
ccggcacgaaaaacccgcagagcccgcgcccaggcgga

SEQ ID NO: 209822 - RNA, 81 nt, Homo sapiens
gaagacgcgcgggcgcgcacgcgagaacaagaacgacaagcacacaccaccgcagggacaaacagcaggggccaagaaaga

SEQ ID NO: 209823 - RNA, 80 nt, Homo sapiens
agggcgaagaaaacaccaggacgaggagccagcagaagaccacggcaaaagcagaagggaaggcaaagggacagccccga

SEQ ID NO: 209824 - RNA, 78 nt, Homo sapiens
gaacccgccaggcgcacaagccagccccggagcaaagagaagacaccggaagaagagacagcagcccccagggaccca

SEQ ID NO: 209825 - RNA, 68 nt, Homo sapiens
aagagcggaaaacaaggggcaagaacaccagggaaagggcaaagccaccagcaggccaggagagcccg

SEQ ID NO: 209826 - RNA, 82 nt, Homo sapiens
gggagaccaccggagagcccagaagaagcaacaggagggaaaccacagaccagaaaggcggaggcgaccaaagacccgcccc

SEQ ID NO: 209827 - RNA, 73 nt, Homo sapiens
agaaaggaacgggccccggcgcggcccagggaaagggcaagcacaggacagcgggcgggagaagaccggagac

SEQ ID NO: 209828 - RNA, 78 nt, Homo sapiens
cccagccaggaccccagaacacagggacaggacaagggaggacagagcccaggaccaagagcacaacaacacggacca

SEQ ID NO: 209829 - RNA, 75 nt, Homo sapiens
ggcaagccaaagcagggggagcagaacaggacaggagagacaacggaggcaagaaagacggagaagcgagaagag

SEQ ID NO: 209830 - RNA, 77 nt, Homo sapiens
gaggcaccacagggaaacaaggaaaaccgccgccggggccagcaagaacaaaaagcaccaacagacccacccaaaaa

SEQ ID NO: 209831 - RNA, 81 nt, Homo sapiens
gaacaaaccgaagaacagcgggaaagaaggcaaaacacggggggagacgaaccggcaaggaacagacgaagagcagagcca

SEQ ID NO: 209832 - RNA, 58 nt, Homo sapiens
gacaagccgcgcggggacccgacgcccgcacgggaaagggagcagcaccggccacacc

SEQ ID NO: 209833 - RNA, 126 nt, Homo sapiens
ggcgggcaccagcccccccacaccgaccaacgggaacccccaaagaaggaggagacgagcaaccaaaagaaacccccaaaaccggaagaaagagaaggaacagaggacacgcacaccacagacccc

SEQ ID NO: 209834 - RNA, 32 nt, Homo sapiens
accggcaccaccaaagcagcacaggaaagaac

SEQ ID NO: 209835 - RNA, 76 nt, Homo sapiens
gggagacagcggcgcaaagaagggacgcaaggaggaacaacgggaccggcaggcccaaagggaccgccagcgacag

SEQ ID NO: 209836 - RNA, 76 nt, Homo sapiens
agcaggagggcgagaagcgccgcgggacggccgagccccgcaaaaacggacacccgaggccaaggcagagagcgag

SEQ ID NO: 209837 - RNA, 72 nt, Homo sapiens
cccccccgcagaggaaacaccaggcgcggcggcccagccccgacacagggggccccaggacccggacagacc

SEQ ID NO: 209838 - RNA, 72 nt, Homo sapiens
cgccagagccaaggccagggggcaaggcggacccacaggaccgcgaacaaggaggccacaaaacacccggac

SEQ ID NO: 209839 - RNA, 63 nt, Homo sapiens
cggacccagggggcagacccagacaggccgacagaagacggcacgaagaggagcgcaggagca

SEQ ID NO: 209840 - RNA, 71 nt, Homo sapiens
cgacgaccgaagcggcggaacagcaacacacacccgggggaaccaacacagcccaggcgggaagaaacaca

SEQ ID NO: 209841 - RNA, 88 nt, Homo sapiens
ccgaggagagcggaggagggggaaagccaggccagaagaaggaaggccggggaggggacaggaaagacacaccaccccaccgaacaag

SEQ ID NO: 209842 - RNA, 77 nt, Homo sapiens
cgaaggacgcaggcaagaagaacagacccaggccagagggaaaagcaagagcccaaacgcagaagaaagacagcaac

SEQ ID NO: 209843 - RNA, 79 nt, Homo sapiens
cccgcccccagaaaccagacaccagaccagagcacgggcagcagcgccaagacaaggcagcgggccaagcaccaggagc

SEQ ID NO: 209844 - RNA, 85 nt, Homo sapiens
ccgaggggagcgcggggcccggcagaaagggacgcggcgcacggcgcggaggggccgagggcaggggggccgccacggcggccaa

SEQ ID NO: 209845 - RNA, 64 nt, Homo sapiens
gcaccaggcagggacagcagcaacagaggcgaagcacgccaggaaagagagaagaaaaccgaac

SEQ ID NO: 209846 - RNA, 63 nt, Homo sapiens
acagcccgggacaccaagaaagaacacaaccgagcacaaaaaaggcacccggagaacagacag

SEQ ID NO: 209847 - RNA, 61 nt, Homo sapiens
gaaccgaaccgaggcaaaagaaagacggccggggcaaccggcgacgggaaggggcagagca

SEQ ID NO: 209848 - RNA, 83 nt, Homo sapiens
cggagcaggagcccggccaggcgcggggaaagggggagaggcaccagcaacagaccaaccgcagcaagcacagagacaggaag

SEQ ID NO: 209849 - RNA, 87 nt, Homo sapiens
aagagacgaccgcaacacgggaggacggggaaaaagcggccaaagaaggaagcgcgcaccgggcaagaaacacggcagggcagagag

SEQ ID NO: 209850 - RNA, 77 nt, Homo sapiens
cggccagcgggcccacagcccaggagacgaagaggagcagaaccagaagggacacacaggacggcaggaaggccagc

SEQ ID NO: 209851 - RNA, 37 nt, Homo sapiens
gaaaacaaggaaacaaagacggagccgccgcccccag

SEQ ID NO: 209852 - RNA, 63 nt, Homo sapiens
caacaaggccagcaccacggcgggagcaccaacaaccgagagcgaggccccaccacggggcga

SEQ ID NO: 209853 - RNA, 76 nt, Homo sapiens
gaaagacgcgcccgaccgagcaagccggccgggaagcaggaagaggcgagaaggagcacgccaagccaagaagacc

SEQ ID NO: 209854 - RNA, 76 nt, Homo sapiens
gagggacccggacaaccagaggcagccagcagggggagggagggccaccacgggccggacgaggacaaaggaacag

SEQ ID NO: 209855 - RNA, 80 nt, Homo sapiens
gcgcacagagcaaaagaacgcgcgaggaggcaggagaagaaagccggaaacacgccgcaccagggaggagagaaacgaca

SEQ ID NO: 209856 - RNA, 74 nt, Homo sapiens
gacaccgccccgagacgagcacccggaggagaagaggcgcggaacaagcgggagagcaaggaaagcgaagagag

SEQ ID NO: 209857 - RNA, 74 nt, Homo sapiens
ccagacgcccacaggacaaaacaacgccagaaagaaagccaccagagagggcagccggggagaagaaacgaaga

SEQ ID NO: 209858 - RNA, 80 nt, Homo sapiens
gcaacggaagaacccagagacgccacggcaaaagcagaccggaaaacccaccggcaagaccacacccgaggggagcccag

SEQ ID NO: 209859 - RNA, 40 nt, Homo sapiens
ccaccggggagcgaacacaggccaccgacagaccccagcc

SEQ ID NO: 209860 - RNA, 75 nt, Homo sapiens
gcaccacgggccagcggccaagcagcaccagggaccaccacacgaaaccaaggaaaaaccgggaacagcagaggc

SEQ ID NO: 209861 - RNA, 78 nt, Homo sapiens
gaaggcagggacagaaacaagagcggcacgggaacagcggcgagaccagaccaggacaaagggacagacggccagccg

SEQ ID NO: 209862 - RNA, 79 nt, Homo sapiens
gaaacgagcacaggaccacaaacagcaacacagaacgcaagaaggccggacccaagccagaagcccgcaaagcccccag

SEQ ID NO: 209863 - RNA, 96 nt, Homo sapiens
cggaggaacagccacagaccccacgcgggggccacgcacaaaggcagaagcccccggggagagacagacagagggacacagagaggaagaaaggag

SEQ ID NO: 209864 - RNA, 69 nt, Homo sapiens
cccccaccacagacgggaaacacacgcccaccagcagagaacaaaagggccaagaaaaacagccagcag

SEQ ID NO: 209865 - RNA, 55 nt, Homo sapiens
ggcaccgaggaagcaaaaagcagcggccagccgacagggagcggcgagcgggcac

SEQ ID NO: 209866 - RNA, 83 nt, Homo sapiens
cacggaggaaaacaagcggaacgccgccacggaaggggcccccggggaggccgacccaccaggccccgagagcagggaccggg

SEQ ID NO: 209867 - RNA, 70 nt, Homo sapiens
gaaaaccagaagcacaaggacagagcacccaccacaggagaagacccaaccccacaagaggaagaaacgg

SEQ ID NO: 209868 - RNA, 82 nt, Homo sapiens
ggagccagccgcgcagccaccaccgccaccagccaccaaggcaagaagaacacccgcggacacggcacgggaccccaaccag

SEQ ID NO: 209869 - RNA, 54 nt, Homo sapiens
ccggcaccaccaaagcaaagagcaagcacaggagaagcagggggcgacagcaca

SEQ ID NO: 209870 - RNA, 102 nt, Homo sapiens
cccagcccgaggaaccgggagggagccgacggaaaccaaggccaaccagggagacaggcggacaacgcaggcccgggagaaccaggaaacggccagaagaac

SEQ ID NO: 209871 - RNA, 82 nt, Homo sapiens
ggccgcgcggggcagcggcggcggcggcgcggggaccgagaggaccaacgggaaaaagaagcaacacagcaaaccaggaggg

SEQ ID NO: 209872 - RNA, 83 nt, Homo sapiens
gggaacccccacgggacagaccgaccaagagaagcagcagggcagagacagccgccgccggagacgaagagaaccgcagggag

SEQ ID NO: 209873 - RNA, 78 nt, Homo sapiens
cgaagggaaagcgaacaaggcagccaaaagacaacaggagagcacaaagcagaagaaacaaaacaacaaacaagaagg

SEQ ID NO: 209874 - RNA, 81 nt, Homo sapiens
agggaaggcaccagaaggggaacaagcaccagggccaaagacccccaggggaagaggcaggccccgaggagccgggagcgc

SEQ ID NO: 209875 - RNA, 79 nt, Homo sapiens
gcacccagccgcagcgccagcagcggacaggcacagacaaccagagaccacagaggaaacaggaaaccggaaagagcgg

SEQ ID NO: 209876 - RNA, 96 nt, Homo sapiens
acacccaccgagagagaggacacgaaacagagaggggaaggagcccagcgacggaaagggagcagcaccggccacacccacagcacgaccggaacc

SEQ ID NO: 209877 - RNA, 81 nt, Homo sapiens
cagcgcggcgcggccgagagccgcggcccggcggaaaggacagcagcagacaacagggagaccccacgggacaccagccca

SEQ ID NO: 209878 - RNA, 74 nt, Homo sapiens
ccaccgcccacgggaaaagaaacacagggacccgccaggggaagacaagccagggcagccaagaagagggaaag

SEQ ID NO: 209879 - RNA, 86 nt, Homo sapiens
cgaacccgagagcgggagcgggcgggccaggaggaaccacgaaagacggagagagaaaacagagaagaagcagaggggccaacaga

SEQ ID NO: 209880 - RNA, 66 nt, Homo sapiens
cagagacgcgaaggagaggcccagaaccgcacgagaagagaagcccagagcaaaacaccccaaacc

SEQ ID NO: 209881 - RNA, 84 nt, Homo sapiens
aaaaagaggcgaaaggaagcaagcagcagaagagccaaggaaaaacagcaagaacccaaaagggaccccccgccgcccgcgccc

SEQ ID NO: 209882 - RNA, 60 nt, Homo sapiens
cggggccgggacgcagcccggcggcagcaggcaacacaagaaaagcaccagaaagggggc

SEQ ID NO: 209883 - RNA, 82 nt, Homo sapiens
cagagcaaggaggccccagcggaccgaacaggagaccaggcccaggaaggaacgaggaagggccagaacggagacggggcgc

SEQ ID NO: 209884 - RNA, 82 nt, Homo sapiens
acgagagaggcaccgggacggaccgagaccggaccgagagcggaccgagagcgcgaaacgcacgagaagagcgagcaaccac

SEQ ID NO: 209885 - RNA, 67 nt, Homo sapiens
ggggacccaaaaagggcagaaaggaaacaaaaagccaacggaaaaagaaacggcagagcacaggacc

SEQ ID NO: 209886 - RNA, 71 nt, Homo sapiens
gcgacgccccagcccgcccaaagaaagaaggagcagaaccacaaagaagcgccaaccagccgcaaggagga

SEQ ID NO: 209887 - RNA, 120 nt, Homo sapiens
gaagacggcgggccagccgggaggggagagccccgcaccccccccagaaacaggaggcacgaagacagacaaagagaaaagcaccaaggaaagggagaagagcaagcgaggacgccaaag

SEQ ID NO: 209888 - RNA, 50 nt, Homo sapiens
cagcaccaagcgcagagcagcaacccggaaacggaaaagacaaacacaaa

SEQ ID NO: 209889 - RNA, 73 nt, Homo sapiens
gcgcagaccggggagggaaagaaaaagaacggcacaagcccggcggcggcccccagacagccggaaggaggca

SEQ ID NO: 209890 - RNA, 80 nt, Homo sapiens
aacacccgccaaagcagagaaaaggggaagagaccgaaaccaagggggaaaggcacgagggcaacccgcccaagccccca

SEQ ID NO: 209891 - RNA, 75 nt, Homo sapiens
ccaggcgccagacagcgaagcacaccagaagagagaaaaccaggggacggaaaaggcgcacacgacccggagaac

SEQ ID NO: 209892 - RNA, 72 nt, Homo sapiens
gcgccaccggcggagcgagcgggaaacggccgcggggggagaaaaggccaagggcaggagacacgagacgca

SEQ ID NO: 209893 - RNA, 73 nt, Homo sapiens
gggccgagaccccacaacgggagggccgcgccgaaaggggagccagccgcaggggccgagaacaaacaccaac

SEQ ID NO: 209894 - RNA, 77 nt, Homo sapiens
cggggaccagcagcgcgccgccgcccaggaacaagacaccaagggaaggaaacacaaaccagcacgaagaaaagccg

SEQ ID NO: 209895 - RNA, 61 nt, Homo sapiens
acacacaacccgacccgacgagcgcaaagccacaagccaggcgaacccccccaaaaaaaac

SEQ ID NO: 209896 - RNA, 71 nt, Homo sapiens
cagaccaaccacaaacagcgccaggcgaaccaccagagcaaggcacgcggcagaacgccaaaaggaagccc

SEQ ID NO: 209897 - RNA, 69 nt, Homo sapiens
cagccgaagaaccccccacaacaccaagagcaggcaggaaggagggaggccgcacagaggcagggacag

SEQ ID NO: 209898 - RNA, 77 nt, Homo sapiens
cagaccgcagacaggaacacgcgccaggccccacggccggcaacagcgaacacagcgagaaacaccaggacaagagg

SEQ ID NO: 209899 - RNA, 94 nt, Homo sapiens
cagaccacccgcgaacggggaaggccagcaaacgaggggggaggagacagaagagcgggacacagacacaagaggggcagaagagaaagccgaa

SEQ ID NO: 209900 - RNA, 76 nt, Homo sapiens
aacagacagccacgcagacggaaacaaggcaacagaaagagcaacagcagggcaacaggaggccaaaggaagacca

SEQ ID NO: 209901 - RNA, 56 nt, Homo sapiens
gcccgaaccgagagagacacgcgcgagaggaccagcccaggagaggaaccgagaac

SEQ ID NO: 209902 - RNA, 81 nt, Homo sapiens
gaacgccacgcagcgccggaaacgccacggagaagaaaggggaccggggacacacccacgaacacaaagggcccggacgga

SEQ ID NO: 209903 - RNA, 69 nt, Homo sapiens
ggcaccaaaaagaaccgcagacagaccccgcacgagagcggagagccaccaagcaaacccccacaaaaa

SEQ ID NO: 209904 - RNA, 75 nt, Homo sapiens
gggcagaagagaagcaggaaggaggcagaggcacaccgaaagaagggaccagcgcaaacggagaacagagcgaca

SEQ ID NO: 209905 - RNA, 56 nt, Homo sapiens
cccggggcaaggacaacaggccgagagggcaacagcaccgacccggaagcgagaca

SEQ ID NO: 209906 - RNA, 63 nt, Homo sapiens
cgggacccccggagcccccagacccaagaagacagcgaaccaggccggggcagaacaaagccg

SEQ ID NO: 209907 - RNA, 83 nt, Homo sapiens
cgggagcgaagagggaaccagcgcgcggcagccgcgacggacacccagagcaacaaaccccaaagaacaaagacaagcaccag

SEQ ID NO: 209908 - RNA, 70 nt, Homo sapiens
cccgggagaggggaaacggagccaaaccaagccgggagggcccaacgcgcaggccacgggccggcgggga

SEQ ID NO: 209909 - RNA, 53 nt, Homo sapiens
aggcaaagaaaaagacaaaaggaagagaagacaagagggacacaaggacaaca

SEQ ID NO: 209910 - RNA, 76 nt, Homo sapiens
gggcagaacgcgacgggcgcggcagggagacagacccagcacggaccccccccccagccgggcgaggccccgaaac

SEQ ID NO: 209911 - RNA, 78 nt, Homo sapiens
gcaccgggcgggccccggacccggagacaccccgcagcacagccgcgaccaagacacgggaagacagaagaggacccg

SEQ ID NO: 209912 - RNA, 41 nt, Homo sapiens
acggcccggagcccggcgggcaggacagggaccaccccgcc

SEQ ID NO: 209913 - RNA, 68 nt, Homo sapiens
accacggccagaaagaccccaaaagggcaaaaggcacaaaaaacaagcaaaacccggcccaaagacac

SEQ ID NO: 209914 - RNA, 39 nt, Homo sapiens
ggaagaagcgagagccaacggccggagcgggacggaagg

SEQ ID NO: 209915 - RNA, 87 nt, Homo sapiens
cccggagagccggaagaggaggaagaagcagaagccgaaaccgccaaagccagacaagaaaccacagagccgagaacagaaagggag

SEQ ID NO: 209916 - RNA, 74 nt, Homo sapiens
cagcgaagcgcacggaaggaagcagggccgagaaagagcacagggacgcaccgcggaacacaggccacaagccg

SEQ ID NO: 209917 - RNA, 75 nt, Homo sapiens
ggaacaaaggaaaacacagaaggcaagcagggccaagggccgacgccaccgccgagcccagaccggaacagacgg

SEQ ID NO: 209918 - RNA, 66 nt, Homo sapiens
agcaacaacagacacggcgacaaaccggcgaccacacacggggacgacggggaagccggacagcaa

SEQ ID NO: 209919 - RNA, 59 nt, Homo sapiens
gagaggccgaaaaggacaggacagaagcaaaggcagaccagggccagagcaccagacca

SEQ ID NO: 209920 - RNA, 73 nt, Homo sapiens
aacgaacaggcaaagcccaaaaggcaaggcacaaggaaaacagaaaggggccaaccacagggagagaacaaac

SEQ ID NO: 209921 - RNA, 82 nt, Homo sapiens
cacacgaggccacagcaccgggagacccagagacagaacggaccggggccgcggaaccaacggagaagcgccgcacccaggc

SEQ ID NO: 209922 - RNA, 79 nt, Homo sapiens
cgggagcgcgcccgccgagcgcaacagcggcgggcggggcaccccaggaccgcaggacaacggccacacagccagggga

SEQ ID NO: 209923 - RNA, 52 nt, Homo sapiens
gccggaagggcgcccgcagccccccacggaaaggcccgagccaaaagaccca

SEQ ID NO: 209924 - RNA, 77 nt, Homo sapiens
gcggacggggaccacacagccagaacagggacgccagccgcagaggaagacccgggaccgcacacggccggaccagg

SEQ ID NO: 209925 - RNA, 83 nt, Homo sapiens
aacagcagacggaggccgggagcaggcaaagggccacagcacggaagaagaccgcgaagggccgcacggcgcagaagggcccc

SEQ ID NO: 209926 - RNA, 82 nt, Homo sapiens
ccaccgcaagagccgcagcagcgccccgcaggcgagcacacagagaggggaagggcagcagcagcagagaaccaaacccaaa

SEQ ID NO: 209927 - RNA, 85 nt, Homo sapiens
acacgggaggggaggacccgggacaccgcacagccgggaaaggagcagggacggggggaaaagcgcacccgggcccgggcgagaa

SEQ ID NO: 209928 - RNA, 82 nt, Homo sapiens
ccggaccgcccaaacgcgaccaacacaaccagcaggaggaccagagacaggagcgcgacagacaaaggagaaaaaagcacaa

SEQ ID NO: 209929 - RNA, 78 nt, Homo sapiens
cggcgcacccgccccgcgccgcagcaacacaagcgagggagaagccaagagcacagacccaaggagaaggaacgaaac

SEQ ID NO: 209930 - RNA, 56 nt, Homo sapiens
cagaggagaagcggcagcccgaagaaaagcgacccaagcaggcaccaagcagccac

SEQ ID NO: 209931 - RNA, 71 nt, Homo sapiens
cgggggcaagccaaaccaaggggaagcaagcaggaccaccgacagaccaagcaacgcgcagaacgcggacc

SEQ ID NO: 209932 - RNA, 35 nt, Homo sapiens
gaacagcggcagcccagggaacacaacaacaagaa

SEQ ID NO: 209933 - RNA, 76 nt, Homo sapiens
ggcaggcaaaggcggaaaaaggcaccagacacagacgcggccaaccacccaaagaggagcaaccaaggggaaagcc

SEQ ID NO: 209934 - RNA, 75 nt, Homo sapiens
gggacggagggaaagaggagccccccaaaagggagcacagaggaaccagagaaggagaaacagcagggccaaagg

SEQ ID NO: 209935 - RNA, 77 nt, Homo sapiens
gcagccagggcgaacccccgcagcaacagagcagccccagacaaggaccaaagggcaaaagagaaacaagcagaaaa

SEQ ID NO: 209936 - RNA, 87 nt, Homo sapiens
ccaggaacagggcaaaggagagcacaaccacgcagggaagcccaggggcagaaacccaaggaccgcaagccaacgccgcgcagacac

SEQ ID NO: 209937 - RNA, 80 nt, Homo sapiens
cgcagacccccaggaagccagagccacacacaccacaggccgacccgaaagccgagccagaagagaagaaaacgagcacg

SEQ ID NO: 209938 - RNA, 87 nt, Homo sapiens
gggccggagcagccgcgggcgcccgaggggccgagcgaggagaaggaagcgccggccaaacgagcacagcaaacgcgaaagagcgga

SEQ ID NO: 209939 - RNA, 86 nt, Homo sapiens
agcggagagccaccccccaaagcaggacaacggacggccggcagggggagagcgccaccccaggagcagcaccagggacccccgaa

SEQ ID NO: 209940 - RNA, 85 nt, Homo sapiens
ggggagccccggcagcaggagcgcgcagagaccaggcgagcccagggaaagacaaacgaagaagagcaaagaacaagccaaaccc

SEQ ID NO: 209941 - RNA, 77 nt, Homo sapiens
gagggccccccgagccaacggcaagaacaagccaagacccagagaccagagcagagcacccaaaggacagccaaaac

SEQ ID NO: 209942 - RNA, 73 nt, Homo sapiens
ccccagagagcggaacacagaggggagcgaaaacaaggcacaaggccgacccagagaaacccacccccagacc

SEQ ID NO: 209943 - RNA, 77 nt, Homo sapiens
gggaacagacacccacccgacggggccggcccgccgcccagacaggaaacggagagagaaaaggagaaggagggaga

SEQ ID NO: 209944 - RNA, 63 nt, Homo sapiens
acagcaggaaagaagggggaacaacgaggaaagccggaaccacgcaaacgcagcggccgaaac

SEQ ID NO: 209945 - RNA, 78 nt, Homo sapiens
gcaaacagcacggcagcaagaagaagaccacagcgcaaaccgagcgccagcaggaccgaccgagcggggagcaggaca

SEQ ID NO: 209946 - RNA, 76 nt, Homo sapiens
gaggccggcggacaggccgcacaaaaaggcccccggaagcggccgacaaaccccccagggaccagccgccccaccc

SEQ ID NO: 209947 - RNA, 75 nt, Homo sapiens
agagggagagcagggggagaaagggaagcccgcaggaccgccgccgagacacaggcggggccggaaccggcgaag

SEQ ID NO: 209948 - RNA, 59 nt, Homo sapiens
cagacaaaaggacgaaacccacggcgacagggcacccacagaaggagaacaagcagagc

SEQ ID NO: 209949 - RNA, 78 nt, Homo sapiens
cgggagcccgggagggcggccgcagagggcgcgccgggcaccaaagcgaaccagacaggggaacggaaaggaggcaaa

SEQ ID NO: 209950 - RNA, 76 nt, Homo sapiens
cacgccagaaccgcaaagaagaacaccaagaaccaggcgccaaacgagggaccacggcggggcagaggaacacaag

SEQ ID NO: 209951 - RNA, 79 nt, Homo sapiens
accccacccccacccgagcagccagagcggaccggggcagaccaaacggcaaggaagagagggccgacgagaggaggag

SEQ ID NO: 209952 - RNA, 86 nt, Homo sapiens
ccgaccacaagacaaccaccgggcgccggccagcagggacgcacaccgagacgaacacagaacagcacgaccagaggggaagccaa

SEQ ID NO: 209953 - RNA, 44 nt, Homo sapiens
agccaccaggagcccgagagagaagggggccgcaaggccaggcg

SEQ ID NO: 209954 - RNA, 76 nt, Homo sapiens
caggacaggaacgggacaggaagagaggccccccaaagcaccgcgcagggaccccaaaaggaacgagcaccgagga

SEQ ID NO: 209955 - RNA, 86 nt, Homo sapiens
aagagaacggcgggccagagcggggcgaccaggaaaggaccagaggagcgagagcagcaagaaccacacccagcagcaagcagcgg

SEQ ID NO: 209956 - RNA, 76 nt, Homo sapiens
gccaccagccaaggcgacgcaacacacgagacagacaccccaaacaaagcaggcccagcggggcgagggagaacag

SEQ ID NO: 209957 - RNA, 68 nt, Homo sapiens
agacaggaggcagagccaaacacccagcgagaaaggaccaacaaagaaagcgaagaaacagcagcagc

SEQ ID NO: 209958 - RNA, 49 nt, Homo sapiens
gaggggccccccggcagagcgagccagaagcgaaacagaggaccgcggg

SEQ ID NO: 209959 - RNA, 91 nt, Homo sapiens
gccgaggggcccgcagagcgcgccccggggaaggagccccacagccccagaggacaagccgaggcgggagccgggcaggaggaaggagccc

SEQ ID NO: 209960 - RNA, 74 nt, Homo sapiens
cgaagaggaacgcccgggaaacaaacacgaggcacaaggaagccacgaggagcaggagaaccagcgcgcgacgc

SEQ ID NO: 209961 - RNA, 73 nt, Homo sapiens
acacccaacacaccagccagcccgaccaggccaggaaaaaaaggcacagaacaaggcaccccagagaccaaag

SEQ ID NO: 209962 - RNA, 81 nt, Homo sapiens
gcagcgccgcgcgacgcccccgaggaccggccgaacggcgcaggggccgcgcggcaaggagagagacacaccgacacacga

SEQ ID NO: 209963 - RNA, 76 nt, Homo sapiens
gcccagcagaagaagagaggagggagaacacagaaaccggccccaggcccgggaggagcggggacacgaggacccc

SEQ ID NO: 209964 - RNA, 62 nt, Homo sapiens
caagagggcaacgccagaacaaggcaaggagacaggaggaaaggagagaggagacaaacgaa

SEQ ID NO: 209965 - RNA, 71 nt, Homo sapiens
cgccaaagagagaaaacacaagcaggcagagcaaggaaacggaggaggacaaacggccaagcgacagagaa

SEQ ID NO: 209966 - RNA, 56 nt, Homo sapiens
gggcagcgacccgcagccacgacccgccccgggggccgccccacgacggcaggcgc

SEQ ID NO: 209967 - RNA, 84 nt, Homo sapiens
ccgcacggccgaaccccaacaaggacgaacagcggggacgccccagcagaccgcccaggagaggaaagcaggaggaaagaccac

SEQ ID NO: 209968 - RNA, 81 nt, Homo sapiens
ggacccgccaggaaagccagggagcccacaggaccacccccaccaggacagaggccccaaccaccacaaccgcggcgccgg

SEQ ID NO: 209969 - RNA, 49 nt, Homo sapiens
gggcccggagcaggcaaggcaaagaagaggaagcagcaggagcaaaaga

SEQ ID NO: 209970 - RNA, 80 nt, Homo sapiens
cgacgacaccagaggacgagggcgacagcagcggccagggcggcgggagggcgggaagcgaaggaggacccaaagcaaac

SEQ ID NO: 209971 - RNA, 55 nt, Homo sapiens
gccagacacccgcaaaagagagacgcagaagcaccgaggagcaacacccccaggg

SEQ ID NO: 209972 - RNA, 69 nt, Homo sapiens
cagacagccaacagaccacaggcaaagcagcacagcagacaagacgggagagaaccgcgacagacacca

SEQ ID NO: 209973 - RNA, 53 nt, Homo sapiens
gggcgaaacaacaagagccaaaccagagcaacagacaggcgacagaggaaaga

SEQ ID NO: 209974 - RNA, 40 nt, Homo sapiens
agcaagaggcaggccaaagagaggaggaaggggagaagaa

SEQ ID NO: 209975 - RNA, 76 nt, Homo sapiens
ccaaggagaggaacagcaaagacaggagcgcgaaaggggaacccacagggggcagcgggaccagggggcgaagcag

SEQ ID NO: 209976 - RNA, 93 nt, Homo sapiens
acgacgccaccgcccgccacgcacgccagaaccgaggagagaaggcagccaggaaacaggcaccagcagaccacacaagaaaagcgaaccaca

SEQ ID NO: 209977 - RNA, 74 nt, Homo sapiens
agaaaaggacaaggaaccaaagaaagaaacacagggcagcaacaacaacagcggccaaagccacaaccagagcg

SEQ ID NO: 209978 - RNA, 69 nt, Homo sapiens
agaaccgaccagaacgcagcaacaaagggcgaaagaaaagcgaccgcaagggacagcaagagaaaccca

SEQ ID NO: 209979 - RNA, 78 nt, Homo sapiens
ccagagacaaggccccgagggaggagcccgaaggcgcacgagacccccgccccaacaagaggccaacggccaagaccg

SEQ ID NO: 209980 - RNA, 73 nt, Homo sapiens
agaaaagaagagagagagaagcaacggaccccaagcagagaacaagacaaaggcagaagcagggaaggcccac

SEQ ID NO: 209981 - RNA, 65 nt, Homo sapiens
aaaacccccggcggagggagggaaaaccacacaaggcgcagcaggggacaaagacacagcaccag

SEQ ID NO: 209982 - RNA, 58 nt, Homo sapiens
gggccagagcccaaaggcccagaccaacgggggaccccacaagacccaagccaggggg

SEQ ID NO: 209983 - RNA, 76 nt, Homo sapiens
agaccccaccgccggcgcgggaaacgggcgaagcgacgagccgcgaggagggacgaggaggggagccacgcccaag

SEQ ID NO: 209984 - RNA, 62 nt, Homo sapiens
aacacgacgccacgacaagcgacaacaggcacaaagagagaaggaacacccacagggcagac

SEQ ID NO: 209985 - RNA, 54 nt, Homo sapiens
ggcccaacaggagcacaagagaccacagacacaacggagccccggcccaggcgg

SEQ ID NO: 209986 - RNA, 75 nt, Homo sapiens
cgccacgaccgggagaccacggcccgccacgggccccgcagccgcgcccgagcgcccgagcagggacagcgacca

SEQ ID NO: 209987 - RNA, 72 nt, Homo sapiens
gcggggcggggcggcggagcgagcaggggaaaaagaaaagggcgaagacccgaagcagcgcaggaacagaag

SEQ ID NO: 209988 - RNA, 75 nt, Homo sapiens
caagacaagcagcggacggccaggagaacaaggcacacagagacagacaaagcagccaagccaggggaccagaac

SEQ ID NO: 209989 - RNA, 76 nt, Homo sapiens
cgccaccggagcgcgcgcggccagcgccaggggcagacagcccagagcaagcacacggaggcccgggagccagacc

SEQ ID NO: 209990 - RNA, 69 nt, Homo sapiens
cgccggccacggagagaagcagaggccggaagagcgggagcgggagccaggcagaaggccaaccaaccc

SEQ ID NO: 209991 - RNA, 77 nt, Homo sapiens
ccaccgcgggacacgacgaacccagcaagcgagcgaggagcccggggccacgcccccgggcgggggcacaacgggcc

SEQ ID NO: 209992 - RNA, 81 nt, Homo sapiens
aagccgagagaggaaacacagcagaaacaaagaagcagcgcgaaaggggagaaggcggagcggggcgggggaaagaccgag

SEQ ID NO: 209993 - RNA, 69 nt, Homo sapiens
gcaagaggggagaccaaagagagcaacagaccccccaccacgcggcgcgcggaggaggaggaggggggg

SEQ ID NO: 209994 - RNA, 79 nt, Homo sapiens
gcgccagggaggaaaaacacaaaagaggggggaaaacaggaagagaacgaggagcaacccaaaggcgaaacccggaaga

SEQ ID NO: 209995 - RNA, 83 nt, Homo sapiens
acagaaaggagaaacagaaaaacgagaaagagaaaaggagaggagcacagacaggcagcaagcggggaagaaacagaaagaaa

SEQ ID NO: 209996 - RNA, 51 nt, Homo sapiens
cagagaaggaaacaacacaaccccacgccacagggaacgggcgacgaagcg

SEQ ID NO: 209997 - RNA, 70 nt, Homo sapiens
cgggcgccgaggggcgacgaaacaacagggggacagaggagccaaaggccaaaccaccagcagacagcga

SEQ ID NO: 209998 - RNA, 42 nt, Homo sapiens
ggacgggaggagcagcaacagaggaggggccaagggagaagc

SEQ ID NO: 209999 - RNA, 73 nt, Homo sapiens
ccacacgcgacgggggagccgcgggcggaacaacagaggcagggaagacgaggacaacggcacagcagagcgg

SEQ ID NO: 210000 - RNA, 82 nt, Homo sapiens
aaaaacaaacacacgcaaaggagaaaggaaccgacaggcgacggaacgcgaaaagaccaggagaaggaaggaggcggggcaa

SEQ ID NO: 210001 - RNA, 56 nt, Homo sapiens
aggccacccaggggcgccaggggccgcaaggccaggcgcgcagaggcacccaacgg

SEQ ID NO: 210002 - RNA, 113 nt, Homo sapiens
acaacaacggggggcagcagcgcgaagacagcaaacacgaaaacaccacaggaaaggccggaaagcagcggcgccagacagcccagggaagagcggcagccgaggaccagggc

SEQ ID NO: 210003 - RNA, 79 nt, Homo sapiens
ggcggccgggacggaggacgcgcagggcaaggaaaggaggaaaacaagcgaagcggcaacaaaacggaaaggcagcaca

SEQ ID NO: 210004 - RNA, 80 nt, Homo sapiens
acagccagccccaggggaaccaccccaagggaggccagcccaagcggccaggcgagggaccagcgaggagccgcaccgac

SEQ ID NO: 210005 - RNA, 54 nt, Homo sapiens
aggagcagccccggccccagaggagacaagggccaaacgaccaggagcaaaggg

SEQ ID NO: 210006 - RNA, 72 nt, Homo sapiens
ccgggccgcccgcggcgccgcagccaagccggaacaggagcggcgagcccaaacgcaagggggaagaaaagc

SEQ ID NO: 210007 - RNA, 80 nt, Homo sapiens
cccgggagacccaggcgggacagagggagccaggcagagccaccggggaccgcaaggccgcggggcccaacaaggcaaga

SEQ ID NO: 210008 - RNA, 76 nt, Homo sapiens
ggccaaagaagggagagaggacaccagcaggaaaacacgggccccagaaacaaggaaagggcaggccaccgagacc

SEQ ID NO: 210009 - RNA, 45 nt, Homo sapiens
cccaacccaccgggcccggaggaggaagcaaacggggacgagaaa

SEQ ID NO: 210010 - RNA, 80 nt, Homo sapiens
aggaggaaggccagaagagaagcacaccgaggaacgaagacaacccagaaaagaaaaggccaggggcgccgaaaaacccg

SEQ ID NO: 210011 - RNA, 90 nt, Homo sapiens
acaaacccgggagaacacccccccaggaggcgagagagcagcaccagcagaagagggcccgaccacggcaacccagaggcgaagcaggac

SEQ ID NO: 210012 - RNA, 58 nt, Homo sapiens
aggcggcggggagacgagaagaagcggaagccgcagaaggaccggccagaagcaagcc

SEQ ID NO: 210013 - RNA, 70 nt, Homo sapiens
gcaccaggccaaagaaagagaagccacagacaagccggcacggagggccgcagagagccacggggaaaaa

SEQ ID NO: 210014 - RNA, 65 nt, Homo sapiens
gaccgccagacggagacagacacagaccaggccagacccccaggcaaaccgccccgcagcaccac

SEQ ID NO: 210015 - RNA, 86 nt, Homo sapiens
ggcagggggagcgccggaacagcagcagcgcgggcccacaagacagagaccaccgcacggaaaccagaccacggcagccacgaccc

SEQ ID NO: 210016 - RNA, 95 nt, Homo sapiens
cccggcaacccagggccggcgcgcgccaccagacgggaagacccgggaggcccccgggagaagaagacgaggaccagaaagggaagaacaaccag

SEQ ID NO: 210017 - RNA, 83 nt, Homo sapiens
gcccgggaccagcccggaacccgcaccaagccgcccacacgccaaccggccagaggacgagggccccaggcagccaccaacac

SEQ ID NO: 210018 - RNA, 55 nt, Homo sapiens
gcgcgaaagaaccggccaacaagagccccagccaccaggccacagacaagagagc

SEQ ID NO: 210019 - RNA, 70 nt, Homo sapiens
caggcgaggcggaacaggccgggcaccaaggcgcagggacacggccaacacgggaaggaaaagcgggagg

SEQ ID NO: 210020 - RNA, 72 nt, Homo sapiens
ggcggaaacagcccccccagaaccaggccggcggcaggcggcacagcaaacacacaagagccagcaaaggga

SEQ ID NO: 210021 - RNA, 94 nt, Homo sapiens
acgagccaccgggcacaacacaaccccaggccagaagaggccgcccaggccccgcgggcaagaagaaggcggagaccccaagagaccaagaaac

SEQ ID NO: 210022 - RNA, 95 nt, Homo sapiens
cgccccggccgccgagcaaacagaggcgccaccacagagccacacgagggaaccccacaaggagccacccagaagcagagagccaaaacacgaac

SEQ ID NO: 210023 - RNA, 73 nt, Homo sapiens
ccaagaccaaggacaacccggcagcacgggaagcagagccccgagaggggcgcgcagaaacgggaagaaacac

SEQ ID NO: 210024 - RNA, 62 nt, Homo sapiens
caaaaggacacagacaagaagggcaaggaccgacgcccaggagggacgaggccacagcagaa

SEQ ID NO: 210025 - RNA, 74 nt, Homo sapiens
aagcccgcggcccagcgaggacggggacgagagccacccggcgccagccacagacagagccgccgcgcccaggc

SEQ ID NO: 210026 - RNA, 59 nt, Homo sapiens
cacaccgccggcccggggcggcgccgaggggaggaggcggaagagacggcgaagaacag

SEQ ID NO: 210027 - RNA, 68 nt, Homo sapiens
aaggaggagcacagcccgcacccgaggagagacacagaaagaaagagacaggaaagagagcggaaggc

SEQ ID NO: 210028 - RNA, 77 nt, Homo sapiens
ccgccaaagcgcggaaaaagacaagggcagagcagccggggaaaagggccaagaagcagaaaagagcacccgagaag

SEQ ID NO: 210029 - RNA, 72 nt, Homo sapiens
aagaaccccagcaaagccaggacccaccacgccggcagggccaggaggcagcacggcaggagacgaggagag

SEQ ID NO: 210030 - RNA, 68 nt, Homo sapiens
aagaagacacaaaggacggaggcacgaaaaacaaccaccagcgagcaaaaaggcaaagaccaagacca

SEQ ID NO: 210031 - RNA, 82 nt, Homo sapiens
ggccggcaaggccacggcggcgaccagcggcggggagccaagagagccccgcagggccgccccgcgcgagagcccagccccg

SEQ ID NO: 210032 - RNA, 78 nt, Homo sapiens
gacacagggccaagcgaagaggccggaggcaagaccaaaggagaggagacgcagaacaggaacacagaaggcgcagca

SEQ ID NO: 210033 - RNA, 82 nt, Homo sapiens
cccagccgggagaagcagcagaggaaggagagaagggcgcaggcaccgcaaccaccacaaagaacaacagaagcagcggcag

SEQ ID NO: 210034 - RNA, 78 nt, Homo sapiens
agccgcaaagagccagaggggagacacgccaaagccccaaggcaggaagggccacgggaacaaaagaggacgcgcgga

SEQ ID NO: 210035 - RNA, 35 nt, Homo sapiens
gggaaaacccccgggaccagaaacagaggaagagc

SEQ ID NO: 210036 - RNA, 78 nt, Homo sapiens
acgagacgagcgccccaccagcaggaaccagggcgagccaggagcagcagcccaaccgagagccagaagcaacaaaga

SEQ ID NO: 210037 - RNA, 78 nt, Homo sapiens
ggggggagaccccaccaccggaaggcgccgaaaaccgaccgacccgggaggccaccacgccgggacgccaccgcgaag

SEQ ID NO: 210038 - RNA, 74 nt, Homo sapiens
acaagcgaggggaacaagagagccgaagggaagaacaggcaccgagagcggggcccggcgcacccaccaccgcc

SEQ ID NO: 210039 - RNA, 77 nt, Homo sapiens
gcaggacgggagaccaagggaagaaggcggaacaccggaggcgggaaaggcagcacaccgcgcccacaggacgaaac

SEQ ID NO: 210040 - RNA, 71 nt, Homo sapiens
cacgagggcgaaccacccacagaccagccggaacaagagacccggggccgcaaggccaggcgcgcagaggc

SEQ ID NO: 210041 - RNA, 86 nt, Homo sapiens
accccgaggggccgggaacccgccggggagaggcacccgagacccacggagaccgcgccggacccagcagggcccccggaacaaac

SEQ ID NO: 210042 - RNA, 85 nt, Homo sapiens
agccggagcgggcgcggacgccgaggcaccgaggcaccagaggagcgccaaggggccaagggagagcggggccccccccaaggca

SEQ ID NO: 210043 - RNA, 47 nt, Homo sapiens
gaaggccccaccacccacaagggaacccaggacgcccgcccccccga

SEQ ID NO: 210044 - RNA, 79 nt, Homo sapiens
gagccggggccccgccggcccaggaagcacaagccagcagacgacaacaggcgcaggagacacagcaaagacgcaagaa

SEQ ID NO: 210045 - RNA, 50 nt, Homo sapiens
gagggaaaacaaaaaaaggcggcacaacacaaggcaggcaacgagggaag

SEQ ID NO: 210046 - RNA, 82 nt, Homo sapiens
ccggacgaaacgaagaccaggaggcagacggggaagaggacgaaggaaccagcccgccagagagcagcagagacccgcaccg

SEQ ID NO: 210047 - RNA, 77 nt, Homo sapiens
cgggaagaaaacaagaaagacaccggcacaacaagaaaccacggcaccccacgccagccccccagcgccggagaacc

SEQ ID NO: 210048 - RNA, 75 nt, Homo sapiens
gaccacagcaagacaccgggaccccggaagccaaaaagggaggagcgcacagcacagccaaaaacagaaaccacg

SEQ ID NO: 210049 - RNA, 84 nt, Homo sapiens
gggcgagcgcggcgcggggcggcgggccggccgaagacagcaagaaagcaccagccaagcagaagggagccagcggacgagggc

SEQ ID NO: 210050 - RNA, 59 nt, Homo sapiens
cacagcgcgacgggcggacggaggagcaaccagccaagggaccgcagggagacggcacc

SEQ ID NO: 210051 - RNA, 85 nt, Homo sapiens
caggccccaaggaagagaacggacaagaaggagcaagcgaagaagagggaaaagcccaaggaacaccggaacaccgggggggacg

SEQ ID NO: 210052 - RNA, 73 nt, Homo sapiens
gaagccgggacaaggaccagacagacaaccaaaagccaacagcaacacccaggagccaagaaggcaagaagag

SEQ ID NO: 210053 - RNA, 78 nt, Homo sapiens
gggccccgacgacagcgcggaaccaaaacgcaacacaagcgagggagaagccaagagcacagacccaaggagaaggaa

SEQ ID NO: 210054 - RNA, 63 nt, Homo sapiens
cagaagagaggacagaagcaaaaagaagcagaccccacgagcgaaagggaaaaaacgaaggag

SEQ ID NO: 210055 - RNA, 42 nt, Homo sapiens
caccggcccggccacgcacacacgcggcagcgaaggggaacc

SEQ ID NO: 210056 - RNA, 83 nt, Homo sapiens
ggaaacaaccacagacacaggaaacagagcaaagcagcgacaacaaagacagaggaagaaaaacagacagaccaagaaagagc

SEQ ID NO: 210057 - RNA, 72 nt, Homo sapiens
agagacaacaagacaggcagaggcagaaaagcagagacagacacaagaggcccagcagcggggacgcgagaa

SEQ ID NO: 210058 - RNA, 82 nt, Homo sapiens
gaacagaaaggcacgacgggggcaacccaggccaacggaagcacgggaagaagaggagggggagagggacgcaggaaaggag

SEQ ID NO: 210059 - RNA, 54 nt, Homo sapiens
gaacaaaccgaagaacagcgggaaagaaggcaaaacacggaggccacggcagaa

SEQ ID NO: 210060 - RNA, 76 nt, Homo sapiens
gcgacaacagcaccagccgccagccgagaagaggcacacagaccgcgggggagcagcaccggggccccagcgagaa

SEQ ID NO: 210061 - RNA, 75 nt, Homo sapiens
gccgccagggaaaagagcaaacgaggaaagaccacagcaagaccacgcccccagccgggggaccaggccgaacga

SEQ ID NO: 210062 - RNA, 82 nt, Homo sapiens
gaggaggcaggacggcccggccccgcgcgcggcgccgccgccgccagcgcgggagaagaaccaacaacggaaaaccagcggg

SEQ ID NO: 210063 - RNA, 87 nt, Homo sapiens
ggaggcggcgggcggaggcggcggggagaggagacaccaggcgccgagaaggccagcagagaaacaggcaggagaggcccacaggcg

SEQ ID NO: 210064 - RNA, 62 nt, Homo sapiens
gcggcacgaggcgggccggagcgagaacccgagcagcgccagagcaacacaccgcgccccag

SEQ ID NO: 210065 - RNA, 102 nt, Homo sapiens
ccggagcggggacccaggagccggccagcgcgccggagccgccgagacaccagcgcagccgcccagcagcagcagcccagcaaacacggggaccacacacaa

SEQ ID NO: 210066 - RNA, 77 nt, Homo sapiens
ggccaaggcgagcccaccccccagcccaagacccaggcagggaggagagagcgaggccacccagaaggccagcccca

SEQ ID NO: 210067 - RNA, 75 nt, Homo sapiens
cagaggacccaacaccagaagacacacaggcaaagcgggccagacacgaagaggccggcgaaggaagaaggacca

SEQ ID NO: 210068 - RNA, 60 nt, Homo sapiens
aacgaagggcaagaacaaaaagagcgcaccccacggccaccggcgaaggcccagcccgag

SEQ ID NO: 210069 - RNA, 43 nt, Homo sapiens
acccacggccagacacccaggagcaagacccaaacggaacagg

SEQ ID NO: 210070 - RNA, 107 nt, Homo sapiens
cggcccccggcgccgcgcgagccgccgcccgcaccccgacggcggagggggggcaccagagaagaccagggccgggaaaaaaggggagcccagacagagcgaacaaa

SEQ ID NO: 210071 - RNA, 72 nt, Homo sapiens
caaggcaaccgggaggggagccgacaggcagaccaaggcagccggagaccccaaccgggagaacgcgggacc

SEQ ID NO: 210072 - RNA, 82 nt, Homo sapiens
ggacgggaccgaaccgaccgacccggcaggcggggcggcgcggcgggaggacacccggaggagggacgggccaagggagcac

SEQ ID NO: 210073 - RNA, 111 nt, Homo sapiens
ggagccgcccgggcggcgcggcagcggaggaggagccgggcaggcgagaaaggccaaagaagagacgaagcaaaggcgcccggagccccagaaccgaagaagagccgcagg

SEQ ID NO: 210074 - RNA, 70 nt, Homo sapiens
gaggacccgaagccacagccccaagggggaagaaggagccgcagccagaaaaggccagccacaaagagcg

SEQ ID NO: 210075 - RNA, 102 nt, Homo sapiens
ccagggcggagggggaggaagcaggggaaagcccgggccaagcgggaggcgccgcaccggcccgaccagccacgacacccacgaaaggacaggcagggacgg

SEQ ID NO: 210076 - RNA, 74 nt, Homo sapiens
aagacagcggaagaagacccagggaaacccccaggcaagaacggaagcacgggcggaggaaagcacaagcagag

SEQ ID NO: 210077 - RNA, 92 nt, Homo sapiens
ccaccaccacgccagccgcaccagccgcccaagccgcacagccgcggcggcagcagcaggagagccggcacagccacaccgagaagaccggc

SEQ ID NO: 210078 - RNA, 89 nt, Homo sapiens
aggccaagcgagaaggagggccgacgccacaggccaacgaggaaccaaagggagaggaaagagccggcccaggagcagcagggaggcgg

SEQ ID NO: 210079 - RNA, 54 nt, Homo sapiens
cacgccagaggcgagccaaaggagcccaaaaggacaaaacagcaacaaggcacc

SEQ ID NO: 210080 - RNA, 57 nt, Homo sapiens
ccggagaggcggagccacaagcacgcggaagagccagaagaagagagggcgaaggag

SEQ ID NO: 210081 - RNA, 73 nt, Homo sapiens
acacagccagcaaacccggcccagaggcagcgaggcgcgaaaaaaaccaacaaacccaaacgcaccaccaaga

SEQ ID NO: 210082 - RNA, 75 nt, Homo sapiens
gggggaccgaccgcaacagaacggacccgcgaaaggggacaaaaaccggacgccgccccccccccccaaaccaaa

SEQ ID NO: 210083 - RNA, 75 nt, Homo sapiens
ccaagggacaacgcgagcaagaccgggcacgcaccgaccgccagagggaccaggagggagcgcaggcacacaggc

SEQ ID NO: 210084 - RNA, 73 nt, Homo sapiens
cacaccaaccaagaagagccaggcagcgcacgggaaagcgccgacgacagacggagcagcacccccagagcag

SEQ ID NO: 210085 - RNA, 78 nt, Homo sapiens
gacgcccgcacaggccacaagagcagccaaggccaaagcagagcagcgagccaaaccccagccaccggaagaagaaga

SEQ ID NO: 210086 - RNA, 81 nt, Homo sapiens
acccgccggagccagccagccgcccgagcaccagcaggcagacccaacaccaacacgaggagaaggcagccccaggggccc

SEQ ID NO: 210087 - RNA, 74 nt, Homo sapiens
gaaaaagaaccgccaagagagaaaaaaacaggagcaagcaccaaaaaagggagagggcgaacccccccacggca

SEQ ID NO: 210088 - RNA, 41 nt, Homo sapiens
aaaagcccggggcaggagaggcacgcaggaaccacaccaca

SEQ ID NO: 210089 - RNA, 85 nt, Homo sapiens
ccagcaaggcggcagagcaaggggcacgcagaaggaccggccacggagaggggagaaacagcaggagcacgagggcagggcgcgg

SEQ ID NO: 210090 - RNA, 82 nt, Homo sapiens
ccgagccgggaccaggcccgggggcggcggccacgccaaggacgggaccagcaacaaggcagagcgaacccaagcagaaggg

SEQ ID NO: 210091 - RNA, 84 nt, Homo sapiens
gaggcggcggccgcggcggcgcgcgcgcaggggacaggggcggcgaccggcggcgccgaggaggaggcaccggaggggaccaga

SEQ ID NO: 210092 - RNA, 73 nt, Homo sapiens
agaacccaacgcgggggggaccggcaggggacagacagaccgagcggccgggggcaccaggacacacaggcag

SEQ ID NO: 210093 - RNA, 71 nt, Homo sapiens
ccgcggcgaagcaaaggaacgcgccggaagaaaaggccagacgcagccgaacgccaggggagaaaaccagg

SEQ ID NO: 210094 - RNA, 76 nt, Homo sapiens
agcagcggggcggccagacacgaccaaacaagagcaccacagcccccgccacgggccggccccgcccagaacaagg

SEQ ID NO: 210095 - RNA, 79 nt, Homo sapiens
aaagggagcacaccaaagcacaagggagccaagacaaccacacacaaaaggaaagggaaaagccacaccaggagaaaag

SEQ ID NO: 210096 - RNA, 78 nt, Homo sapiens
cccaccgcaccacgggcccaccaccgcacccgccagcgagcccgggcacccgcggaccaggccgaggcccaccgcgcg

SEQ ID NO: 210097 - RNA, 74 nt, Homo sapiens
cagaggcaacgggccccgcaggccaccaccacagccaaaagggaccacgcaaagaggccaagaccagcagaagc

SEQ ID NO: 210098 - RNA, 80 nt, Homo sapiens
ggcagccaaccagagcgccacccaggaggcggagcggcaaaaaccaccgccagagcggaacgaccccagagcgagcccgc

SEQ ID NO: 210099 - RNA, 34 nt, Homo sapiens
aacaagaaaaacccaggaggaccaaagggacaca

SEQ ID NO: 210100 - RNA, 74 nt, Homo sapiens
agcggggggcgcccaggaaacagcccgaacgcacagaagaaaccagcgcccagcgccgggagacaaagagaaaa

SEQ ID NO: 210101 - RNA, 54 nt, Homo sapiens
aaggaacgacgcccggacaacaaagccggaacggcaaaccagacagcggacgac

SEQ ID NO: 210102 - RNA, 67 nt, Homo sapiens
agcagacgcagccgagacaccagcccgaaacaccaccaagcccgcggcgccaggccacgcggccccg

SEQ ID NO: 210103 - RNA, 34 nt, Homo sapiens
agcgcgaaacaacacacaggagggcgaaaggaac

SEQ ID NO: 210104 - RNA, 61 nt, Homo sapiens
ggaggagcccccacaagggacgcacacgaggcagcagagggcagaggggccagagagaggc

SEQ ID NO: 210105 - RNA, 64 nt, Homo sapiens
aggaacccgcgaagcgggaaggccagcacaaagcgagaaggagggagaagggcgcgagaaccaa

SEQ ID NO: 210106 - RNA, 71 nt, Homo sapiens
agcccacaaacagaagccagacagccacacaggcaggccgcgcgcccacccgggcagaaaacgcagaagcc

SEQ ID NO: 210107 - RNA, 77 nt, Homo sapiens
aggcgcaacaaaaggccacaaaccaaggggcaaaaaggcagaaacggagaggagcgaagagcgaagccagccagccg

SEQ ID NO: 210108 - RNA, 65 nt, Homo sapiens
acacggggccagggaacccggcaccgccccaggcaagccgcgcgcagggagccggcaggaggagg

SEQ ID NO: 210109 - RNA, 87 nt, Homo sapiens
cgggcggccccggcccgcgcccgcccccggccgggcggacgcacgaggaaaacagaaaagcagaaaaaagaagagaaaagaaacccg

SEQ ID NO: 210110 - RNA, 79 nt, Homo sapiens
caggagacgaagagcccgggcggcgccgaccggccacgggcgagcgcggcaggaacccagaaccgcgggcagcaagaac

SEQ ID NO: 210111 - RNA, 73 nt, Homo sapiens
ggggagaaggggcaggggacagagagcccggacaggaagggcaggcccgaagccggcacaaaccgagccggca

SEQ ID NO: 210112 - RNA, 73 nt, Homo sapiens
aaagaccacacccgagaaagcgagcgacagaccacaaggggaggacaaagccgggaggcgcagaaggccgggg

SEQ ID NO: 210113 - RNA, 67 nt, Homo sapiens
ccgagaaagcaacggaaacgaagaaggcccagcccaccaggaagagagaaggccacgcccgacccca

SEQ ID NO: 210114 - RNA, 60 nt, Homo sapiens
cgggaaacgggcgaagcgacgagccgcgaggagggacgaagcacggcaccggcccacgac

SEQ ID NO: 210115 - RNA, 72 nt, Homo sapiens
agccgccccggaggagaagagcccggagagggaaagaagcagaagcggcacgagcaggcaagagagaagcga

SEQ ID NO: 210116 - RNA, 87 nt, Homo sapiens
ccagacccaccaagcagccgccccaagccccaaacccggaacaagaccggaaccaggccaaagaggcccacgaggccccgggggccc

SEQ ID NO: 210117 - RNA, 79 nt, Homo sapiens
gccaccagccggacagccggcgggacaccagaggaccagaacccacgagaaacagacgagccaaccagaccccaggagc

SEQ ID NO: 210118 - RNA, 76 nt, Homo sapiens
agcgcacgacaaccagcaaccagaaccacgagagaaagacccaccaagaggagaaaaccaccaaaaaaagaagaag

SEQ ID NO: 210119 - RNA, 76 nt, Homo sapiens
caaaaacccaaaccccccaccagcgccaagagaccagaaaacgaccacaagaaggcacacggaaagagcgccccag

SEQ ID NO: 210120 - RNA, 54 nt, Homo sapiens
cggaccgcggagacccccagcccagagcgcaaacgaaaagcaacggcgcaagag

SEQ ID NO: 210121 - RNA, 60 nt, Homo sapiens
cccgcaccagagcggggcaccgagccggaagggcccggaggggccgccccacgccggcga

SEQ ID NO: 210122 - RNA, 63 nt, Homo sapiens
ccgccgagcggacccggaccgggggcggggaccaagagaagagcagaggaccagcaccgccga

SEQ ID NO: 210123 - RNA, 76 nt, Homo sapiens
gccccgccgccccgcgggagccgcagacagccaaggacggacaggaggcgaaaggcaaagaggccgaagccaggcg

SEQ ID NO: 210124 - RNA, 80 nt, Homo sapiens
agaaggcaggccaaaccaccgaccaggcagccgcgaacccccagaaccgaaacgaccaccgagacgcccagcgagcgccc

SEQ ID NO: 210125 - RNA, 73 nt, Homo sapiens
gccagccaccgccacacgccaggggaaggagaccccggcaacagggaacaggcagcaaaggggaaggccggaa

SEQ ID NO: 210126 - RNA, 63 nt, Homo sapiens
acaacgcaaggagcggaagaagagaccaaacaacaccgcaaacaacggaacagggaggcagcg

SEQ ID NO: 210127 - RNA, 70 nt, Homo sapiens
gccggaggggacaaacaggaaggaagacgacagcaagagaaagaaaaccaagccggcagacgcgaaggag

SEQ ID NO: 210128 - RNA, 70 nt, Homo sapiens
agcgcacgcaagggcgcgcccggcacacgaaaccacgacccacagaaagacaacaggcacaaagagagaa

SEQ ID NO: 210129 - RNA, 84 nt, Homo sapiens
gggaccacccgaggggggaacaaagagaagacacaccaccacgccaagggcgaccagacgaggggagacggacgggggagagag

SEQ ID NO: 210130 - RNA, 69 nt, Homo sapiens
gacgggcagggcccagggagcaacagcgagcaacaggcaacgaaaacagacaaaacaacggaaaagcag

SEQ ID NO: 210131 - RNA, 73 nt, Homo sapiens
cgccccccccccgccggcagacacaagcgcgccgccagcaagaaggggccgggcacggggcacgccgaaacca

SEQ ID NO: 210132 - RNA, 71 nt, Homo sapiens
aagggaggcaagacagccccacccaagaagagcgaggcgggacaaacaaggcagaaacccagggagggcag

SEQ ID NO: 210133 - RNA, 80 nt, Homo sapiens
gggggcggggcggcaggagccggccggcaaccgagggacccgcgccaggcccagcacgacagagacccggaaagcgagca

SEQ ID NO: 210134 - RNA, 71 nt, Homo sapiens
ggagaaaaggccaagaaggcagacggagaagggacccgaaagcccgaaggagacaaacaacaccccccccc

SEQ ID NO: 210135 - RNA, 77 nt, Homo sapiens
ggcggacgccaagaccgggaccgggcgccacgcgggggcaagacgaaggaaaaacaggaggcggccagggcgagcca

SEQ ID NO: 210136 - RNA, 74 nt, Homo sapiens
ggagcgcccggcgcacagcgccagagacacgaagggacagaacccccggaagacaccaggccacacagccgaaa

SEQ ID NO: 210137 - RNA, 73 nt, Homo sapiens
gaaccaccgccacaaacgcaggccacaaaggagggaggaagaggcgcggcaagggcgcggcaagaaaaccggg

SEQ ID NO: 210138 - RNA, 72 nt, Homo sapiens
ccacgacccaggagcagggaagcaggagggcgcgagagagaaggggaggaaaagcagcaaagacgaccccag

SEQ ID NO: 210139 - RNA, 48 nt, Homo sapiens
ccaccgcaaggacggagaaggaggacccaagaagaccagccgaagccc

SEQ ID NO: 210140 - RNA, 74 nt, Homo sapiens
gcccccgggggacggaggaggccgcgccgagaaccgaccgagccaggacacggccaaggccggcgagaacgccc

SEQ ID NO: 210141 - RNA, 56 nt, Homo sapiens
ggagaaggacggggggcagacaggagcccaagcaagaagcggagaacagggggcgc

SEQ ID NO: 210142 - RNA, 81 nt, Homo sapiens
ccacggcgggccgcgggaggacaccacccacagggcggaaaacaccccaaaagccaaaagggaaaggaaaagaccaacaac

SEQ ID NO: 210143 - RNA, 78 nt, Homo sapiens
ccggccgcggcacggcccggggccgggagcgcccgaggaacacgccgcaggcaagccacagccaggaaacaccagccc

SEQ ID NO: 210144 - RNA, 86 nt, Homo sapiens
cgggcgcccggccggcgcggccggcggaggcgagccggccgcgggcgcgaccggaggcagggaaagaaaagaggcccggaagagag

SEQ ID NO: 210145 - RNA, 73 nt, Homo sapiens
aaagcagcggacgaaggaccaccaaccaaagacaggagcagccagaaaaacccgacagacaagggcgccgaga

SEQ ID NO: 210146 - RNA, 80 nt, Homo sapiens
gggcgccagggccgccgccccgcccggagaccagaagcgggcggagggccgggggcgaggccacgagaccacccagcgcc

SEQ ID NO: 210147 - RNA, 77 nt, Homo sapiens
ggcacgcgccgcgggacccgaggcgagccaagcagggcggagaacggaaaagcaccaggaagcagagaggaccgcag

SEQ ID NO: 210148 - RNA, 73 nt, Homo sapiens
aggaacacaccaagggagccagggccaggcgacgccacaggcacagggcaagggacgaagaacagaaacccag

SEQ ID NO: 210149 - RNA, 57 nt, Homo sapiens
gcccaccgcgaagggggcagagacagccccgagccaagaaccgccggcgcagcacca

SEQ ID NO: 210150 - RNA, 99 nt, Homo sapiens
ccaggcgagacgcggggagacaagcaccccaccaaggggacgacagcgcgagggagccgaaggcaggaaaagggaagggcacagggaggaagacgccag

SEQ ID NO: 210151 - RNA, 96 nt, Homo sapiens
gcggaagaggccagcccagccgggggccggaggcagggcggagagacgccggggcccggcgccaccaccggggagccagagcaagaggccaaggcc

SEQ ID NO: 210152 - RNA, 77 nt, Homo sapiens
agcccagccaccacagacagcacgagccagggagccgccgggaccggcccgggagacgacaacccaaaccgaaaagg

SEQ ID NO: 210153 - RNA, 80 nt, Homo sapiens
ccaggagacgagagagcgaacgccagggacccggcaggccgcccccggcaagacgggagagaagcgccggccggaaagaa

SEQ ID NO: 210154 - RNA, 101 nt, Homo sapiens
ggcaccaccacgcaacagcaccggggacagcgagcggcacagaagaccacgcccagacagggcaggaccgcccgaccacgcgcgccggcagggggaccagg

SEQ ID NO: 210155 - RNA, 70 nt, Homo sapiens
gggcggacagcggggcccgcggaaaacagggcccgccccaccgggggccaccccagggaggagaagaggg

SEQ ID NO: 210156 - RNA, 71 nt, Homo sapiens
accgaccaccaaaacgaagcaaaccaacaccccccgggaacaagaaggcagcacaccccccacaacaaagc

SEQ ID NO: 210157 - RNA, 40 nt, Homo sapiens
ggcagaagaaacgccaagaagcgccacgagacgcggcacc

SEQ ID NO: 210158 - RNA, 64 nt, Homo sapiens
cgcagaccagaccgccgaccggcgcccgccggaacgggaaaagggaagcagcgggcagcggcag

SEQ ID NO: 210159 - RNA, 75 nt, Homo sapiens
acaacgagagcagcgaagcaccacgaaaggagaggaaacaaaagggcgacagcccagaggaccgaggcgcgagaa

SEQ ID NO: 210160 - RNA, 57 nt, Homo sapiens
ccagaaaggcccccgcgcggccccagcagaaccagagcacggagcagcaggaaaggc

SEQ ID NO: 210161 - RNA, 72 nt, Homo sapiens
ccgccagccgcagcccgccagccagcgccgcgggcccgcggcccggacagcccaggccaagacagcagccac

SEQ ID NO: 210162 - RNA, 72 nt, Homo sapiens
ggagaaaaggccaagaaggcagggagaagaaaaagcagaaaggaacagaaaacaaaagaacaaggcacaacg

SEQ ID NO: 210163 - RNA, 83 nt, Homo sapiens
ggcgcgcggcccgggcaccacaaacccacagaccaagccagaggagcaacaggaggcacaaaaagaacaaccagaaggaacgc

SEQ ID NO: 210164 - RNA, 83 nt, Homo sapiens
cacagagccaacccagaagagccaagggcggcacccaccccccgagcccgcccgccggccccagcccccaccagcagccccgg

SEQ ID NO: 210165 - RNA, 55 nt, Homo sapiens
cagaccacacccacagaaggagagcaaaggagacagccaacaagcccaaaggaaa

SEQ ID NO: 210166 - RNA, 84 nt, Homo sapiens
agaagcagggcagcaggccggaggggcagaacacagcgggaacgaggggcaaagaaaaaggagagaaaaagaggcaaaacaaca

SEQ ID NO: 210167 - RNA, 63 nt, Homo sapiens
ccgaccagggcaacaccaaaaacaaaacgaaccaggacggcaacgaaccccaagcccgacggg

SEQ ID NO: 210168 - RNA, 83 nt, Homo sapiens
aaaaaagccaacccgcgggcagggagcaccagagaggggcccagacaagcggcggaggcaggacccagaccggacgggaacgg

SEQ ID NO: 210169 - RNA, 78 nt, Homo sapiens
gaagagacaaaaaaaaagccagaagaaggacaacgacaaaaaggagcaagcccaaaccagaagcaccagcggaacaag

SEQ ID NO: 210170 - RNA, 81 nt, Homo sapiens
acgaggccgaggcggcggcgcgaggcagagccggcgcgcggggcggcggggcgcgggccggggcgggcaggaacacccccg

SEQ ID NO: 210171 - RNA, 73 nt, Homo sapiens
agcgcagagcgaagcagaagacgaggacacgcagccggccgaggaccccccagggacacacgcaacacaagca

SEQ ID NO: 210172 - RNA, 75 nt, Homo sapiens
gcaaagcagcacagaagcacccggcaaaccgaaagccgcggcccgcggcccaccggacaaacccccaacccgccc

SEQ ID NO: 210173 - RNA, 58 nt, Homo sapiens
gcaccgcggccgggcgccagcgcggcgcaggccaaggggccagaagagaccaagagga

SEQ ID NO: 210174 - RNA, 77 nt, Homo sapiens
ccaggccgcagccgacccaacaggcgggcgccaggcaccaggggacagcaggagaagcaaaggcccgccaagacgga

SEQ ID NO: 210175 - RNA, 77 nt, Homo sapiens
cgggaggggggagcggcgggaggccaccgccaggcaccacaaaagcaaacaaagggaagacgccgagaggaaaagga

SEQ ID NO: 210176 - RNA, 71 nt, Homo sapiens
aggaggacgaggcaagggaacagaaggagcaggagcccagccaccccggccgcggcagcaacgcagcagaa

SEQ ID NO: 210177 - RNA, 63 nt, Homo sapiens
agaagccgacgagcaagggggcgcgccacaggaaaagaccacaggagccacggagcgacaagc

SEQ ID NO: 210178 - RNA, 71 nt, Homo sapiens
gggcccaagccccggaaagccacgccccaggaggcgggaaagccacaaacaacccccaccacgccaagaga

SEQ ID NO: 210179 - RNA, 62 nt, Homo sapiens
ccgcgcgccaggcgcgcccgggacccagcagccagcgaagccccaaggaagccgggacgccc

SEQ ID NO: 210180 - RNA, 75 nt, Homo sapiens
caccgccggccaggggcggaaacggccaaggaacaagaaacccagggagggacagagagaagaaaaggcgggagc

SEQ ID NO: 210181 - RNA, 92 nt, Homo sapiens
gccggacccgaagacgagggccggaggaaacaggagcggaggacaccccggagaggacgggaggacggcagcacagggaaccacagaacagg

SEQ ID NO: 210182 - RNA, 70 nt, Homo sapiens
gaccggaccgagagcggaccgagagcgcgaaacgcacgagaagcacgacagccgaaggagaggaggcgac

SEQ ID NO: 210183 - RNA, 86 nt, Homo sapiens
gggaccacgcacaggacggaagagaagaaggcagagacgagcagcaacaaggccccgccagcaggcgaagcagggagagcagacgc

SEQ ID NO: 210184 - RNA, 69 nt, Homo sapiens
acccaggggccgccccaggacacgccggacccccccgggcgacgccaggagcacaccgaaaagaaagga

SEQ ID NO: 210185 - RNA, 56 nt, Homo sapiens
ccgggggacacgcaaaaagagcagaacggccaccagagaaaccgggggccagccgg

SEQ ID NO: 210186 - RNA, 76 nt, Homo sapiens
ccacccccacggcccccggcgccccggcccccgccccagcccgccggcggcggcgggcggaggcaaggcgcgaccg

SEQ ID NO: 210187 - RNA, 70 nt, Homo sapiens
acgaccagcaggaacgaccggggaaccagcaccccagaaggaggagagccagagcccacaaccagaaagc

SEQ ID NO: 210188 - RNA, 74 nt, Homo sapiens
gggccagaggacagaggacagggggaaaggcccaggggggccagaaggacaaccggcacgacacgcccacgcaa

SEQ ID NO: 210189 - RNA, 76 nt, Homo sapiens
ccacgagcacacgcagaagggggaaagagaccgggacagaacagcaacgaaggcgaaccaaccacggagaccggcg

SEQ ID NO: 210190 - RNA, 82 nt, Homo sapiens
ggcccggacgaggaggacgcgcccgccaccgacacaccagggagaagaggagagagcagccaggccccggccgagcccgccc

SEQ ID NO: 210191 - RNA, 76 nt, Homo sapiens
ggccagcaagagcccggaaccagagcagcagacccaaaggacaaccccgcaacagaaacccccaaccaaaagccaa

SEQ ID NO: 210192 - RNA, 77 nt, Homo sapiens
caaagaccgggcgacgaggcacagcgcgcaagaagggagaaaaagcggggaaaacaaaaaaaagaaggagggaagag

SEQ ID NO: 210193 - RNA, 66 nt, Homo sapiens
caccgcccaaaaaggcgagcggagcggaggcagacacacacggggggagagggagggggggacacg

SEQ ID NO: 210194 - RNA, 75 nt, Homo sapiens
cagaggacggccccaagaacagagaagaaaaaaacgcaccggagaaaaaaacggagccaaaacccgcaacaacag

SEQ ID NO: 210195 - RNA, 70 nt, Homo sapiens
ccgcgcgcaaggaagaaacccccagccgacgcccgcgccccccagcaaggagaggggaagaagagaaggg

SEQ ID NO: 210196 - RNA, 48 nt, Homo sapiens
cgagagcaaaagggaccgaggcaagaagaaaaaacaccagcagcccag

SEQ ID NO: 210197 - RNA, 77 nt, Homo sapiens
cagagcgcgaggagggaaacgcgagggcaccagccaggagcacacggcgcacgccaacacaacacaggcgaagaggc

SEQ ID NO: 210198 - RNA, 74 nt, Homo sapiens
agcacgcggcaggagcagagacaacacgcaagccccggggcagagacacaggacacccacccgccggggacaga

SEQ ID NO: 210199 - RNA, 70 nt, Homo sapiens
gcggccacacccgccacccacaggaccaggggcgcacggaccaacgaccggaaaaaggcgcgcgcgcgga

SEQ ID NO: 210200 - RNA, 76 nt, Homo sapiens
cccggaaggaaaaacaggccaagaacccaaagcaaggcgagacaaggggccaaccagccagggccaacaaacagga

SEQ ID NO: 210201 - RNA, 81 nt, Homo sapiens
cgcccccccacacacagaaggggagcgagcacccagagccagggaggagagaagagcgccaggcacagggagcgcgaggag

SEQ ID NO: 210202 - RNA, 78 nt, Homo sapiens
aggagcccagagagggagggacagcccaagaggggacgagaacaaaggagagccagacagacaccccaaacaaagcag

SEQ ID NO: 210203 - RNA, 73 nt, Homo sapiens
gcacccccggccggggcacacagcccagacaggaacagcgcaggaggaggcccggccagcagccccgccacga

SEQ ID NO: 210204 - RNA, 80 nt, Homo sapiens
ccagaaggcaagagaccgggaagacagcgcccgcccaacacccagcagccagggaaccccaggacaggcaaggagccagg

SEQ ID NO: 210205 - RNA, 77 nt, Homo sapiens
ccccacccgggggagcgaaacagaaccgccaggagcggcagacggcaggccagcgcgaaaaccaacggcccggagga

SEQ ID NO: 210206 - RNA, 88 nt, Homo sapiens
acagcgggacaggagcagcggccgggagcccagggaggcagaaggacagaaaacgggccccagacacaagccccaccaagaggacacc

SEQ ID NO: 210207 - RNA, 71 nt, Homo sapiens
ccagcagcgaccaaggccaaagaagcggcaaggagagaaacagccgacgaggaccgaagaggggcgccgga

SEQ ID NO: 210208 - RNA, 71 nt, Homo sapiens
gaacccgagaagagacaccgagaagcagggggagccagcaaaggaagaaaagagagaaagcagagcaaaaa

SEQ ID NO: 210209 - RNA, 59 nt, Homo sapiens
ccacagggagaaacgggcggccgaggcaggggagaccgaacaacgcgcggaggagacca

SEQ ID NO: 210210 - RNA, 55 nt, Homo sapiens
cacccggccccacacacgccagggacgggggaggaaggaagggaacacggacgac

SEQ ID NO: 210211 - RNA, 68 nt, Homo sapiens
cgcgcgccaggagacggccgacccgccagaggaggccccccagccacggaaacagcgccgccccaggc

SEQ ID NO: 210212 - RNA, 63 nt, Homo sapiens
ggagaacgcggcacggggcaggggccgcaagccaggacagagcaccccgcaaaacagcaaaac

SEQ ID NO: 210213 - RNA, 60 nt, Homo sapiens
gccagcgccccaggccaagagggacccacccggcgggggggccccagcccggccgaacgg

SEQ ID NO: 210214 - RNA, 81 nt, Homo sapiens
gcgccccccagccccgccgccccgccaccgccccggccgccgcgcccggacacacagcggcggagaaaccaccacaaacac

SEQ ID NO: 210215 - RNA, 80 nt, Homo sapiens
ccgacgcgggcgggacacgaccgccacgaagaccggacagcacccaagaaaacccaggccgcgaaggagaagaccggaca

SEQ ID NO: 210216 - RNA, 48 nt, Homo sapiens
aaccccgaaaaaggcaggagcggaggagccccaggaaggcgccaaagg

SEQ ID NO: 210217 - RNA, 81 nt, Homo sapiens
ggcggagacacagaggcccaaagagagagagcaacgggaccaaaagaagggcaaaaaacagagccaaacagcccaagacca

SEQ ID NO: 210218 - RNA, 75 nt, Homo sapiens
agccagcaccgcacgcccgcaagggagacagaaaaagcacagaaacgcggaacagagaggaagcaaggcaaagcg

SEQ ID NO: 210219 - RNA, 78 nt, Homo sapiens
gcgagagaggaccccggacacgaaagccgggaaagccaaaccagaaaggggacagcggcgggcagggagcacggaagg

SEQ ID NO: 210220 - RNA, 61 nt, Homo sapiens
ggggaacagacagaaggagcaggaaccaaaggggcagcggaacgcgccgacgccgcaacca

SEQ ID NO: 210221 - RNA, 101 nt, Homo sapiens
ccagccaaagaaacaagccgggaaagggacaagaagggcaaagccgaagagcggggaagcaaagaaggacgcaccccaccgacaggacaaaggacggaggc

SEQ ID NO: 210222 - RNA, 79 nt, Homo sapiens
cacaccagaccacggagggagcggaaaccgacgcagacggaaagaaggaccaggaagggggggaagcaaaaggacgacg

SEQ ID NO: 210223 - RNA, 56 nt, Homo sapiens
gaggccccagaccacacgggaaagacaaggagccgggccgagaaaccgaaccagag

SEQ ID NO: 210224 - RNA, 55 nt, Homo sapiens
aaggcccccaaggggacacaggaaagagaaaggagaccacaagaccccgcgccac

SEQ ID NO: 210225 - RNA, 51 nt, Homo sapiens
ccaaaggcgagaacaggacaaccaggacgaaggcgcgacgccaaggcacga

SEQ ID NO: 210226 - RNA, 114 nt, Homo sapiens
gaccagaaaaccgacaacccccagaaagccaagccggggggggaaaaggcgccgagaccggaacaggggcgggcggaagcacccagccggagaaaacccaaccaaagaggcacg

SEQ ID NO: 210227 - RNA, 64 nt, Homo sapiens
gacagagaacggagcgacccaccgaacaggcacggcgaaagagcaagcgggcacaccgacggac

SEQ ID NO: 210228 - RNA, 89 nt, Homo sapiens
cagaggaagagcgaggacccggaaaagagcggagagcggacccgagggccccccgccaaagacagccagagaggacggcaagaagaaga

SEQ ID NO: 210229 - RNA, 70 nt, Homo sapiens
gccggggaggaagggcggcggaccgggaccaagcgccagaacgaccaacgaccacaacgacgggagagcc

SEQ ID NO: 210230 - RNA, 77 nt, Homo sapiens
gagagacgcaccccgagacgaggcggagggagaaacgcagcaccaaccgcgaagaccgcgggagccggccaggagga

SEQ ID NO: 210231 - RNA, 87 nt, Homo sapiens
cccaggaccccaggggaacaagaggccacgcagagccacgccgccaagcccaagaaccaagcgaggcccagaaggcacgcagccagg

SEQ ID NO: 210232 - RNA, 71 nt, Homo sapiens
acagacagaacaaaacacaaaacccgagcacagaaaagaaaaggaccggaggagagccaggaggggccaga

SEQ ID NO: 210233 - RNA, 75 nt, Homo sapiens
gcggccaagaagacacaaaggacggaggcacggccagagccgggcacgggaacgcaccgcaggcccccaccgcca

SEQ ID NO: 210234 - RNA, 97 nt, Homo sapiens
ccggccgcgcgcgaccccgacaccgcgcggcgcgccggccgcccaaggcgcccaaggaaagaagacgaccgaacaaggaggcaaagacaaaggacaa

SEQ ID NO: 210235 - RNA, 73 nt, Homo sapiens
gaacgaccgaaacaccagaaccagaccacgcaaaaagggccgccccacagcccgcccaagccacagccgagga

SEQ ID NO: 210236 - RNA, 77 nt, Homo sapiens
ggcgagcaaccgcagccccgcggccgagaggcagcgaaccggggaccacgggaaagcccccgcagccggcagacaaa

SEQ ID NO: 210237 - RNA, 85 nt, Homo sapiens
ccggaagagcgccccaggagaaacaaccagcccccgcccgagccagcgggaaccgaccgggaggcacacccggaaagagcccgcc

SEQ ID NO: 210238 - RNA, 85 nt, Homo sapiens
cggaaacgagggagccccggggagcggccaaccacgaccgacggacaccacccgggcgggaaggcacagagcagaagaaagaaga

SEQ ID NO: 210239 - RNA, 78 nt, Homo sapiens
gagggggaagcaacaaaaggaccgcagagagagaggcagcgaaaaaagagcagagggcaagcgcagacggaaccgcga

SEQ ID NO: 210240 - RNA, 77 nt, Homo sapiens
aagagacaggaggccggggcacgccacccagggggacacagcggaaaacacggaggagaagacgcaaacagcagacg

SEQ ID NO: 210241 - RNA, 80 nt, Homo sapiens
cgaagccaagagagaacaaacggaaaagaagaccaccaccagagcagcaacaaggacagcgacagcagacaagcaacaca

SEQ ID NO: 210242 - RNA, 73 nt, Homo sapiens
cagcggggcaccagcacaaagcccggaccaggcccccccagccggcgaccagccaccccacgcaccggagcac

SEQ ID NO: 210243 - RNA, 72 nt, Homo sapiens
gcccgggaggaaaccgacggcgcaagagaaacgcacgggaggcaagcaggggggcaaaggaaagaaggcaga

SEQ ID NO: 210244 - RNA, 76 nt, Homo sapiens
gaggggccaacggcggcgggggaaaaccaagacgagaagaggaaaaaacgcacagcaaacacaaagaacagagccc

SEQ ID NO: 210245 - RNA, 73 nt, Homo sapiens
gagagcgcgaaacgcacgagaagaacacggaccaggacacggaggagaacagggcaccgaagggggaggacaa

SEQ ID NO: 210246 - RNA, 95 nt, Homo sapiens
gggcgccgccccaccgcggcacaagcaggccggacccacggcgcggagcgcaccaccagagcaaaggggaccggacaacacacacaccagaagca

SEQ ID NO: 210247 - RNA, 46 nt, Homo sapiens
gagggggaagggcccaaagccagaagaggagcccccgcgcccaggc

SEQ ID NO: 210248 - RNA, 74 nt, Homo sapiens
ccaacacagagccaagcgccaaggaaagcgacgcagacacggagaaccggggcacaccagacgaaaagaacaag

SEQ ID NO: 210249 - RNA, 75 nt, Homo sapiens
aaagggggccagcaacccagacgcccacaggacaaggcggagaacggaaaagcaccaggaagcagagaggaccgc

SEQ ID NO: 210250 - RNA, 73 nt, Homo sapiens
gagccagagaagagggggcgggacgagcaggccccggggcggcgccagagacccagaggccgcacagcaggcc

SEQ ID NO: 210251 - RNA, 78 nt, Homo sapiens
gaaaaaaccccagaaggcagaaaaccaagcaaaggaggcagaaagagcacacgacggcgcccaaaacgagagaggaca

SEQ ID NO: 210252 - RNA, 86 nt, Homo sapiens
gaaaaggcggacgggaaggcgggagacgagaagccgaaaagcgcagcgagcggagccgccggaggaagcgcgccgaacgggagccc

SEQ ID NO: 210253 - RNA, 79 nt, Homo sapiens
agagagagggcccagcccggcaggacacgaagcgcagggacgcaagccccgagccccggccccaaagacccaaaacaga

SEQ ID NO: 210254 - RNA, 83 nt, Homo sapiens
gcccgggggcgggcggagggggcggcggcagcgacggcagcggcggcggcggacaaacaggcaccgcagggcaagacggacga

SEQ ID NO: 210255 - RNA, 78 nt, Homo sapiens
acaccagcgagagcggaggagcacaggcacggaagaagaccgaggaaagcccgcagagccccagggcacccacaagcg

SEQ ID NO: 210256 - RNA, 68 nt, Homo sapiens
aacacggcaagaccggaacgacagaccccgggcacaggaagacccaccgccggccaggaggagagcgc

SEQ ID NO: 210257 - RNA, 58 nt, Homo sapiens
aggaagcgcagacccgcggcaagaagagaaaggaaggaggggaaaagacaaacaccaa

SEQ ID NO: 210258 - RNA, 86 nt, Homo sapiens
gacagagcgccgcgaccccagcgggcccggggaggcaccgacgaggaggggagccgccaccaaaagcagacggaaaacccacgggg

SEQ ID NO: 210259 - RNA, 84 nt, Homo sapiens
aaggaacacgcacaaaaaagggcagaagagaagcaggaaggaggcagaggcacaccgaaagggcggggaaacaaagggaagagg

SEQ ID NO: 210260 - RNA, 74 nt, Homo sapiens
gaaaagaaagcaagacacgggcgcacgcgggacagagcacccgaagcgcccagccagcacgccacccccgggac

SEQ ID NO: 210261 - RNA, 57 nt, Homo sapiens
gaggagcggggccacaaggaagcgggacacaagagaacggaacgggagcggccgcag

SEQ ID NO: 210262 - RNA, 63 nt, Homo sapiens
aagccaggagcaggacgcagaagacgcagggccaaggacaaaaaggacccgacagcacacccc

SEQ ID NO: 210263 - RNA, 82 nt, Homo sapiens
ggcaccggacgggaggggcaagccagccaccgggaccccaggcggcaggccgaggagccacgccgccaggagcccgaacaca

SEQ ID NO: 210264 - RNA, 78 nt, Homo sapiens
ccgccgcccgcaggcccggcccgcccggacagagcccgggcgcgcagaagagggaaggcaccaggagaaggcaccggg

SEQ ID NO: 210265 - RNA, 78 nt, Homo sapiens
gcacaccgaggacaggaccgacagcacaacaccgcacggggagccaagccgaaacgaaggaggcccaaccacaaaagg

SEQ ID NO: 210266 - RNA, 79 nt, Homo sapiens
caaagcgcgccgccccgggcaaaagagggcaggcacgagcaaggaggagccccgaaaagcaaagaaaaaggaaggacga

SEQ ID NO: 210267 - RNA, 81 nt, Homo sapiens
ccggccccccaccgcaccggccggacacaccgaggacccccagcccacaagggccccaccgaacccccacgaggaggccca

SEQ ID NO: 210268 - RNA, 56 nt, Homo sapiens
ccccccaccccaccaccagaagccggggccggacgagaaagccgaaggagacgacg

SEQ ID NO: 210269 - RNA, 72 nt, Homo sapiens
ggaaacgaccggcagggagggaaggcaagagccaacccaaaaccaaacacggccgagaccccgacgcccgac

SEQ ID NO: 210270 - RNA, 76 nt, Homo sapiens
gggaccgcgggggcagggagccaaaggaggggcacccagaagaaggaagggacacagaaggaggggcagagggaaa

SEQ ID NO: 210271 - RNA, 47 nt, Homo sapiens
accgggcgggccacgcacgagaccaaacaaaccaaggcacggcggcc

SEQ ID NO: 210272 - RNA, 77 nt, Homo sapiens
cgccagcgcgacgacggaagaaccccgaaggggaacccggacaagcaacggagcgacaccaacagcaccggggcgcg

SEQ ID NO: 210273 - RNA, 62 nt, Homo sapiens
agaaacgcaccggaaaggccaccagggacgaagccacgacagcagagaggagcacggcagag

SEQ ID NO: 210274 - RNA, 87 nt, Homo sapiens
cagcgccaggacccaggccagcccgaacccgcaggaaggaccgaaggagaagaaggagaaggggaggagaaggcaagccggaaagag

SEQ ID NO: 210275 - RNA, 82 nt, Homo sapiens
accaggggacagagaagaccggagacgagaaggagacgccggacacagaagaacaagggcccccgcaaacgcggacacgccc

SEQ ID NO: 210276 - RNA, 76 nt, Homo sapiens
gcgagcagaggagcgaggcgccgcccgccgccacaaaggacggccagcagaagcaggcgagccccccgagaaaaag

SEQ ID NO: 210277 - RNA, 71 nt, Homo sapiens
aggccccagccgaacaagggaaggacaacagcaaggacagcaccaagggaggaagggggagacggaaccca

SEQ ID NO: 210278 - RNA, 76 nt, Homo sapiens
ggaaaggagaaacgagagcacgcggagaaagcaaaaccgaagaaagcaggccagggacggcagggacacggacagc

SEQ ID NO: 210279 - RNA, 79 nt, Homo sapiens
caagaacgaaaggaaacaagagaaacagcagggaggcgggcgccaaacagcggaagagccagcagaaaggaacagagac

SEQ ID NO: 210280 - RNA, 60 nt, Homo sapiens
cccgggcccccccgccggccggcccgggcaccgggccggaggccggggggggcacagagc

SEQ ID NO: 210281 - RNA, 77 nt, Homo sapiens
ggggcccggaggaccggcagccggggggaagacaaggaggggggagaggcaccagcaacagaccaaccgcagcaagc

SEQ ID NO: 210282 - RNA, 75 nt, Homo sapiens
cagccagagccagcagcagaacaggcggagaacggaaaagcaccaggaagcagagaggaccgcagaagggaagga

SEQ ID NO: 210283 - RNA, 79 nt, Homo sapiens
caacacacggacagcaccaaacggagagagccgaaaacgcaaggccgaagccaaagccagggaagcggggcggccacac

SEQ ID NO: 210284 - RNA, 84 nt, Homo sapiens
cccaggccgccggccccacaggaaaaaggcacaaacccagcacagagaagacggcgacaagcaaaagacgacgcagaaaggaga

SEQ ID NO: 210285 - RNA, 120 nt, Homo sapiens
gacacacccaggaagcagccagaccaagaacaaccgcggacacggagaggaaggcaccaggagacaaagccacaaaaacaccagaaaaaccaagcagaaaaggagcggcagcaaaaagcc

SEQ ID NO: 210286 - RNA, 80 nt, Homo sapiens
agggcagggagcggaccggaggcgccgccgcgacagcagcagccaggaggacgagagcccaagaccgcgcgacaggaacg

SEQ ID NO: 210287 - RNA, 76 nt, Homo sapiens
ggggccagacacggaagacgagccagccgacgggaacgggggggacaacagcaacaagaagaccagagaaaagaag

SEQ ID NO: 210288 - RNA, 35 nt, Homo sapiens
gcccccaagaggggaacagaccaagacacaaaaga

SEQ ID NO: 210289 - RNA, 56 nt, Homo sapiens
ccgcaccaacaaagacaggaggaaaacccagcgaggccccaccagagcgaggaagc

SEQ ID NO: 210290 - RNA, 77 nt, Homo sapiens
gaaaaacagccacccagaccagccccaggggaacagacagcacagagggccaagccagaacaggggaaagccaaggc

SEQ ID NO: 210291 - RNA, 78 nt, Homo sapiens
gacggaggacgagcaaaagagcaccgaaccggagaccgaggagagagaggccaccgcggcccacgagccgggggaccc

SEQ ID NO: 210292 - RNA, 83 nt, Homo sapiens
gcaaggggccggagggccggcccagaacgcaggaaacaggaacacgaaagaggaaaaacgcacaagaaaccgaagccaaggag

SEQ ID NO: 210293 - RNA, 77 nt, Homo sapiens
ccgaggcggacgagaagagaacacaccggggaagggcaccgggacaacagcgagcagcaaaaagaacgaaaagcgca

SEQ ID NO: 210294 - RNA, 104 nt, Homo sapiens
caagaagcaaaagagaagaaacgcacagccccgaccagaccagacggggaaccggaaaaccaagcaacgagacacacggaaaacgcacagagaaccacaggacc

SEQ ID NO: 210295 - RNA, 68 nt, Homo sapiens
agacccgaagcgaaaaggagccaaaagaacggagggccaaggggggaaagcacggagcggagagcggg

SEQ ID NO: 210296 - RNA, 41 nt, Homo sapiens
cccaaaggacagccacagaagcgggaaggacgagcagaaga

SEQ ID NO: 210297 - RNA, 72 nt, Homo sapiens
ggcgacgaccgcacaacagaacaaagggcacaagcccccgaagacaagaggccggggagaccgacaaccccg

SEQ ID NO: 210298 - RNA, 59 nt, Homo sapiens
cagcagccgccggagccagccaacgagcggagagagggccaccaaaaggagaccccccg

SEQ ID NO: 210299 - RNA, 79 nt, Homo sapiens
aaaaacggaaacacgacagaagcagggcgaaccagagaaaacggcaaggaagcgaacagcgccgagcgggccaaaacag

SEQ ID NO: 210300 - RNA, 69 nt, Homo sapiens
aaaagcagagcccaggagaaaccggacgcgacggggcccggaccagaacgccgggagccgccaggagaa

SEQ ID NO: 210301 - RNA, 98 nt, Homo sapiens
gcccagcagacagccgaggggagcgcggggcccggcagaaagggccaaccgccccccagcagcaggcacgggcgaaccccgagccccgccccacgccc

SEQ ID NO: 210302 - RNA, 65 nt, Homo sapiens
agcacaaagggagggggcagcccgcaggagcaagcgcagcaccaccaacagccggcagaggccgc

SEQ ID NO: 210303 - RNA, 79 nt, Homo sapiens
gcgaccgagaccccgccccccacaacgggagagcgcgacgaggagcgccaggaaagaggcagagacgaagcagaagcga

SEQ ID NO: 210304 - RNA, 49 nt, Homo sapiens
ccgcacaccacacccgcgccgacaggagaaagaagacccggagaagagg

SEQ ID NO: 210305 - RNA, 58 nt, Homo sapiens
ggaccacagcaccacagcccgaagaccagcggggacccaggcgcggagcgggaaagac

SEQ ID NO: 210306 - RNA, 77 nt, Homo sapiens
ggagaaccagaagcgcacgaaccaagaaagagaggcagacaacgggccgggaagggccacggcgacgccgacacaag

SEQ ID NO: 210307 - RNA, 69 nt, Homo sapiens
caccgcccagaccagagggagaaaaaaaaaacccagaggcaaggaaagcagaacaccagagaggaccaa

SEQ ID NO: 210308 - RNA, 80 nt, Homo sapiens
cggggccgacgagccggaggggcgccgcgggagcacaccgacagagaacccaggccaacacacagacagaggcagccacc

SEQ ID NO: 210309 - RNA, 79 nt, Homo sapiens
ggacccacggaacgaggcgaggagccaggagcagcagagggaagccccagagggcccgccagaccagaagcacccagag

SEQ ID NO: 210310 - RNA, 66 nt, Homo sapiens
ccagcccggagcgggcacaggccagggacaagagaaaaaaagggcgggcgaacaaaaagagcagag

SEQ ID NO: 210311 - RNA, 54 nt, Homo sapiens
cggacaagggaggcggaagaaggaaccccgaagagcacagggaacaaagaggaa

SEQ ID NO: 210312 - RNA, 86 nt, Homo sapiens
ccaggggacggggccaccggcggagcggacccacaccccggaccgagggacgcgggcacaccccaacacccgccaccccgaggcag

SEQ ID NO: 210313 - RNA, 82 nt, Homo sapiens
gggagcgagaccagagcgccacggccacggcccccacagagcgacggagaagaaagcacggacaggcaggaaaagaaaaacc

SEQ ID NO: 210314 - RNA, 80 nt, Homo sapiens
aacagaagcccgacccaagcaacagccaccggcagaggccagccgacaaaagccagggagacccagggagaaacaccagg

SEQ ID NO: 210315 - RNA, 75 nt, Homo sapiens
cagcaagcccaagccaggcaaggcgccaccggaagaaacgggaggggaggagccgggaaagacagcgccaagcca

SEQ ID NO: 210316 - RNA, 78 nt, Homo sapiens
gacaagcaggcgacaggccgagcgacaggaccgcagaacgcagagaacagcaaaccacagggacccgagggacaaaaa

SEQ ID NO: 210317 - RNA, 78 nt, Homo sapiens
cgagcaaagaagagcccgaacaaacaaacacccagaaacaagagcgcacacagacccgggcccaacggaccgaaaacg

SEQ ID NO: 210318 - RNA, 56 nt, Homo sapiens
agggagcccaaaacaagaagcagacaacacacacgcacaagcgaaaccaagagaga

SEQ ID NO: 210319 - RNA, 81 nt, Homo sapiens
cggacggaaggcccccgacagcagaccaggccggagcccagacgcgggacaggcacacagagaaaaaaagggaacaaaaca

SEQ ID NO: 210320 - RNA, 69 nt, Homo sapiens
caggcgcagccgggcaacgcgcacggcccagggaagaccaccagaccgcaaaacaggaaagagcccgca

SEQ ID NO: 210321 - RNA, 53 nt, Homo sapiens
aacccgagaaagggcaaccgccgggaccgggcagaggcccccaccaggaagaa

SEQ ID NO: 210322 - RNA, 79 nt, Homo sapiens
aaaagaccacggacccaagaggaagccagccagaacaacgccagaaagaaagccaccagagagggcagccggggagaag

SEQ ID NO: 210323 - RNA, 74 nt, Homo sapiens
acagagaagggaggaagaaacagagcggcagacacgcagcaaggcagagcccccagacagagcagccacaacag

SEQ ID NO: 210324 - RNA, 59 nt, Homo sapiens
ccaaaccgcccgagggaccagggcagcgaagccggccagcgcagaaccgcagcccagcc

SEQ ID NO: 210325 - RNA, 67 nt, Homo sapiens
gaggagaggccagcaggccgcgacccagcacagacgggaagggaacggcgccaccgagcacagaaga

SEQ ID NO: 210326 - RNA, 80 nt, Homo sapiens
gcggggcaggagacggccgagaggcaagaagccagccaggaggcgcgcagcagagcggaaagggccaaaggcagaggcca

SEQ ID NO: 210327 - RNA, 57 nt, Homo sapiens
cccaggcggaacgcccgccccgcagagaggagggacaggccacgggggagaggacgg

SEQ ID NO: 210328 - RNA, 74 nt, Homo sapiens
ggcaacggggcacgaccggggccgcaagcaggaagaaaagagcggggcaaggcagccagcagccaaagcagcag

SEQ ID NO: 210329 - RNA, 73 nt, Homo sapiens
aggacacaagcggcgagagcgccaggaacagggcacaaaggccggggaggggagggcccaggaagacagagcc

SEQ ID NO: 210330 - RNA, 60 nt, Homo sapiens
gggccaaggcgcgcaggcgccgcacaagacacgagacgacccgggccaggggacggcccc

SEQ ID NO: 210331 - RNA, 68 nt, Homo sapiens
gaggagagagggagagccaaagaagacggggacagaagacccacgccgagccgcggcagaaccacaag

SEQ ID NO: 210332 - RNA, 74 nt, Homo sapiens
accgcagcgagggaccagcgggccggccgccaagacacccccggcccggcacagaaaacacgcaacaccagcgc

SEQ ID NO: 210333 - RNA, 64 nt, Homo sapiens
agaagacccgacggaccccagcgccgggcagcgagaaaaacggcgcagaacaacccggcgcaca

SEQ ID NO: 210334 - RNA, 81 nt, Homo sapiens
agaggcggcaggcgaagccccggagaaccacccggaggagacggggcagacaacggagcccgggcgccgaaaagcgaaaag

SEQ ID NO: 210335 - RNA, 76 nt, Homo sapiens
aagcagccgagagacagagaagaccggcggcacacggacaaccgggcgaggggcagggaccaggcacacgcagaag

SEQ ID NO: 210336 - RNA, 82 nt, Homo sapiens
ggaccccgagaccggagacgcaccccaggcacccgggcccaaaccagacaaagccacagaaaaccagaagcgaaggaaaaac

SEQ ID NO: 210337 - RNA, 77 nt, Homo sapiens
cgcggcgccaccagaccagcgcggagcgagcggagccagggcagccccagcgcagcagcacggacagggcaccagga

SEQ ID NO: 210338 - RNA, 83 nt, Homo sapiens
cccgaaggcaggagcagaggaaaaaacgaccaagccagagaacagcccccacgcagcccagaaggacacgcccaccaagaaag

SEQ ID NO: 210339 - RNA, 85 nt, Homo sapiens
cagaggaggagccagaagcagaaggagggagaggagcagccagggagcaagagcagcagcgacaaccagcagcaggcagcccccg

SEQ ID NO: 210340 - RNA, 70 nt, Homo sapiens
aaagggacaagaagggcaaagccgaaccggaaagaacagcagcaaggcggccaaacgaaaccagaggagg

SEQ ID NO: 210341 - RNA, 86 nt, Homo sapiens
aggcaacaaaacacaaacggcaacaaagaaacggccaggagagacagcacaaggggcccaccacacacaaccacgcagcccagaga

SEQ ID NO: 210342 - RNA, 80 nt, Homo sapiens
cacaaagacccccagacacacacacccaacccaaaccaaggaacccggagccccacggcgggacccgggacagccagcca

SEQ ID NO: 210343 - RNA, 77 nt, Homo sapiens
caaacgaacgaagaaaggagggaaggaaaccagcacaccacaaagaggagacaagagccgacggaccgggggggccg

SEQ ID NO: 210344 - RNA, 58 nt, Homo sapiens
ggccacgccgaccgcagccagacacgcagcggccgaggcaggggaagagagcggcccc

SEQ ID NO: 210345 - RNA, 36 nt, Homo sapiens
cccagacaccaggcaagaccgccgaggacaaccgag

SEQ ID NO: 210346 - RNA, 76 nt, Homo sapiens
caccaccgccgccccagcgggagagaggagcaccagggccagacggccgaacccgacccaaggaccacccacccgg

SEQ ID NO: 210347 - RNA, 52 nt, Homo sapiens
cagacgcagggcgcccccggcaagacacgaagacgccaccggagagagaaaa

SEQ ID NO: 210348 - RNA, 52 nt, Homo sapiens
aacagccccggaggagacccacacgaccagcgccggaggagaagacgcgcaa

SEQ ID NO: 210349 - RNA, 74 nt, Homo sapiens
caccgccggcgcgggaaacgggcgaagcgacgagccgcgaggagcccgacggagaagacacggaaacccggagc

SEQ ID NO: 210350 - RNA, 34 nt, Homo sapiens
gacgcaccacgagggacgcgcagaaagggccgga

SEQ ID NO: 210351 - RNA, 71 nt, Homo sapiens
ggacggaaagaagaagaccagcagcgaaaacggaaacacaagagaccagagagagcccagaggaccggcgg

SEQ ID NO: 210352 - RNA, 67 nt, Homo sapiens
ggcggcgacggccacaggggcggcgacggcgcaggcgaagcgaaacagggcggagaacggaaaagca

SEQ ID NO: 210353 - RNA, 68 nt, Homo sapiens
aagaggcccggcaagcggccaaaggggacagaaagcgggacacaagcaggagcacagaccccgaaaag

SEQ ID NO: 210354 - RNA, 72 nt, Homo sapiens
gccggcccggggacgccgacggcgacggcaccgggagaaagacaggaagggaaggggcggagacgggcggaa

SEQ ID NO: 210355 - RNA, 71 nt, Homo sapiens
ggagaacaggccaaaaggggaccggcggagcgaggaggaaacaacagacgggaagagaggggggagcaggg

SEQ ID NO: 210356 - RNA, 83 nt, Homo sapiens
caccaggcagccaggccaggggaagcccggccccaggggcaagggagcgggggcacgggggaaggcggcggggaagagccccg

SEQ ID NO: 210357 - RNA, 74 nt, Homo sapiens
gaaaccaagcaccagcgagacccagggaagagccagaagacaccagaccgcggaccggagagaacagaaaaaaa

SEQ ID NO: 210358 - RNA, 80 nt, Homo sapiens
cacggggcacggaccaacgggaacaaaacacacacccgcagacaagaacggagagggaaaaagcgcaagaagcgagcaga

SEQ ID NO: 210359 - RNA, 82 nt, Homo sapiens
gacggccgccggagccgcgaggccaagagcacagaccagcgcgcgaccggagccccacagcggcacaggccccagccaagcc

SEQ ID NO: 210360 - RNA, 69 nt, Homo sapiens
gaggaacgcgcgagggagaaccagccgccggaacagggagcacccgccgcaagacgaccccgaccacaa

SEQ ID NO: 210361 - RNA, 76 nt, Homo sapiens
gggaagcggcccccgggcgcgggcgaggccgggcggcgccgccccaccggacccgcaggagaagcagcacaaaaag

SEQ ID NO: 210362 - RNA, 70 nt, Homo sapiens
ccgcagccaccaccaagggaagacagacggagaaggaacccggccgggcggagcagcgggaagaaggcag

SEQ ID NO: 210363 - RNA, 62 nt, Homo sapiens
aaacacagaccccaaggacccaagcaagaagaaggccccagcaccgcccaaggcagccccgg

SEQ ID NO: 210364 - RNA, 81 nt, Homo sapiens
caacacgagcacaagacccaaaaaggcgacgcaaccaagcaccgaaacagcaggagaaagacagcaaagaaaaggagaaga

SEQ ID NO: 210365 - RNA, 72 nt, Homo sapiens
cacccaaacgcagaaacagagccacgggggggacgcagccaaaagaaacaggacccagcagccagcgaagcc

SEQ ID NO: 210366 - RNA, 70 nt, Homo sapiens
gaccgggcagaacaacgaacagaagcacaaccagagccggccccgggaaaggagcccgccacagagggag

SEQ ID NO: 210367 - RNA, 78 nt, Homo sapiens
gacaaagccagcggaggacaccaagacggggacgggaaaaaaggcgaagcgagcaacagggcgcagagaccaggcccg

SEQ ID NO: 210368 - RNA, 77 nt, Homo sapiens
agggggagacgcagcggcaccacaagagaaaggaaagggcggcaggaagacaggaaaagagaaacaggccccaacga

SEQ ID NO: 210369 - RNA, 63 nt, Homo sapiens
ccgagaccgagaagcccagcaaggagcagggacaagacaggaagcccaagcagcaaccaaaag

SEQ ID NO: 210370 - RNA, 55 nt, Homo sapiens
ggagcccaaacgaaaagagaagacacgcagagaccagaaagacccaaggagaaca

SEQ ID NO: 210371 - RNA, 88 nt, Homo sapiens
ccaccccggcgaagcccaggagcgaagagacgggaacagagaagcgagcggaggagacggaggcaggagaggagggaagcaggaaacg

SEQ ID NO: 210372 - RNA, 47 nt, Homo sapiens
ggcaacggacaaaaccacaaacggacaggaacggggagggaggcggc

SEQ ID NO: 210373 - RNA, 78 nt, Homo sapiens
agcccgagccggaaggacacgacacagaagcaacggggacggggcagcccgacggagagccaaccagcagagacacca

SEQ ID NO: 210374 - RNA, 86 nt, Homo sapiens
ccgaacgaagggccaagaaggagaagcagcgcggaaaagcagaaggaccgcgaagccacacccgggaccacccagacgccgccgca

SEQ ID NO: 210375 - RNA, 77 nt, Homo sapiens
cagcggccgcgcgcagcacgcgccgccgaagccagaggacaacagagcaaccagccgggcaccaggaaccccaggca

SEQ ID NO: 210376 - RNA, 81 nt, Homo sapiens
aagagggcccacccagacccccggcagaaggcccgaccgccggcgccacagccacagcccggagcggaggcaacgggcgac

SEQ ID NO: 210377 - RNA, 48 nt, Homo sapiens
aggagaaaaccgggcgcagccgccggacccgacgacacggccgcccag

SEQ ID NO: 210378 - RNA, 69 nt, Homo sapiens
cagggacagcgcaggcagcagggccagagaaacagaaagggaagaacagagagcgcagcccgacaccac

SEQ ID NO: 210379 - RNA, 75 nt, Homo sapiens
cgccagaacccccacgcacccaggaccgcgcccacaggacagagcaccgaagaagcccgaagacacaggcccccc

SEQ ID NO: 210380 - RNA, 74 nt, Homo sapiens
acaacaagagcccaaacaagagggcggagaacggaaaagcaccaggaagcagagaggaccgcagaagggaagga

SEQ ID NO: 210381 - RNA, 87 nt, Homo sapiens
gagaaggaccaagaaccagacagccgacccaaaccagaagacggccaggaaggggggccgagccagacaacaagaacggacaaggaa

SEQ ID NO: 210382 - RNA, 62 nt, Homo sapiens
gacgccgcccggcccagggcagcgccagagcacagaacacaggcacagaagcggcaggaaag

SEQ ID NO: 210383 - RNA, 74 nt, Homo sapiens
accgaccccggggcccaaacacaacgcccgggaaggagggggcgaaaaagaaacagcaccccacagcgcgacag

SEQ ID NO: 210384 - RNA, 68 nt, Homo sapiens
cagcagccggggcagcccagcggccgcggacagaacaacggcccagccccacaggacaaagagaaagc

SEQ ID NO: 210385 - RNA, 71 nt, Homo sapiens
cacgccagcaaacgggccaagcaacaagggaagaagcgaccgaccccacgcggccacccaccgcagggcgg

SEQ ID NO: 210386 - RNA, 53 nt, Homo sapiens
agacaacagccaagaagcgacccgagaagacaggagaaggcaccccaagcccg

SEQ ID NO: 210387 - RNA, 65 nt, Homo sapiens
gggaagggacaaaacagaggcaacaagcacaccgacacagaagcccacaaagccgccaccgaccg

SEQ ID NO: 210388 - RNA, 76 nt, Homo sapiens
acccgaagcccccaaagagagaaccggagagcacccaacagccccagccccagaggaaggaagcacgcagagaaag

SEQ ID NO: 210389 - RNA, 82 nt, Homo sapiens
aggccagcaagacgcgcccgccacgaggacagcgggaaaagcaggcgccacccggccaaggaaaccagaggaagaagcagag

SEQ ID NO: 210390 - RNA, 75 nt, Homo sapiens
ggacaagcgaggaagcaagggcaggcacgaggggaaaccaggaacagccagcaagaggagacaaccagcaacaac

SEQ ID NO: 210391 - RNA, 78 nt, Homo sapiens
ccgcggacagagacaacaccgagagagaagcagggcaagaacccgccacacaaggcgaacagagggcagcaggagcac

SEQ ID NO: 210392 - RNA, 57 nt, Homo sapiens
cagcggcggagacagacggggcacacccggagcgcccgccagccgggacgaaccaaa

SEQ ID NO: 210393 - RNA, 39 nt, Homo sapiens
cgaggaaccggaccccggcagcgcccacaaaacacggcc

SEQ ID NO: 210394 - RNA, 67 nt, Homo sapiens
gaagcagaggaagaacacaaaggagaggcagacaacacacacgcagcaacgcacccgcccccaaaga

SEQ ID NO: 210395 - RNA, 75 nt, Homo sapiens
gaacggcccccccccagcccgccccaaaagcacgcaaacaagagaacgggcccacacaacccaggcaaccaacag

SEQ ID NO: 210396 - RNA, 83 nt, Homo sapiens
aaaggagacacggaccccccacagaagaaaagcggccaggcgagaagacagaaggagccacagagaaccccagcaaagcgaag

SEQ ID NO: 210397 - RNA, 75 nt, Homo sapiens
gaaaagaaagcagggaaaaaagcagcaaacacgggacaaaaaccagaccaggaaggccaaaggacaggggaaaca

SEQ ID NO: 210398 - RNA, 68 nt, Homo sapiens
cagaacacaggggccggccaccggccgagcacaccacaggccaaacggaggaaggcaccacggcgcca

SEQ ID NO: 210399 - RNA, 74 nt, Homo sapiens
ggcaaaggaccagaccgagccagagggagcgaacgcaggaaggccaggcaggacgacgcggagcagggacacgc

SEQ ID NO: 210400 - RNA, 56 nt, Homo sapiens
gggcaggcggaagcgccagaggagccaccagagaagaaggaccagacagcaaacga

SEQ ID NO: 210401 - RNA, 63 nt, Homo sapiens
cgcccacgggccaggcacgcaaccgcccaccgcccacacacagaagccccccagaaaagaccc

SEQ ID NO: 210402 - RNA, 55 nt, Homo sapiens
gccaccccacagacggcggggcgcgaagggggagcagggacagcccaggacaaac

SEQ ID NO: 210403 - RNA, 61 nt, Homo sapiens
acccgccaccgccaggccaggacagaccgaaaagcaacaacaacggagaagagcaaagaac

SEQ ID NO: 210404 - RNA, 70 nt, Homo sapiens
aaaacacagcaccggaacagcagccgccaccaggagcacccagggaagaagggggaggaggcagggaaag

SEQ ID NO: 210405 - RNA, 74 nt, Homo sapiens
gcaccggagacgccgaaggaccggaggaggaccacgccgcaccccacaagaccacagacacccgagccgaaccg

SEQ ID NO: 210406 - RNA, 82 nt, Homo sapiens
ggcggcaccgggaggccgggccgagcgacaagggaggcgaggacggacaaaaggaaacggacgggaggccagccagcagaag

SEQ ID NO: 210407 - RNA, 74 nt, Homo sapiens
agcagccccccgggggaagaagagacacaaaaggccccagaggcaacagggaagaagcacaggccgagaccaaa

SEQ ID NO: 210408 - RNA, 35 nt, Homo sapiens
aaagccgggaagacaaagggagaaaacaaccaaga

SEQ ID NO: 210409 - RNA, 70 nt, Homo sapiens
gacaagccccaaaagcagccgggaaaggagccggccggcggcaaaggagcccaaacaacgacagcccaga

SEQ ID NO: 210410 - RNA, 90 nt, Homo sapiens
gcacaccgaccagccgcacgccgaccggcgccgggagaccgggccagaagcggacccagaagaggggagcagcaaggaggaagacagccg

SEQ ID NO: 210411 - RNA, 81 nt, Homo sapiens
gcacagccgacacagccccgggacccccaagagcacaggcagaaggcacaaggacccaacagaggaagccgcaagaaacgg

SEQ ID NO: 210412 - RNA, 68 nt, Homo sapiens
gaacaccaaaccagccaaagacgccacagcaccggcaaaaacagaaccccccggcagaagcacgaagg

SEQ ID NO: 210413 - RNA, 74 nt, Homo sapiens
gaaaaccaaacaccaagcccacagagggaaagaagaggccccagcacacggcgcacaagcgcgcgcacagagcg

SEQ ID NO: 210414 - RNA, 76 nt, Homo sapiens
gcgcgggggaccaccgggaggcaacacggccaagaagaggaaaggcccaaagaggccggccccgaaccagagaccc

SEQ ID NO: 210415 - RNA, 84 nt, Homo sapiens
gcccgcacccgcgccccacgcgccgccgaggaccggcccggccgggagccccgcccgcggcgaaagagcggaggacccggaccg

SEQ ID NO: 210416 - RNA, 62 nt, Homo sapiens
agaaaccagcccggacagcgcaccccacgcggccggcgggaaaacggcacaaggcgacgagg

SEQ ID NO: 210417 - RNA, 81 nt, Homo sapiens
caagaggcgggcaggagcggcggccaggccagacccgaaggccaggagacccgaccccaagccacgagagaagaaagaaaa

SEQ ID NO: 210418 - RNA, 72 nt, Homo sapiens
gaaaaaagacagcaaaaacaaaagcgagagaggaaaacgcgagagagacgcaaccagcacaaagaaaaaaga

SEQ ID NO: 210419 - RNA, 74 nt, Homo sapiens
cggaagcccacgggcaccgagcccgcccacgacggagaggaggggccgcaaggccaggcgcgcagaggcaccca

SEQ ID NO: 210420 - RNA, 82 nt, Homo sapiens
gccggagacaccagcaggcccacaagccccgcgagccgggcagcagcgagggaccaagcagagaaaaccgaggaggggccgg

SEQ ID NO: 210421 - RNA, 80 nt, Homo sapiens
aaccgacccaaggggccacccccgcgcgcgcccgccaccagggccgcgggccccaagaaccagaccacaacacgaacgga

SEQ ID NO: 210422 - RNA, 79 nt, Homo sapiens
gggaccgggcaagggaagaaaagaacacgacgggccaaccacaccagcaaaacaggccacaagcggcgacaaggacgca

SEQ ID NO: 210423 - RNA, 88 nt, Homo sapiens
cgggaggccggcgccgcagcccgggcccaggccccggcagcgccgggacaagcgaagagagagaaacgaaaaagaggaaggagcgagg

SEQ ID NO: 210424 - RNA, 75 nt, Homo sapiens
cgcgagagaggagagccacacaacccacccacagcaccaagcagcaaggcgcagaaaggccaagagggaggcaca

SEQ ID NO: 210425 - RNA, 73 nt, Homo sapiens
gaccccagaagccagaaagggacgccagaggggaagccgcacgagggagagacggaccaaaggcgcagcagac

SEQ ID NO: 210426 - RNA, 81 nt, Homo sapiens
ccagcgcggcgcacgacccccaaccaggcaagggacgaacagcggggacgccccagcagaccgcccaggagaggaaagcag

SEQ ID NO: 210427 - RNA, 75 nt, Homo sapiens
cggacccagcgggcgccgcacaccacacccaaccgccacggaaggaaaaggcaacagaggccccgcaaaggagga

SEQ ID NO: 210428 - RNA, 74 nt, Homo sapiens
agaaaagaacacgccccaagagcggagacacacaagggcagccaaacgagacaggaacaaaagagaaaggcaag

SEQ ID NO: 210429 - RNA, 85 nt, Homo sapiens
aaccggaagaacgaccgcagcgcaaggccggcggaagaacggggcaggaaaggaggaggcaaaacagacagaacgcagaaagcag

SEQ ID NO: 210430 - RNA, 84 nt, Homo sapiens
gggcgccggagccgaggcgagcgccgcgcgcaccacgggaggccccgaaggagcaaggaaacgcgaaccaagggccacggggag

SEQ ID NO: 210431 - RNA, 78 nt, Homo sapiens
cgcgcaggaccccggcggcgcgcggaccagggggcggcgccaggacagcgacagggagagaccaaagaaccgagcagc

SEQ ID NO: 210432 - RNA, 64 nt, Homo sapiens
gcaaggcccggcgcaaggccagggagcacgagacagcgccggccccaacgagggagacaccaag

SEQ ID NO: 210433 - RNA, 69 nt, Homo sapiens
ggagcacgacacggccagcccggcgccaccgcacgagaccgaccagaaacggccggcggcccggcagac

SEQ ID NO: 210434 - RNA, 71 nt, Homo sapiens
ggcaaccgggaccagccaaaggcagggaagaaaaagaagacaccagagaaacacgagagcagcggagaacc

SEQ ID NO: 210435 - RNA, 79 nt, Homo sapiens
gcgcagcaccaacgcagcagaaaaagcggggaaaacaaaaaaaagaaggagggaagagggggccaggaccaggccccac

SEQ ID NO: 210436 - RNA, 61 nt, Homo sapiens
cagggcaggaggagcgccagccccaggcacccaggaacgaggacagccagggccgccgggc

SEQ ID NO: 210437 - RNA, 80 nt, Homo sapiens
gggggaaaggccggacggcccaaagaggagggcgcacagcgcccgaggacagacaagcagaccggaagaccgacggaaga

SEQ ID NO: 210438 - RNA, 81 nt, Homo sapiens
agaaccaccagcaaccaaggacccccaaaaccacaaacgccacgcagaacagccaccaaggggacaggcaaagcccgggag

SEQ ID NO: 210439 - RNA, 74 nt, Homo sapiens
ccacgccgggaaaacaacagccagcagggcagcgcgcgcagcaggagccccccaaccaggcccaggaaggaacc

SEQ ID NO: 210440 - RNA, 81 nt, Homo sapiens
gaacagcggacaagaagaagacagaacgcccccaccaccgcaaacagagcaaagaaggacgcagagccagccacacagccc

SEQ ID NO: 210441 - RNA, 72 nt, Homo sapiens
ggcagccagcacaagacagacaaacggccaagccagcagacggggccagcaagcacaccaagagcaaggaaa

SEQ ID NO: 210442 - RNA, 73 nt, Homo sapiens
aagcgcccggccggaggcaggggaaaggacgagaacccccgcgaaccagaggaacccagcgagcgagagcgga

SEQ ID NO: 210443 - RNA, 78 nt, Homo sapiens
ggccgaaccccgaaggaaaggaagcaccgggcacaagacgaagacccccgacgcccagcccgaggcggaaacagcgcg

SEQ ID NO: 210444 - RNA, 61 nt, Homo sapiens
agggacaagaagggcaaagccgaagagccgaggaaggacagggcgggaggggccaccgcca

SEQ ID NO: 210445 - RNA, 79 nt, Homo sapiens
cacagcccgccacaccgccggggccggagcgccgccgccgccgccgcggacaagagagggaggcgcaggcccgagaagc

SEQ ID NO: 210446 - RNA, 49 nt, Homo sapiens
gaaaggcggcaggaaagcagaacgcaacccccagccacaacgcgaaccg

SEQ ID NO: 210447 - RNA, 58 nt, Homo sapiens
cccgccagccccgagcaggggaccacaggggccaaacggaaccgaaggagaagaggag

SEQ ID NO: 210448 - RNA, 51 nt, Homo sapiens
gcgaaaaccgacgccaaaagcagaaagaggccaagccgacgccagcgggcg

SEQ ID NO: 210449 - RNA, 84 nt, Homo sapiens
cggcccgcgggaagcaggacgcgccgcgccccaagaacaccagcaggaaaaaagagcggcagaaggccaaacggccgagcaggc

SEQ ID NO: 210450 - RNA, 75 nt, Homo sapiens
gggaggcgggagaaggcgcaacgcggcgcgggaaagccggggccccggggacccgcggcacggacaggccccagg

SEQ ID NO: 210451 - RNA, 60 nt, Homo sapiens
gagcgagagggaggcgccccaaagaggaaggcacccacagaaggagaacaagcagagcac

SEQ ID NO: 210452 - RNA, 62 nt, Homo sapiens
gggcacccagagcagggaggcaggagcgagaacccgagcagcgccagagcaacacaccgcgc

SEQ ID NO: 210453 - RNA, 106 nt, Homo sapiens
acaccagaagaggaggaaaaggcccgagcagggaccgccgcgcacgggcaaggcgacaagcaagaagaaagagccaccagcacaaaggagccaaaagagggacgag

SEQ ID NO: 210454 - RNA, 58 nt, Homo sapiens
cgcagggcgcccccgacaaaaggagccacggagaaagaaaaaagaaagaagcccgaac

SEQ ID NO: 210455 - RNA, 93 nt, Homo sapiens
gaagccagggaaggaaccccggccaccaggagaccccagccgaaccccaggacaccagggcgaacgcggcaaggccacaggcaaggccggacg

SEQ ID NO: 210456 - RNA, 74 nt, Homo sapiens
ggaacaggcagggccaggaacaaccgaaacagaaagaagcgggcacaggccccggcaacacgccccaccccacc

SEQ ID NO: 210457 - RNA, 82 nt, Homo sapiens
accaggacccgggcagcaggcagcggcagcaccgggagcagcagaggaaggacggcggacgaacccaaccccagagacagac

SEQ ID NO: 210458 - RNA, 74 nt, Homo sapiens
caagaagggaagagaacccaacagcccaagccggagggcgggcccaagcaccagcgaggacgggaggggcacac

SEQ ID NO: 210459 - RNA, 52 nt, Homo sapiens
accgcaaaggggaccaacgcagaggaacccaggccagagagccaacggacca

SEQ ID NO: 210460 - RNA, 96 nt, Homo sapiens
agagacagacaaggcaaagcgaaaggcaccgcaacaacgcccagcgagcaagcgaagcgacaggaccaacacaggacagaaggcaggaccccaagg

SEQ ID NO: 210461 - RNA, 70 nt, Homo sapiens
gaaagcccccagagagacggacaagcaggacgccaggggcgcaaaacgggcagggggacggacagagagc

SEQ ID NO: 210462 - RNA, 89 nt, Homo sapiens
ggagacaagaaggccacggaagcggcgccaagaccacccggacaagaacccggagagggcgagaaggggcacgggccgggccgccagga

SEQ ID NO: 210463 - RNA, 71 nt, Homo sapiens
gagccaacgccggaccagcaaggcggagcccggcaaggaacagagaccggcccaccggagggcagcgagaa

SEQ ID NO: 210464 - RNA, 80 nt, Homo sapiens
gcgagaggaaccagaaaaagggagcacaaggaagagcgcgacgagaaaccaaagaaaaaggaaacaaaggaacacagcca

SEQ ID NO: 210465 - RNA, 67 nt, Homo sapiens
agaaagcaggcgaacccgcggcgcaaaacggagcacagcaagcgggagcaggcagaccaaaggaaca

SEQ ID NO: 210466 - RNA, 71 nt, Homo sapiens
ggagaagccgaaagaaaagaaccaaacggcgagaagacaccggcaggccaaagccacccccaaaggcagag

SEQ ID NO: 210467 - RNA, 81 nt, Homo sapiens
cacccgccccgccagccaacacagagcagcagggcgaccggacaaagacggaacaggaaaaaggaaggcagcagcccagag

SEQ ID NO: 210468 - RNA, 54 nt, Homo sapiens
acgccccagcgaccccacaggcaagaaacagaacgacagcccgcaccgacgccg

SEQ ID NO: 210469 - RNA, 75 nt, Homo sapiens
gagacaggccgcaacagggggagaggggggaccccaaccagaagaggagcgcccgcgcccaggcgaaggcagggc

SEQ ID NO: 210470 - RNA, 75 nt, Homo sapiens
gccgacccaggccgccggccccacaggcacacaggacaggccccccagccaccagcggggcccacaggagggcac

SEQ ID NO: 210471 - RNA, 74 nt, Homo sapiens
caaaagagccaaaccagccgcccggccggcgaagacagcacagagcccacagcgaaaaaagcccggcgaacagc

SEQ ID NO: 210472 - RNA, 72 nt, Homo sapiens
gcgagcaggagcacgaaggggagaaaagggaaggccccaagccaagagaggcagcacaagcaggagcccccg

SEQ ID NO: 210473 - RNA, 58 nt, Homo sapiens
aaagagcaacccgcagcagaagaggacggccggaaaacaaggaaaggacaacaccaca

SEQ ID NO: 210474 - RNA, 75 nt, Homo sapiens
agacccagacccaccagccacaaaccagccagacgaaacgccaagagagaaacgaggcacaagcacccacgccag

SEQ ID NO: 210475 - RNA, 54 nt, Homo sapiens
gcgcccggccggaggcaggggaaagccaaaagaagaacccggacccgaccgaag

SEQ ID NO: 210476 - RNA, 86 nt, Homo sapiens
cggccggacggaaagcgacaagggaggcgccgccagcggccgggaccgaacaggcggagagcgacgcaggggaggacagggaacgg

SEQ ID NO: 210477 - RNA, 77 nt, Homo sapiens
cgaaaaaagagagggggggaccgaccgcaacagaacggacccgagagcccgagggaaaagacaggcaacaggaaagc

SEQ ID NO: 210478 - RNA, 79 nt, Homo sapiens
gccgccggccgaaggcccgagcgcccgaggcgcgggaggggggaccgggacgacgcagcacagagaggaaacgaggaaa

SEQ ID NO: 210479 - RNA, 78 nt, Homo sapiens
cgaggagcaaggacacaccaaccacgcaccaaaaggaaccgagacagaaagaggaccagacaagcagaaccagacaac

SEQ ID NO: 210480 - RNA, 83 nt, Homo sapiens
cccgcgaaaccaggcaaggcgggagagagggaggaacacgggacgacggcgggagcgaccgcggggcccggccgcagcggaga

SEQ ID NO: 210481 - RNA, 56 nt, Homo sapiens
ggacccggcgcagaccggaaggaggacggccaaccaagcaggcagcagcagaagga

SEQ ID NO: 210482 - RNA, 79 nt, Homo sapiens
ggagacccaggcgggacagagggagccaggcagaggcgagcagcaaaccgagcgcaagaggcaagggcccggcccaccg

SEQ ID NO: 210483 - RNA, 84 nt, Homo sapiens
agcaaacagacagggccgcagcccccagccccaggaggggcggagcagcccgccagcccagccccccccagcagccgccagagc

SEQ ID NO: 210484 - RNA, 90 nt, Homo sapiens
cccgacgggcgggagagcgaaccccgggacacgcaggaacggcccagcacaagaccgcgacagacaacggcaagcggagaagagcaaggc

SEQ ID NO: 210485 - RNA, 78 nt, Homo sapiens
cagcaagccgagaaagggaggcggaacaggagagccaaaggaggcacgacagcagaggaagagaagcagcgaagccga

SEQ ID NO: 210486 - RNA, 82 nt, Homo sapiens
gccgccggggaagccggccgggcccagccgggggagagaggaaggcgcgcacaccaccgggacgcagacccacgagcaaaag

SEQ ID NO: 210487 - RNA, 80 nt, Homo sapiens
aggcaccaggccaccacagaaacaaaagcaacaaagaggagggcggagaaggaacagggagagaaacaacgggaacagaa

SEQ ID NO: 210488 - RNA, 85 nt, Homo sapiens
agcggcccagccgagcagcaggagcagcccgcaccggacaacgcgagccaggggcggcggagcgcgggaagaagacaccagcaac

SEQ ID NO: 210489 - RNA, 62 nt, Homo sapiens
ggccgccccgagcggagccggagaccggaaacaggcacagaacagaaggaaaggacgaagag

SEQ ID NO: 210490 - RNA, 93 nt, Homo sapiens
ggccgacaacgagggagaagcacaagacagcacagagccccagcacaagagaaaacagacagcagaacgaaaagcccagagaccaaagagccc

SEQ ID NO: 210491 - RNA, 86 nt, Homo sapiens
gccggacccagcgccggcccccaggcgaagaagcgcagccgcaccggccaaggggaaagggagcagcaccggccacacccacagca

SEQ ID NO: 210492 - RNA, 63 nt, Homo sapiens
ccagaagagcgggaaaaccccgagaggacgaaggaaacgggggcgcacaggaaacagaaaaaa

SEQ ID NO: 210493 - RNA, 75 nt, Homo sapiens
gcgaaaccgcaccgcaaaccaacgcgggccgggcaacacgcagccgagcggagggacaaggcacacgcgggacgg

SEQ ID NO: 210494 - RNA, 75 nt, Homo sapiens
gcccagcccccgagggcgggacacaggacaagacacaccagaccgggagaacaccaagaaggaacagaaaaaacc

SEQ ID NO: 210495 - RNA, 61 nt, Homo sapiens
ggaccggaaacccccaggggcacaggagccaccagacccaagacaaaagcggggaaggagc

SEQ ID NO: 210496 - RNA, 58 nt, Homo sapiens
cagacggaaacaaggcaacagaaagagcaacagcagggcaacagcgcaaaacacagca

SEQ ID NO: 210497 - RNA, 74 nt, Homo sapiens
gcaaacgcggaaaggaccacccgggcagccccgggcaaccagcaagcccagagaacccacagaaaccaaggaga

SEQ ID NO: 210498 - RNA, 71 nt, Homo sapiens
agaaggccccagaaacagcagggagaagagggacacaccagaaaacgacggaaccaagaagaaacggacac

SEQ ID NO: 210499 - RNA, 36 nt, Homo sapiens
cagaccgaccaccaaaaaagaacggaccgaagccaa

SEQ ID NO: 210500 - RNA, 81 nt, Homo sapiens
ccgccacagcggcccggccccccggacagacgccgacgcccaggagagcacgcgcaagggaccaccaccgcacgaccagaa

SEQ ID NO: 210501 - RNA, 73 nt, Homo sapiens
gaaaggaagcgccccagccgccgggcggaccgccgggggccgaagggcaacacagcagaccggccagcgcggc

SEQ ID NO: 210502 - RNA, 71 nt, Homo sapiens
gcgaccggaaagcggggggaaaagaaggaggccagcgggacacacaaagaaagacgaaggacacccaaagg

SEQ ID NO: 210503 - RNA, 58 nt, Homo sapiens
agacaagaggagcccgaggcagagcacacggggaagcacggaacaagagacccaggca

SEQ ID NO: 210504 - RNA, 94 nt, Homo sapiens
gagaccgagaaaggcaagaagagcgacaccggaaaggggcccagcggagaagagcccaggcccggaagagaggaaacggagaagagagagcagg

SEQ ID NO: 210505 - RNA, 81 nt, Homo sapiens
agaagccaagggccacaagcacacccccccaggaaggcaggggggaagccagcgggcccgagagcggagaaggagagcggc

SEQ ID NO: 210506 - RNA, 74 nt, Homo sapiens
ggcgcccggagggcagcgagggaagaaggaggcagcagccggcaaaaagcgggagaccagggcacaccacagaa

SEQ ID NO: 210507 - RNA, 62 nt, Homo sapiens
ccaagccggaagaaaaagaagcaccgcgggcacccacacccaaaggacggcgggaagagggg

SEQ ID NO: 210508 - RNA, 69 nt, Homo sapiens
agccccccagagcaggaaaccagccacgccacacacgagcagagaaagcaaagaaggccaaaggcagag

SEQ ID NO: 210509 - RNA, 94 nt, Homo sapiens
agaacgggaaggagacgcgcagcgcgcggaccccccccaagacacacggacccaccccccccgaacagaggcaaacgaggccgggcgggccacc

SEQ ID NO: 210510 - RNA, 70 nt, Homo sapiens
ccggaccgagagcggaccgagagcgcgaaacgcacgagaaggagaaagaggacacggccgacagacagcg

SEQ ID NO: 210511 - RNA, 76 nt, Homo sapiens
acgaaacgaccccaccagccccaaaaggcggcaacagggaggagcacaaacgcccaccacacagcagaaacggcag

SEQ ID NO: 210512 - RNA, 50 nt, Homo sapiens
gagacccagaccagcaggaacaggggggagcgccgaagggccggccgggc

SEQ ID NO: 210513 - RNA, 71 nt, Homo sapiens
caacagaaggacggaaagggcaaaaaggggccgcaaggccaggcgcgcagaggcacccaacggcacagacc

SEQ ID NO: 210514 - RNA, 88 nt, Homo sapiens
gggagggcccagcgcaccgacaggaagccagcccggagccagaaacgggaggcccgccggacaagggcgcggacagaagagacacaag

SEQ ID NO: 210515 - RNA, 78 nt, Homo sapiens
aaagagaaccgggggaccacagagaggagcgcgcgcccaggcggaggaaggggcgcgagccgcgcaaccccgccccgg

SEQ ID NO: 210516 - RNA, 82 nt, Homo sapiens
ccccgcgcccgccacggaccccgagacccggaacccagggcaagaggagcagcagcggcggggccaagcgggagagcgagaa

SEQ ID NO: 210517 - RNA, 78 nt, Homo sapiens
gcgccaaggggagaaggaagggaccaccaacggcacgaagacacacccaggccggaaagagcaaggggagcccagacc

SEQ ID NO: 210518 - RNA, 64 nt, Homo sapiens
agaagagaagaaggcccagaaccgaaagagaagaagagagccagaaacacgcccgccgacagaa

SEQ ID NO: 210519 - RNA, 77 nt, Homo sapiens
acaccacaccgggagccaccaccgaggaagacgccggcacagaaaccccggggaccccacaagcgaccggaagaccc

SEQ ID NO: 210520 - RNA, 35 nt, Homo sapiens
gaggacgacgagagagagaagagcaagagaccgac

SEQ ID NO: 210521 - RNA, 50 nt, Homo sapiens
gacacgccggacccccccgcaacaggcaagaaagaaaaaggcacacaccg

SEQ ID NO: 210522 - RNA, 74 nt, Homo sapiens
ccccccgcccgcggcccggcagggacgcagcccaagaggaggcagggaagccggcagcccgcggaagccgaaga

SEQ ID NO: 210523 - RNA, 70 nt, Homo sapiens
cgggcgccgcgggcagcgcgcggcccgggcagcagaggcagagcaacagggacacaagcaagaagaaagg

SEQ ID NO: 210524 - RNA, 69 nt, Homo sapiens
ggcagcccagaaacacccaacgaaaacacgaggcaaagacaccccacacgacaagaaggacccaccagc

SEQ ID NO: 210525 - RNA, 67 nt, Homo sapiens
cacggggggaacgacgaacagggcaaaccgcaggcacaacacaagaaggacgggacggcaaaacaga

SEQ ID NO: 210526 - RNA, 82 nt, Homo sapiens
gacagcggaagaccaaagaggagagaaggacgacaagcccaccgaggcacccagaggcgaaaaccggcgccaagcacgggga

SEQ ID NO: 210527 - RNA, 72 nt, Homo sapiens
gaacacgcggagcccggagcagaccaccaaagaggcacaccacacacgccggcacaagaccgccgcggccac

SEQ ID NO: 210528 - RNA, 76 nt, Homo sapiens
ggcccgggggaggagggggccgcgagcacgccgggcacgggccggaacccggggcccgggacgagcggcccagcga

SEQ ID NO: 210529 - RNA, 85 nt, Homo sapiens
cggcgagaggggcgagaacgccacgcgggccggcgaaagcgacgacaccaagaggaaaaaccaggcaaggaagcacaagcgacaa

SEQ ID NO: 210530 - RNA, 78 nt, Homo sapiens
ggggggcgcgccggaaaccggagcgcgcagcagaagacgaccccgacgcaggccaggagccgcggacagaagccgagc

SEQ ID NO: 210531 - RNA, 76 nt, Homo sapiens
caagcaagcagcagcacgcgaaagaggaaccaggacagaaacccacagaaagagggggcccgggcagggccacgcc

SEQ ID NO: 210532 - RNA, 95 nt, Homo sapiens
accacaaagaggcccgagccgcaaagagcaagagcagggaacagggcacgaagaacacaaagcaaaaaggaaaagaagagaagaagaggcaggag

SEQ ID NO: 210533 - RNA, 64 nt, Homo sapiens
ccagcgcaacggcaaggacccgcccccaagacgggcaggcgacgagcccgcccgggccgacgca

SEQ ID NO: 210534 - RNA, 58 nt, Homo sapiens
gcgggacccagcccaggcggcgcggacggggcggggccccccaccaggggccgcggca

SEQ ID NO: 210535 - RNA, 64 nt, Homo sapiens
ggcagacgagggaccagaggggacgagacgcgggcgggccaacagcaggcaggggcgcacccag

SEQ ID NO: 210536 - RNA, 66 nt, Homo sapiens
agcggaggccggcaaagccaaggagaccgggcgcaaagcagaacgcgaagaaggaagacggaaagc

SEQ ID NO: 210537 - RNA, 83 nt, Homo sapiens
gggaagagccgccacgcggcaggagccaccgggggacgggagaagcggaggaaccccccaagcacacgccgagaaacagacaa

SEQ ID NO: 210538 - RNA, 88 nt, Homo sapiens
accccgcagggcccaagagccggagccggcgcccccagagagaccgacgagggggccgaaaccgagagcaaaccagccggcgggcgcc

SEQ ID NO: 210539 - RNA, 79 nt, Homo sapiens
ccaccgggaaggcgaagcgcccccgccccacgagacaagcgcaagcagccagagcccgggcgcaaagaaccaggcccgg

SEQ ID NO: 210540 - RNA, 80 nt, Homo sapiens
agccaagcccccaaccccagaaccccgagccgacgggacacggaggggagcgaggaacgggaacaacaccccagagaggg

SEQ ID NO: 210541 - RNA, 70 nt, Homo sapiens
ccgaagaaagcgaaacccagaacaagcagaggaaagacacgccagagaagaacaggacacaacaggagac

SEQ ID NO: 210542 - RNA, 81 nt, Homo sapiens
gaagcgccaaaggaccggacccagagaagaggaaaaccaccgggcagggacgaaacgcccaccccgggaagcaggacgcgc

SEQ ID NO: 210543 - RNA, 113 nt, Homo sapiens
gcaggggagagagcagcgcaaccgcgggacccgggcgacccaggccccagcgggccccagcgggcgacgcacgaggcacacaggaaggaggggagcagggacgcgcggcggcg

SEQ ID NO: 210544 - RNA, 79 nt, Homo sapiens
ccagcccccccaaaaaggaaagacaccggcggggcggaggccggcagaagggccaaaccccggaacccgggccacacgg

SEQ ID NO: 210545 - RNA, 73 nt, Homo sapiens
ccagaggggaagagcccaaacccagacagcgcaccccaagcccgggagcccagggcagcacacccccgcccag

SEQ ID NO: 210546 - RNA, 75 nt, Homo sapiens
ccgcagcgccgccagccgaaggaggaagggaaccaacccacccggcgccgcggcccaaaagccccaagcaaaaaa

SEQ ID NO: 210547 - RNA, 58 nt, Homo sapiens
gaagaccagggacgcgcacacgccagagggagaggagaggagaccggaggaagaacac

SEQ ID NO: 210548 - RNA, 60 nt, Homo sapiens
ccccggaacggcaccacaagacccggaggaaagcccagagggaagcgcaagaagcaggcc

SEQ ID NO: 210549 - RNA, 77 nt, Homo sapiens
cccccggaccgagccgacgccgcggggcagcgggccggcgccggcgcgaaagggcaagcagaaaccgggaagggggc

SEQ ID NO: 210550 - RNA, 77 nt, Homo sapiens
cccacaccgggcagccccagccgaaggcacagccacccgccccgaggaccccgacggcaggaaaacggacagaagac

SEQ ID NO: 210551 - RNA, 66 nt, Homo sapiens
gccgcagaggccccgggcggaccaggcccagacaacggcaagcggagaagagcaaggccgaaccga

SEQ ID NO: 210552 - RNA, 76 nt, Homo sapiens
ggagggacacggaggggccggaagagacaagaccgggggcccagaaagacacgggagcagaagggccaacgccccc

SEQ ID NO: 210553 - RNA, 66 nt, Homo sapiens
ccccggcccgaccagggcggccaccgagagaacgggaaaagaacggcaaacccaaccccagcgaaa

SEQ ID NO: 210554 - RNA, 81 nt, Homo sapiens
ggagacaaagagcgggagaggggaaggaaaagcccaagggaaaacacacagccgggaaaaacccagagcgccgcaaggcac

SEQ ID NO: 210555 - RNA, 83 nt, Homo sapiens
agagcggacgggccaacccaaaaccagggcggcaaaacgagcgggccaggggcaaggaggagccccggaggaggaggaagagg

SEQ ID NO: 210556 - RNA, 79 nt, Homo sapiens
gcccaccgaaaggcggcgcgcgcacacagaggcggcacagagccgaaaacagccaacaaacacggaccaagaacccacc

SEQ ID NO: 210557 - RNA, 67 nt, Homo sapiens
aaagggaagacacgaaaaaagagaaagggccaacggaccgagagcaagcgcaccagcccgcaaaagc

SEQ ID NO: 210558 - RNA, 77 nt, Homo sapiens
caaagccgccgggagcagaaccaagggccccggggccggcgaaggccgacagaacagaaaggcaaaaagagacacac

SEQ ID NO: 210559 - RNA, 75 nt, Homo sapiens
cggcaaacggcagagcaggccgcggcgacccagcgagaacagacgaggggacggcccaacccgcgccgaaccggc

SEQ ID NO: 210560 - RNA, 80 nt, Homo sapiens
gcggaagcgggggcaccagcaccccgcaccacagccagccgaacacgccgcagaccagcaaagaaagagaagggcaacca

SEQ ID NO: 210561 - RNA, 55 nt, Homo sapiens
gagaaaggaaaaggaaagccacgcaggcaacaacaggagaaagacgagagcacca

SEQ ID NO: 210562 - RNA, 73 nt, Homo sapiens
gagcaaggaccaagagaacaagggaaccagccaaaaggcgacgccaggagcacaccgaaaagaaaggaaaacc

SEQ ID NO: 210563 - RNA, 70 nt, Homo sapiens
cacaaaacacgaagaggaagccagccaggaggagaacacgccaagccacccaggaaggaaaaggcgcccg

SEQ ID NO: 210564 - RNA, 74 nt, Homo sapiens
cagcgaccccgagcaggccggcgagcggcgggacgagcggagagagccaacagaggaggcgggcggaagaagca

SEQ ID NO: 210565 - RNA, 58 nt, Homo sapiens
gcaaacgcagaaggacgcccacgagcaaccaagaaacaaagccagccgcgaaacaagg

SEQ ID NO: 210566 - RNA, 51 nt, Homo sapiens
ggagggagaacaagcaacggcgggaaaaagacaagggcagagcagccgggg

SEQ ID NO: 210567 - RNA, 56 nt, Homo sapiens
gcgcagacgccggcagcggcaagagcgggcaggcgggaaagagccgaaacagaagg

SEQ ID NO: 210568 - RNA, 65 nt, Homo sapiens
aaccaaagaggcgacacggcaagagagcccaaggccgcaacagaaggacacagacaaaagaccag

SEQ ID NO: 210569 - RNA, 57 nt, Homo sapiens
cggggagcgagcacggcggaaacccaccgccaggacgccacaaacgggcacaccaac

SEQ ID NO: 210570 - RNA, 58 nt, Homo sapiens
agacacaacacgcgacacaaaggagacggaaacggaacgccaagcgaagaagaacgaa

SEQ ID NO: 210571 - RNA, 80 nt, Homo sapiens
aaccagagggaaacggcacaccaggcggcaggggcaaccagacgggccaagggcagaaagaaagcaggaccagggggagg

SEQ ID NO: 210572 - RNA, 76 nt, Homo sapiens
gggccagcgcagccgcggcggagacgcacaggcccgccgccccagccaccaccccaggggccagagcccccccaga

SEQ ID NO: 210573 - RNA, 89 nt, Homo sapiens
acccaggagcggaggaagcagggacggagcggcaggggccgagggcggcccggcccgcgagccgccgccgcgcggagggccccccgaaa

SEQ ID NO: 210574 - RNA, 78 nt, Homo sapiens
gaaaagccaggcggcagcaccccgagccaccccaggcgcccagaccaagggaacggacgaaaaagagccacgccccca

SEQ ID NO: 210575 - RNA, 41 nt, Homo sapiens
gcccggccaacacgccccagacgaacggggaagaagcagcc

SEQ ID NO: 210576 - RNA, 75 nt, Homo sapiens
gggaagccgccaagccagagcagccgggaacgaaggcgggaagcccggcccccagagaggagccaagcccaacgg

SEQ ID NO: 210577 - RNA, 57 nt, Homo sapiens
cgcgccaggaggaccgcaggaggacgcagacggagccaggcgcgggccaccccacgg

SEQ ID NO: 210578 - RNA, 77 nt, Homo sapiens
cgggaaaccgccgaagacgaagggggcccacggccgcgcgcccagaccccagggacccccccccaccaggcgccaga

SEQ ID NO: 210579 - RNA, 82 nt, Homo sapiens
cgcagaagcacgacagggcagggcagaaagcagggcggaggcggcagaagggcccggcccccaggggggcagcagccggaag

SEQ ID NO: 210580 - RNA, 76 nt, Homo sapiens
aggggaccagaacggaacaggccggcggccccaccccccaggccgggaacgggaaacgcgcgccgagaagccaccc

SEQ ID NO: 210581 - RNA, 73 nt, Homo sapiens
ggccaagccagaaaacagaaacgaaacagaacagagagaagcccagcgaacaagaggcgccagcgggcgcgcc

SEQ ID NO: 210582 - RNA, 74 nt, Homo sapiens
ccggacaggaggagccagggcccggcccgaaaggagagccccgaagaaaaggagagaggcagaccaaaacgggc

SEQ ID NO: 210583 - RNA, 67 nt, Homo sapiens
cacaccaagcggaggggacgccacgcaacgccggggaaaacgacccccaggaaaaagaaaaggacca

SEQ ID NO: 210584 - RNA, 71 nt, Homo sapiens
aacagaggccaggaaacggcaagcagaagaaagcaaaagaccaaggagccggcaagagaagaggaaccaca

SEQ ID NO: 210585 - RNA, 65 nt, Homo sapiens
gcggccgagaggcgcggggagaggaacaacggacagaccccaaaagcaccccagacgcgaaccac

SEQ ID NO: 210586 - RNA, 74 nt, Homo sapiens
acaaagcacagcggggccggcgagaacaggccaagacagagagccaggcacccccccaaccacagcaggaggcc

SEQ ID NO: 210587 - RNA, 80 nt, Homo sapiens
ggcgggagacgcagcgcgacccagcagagcaaggggaacaaagcggcaaaagaacccacaaaaaaagccacaaaagcaag

SEQ ID NO: 210588 - RNA, 72 nt, Homo sapiens
cacaccgagccacgagaaaagcccaaccggcccggagcccaaggccccaggcagcccacaccagaagaccag

SEQ ID NO: 210589 - RNA, 81 nt, Homo sapiens
agcggacagcacaaggaaccacccgcggcagagaaagaaggggacaaccgaaagagccaaccaacgcacacaccgaccacc

SEQ ID NO: 210590 - RNA, 52 nt, Homo sapiens
cgacgcacacgggggcggacaccacaagaagggcgccagaggagcaccggcc

SEQ ID NO: 210591 - RNA, 73 nt, Homo sapiens
gccgacagacaaccagggcgccacaaaggggggagggggccaccccgaagcgagacgggacacagcggccagg

SEQ ID NO: 210592 - RNA, 75 nt, Homo sapiens
gagcagggcccgacccagccggacaaagaaacagccggaaaagcacgagcacaagacgaaaacgacacgccagaa

SEQ ID NO: 210593 - RNA, 78 nt, Homo sapiens
caaaggaagcgcgaacagcagcgcagccacacccaccgcccgggcaggccacggcggagagggccgggcgcgcacccc

SEQ ID NO: 210594 - RNA, 76 nt, Homo sapiens
aagccggcaagagggagaaggacaccaggcagaggcaagggcgaagagagaacacgcacggaaggaaggagaccac

SEQ ID NO: 210595 - RNA, 75 nt, Homo sapiens
aaaaaaaaaacaagaaccgcgaggaccaacggcggagcaaacaacccaaaggcaagcagaaccagcaaacggcaa

SEQ ID NO: 210596 - RNA, 82 nt, Homo sapiens
accaacaaagaaggagcggaaaaccaggaacggccaggcacccgacaggaggacgcccgccaggggagcagacagaacaccc

SEQ ID NO: 210597 - RNA, 82 nt, Homo sapiens
gacggggagcccaaagcaaaggcaggaacagaaccggagcaggccgagagcggaaaagaccaaagcagaaaagaaaggagag

SEQ ID NO: 210598 - RNA, 74 nt, Homo sapiens
ccggcgccgcgccaacggcgcgggcaggcaggccaccaagccggggaggcaacaggcccagaaagcgggcacca

SEQ ID NO: 210599 - RNA, 79 nt, Homo sapiens
ggccagcccacgagagaaccccagcgccaaggggccaagggagagcggggccccccccaaggcaccccccggcggaacg

SEQ ID NO: 210600 - RNA, 50 nt, Homo sapiens
caggcaagccacaaagggacccacaacacgaaaggagaagaggacgggag

SEQ ID NO: 210601 - RNA, 43 nt, Homo sapiens
agagaaccgaccagaacgcagcaacaaagcggggacgagagcc

SEQ ID NO: 210602 - RNA, 78 nt, Homo sapiens
ggacgggaggggcgccgcggcggcgggcgcccccaggagcaggccgggcccgccagggcacgcgcccgccacgggaag

SEQ ID NO: 210603 - RNA, 69 nt, Homo sapiens
aaggaccaagaaccaggagaaaacaagagacgaaaccagacgagcgcgccagcggacccgggcgaaacc

SEQ ID NO: 210604 - RNA, 53 nt, Homo sapiens
ccacaacacaacagggaaggcgccagacacagaaaagaaagagagcaaccacc

SEQ ID NO: 210605 - RNA, 69 nt, Homo sapiens
ggggggggagaccggagcgaaacagaaggaccgagaccccagaagcaaacgaaaaagaaaaaacgaaac

SEQ ID NO: 210606 - RNA, 69 nt, Homo sapiens
aaagacagcaaaaaaaaggaagcacaccagaggcgagagccaaccaaacccagccccgaggacaggaag

SEQ ID NO: 210607 - RNA, 71 nt, Homo sapiens
gccaccacaggaggagcagccagaaaccgcccaaaacgagacgagaggagaaaaacgcaaacggagcccag

SEQ ID NO: 210608 - RNA, 73 nt, Homo sapiens
agaagcacaggcccgggcgaaggggccacgcgaaggaggagagaaagaaagccagcgcaacgagagaaccagc

SEQ ID NO: 210609 - RNA, 61 nt, Homo sapiens
ggaaagcccaaagccagcgacaagaaaacgaaacacgcgaaaccaaggagccgcgagaacc

SEQ ID NO: 210610 - RNA, 75 nt, Homo sapiens
accccgccccaaacgcccccaccccaaagagacccaaaggcaagggaacagccaagggggaagaaaaggagacgg

SEQ ID NO: 210611 - RNA, 38 nt, Homo sapiens
gcccagccggaagaagaacggcggccaaaaggcaacag

SEQ ID NO: 210612 - RNA, 72 nt, Homo sapiens
gggagggagaaagaggacaggagaacaaggcaaccgcgaaccaggccaccgaagggggggaaaccagaaccg

SEQ ID NO: 210613 - RNA, 57 nt, Homo sapiens
acgcgcgggccgcgagcggggcgacccgaggacagaaagacagagcaaccacggcag

SEQ ID NO: 210614 - RNA, 110 nt, Homo sapiens
cgcccacgagccggagagccggacgcgagcccggacagcagcaacagggccgggccggaggaagcggaagaggacagcaagccgcacccggaaggcgcgcccggcgggag

SEQ ID NO: 210615 - RNA, 78 nt, Homo sapiens
cgaaaaagcgcccgagacgggcccgccgaaagacaccaccccacaacaccgagcaaagaaaagaagagaagaccggac

SEQ ID NO: 210616 - RNA, 73 nt, Homo sapiens
ggagaacagcacgccccgcgaggcgccccggagaagcaacagacccacgagacaagaaaggaccaagaccaac

SEQ ID NO: 210617 - RNA, 58 nt, Homo sapiens
gccggcgcgcccgcgcggcgcggggaccgcggcccgaaaaaggcacaaacccagcaca

SEQ ID NO: 210618 - RNA, 45 nt, Homo sapiens
gcgacacaaacaaaagacgcgcgaacaaaaagaagggcgaggaac

SEQ ID NO: 210619 - RNA, 73 nt, Homo sapiens
gggccaaaagaaagggaacccagaaccgcgggcagcaagaaccaccaaacaaggacaggagggaaggcccaag

SEQ ID NO: 210620 - RNA, 68 nt, Homo sapiens
ccacagaagaaagaacggggacaacgccacagcagcggaaagggaaacgagacaacacacccaagaca

SEQ ID NO: 210621 - RNA, 79 nt, Homo sapiens
gggcgcaaaggcaaaagcggagaacaagaaggaagggccaggagagagagggggaccaagcgccgcaagaacgccgggc

SEQ ID NO: 210622 - RNA, 62 nt, Homo sapiens
ggaccgcgaccgccgacccgcggcggggggagccggccacccaccggacaggagagacaacg

SEQ ID NO: 210623 - RNA, 69 nt, Homo sapiens
ccagaggcagccagcagggggaggcccaaccgggccgcggcagacggggcggccgccaagcacacccgc

SEQ ID NO: 210624 - RNA, 65 nt, Homo sapiens
gcggggccgcgcccggagcgccccgccgcgcacaggccccacggcccaggagccggagagcacag

SEQ ID NO: 210625 - RNA, 84 nt, Homo sapiens
gccgaccaaaaaagaggaaagaaaagaagagacgcgggcccagggggaacaggcacgagcgaaccggaaagacaaccccgagga

SEQ ID NO: 210626 - RNA, 83 nt, Homo sapiens
acaccgaaaagcaaagggagaggacacacgaggcaaagcagcaccagggcagcgcagccccaggacggccgcacgccaccggg

SEQ ID NO: 210627 - RNA, 72 nt, Homo sapiens
acgggcgccaccagaggaagacggaaggaccgaaagcacagaacacgggcgaagcagaaccacaccgcagga

SEQ ID NO: 210628 - RNA, 75 nt, Homo sapiens
agcaacccagccggggcacaacaggcccgaaaggagaagcaaaccaggcgagacagcaggagcaccaaaccccac

SEQ ID NO: 210629 - RNA, 61 nt, Homo sapiens
agcgggcgggcgcaccaaggacggaagaggggagcccaaaagcacgaagcgccagaggaca

SEQ ID NO: 210630 - RNA, 77 nt, Homo sapiens
gaggcgggcgcaagagaaggcaccaagagccagagacgcgcacgaaacgacgaagaggcccgaggacagaggagcaa

SEQ ID NO: 210631 - RNA, 77 nt, Homo sapiens
cgagcggccgcggccaggcgacgccacccaagacacaaacggcgacacaggacaaagagagacaccagagccagcag

SEQ ID NO: 210632 - RNA, 67 nt, Homo sapiens
cgccagagcgagaagagacggcacaggagagcagcgggccaaggaaagcggagggagccccagagga

SEQ ID NO: 210633 - RNA, 77 nt, Homo sapiens
cccacgggccccgcacgcccccgccccagcccaccccaaccaaggaaccggaaccgaagaagaacaaagacaagaac

SEQ ID NO: 210634 - RNA, 77 nt, Homo sapiens
gcgaggacacgggcgcaaccgcagcacacagcgaccgggagaacaagacggcccgcaagggaggacaagcgaaccaa

SEQ ID NO: 210635 - RNA, 75 nt, Homo sapiens
accgagaaagccagacagcaaagacaaccagcaccaacgggagccgcaaggacaacagccgcggccagacagcgg

SEQ ID NO: 210636 - RNA, 45 nt, Homo sapiens
ccgacagccaggcccgggagaagggcacgaaggcaaagaccccag

SEQ ID NO: 210637 - RNA, 65 nt, Homo sapiens
ggccgcgggcgcgcccgcagcgcccgccacaggcccgaagaggacacagaaggacaagcccagac

SEQ ID NO: 210638 - RNA, 73 nt, Homo sapiens
ggcggcgcccagacccacacccagcaagagagaaacagaaaggaggacgaacagaacggggaagccagagcac

SEQ ID NO: 210639 - RNA, 74 nt, Homo sapiens
ggcaggacagcgaacagcggcaaacccgggaggagccgagggagacggcccgggcgcggacggacggcccccag

SEQ ID NO: 210640 - RNA, 73 nt, Homo sapiens
aggggggaacagcagagacgcaacggaaaggcgcaggcagaaaaacgcacaaagacgcccaccgaaaaggcga

SEQ ID NO: 210641 - RNA, 76 nt, Homo sapiens
ccccccagaaaccaacccaagggcggagaacggaaaagcaccaggaagcagagaggaccgcagaagggaaggagag

SEQ ID NO: 210642 - RNA, 74 nt, Homo sapiens
cgccagcgcacaccggggccaccccaaacggcaccggcccggcggccccgccacccacgacggacgccaagccc

SEQ ID NO: 210643 - RNA, 82 nt, Homo sapiens
gcccggcggagcagaggaaccacacgcgacagaaccaagaaggagcgagggaggagcagcgagacagcaagagacgaccaca

SEQ ID NO: 210644 - RNA, 59 nt, Homo sapiens
gggggccacccgcccaggaaccaagaggcgcgaccccagggacaaccccaaccgggaaa

SEQ ID NO: 210645 - RNA, 81 nt, Homo sapiens
gcggaggggcgcgcgggaacaccggagcccgcgggcagacaggggcaaggccgaggggaacagcacacagagaggaggcgg

SEQ ID NO: 210646 - RNA, 80 nt, Homo sapiens
gagcccgggagggcggccgcaggacagagcagccaggccacgagccagaaccgagacacacacaggaccccaaaacaaca

SEQ ID NO: 210647 - RNA, 68 nt, Homo sapiens
gagggagcccgcgcggcgagagcccacaggcccccacagggcccgacacccgcggacgcaggcgagac

SEQ ID NO: 210648 - RNA, 65 nt, Homo sapiens
cacaaaaaccgacgagccaggcgaaacagaaagcaggcaggggagggagggccaccgacggcacg

SEQ ID NO: 210649 - RNA, 74 nt, Homo sapiens
aagcgaggagaagaagaggcccccacagagagcacacaaacaaagcgaaaccacggaagaaaagggcaaaggaa

SEQ ID NO: 210650 - RNA, 82 nt, Homo sapiens
caagccagcagaaacagccgagcccaccgcagacgcagggccgcgcgaagcggcccccgaggccggaaaggagcgcagcgcg

SEQ ID NO: 210651 - RNA, 84 nt, Homo sapiens
agccacaaacacagaggaagaccaccaggcagaggcaacagaggagcaacaaggaggagaaggaaagagcagcgaaacaaagag

SEQ ID NO: 210652 - RNA, 84 nt, Homo sapiens
ccgcgccccgcgcgggggcggggggccgagcaaccagaaccggagcaggaggcgcacaacacccagaagacgaccccgacgcag

SEQ ID NO: 210653 - RNA, 78 nt, Homo sapiens
gggagagcgaggccgagcccgcgcagaacaccagcgccccccccaccagaggacacaaagccccagagagaacagaga

SEQ ID NO: 210654 - RNA, 54 nt, Homo sapiens
ggaagcagggccccgaagggaggaggacagaagaccacacacccgcaccaagac

SEQ ID NO: 210655 - RNA, 64 nt, Homo sapiens
cagacaagcggaaaaacagaaccacaggaaagacggcgaacacaaacgggcgagaacagccacc

SEQ ID NO: 210656 - RNA, 53 nt, Homo sapiens
ggccggcgcccgcacccaccgagaaccagccaccgacccaggagcgcccggcc

SEQ ID NO: 210657 - RNA, 89 nt, Homo sapiens
cgccgcgccagcgacaaacaacggcaggggccgccgaaggggagcagcgccggagaaggcgggaggagcccggcccgggggacgggcgg

SEQ ID NO: 210658 - RNA, 76 nt, Homo sapiens
gacggccgcgccccggccgcgccggggccgcgcggccccgcggagccagggcagcggggaagaagaaaaggaaccg

SEQ ID NO: 210659 - RNA, 73 nt, Homo sapiens
ccaaccagaagaaaccagccagagagccaagaagaacagacagacaggcccaggccaaagccacccccaaagg

SEQ ID NO: 210660 - RNA, 67 nt, Homo sapiens
ggcccaggcgcacaccgcgaggcgagggcgccggcaccagggcgcaaccggaaagggaaggccacaa

SEQ ID NO: 210661 - RNA, 86 nt, Homo sapiens
gaccaaacaaggccaaacggaggaaacccgagcaacccaggccagccagcacaggaaagagaaaagcaaagaggggacagcagaga

SEQ ID NO: 210662 - RNA, 68 nt, Homo sapiens
gggcgccgggccggcccgggcccagcaccccacggcaacgggccgcccgaagcccgacccggcagcgc

SEQ ID NO: 210663 - RNA, 75 nt, Homo sapiens
gccgggcaaacacaaacgcgcgaccccccacagaacggccgagcgaccaggagaggagcccccgcccgaagaccg

SEQ ID NO: 210664 - RNA, 88 nt, Homo sapiens
gcggccgggcggccggcgaggggggcgccgcggcgggggagagagggccccgaaccgccaggccggaaccaaaaagaagccccagagc

SEQ ID NO: 210665 - RNA, 69 nt, Homo sapiens
gggggggcgcgccaagaaaggagggaagccacgaacgcgggacaagcagcgcgacagaaaggaggaaag

SEQ ID NO: 210666 - RNA, 79 nt, Homo sapiens
gcaagggacggcacccgagggcgcggcgaaggccgccaggcacagagaaggcaaacgggagggcgaggacaccaagagc

SEQ ID NO: 210667 - RNA, 68 nt, Homo sapiens
aacaagaacacacgaggacgcagaaggacccacagaagcccaagggaaccacaaacagacaggaaaac

SEQ ID NO: 210668 - RNA, 77 nt, Homo sapiens
aggacaagccaagcaagaaaaaggagaccgccaccaagggagaaaagaccacagagaagcaggcgaccaggcgcgcg

SEQ ID NO: 210669 - RNA, 81 nt, Homo sapiens
gcgcgaagcggccaaagccgcccagacggccaccggcgggaggaacaaaaggagcagaggaccacgagcgaccggaagccg

SEQ ID NO: 210670 - RNA, 41 nt, Homo sapiens
ccgagggaggggggagaggcaagaagcaagcaaccaggcgc

SEQ ID NO: 210671 - RNA, 70 nt, Homo sapiens
accagcgagggccacacaggagcccggacggcacagggaaggcaagcagagcagcgaagcaaagcagaac

SEQ ID NO: 210672 - RNA, 81 nt, Homo sapiens
agccaggagaccaaggaccagccaccacggagaacacaccggcgccggagacaccagcagcccgcagcgccaggggagggc

SEQ ID NO: 210673 - RNA, 70 nt, Homo sapiens
gacaaggcccacaaccgagcggcggcggaagaagaggcaagaccgcggaaaggacgaacccagcccaaaa

SEQ ID NO: 210674 - RNA, 76 nt, Homo sapiens
aaacaacgggaggcggaacacgcaccggacaagccaacgcagccgacggccaagaaacccccaagagggcacaaca

SEQ ID NO: 210675 - RNA, 81 nt, Homo sapiens
cagccgagacgccgaggcccgcagccggccggggccaggcggaaagagccagggggccgccaggagcagaccgggccgccg

SEQ ID NO: 210676 - RNA, 52 nt, Homo sapiens
cccaagagagcaagaccgggcccacgaggacccagcaggacgaccagccaaa

SEQ ID NO: 210677 - RNA, 80 nt, Homo sapiens
gcgccgaggcggagcgccgagcgggaaagggagcagcaccggccacacccacagcacgaccggaacccagcgaccgacgc

SEQ ID NO: 210678 - RNA, 41 nt, Homo sapiens
cagacgggagccgggagccggcagccggcacagccacaccg

SEQ ID NO: 210679 - RNA, 52 nt, Homo sapiens
agcgcaacaggaccagcaaaaaaagaacccaacacgcacgcaagcaaaacga

SEQ ID NO: 210680 - RNA, 80 nt, Homo sapiens
ccagcccccgagacggggaccaggggaggcagccagcaccgacagccggccccaggacccaggacgaagggaaacgacaa

SEQ ID NO: 210681 - RNA, 44 nt, Homo sapiens
ccccaagagcgggacgcaggggaggaacaggaagagaagagggg

SEQ ID NO: 210682 - RNA, 86 nt, Homo sapiens
gcgccggcgaccgaggggagagggaacgcagcgaaagcggaacgcgaaggaagaggacaccccaagacaaaacagccagggggaaa

SEQ ID NO: 210683 - RNA, 77 nt, Homo sapiens
cgacgacccagaccaagagcaccgagcaagaaacaaaaaaaaccagccacacagaccgccagagcggaacgacccca

SEQ ID NO: 210684 - RNA, 73 nt, Homo sapiens
gggccggcgcagggcggaaggacaacagcccgacaaccagacaagagacgaaaccacccacacaaggagggca

SEQ ID NO: 210685 - RNA, 59 nt, Homo sapiens
acggacacgcccagccccgggcacggaaaggggggacacagcgagccacgcgccaggaa

SEQ ID NO: 210686 - RNA, 60 nt, Homo sapiens
agacaaaaacacaggacaaccaaacaaagcaaaccggcacgagccaggcaccagaaccag

SEQ ID NO: 210687 - RNA, 73 nt, Homo sapiens
agcccgggcccccgagccaggaccccccgggccgcgacccgggcaaccaaacgggcgaacaaaaccagccacg

SEQ ID NO: 210688 - RNA, 81 nt, Homo sapiens
gacaaggcacggagagcaacaaagccgacccaacccaagggccaaagcccgaaaccaaagcaaaggcaagaaaagagagag

SEQ ID NO: 210689 - RNA, 77 nt, Homo sapiens
cgggaaaccgccgaagacgaaggcgagagcgagacaaaacagggcaaggcgcccagaagcggcgacgcaaccccccg

SEQ ID NO: 210690 - RNA, 79 nt, Homo sapiens
agcccccagcgcagcggccgcgggcacgcaaaaaaaccaagggaaaagagacaagaccgagacacaaaaaaagcaagga

SEQ ID NO: 210691 - RNA, 101 nt, Homo sapiens
ccggaagcggcggagagagcggagccggcgggcggggaacccaggccccgccgaggcggccagccgcggcgagccgcacagggcaacacacgcaccgcacg

SEQ ID NO: 210692 - RNA, 80 nt, Homo sapiens
cagcaccccacgcccggccgacaagcacgcaaagcccacgcaggagacgggaggagcgacaacggagcacacccaccccg

SEQ ID NO: 210693 - RNA, 55 nt, Homo sapiens
ggacaggacgggagaccccagcacagcggcagaaacaacgaagcaagcccaaggg

SEQ ID NO: 210694 - RNA, 85 nt, Homo sapiens
ccacccgccccacccccacccaccgccgccacacaagccaggagcaccgcccggaagagccagggacggagagaaaaacagagag

SEQ ID NO: 210695 - RNA, 72 nt, Homo sapiens
gaaaaggcaaaggcaggcccaggagccaggaaaaacaaggaccagaacgaagaagacacaacagaagaagca

SEQ ID NO: 210696 - RNA, 74 nt, Homo sapiens
agcagaggaaagcgccaaacaccccgagaccccagagcgcggccgccgcagaaccagagcggcagagccggcgc

SEQ ID NO: 210697 - RNA, 76 nt, Homo sapiens
cacggggaacgagaacaaacagcacagaacgaggaaggggagggaaaaaccgggccacgggcaaagacaccaaccg

SEQ ID NO: 210698 - RNA, 83 nt, Homo sapiens
ggacggaggagcaggcgagaagagaagaaacccgagaagcaagggaaagcgggcgaaaaggaacgagcaggaggcgaaaagga

SEQ ID NO: 210699 - RNA, 75 nt, Homo sapiens
cacccggcacgccacggcgccccgcaagagcagcccgacggccaggaggcgaagagacgaggaagcccaggagcc

SEQ ID NO: 210700 - RNA, 40 nt, Homo sapiens
aaagcgcagagagaggagagccaggagcacacggcgcacg

SEQ ID NO: 210701 - RNA, 75 nt, Homo sapiens
acgagcgccccccgagcggggggacgcgccaggcacagcagcagggggggccccagcccggccgaacgggcgcac

SEQ ID NO: 210702 - RNA, 42 nt, Homo sapiens
gcggcgcagagacccgaaccaaccggggaccagcggcggcac

SEQ ID NO: 210703 - RNA, 86 nt, Homo sapiens
gaagggaaggccagcagcgcgcggagaagaacggggagccaggacggcggacccagccgagaagacgccgcgggggcccgcgccag

SEQ ID NO: 210704 - RNA, 41 nt, Homo sapiens
cacaagaccgaccaggaaaaggccaccggcacacggaaacg

SEQ ID NO: 210705 - RNA, 66 nt, Homo sapiens
ggccgcccgcccacccagggccggaaaagccaacgccggcgaagggaaacccagacgacaaggaag

SEQ ID NO: 210706 - RNA, 84 nt, Homo sapiens
gaggacagcagggaggcgggacgcggcacgccagcacgcaggcaggaggaagcgggcaaaggagacccagcaaaggagagacag

SEQ ID NO: 210707 - RNA, 94 nt, Homo sapiens
ggggagagaagcggacccgccgagccccggccccaagaacgccgccgccccggagccgccaagccggaaggccccccccgccgggagaagaaag

SEQ ID NO: 210708 - RNA, 81 nt, Homo sapiens
aagacgagaccagccgcgaacaggcggcagcagccaccacgaccccaggcccccagccagccggggggagagcccccccag

SEQ ID NO: 210709 - RNA, 81 nt, Homo sapiens
accggggcccggcgcccgggcccgccccggagggcagaaaaaccacagaaacgaaagaaaagacaaaaaacaacgaaaaga

SEQ ID NO: 210710 - RNA, 75 nt, Homo sapiens
aagaccaggcacgggggaaacaggacaggaccaaagagcaggcaaggaacacggaacaccacccccagccgcaga

SEQ ID NO: 210711 - RNA, 69 nt, Homo sapiens
agaaggaccaagaaccagagaacaggaacaacccagacacccgggccagcacaaacccagaaaccagac

SEQ ID NO: 210712 - RNA, 68 nt, Homo sapiens
ccgacggaccaaaacagcacaaagacaggacccacgggaaacgcacgagaccgaacccaaggagagga

SEQ ID NO: 210713 - RNA, 58 nt, Homo sapiens
agcagcagaagaggacaggcgccacaagacaggcggcaaggaagaggcccggaaaggg

SEQ ID NO: 210714 - RNA, 80 nt, Homo sapiens
ggaacccggggacacgacgccccaaaccgccaggagaaaaaagccgcccggcagaggaccggaggagaggaggaacagga

SEQ ID NO: 210715 - RNA, 84 nt, Homo sapiens
acggccacgaggcccagcgcccgggcgagaaaggccggccagccgagaccacccagcagcgaagagcaaaggacccaccacgag

SEQ ID NO: 210716 - RNA, 74 nt, Homo sapiens
aggccagagaggaagggacacaccaccaggaggaaccacaccaagaaagcaaagaacccgagcacaggcagccc

SEQ ID NO: 210717 - RNA, 83 nt, Homo sapiens
aaagagccaagcccagagaggcgaacaaaacagacaaggaaagacaaacacccacaaacaagagacaagccaagaaccaacca

SEQ ID NO: 210718 - RNA, 78 nt, Homo sapiens
agaagcaccagaaacgagccaaaaagacaagcgaaaaagggcagaccaagaccgaggaggagaaggggcggcccggag

SEQ ID NO: 210719 - RNA, 57 nt, Homo sapiens
cgcccagcccggagggagcagagccccaggacaaacaaggaacaagcacacagagac

SEQ ID NO: 210720 - RNA, 56 nt, Homo sapiens
agcaaaagcacaacccgcagggaagacagggggagacaaagacaacaggcaccaga

SEQ ID NO: 210721 - RNA, 59 nt, Homo sapiens
gggcacccggcagacacccccccagcccagcgcaaccgaacgcacacgaaggaagaccc

SEQ ID NO: 210722 - RNA, 74 nt, Homo sapiens
cagcaaaggcagaaacaagagagcgccaggcaggacacaagcgcggggccgacagacgcgcagaaacaagacga

SEQ ID NO: 210723 - RNA, 60 nt, Homo sapiens
caggaaccaccaggacagagggcacgcacggggacgggcggggccacccggaaagagggc

SEQ ID NO: 210724 - RNA, 78 nt, Homo sapiens
cagaaggaacacccccaggaagccaaggacccccgcaggcagcggcaggaccgaaggacacagcgagaagcggggagc

SEQ ID NO: 210725 - RNA, 90 nt, Homo sapiens
gagcggcaagaccaggaccccccaagggccgcagggcgcaagacaaggcccgcgggccaagacaaacaccacacaagaccccaggcgggg

SEQ ID NO: 210726 - RNA, 93 nt, Homo sapiens
aaccagcacggcgcaacaggaccacagcaagacgacaagcacggccggagcgcgaagacgcagggaaagcggcacacgaaaggggcacggcag

SEQ ID NO: 210727 - RNA, 55 nt, Homo sapiens
gaggcccaggccaaaagaggaacacaagaaacgaagggaaaacacagaacaaaag

SEQ ID NO: 210728 - RNA, 78 nt, Homo sapiens
cgccgcccagaggccccaggcgacccgcgacccccgcgcgcgcggcggggggagaggaaaggggccccgagcagccgc

SEQ ID NO: 210729 - RNA, 76 nt, Homo sapiens
caaggcccgaacagaaccgcccgagacggggcacggagccaggaggccgacccgacccggaccgcccgcccagccc

SEQ ID NO: 210730 - RNA, 78 nt, Homo sapiens
acgaaagacccgaacagagcccaggcaaccggcagaggacaacagcaaccaagaagacgagcaccccccgcaccgagc

SEQ ID NO: 210731 - RNA, 73 nt, Homo sapiens
gcgcggagcgccgcaggcggcggccgagggcgcgcggaccccccgcgagagccgaggagcacgagaggaggag

SEQ ID NO: 210732 - RNA, 60 nt, Homo sapiens
agagcagaagacagacaaaaaccaagaaacaagccagacacgcaagagaagcccacggac

SEQ ID NO: 210733 - RNA, 81 nt, Homo sapiens
gagaaacaccagaaacgaaacccacaagcccacaagaaagaagaacgagacagacacagaccggagacacgggaagcacaa

SEQ ID NO: 210734 - RNA, 76 nt, Homo sapiens
caacaagccacagggccggagaggggaaccagcagaaggaggagcagacagaagagaggaaggccaaaacccaagc

SEQ ID NO: 210735 - RNA, 69 nt, Homo sapiens
ccaccggcagagagcagagaccacccaaacagaaaaggaacagcagagaacaaaggaccgcaaacgaag

SEQ ID NO: 210736 - RNA, 64 nt, Homo sapiens
cgaggaccgagaccgcggccgggaccgaggggacgaagccacgacagcagagaggagcacggca

SEQ ID NO: 210737 - RNA, 74 nt, Homo sapiens
aggagcgcagagccggccaaaagccggaaagcggcccgcaggcggcgcaccgggcccacaaggcgggagaagac

SEQ ID NO: 210738 - RNA, 70 nt, Homo sapiens
ggaccccgccgagggacaagccccgagccgcgccgaccagcggagcgacgcagccccccgcgccccacca

SEQ ID NO: 210739 - RNA, 82 nt, Homo sapiens
aacccggcaccgccccagggacgaacagcggggacgccccagcagaccgcccaggagaggaaagcaggaggaaagaccaccc

SEQ ID NO: 210740 - RNA, 64 nt, Homo sapiens
aacccccaccgggaacaccccgcaagggccgagcaccacagacagcgcgccccccgggccggcc

SEQ ID NO: 210741 - RNA, 73 nt, Homo sapiens
cgagaacggcgaagccgagaacagcgccgggaccagcaacggggcggcacacaaggagcgaagggcagggaga

SEQ ID NO: 210742 - RNA, 63 nt, Homo sapiens
accaccgacccaaagagagcgcccagccgaaagagggcaggcccgcgagccccagcccgggag

SEQ ID NO: 210743 - RNA, 68 nt, Homo sapiens
aagagccaccgggagaagcagacgaaggacagggagggacgccagacgggacacgcacaggggcgagg

SEQ ID NO: 210744 - RNA, 74 nt, Homo sapiens
ccgccccagaacgcagacagaggagcggacccccgcggcgcgcagcccagcagagaccgcaagagaaaaggcaa

SEQ ID NO: 210745 - RNA, 70 nt, Homo sapiens
agcagaaccagcagaccggcaacagaggaccccgcagccccgccacagacagccaaagagaagccaggcg

SEQ ID NO: 210746 - RNA, 84 nt, Homo sapiens
cccacccggcggagggcacaaggccagggcaggacagcagcccgcaacaggccggccagccccccacaaccaccgcaccagcca

SEQ ID NO: 210747 - RNA, 71 nt, Homo sapiens
gagccaagaacaaagaagccaccgggcggcagcagcagggacccccagaagggggagaagggcgcagagac

SEQ ID NO: 210748 - RNA, 75 nt, Homo sapiens
gggacccgcacagagaaaaagaagaagagacgagaagagaaagaagccgacaaccccggaacgcgggcaaaaggc

SEQ ID NO: 210749 - RNA, 74 nt, Homo sapiens
ccaggggccccggagccaggaacacccacaacacaaccagagcaggagcggacagagcggcccaacagcgacaa

SEQ ID NO: 210750 - RNA, 81 nt, Homo sapiens
cgccgcgcgccgcgaccccaagcagacaagccgagaccaccaggagcagagcggaggcaaccagccaaaacaacggaaaac

SEQ ID NO: 210751 - RNA, 75 nt, Homo sapiens
acacccgccgcgcaaaaggggcagccggagcggcagagcccagaaggggcggaggaggacccggcagaccacacc

SEQ ID NO: 210752 - RNA, 85 nt, Homo sapiens
gccggaagcgccaggacaaggggacccgggacgacgagacgacaccacaaaggcgacgccgagggggcgggcaggagggaagaca

SEQ ID NO: 210753 - RNA, 74 nt, Homo sapiens
aggccccagcaaagaggacaaaagagcggaggagcggcgagggggacccccacgagcagacaagcaccgaaagg

SEQ ID NO: 210754 - RNA, 49 nt, Homo sapiens
caaaagcacacaagcaccgggacccaggacggaggcaccgaaccacagg

SEQ ID NO: 210755 - RNA, 91 nt, Homo sapiens
ccagaaagccgaggccccccagccagcgaacaggcgccgcacgcccgccccccgcgcccgccaccgcgggccgacacagccacgcggggcc

SEQ ID NO: 210756 - RNA, 81 nt, Homo sapiens
cggaggcgcggcggggcggacggcgcgcggcggcaggcacagagggaaaagaggacgaggcgcgaaaaggcaaaggcaaga

SEQ ID NO: 210757 - RNA, 62 nt, Homo sapiens
gaaacaagaaaacggagagcagccaggagagaaccccaagcgaaggaagaagcaaggaaagg

SEQ ID NO: 210758 - RNA, 86 nt, Homo sapiens
gggcggccggacggcgcaagaacagcgagcccaaagacaggcaggccaggaggggccgggaggcccagcccccgcgcggccggagg

SEQ ID NO: 210759 - RNA, 92 nt, Homo sapiens
cccggcggggagcgccggagccgggccgacggcaccaagcggaacccacaggagagaaccacccagagccgccaccagggggagaccgaaga

SEQ ID NO: 210760 - RNA, 78 nt, Homo sapiens
agacagcgagacccgccaggagcaaagcagaaaaagccaccggagcgaagcgaaggaagcgaggacaacaccgggaga

SEQ ID NO: 210761 - RNA, 79 nt, Homo sapiens
gaacaccagcacggcgaaggggccaagcgacagagaagcgacggaacagaaggagggagaagaaaaggacccaaagcag

SEQ ID NO: 210762 - RNA, 77 nt, Homo sapiens
gcggcccaccaacaggaacagggcagacgagcggaggacacccaacccggaacaccgaggcaagcaaaggcacgccc

SEQ ID NO: 210763 - RNA, 59 nt, Homo sapiens
gcgggacaacagaagccacgaccggggaaagagcaaacagaacaaaaacaagaaaagcg

SEQ ID NO: 210764 - RNA, 60 nt, Homo sapiens
agaacccaaccagggggaaacacagaacgcaggggcgaaccgaccaagaacaacacccag

SEQ ID NO: 210765 - RNA, 81 nt, Homo sapiens
gccgccggcccgcagccgccaccacccaggaccagaagacaagccgagaccaccaggagcagagcggaggcaaccagccaa

SEQ ID NO: 210766 - RNA, 79 nt, Homo sapiens
ggagcggacccccaagacaggaccgcagaacagccaagagcgggcccgggccaaccgaggaagcccacccagagagaga

SEQ ID NO: 210767 - RNA, 57 nt, Homo sapiens
ccaaggggcggcaaaaagacccacacagcgacaggaagaacagaccaaggagaaaca

SEQ ID NO: 210768 - RNA, 84 nt, Homo sapiens
gaggaccagacgggaacccggccccccaccccaccaaggagccccagaaaaagaccagggaaaagcccagcgaagaggacccag

SEQ ID NO: 210769 - RNA, 74 nt, Homo sapiens
cccggcccgcggcgcgcaccgggcgcggacgcccccggaagcgcccccccaggggcagcccagcacagcccgaa

SEQ ID NO: 210770 - RNA, 78 nt, Homo sapiens
ccaccaaccccgcagagaaacaggacagaggaacaaaggagaccagaggaaggcccagaaaagggcggaagagaaaag

SEQ ID NO: 210771 - RNA, 59 nt, Homo sapiens
aggcccgaaaagcaccccccaaagccggagcggcaggcgacccacaacggggacccaac

SEQ ID NO: 210772 - RNA, 70 nt, Homo sapiens
gggaagagagccgaaagcgcaagacaccagcccaaaacaggaacccgccacccaacgaagcggcaaagac

SEQ ID NO: 210773 - RNA, 60 nt, Homo sapiens
ggagcccagggaagcagccgaccagccgcggagccgggggcagagcccagcaagaccacg

SEQ ID NO: 210774 - RNA, 38 nt, Homo sapiens
cgcagccccgggaccggggcccaccgcacagaaccaca

SEQ ID NO: 210775 - RNA, 78 nt, Homo sapiens
gaacgcccagccaaagaaacaagccgggaaagggacaagaagggcaaagccgaaagaaacagaagcggagagacaggg

SEQ ID NO: 210776 - RNA, 76 nt, Homo sapiens
cacacagcaccgcccgacccccagagaggcgagcacaaccgaccccagaccgcagagcccaggccccccgagcgca

SEQ ID NO: 210777 - RNA, 78 nt, Homo sapiens
ccgagcaacccaggccagccaaggaacagaggaggaggcggcaaggagacggcccgccgggacagggagggaaaccag

SEQ ID NO: 210778 - RNA, 81 nt, Homo sapiens
cccggacacgaaagccgggaaagggaggcaccgccccaacccccccccgcccggagaaccccgcggaacgagcagcgggcc

SEQ ID NO: 210779 - RNA, 81 nt, Homo sapiens
gacaacacaaaaccagccaaaggggggcagcagggaaaaggggcgaggccggccgaccgacaagaagacgacgcaggggaa

SEQ ID NO: 210780 - RNA, 69 nt, Homo sapiens
gacacggcaaaggggggcacggagcaacaggaaaggacaccgggccaggaccagagcagacgacaccga

SEQ ID NO: 210781 - RNA, 77 nt, Homo sapiens
gcgccaagggcacagagggagagggaaacaacacgaggaggacggcacaaaaagcaccagcggggaggaacaacgaa

SEQ ID NO: 210782 - RNA, 76 nt, Homo sapiens
ggcggcggacgggacgacgggcagcgggaccgcacacaggaaaggacaaccccacagggagaaccggagacaaagc

SEQ ID NO: 210783 - RNA, 100 nt, Homo sapiens
caacgagcggacagaacaaagagaagcccagaaccacaaaggcagaggggcgggcaaaggagaggcacaggaagcagaggcaagaaacgaaggcagccaa

SEQ ID NO: 210784 - RNA, 73 nt, Homo sapiens
cggagaccacccacaagaagggagcaacagcgagcaacaggcaacgaaaacagacaaaacaacggaaaagcag

SEQ ID NO: 210785 - RNA, 74 nt, Homo sapiens
gcccagacgccaagaacacaaaaaccaaaaaaggaaaccagacccgcccccaggaggagcaaaggagcagcaaa

SEQ ID NO: 210786 - RNA, 84 nt, Homo sapiens
ggccggcaaccgagggacccgcgccaggagagcaggagagccgcaggacccagaccgaacggcgccggcgaccggcccaaccag

SEQ ID NO: 210787 - RNA, 87 nt, Homo sapiens
cgcaaggacggccacggcagccaacagcgggaacaagaggcgggagaagacgggaagccaccagagcccaggcacgaggagacccag

SEQ ID NO: 210788 - RNA, 80 nt, Homo sapiens
aggagccagcagagcgccagaaagccgacaagagacaacccccaaaagcaccgagaccgggcagagcccagggggagaag

SEQ ID NO: 210789 - RNA, 80 nt, Homo sapiens
ccgagggaaaggacaagagaagggaaggcgccaccgcggccaccgcaggcacaggccgaacagagccgaagagagaaacc

SEQ ID NO: 210790 - RNA, 76 nt, Homo sapiens
cacagaaaagccacaacccaggcaggacggccacccccagaagaagaccgccaggcgcggcgccccggggggagcg

SEQ ID NO: 210791 - RNA, 62 nt, Homo sapiens
acacaaaacggcaccccaccgagccgacggcagcgaaaaaagcggcaccaagccaaggaggg

SEQ ID NO: 210792 - RNA, 66 nt, Homo sapiens
gccagacccgagcgggagagaaggaacaccggaaacacagacgcaaccgcccaggcagacaggaaa

SEQ ID NO: 210793 - RNA, 71 nt, Homo sapiens
gccgcagccccacagcgaagaacaccaaaccggacccaggcaggccacgcagaacaaaagacgcacagaga

SEQ ID NO: 210794 - RNA, 74 nt, Homo sapiens
agaggaagaaaggccgggaggaccaagcagcggagcccacaccagacggagaaaccggaggccaggagggacag

SEQ ID NO: 210795 - RNA, 76 nt, Homo sapiens
cggcacccccaggaagcgcgaacaccgcccagaccacacgggggccaaaggcaaaagcggccaggaggccacaaga

SEQ ID NO: 210796 - RNA, 57 nt, Homo sapiens
caaaaaaaagaaggaagaagccgggaccgaaggcgaagagccaggacaaaaccaggc

SEQ ID NO: 210797 - RNA, 72 nt, Homo sapiens
aagcgcggggcagccagggccagcaggcaccgagccgagaggagacacggccacccacagcaggcgacgcac

SEQ ID NO: 210798 - RNA, 71 nt, Homo sapiens
gcgaagcgcagaagcccgaagaaaacagcgggaagagacagccaagacggggcggccgcacccaggcggag

SEQ ID NO: 210799 - RNA, 80 nt, Homo sapiens
cgacagagggcgggaggacaaagggagaaggcagagacgaaggaagggggagcaacagacaagcccgaaaggaacagcag

SEQ ID NO: 210800 - RNA, 72 nt, Homo sapiens
caggagcacaccgagagaaagcaggggacacgcacccgacccaagagaagaaagggggagaaaacgcaggcc

SEQ ID NO: 210801 - RNA, 101 nt, Homo sapiens
gcaaagggagcggagcgcaggcgaggcggcaccggggaacagcacggccggggggggcacagagccccggaagacagcccccagcgaccagacccagggcc

SEQ ID NO: 210802 - RNA, 86 nt, Homo sapiens
ccaccgcaggcgaggacggcggaccccgcggcgggaggagccgccccgagacaacacaaagagggaggccagccccggcacagagg

SEQ ID NO: 210803 - RNA, 90 nt, Homo sapiens
ggaagaaccaagacacaaaggacaaacgggaagcacaagcagagaccaaacgcaagaaaacaccccgaggggcccacaggaagagagaaa

SEQ ID NO: 210804 - RNA, 61 nt, Homo sapiens
cggggccaaccacccgcccagcccgggcacgccccgccgacagacagccagcacaacaacc

SEQ ID NO: 210805 - RNA, 83 nt, Homo sapiens
gaaggcgccgcgcgggacccggaggaccgaccccagcccacgggcacgcagaaaaacggcaggggcaagcgaagggcgaggga

SEQ ID NO: 210806 - RNA, 80 nt, Homo sapiens
caacgagaagaagccaccaaggagcaggaaaacgaccccccgggccacagcagcgaggcgcacaaacgaagaaaacacac

SEQ ID NO: 210807 - RNA, 70 nt, Homo sapiens
ggcacacaaggaaggaaaggcagcagaccagcggcagaccaggaagcaccaaccccacaagacccacaac

SEQ ID NO: 210808 - RNA, 60 nt, Homo sapiens
ccacagaaggacgggagaacaccccacagggaagaggggaaaagccagagcaaggaacca

SEQ ID NO: 210809 - RNA, 88 nt, Homo sapiens
gcgcgaggggaacggaggccagagcgcgcccaacagccgacgggcgagcaaagggaagacaccccgaagagcagacggagaaggagca

SEQ ID NO: 210810 - RNA, 73 nt, Homo sapiens
acggacccaacagagcacgcaaagggagaaacagaacaggcgacgggaaaggaaagggaccaaagaacagaac

SEQ ID NO: 210811 - RNA, 69 nt, Homo sapiens
gggcgcgccccccaccagacggagccccgaggagcaggaaaccacgaccaagaaaacggggaaaaacac

SEQ ID NO: 210812 - RNA, 76 nt, Homo sapiens
cccccaacggaaggcaggacgaaagcaccgaacaggaaaaggacagaggggccagggaagcaccgaagagagacaa

SEQ ID NO: 210813 - RNA, 74 nt, Homo sapiens
acaccaggaaagacaggagaccaaaaaggggcacgcacaccccccggccccgaagaccaagcagcaaacgaaga

SEQ ID NO: 210814 - RNA, 66 nt, Homo sapiens
cccgggcggggcagagcagcccccagccagccgcgagagcaccacgccgagaaacggcacagaggg

SEQ ID NO: 210815 - RNA, 67 nt, Homo sapiens
acggaagcaaagccccaagcacccgcccacaaaagccaagccaaccagaacgaagcccaaagaaaag

SEQ ID NO: 210816 - RNA, 83 nt, Homo sapiens
cgcgccaccgcagacagcggcaagacaagcacggaaccgcccgagacaacccggcgcggagccgggccgccccagaacccgca

SEQ ID NO: 210817 - RNA, 59 nt, Homo sapiens
gcagcagcacagacccagacaaacaggacggaccgccggagcccagcccagagcacccc

SEQ ID NO: 210818 - RNA, 69 nt, Homo sapiens
gcagacgaagaccaacgaaagaaaacacacacacacaaggcagagaaagagcgagagggaaaggaagag

SEQ ID NO: 210819 - RNA, 71 nt, Homo sapiens
acccgccgcggcgcccgcccaggcaccggaaggcaaccaaccagccgccgaaacaccacgccacacaccag

SEQ ID NO: 210820 - RNA, 115 nt, Homo sapiens
cccgacgcgccgggccgagggacaccagccgccggacccgcgggccacgaaaaacaaccaccagcgagcaaaaaggcaaagaccaagaccaccaagaagcgccccagcggcaaca

SEQ ID NO: 210821 - RNA, 69 nt, Homo sapiens
ccgccgcaggcgcccccggagaaggacggagaagcgaaagccagaccggcaagagcggaagaaagcacc

SEQ ID NO: 210822 - RNA, 79 nt, Homo sapiens
agggagacaaaagagaaagcaggccacgaaaacacaagcacagccgcgagaggagaccacccgaaaggacagaaggaaa

SEQ ID NO: 210823 - RNA, 73 nt, Homo sapiens
ccccggacgggacaaacagcacggaacggcaggccggggacggcaacccgggacagaagaaagaacggcaaga

SEQ ID NO: 210824 - RNA, 74 nt, Homo sapiens
aaagaagccacgaagcaaaaagacccccaagggaacggcaccgggagaggaggccaagcggaggaccgagcccc

SEQ ID NO: 210825 - RNA, 71 nt, Homo sapiens
ggaccaggcgaccagcaccagcccgaccagagcgggacaaggagaaccggcacggaagcgcagccacagcc

SEQ ID NO: 210826 - RNA, 69 nt, Homo sapiens
ggaggggcccaccagcagggcacacaggaaggaacaggaggaaaccacagagggaagcccagaagaagc

SEQ ID NO: 210827 - RNA, 81 nt, Homo sapiens
ggcgcggccgcaggggcaccagcgcgccgcggggccagaacaccggaggccccaggcgccgagccggcagcccaaccggag

SEQ ID NO: 210828 - RNA, 76 nt, Homo sapiens
ggccgggggacgcgcggaggcgcacgacccggggacccacagcgcggcagccaagcgaaacagcgggaaccccaaa

SEQ ID NO: 210829 - RNA, 84 nt, Homo sapiens
ggagaggaggcgcgggcggagcggaaagaggaggagaggggaggaggcgaagggagcccacaggagacaaaagccaaaagaacc

SEQ ID NO: 210830 - RNA, 81 nt, Homo sapiens
caccaccacgccagccgcaccagccgcccaagccgcacagccgcggcggcagcagcaggagagcagcccagaaagccggga

SEQ ID NO: 210831 - RNA, 69 nt, Homo sapiens
gagcgaacgagacagaacaggaaaaagggcaagcagaagaggaacagaagaagcagagcagagacggag

SEQ ID NO: 210832 - RNA, 42 nt, Homo sapiens
gccacacaggccagaacgaggcacagaggacccgaaaccgga

SEQ ID NO: 210833 - RNA, 106 nt, Homo sapiens
cggcaggagccgcggagccggcgcgagaggggcgcggccggagcgggcggcgagacaaaggcgacgagcccaaaaggcagagcgaggagagaagaaggagggaaag

SEQ ID NO: 210834 - RNA, 68 nt, Homo sapiens
cagcaagagcacccgacccacaggccagagagaccagcaccagacagcgaaaaagaggacccaaaaaa

SEQ ID NO: 210835 - RNA, 76 nt, Homo sapiens
acgggcaaaagaccaaagaaggcaaggagagaagagaagaacagcacaggacagacgggacagccggagggggcag

SEQ ID NO: 210836 - RNA, 85 nt, Homo sapiens
ggaccgacagccaggaggcggcagacaccccgggccgccagccgcagagcccggcgacgaagaggcagcaacgaagaggcacgga

SEQ ID NO: 210837 - RNA, 76 nt, Homo sapiens
gcgccggacggggagaggggagcgccggggcggcccaggcgagcgggcgaagccgacgagcccgaacagacgcacc

SEQ ID NO: 210838 - RNA, 80 nt, Homo sapiens
ggcacgagcggccgcggccaggcgacgccacccaagacacaaacggcgacacaggccaaggagaaggccaagacaagaac

SEQ ID NO: 210839 - RNA, 69 nt, Homo sapiens
gggaccagaccaaaggcaaaggccaggacaaagacccggggccaggcgggccccacgcgggcccggaca

SEQ ID NO: 210840 - RNA, 71 nt, Homo sapiens
ccgaggacagcaccaaacaacaccaaaggaaagagggaaggcaccaggagaaggcaccgggaaacagaaag

SEQ ID NO: 210841 - RNA, 69 nt, Homo sapiens
cacggaacagagccggggggacgaccacaagaccggggaaagccacaccaagcgggccccagcaccggc

SEQ ID NO: 210842 - RNA, 68 nt, Homo sapiens
aggacggggcccaggaacggaaaagggcagccgcacgggcccaagcgggggcgagaggaaaaaagaga

SEQ ID NO: 210843 - RNA, 62 nt, Homo sapiens
gccccaggacccaccagcgaaacaagaccaaaaggcagacagaagggcgggaagagaagcaa

SEQ ID NO: 210844 - RNA, 70 nt, Homo sapiens
caaagcggggcgaaaaggaccagaagccaccgccagaaggaggaaagagaagggccacgcaacggacaca

SEQ ID NO: 210845 - RNA, 80 nt, Homo sapiens
aggaccgacccgggcacccgggcccgggaccccccgcgccgcagcagcgagcgacgcgcccacggaggaggcgggggccc

SEQ ID NO: 210846 - RNA, 61 nt, Homo sapiens
aagcaggcgacaggccgagcgacaggaccgccgaggcaagagccacaccaaggcggcagag

SEQ ID NO: 210847 - RNA, 69 nt, Homo sapiens
ggagaggcggcaaagggagggacgcgagagcccacgaagagcgacggagcgaacccggacgaagaaacg

SEQ ID NO: 210848 - RNA, 32 nt, Homo sapiens
cgagcggcggaagacaaagaggggccaccgca

SEQ ID NO: 210849 - RNA, 78 nt, Homo sapiens
cggcgaaccggcgggaccccaaaccgcgaccgcacaagcagccgccagcggaaccaagcggcgcggcacacgagacca

SEQ ID NO: 210850 - RNA, 74 nt, Homo sapiens
cgagaacggccgcccgccgcagcggaggccgggaacggcagacgcagcagagagaccaccagcgagcgcaggcc

SEQ ID NO: 210851 - RNA, 76 nt, Homo sapiens
cgcggccggggcccgacccccccaccgcagcccaccccgcaggcgggcaggccacagcacagcaaagccacaacac

SEQ ID NO: 210852 - RNA, 73 nt, Homo sapiens
agaacggcaaaccggaaaaaaacgggaccagccaccggggccaggaccggaagaacaggaagcacaagcaaac

SEQ ID NO: 210853 - RNA, 78 nt, Homo sapiens
gcagggcagcacacgaccgaggaagccgacaggaccgggggcacggaggggaagcacccagaacccccggagacgcgg

SEQ ID NO: 210854 - RNA, 47 nt, Homo sapiens
gcggcccgcacgccaaaacgagccagacagacacagcacagcagcca

SEQ ID NO: 210855 - RNA, 82 nt, Homo sapiens
aacaggagcggagcagccaaagaggaaaggccgagggggacggcaagagcacacaccccggaccacggcccgggacacccga

SEQ ID NO: 210856 - RNA, 75 nt, Homo sapiens
agagcgggccggggacggcagagaccacaagaaccaggagagacccagagccagcgcaggggaagccgcaaggac

SEQ ID NO: 210857 - RNA, 74 nt, Homo sapiens
gcgacggagcaccggcggcggcagggcgagagacacagccccgaagcgaaagagagccaaccgagcgcacacgg

SEQ ID NO: 210858 - RNA, 76 nt, Homo sapiens
cagcagcaggcagcaaccggcccaaggaacggggggccacgacgggccaaagcggagaagacacaaggcgcagcgc

SEQ ID NO: 210859 - RNA, 83 nt, Homo sapiens
cggaggcgacgaggaggcggacccccggcgcaggaaggggagagaaggcgcaccagaggaagaccggaagaccggaaaaggcc

SEQ ID NO: 210860 - RNA, 40 nt, Homo sapiens
gcagagaagccacagacaccaggcaagacccccaccacgc

SEQ ID NO: 210861 - RNA, 55 nt, Homo sapiens
gaccagcagcacaaaagcgcgccaacgaacccaccacgaaggccagaggacagaa

SEQ ID NO: 210862 - RNA, 102 nt, Homo sapiens
gccaaagaggacaagaacggaggaaaaggcgcccgcgcaccagggccggagacagggggcagcacgccgaaggagagaccagacaacaggccagggaaggga

SEQ ID NO: 210863 - RNA, 64 nt, Homo sapiens
gagcccagaacccaggggcaaacgggacgcaaaccaagcagcgggagagacaccgaaggcggag

SEQ ID NO: 210864 - RNA, 79 nt, Homo sapiens
cgcagcaggcggggaggacgaggggcccgggcccagagcggaagacaagacggcggagagagcagggacgccaaggacc

SEQ ID NO: 210865 - RNA, 80 nt, Homo sapiens
ggcccggagaacggggaacggagaaaaacaagacggcaaagcaagggcacgaggccagcgcgcaggcccggaggagcggg

SEQ ID NO: 210866 - RNA, 64 nt, Homo sapiens
gcccgccgccacacgcgcaaagcccggcaaaagaaggaccccagcaggaaaagcaaagcaagag

SEQ ID NO: 210867 - RNA, 81 nt, Homo sapiens
caggccccaaggccaacaaacggcaggagaggaggagggcccgccccggcggccacaggcaagccccccacgcggggaagg

SEQ ID NO: 210868 - RNA, 48 nt, Homo sapiens
ccacacaaccgggaccaagggagaaacgaacaggagacagcggagaaa

SEQ ID NO: 210869 - RNA, 76 nt, Homo sapiens
cgacacagacagaccgaggggacggccggacacacagcagcggacgacgggagcagacggacgggccacggggagg

SEQ ID NO: 210870 - RNA, 75 nt, Homo sapiens
agaaacaacgagcggaaagcaacccggagcggaggacaggagaccgaacagcaaggagaagcgaggcacgagacc

SEQ ID NO: 210871 - RNA, 73 nt, Homo sapiens
ggaggagcacagaacgccaggaccaaaacagggagaaacacagccagaagggagaagagcaaccggacacaga

SEQ ID NO: 210872 - RNA, 80 nt, Homo sapiens
gggccaagaggcagcaagaggaaggcgcccgcggcgacgggggcggcgcccccgggcgagacagacccagcacggacccc

SEQ ID NO: 210873 - RNA, 74 nt, Homo sapiens
ccgccggacccaaagcccagacccaggaacaaggccggaagcacgcacaacgaggccaccacgcaccccacccc

SEQ ID NO: 210874 - RNA, 69 nt, Homo sapiens
ccaccccacagaggggagaggccggcgacccacaggcacaggccacagccacacagggaacaccagagg

SEQ ID NO: 210875 - RNA, 78 nt, Homo sapiens
cgccgcggagaccccaccgccggcgcgggaaacgggcgaagcgacgagccgcgaggagcaggcaccacacccgagggc

SEQ ID NO: 210876 - RNA, 82 nt, Homo sapiens
gcggcggccaggccagacccgaaggccaggagacccgaccccaagagccaaaccccagccaccggaagaagaagagaacacc

SEQ ID NO: 210877 - RNA, 85 nt, Homo sapiens
ccgaggccccccagccagcagaacgaaacccaccagagaaggcgcggccacccaggacccgggggaggcagcgaagaaaacaaaa

SEQ ID NO: 210878 - RNA, 61 nt, Homo sapiens
cccagacccagcccgggcccggagcaggacagacccccagaggcgcaggaagggcaacacc

SEQ ID NO: 210879 - RNA, 65 nt, Homo sapiens
gcgcggggacccgacgcccgcacgcacgggagaccccccaaagggagaccacacgagaggaacag

SEQ ID NO: 210880 - RNA, 65 nt, Homo sapiens
gccgacaggccaagagcagcaggaagaccaacacgcacgaagggaacacacggaagcaaccagcc

SEQ ID NO: 210881 - RNA, 58 nt, Homo sapiens
cccagggccaggcgccgccagaacggagccagcacgaacgcacccaacggggagccgg

SEQ ID NO: 210882 - RNA, 69 nt, Homo sapiens
agaaccccgcacggacagcgacccgccccacccgcagcagaacaaggcaaggacccacagaccggcgac

SEQ ID NO: 210883 - RNA, 56 nt, Homo sapiens
aaagcacaagagcaccaacgagggccagcagaagaggaccagacgcccgggggggc

SEQ ID NO: 210884 - RNA, 70 nt, Homo sapiens
ggcaaacgaccaaagacaagaagggacaccggagaccgaagaacggaagcgcacgaacaaggcggaccaa

SEQ ID NO: 210885 - RNA, 72 nt, Homo sapiens
aaagagccccgaaaaccacccagccgccggggccggcacgaggaggggccgcggagaacagcaagagaaaga

SEQ ID NO: 210886 - RNA, 78 nt, Homo sapiens
accaaaaggcacacacggacacgggaagaagaaaacacggggaagagaaagccaaaaagaagccaacaagccgcggag

SEQ ID NO: 210887 - RNA, 72 nt, Homo sapiens
gcccagacgcgcccgcgggcccggccacggcggagccaaggccacccagaggagaaggccaccccgccggag

SEQ ID NO: 210888 - RNA, 66 nt, Homo sapiens
agcaggccccgggcccggcgccgccgcccgcagcacgcaaacaagagaacgggcccacacaaccca

SEQ ID NO: 210889 - RNA, 81 nt, Homo sapiens
cggagcggacccacaccccggaccgagggacgcggggcagagaacacacagaagagaaaaaccgaacacaggacacacgac

SEQ ID NO: 210890 - RNA, 72 nt, Homo sapiens
caaaaaaaagccaccaccgaaacgccaaaaagacacaaggggggcccccggagagacagaaccaacaccaga

SEQ ID NO: 210891 - RNA, 65 nt, Homo sapiens
gggaagggcggacacacccggacaggcgaagaggagacaaaagggaaaccccgacaggcacaaga

SEQ ID NO: 210892 - RNA, 85 nt, Homo sapiens
cggagaagaaggccgacaaggaaggaagaaggcgcacaccccagcgcgcaaagcgcgaggggcgagaaggacagaaaacgggccc

SEQ ID NO: 210893 - RNA, 78 nt, Homo sapiens
ccacgggccagggcggagaacagaccgaggaagccgccgacagacccagcagaagggcaaggagagcgaaaggaaaac

SEQ ID NO: 210894 - RNA, 75 nt, Homo sapiens
ggaggagcaggcgagaagagaaggggcaccaccacgaggcgaggggccaaccaaggaggcgaggggccccccgac

SEQ ID NO: 210895 - RNA, 49 nt, Homo sapiens
cgaccacgcccggcgccccaccccaggcgggccaaaaccacaccaaaac

SEQ ID NO: 210896 - RNA, 74 nt, Homo sapiens
acagcgacaaggagagaagcgcggagccccaagggcgcccaagaagccaaaagggaagcacgagaagcaggcac

SEQ ID NO: 210897 - RNA, 66 nt, Homo sapiens
cgcacgaagaccaagacggacacggaaaaaaccaggaggagagagagagagagaggaagcgaagaa

SEQ ID NO: 210898 - RNA, 55 nt, Homo sapiens
gaagcacagagcgcgagcagagagaccggaccaaaccagagacaaaaggcacagc

SEQ ID NO: 210899 - RNA, 75 nt, Homo sapiens
cggagacgagaccccagcagaggagaaagaacagcgacccacagagagagggagaagagaagcagagagagagac

SEQ ID NO: 210900 - RNA, 59 nt, Homo sapiens
gagaaggaccaagaaccagaccaagcccacgaagaccggagaagaggacggcgccaccc

SEQ ID NO: 210901 - RNA, 73 nt, Homo sapiens
accccacagggaagaggaccccaggccccgacaaaacaaagagaaaggaagaagcacgacgcagaggacaaac

SEQ ID NO: 210902 - RNA, 77 nt, Homo sapiens
ggggagagggcaggaaccaccgcccaaagccacccggggaaacgacaacagcgcaagcagaaaacccaaacccagaa

SEQ ID NO: 210903 - RNA, 51 nt, Homo sapiens
ggacggcggaaaggcccaggcgccccgcagaccgacccgcgagacacgcgg

SEQ ID NO: 210904 - RNA, 84 nt, Homo sapiens
gaagggcgcacccccgagcgaagaagcccggacagacacagggggaggaacagcccgaacccaagaaggcagaagccagccccg

SEQ ID NO: 210905 - RNA, 78 nt, Homo sapiens
gaggagggaggaaaacaaccgagggcagaaagacggccgagggaagcgagaggaaaacagcgagagaaaacgaagaga

SEQ ID NO: 210906 - RNA, 93 nt, Homo sapiens
cggccaggcgacgccacccaagacacaaacggcgacacagagacaaagcaggaggacacaagaagggaggaaaggcggacccaggaaccacca

SEQ ID NO: 210907 - RNA, 76 nt, Homo sapiens
agaagagccacgcaggccaggaggagaacaggagggagcccaaagcggccagaaacagacaaaggaaaagcaaagc

SEQ ID NO: 210908 - RNA, 79 nt, Homo sapiens
gcggcgggacagcagcgacccccgacggagggcggccaagaaccgaggaacaccagagcgcacacgcccagaaggccgc

SEQ ID NO: 210909 - RNA, 77 nt, Homo sapiens
ggcgcgcgcggcccggggcggccccgcgggccacagccaaagagggccccgcaccggggacgggaccgcagcggaga

SEQ ID NO: 210910 - RNA, 63 nt, Homo sapiens
ccggaagacggcggcacaggagcgcacgagcggggaccacaggagccaggccgggccccccgg

SEQ ID NO: 210911 - RNA, 72 nt, Homo sapiens
gacggagaggaagcgacgcgggggggaaaacacacgcaggagcagccggcaaacagaaaaaccgcagcgcca

SEQ ID NO: 210912 - RNA, 80 nt, Homo sapiens
caaggagcgcgcgcacagagaccaccgggcgcaccccacccgggccgcccgaaggcggacaaggacagcaggagagagaa

SEQ ID NO: 210913 - RNA, 79 nt, Homo sapiens
cagccccccaggacccgggccgcagcagcccccaggggccaaaccaggcccgccaccccggcgcccccagagccgccca

SEQ ID NO: 210914 - RNA, 76 nt, Homo sapiens
gcgccagccggaagcccgagggcagcgcccacggccgcgaccggccgcggcagacaaggcccaaagacagcagggg

SEQ ID NO: 210915 - RNA, 80 nt, Homo sapiens
agaacccaggacacagcaaaagcaaagaccagaaagaggccacccaagaaacgccaaaagggcccaccgaaccagccccc

SEQ ID NO: 210916 - RNA, 85 nt, Homo sapiens
cggcggcagggcaagcggcgacggaccccaagcagaacaacagaggcagcaggcacgaacgccaaaacccacaggaacagcgaag

SEQ ID NO: 210917 - RNA, 88 nt, Homo sapiens
ggggaagcggaccagaaggaccgcagggccagggcgcagacgccgggaagaggaagaacgcgagaaaaaaacgagcgacagagaaggc

SEQ ID NO: 210918 - RNA, 35 nt, Homo sapiens
gcggggacagggaaaaagaaacccgaccgccccag

SEQ ID NO: 210919 - RNA, 74 nt, Homo sapiens
gggagccaggaaaccaggagccggccagaacgggccgcgacgaaccggccgaggcgggccgggcccacgggcgc

SEQ ID NO: 210920 - RNA, 77 nt, Homo sapiens
ccacccgcgcgccgccgccgaggagaaagaacagagagaagggcgggagaaaccaaggaaagagaaaagcgggaggc

SEQ ID NO: 210921 - RNA, 51 nt, Homo sapiens
gggagaagaaaagacaggcggggcaccaggcccagacggcgaacccgagca

SEQ ID NO: 210922 - RNA, 85 nt, Homo sapiens
acgggccgcgcggcccagcccgacgggcagggcggagacccaggccgcccagggcgggaaagcaggcaggagggagagcgccgaa

SEQ ID NO: 210923 - RNA, 86 nt, Homo sapiens
cgggcccgccccacaggagccggacacgcagacagcaagcgaggacacagaccgcccacccaccaccccagagggaggccaacaca

SEQ ID NO: 210924 - RNA, 71 nt, Homo sapiens
gggcccccaggcgagccacgccaccgggcacggagcgaggcagaacacagaagaccggccgcccccacgag

SEQ ID NO: 210925 - RNA, 84 nt, Homo sapiens
cccgcgcgagcacccgagcggcggcggcggcagcagcggcagcggcaagcaccgacggcagcggacgaccccagggagaggccc

SEQ ID NO: 210926 - RNA, 90 nt, Homo sapiens
caggcccacggaggaagagccgggcagcccggagcgggccaggcgaccccgcacacacacccaccagccacggcagcccagcggggaccc

SEQ ID NO: 210927 - RNA, 83 nt, Homo sapiens
cccgaggagaaggagaagccacacaaggaaaccccgccagccccagagcaaaggaccccccacgagccagcaaaggaaggcag

SEQ ID NO: 210928 - RNA, 79 nt, Homo sapiens
aaaaggagaagaaaccagaccagagagaggaggagaagaagagacaccagcggcaaacaaaaaaagaggaaaagacgag

SEQ ID NO: 210929 - RNA, 84 nt, Homo sapiens
aacagggcaccaagagaggcgagagaccagaccagaccaagaccgggcccaggcgggagcacacaccacaagaagcagggaaaa

SEQ ID NO: 210930 - RNA, 74 nt, Homo sapiens
agaggcaccaaagcagccgcccccgcagccccgacaagggggaagagggaacagaaacgcccccgacggaaacc

SEQ ID NO: 210931 - RNA, 69 nt, Homo sapiens
agaggggagaaaaccagagcggccaccaaggcaggaaggagagacaaacagcagcaggcagagagaacg

SEQ ID NO: 210932 - RNA, 80 nt, Homo sapiens
gccgcccgggagcgggagccgcggggaaccgggcaccgcacccgcccgggaggggccgccacaggcgcccgcaaaggccc

SEQ ID NO: 210933 - RNA, 66 nt, Homo sapiens
gagacacaggaagcagagccagaaacggcgaggaaagagaggagccccggaaagaaaaggacagac

SEQ ID NO: 210934 - RNA, 71 nt, Homo sapiens
gaagaccacggaaaaagacccgaggccacgagaagccacgagcccaggaggcagccggggccgagagcccc

SEQ ID NO: 210935 - RNA, 70 nt, Homo sapiens
cccccaaaggcggaacaggacagaacaaccgaaaaacagacgacgaagccccagaagaacgagcacgaac

SEQ ID NO: 210936 - RNA, 87 nt, Homo sapiens
cagagagaggcgcagaaggaccgggagcacagccgccgaagcgcgcccaaagggagcaaggaggaacagcgggaacgccaccggccg

SEQ ID NO: 210937 - RNA, 69 nt, Homo sapiens
cacgcccggggcgaggcccgcggggccaggagaacaccccaccagaccacccagcaagcccacaaaaaa

SEQ ID NO: 210938 - RNA, 79 nt, Homo sapiens
agacacgaagcaaaaaagagaaaaacggagcagaaagaccgaaagagccggcccaaaaggaaaaccgccagaaccacag

SEQ ID NO: 210939 - RNA, 65 nt, Homo sapiens
ccgaaacaggacaccaaaggcccagggggggccgagcccccaacacgcgcccgggccaaacccca

SEQ ID NO: 210940 - RNA, 79 nt, Homo sapiens
aaagcccaaaagccaaggaacgggacaaccgaaagggaggcgcgaaaaagggagcccgcacgcggaccgaggaggcaca

SEQ ID NO: 210941 - RNA, 71 nt, Homo sapiens
aggaaggcaccagcaaggacaggcgagacagcagccgcaagaaaagggcgcgaaccaggaaaaaccggagc

SEQ ID NO: 210942 - RNA, 76 nt, Homo sapiens
gcacggacgcggagaggggagccgcagccgacggggaaacagaccagaccaaggccacaagaaggcaggccgacag

SEQ ID NO: 210943 - RNA, 75 nt, Homo sapiens
gggaggggacgcagcaccaacccgccgaaaaagcgacaaggagagggacaaggggagcggagaaggaggaagcca

SEQ ID NO: 210944 - RNA, 76 nt, Homo sapiens
aagacagacaaaccaggaacccagaaggagacgcacgaagcagaacaaaaaaaaaaggaggcaggccagaagacaa

SEQ ID NO: 210945 - RNA, 58 nt, Homo sapiens
acgggacccagcacaccccagcagaaagacaaagcaccagaacagcgcgagccacaag

SEQ ID NO: 210946 - RNA, 67 nt, Homo sapiens
cggacagcaagcaccaaggaaacagaagacagccgaaccaagggcgacaaccagagacaagcaggcg

SEQ ID NO: 210947 - RNA, 78 nt, Homo sapiens
gacaaagagaaggaaagcagaagccaccgggaagaccagcgcaaagagaaaggaaaagaagaaggcaaaagcggacaa

SEQ ID NO: 210948 - RNA, 80 nt, Homo sapiens
aagaaccaacccagcagccaaaaaaaaagacagaaagaacagcgaaaggcgagaaaaccccaaaaaagcgaaggaacaca

SEQ ID NO: 210949 - RNA, 84 nt, Homo sapiens
cgcaggcggacgccaccccggagaaggagccccccgcacccccagaggacgacgcagccgagacaccagcccgaaacaccacca

SEQ ID NO: 210950 - RNA, 58 nt, Homo sapiens
cccccagccacaggaaccgagcccagaggacagaaccccagcccagagccaacacccc

SEQ ID NO: 210951 - RNA, 69 nt, Homo sapiens
agaccccccggggccccgggaccaacgcgcgggccggggcgaggccccgggggcacccgaggaggaaga

SEQ ID NO: 210952 - RNA, 81 nt, Homo sapiens
ggccccagcgccaaccaaaccgaaagccagaaggagcgaagcaacgggagagcaagaggaaggaagcaagaacccgaaaaa

SEQ ID NO: 210953 - RNA, 42 nt, Homo sapiens
cccgaggcgaggaggagcgcggcgaagagaaaaagccaacag

SEQ ID NO: 210954 - RNA, 61 nt, Homo sapiens
cgcagagcgcgcagaccccggaccaagaacgcccagcccgcgggcaccggcagaaaggagg

SEQ ID NO: 210955 - RNA, 77 nt, Homo sapiens
gcagacgggagcgcaaggcgccccaaggccagacaaaacggaccacacgcgaggccagcggaaagggcgccaaaggc

SEQ ID NO: 210956 - RNA, 76 nt, Homo sapiens
aagaagaagagaagacgcggcacaagcagggaacaccggccaagaaggccaagaggcaacagcgaaaaccaaccaa

SEQ ID NO: 210957 - RNA, 59 nt, Homo sapiens
ccccggcccggaaggagcagcaccacagaaagagaggcgacgagcgacagaagaaaaag

SEQ ID NO: 210958 - RNA, 72 nt, Homo sapiens
gcacgacccacgcggaacggccccgcgagcggccaccgcccaccaacagcgggaagaagccgccccgccgcc

SEQ ID NO: 210959 - RNA, 72 nt, Homo sapiens
ggccggccgacaacacagggcgggacgcggcgaggagcgacagccgcggcggcacgggggggcgcgcgaccc

SEQ ID NO: 210960 - RNA, 77 nt, Homo sapiens
ccgggcggagcggacgggagaggggaaagaaaaagagcccaccaaaaggaacagacggccccaggcggacaacgcac

SEQ ID NO: 210961 - RNA, 74 nt, Homo sapiens
agagaccaaccaacagagcagggaaaggcccgcagccaggcgcggaaggaggccgcaccgcgaggaacccgagc

SEQ ID NO: 210962 - RNA, 80 nt, Homo sapiens
cccgcaccccccgagcagcccggggaccagcacgcaggacaggagagacaacggaggcaagaaagacggagaagcgagaa

SEQ ID NO: 210963 - RNA, 55 nt, Homo sapiens
gcaccgggccaggcacgcgcagcggcagcgaagaagacggaccacgcacacccca

SEQ ID NO: 210964 - RNA, 79 nt, Homo sapiens
ggaagcaagacaaaggccagcagacaggcaggaggacggcccgccaagaaagagggccgaccaagcagaacccgagaag

SEQ ID NO: 210965 - RNA, 87 nt, Homo sapiens
cgaacacgccggagccgccaggggaccaaaagaacccagccaacccgcagagggaggggaggggcgagcggaggagagcggggccca

SEQ ID NO: 210966 - RNA, 53 nt, Homo sapiens
ggacagacgggcagcggcagaagaggcggccacccacgagccgacggcaaacg

SEQ ID NO: 210967 - RNA, 45 nt, Homo sapiens
gcacaagaggcccgcccccagccaaccaacaggggagcggcgcgc

SEQ ID NO: 210968 - RNA, 66 nt, Homo sapiens
gcaaggaaaaggaagagagaccgacacccaagacaagacagcgcaaggcagggaagcccagaggca

SEQ ID NO: 210969 - RNA, 39 nt, Homo sapiens
cccgcaacagcccccgcccaacgaaggagccaagagacc

SEQ ID NO: 210970 - RNA, 74 nt, Homo sapiens
cccgggcccgaggaggaacagccgaacgacccgcaccaacagccaagcagccgacaaacagccacccggggagg

SEQ ID NO: 210971 - RNA, 90 nt, Homo sapiens
ggagaccgcggggacccggagggagcccggcggccggcccgagcgggaagaagccgcagcaagccgcagcggcgcgcaccgggcggccca

SEQ ID NO: 210972 - RNA, 66 nt, Homo sapiens
cacagcaagacaaaacaagacggaggcaagaagaagcgagagaagggaacaggacaagcgaaccgg

SEQ ID NO: 210973 - RNA, 78 nt, Homo sapiens
agcggcggggcggcggcaccaaggcccccaagccccccggcgacgacgcccgagacgagaagaggacagacggaggag

SEQ ID NO: 210974 - RNA, 68 nt, Homo sapiens
gcagagcgaaggcggaaagaggaagaccaaagggcacacaagaggaccgcagagagagaggcagcgaa

SEQ ID NO: 210975 - RNA, 78 nt, Homo sapiens
aagaaaggccaaccagcagacagacaaacgaaggagcaggacaaggaagcagaaagggccgccaaaacagggagagag

SEQ ID NO: 210976 - RNA, 71 nt, Homo sapiens
acaaccacagagcgcaggcgccaccacccacccgaacacagccccagaggaggccaacacgccaccacccg

SEQ ID NO: 210977 - RNA, 77 nt, Homo sapiens
cacccaggcgacgcccaccaagggaccggagggccggaagcgggccgggacaacgggcaggagccggaagggcgaca

SEQ ID NO: 210978 - RNA, 79 nt, Homo sapiens
gagaaggaagggcaggcaagacccaccccgggaagaaagcaaacaagcaaaaacgagaccaggagaaacgaacaagagg

SEQ ID NO: 210979 - RNA, 74 nt, Homo sapiens
gaacccaacagagacccgcccacgcagaggacacgagcccagccaggcgagccagcgccaaagaaaaagaacaa

SEQ ID NO: 210980 - RNA, 67 nt, Homo sapiens
accacaggacggaagcacaggggccaccagagcgcccgagaagcgggacaccaccacccgaaccccg

SEQ ID NO: 210981 - RNA, 82 nt, Homo sapiens
ccaggaccgagaaggcgcagcggaaaggaacgcagacccagcagcccagcgccgagcgcagggacagaggacgcggccccag

SEQ ID NO: 210982 - RNA, 77 nt, Homo sapiens
ggcaggcgggaaggacgggcgcggacccagaggggacggcgccgcaggagaagccggaggcccggcggccgccccgg

SEQ ID NO: 210983 - RNA, 83 nt, Homo sapiens
agggccaggcgccgccagaacgcaccagccacaacgggaccacgcccagccccgggagcgggcccccggccacccgccacaaa

SEQ ID NO: 210984 - RNA, 67 nt, Homo sapiens
agggagagcaggcggagaggaaaggggaaaaaggaacagacccaacaaagggaggaggaggagagag

SEQ ID NO: 210985 - RNA, 77 nt, Homo sapiens
gccgccccgcccgccgccggcagcgcccgaacccaaaggggggacgcggccccagccgaaccgcccggaaccgggag

SEQ ID NO: 210986 - RNA, 74 nt, Homo sapiens
agggggcacccgcggccggcccggggccccgggaccggcgcccccccgcagaaaacacagagaaaacacggaga

SEQ ID NO: 210987 - RNA, 73 nt, Homo sapiens
ggccggggcgacccgggaagcggggccccgcccgccgcgccacagcaggaccgagaagaagggaacagccagc

SEQ ID NO: 210988 - RNA, 81 nt, Homo sapiens
agagcagaaaaagccagcaagcggacgccagcagacacgggaccggcaaagcgaggcaggcggagacaaggcacgaccggc

SEQ ID NO: 210989 - RNA, 68 nt, Homo sapiens
aaacccccggcggcgccggggcccgccgcagaccaaccagggaagcaagacggaagaggggaacacag

SEQ ID NO: 210990 - RNA, 85 nt, Homo sapiens
ccaaggccccagaaaggggagcgccgccgccgcagcgggaccgcgcgaccggcgcccgcccgcggaaaagagaaccgccagcaag

SEQ ID NO: 210991 - RNA, 77 nt, Homo sapiens
cccccccgcaaggggacgcccagggacaaccacccccaaggaggacaccccaccagcagcggaccacccccccgccc

SEQ ID NO: 210992 - RNA, 79 nt, Homo sapiens
gccacccccgccgcagaacacagcccgccaaggaacccgcggggcagaccacaccagcacacccagcacggcaaacaaa

SEQ ID NO: 210993 - RNA, 51 nt, Homo sapiens
agaagcaacaccaacgaacgaacagggcggagaacggaaaagcaccaggaa

SEQ ID NO: 210994 - RNA, 34 nt, Homo sapiens
gaaaaccggaaagcacgagagcaccagagagcga

SEQ ID NO: 210995 - RNA, 73 nt, Homo sapiens
acacacgaccgaaagagcaaaacaggcggcgagccagcccccagaacccaacaccccgcgggaggaaacaaca

SEQ ID NO: 210996 - RNA, 68 nt, Homo sapiens
gccagcgcggccaagacccgccgcaaggggacagccgccacccccagggacagggcgacaggacagca

SEQ ID NO: 210997 - RNA, 94 nt, Homo sapiens
cccgacagccacaacggaggcaccgccgcgcgcagcgcaccccaccaaaagggaaggcccacaagaaaacaaaaacacaaaaaagaaaacgggg

SEQ ID NO: 210998 - RNA, 67 nt, Homo sapiens
agaacacacaagaaaaaaacgagcaggagaagaacgcccaaaaggacagagaagaggacggagcgag

SEQ ID NO: 210999 - RNA, 55 nt, Homo sapiens
gaagcgggaccgggagcaggcaggcagggagcagccacacaagacagagcgcagg

SEQ ID NO: 211000 - RNA, 86 nt, Homo sapiens
acggccaccggcgggaggaacaaaaggagaagaggccgggcgggaggggccagcccggcagaagcagcccagcaacagaaagcgca

SEQ ID NO: 211001 - RNA, 54 nt, Homo sapiens
gccagcggccgcgcacccccggccggaggcaccagccaagagggacagggagga

SEQ ID NO: 211002 - RNA, 77 nt, Homo sapiens
agaagaggaggggagaaggcgggccgcgccgcgaagcaaggcgccaccggaagaaacgggaggggaggagccgggaa

SEQ ID NO: 211003 - RNA, 68 nt, Homo sapiens
gaaagaaccaggacgaaaggaaccagacaagcaaagaaccaggacaaaaaggaagaaggcccaacggc

SEQ ID NO: 211004 - RNA, 73 nt, Homo sapiens
cagccgaacggaacggagagcagccaagcagaccccgagagaaacggcgagaaaaccaaacaggagccgacag

SEQ ID NO: 211005 - RNA, 78 nt, Homo sapiens
acccgcccagcccccgagacgaggcgcagcacccgggaggccggaaggcacgcccagcaccagggagaggaagccagg

SEQ ID NO: 211006 - RNA, 84 nt, Homo sapiens
gcggggggaggagagccaaccagcaggcccggacaggagccccagaaaaagaccagggaaaagcccagcgaagaggacccagca

SEQ ID NO: 211007 - RNA, 66 nt, Homo sapiens
agcccagggcgagccccacagcggaacacacaacacacaggggcacggggaacacccagaggaacg

SEQ ID NO: 211008 - RNA, 87 nt, Homo sapiens
ggggcgaacagagcaggacggaaagaacccggccagacggcgaacagcccagcggggaccaagaaaggcccagggaccaaagcccgg

SEQ ID NO: 211009 - RNA, 77 nt, Homo sapiens
cagagaacacagcaccaaccaaagggcccgcagaaaagcagccaaaggcagggaagaaaaagaagacaccagagaaa

SEQ ID NO: 211010 - RNA, 66 nt, Homo sapiens
gggcgccaggccggagcagccacagccagccaggcgaaacagaagacagccgaaccaagggcgaca

SEQ ID NO: 211011 - RNA, 79 nt, Homo sapiens
caggagggagaccacagcaagacgccaggacccacggaagccagaaagcacgcaggacaaacacacccgccagcgacag

SEQ ID NO: 211012 - RNA, 97 nt, Homo sapiens
cggggagggggcccgggcgccccgcagccccccaacaccgcccgccaggacgacgcgcggggaggcccagcccgccgcagggccaccccgcggccca

SEQ ID NO: 211013 - RNA, 76 nt, Homo sapiens
cggacagagagagagaaagaaaacagcccggccacaacagagcgaggaacaaaagaaacaggcaggccagaaagga

SEQ ID NO: 211014 - RNA, 118 nt, Homo sapiens
cagcaaacgggaagaggaccccaccaggaaccacacgccagcaccgacgaacccagccccagaacggcaagaaccaggaggcggggcccgggaagcgggcccggaaaggcacgaccaa

SEQ ID NO: 211015 - RNA, 57 nt, Homo sapiens
ggaacacccgccaacacacaagccaaaagaagaacagacaaggcaccagaaggagaa

SEQ ID NO: 211016 - RNA, 70 nt, Homo sapiens
gaagaaacaagcacccgccgggccgaaccggaagggcaagggccaggcccggggccggacccaagcccac

SEQ ID NO: 211017 - RNA, 80 nt, Homo sapiens
gaaacgaggccggagaggaaagagacccgcagagccacagggcaggaacaagcgcgagaaggaacaaaccaggagaaacc

SEQ ID NO: 211018 - RNA, 112 nt, Homo sapiens
gcggggacccgcgggggcgcgccgcgcccgcacccgcgccgcgcgccgaggacccagccgggaggggggggccccagcccggccgaacgggcgcacgacacaaacacaaccg

SEQ ID NO: 211019 - RNA, 72 nt, Homo sapiens
ccaccgccaccagcgcgggcgcgggccaaggcaaaagacgcgggcaacgaaaagaagacgagaggcaccagc

SEQ ID NO: 211020 - RNA, 75 nt, Homo sapiens
aagaaagccaccaggacgagaaaaaccaccggacagaacaaccaacgggagccgcaaggacaacagccgcggcca

SEQ ID NO: 211021 - RNA, 71 nt, Homo sapiens
gcaggccagccccgagccgggggacacaggggagaagcagaccgcaccaggcgggaccccgaaaaagccca

SEQ ID NO: 211022 - RNA, 53 nt, Homo sapiens
acggaggagcaggcgagaagagaaggccaaagaagcgagccaaacagccacag

SEQ ID NO: 211023 - RNA, 81 nt, Homo sapiens
gagagccgagagcacccgcaccaagagaagacccgcccagggccgaaaagaaaacaggagaaccacccgccaacagcaagc

SEQ ID NO: 211024 - RNA, 78 nt, Homo sapiens
gcaccgaaggccagacgggggccggggcggcccagcccagcgagccggagcgcgggacaggaggccgggccccagcac

SEQ ID NO: 211025 - RNA, 58 nt, Homo sapiens
acaaacaaccggagggagggcacagcaagcaacccggccgaggggggcaccccgggag

SEQ ID NO: 211026 - RNA, 69 nt, Homo sapiens
cggggagacccggggacccccgacgccaggcagcgcccccaaacggagaggagcagagaaaagaaaaaa

SEQ ID NO: 211027 - RNA, 86 nt, Homo sapiens
cgagagcgcggagcgggcggagcggcgagagcccccacggaaaaacaaccaccagcgagcaaaaaggcaaagaccaagaccaccaa

SEQ ID NO: 211028 - RNA, 69 nt, Homo sapiens
gccgcagcgcagcgccagccaggaaagaccacaggggaaacaagagacagaacggccaaagccaagaaa

SEQ ID NO: 211029 - RNA, 77 nt, Homo sapiens
cgcaacaccacccccgacagggcggagcagagaaacagaagcggagagacagggacaagggggagccggcaaaacac

SEQ ID NO: 211030 - RNA, 67 nt, Homo sapiens
agccgacgagacggagaggaggcacacaccaacgagagcggaaccgcaggggaagccccagaagccg

SEQ ID NO: 211031 - RNA, 76 nt, Homo sapiens
aggaccgcaccaggagaagcaaaaggaaggagcccgggccccccgcagaaagaggagccgaacaaccaaaaaccaa

SEQ ID NO: 211032 - RNA, 82 nt, Homo sapiens
gcgaggcgcgagcccgcgacagccggacagcaaccaggacaccaggggggaaaaaccacacaggcaaagaacgcgcaaaaca

SEQ ID NO: 211033 - RNA, 74 nt, Homo sapiens
cagcaacagccgccggcggaagaacccaggagaaacgagagggacagcaaggaagacgccagagagcggcacac

SEQ ID NO: 211034 - RNA, 59 nt, Homo sapiens
aaaaggcaccgggagagggaaacaaggcagcgggggcaagaggagcagcagcggcgggg

SEQ ID NO: 211035 - RNA, 76 nt, Homo sapiens
agaggagcggagggcagaccggcaggaaaggccagaaagacacacaggagagcggcgcagaaaaacaaaaggagcc

SEQ ID NO: 211036 - RNA, 84 nt, Homo sapiens
ggccacgaggagggcgcagagcccaggagacgaaggccggaaaaagaacccccccgagaaacggcaaggaaggcgagggccaga

SEQ ID NO: 211037 - RNA, 73 nt, Homo sapiens
gaaggcagagaggggaagaccaagagcacaggagggcagagagcgcggacacagggaaacacgccgccccagc

SEQ ID NO: 211038 - RNA, 45 nt, Homo sapiens
ggggcggcgaagcggaggccggaggaaaaaaagcggaaaggacac

SEQ ID NO: 211039 - RNA, 70 nt, Homo sapiens
ccggggcccgccgggccaaccgaaaggcccagggcgacagccacccgggaaagcacgaagggagcccagc

SEQ ID NO: 211040 - RNA, 61 nt, Homo sapiens
cgaacaagaagcccgaagccgaccgggcaaccacaagaggcggaaaccgacaccgcaccgc

SEQ ID NO: 211041 - RNA, 43 nt, Homo sapiens
caaaaaagcggaaaaacgaggaaacagagcaaagcagcgacaa

SEQ ID NO: 211042 - RNA, 77 nt, Homo sapiens
caaaggaggcaccagacgccggcaacaaagaacacacggaagagccaagagaaaccccaggcaccacacaccgaaaa

SEQ ID NO: 211043 - RNA, 78 nt, Homo sapiens
gggaaaccccggaagcgcagaggagggaggggggagaagcgaccgaggccggccaggaggacagcaggaacaggcgga

SEQ ID NO: 211044 - RNA, 79 nt, Homo sapiens
ggcgcgggacgcgcgcgggcacccacggagccccggggcggaaggagggccccggagcagccacaccaccgaggcccca

SEQ ID NO: 211045 - RNA, 59 nt, Homo sapiens
aacaaggagcggacacgagccgagggaggggaaaggcgcagggaaacgccaagagcgag

SEQ ID NO: 211046 - RNA, 79 nt, Homo sapiens
aagaggcagacagaccgagacgggcaaccaacaagaaacagacacaccgcacagagacacggggcgccaggcccaggcg

SEQ ID NO: 211047 - RNA, 67 nt, Homo sapiens
aacgagaaaacaaacaagcggccacccgaaagggcagagcaaacaaagcaaaaaacaaaaagaagcg

SEQ ID NO: 211048 - RNA, 70 nt, Homo sapiens
cgaccaaacgacgggggccggagcccacagcgacagggacaagccaggagcccggaagacagccgcaggg

SEQ ID NO: 211049 - RNA, 39 nt, Homo sapiens
ccaaccgcaggcacccaaggcggaaggcggagagcagag

SEQ ID NO: 211050 - RNA, 66 nt, Homo sapiens
accaagaaccaggggaacacccaggcaggccgaagccggcagcaaggcgcggcgaggcggggccaa

SEQ ID NO: 211051 - RNA, 77 nt, Homo sapiens
ggcgccccacagaggggcgacgccggaggcgccacgagaacccaagaagccaagaacagcaaagggacgcaaagagc

SEQ ID NO: 211052 - RNA, 84 nt, Homo sapiens
gaaaaagcagaaagccagaggaaggcgaaaccaaccaaacgccccaccagccacagcggcagaacaaaaggaacccaagggacc

SEQ ID NO: 211053 - RNA, 71 nt, Homo sapiens
aaaagaaaacacgaccgaccgccaccgacgccaggaggagagaaagaacccacgcaggacgacagaagagg

SEQ ID NO: 211054 - RNA, 84 nt, Homo sapiens
aagaggacaagagacgacacgcaagcaggcaaccgaaacaggaacacccacaaaagcagaagcagaaacgcagagcccccgcag

SEQ ID NO: 211055 - RNA, 75 nt, Homo sapiens
aggacaccccccagggcccagagccaggagccggccgcccggacagaccaggcaaaagaaaccaccgacgaagcc

SEQ ID NO: 211056 - RNA, 95 nt, Homo sapiens
caaaaagcgggaaggaaagaagaacaacagacgagaagagaagggagcaccaggagacgccagaacccaggagaaacgagagggacagcaaggaa

SEQ ID NO: 211057 - RNA, 63 nt, Homo sapiens
acgaagaagacagaccgaacagcccaacaccacccacaccacacgacaccgcaaaagaggcga

SEQ ID NO: 211058 - RNA, 60 nt, Homo sapiens
gaaccaaaggcagaaaagaaagagagagacagcaaagccccacccagacggcaggggaag

SEQ ID NO: 211059 - RNA, 75 nt, Homo sapiens
gaggaaccggcccccagcgcccaggccaaaacagaagaggcaaagcccagccacagcagcagcccagcagcaaac

SEQ ID NO: 211060 - RNA, 79 nt, Homo sapiens
gcggaccaccgccgccaggaggcggcagcagccaccacgaccccaggcccccagccagccggggggagagcccccccag

SEQ ID NO: 211061 - RNA, 79 nt, Homo sapiens
caagcacggggggcaggccaccgacaagggccgaacaccaacagaggaagaaaggagagccgcagaagcaagagaaagc

SEQ ID NO: 211062 - RNA, 59 nt, Homo sapiens
gaaggagcaggcgggagacaccgaaagcgggaaaaccgccacaaagcccccaagccaca

SEQ ID NO: 211063 - RNA, 58 nt, Homo sapiens
agggaagccagaggcgggccaagggggacggaacaccaccacaggagcccgacaggga

SEQ ID NO: 211064 - RNA, 43 nt, Homo sapiens
gccgcggaggggagcggagggcgagagagggaaggaaggaaca

SEQ ID NO: 211065 - RNA, 86 nt, Homo sapiens
cggacgggaaggcgggagacgagaagccgaaaagcgcagcgagcggagccgccggagccacaaaagaagacccaaagcaccaacaa

SEQ ID NO: 211066 - RNA, 72 nt, Homo sapiens
ggccgagacaaaggcaccaggccaccacagaaacaaaagcaacaaagagggcgccggaccgaaggcgcgacc

SEQ ID NO: 211067 - RNA, 88 nt, Homo sapiens
gacgcccgcgcagcgcccccccaggagaagaagaccggaaacaggcacagaacagaaggaaaggacgaagagcccaggaacaccgcag

SEQ ID NO: 211068 - RNA, 77 nt, Homo sapiens
aagagcgaggaggaacgcgcaaggcaaagcaccggaacaagggacaaaccaaagaccaaccaagaggccagagagca

SEQ ID NO: 211069 - RNA, 86 nt, Homo sapiens
cgagaagggagacgacgcgcgggccgcgagcggggcgacccgagaagcgcacacaacagaagagaagcaaaaagcagagaacagga

SEQ ID NO: 211070 - RNA, 46 nt, Homo sapiens
aacaaacaagcggccacccgaaagaaacagacgagaccggaaaggc

SEQ ID NO: 211071 - RNA, 70 nt, Homo sapiens
cgcggaccgagagaagaaccacgcccagcgccagccgcagaaggacgccccgaagcgcacaccccccaga

SEQ ID NO: 211072 - RNA, 79 nt, Homo sapiens
aagaacccagcaggggaaacacagcaaggaaaggagccccaggcgcagaagggcacaagacaagcccaacgggccaagg

SEQ ID NO: 211073 - RNA, 58 nt, Homo sapiens
cgcccggcgagggacccccggacaagagagaagaagaaggaggccgcggccagaaacc

SEQ ID NO: 211074 - RNA, 88 nt, Homo sapiens
cgccacccacggaccagcagcgccgagggaaacccggagaccaaaccgccaccgcaccgggaaagcgggacgggaccacacgacccgg

SEQ ID NO: 211075 - RNA, 71 nt, Homo sapiens
aggaacgggagcagacgaaagcggaagaagcaggagacagggaaagagaaggcacagggcagagcaacaga

SEQ ID NO: 211076 - RNA, 98 nt, Homo sapiens
ggaaagccaaggaaaaacggagagccacaaaaaaggaagcgaaagaaagaccacagcaagaccacgcccccagccgggggaccaggccgaacgacccg

SEQ ID NO: 211077 - RNA, 53 nt, Homo sapiens
gccgcaggccacccgggaacggaggagggcacccgaaagagcgaaagcccaga

SEQ ID NO: 211078 - RNA, 64 nt, Homo sapiens
gggcagcaaggagggacccgaacccacgacacggccgggccggagcgagggagagcaggaacac

SEQ ID NO: 211079 - RNA, 62 nt, Homo sapiens
gcggcggcggcagcgggcgggccccgagagcagcagcggccggggggggcacagagccccgg

SEQ ID NO: 211080 - RNA, 55 nt, Homo sapiens
ccccaccgccgacgcccccagccaccagcacccaaccaagcggccacaaggaggc

SEQ ID NO: 211081 - RNA, 71 nt, Homo sapiens
agagagagaggggacagacgagagaacgaggagccaaccggccgggacacggacaggggggaagccccacc

SEQ ID NO: 211082 - RNA, 77 nt, Homo sapiens
gcaaaccgagacaagcaccccgaagcgccgggaacgggcgacgaagcggcgaagcaggagaagcccagcccccgagc

SEQ ID NO: 211083 - RNA, 67 nt, Homo sapiens
cagacgagcgcgccaggccgacagccgcggccgggcccgagaaaccaaagagccaggcgacccccgc

SEQ ID NO: 211084 - RNA, 92 nt, Homo sapiens
ggagcggacaacggagaccagaccacgcagccacgcgggcgagcggcggggagcggcgaagccgcgggcgaggagccaagccgccaggccac

SEQ ID NO: 211085 - RNA, 77 nt, Homo sapiens
gacgcacccagccgagccccacgaggccggggacgaccggaagccgcagccgaccgacagcggcacgagccaccgag

SEQ ID NO: 211086 - RNA, 64 nt, Homo sapiens
cagcacaccccgcgcgcaccccagacccccccacgcacggacgccgaagggaagacgcagaaga

SEQ ID NO: 211087 - RNA, 80 nt, Homo sapiens
acggcgcgcccagaagaagggaaggcgcgaggaggaaaggaggacgaggacccaagaagaacagaaggaagacaaagaga

SEQ ID NO: 211088 - RNA, 66 nt, Homo sapiens
acggaccagggggacggcgacagcgccgaacagccaggcaggggaagacccagggagcggaagcgc

SEQ ID NO: 211089 - RNA, 56 nt, Homo sapiens
cagccagcacaccccgcgagcaaggagccaaacaaaggaacgccaagcccggcagg

SEQ ID NO: 211090 - RNA, 75 nt, Homo sapiens
aacagggcagaaaaccagccccaggaggggacaaaaccccgaaaaaggccaagccagacaacaggccaaagccag

SEQ ID NO: 211091 - RNA, 78 nt, Homo sapiens
gaggagacccgcgcgggaggaccaggcagccaggcagcgcagaggcccagggagagggaagacacccccggaccccca

SEQ ID NO: 211092 - RNA, 53 nt, Homo sapiens
gggaaagaaggcaaaacacgggaccgccgcgccgaccggagacaacagacgca

SEQ ID NO: 211093 - RNA, 71 nt, Homo sapiens
gggagagagcgagcgagggggggcgcgccggaaaccggagcgcgcagcagaaacgcgaagacgacgagcgc

SEQ ID NO: 211094 - RNA, 57 nt, Homo sapiens
aaagggccaaagaagggagagagagcagaggccaggaggggcccagcccggccagga

SEQ ID NO: 211095 - RNA, 71 nt, Homo sapiens
cacggagcaccagaccggaggagagcgacacagacaaggggcgcagagcccggaacagagaaaaggaggcc

SEQ ID NO: 211096 - RNA, 53 nt, Homo sapiens
gacaggcaagaagcgaggcccacgaccgggccagaaccaggcagcaaagagga

SEQ ID NO: 211097 - RNA, 79 nt, Homo sapiens
gcgggaagcgaaagaacgcagaggcccacagcaagaccccaccaacaacgaacgcggcaggcgcacaaggaaggaaggg

SEQ ID NO: 211098 - RNA, 71 nt, Homo sapiens
caacaggaggcggaggcgaaagcggaacgaggaagccgcccgaacacgaagaagagggacggaagggccaa

SEQ ID NO: 211099 - RNA, 73 nt, Homo sapiens
gacgggagccgggagccggcagggaagcccagaggcacggggcagaacaccaacagagggccgaccgggggag

SEQ ID NO: 211100 - RNA, 70 nt, Homo sapiens
gagcccaggagcgccacgcgcggaaggcagcgcccagcagcgcaggcaagaacggaagcacgggcggagg

SEQ ID NO: 211101 - RNA, 67 nt, Homo sapiens
agaccccaccaaggagggcaccaacgccgccaggacagaaagcgggacacaagcaggagcacagacc

SEQ ID NO: 211102 - RNA, 56 nt, Homo sapiens
ggacgaagaccagcgccagggaaagaaggcaagggcccggcgacgacgcccgcggg

SEQ ID NO: 211103 - RNA, 73 nt, Homo sapiens
gcaaggcaacggccccagagccgagcaaccaagaaggggccagcaacgaagaaaggagcagcaacagaacgca

SEQ ID NO: 211104 - RNA, 75 nt, Homo sapiens
cggcccgccgcccggagcacggccacgaggcccagggaacccggaccacagaaccaagaaagaggagaacaagcg

SEQ ID NO: 211105 - RNA, 85 nt, Homo sapiens
agccacaccaggcggagaaagggcagaggcccccacggaagacaagcagcagcggaggggagacgagggcggccgcagccgcgcg

SEQ ID NO: 211106 - RNA, 71 nt, Homo sapiens
aggaaaaagacagcccgcagcacgaccagcaggaacggcgaggagacacagggacggccgccccgcaaaaa

SEQ ID NO: 211107 - RNA, 57 nt, Homo sapiens
accgggcccggaggagcgaacaaggcgacaacacaggcccagcgaggagagggaaga

SEQ ID NO: 211108 - RNA, 75 nt, Homo sapiens
agccaccgaccacaccgcccggggccgggcagcgagcccacacagcaggacagggagcggccagaaaaccaacga

SEQ ID NO: 211109 - RNA, 73 nt, Homo sapiens
acgcgcaaggacgggcccaagacaaaaggagacagaacagacagaaaaaacaacaagaaacccacaaccaaga

SEQ ID NO: 211110 - RNA, 91 nt, Homo sapiens
gaggaggcaccacagcggcagcgacaagcaggcagcgggcgccagcaaaaccgaaacagagagaacgagggccaaagccaacgaagaaaag

SEQ ID NO: 211111 - RNA, 80 nt, Homo sapiens
gcgccaaaagcaaaccaaggcaggagaggagccagcccccaccccacaggagaaaaagaccgcggagaaccgacccagac

SEQ ID NO: 211112 - RNA, 74 nt, Homo sapiens
cgggcccgggcaagcacaacggccagaaagcagcccaggccaaccgggcgcgggggcagggcaaccgacgggga

SEQ ID NO: 211113 - RNA, 75 nt, Homo sapiens
ccagccagcagagccgaagaggcccgccgaaacccacaaagaaaccaagagaggacaacaaaggaagcaagacac

SEQ ID NO: 211114 - RNA, 81 nt, Homo sapiens
ggagggcggggcggcgggcccgcgagaagcaagcggaacccgagaggggacggaaaaaaaagacagagaggaaagaaccac

SEQ ID NO: 211115 - RNA, 80 nt, Homo sapiens
cggccacccggggggcacgagaacggccccaccgagccagcaccccaggccagcggaaggcaaggcaaggagacaggcac

SEQ ID NO: 211116 - RNA, 79 nt, Homo sapiens
ggcgccgagcggccccaacaggcccgccgcgccgggccagcggcgccgccgaaggagacgcgcggccggggccgcgccg

SEQ ID NO: 211117 - RNA, 74 nt, Homo sapiens
agaacgagaaggaaaggaaagacaggcacgccggacaaaacaagagcaacgaacaccacagacgaaagccaagg

SEQ ID NO: 211118 - RNA, 35 nt, Homo sapiens
agaacgcaggcaagaaagcaggggggggggggagg

SEQ ID NO: 211119 - RNA, 77 nt, Homo sapiens
cgcaccggccgcggccgagaaggcacacagcccaccaccggggcagaaacaggcagaacagcgaacaaccacccccc

SEQ ID NO: 211120 - RNA, 66 nt, Homo sapiens
cgcaccgcgcgccagccgagaccgacccgcccgcccgcggccccgcagcagcccaagaaggaacca

SEQ ID NO: 211121 - RNA, 76 nt, Homo sapiens
agcggaacggcccgcggagcccagcacggcagaaacagccaagaacccaccggcacaaccgcacgcaagcgacagc

SEQ ID NO: 211122 - RNA, 84 nt, Homo sapiens
gccgcgcagggagaagaggcacccaggaacgcacaccagcaccagcccaccaaaccagcacgaccccggagcagaagaaggagc

SEQ ID NO: 211123 - RNA, 77 nt, Homo sapiens
cacacggagacgccagggcaccgggcagagacacgcgccaaagggccggagaggaggcaaaaaaccagggaaaaaaa

SEQ ID NO: 211124 - RNA, 81 nt, Homo sapiens
cggggcccccgcgagccgcggccacgcgagagggacacgcaggacgagcggccgaagcagcgcgggacaagagaaaaaaag

SEQ ID NO: 211125 - RNA, 49 nt, Homo sapiens
ccaggagcccgagagagaaggggcggcaaaagcagaacaaaaccgaaca

SEQ ID NO: 211126 - RNA, 77 nt, Homo sapiens
gagagaccaaagcagggcagggacagggacagaagcccggcccaagggcaccagggggcaccggcaaacgccaggac

SEQ ID NO: 211127 - RNA, 68 nt, Homo sapiens
cacggacgccaaccagccccggcaagaccgaaggcgccggccaaaagaggcacccggacacgaccaaa

SEQ ID NO: 211128 - RNA, 79 nt, Homo sapiens
cgagaaccgcaggagccagagacgggaacaaaggagaaagggcacgaagagagaggagacaacaaaaagaaacacaaga

SEQ ID NO: 211129 - RNA, 76 nt, Homo sapiens
agaaggggagacccggaagggcccagaacagcaagagaagacgacaacgaggcagaagaaccaggaaaaaagaagc

SEQ ID NO: 211130 - RNA, 79 nt, Homo sapiens
gggaagccgcaaccagccacaccaagagaccacaaaaggaacgaggaagcagaaaggcgaaggaacacacgacacagaa

SEQ ID NO: 211131 - RNA, 73 nt, Homo sapiens
ccccacccccaggagcacgccgcacaggccgcgaacggggcaaaggaaaaggcacacacacccgcaggagagc

SEQ ID NO: 211132 - RNA, 97 nt, Homo sapiens
cgaacgagcaaaggcacgggcagccggaaggacaccaagagcggaccgggccccggcgggacaagggcgcaccggggcgcagcgagggaggacaacg

SEQ ID NO: 211133 - RNA, 86 nt, Homo sapiens
ggaggagcgcacaaggcggaggacagccccggccgccgaagaggccgccgccaagggcacacaccccaggagggggaggggggagg

SEQ ID NO: 211134 - RNA, 55 nt, Homo sapiens
accacacagcccccgaaggacaaagccgggagagggacaggagagacaacggagg

SEQ ID NO: 211135 - RNA, 84 nt, Homo sapiens
aggcaccgccagcacgcgccgccccgcgcgcgagccacgcagcccccaggaacaagagagacccggccaaggcggcccaggacg

SEQ ID NO: 211136 - RNA, 79 nt, Homo sapiens
aagaacagaagaagaaagcagggggacgcaaaggccaaggggcggcaaaaagggaccgaaaagcccgccgggaccgaga

SEQ ID NO: 211137 - RNA, 80 nt, Homo sapiens
accggcccccagcaccggcccaaggccacaccggacacgaggacgcacagaaggcgcaaggaagaagagacgccgcgcgg

SEQ ID NO: 211138 - RNA, 73 nt, Homo sapiens
aacgcggcgcgaaggaggcggaggcgggagccaaggagacgaagaaaaccccaaagcaggaagaagaacacaa

SEQ ID NO: 211139 - RNA, 85 nt, Homo sapiens
caacgcgaggggagcaccaggaccgggccggaacgagacgcacgaaagccaacaggcagaccagagacagcgccacgcacccggg

SEQ ID NO: 211140 - RNA, 71 nt, Homo sapiens
gacgagaggcacagaacagcagcagagagaccaagcagcggcggagcgcaagaaaagagagaccaaggaaa

SEQ ID NO: 211141 - RNA, 73 nt, Homo sapiens
caagcgaagacacaagaagaccgagcaaagagaccccggaaccaacccccccaccaggcacaggccagaccag

SEQ ID NO: 211142 - RNA, 44 nt, Homo sapiens
agaagggcagccacaacacaaggcacgggagccgaacaaggccc

SEQ ID NO: 211143 - RNA, 60 nt, Homo sapiens
caggcgggaccagagcggccagcgagcgccgacacccaacaagaccagcccccagcagag

SEQ ID NO: 211144 - RNA, 66 nt, Homo sapiens
acaaaacgcaaaaccagcaggcgacaacaaaggagaggacaagcgggccaacacaagggagagagc

SEQ ID NO: 211145 - RNA, 79 nt, Homo sapiens
ccccagcagagagcggccccacaacaaaagaggccagcccccagagggaggccaccgggcagcggagcagaaaaggaaa

SEQ ID NO: 211146 - RNA, 41 nt, Homo sapiens
gaacaaccgggcgccgacgagacgggccggaaaccccccgg

SEQ ID NO: 211147 - RNA, 82 nt, Homo sapiens
caaccgcaaccagacgccagcgggacgaggaccgagaccgcggccgggaccgagggaagaaggaccggggagacaggaacac

SEQ ID NO: 211148 - RNA, 46 nt, Homo sapiens
ccagagcgccaagcagcaaaggagaggagaaggaccaagaaccagg

SEQ ID NO: 211149 - RNA, 73 nt, Homo sapiens
gagccggcagcaaagagggaacaggggcaacaaagcggaccagcgggggccagggcgagaccaccccgaggca

SEQ ID NO: 211150 - RNA, 66 nt, Homo sapiens
ggcggcacacgcccgcccaaccgcgggaccaggcaaggggaaacggggaaggccgcggaccccccc

SEQ ID NO: 211151 - RNA, 82 nt, Homo sapiens
gccggccggccggacaagcccaggagccgaccagagagcagcccgggcgcgccaggcacagccaagagcggaccggcagcgg

SEQ ID NO: 211152 - RNA, 68 nt, Homo sapiens
agacagggaaccggggggagggcagaaacaggaagaagagccaaagggaggggccaagacagaaacaa

SEQ ID NO: 211153 - RNA, 55 nt, Homo sapiens
gggcgcgagggcagaaccggagccgggccccaggaccccacaaggcagacaaagc

SEQ ID NO: 211154 - RNA, 76 nt, Homo sapiens
ccaacgccccagcccggccccgcgccgcaccagccgccagaggaaggagacccaggaagaaagggcgaaggacacc

SEQ ID NO: 211155 - RNA, 111 nt, Homo sapiens
agcccaccccccgccgggagggccacaggaggcggcgggccccgcccgccgaaggggcacacagggaccaagaagccccggggacacgcgagaaaagacgccgaagggaag

SEQ ID NO: 211156 - RNA, 83 nt, Homo sapiens
ccggaaaggcagaagggaaggagcagaacggaggggaacacaaaaaggaccgaggaccggaagaagcagaggagccagacagg

SEQ ID NO: 211157 - RNA, 85 nt, Homo sapiens
ccggaacccgagcggagcgaagcgcaggcgcggggcgcggagcgggagaggagaacgccaagccaaccgaaaaagccgacaaaaa

SEQ ID NO: 211158 - RNA, 70 nt, Homo sapiens
cagaagaacaacagcaaaagcacacaagcaccgggacccaggacgacaacgaagagaggaaagaagcgga

SEQ ID NO: 211159 - RNA, 77 nt, Homo sapiens
gcgaaaacagaccgcgagcccagagacaaaggagagaggcaccaccagaccaaagagagcgagaaccaaagaggccg

SEQ ID NO: 211160 - RNA, 76 nt, Homo sapiens
aagaaaagcaacaacccagggcgacgaggacacccgagcagggaccgaaggcccggggcacccgggcaccagagga

SEQ ID NO: 211161 - RNA, 111 nt, Homo sapiens
aggccaggagaagagcaaggccacgccggccgcgcgcgccagcaagaagaccgcgcccgagcccaggccgcaggagggaagcgcacggaaaccgccccgggaggcacagag

SEQ ID NO: 211162 - RNA, 86 nt, Homo sapiens
ccgaaagggccacaaacccaagacagaagcccgggggagcggaggaagagaggacgagaggacgggaggcccgagaaggaggggag

SEQ ID NO: 211163 - RNA, 84 nt, Homo sapiens
gcccgggcccgaggaggcagccaagccaggccgccacgcggcgccggcgcgcgcgccgcccgcacccggcagcccggggacagc

SEQ ID NO: 211164 - RNA, 55 nt, Homo sapiens
aaagaaacaagacagcaaggaaggccaagagaggccaacagaggaacaaggcccg

SEQ ID NO: 211165 - RNA, 83 nt, Homo sapiens
gccgaggcggaccgcgggcggcggcgcacgggacccaacgggccagaacaggccaagacaaccgggaaagcagcccaaggagg

SEQ ID NO: 211166 - RNA, 71 nt, Homo sapiens
agaggccgaaacagccaaagcaggccagaagaagggcccagaccaagccccaccaacagaagagccccaca

SEQ ID NO: 211167 - RNA, 80 nt, Homo sapiens
ccggagcgagaccgggcggccacagccgcagggagaacccgaggcgggggagccaagaagaaccagagaaaccaacaggc

SEQ ID NO: 211168 - RNA, 69 nt, Homo sapiens
aggggagccacaggagagcgcccagaagccgagagaggggaccacggaaacagccagaggacccgggaa

SEQ ID NO: 211169 - RNA, 84 nt, Homo sapiens
gggggaggcagacgggggcgaggaggaggaccaggagcggaagcagacacaggagggccgcagcagcaaggccaagaaaccgcc

SEQ ID NO: 211170 - RNA, 92 nt, Homo sapiens
cgcacacacacaccgagcgaagcacccccagcggggaccgcccgggacaacagcgcggggcacaggaagccacggacagacaccccgcacca

SEQ ID NO: 211171 - RNA, 80 nt, Homo sapiens
caccaccgccgcgccccggcgcccccccgaggcaccaaccagcggacacacggaaaagggacgggaaaagccgagaaaga

SEQ ID NO: 211172 - RNA, 79 nt, Homo sapiens
gaggccagccaagcgccaaaaggaacgaaggcgggggcgggcaaaacgccgagcccgagaacgaccccagaaggaagga

SEQ ID NO: 211173 - RNA, 93 nt, Homo sapiens
caccgagcaaggagaggggaaaagcaacaaggcgacgaaacagggagaaaccggaaaccgacaaggcaacagggcccagcgcacaacccagcg

SEQ ID NO: 211174 - RNA, 78 nt, Homo sapiens
ccccgcaagaaaagggagacgacagaccggggcaagccccgggcgggacagagcgagggggaaaagcaaaagcagagg

SEQ ID NO: 211175 - RNA, 103 nt, Homo sapiens
ggggcacggagggcggggcggcgggcccgcgagaagcaagcggaacccgaggcaagaacggaagcacgggcggaggaaagcacaagcagagcccccgcagagg

SEQ ID NO: 211176 - RNA, 49 nt, Homo sapiens
ggcgaacagcgcgacacaggaggggggcacgaacaacaagacaagcaac

SEQ ID NO: 211177 - RNA, 79 nt, Homo sapiens
ggcagcgcccagcagcgcaggagagccaggcggaaagaagaacagaacaggaggaacagacaagaagcggaaacaggga

SEQ ID NO: 211178 - RNA, 74 nt, Homo sapiens
gcacgggcccgagaggaggcggagaccacccaaaccccccaagaaggcaccggcacggaccaccccaacaccgg

SEQ ID NO: 211179 - RNA, 82 nt, Homo sapiens
cccgcccagagcgcggcgagaccgaaggagcagacgaggcacgagcgccagcgcgagacagacggggcgcagaagcggcgga

SEQ ID NO: 211180 - RNA, 76 nt, Homo sapiens
acacccaggacagacagccccaggaggcgaccccgcgccaggaggagcagcgaacgaacggagcgcgaggagaaga

SEQ ID NO: 211181 - RNA, 77 nt, Homo sapiens
gaggggacagcgcacccaggggacagaagggcacgagcaaaaaaaagccccgagcaacaaaccagggaacgacgcag

SEQ ID NO: 211182 - RNA, 54 nt, Homo sapiens
caccccccgaacccagccgcaccggagacgaccagaaaaccccaaagagaggga

SEQ ID NO: 211183 - RNA, 73 nt, Homo sapiens
caaagcgccaaacccgcggaaccagcagaagaacagggcgagacgcccgggccacacccacagcacgcacgac

SEQ ID NO: 211184 - RNA, 97 nt, Homo sapiens
ccagaggagaaggcacggcaccaacagaggccgacgcaacccaagcagccaccggaaggcgagagcggagcaccaggcccggaaagagcaggcaccc

SEQ ID NO: 211185 - RNA, 77 nt, Homo sapiens
ggggagacgcagacagcgggccggacggcccgcagaagggccacagagccgaacacagcagagggggacaagcccac

SEQ ID NO: 211186 - RNA, 90 nt, Homo sapiens
gcggaccccggcgccggccccggcgccaggagggggccgggggccgcggggggccgggcgcccccgccggagagaggaaacgaagccaga

SEQ ID NO: 211187 - RNA, 79 nt, Homo sapiens
cgacaccgcggagcaaggaaaaaaacccgaccggaagagacagagagagccaaacccccagcccgagaaaagcacagca

SEQ ID NO: 211188 - RNA, 69 nt, Homo sapiens
caacgcggagcgacgcggagcaggaaacagaacggcaaccgagccgggacagacagccaccagaacaaa

SEQ ID NO: 211189 - RNA, 45 nt, Homo sapiens
gagaacacgcggaacacccagaagcgacaggaaagaacaccggac

SEQ ID NO: 211190 - RNA, 71 nt, Homo sapiens
agaagaagggaaaaacggagcaacgcaaggcaggcaacaagggagcgaacgcggcgcggaaagacaaaacc

SEQ ID NO: 211191 - RNA, 67 nt, Homo sapiens
aggcaagcacgcacaccccaacacgggggaggcagcgcaagccccggggcagagacacaggacaccc

SEQ ID NO: 211192 - RNA, 86 nt, Homo sapiens
ccgggacaaaggaccagcggcagcagggaaggcccgaacaagacaggaacgccggcccggacgggagcggcagggaggacaccaag

SEQ ID NO: 211193 - RNA, 66 nt, Homo sapiens
ggagcgagaccggagcgccgcggccacggccccccgccagaagccagaggaagggaaggagcaaga

SEQ ID NO: 211194 - RNA, 72 nt, Homo sapiens
cgccggccggagcgggaggcgggccagcgacaaaaagaggcaaaaggaaagaagaccaaaaacaggcggaga

SEQ ID NO: 211195 - RNA, 76 nt, Homo sapiens
gaaaaaggcggacgaagaggagggcgccgcgcccggggagacagaaacgaggcgcccccagcagcaggaggacgac

SEQ ID NO: 211196 - RNA, 82 nt, Homo sapiens
ccggagccgggccgcggggggcggcggcgcgagccagcggggccggccacgcgcagagcgaacaccaccgcgaagacgcagc

SEQ ID NO: 211197 - RNA, 86 nt, Homo sapiens
acaaggaccagaagaaacgcaccggaaaggccaccaggaagagcgagggcccagcggccgggccgagaaaaccccccggccagcgc

SEQ ID NO: 211198 - RNA, 84 nt, Homo sapiens
cgaccggccgcgcgccgggagacgcgcccggcccggacgcgcccgcgcccccgcggcggaggggaggcaggagagcggcgacaa

SEQ ID NO: 211199 - RNA, 79 nt, Homo sapiens
aaaacaggacagcacaggcacagaaggccaaaaaggcaaccacagagagagagagggagggacgcaaacagcagacgga

SEQ ID NO: 211200 - RNA, 82 nt, Homo sapiens
ggaccagaacggcacggccacgggcgggcaggcaaggaagggaaaaggccgaggcacagcgggaagaccgcaaagacgaccc

SEQ ID NO: 211201 - RNA, 78 nt, Homo sapiens
aacgccgcgacagaaaagcacacaagaagagggggaaggacaaaagggagaggaggcacaaacacggaaccacgggag

SEQ ID NO: 211202 - RNA, 64 nt, Homo sapiens
cacgcggaggggggcccacgccaggccggagcggacgccagaccaggaaaagcaacggcgcaag

SEQ ID NO: 211203 - RNA, 78 nt, Homo sapiens
agacgcgggagcggagcagcggagacgggcacgcgcgccccgggggacgggccacgaggcaccggccgcgagcaccag

SEQ ID NO: 211204 - RNA, 79 nt, Homo sapiens
caagcagggggcacccaagcaggaggcagaggcaaaaacaagcaaaccccagacagccggggaggcccgacagcccagg

SEQ ID NO: 211205 - RNA, 59 nt, Homo sapiens
ccaaagcaagcggccggcacacccacggcgggaggcagcagacgacaggacggcagagc

SEQ ID NO: 211206 - RNA, 79 nt, Homo sapiens
ggaaaaagcgcgaaagagagcagcgggcggaacagagagaaacagggccaccgggcgaaggcagaaggaacaggaccgg

SEQ ID NO: 211207 - RNA, 84 nt, Homo sapiens
gggcggaggcggggggaccggcgggcggggccggcagggaagcggagcggggcaccgcgcccagggaggaaaaaacccaccggg

SEQ ID NO: 211208 - RNA, 74 nt, Homo sapiens
caagcagacagcacggaaaacgaaaagagaacccacgaagacgagaccgagggcccggacaaacaagggaaaag

SEQ ID NO: 211209 - RNA, 76 nt, Homo sapiens
aaagcccaggaaccgcgaaggaacacggaagggcccccaggagagcgagaacggacgggaccgaaaggaaagagcc

SEQ ID NO: 211210 - RNA, 76 nt, Homo sapiens
gccgccgccgccgcgccgcagcgccaccggaagagagcgagcggaaaacggccgaaggcaaagcgaccagaccgga

SEQ ID NO: 211211 - RNA, 36 nt, Homo sapiens
aaaaaaaaggcaaagcacggcaccgagacaaccaag

SEQ ID NO: 211212 - RNA, 56 nt, Homo sapiens
aggacgcagcacgcgcagccacagcacacagggcacccacagaaggagaacaagca

SEQ ID NO: 211213 - RNA, 82 nt, Homo sapiens
ggcaagacccagacccggacgacccccagcgagccagcggagcgcggcacagggcgggcagccccaggcccagagacggcgc

SEQ ID NO: 211214 - RNA, 81 nt, Homo sapiens
gcgcagccggagccgggccgcagcgcgaggccgggccgggggagaccgcagagggcacagacccaggccagcagaacgggc

SEQ ID NO: 211215 - RNA, 88 nt, Homo sapiens
cgaagcccaaaccacaagccacaaaaggaaagggccgagaaagaagagaggaagaagaggaggaggaggaagaggaggaagacgagga

SEQ ID NO: 211216 - RNA, 75 nt, Homo sapiens
cgcacaggcgcccgcccgcacgggcgcgccaagggcacagagggagaggccgccaggcacagagaaggcaaacgg

SEQ ID NO: 211217 - RNA, 78 nt, Homo sapiens
gccgagacacgcagcggcggccagggaccaaccgaggaggagaaggggcggcccggaggccgagaggagcggagagac

SEQ ID NO: 211218 - RNA, 73 nt, Homo sapiens
cgaagagacgacacaaggagacgaggggaagagggaagaacagacacagcaccgacacgcgcaaaagcacgac

SEQ ID NO: 211219 - RNA, 81 nt, Homo sapiens
ggaacgacccgaggggggagagcgcgggggcgacggccgagcaggcaaaaggcaaccaaggaaaaaccagcaccaggcgga

SEQ ID NO: 211220 - RNA, 65 nt, Homo sapiens
ggagggacacccacgaaaaacagacaaggaacgcgaagagacccccaggccaaagcacccaaaaa

SEQ ID NO: 211221 - RNA, 61 nt, Homo sapiens
acgggacaagacagggcaaaggacagaccagaagacgaccccgacgcaggccaggagccgc

SEQ ID NO: 211222 - RNA, 71 nt, Homo sapiens
gcgggaagagacagccaaggaaggcccgccgaaggagaagggcaggaagacccagcaggccggcccagagc

SEQ ID NO: 211223 - RNA, 66 nt, Homo sapiens
gagccgccgcgcagcccacgccggaggggaggagacacgaagcgacgcagagccagaagggaggca

SEQ ID NO: 211224 - RNA, 73 nt, Homo sapiens
gcgagggcccagccgcgagcgcaggccgaggcaggccgggcaggggacgaagggaacccgccgggcggcccgg

SEQ ID NO: 211225 - RNA, 70 nt, Homo sapiens
caggcagcgaacgggaaagagcggaaaaggaggagaaagccgcagccgaacaaagccgccgcgcaaaaca

SEQ ID NO: 211226 - RNA, 55 nt, Homo sapiens
cggaaaaccagaccagaaacggaggagcccgccgaagcagcgagcaggagcacga

SEQ ID NO: 211227 - RNA, 77 nt, Homo sapiens
cccacggaaaacgcgcaggaggagaggagaaacgagaggaggggaaggagagaaggcgcgcgcccaggcagaggcag

SEQ ID NO: 211228 - RNA, 50 nt, Homo sapiens
gagagccgaacccaccgagccagggaggggaaccagaagaggccaaccag

SEQ ID NO: 211229 - RNA, 79 nt, Homo sapiens
cagcccccgagggcgggacacaggaggaagaggggccgagagaggaggcgggccaaagcacccacacggggcgccaggc

SEQ ID NO: 211230 - RNA, 51 nt, Homo sapiens
ggcacgcacaggaccacaggagacacagccgccagcccaaacagcagcggc

SEQ ID NO: 211231 - RNA, 69 nt, Homo sapiens
ggaaaagccgccaccgcagacaagcaggaagcgaggcagcccagaggaagaaacaaagcaggccgcgag

SEQ ID NO: 211232 - RNA, 64 nt, Homo sapiens
aaaaggcagaccaggccgcaacccacccaggaggccagcagcaaagcaggaagaggggaagaga

SEQ ID NO: 211233 - RNA, 85 nt, Homo sapiens
cgccaggaggaggaggaagaggaggaaggagggcgagcgaggaggaggcggagcggggcccgacggccgggaggcccagcccccg

SEQ ID NO: 211234 - RNA, 71 nt, Homo sapiens
cgcgggaggcgcccggaccaccaagcagccacaagaaaggacccccccaaccaacaagcagcggagcacga

SEQ ID NO: 211235 - RNA, 87 nt, Homo sapiens
cgccggacgcccaggacgcccgaggagccgcgccgccgggacacaccaggagaacaagcccacgcaccgaggagccgaggaaggcgc

SEQ ID NO: 211236 - RNA, 70 nt, Homo sapiens
aagagcacacaggaaaggcgaccgccccccacggggagagagagagagagaggaagcgaagaaaaagcgc

SEQ ID NO: 211237 - RNA, 57 nt, Homo sapiens
gggaagaccacaacaagcaagcagcagcacgcgaaagagcagaagaagcagaggcgg

SEQ ID NO: 211238 - RNA, 78 nt, Homo sapiens
cgagacgccgagaccccagagaagagacgcagaccaccaagggcagggcgggcacgaccgacaggcaggagcgaggca

SEQ ID NO: 211239 - RNA, 69 nt, Homo sapiens
acagaaggaagccggccacaggcgggacaagggcgcaccggggcgcagcgagggaggacaacggggcgg

SEQ ID NO: 211240 - RNA, 78 nt, Homo sapiens
cacaccccagggagagaggacggggacccgcgacccagccccccacccaacgcgaagccaccgggccaagcacaacac

SEQ ID NO: 211241 - RNA, 77 nt, Homo sapiens
gggccgaggagagcggaggagggggccgggcccaagaagcacgaagcgggggcagcccaaagcaggagcggaaaaga

SEQ ID NO: 211242 - RNA, 52 nt, Homo sapiens
ggaaccgcaaacacggcaacgggcaaacaagaccagaacaaacaccagggca

SEQ ID NO: 211243 - RNA, 65 nt, Homo sapiens
cccacaagcccccccgccccgagaggcacacccagaagccacaggagaagcaagaggcggccccc

SEQ ID NO: 211244 - RNA, 77 nt, Homo sapiens
caacgcgggcacggacgcgacgccgcccggcaaagggaaccaagaccaggacaaagaagacccggagagacaagccg

SEQ ID NO: 211245 - RNA, 73 nt, Homo sapiens
cgcccagcccccgagggcgggaacagggggccggaaaaggaaagcacacaaagagaagcacaaaccccccgaa

SEQ ID NO: 211246 - RNA, 74 nt, Homo sapiens
acaaaccagcagagccacacggcaccaaaacagagccccaaaaggagaagcaaaccagaggagaagaagaaaaa

SEQ ID NO: 211247 - RNA, 70 nt, Homo sapiens
aagagaaaacgagaaacacagcacaagaggggagaaaaccagaggcagcaggagaccagagcaaaaacac

SEQ ID NO: 211248 - RNA, 115 nt, Homo sapiens
caccaagaccgaggcagaaccccccagcagcagcagaccaagcgcccacacccggagcggaagagcagggcacaacgagagagccaaacacacagcccccaggacaccgcacccc

SEQ ID NO: 211249 - RNA, 89 nt, Homo sapiens
gacagcgcggcccgcgaggagccgccgcgcgcccgcgcccccgcgcgacgccagagcgccgcccggcgggcgccgggagccgccaggaa

SEQ ID NO: 211250 - RNA, 83 nt, Homo sapiens
cgacacaccaagcggaggggacgccacgcaacgccggaaccacggaaggagggggcgacacacaagcaggggggaccgacgag

SEQ ID NO: 211251 - RNA, 80 nt, Homo sapiens
gggcgcgcacacaggccccggaagaacccagacaccaggcaagaccgcaagagagagaagaagccggcagcccggcccag

SEQ ID NO: 211252 - RNA, 76 nt, Homo sapiens
cccgagagcgggaaagggaacaaggaagggagcacacaaagaggccaaaccccaagcagaagagaaagaaaaacca

SEQ ID NO: 211253 - RNA, 80 nt, Homo sapiens
gcggccccaaaccagagcagccacaccccaaagacaacaaccaccgaaacgggcgaaaaagaagaacagcaaaacacgaa

SEQ ID NO: 211254 - RNA, 65 nt, Homo sapiens
agaagaaaagagggggaacgaagcagaaccggcccgccgcccggagcacgggagacaacaaggac

SEQ ID NO: 211255 - RNA, 46 nt, Homo sapiens
cccgcggcggcagcagggcgggagcacgagcccaaaaggcagagcg

SEQ ID NO: 211256 - RNA, 66 nt, Homo sapiens
ccacagagagagcggggcagagacaaggaaccagaacacgccagacgacaaaaggggcgcgcccac

SEQ ID NO: 211257 - RNA, 78 nt, Homo sapiens
gcaccaacccaaacaggcgcggggccccacaccagcagcaccagagacacgacgcaaaggccaccaggcagccgcgag

SEQ ID NO: 211258 - RNA, 76 nt, Homo sapiens
cggaccgcgggacaagaaaacagcggaggcacaaagagagacggaacgcagaaagaccacaagggagagaaggaaa

SEQ ID NO: 211259 - RNA, 79 nt, Homo sapiens
ggcccaggggcagcgagcaagacagcaagcaggcgggggacagccggcgcggcccaagaagagacaccgggccgacaga

SEQ ID NO: 211260 - RNA, 77 nt, Homo sapiens
ggaggcgagcgcgccgcccggagccgcgcacacggaagaagacggcacgggacccccagcacaggcagcaggccggg

SEQ ID NO: 211261 - RNA, 74 nt, Homo sapiens
gcagagaccacggcgcgccccggccggaggaaccggccggcacggaacaggcccaaagagcagcaagaccgaaa

SEQ ID NO: 211262 - RNA, 80 nt, Homo sapiens
cccaaaacgggccagcgaacagggacccacggaaaaccgagaaaacgggacaaagagccagcccgagcagcacccggccc

SEQ ID NO: 211263 - RNA, 69 nt, Homo sapiens
gcagaaacgagcaaagcagcacaacagcaacaagacgaaaggccaaaaagcgcaccacacagagagggg

SEQ ID NO: 211264 - RNA, 68 nt, Homo sapiens
gagcccccgaggccccagaacaccgccaccgaggaacgggagcgggggccaaacccgggagaagaaga

SEQ ID NO: 211265 - RNA, 52 nt, Homo sapiens
acggaaggacaccagcgcggaagcggcggcaggccaccaaggcccgggagaa

SEQ ID NO: 211266 - RNA, 43 nt, Homo sapiens
aagcaagcccccaagacaacggcaagcggagaagagcaaggcc

SEQ ID NO: 211267 - RNA, 76 nt, Homo sapiens
aggcagaggagaacaaaggaagaaggaagaacgggaagcgagaaaggacaaaccggcgaccacacacggggacgac

SEQ ID NO: 211268 - RNA, 67 nt, Homo sapiens
acagaccgcagaggcaggaaacagcccgggcaccccgaggacaaccgagggaccacgacaaagggag

SEQ ID NO: 211269 - RNA, 73 nt, Homo sapiens
aggacagggcaaccaggcgggaccgcggccaacagaagcaacacacacgcgcacccccggccgcgccagccag

SEQ ID NO: 211270 - RNA, 49 nt, Homo sapiens
ggaacgaccgaaacaccagggaaaagcacagggccaggaagcagaggga

SEQ ID NO: 211271 - RNA, 84 nt, Homo sapiens
gagccaaagcagccacacaacagcagcagcccgacggccaggaggcgaagagacgaggaagcccaggagcccgaacacaaaaag

SEQ ID NO: 211272 - RNA, 71 nt, Homo sapiens
ccgcacggcggagcccgcacgcggcgggcaggcagaacggaagaagaggcaccagaggaccgccgccccgg

SEQ ID NO: 211273 - RNA, 67 nt, Homo sapiens
acacaaaagaaagcgacaaggaacaagaaccgccgcgcccgggaaaggaggaaagaaagagaagaag

SEQ ID NO: 211274 - RNA, 57 nt, Homo sapiens
gaaaaagcggaacagaggcaagcacggacagaaaagaagggccaaaggcaaagcggg

SEQ ID NO: 211275 - RNA, 77 nt, Homo sapiens
acagaggagggaggaaaacaaccgagggcagagcgacagcagccgcgcagcagcgcgcgcaccaagcagcagcgaag

SEQ ID NO: 211276 - RNA, 71 nt, Homo sapiens
cgagcccacacacgccacaaaccgcaaggagagaggcaccgggcaagcacgccacgccgaccaggagaccc

SEQ ID NO: 211277 - RNA, 71 nt, Homo sapiens
gcccacagcacagagaagcaaagaccaaacccagacccgacagaagcaaggggagacaggcgcccgccgcc

SEQ ID NO: 211278 - RNA, 75 nt, Homo sapiens
cggcacaggccccaccgggacgaaacggaaaagaagaacgacacagcagcaaaggaggcggccaacaggcacggc

SEQ ID NO: 211279 - RNA, 106 nt, Homo sapiens
ggacggaaagcgacaagggaggcgccgccagcggccgggaccgaacaggcgaaaccagagacgaccacaagaacccacaggacaaggggggaaagaagggcaacag

SEQ ID NO: 211280 - RNA, 74 nt, Homo sapiens
gaacaaaccaaccaacccacacagcgcccagcgggcacgagaaaaaagggcagacgggaagcccgaagccagag

SEQ ID NO: 211281 - RNA, 102 nt, Homo sapiens
ggccccacccaaaccgcgaagagccccaaaccccacaggggagggacccgggaagcacacgccaaagagggcagcaccccacccaccacaaaacgagcaaca

SEQ ID NO: 211282 - RNA, 58 nt, Homo sapiens
gggacagggccaacagccagggaccgaggggcccacaaaccaacaacgaaaaaagggg

SEQ ID NO: 211283 - RNA, 79 nt, Homo sapiens
ggaaacaaaacccaggcgacgcagcacaaaagaaacaagagggcacagccccagacagcacacagaccccacagcgacc

SEQ ID NO: 211284 - RNA, 74 nt, Homo sapiens
gaagaaaagaaggcacccagcgcaaaaaagcagaacagaacaggagcaggagcgggaaagaaaaaagaagaaga

SEQ ID NO: 211285 - RNA, 106 nt, Homo sapiens
ggcgagacccccacagaaaagagggaggagcacaaaccagaagcgaacaccgagcggagacacaaaaacaagcccggaaccagagaaaaagaagaaagaaacacgg

SEQ ID NO: 211286 - RNA, 62 nt, Homo sapiens
gacgccgccccagcggacacaaaccagcaaaacgggcaccggaaacaccgagaagggccagc

SEQ ID NO: 211287 - RNA, 71 nt, Homo sapiens
cgcacaaagcagcacccggagcaggggacaccggggcacaagccccccggaccagcgcggagccggcagaa

SEQ ID NO: 211288 - RNA, 79 nt, Homo sapiens
ccaaaggcaccgggccggcgcggggcccccggggccggaaagggacccaggaagggggagcaacagacaagcccgaaag

SEQ ID NO: 211289 - RNA, 62 nt, Homo sapiens
aaaaaagagcaccggaagcagaacagcaaccaccaggccagaccacagcgggaccacccaag

SEQ ID NO: 211290 - RNA, 73 nt, Homo sapiens
ccgccccgccccgcccccggcggcggcggaggcgcgccgagaaccgacgaggggagcgcaccggaccccaaga

SEQ ID NO: 211291 - RNA, 80 nt, Homo sapiens
caacggggaggccaacggaagaagaccgaggaggaagaaaagagcggaagcaaacaggaagcaaaagcacagccagaccg

SEQ ID NO: 211292 - RNA, 75 nt, Homo sapiens
aaaaggccacaaaccaaggggcaaaaaggcagaaagaaccgaaagacgacgcaccgaaacgaagagcaacgaaga

SEQ ID NO: 211293 - RNA, 80 nt, Homo sapiens
gaggaccgccacgcgcgaagaaggacagaaaccgaagggagaagagccacaaccaggagaaccccgacaaaccgagaaaa

SEQ ID NO: 211294 - RNA, 75 nt, Homo sapiens
cgaaggcgacaggacaagggggagcgaggcgacagaacacagaacacacaagggccaaaccaaacaggaagcacc

SEQ ID NO: 211295 - RNA, 85 nt, Homo sapiens
ggcacccccgcacaggcgcccgcccgcacgggcgcgccaagggcacagagggagagcccgagcgggaagaagccgcagcaagccg

SEQ ID NO: 211296 - RNA, 85 nt, Homo sapiens
ccgggccccgcgcacagccccagcgcaggacagggccaaagcggcaggagaaggaagggaccggaaacgacaaggcaacccacaa

SEQ ID NO: 211297 - RNA, 84 nt, Homo sapiens
aaggaagacagggagggggcaccgccagagccaaggccagggggcaaggcgggaagccaaagcagaaccaagacaaacgacccc

SEQ ID NO: 211298 - RNA, 50 nt, Homo sapiens
ccggaccaccccgaagaaagcacagcgggcccagagccgaacccagggga

SEQ ID NO: 211299 - RNA, 66 nt, Homo sapiens
agcagccaccaggagcccgagagagaagggcggacccggacgacaccaaagagacccccacgagaa

SEQ ID NO: 211300 - RNA, 82 nt, Homo sapiens
ccgaggcccgcggggcggagaaacgaccgcgccgccgcgccccaccgggcaaaccgcggacgcccagaagaaagagaagagc

SEQ ID NO: 211301 - RNA, 73 nt, Homo sapiens
aaaacaggcaacgcgaaaggaggcaagaagacgaccaaagcaaaaaaaaggccagaggacaggccgagaggaa

SEQ ID NO: 211302 - RNA, 78 nt, Homo sapiens
ggaaagacaccacacagcgcagcgggaccacgccggagccgaggacacccgcgcacagaggaagaccgccggaccaaa

SEQ ID NO: 211303 - RNA, 84 nt, Homo sapiens
agcgcgacgaaagaacgcccacacggcagcaccagcaggcaaaacgaggcgcagcggggaaggaagggccgcgcggaaggggac

SEQ ID NO: 211304 - RNA, 76 nt, Homo sapiens
cggcccagccgagcacagaccgaccccagggagccggggggaacgggggcacgccggcacgggaggcagaaggagg

SEQ ID NO: 211305 - RNA, 68 nt, Homo sapiens
cggccgccgcgccgcccaggcccggaccagggaaagagggaaggaagaaccaaaaaaagagaaccacc

SEQ ID NO: 211306 - RNA, 60 nt, Homo sapiens
ggaagaacgaccaagagaccgccacgggggcaagacccaggaaccgaggaggagcgccac

SEQ ID NO: 211307 - RNA, 75 nt, Homo sapiens
ggcccccagaagcacggaaaagcccccggccaaaggcggaggggagcgaccgcgagaccacaagaggggaagcga

SEQ ID NO: 211308 - RNA, 75 nt, Homo sapiens
ggcgcagagacccgaaccaaagcggacgaaagaagaaagacaagcgcaaaaggggagaagaccgaaaacgacagc

SEQ ID NO: 211309 - RNA, 75 nt, Homo sapiens
acgaaccaaaagggacggacaaaggaacaggaccaggcgacaaagagcgaaagggcccaaggaacagaccaagca

SEQ ID NO: 211310 - RNA, 87 nt, Homo sapiens
ccgggcaccgaggagcgggccagccgcgcggcgggaagcggcggcggcggcccagcgccaagagagccaggacaaaaccaggcagaa

SEQ ID NO: 211311 - RNA, 53 nt, Homo sapiens
ggagaaggaccaagaaccaggggaacacgacggcgaagaggcagaagcagaga

SEQ ID NO: 211312 - RNA, 71 nt, Homo sapiens
ccaaaagagaccagagacagacaacaccacagcacaaagaaacgaaaagacgaagggaaaaaagcagagcc

SEQ ID NO: 211313 - RNA, 78 nt, Homo sapiens
aaaccggcagcgcagcagccacccccaggccgggcgaaccacgccccggggccgccccaggggcccagaacccggaga

SEQ ID NO: 211314 - RNA, 54 nt, Homo sapiens
gcggagaaaacccaaaccgaagccgaacgacacaaccccaacggggaagaaaag

SEQ ID NO: 211315 - RNA, 83 nt, Homo sapiens
gcccagccgggaacccccacgcggccagcgaaaacgcccagaggaggaaggaccgagcgcaggaaccaggccagcgcccagca

SEQ ID NO: 211316 - RNA, 82 nt, Homo sapiens
gaaaaacaaacacacgcaaaggagaaaggaaccgacagggacgaggaggggagccacgcccaaggaagaagaagcaccgaac

SEQ ID NO: 211317 - RNA, 71 nt, Homo sapiens
aacacagaaccggagagacacacagcagcccagccagcccgagcaagaaagagagcgagcaccgaagaccc

SEQ ID NO: 211318 - RNA, 72 nt, Homo sapiens
acagcaacgccaaagaggcggagaaaagaaaaaagaagaaaaacgaaggaaaacggggcagacacaaggaac

SEQ ID NO: 211319 - RNA, 81 nt, Homo sapiens
gcaaggccacgacccacgagacaggggcccaagaaaaagcaccggacggaccccgacggagagacaaagaagacggagggg

SEQ ID NO: 211320 - RNA, 76 nt, Homo sapiens
aagccgagagaaggacaacaccacagaaacaacgaacgagcaaggaagggccaaggcagaccccacaccggagaac

SEQ ID NO: 211321 - RNA, 70 nt, Homo sapiens
gcaccccacgaggggacccagagaggaacggaacggacccaccagggcagagccagaaggagagccaagc

SEQ ID NO: 211322 - RNA, 69 nt, Homo sapiens
caaaccgagcggagaacgccacagccgcgcaaagaacgcgaagagacccccaggccaaagcacccaaaa

SEQ ID NO: 211323 - RNA, 77 nt, Homo sapiens
gaggggggcagggccggggaaggaaaggacagcaagcacagaagagcccggcagcgcagagaagaacaaggagacaa

SEQ ID NO: 211324 - RNA, 70 nt, Homo sapiens
gccaagagagaacgaaaccccaaagcgcagaacaaaccaggggagggaaacgagaaaaacgacgccagcg

SEQ ID NO: 211325 - RNA, 67 nt, Homo sapiens
agagcagcaggaagggagagccacccaagagacaagcagcccagagccaggagaagcagaacgggac

SEQ ID NO: 211326 - RNA, 75 nt, Homo sapiens
gaaacaaaagagacaagcggcgagccccagggaagaaccgggcgggacagaacacgggacacaacacgagggggc

SEQ ID NO: 211327 - RNA, 68 nt, Homo sapiens
gggggcggccgggacggaggacgcgcagaggcgggaggcggcagaagcagccagaggagggcacaggc

SEQ ID NO: 211328 - RNA, 83 nt, Homo sapiens
acagcccaccgccccagaccacgggagcagcaaccggagcccccaggacaggcacacccgggaaaaccgaacacccagcccag

SEQ ID NO: 211329 - RNA, 79 nt, Homo sapiens
cagcccgcaacgggacagggcccgcagccaagacaagaccggcacaccaggaggaagaggaggagagaagagaggaagc

SEQ ID NO: 211330 - RNA, 66 nt, Homo sapiens
aggaaaacgcagaaagaccagaagagcacccacggaagcaccacaaacaagcaaaaaaaacccgga

SEQ ID NO: 211331 - RNA, 74 nt, Homo sapiens
ggagacccccgggcaggcgaaagaggcggcggcgcgccgcggccggccacgcggaggaagcccgacagaaaagg

SEQ ID NO: 211332 - RNA, 39 nt, Homo sapiens
gggcaaccgccaaaggagcaagaggggggggcccccccg

SEQ ID NO: 211333 - RNA, 83 nt, Homo sapiens
gacggccgaggaaggaacggcccccccccagcccgccccaaaaggggagagaccccagaagaccggaggggcaccccaaacac

SEQ ID NO: 211334 - RNA, 66 nt, Homo sapiens
caacgagagggaggaacagcaccccggacacaagagggcaagaaaggcgcgacgggccgaaaaggg

SEQ ID NO: 211335 - RNA, 77 nt, Homo sapiens
ccaagaccaagcgcgaaagcgccaaaaggacagcagggacgaggaggggagccacgcccaaggaagaagaagcaccg

SEQ ID NO: 211336 - RNA, 82 nt, Homo sapiens
ggaagccacgcacgccagaaaaacaaacacagggaggaagagaaaggagaagcggacaagcacacaagaaaagcaaagcagg

SEQ ID NO: 211337 - RNA, 73 nt, Homo sapiens
gagcggacggaaagacagaaaaggaacacgcgggaggacagaggaacgcaggcccgcacccaacgcaagccgg

SEQ ID NO: 211338 - RNA, 75 nt, Homo sapiens
acggagaggaacaccgcaagccgcagcgcccggcggcgcagaagcaggaaacggccccacgacggcaggcgcacg

SEQ ID NO: 211339 - RNA, 68 nt, Homo sapiens
gcgggcaacagacagagccagccagcagcgcagcgcccgcagccacgcaacacaagccaacccaacag

SEQ ID NO: 211340 - RNA, 78 nt, Homo sapiens
accagcagccgaggcccacaaaggggggacgggcagaggggcccggggcagcggggaggaagaggggcccaggacggg

SEQ ID NO: 211341 - RNA, 83 nt, Homo sapiens
cacagccggcgcggagcgccgcaggcggcggccgagggcgcgcggaccccccgcgagagccgacccggccgaaccacgcgcgc

SEQ ID NO: 211342 - RNA, 76 nt, Homo sapiens
cgacaggagggacaaaaagggcacaggaagagacgagaaagagaagagagacggcacaaagagccgagacacagcc

SEQ ID NO: 211343 - RNA, 76 nt, Homo sapiens
cagacagccaaggacggacaggaggcgaaaggcaaagagggaacacagaaacgccccgggccagccgccaaggccg

SEQ ID NO: 211344 - RNA, 88 nt, Homo sapiens
ggagaccccacggagcgggcgacgagcgacccgggagacacgacgggcggaaaacaccccaaaagccaaaagggaaaggaaaagacca

SEQ ID NO: 211345 - RNA, 57 nt, Homo sapiens
ccgacgagcgaagagcaagggcagaggagagaagcgacggagaagaaaggagaagag

SEQ ID NO: 211346 - RNA, 61 nt, Homo sapiens
agggcccgcaggcggcgcacaggaagcacggcgccacaggagccgcagaagcaaaggcacc

SEQ ID NO: 211347 - RNA, 64 nt, Homo sapiens
cccaagagcgggaacagcgcccccaagacaggacgcaagcgacagggcacccagcaaggaggcg

SEQ ID NO: 211348 - RNA, 72 nt, Homo sapiens
ggcgaaccgggaacgggaggaaacagaacgacagaaacaagcagggaacaacgagagcgccccaagggagcc

SEQ ID NO: 211349 - RNA, 73 nt, Homo sapiens
gcccgcgcggcgcggggaccgcggcccgcaccaagccagacacgggaaccacacaagacagaagaacggccag

SEQ ID NO: 211350 - RNA, 61 nt, Homo sapiens
cgaaccagggggagccaccccgcggggcaagaagaccggaaggagagaaagccagaccgga

SEQ ID NO: 211351 - RNA, 118 nt, Homo sapiens
cagacgccaccgccgcagcggcgcagcccacgccagacgaccccacccgcgccgcgacccggcaccggggccgagaagccgcgccgggaaccgaaaaggaaggggcccccggcccagc

SEQ ID NO: 211352 - RNA, 82 nt, Homo sapiens
cgacacaagaagagggcggagcggagacgggagaagaaaagacaggcgaggggacggcggggagcgcaggacagacgccccc

SEQ ID NO: 211353 - RNA, 66 nt, Homo sapiens
aggacgccaaaccaagccgcagggggaagacaggcaagagcagccacggaaagaggaccgaccagc

SEQ ID NO: 211354 - RNA, 68 nt, Homo sapiens
caaaagagacagcagcacacagaaaacaccagcagcacgcaagcccaccagggaagcaaaaacagcca

SEQ ID NO: 211355 - RNA, 80 nt, Homo sapiens
ccagggggacggcgccacgcaccggacgacgcccggcgccagcacacgcagggaccgcccgaggacggcagcacccgacg

SEQ ID NO: 211356 - RNA, 78 nt, Homo sapiens
ggagcccggccccgcaccaggaggaggacgacagcacgagagaacacaagaagaaagacagcacgggccgagccgcgc

SEQ ID NO: 211357 - RNA, 102 nt, Homo sapiens
gccgagggggccccaacccgcgcggcaagaagacggcgcggcaaccggggagcccgccagggagccagcgacgcgcaggaccggccaagccagcccgagggg

SEQ ID NO: 211358 - RNA, 84 nt, Homo sapiens
gacgcagagccccagcggggaggcgcaacacgaggcgccgcagcacccgcgagccgcggcgcggagacacaagcacaaagacac

SEQ ID NO: 211359 - RNA, 62 nt, Homo sapiens
ccggcacaaacggaccaccagaaagcaccccacaggggagaagaagagcgaggacagggagc

SEQ ID NO: 211360 - RNA, 56 nt, Homo sapiens
gacagcgcaggcagcagaccaacgggagccgcaaggacaacagccgcggccagaca

SEQ ID NO: 211361 - RNA, 90 nt, Homo sapiens
ccaccaccacgccagccgcaccagccgcccaagccgcacagccgcggcggcagcagcaggagaggcgccacgggacacggaaccaggagg

SEQ ID NO: 211362 - RNA, 74 nt, Homo sapiens
ggcaagaaggcaaaagcccaaccaccaccaggccggagaacgccccaaggagcaagccccacgacggcaggcgc

SEQ ID NO: 211363 - RNA, 87 nt, Homo sapiens
gcagggggcacccgcggccggcccggggccccgggaccggcgcccccccgcggcagcagaagcagcggccaagaacccaggcacgca

SEQ ID NO: 211364 - RNA, 34 nt, Homo sapiens
agaaccccccacaacagagcaggacccacacgac

SEQ ID NO: 211365 - RNA, 74 nt, Homo sapiens
agcacgcccagcccagcggcaggcgggcagaaacgaaaaacagcagaaacggaaggaagccaagaacgcagaga

SEQ ID NO: 211366 - RNA, 54 nt, Homo sapiens
cacgccagaagaccgcggaaggaagcacagccaagagccgggcccagacccggc

SEQ ID NO: 211367 - RNA, 77 nt, Homo sapiens
ccggggggcggccccgcggggccgccgcgcacgcacccgcggaccgccaaggccccccaccagaccgccgagacccg

SEQ ID NO: 211368 - RNA, 87 nt, Homo sapiens
caagcccacggccgagcacagaagccgcacccagcaggaccccagccaggccacggggacaacaggcagcagcgcagcgcacagagg

SEQ ID NO: 211369 - RNA, 49 nt, Homo sapiens
cgcgcgcacgcggcgcgccggccccgggggcgccgagggcacaagggca

SEQ ID NO: 211370 - RNA, 56 nt, Homo sapiens
ccccggaacgggagcgcagggacgcaccaaagaagacagacacgcagaaaaggagc

SEQ ID NO: 211371 - RNA, 71 nt, Homo sapiens
gccggaagcaacagagcccccaggagacagcaagcccagacaagggggacaggagccagagaaaaaacgac

SEQ ID NO: 211372 - RNA, 77 nt, Homo sapiens
caagacagcgcgcagaagcccaaggcgaacggagagacacagaaacgaaggaggcccaaccacaaaaggagccgacg

SEQ ID NO: 211373 - RNA, 69 nt, Homo sapiens
aaaaagggaccgcgaagagcaaggccggaaaaaagggagaggaggcaagccacgcgaaaaccaccacgg

SEQ ID NO: 211374 - RNA, 50 nt, Homo sapiens
cgcagggcgcccccgaaaaaggcacaaacccagcacagagaagacggcga

SEQ ID NO: 211375 - RNA, 79 nt, Homo sapiens
aagcaagcaagaagaaggcacagacgacgggaacagcacgcaacagaagagagaaggcaccagaaggagacacaacgcg

SEQ ID NO: 211376 - RNA, 81 nt, Homo sapiens
ccccccgggcccgggaggaagccaggaccaccaagcgaaccccgaagggacaccagagagaccgcggccaggagccaagaa

SEQ ID NO: 211377 - RNA, 85 nt, Homo sapiens
agggcgcacggagggccgccgccagggaaggagccaccgcccccgcccgaccaggccgagggaggccccgggggccgcggcccgg

SEQ ID NO: 211378 - RNA, 73 nt, Homo sapiens
ccccaagacaaaccaagggcgggggggcacaaggggggcccacgcggaggacgcagaacacggcgggcggccc

SEQ ID NO: 211379 - RNA, 68 nt, Homo sapiens
ggaaaagacaagggggcaaagcgaggagaccgcagccgagcagcaccgcagcagaagaacaaaaggag

SEQ ID NO: 211380 - RNA, 61 nt, Homo sapiens
cgacgcgcagaagcagagccaccgggaaaacagcacaggaaacacagaagaagagaaaaag

SEQ ID NO: 211381 - RNA, 77 nt, Homo sapiens
aggagagaaccaagggcacggggcccagaggaggaaacgagcgagggcggaggcagcaaagacaggccgggggccag

SEQ ID NO: 211382 - RNA, 74 nt, Homo sapiens
accagaagaagggacaaaaggagacaaagacgaaacgaacgcaggaaacgagaagacaacggccgagaagaccc

SEQ ID NO: 211383 - RNA, 69 nt, Homo sapiens
cggcacgcacccgacagggagagccaacacaaggaagcggccaaccagagaggaaagccgaggacagcc

SEQ ID NO: 211384 - RNA, 70 nt, Homo sapiens
agaggaccggagaaagcagcgcgaacagagcggaagcaaggccaagagaaaaagggacggagaggccagc

SEQ ID NO: 211385 - RNA, 85 nt, Homo sapiens
gagcgaccagccacaagaacagccaggaagaggccgaccagcagccagacccggcgaagccaacccaacggagccaagacagccc

SEQ ID NO: 211386 - RNA, 54 nt, Homo sapiens
cccggacaaccagaggcagccagcagggggagggcagcagagaccgagacaaca

SEQ ID NO: 211387 - RNA, 71 nt, Homo sapiens
aaacacgagcaggagaaagacaggagcacagaaggcagagggggcgagggaggaaagggggcaaaacgacg

SEQ ID NO: 211388 - RNA, 78 nt, Homo sapiens
gccccgagagcacgacacagagaggggccacgggccaggcggcgagcccggaccaaaccaccacccgccggccccaaa

SEQ ID NO: 211389 - RNA, 76 nt, Homo sapiens
ccacacaagcgccaaccgaggagaacccgcaggcaggcccggagagccgcacgcgcggaaaggcccgcccaccacc

SEQ ID NO: 211390 - RNA, 79 nt, Homo sapiens
gcaacaacaggaaaggcaagaaaaggaaagcacccgcagcggggacagcgagggggagggaggcgggaaccggccggga

SEQ ID NO: 211391 - RNA, 45 nt, Homo sapiens
ggagacacccgaacacaaaagggcgaaaacacagaaacaccaaag

SEQ ID NO: 211392 - RNA, 81 nt, Homo sapiens
agacacaccgaccagaggaaggcgaacccgccacgcagcaggagcaggggacgaagagaaaggacagggacaggaaagaaa

SEQ ID NO: 211393 - RNA, 45 nt, Homo sapiens
cccacaggcaccgagcagcagccaccggacagccaccggaggagg

SEQ ID NO: 211394 - RNA, 73 nt, Homo sapiens
ggaaaggaggccagaagccagaggaccgacaccaccaaccaaggacgaacacgcagaaccccccccagaaagc

SEQ ID NO: 211395 - RNA, 81 nt, Homo sapiens
ggcggcagagcaacggggccccgagggcaacgaagccgaggcccccaacgcaggacacaggcgaggagggaccacgcccca

SEQ ID NO: 211396 - RNA, 74 nt, Homo sapiens
gggccaaaaggaagcaagggacgaacaggcaaccaaagaacgccaggaacgaagaacgaccaaaaagaagaaca

SEQ ID NO: 211397 - RNA, 76 nt, Homo sapiens
caaaggccggggcagaccccaaacgaaaacaaacggaagagagggcagcaagaaagaacaagaaagcgaacggaaa

SEQ ID NO: 211398 - RNA, 81 nt, Homo sapiens
caacagggcaagaaccgacaagccaccggcggaaagcgcagccggagcgggcagggcacacaaccgggcagcggacacgga

SEQ ID NO: 211399 - RNA, 54 nt, Homo sapiens
cggggcgggaggaacgggggagcccacaggagccaggcgcccacagcggcagaa

SEQ ID NO: 211400 - RNA, 51 nt, Homo sapiens
caagaggccagcgaaaaccgaagcgaacggaggaaccacgcacagaggagc

SEQ ID NO: 211401 - RNA, 76 nt, Homo sapiens
aacaagagaagacgaaaaaaagggaggcgaggagcggggaggagcagcgacagacgaagaaaaggcggacaggaag

SEQ ID NO: 211402 - RNA, 79 nt, Homo sapiens
accaggcggcaggggcaaccagacgggccaaggagaccaaggaccggacagaggaagaaacccggaaggggaagaggaa

SEQ ID NO: 211403 - RNA, 50 nt, Homo sapiens
cgagacggccacagacaacggagggaaacacaaagaagacaccagaaggg

SEQ ID NO: 211404 - RNA, 81 nt, Homo sapiens
gccaagaacgcagcagcagccgccaagacgaccccaaacaggagaaagcaaaacccaacccccagcagagaggagagcaaa

SEQ ID NO: 211405 - RNA, 81 nt, Homo sapiens
agaaacagcacgcgcggaggaacgacggagaggggcggagaggcccgaaaaagcccaagacagcagaagcagacaccccag

SEQ ID NO: 211406 - RNA, 53 nt, Homo sapiens
gcggcaccccgacggacgaacaaacagcccccaggcagcgcaaggaacccacc

SEQ ID NO: 211407 - RNA, 74 nt, Homo sapiens
agaggaggagcgcagcccggcccgaaaagccccaacacccccaaccaccgggcagccaagcagggaaaagccaa

SEQ ID NO: 211408 - RNA, 77 nt, Homo sapiens
cgcaggcaaacgagaaaaagccgagaaggccagacgaggacggccaaaggcagacccaagaaaaggaaaacaagaaa

SEQ ID NO: 211409 - RNA, 80 nt, Homo sapiens
ccagccgcagccacaacaccggcaggaaccaccaggacagagcacagaagacgagcacgaggagaggaaccaacgaagaa

SEQ ID NO: 211410 - RNA, 72 nt, Homo sapiens
aggaggccggagaagaaagaggccacggaccgggcacacagaagaagggacagcacaaagaaagcagggccg

SEQ ID NO: 211411 - RNA, 72 nt, Homo sapiens
aaacaggagcgaagcccagcgggccggacggggcggggggaacggcaagacagaagacgggggacccacgga

SEQ ID NO: 211412 - RNA, 80 nt, Homo sapiens
cgccgggaagaaaacacacgcccaagggccgaaagagccgcagacgcacagcaaccaccggacccgaaggccaccaccca

SEQ ID NO: 211413 - RNA, 77 nt, Homo sapiens
ggaggacggggcccacagcaggccaaaagcacagcaagggcaaagcccggaagagggaaggggaaacgcggagccaa

SEQ ID NO: 211414 - RNA, 74 nt, Homo sapiens
ggaaaagagcgagggcccgcccccgcaggaccagaaggcacacaccgacaacaggcacaaagagagaaggaaca

SEQ ID NO: 211415 - RNA, 76 nt, Homo sapiens
agagaaaccaaaaggccagacgaacacgagagggcacggaaccggggaagcacacgacaacaacgggaccaaacaa

SEQ ID NO: 211416 - RNA, 33 nt, Homo sapiens
cagacagggaagacagcccacagggcgacgcag

SEQ ID NO: 211417 - RNA, 74 nt, Homo sapiens
agaaaggccaacgagaacaagcacagaagcacaccagcccgaaacccgacaggaaggaaggaaccaagcaccca

SEQ ID NO: 211418 - RNA, 77 nt, Homo sapiens
aaacgggcggcacagcagacccacccaggacccaggggcagagaggagagccaccggagcagcaggggacgggcgca

SEQ ID NO: 211419 - RNA, 81 nt, Homo sapiens
cacgggagcccaacacgcggcacgagggccggcccgcgggcagcacccaccccgaagaacagaaaaagcagggcacaagac

SEQ ID NO: 211420 - RNA, 60 nt, Homo sapiens
gccacgaagggggagagaagcgccaggaagaagacggcacgggacccccagcacaggcag

SEQ ID NO: 211421 - RNA, 49 nt, Homo sapiens
accaccacccaccggacagagagccagaaacgaagagcagacaagggcc

SEQ ID NO: 211422 - RNA, 72 nt, Homo sapiens
acaagccagagggaaaccagcccaagcaccacccacgaccgggaccgagacagcgcagacccaggggagccc

SEQ ID NO: 211423 - RNA, 80 nt, Homo sapiens
aggccccgcgcggccaacgcccaggaccgcaagcgcgcgcccacgagaaaccaagccgccgacgacaacggacggaacag

SEQ ID NO: 211424 - RNA, 76 nt, Homo sapiens
acggcggcagaaagcagacaacccggaggcggcgaggaaagagccaaaggacagggagcagcggaggaagccacag

SEQ ID NO: 211425 - RNA, 84 nt, Homo sapiens
cccgaagccgcaacccggggagggcccgcggcgcgaggcggacgggaccggaggcacaaaagaagaaaccggaaagcaacaaca

SEQ ID NO: 211426 - RNA, 61 nt, Homo sapiens
aagaagagaaaaagagaagagaagaaacccagcgaagggaggagaagagccgggaaaacag

SEQ ID NO: 211427 - RNA, 76 nt, Homo sapiens
ggaagaaccaccgagaagagaaaaaacaaaaggacggggaccaaaaaggaccgcgcagacgcgcaggacggagcgg

SEQ ID NO: 211428 - RNA, 110 nt, Homo sapiens
gacccaggcgccgggcgcggcgcagcgccgaggcgggcgaggcgccgcggaccagaggcgccggagacagacccagcacggaccccccccccagccgggcgaggccccga

SEQ ID NO: 211429 - RNA, 76 nt, Homo sapiens
ccacaggaagcagaccccgaaccagcccaaaaccggaagcagagccgaaaaccagccccgcccacacacaccaaca

SEQ ID NO: 211430 - RNA, 75 nt, Homo sapiens
agagggcccgcagaagccgagaaaacaggaagaagaggccaacaacggccccaaggggcaggagaaacggcaaaa

SEQ ID NO: 211431 - RNA, 76 nt, Homo sapiens
gcagcagggacccgagcagcagacaaccgaggcgaaggcacgagggcacaacccggacgggacaagaagaggagca

SEQ ID NO: 211432 - RNA, 62 nt, Homo sapiens
aagaacaagccccacgacagaccacgacaagagcacaaccccggacagaacaagcgagggag

SEQ ID NO: 211433 - RNA, 80 nt, Homo sapiens
gcgcaggagaagcggagccacggagaagaaggccccgacgaaggagggccccggagcagccacaccaccgaggccccacc

SEQ ID NO: 211434 - RNA, 70 nt, Homo sapiens
aaagggagagaacaacacgacaagcagacagagggccacaaagggggaaggaacagcgggaccagggagg

SEQ ID NO: 211435 - RNA, 61 nt, Homo sapiens
cccgaggccagcagggaaagccccgcagcaacaggcccaaagcccagccaaggacccgaaa

SEQ ID NO: 211436 - RNA, 118 nt, Homo sapiens
gaacaacccgcgcccaggccagcgccccaggccaagagggacccacccggcgggcccaccgcaccggacgacgggggacacagaacgcaagaccaccgcgacacaaaacaggaaccgc

SEQ ID NO: 211437 - RNA, 70 nt, Homo sapiens
cgcggaggcgcacgacccggggacccacagcgcggcaggacagacgaaaaagcgaggagaggaccagagc

SEQ ID NO: 211438 - RNA, 71 nt, Homo sapiens
caacacgggggagaaaaggggcccccaggcacggggccaaaaaggcacgagggaacgggaaagaacagaga

SEQ ID NO: 211439 - RNA, 53 nt, Homo sapiens
ggaagagaagacaacgcacaacagcagagagagacacagccgaaagcggacgc

SEQ ID NO: 211440 - RNA, 69 nt, Homo sapiens
ggaaagaaacaccaagaacgggcgcgaaaaccgacgccaaaagcagaaagagggcgggaaaccagaccg

SEQ ID NO: 211441 - RNA, 74 nt, Homo sapiens
gggaggcagcgccgacaacaccgacacagaccaacaagagcacaagaccgcgaccaagaacgaagagaagacca

SEQ ID NO: 211442 - RNA, 50 nt, Homo sapiens
acaccccacagggaagagggacccggcgggggcaaggaagcacggaggcc

SEQ ID NO: 211443 - RNA, 65 nt, Homo sapiens
cgacgcaccgcaggcagacaaaagggccaaagaagggagagaggcccagccccgacagggagacg

SEQ ID NO: 211444 - RNA, 74 nt, Homo sapiens
aacggccagacccggagacgacccgacgaagcccacgccgggacccagcgcagggcgcgaccagccacagaagc

SEQ ID NO: 211445 - RNA, 71 nt, Homo sapiens
ccaggagaggaagccacagagacaggccagacccgcccccgaaagaaaaaagacagggccaggcccagccc

SEQ ID NO: 211446 - RNA, 86 nt, Homo sapiens
gagagagccagagaaaggacgagcagcaagcagggagcaagaagaagaaggaggaggagagcagggagagaacagaagagacgagc

SEQ ID NO: 211447 - RNA, 79 nt, Homo sapiens
agcaggggcccccggaggacagggaccaccgggggcagaaccgagggaaacgacaagaagcagcagcgccgacgaaaag

SEQ ID NO: 211448 - RNA, 69 nt, Homo sapiens
caggcacgggacggacaaggcaacacccgaagaaacaagcacagcccaggggcacgggcacagcccaga

SEQ ID NO: 211449 - RNA, 89 nt, Homo sapiens
cggcaggcagaagccagggaaggcggcccagcagcgagacacagaacaaacggacccaggacaaaacgacaccagccaaaccagcagcc

SEQ ID NO: 211450 - RNA, 77 nt, Homo sapiens
ggggacacgcgacgaggcccgccaagaggcgccgcaggaggggaagaccagcaagcacaaaggacaccacagacaaa

SEQ ID NO: 211451 - RNA, 74 nt, Homo sapiens
ggcccaacccccaccccgcccaaggaggcccagcgagccacagaagcgaaggccaccagggagaaccagcccga

SEQ ID NO: 211452 - RNA, 78 nt, Homo sapiens
gaaaacaacgacaacgagcacaggacagcccaaggcggaaaagcgaaggaagccacaagcacagcccacacaaaccag

SEQ ID NO: 211453 - RNA, 71 nt, Homo sapiens
cccggcaggacgaggacgaaggccgagccggaagaacaaaggacaccacggccgggagacgggaagaggaa

SEQ ID NO: 211454 - RNA, 81 nt, Homo sapiens
gggccgagagccgcggggagaaggccacacccaggcacagaagacagacagggacgaggcaaaaccacaggaaggagagaa

SEQ ID NO: 211455 - RNA, 53 nt, Homo sapiens
gacccccggcccccgaacgacaaagagcggaaaaccccagcgacgcgggagaa

SEQ ID NO: 211456 - RNA, 81 nt, Homo sapiens
ggagagcaaaagcccacacgcgcacacagagcaaagacccagcgggaaggcggagcaaggacccacccagccaaaagaacc

SEQ ID NO: 211457 - RNA, 79 nt, Homo sapiens
agaaaaacaggagcagaccagcagagcagcacaggaggggagggagacgcggagcggggccaggaaggcccggacggag

SEQ ID NO: 211458 - RNA, 70 nt, Homo sapiens
aagcaaacggaccagaccgaccaccaaaagagagccacgagccaagggggcacgagcggacccaacaagc

SEQ ID NO: 211459 - RNA, 72 nt, Homo sapiens
gagagaaacaaaagacggccaccgaaagccagggcgaagagacccagggaagagccgacgcaaggccagggg

SEQ ID NO: 211460 - RNA, 78 nt, Homo sapiens
gccaaagaacagaaacggaacgccaagcgaagaagaacgaaacggaagcacaaagcagcgcgagaaagcccaggaagg

SEQ ID NO: 211461 - RNA, 44 nt, Homo sapiens
gaagaggacggcccgagcaaggaaaccagcgagcagccgccagc

SEQ ID NO: 211462 - RNA, 82 nt, Homo sapiens
cgacggcccgggaggcacgaaggcaccgggcccagcacagccagcaccgcacgcccgcaagggagggggcccccaaagggaa

SEQ ID NO: 211463 - RNA, 77 nt, Homo sapiens
ccggaacaccacggagaccgccacgcacagccgcccgggagaaccgcacgacggcgggggggaacagcgggaccgga

SEQ ID NO: 211464 - RNA, 73 nt, Homo sapiens
cgggcgcagacagagcaccagcaccagcagaggagcacccgaagaagacaagacaggggaaagacagcccagc

SEQ ID NO: 211465 - RNA, 76 nt, Homo sapiens
caagcgcccaggagcagcagacccggagagaagcggggccacgacaccagccccgagcgccgggacgaacgcagaa

SEQ ID NO: 211466 - RNA, 79 nt, Homo sapiens
gccgccgcccgcagcccagcgcagaccagaaccagggaggggcagcggaggacagacggccaaggagaagcgcgcgggc

SEQ ID NO: 211467 - RNA, 76 nt, Homo sapiens
ccgagccccggcgccgccgccaccgcccggcgagggacccccggacaaggacgacaagaaacggaaaacgacaggg

SEQ ID NO: 211468 - RNA, 63 nt, Homo sapiens
ccaacggcaaaaaccaagaaagagggggcaagaccggcacgacgcggcgaagccgacgagccc

SEQ ID NO: 211469 - RNA, 76 nt, Homo sapiens
cggcaccaggacaagagaagaggcagagaccggcggcagagggcggaagacgcacgggccaggaccaagacgggag

SEQ ID NO: 211470 - RNA, 79 nt, Homo sapiens
acgaggggaggacccaaggagaggcacccgggacggaaccgaaaggcagcaacaggggaagcggagggaggcaaagaag

SEQ ID NO: 211471 - RNA, 76 nt, Homo sapiens
agccaggccgggccccgggccccaagacccggccggcgccgcggccgcgggcggagcccggcacgggcaaacagag

SEQ ID NO: 211472 - RNA, 69 nt, Homo sapiens
ggcgggaggcgacaggaaacccgccacgacaaccgcaccaacaaagacaggagccaggaggaggaaagg

SEQ ID NO: 211473 - RNA, 87 nt, Homo sapiens
aaggagcagacgggcagcacgccagaccgggagcgcgccaagaggaagcgggcaggcaccgcccccaggcaaggagcaaaccccagc

SEQ ID NO: 211474 - RNA, 73 nt, Homo sapiens
ccgcggcggcgacccaccacgccagccagaaaaggcgggggggagaagcacgcgcccgcggagacacacccgc

SEQ ID NO: 211475 - RNA, 82 nt, Homo sapiens
caagggggaagagagagaaacaaaagcgccagagccaagaacgggaggaggaaacaggaaccaaaaggacacaaagaagaac

SEQ ID NO: 211476 - RNA, 74 nt, Homo sapiens
aaaagggcaaagacacggaccaagaagccaacaggaagccacagagaggacaaacaacaaccccccagaacagg

SEQ ID NO: 211477 - RNA, 78 nt, Homo sapiens
agagggacaacaaaagccccacaagagccaccaaaacaagaagccacagggaaagccacagcgacaacgaagacaaca

SEQ ID NO: 211478 - RNA, 67 nt, Homo sapiens
cgcgcggccccaccggcccgaaggaagaaagacgaacagaaaaaaggagggcagacaaaagaaccag

SEQ ID NO: 211479 - RNA, 65 nt, Homo sapiens
aacaccaaaaacaaaacgaaccaggacggcaaagggcccccaaggaagacagcacgagggaacag

SEQ ID NO: 211480 - RNA, 78 nt, Homo sapiens
gcacaaggaagcgccccaaagagcggaaagcgacacagaagccacagacagagggcaagacacgacccgcacccggga

SEQ ID NO: 211481 - RNA, 79 nt, Homo sapiens
ccgcggcgaccgggaagaagcgaaaaggagcacgccaggcgaccacgagcccccaggccgagaaagaagacgagaagcc

SEQ ID NO: 211482 - RNA, 89 nt, Homo sapiens
cgacaccccccccccgcagccccgccagcgccaccccccgcgggccgcaggggccagcagccgccaagcgcgggccaggcacgacaccg

SEQ ID NO: 211483 - RNA, 64 nt, Homo sapiens
ggagcggcagggcccccgagggcccggacagaccccaccaggcagaaacaccgaagaaagagaa

SEQ ID NO: 211484 - RNA, 71 nt, Homo sapiens
cgggccagaacacccgaggggaccagccacaggaggcggccgcacaaagaagccaccgcaggaagggaggc

SEQ ID NO: 211485 - RNA, 80 nt, Homo sapiens
ccgggagggcaagacccaggggggacaagacaggggccggcagaaagacagaaccagcacagcaaaaaaggcagcgcacc

SEQ ID NO: 211486 - RNA, 62 nt, Homo sapiens
caacaacccaagagaagacaagaaggaggagagcgacgcaggggaggacagggaacggcgag

SEQ ID NO: 211487 - RNA, 85 nt, Homo sapiens
agaccgccgagggcgggcggagagggggagcgggagccccgaggccgaggggaccgaagaggaggaaaccaccacaccggcgccc

SEQ ID NO: 211488 - RNA, 51 nt, Homo sapiens
caaaagcaagaagacggcaagcccaaaagacgccagggccacgggcgggaa

SEQ ID NO: 211489 - RNA, 77 nt, Homo sapiens
caccagagccagggcgcaggagcagcagcacagccgggccccgaggaccgagacaggagcacccgggccgcacagca

SEQ ID NO: 211490 - RNA, 76 nt, Homo sapiens
cccagcggaccgaacagggcagcgcaagaccccgcacggaagcagcaagcacaggcagcgcagagccagagaccac

SEQ ID NO: 211491 - RNA, 68 nt, Homo sapiens
acaaagagagagaaggaaccaagaacagagaccagcacaaccagggaagaagacagaaagggcaaggc

SEQ ID NO: 211492 - RNA, 58 nt, Homo sapiens
gcgcaggccgcccccagaaccgcccaaccgcacggcacccaacagcaggaacaggaac

SEQ ID NO: 211493 - RNA, 71 nt, Homo sapiens
ccgcagggagaacccgaggcgggacacggaggcaaggagagaagacgaggcgggccaccacggagaaaacc

SEQ ID NO: 211494 - RNA, 71 nt, Homo sapiens
cggaaaacgaccagcgagaaagagccacgaggcccacacaaagagcagcgagaacgacccagaaaaagaac

SEQ ID NO: 211495 - RNA, 83 nt, Homo sapiens
acgcggacagagagcggacgggccaacccaaaaccagggcggcaaaacgagcgggccagagcaagaacgaggccaaggaggag

SEQ ID NO: 211496 - RNA, 63 nt, Homo sapiens
gcccacgcccagccgccacaaggaacacaagggcaagacagccgggaaccccaccccacccca

SEQ ID NO: 211497 - RNA, 80 nt, Homo sapiens
gcccaggcacaagggaggcgacagagacagcagcaggacccagagagggaccagggccaaagaagagccggggggcaggc

SEQ ID NO: 211498 - RNA, 75 nt, Homo sapiens
cagggcaggggacaggcaaaacgcgaacaacccacagaagcccaacagggccgggcagccacaacaggacacggc

SEQ ID NO: 211499 - RNA, 79 nt, Homo sapiens
ccgcggcggagcccgacccacccaaggcgcgagccggcacgaaacaaaggagcgagacagaagagaaccggaaggggac

SEQ ID NO: 211500 - RNA, 82 nt, Homo sapiens
gcgcggagcgccggagccgcgcgcggaaccgggaaaacagaagcacaaaaaaacagaccagcccgaaaccaaaagaggccag

SEQ ID NO: 211501 - RNA, 70 nt, Homo sapiens
accaacgacggaaacacagcggacggccggcgcgaaagccagcgacgaccagacgaacaggagaaggaac

SEQ ID NO: 211502 - RNA, 71 nt, Homo sapiens
gcgccccaacaaaggaacagagaacgaggaagaaaaggaaacccaaaaagacaaggccaagcagcaaaacc

SEQ ID NO: 211503 - RNA, 70 nt, Homo sapiens
gggaagacgccgggcaaaagggcaggcccgacaagccgaccagccaagggcggagaacggaaaagcacca

SEQ ID NO: 211504 - RNA, 103 nt, Homo sapiens
ggcaaccgaaagcgggcccgggagacccaggcgggacagagggagccaggcagagaggggagccagggcaagaacgcgcgcgaggagagggaaagccgaagac

SEQ ID NO: 211505 - RNA, 81 nt, Homo sapiens
ccaaggcccaaggcaacaaggagggaccgacaccgaaagaccccgccgggcacccagggcccgaggccgcccacgccgccc

SEQ ID NO: 211506 - RNA, 78 nt, Homo sapiens
gaagacgcacgacgagccccaccgggccgcacagcaggcgcaggaaccgagaggcgagaacaccagggcccgcaaggc

SEQ ID NO: 211507 - RNA, 52 nt, Homo sapiens
ccgaaacagggagacggccaagccaaggcccgaaagagaggcaccgaaccac

SEQ ID NO: 211508 - RNA, 76 nt, Homo sapiens
caggcggggggcgcagaggacacgaggcggcgggcggagacaggaccgcggcgagcaaggagaaagcccgaacgcg

SEQ ID NO: 211509 - RNA, 74 nt, Homo sapiens
acccagaggggacggcgccgcaggagaagccggaggacccaaggaacgaggggcacccaaacaggagcgaacag

SEQ ID NO: 211510 - RNA, 66 nt, Homo sapiens
gcaccacccggggacgggccagacaagccaagacacagaagggacagggagccagccagagaggga

SEQ ID NO: 211511 - RNA, 70 nt, Homo sapiens
aaagcggaaacaccggagaagaggccagacagagcagacgaagaacggaagcgccccagaggagagggcg

SEQ ID NO: 211512 - RNA, 78 nt, Homo sapiens
caaccccacaaaagcggccggcggggaaaagcccgcccaccaccggaccagcaggaggccccaaacagaaacaagagg

SEQ ID NO: 211513 - RNA, 83 nt, Homo sapiens
aggggcaaggagcagaagcagcccacaaggcaaaggcggccacagggaccaacgcacaaaagcaacacaagcagaaacaagca

SEQ ID NO: 211514 - RNA, 85 nt, Homo sapiens
ggagcgaccgggagcggcggcagcggcggcgcggaggcggcgagggcgagccgagaaagcacgggaccaggagaggcagaggccc

SEQ ID NO: 211515 - RNA, 71 nt, Homo sapiens
gacaagggggcgggcccaggaagaccgcaggaaagcaggaaggcaagaaagccaaggacgaaacccacacg

SEQ ID NO: 211516 - RNA, 76 nt, Homo sapiens
cgccggggaaaagcgacaaggaccaggaaaagggcgacagcaagaaggagccagcacagaggcaaaagaaccaaca

SEQ ID NO: 211517 - RNA, 73 nt, Homo sapiens
cgaacacagaggaaaccgcaccgcccggagggcccccccaaggagaacagagaccaccaacggaaccagaaac

SEQ ID NO: 211518 - RNA, 83 nt, Homo sapiens
ccggcaccgccaacgcgagccaagccccaagagcggaggccgggaaacaaccgcagacccacaagcgcgagccggaccgacgc

SEQ ID NO: 211519 - RNA, 56 nt, Homo sapiens
gagccaacaggaccagcagggcgggcaggcccacacagaacgcaaggagggacagg

SEQ ID NO: 211520 - RNA, 69 nt, Homo sapiens
ggcaagcggcgacacacgacggggcgcaccaaccgccgagagaccgggagaacgaaggagaacggcacc

SEQ ID NO: 211521 - RNA, 68 nt, Homo sapiens
cgcccagccccagcaggcgcgacccgccaaaaccgaccagcaagcaagaaccgccaacggccaccacc

SEQ ID NO: 211522 - RNA, 103 nt, Homo sapiens
cacacaccgcacacccgaggccaacgaaggccgacggaccgcgagggccggggcaccacagaacagccgaagcaggccaccagccgagaacgaggaacacgag

SEQ ID NO: 211523 - RNA, 83 nt, Homo sapiens
ggagagaaccagaagggcacggaaagaaaggacagccgagccaacagaggagagagcacgaaccgcaaacaagccagcaccac

SEQ ID NO: 211524 - RNA, 73 nt, Homo sapiens
cgggggccgcgcacccaccccgagccagaaacaacccggaagccccggcagaaacagaaggcgcacgggcagc

SEQ ID NO: 211525 - RNA, 78 nt, Homo sapiens
ccaacagagcacaagggagggaaaggagaagcgagacagcccaccgaggaagaccaaaggaccaaccaacaagaagca

SEQ ID NO: 211526 - RNA, 81 nt, Homo sapiens
aaggagggcggcgcgccgagcgcccaggaccgggggccgggcgaggaggccgggagaagccgaagcgccgaaggagagaga

SEQ ID NO: 211527 - RNA, 80 nt, Homo sapiens
ccacgcgccacgccgccacacccgccgccacagggaagccgcgaagacccggagagggccagcccacccaggacaccacc

SEQ ID NO: 211528 - RNA, 82 nt, Homo sapiens
gcgcccaaggggagaagcgcaggcgcgccggccgcgaacccggacccaagaaggacggccggagcagcagaacaagagcgga

SEQ ID NO: 211529 - RNA, 61 nt, Homo sapiens
ccaaaaccagggcggcaaaacgagcgggccagggacgaacagcggggacgccccagcagac

SEQ ID NO: 211530 - RNA, 57 nt, Homo sapiens
ccccaagccaggaaaagccggggcggaacagaacgacaggagaacagaccagagcga

SEQ ID NO: 211531 - RNA, 70 nt, Homo sapiens
aaagaagaaccaaaggcagaaaagaaagagcgccgcaaagcacagccaaggacacccgaaacacggagcg

SEQ ID NO: 211532 - RNA, 77 nt, Homo sapiens
gccaggcacacgcggccgcccggccgggaaccaagagagaacaacaggggggagaggagagaaccagaagagaggag

SEQ ID NO: 211533 - RNA, 77 nt, Homo sapiens
cgaccgaaaccacagcgaagggaaaagaaggcgaagggagggccgccccaaccgacgcaccagccggaggaggaggg

SEQ ID NO: 211534 - RNA, 81 nt, Homo sapiens
cacaccgagcgaagcacccccagcggggaccgcccgggacaacagcgcggggcacaggacacggcccaaaggacagcaagc

SEQ ID NO: 211535 - RNA, 77 nt, Homo sapiens
agcggacccagggcccggcgaaggacccggccgaggcgggcgcaagagaaggcaccaagaggccggaccgcccagcg

SEQ ID NO: 211536 - RNA, 82 nt, Homo sapiens
cgagcgacggaacacaaacaggcggaaagaaacaagacaacaccgacagcaaggagcgcggcgacagagcagagagccaagc

SEQ ID NO: 211537 - RNA, 51 nt, Homo sapiens
gaagaggcccaccagacagagaccagggaaagaaaacaagccacccagaca

SEQ ID NO: 211538 - RNA, 114 nt, Homo sapiens
gccggcaagaacaagacagcaagagcagcccgcgagagcccagaaagagcgaaccacagcgcgccacagaccagaggcagccggagcaggcgcggcggcggcacaccccacaag

SEQ ID NO: 211539 - RNA, 92 nt, Homo sapiens
gggggcgggccggcggaacccgagcggggccaccggaaggaagcagccaccccgccaggccccccgcccgccgcccccggaggaggacgaga

SEQ ID NO: 211540 - RNA, 56 nt, Homo sapiens
aaagaaaaccaaaacgcaacagaaacaacagcacaccaaagaaaagcggggcagga

SEQ ID NO: 211541 - RNA, 84 nt, Homo sapiens
gagccagcacaacaacccccaccgagccgggagacgccacgagcgaagaagcaggggagaggccgagcgaagaaccagcggcca

SEQ ID NO: 211542 - RNA, 90 nt, Homo sapiens
ccgagcccacgaacccgaagcccccaaagagagaaccggagagcacccaacagcccgggaggagcggggacacgaggaccccccaaaggc

SEQ ID NO: 211543 - RNA, 65 nt, Homo sapiens
gggcaagaagcccaagaggagagagccacagagggaaggagagaaggagagagacccagcccacc

SEQ ID NO: 211544 - RNA, 77 nt, Homo sapiens
aaaacacagaggaaagcacacacacaccgcaagggggacaccgcgcagggggcccccggccccgaagcaggccagca

SEQ ID NO: 211545 - RNA, 66 nt, Homo sapiens
gcccggagggggagcagacgaaccggaacccgcggacaaaggccacacaaaacaccaaagaccaag

SEQ ID NO: 211546 - RNA, 79 nt, Homo sapiens
gcgcccgcgacagaggagggaggaaaacaaccgagggcagagaggaagaagaagccagaacacaaaccaggacaggcaa

SEQ ID NO: 211547 - RNA, 75 nt, Homo sapiens
acagaagcaccacggagacagccacgcccccgagagccgccaacacccggccgagggcacacacaacggggccga

SEQ ID NO: 211548 - RNA, 80 nt, Homo sapiens
cggcccgaacccgacccaggcaagcaccggaagcaccccggcggccgcggaagcggggcgcacaccaccggacaaccgac

SEQ ID NO: 211549 - RNA, 58 nt, Homo sapiens
cgaaggcgccggccaaaagaggcaacagagggaaaagacaaacggagcaggaaaaaga

SEQ ID NO: 211550 - RNA, 72 nt, Homo sapiens
acgcccgcagggcggcagcagcacccgccaggaggcgccgaggaagagcagcgaagaggcacaaaaagagag

SEQ ID NO: 211551 - RNA, 66 nt, Homo sapiens
cagaccagacacaagaaaaccagccgagaagggacgggagaaagaacagacaagccgcaagaaccg

SEQ ID NO: 211552 - RNA, 88 nt, Homo sapiens
ggcgcagcggcgccgcgcccaggagggagggacacagccccaaacaggacgaaggcggcgaagcaagcagagagcggaagggaagagc

SEQ ID NO: 211553 - RNA, 81 nt, Homo sapiens
ccggagacagaggcggaaccaaaagcagggaaaccgggacggggcgaaagacaaagaagcaacacagaaacggaaaaggaa

SEQ ID NO: 211554 - RNA, 76 nt, Homo sapiens
ccacccgcgcgcgcagccgcgggcgggcaggcgcggcaccgaagcggcagcgaggacagaagccccagaaagaagg

SEQ ID NO: 211555 - RNA, 65 nt, Homo sapiens
aaagggcgacggcacacagagagaccgacaccccccgccgccaggaagaaagaggcgccccccgc

SEQ ID NO: 211556 - RNA, 62 nt, Homo sapiens
agggcagaccgccagcaaccaggacagcccccacggcggcacaggcaccaagagccaaccga

SEQ ID NO: 211557 - RNA, 79 nt, Homo sapiens
cgcagagggaggaacaacagagagagccacggagagaaccagaccaggaggcgggcgagcaggagccacgccagagaaa

SEQ ID NO: 211558 - RNA, 36 nt, Homo sapiens
ccacccacccgcacgggcccgaggagccgccgcgcc

SEQ ID NO: 211559 - RNA, 79 nt, Homo sapiens
cagggcgccccagccgccgccggcggcggcggcggagccaccgcgcagaacaaggaaagacgcagcagagggagaccaa

SEQ ID NO: 211560 - RNA, 59 nt, Homo sapiens
aaagaacaagcacagagcaaagaggaggagagaaagaacccacgcaggacgacagaaga

SEQ ID NO: 211561 - RNA, 50 nt, Homo sapiens
cgacacaacaagaccaaccgaccggacacagggggcccgccagaggagag

SEQ ID NO: 211562 - RNA, 32 nt, Homo sapiens
aaaagggaccgcgaagaggcggaccggacaaa

SEQ ID NO: 211563 - RNA, 73 nt, Homo sapiens
aacacagacccagccgccaaggagacacgacagccccaccggaccacgagaagaaaaaacagcgagacaccga

SEQ ID NO: 211564 - RNA, 79 nt, Homo sapiens
ccagggaagccacagcaccccagcacccaggaaacagcaccacgggaaaccgagcgcagcagaaccaaacaacaaacgg

SEQ ID NO: 211565 - RNA, 77 nt, Homo sapiens
ccaagaacgggacacagggcacgaagaacacaaagcaaaaaggaaaagaagagaagaagaggcaggagcacaccaaa

SEQ ID NO: 211566 - RNA, 38 nt, Homo sapiens
caacagcagccacaggaaccgagccgcccagacacggg

SEQ ID NO: 211567 - RNA, 79 nt, Homo sapiens
gccccgcaagaagggccgggggcgagccggagcgaccccggcaggcaaccaagggcagaccgcacaagcagccccggaa

SEQ ID NO: 211568 - RNA, 76 nt, Homo sapiens
gcgccggcaggagacgaagagcccgggcggcgccgaccggccacgggcgagcgcggcagcaccaaggagaaacaga

SEQ ID NO: 211569 - RNA, 78 nt, Homo sapiens
gagagcccaacgccgggccaagaccccgaggccgggcgaggaaaacgcaaggggccaggacgggccccccgccccaag

SEQ ID NO: 211570 - RNA, 57 nt, Homo sapiens
aggaaacaaaacagaagacaacaagcaaggcacggcaccccacccagcccagaacag

SEQ ID NO: 211571 - RNA, 88 nt, Homo sapiens
cgcggccaggcgcagcgggaaagcgccaaggagcagaagacgaccggcagcgaggggcaccaccacgaggcgaggggccaaccaagga

SEQ ID NO: 211572 - RNA, 63 nt, Homo sapiens
aggcgccagccgaaacgacaaggccagagaaggaaccaacggaaagaagaagccggcaccaga

SEQ ID NO: 211573 - RNA, 79 nt, Homo sapiens
gcaacccccgccgcaaaccgcagcccaggagcccggaagacccgcaccggagcaaagggcggagaacggaaaagcacca

SEQ ID NO: 211574 - RNA, 40 nt, Homo sapiens
aacgagaccacaccaacggaagcaaggcagcgccgccaaa

SEQ ID NO: 211575 - RNA, 74 nt, Homo sapiens
aagaaaaacacaggcgggcgaacaggaccagcaagacaacccagccagacccagccaggcacaggcgggccagc

SEQ ID NO: 211576 - RNA, 55 nt, Homo sapiens
cgcaggcagacaaaagggccaaagaagggagagagcaaggccaagacaggggaca

SEQ ID NO: 211577 - RNA, 70 nt, Homo sapiens
caagaccaaggaagacgaacgcaccccagagccgacccccaccgcaaggaaggaacaacgacgagagagc

SEQ ID NO: 211578 - RNA, 35 nt, Homo sapiens
cgagccacggcagccgggggcaccaagcaaggcac

SEQ ID NO: 211579 - RNA, 70 nt, Homo sapiens
caggagcgcacccacggaaagacgaccacgcaaaggagcacaacaggcacaaagagagaaggaacaccca

SEQ ID NO: 211580 - RNA, 76 nt, Homo sapiens
aagaagagcagggaaggcacggcaacaaccagaccaagggccacaaggggggacgaaccaaagcccaagacgcgcc

SEQ ID NO: 211581 - RNA, 71 nt, Homo sapiens
ggaggagaccacccaaacgcggcacgggagggaaagacaaggagccgggccgagaaaccgaaccagagacc

SEQ ID NO: 211582 - RNA, 77 nt, Homo sapiens
gaagcgggagaagccggaagaccgcagagaaaggcccccccgagccccccagcgccacagcaaggacacgaggcacc

SEQ ID NO: 211583 - RNA, 64 nt, Homo sapiens
gggaagaagacgagcaacaggagagggaacgggaggaccaggggcacacaccacagggcaccag

SEQ ID NO: 211584 - RNA, 76 nt, Homo sapiens
agacggagcgggcgccgcgcgccacgcccaacccgggggaaggcaaaggcccacccacagcccccagaaccccggg

SEQ ID NO: 211585 - RNA, 54 nt, Homo sapiens
cggcagaagcagacggaagcaaacagacggcaaaagggaaaccaaccaggaggc

SEQ ID NO: 211586 - RNA, 40 nt, Homo sapiens
ccacccgcgccgcgacccgccggcacagccacaccgagaa

SEQ ID NO: 211587 - RNA, 86 nt, Homo sapiens
cagggcccgaagagggaagacacgcggaaacaggacagagcgggagccaccagcgccaaagggaagccaggagcccgggggcacgg

SEQ ID NO: 211588 - RNA, 66 nt, Homo sapiens
gggcgcgaagggcggcagcccggggcgagcccagaggcccggaaggcgcaaaagggggagaacaac

SEQ ID NO: 211589 - RNA, 79 nt, Homo sapiens
cacagagaaacacgaagggaacaacagaaaaggcaggaacaggggaacagcaagcacagaaccaaggaacaaggaagaa

SEQ ID NO: 211590 - RNA, 80 nt, Homo sapiens
aacagagccaaggccggagcgcccaacaggaggagcaagcacaacaggccgaagaggccggagaaggacacgcgaagaag

SEQ ID NO: 211591 - RNA, 82 nt, Homo sapiens
cagacagacgccggggaggcagcgcgggacccagcccaggcggcgcggacggggcgggagccgggggggcgagcccgccgag

SEQ ID NO: 211592 - RNA, 83 nt, Homo sapiens
gggggggaccgaccgcaacagaacggacccggccacaccaacaagacaagaaccaaacagaacccacgaagggagaccagaca

SEQ ID NO: 211593 - RNA, 36 nt, Homo sapiens
gacccacacaaccaccagcgagggacggggcaccgg

SEQ ID NO: 211594 - RNA, 67 nt, Homo sapiens
gacccaaccaaagcacaaaaaacaccgaagccagaagacggaaaaaacagccagacaacacagggac

SEQ ID NO: 211595 - RNA, 74 nt, Homo sapiens
aggagcgcaacagcagcaccaggacgaagaacggaagcgccccagaggagagggcggagagacggagaaaacgc

SEQ ID NO: 211596 - RNA, 53 nt, Homo sapiens
gggacggcccaccagccaccccaccgcgcagggagcggaagaagcccaagaac

SEQ ID NO: 211597 - RNA, 63 nt, Homo sapiens
gcaagagcccaggaagagccaagcaggcggacaagccgagaagaaaccgcaagaaagaaagcg

SEQ ID NO: 211598 - RNA, 77 nt, Homo sapiens
acaaagcaaaaccagaccacaacaagaagggggccaaagggcgagggcacaaaaaaccacaccccccaccgaggaag

SEQ ID NO: 211599 - RNA, 72 nt, Homo sapiens
aagcacaaccagccaagggccacagccagggcacagcagaaaagcacgaaaggaacggagaaagaccagcag

SEQ ID NO: 211600 - RNA, 57 nt, Homo sapiens
acaggaaagcagcccgaaaaagacgcgagaagccacacgaccacagacaggcagcca

SEQ ID NO: 211601 - RNA, 76 nt, Homo sapiens
gggcacgcaacccaccacagccaagccacccccaccagcccccgaacgggaccacaggaagggacccacagaagaa

SEQ ID NO: 211602 - RNA, 65 nt, Homo sapiens
gaaaaagcacccggacaaggaaacgagcaagaagagagaacggcaagaaagagagcacaggcgca

SEQ ID NO: 211603 - RNA, 70 nt, Homo sapiens
gggcagggcacacaaggcaaggaacgagccaggggaacacaccagaaggagaagagaggaccagaaccag

SEQ ID NO: 211604 - RNA, 73 nt, Homo sapiens
ccaagcccccggaagagggccggagacccagagccgggggagggaagagacgaagggaaaacgagaggggaaa

SEQ ID NO: 211605 - RNA, 76 nt, Homo sapiens
agaggaacggagcaagaagcgacacaaggagaaaagcaggcaggagacaaagagggagaaaagagcgcacaaaaac

SEQ ID NO: 211606 - RNA, 80 nt, Homo sapiens
ccggcacggaagcgaggcaaacacgagaagggacacgacacagggacgggccaagaacccaggaggagggaaagccggac

SEQ ID NO: 211607 - RNA, 80 nt, Homo sapiens
ggaggaagcgcagacccgcgaaagggcagcaagacacgaagccgagaaagagcagcgacaacaaggaggccccggcaaga

SEQ ID NO: 211608 - RNA, 94 nt, Homo sapiens
gcgcagagcgggaccacccgggcacagcaggcacggagcaagcagagcccggacaggcccgccaccggggcacgggcgccccccggaagcggac

SEQ ID NO: 211609 - RNA, 78 nt, Homo sapiens
caaaccaccccaacacccaggaggagcaccgacccaggcggaggcagggcacagcggccaccaaaaccccaccccggg

SEQ ID NO: 211610 - RNA, 81 nt, Homo sapiens
gcaccacaacccacggcgacacgcggcagcggacaaaacaaagccgaccgcccagcggcgccagagcaaagaaaaagaagg

SEQ ID NO: 211611 - RNA, 77 nt, Homo sapiens
ccacgcccccgcgccggagccccgggccagggaccagaccccacaagaaaacacacaaccacaggcccaagcaaaca

SEQ ID NO: 211612 - RNA, 76 nt, Homo sapiens
ggcggaaaggggaagaaccgagagaggagagaagaaaaagcagcggaaggaagcaaacagggcccacccacacaag

SEQ ID NO: 211613 - RNA, 78 nt, Homo sapiens
cgccccccggccacgcgagcgggaacagcccccaccggagcggcagaaaaagaagaggagggagggcagaaaaacaag

SEQ ID NO: 211614 - RNA, 69 nt, Homo sapiens
agggcaaaaacgaagcacagcgggcacccgccacggacagggagggcaacagagagaaaagcgaacacc

SEQ ID NO: 211615 - RNA, 64 nt, Homo sapiens
cagccccacgaccagaggagcagcagggcgcggcggaggggaggagcaaagccagacgagccag

SEQ ID NO: 211616 - RNA, 82 nt, Homo sapiens
caccacccggaggagaccggcagcaggcaaaagcagaccggaaaacccaccggcaagaccacacccgaggggagcccaggac

SEQ ID NO: 211617 - RNA, 50 nt, Homo sapiens
ggcccggcaacgaaaagacagcaaaggcgcagcaaacagggaggaagcca

SEQ ID NO: 211618 - RNA, 70 nt, Homo sapiens
gcagacggaacgaacagaagaaccaaggagacagggaaaaccgaccagagaaaagaagccgggaagcaga

SEQ ID NO: 211619 - RNA, 74 nt, Homo sapiens
ggcgaccagaagcggaaacgaacaaagagaaaaacacaccgacagcagaacacacgcgaaaggaaaccaagcgg

SEQ ID NO: 211620 - RNA, 73 nt, Homo sapiens
ggccgggggacagccaaggccagccaggaacaaggggagaagggaaaaggccaggggaccgggggagcggccg

SEQ ID NO: 211621 - RNA, 66 nt, Homo sapiens
gcccagccgccccggacagagagagcaaaggagaaagacgcagaaagaggggcaaaaaagagcaca

SEQ ID NO: 211622 - RNA, 80 nt, Homo sapiens
cgcaccgaccaggaccacagcggcaaggcccaagcccagccaagagaacacaggaagaggaacaaaggcagccccaagag

SEQ ID NO: 211623 - RNA, 78 nt, Homo sapiens
ggacccacacagacacaagaacagacgaccgggaaaagacgcagcccccaagcacaggaacacagcgaagaaccgaaa

SEQ ID NO: 211624 - RNA, 69 nt, Homo sapiens
cgaaggccggaaaccccaccccggaaaggagagccagacaaccacacaggccgaagacaagcaaccaac

SEQ ID NO: 211625 - RNA, 93 nt, Homo sapiens
gaaaaccccacagaaaggaaaacgcagaaaaaacgacaggaaacggggacggaacagggggggaaagagccagagagaggaacagacagcgag

SEQ ID NO: 211626 - RNA, 86 nt, Homo sapiens
cgaaggcggcagggcagcagaagcgcaccccgacgccgaggaacgagagcgcgaagcaagcgggggagagcagcggcgccagcccg

SEQ ID NO: 211627 - RNA, 80 nt, Homo sapiens
ggaacagggcaaaggagagcacaaccacgcagggaagcccaggggcagcagacggcgacccggcgagagccaacgggcac

SEQ ID NO: 211628 - RNA, 81 nt, Homo sapiens
cggagcccgcagaaccccacagcaagaggacgcgggaggcgggcggcggggcggcacggcggccgccacacaggggagccg

SEQ ID NO: 211629 - RNA, 77 nt, Homo sapiens
aacaccccagccaaagccaacaagaccaagcccgcggacgccaggggccagacccacgcagcgcagacagaccccgc

SEQ ID NO: 211630 - RNA, 90 nt, Homo sapiens
ccaaagccgcgcgagaggagccgggacacgccagcgcgggcccagaccggccgcagagagaacagcccagaaaagaaagccccagccccc

SEQ ID NO: 211631 - RNA, 87 nt, Homo sapiens
caaggcccaaccccaaacaccgagcacacaaccccgggccgccccccaccagaagagccagacagacccacgcccgcccaaccaaac

SEQ ID NO: 211632 - RNA, 76 nt, Homo sapiens
agcccagggcaggacaccgacaggaacagggaccacggggcgggaacagcccgggccgccgcacccaccgcggaga

SEQ ID NO: 211633 - RNA, 59 nt, Homo sapiens
ggggcacccagaaacgcaagaagacaacggccggccagggaaagacaaggagccgggcc

SEQ ID NO: 211634 - RNA, 76 nt, Homo sapiens
gccgggccggcccgcaccaggagcggaacaagaaaagagggccggacagaggcagcagcccggcgaacaaaggcag

SEQ ID NO: 211635 - RNA, 79 nt, Homo sapiens
cccccagcggagacccgccgcaaacagcccgccagacacggcaggccaagaagcaccgagcgggcggcgcgccgagacc

SEQ ID NO: 211636 - RNA, 57 nt, Homo sapiens
caccacaggaacagacccggagaacggacaaggcaacaggagcagggccgccccgag

SEQ ID NO: 211637 - RNA, 75 nt, Homo sapiens
cacaaaagcagacaccgaaccccacaagcagagaaagcaaggaacaagaaacagggggcagcacgccgaaggaga

SEQ ID NO: 211638 - RNA, 74 nt, Homo sapiens
agcagccagccaaaaacgagccacacccagaacaaacaccacacaaaaaagccaacacaaccaggacaagccga

SEQ ID NO: 211639 - RNA, 56 nt, Homo sapiens
ggagagcacggggcaggagccagcaccgccgaccgccagcgccagaagccagagag

SEQ ID NO: 211640 - RNA, 76 nt, Homo sapiens
cgggccgaaggccccggacgagacggcccggcgccaaggggagagagggaaacggcccccaggaccgcggcccggg

SEQ ID NO: 211641 - RNA, 64 nt, Homo sapiens
aaggaccaagaaccaggccacagcacaccagagaagcaagggacagaaagaggaggggcacggc

SEQ ID NO: 211642 - RNA, 77 nt, Homo sapiens
gcggagcagcgggggcggggcggcggcgccggcgcgggcccgggccccgagcgcccgaacaggacccacccaggagg

SEQ ID NO: 211643 - RNA, 78 nt, Homo sapiens
ccggcgccaggcccccgccgccccagaaccggcgaaaaccggagagggacaccggccagggccaaaaagcagaaaaac

SEQ ID NO: 211644 - RNA, 71 nt, Homo sapiens
acccagccaggcagaccccgggcagcagggaagggccccacaccaaaccgccacgcaacagacgcagagcc

SEQ ID NO: 211645 - RNA, 71 nt, Homo sapiens
gaggaagggaacgggaaaagaaacggccgcagggcaaacaggccaaaggccacggccgcagacacagagaa

SEQ ID NO: 211646 - RNA, 75 nt, Homo sapiens
aggaaaagaccaagacccaccccaaaggcaagaacggaagcacgggcggaggaaagcacaagcagagcccccgca

SEQ ID NO: 211647 - RNA, 78 nt, Homo sapiens
cgaaaacggaaacgaacggaaagacgcccagggaccggagaagggcgggaaacaggcggaggcagaggacgccggacc

SEQ ID NO: 211648 - RNA, 55 nt, Homo sapiens
gaaaacaaaagaggagaaaggggccccagacacgacgcccccggccggcccgggc

SEQ ID NO: 211649 - RNA, 73 nt, Homo sapiens
agcaggaaagccaggggggccaggacgcaggggagcgcaggccgagaaaggagcgagaaaagagcacgaggcg

SEQ ID NO: 211650 - RNA, 70 nt, Homo sapiens
ggcagaaggaaaccgggccagcccgcacagcggaggccagcgggaacggaaggcgcagccacgcaaaaaa

SEQ ID NO: 211651 - RNA, 79 nt, Homo sapiens
cgggggcaggaggacaggaggagcccagagcggacgggcgaacagcccgggccgcgagccaaaaaaaggcaggagcgca

SEQ ID NO: 211652 - RNA, 74 nt, Homo sapiens
gacccaaaaaagagagaaaaggccaaagagagggcgaacaagcaaggagcggcagcccacaagcaggaagacca

SEQ ID NO: 211653 - RNA, 83 nt, Homo sapiens
agaggcgcggaaagcacggaagggggagaaggaacggaaaagaagaagcgagagaggcgaagaaaaggaagacaaagaagaag

SEQ ID NO: 211654 - RNA, 64 nt, Homo sapiens
caaccccacgccaccgaagagccaagcccaggagcgccgaacgcgggggggcggcgggacaaca

SEQ ID NO: 211655 - RNA, 74 nt, Homo sapiens
cacaggaaaacgccccacggaaaggggagaacaggacccaggagaggaaaagaagcaggaacagagacagagcg

SEQ ID NO: 211656 - RNA, 70 nt, Homo sapiens
ggcacagaaaaacaaaaggacaaaggagaagccccggggaaagaggaggaaaacaaaggcagcgaacaaa

SEQ ID NO: 211657 - RNA, 76 nt, Homo sapiens
gccccagaggcggcagaacccccagccaacggcaggagagcgacgcaggggaggacagggaacggcgaggagccac

SEQ ID NO: 211658 - RNA, 78 nt, Homo sapiens
cggcggccacgcccgccggaccgcgcccaggccccccagaaagagccgcagacgcacagcaaccaccggacccgaagg

SEQ ID NO: 211659 - RNA, 64 nt, Homo sapiens
cacacagcaagaagaggggaccaaaagaacccagccaacccgcagagggaggggaggggcgagc

SEQ ID NO: 211660 - RNA, 68 nt, Homo sapiens
gacacccgggcggggcagagcagcccccagccagccgcgaggccccagcccacccaaggaaccaaaga

SEQ ID NO: 211661 - RNA, 68 nt, Homo sapiens
agaacagcagaaacggccacagaggaagccaaaaggcgaccagaagacggaagaagcggcggagcagg

SEQ ID NO: 211662 - RNA, 72 nt, Homo sapiens
gaagaaacagaaaagaccaagaccaccaaggcaaagaccggccgcagagagaacagcccagaaaagaaagcc

SEQ ID NO: 211663 - RNA, 78 nt, Homo sapiens
gcaggacagccagcagaacccgaaaaaggaacaaaaggggacaaaaggcccgaagaagagaagaacacaggacagagc

SEQ ID NO: 211664 - RNA, 75 nt, Homo sapiens
cagaagaaggaccggaagcacacaacaggaaaacaaaagaggagaaaggacacccccggcaccgaggaaaacaag

SEQ ID NO: 211665 - RNA, 52 nt, Homo sapiens
agacagagacgggagcacaacggaccacaccccgacgagagcaccacgacaa

SEQ ID NO: 211666 - RNA, 67 nt, Homo sapiens
gaccgagaaacaaaggaaccggaaaagcaaaacagggcggcagggcaaggaaacgcgaagcgaaaac

SEQ ID NO: 211667 - RNA, 74 nt, Homo sapiens
gggaaggggccagggcacggacaacgcgagacagaacagacagaaaaaacaacaagaaacccacaaccaagaga

SEQ ID NO: 211668 - RNA, 79 nt, Homo sapiens
gagcggaggacacgggggccacaaagccccccggagacgcaaccaaggggcgggcacaagggaagacagcgcccgggac

SEQ ID NO: 211669 - RNA, 75 nt, Homo sapiens
ccacccagggccacggagagccggcgcacccgaagagcaggcaagcccgagacacgagccccaaggggaagcacc

SEQ ID NO: 211670 - RNA, 53 nt, Homo sapiens
gacaaagcgaaagcacaccaaggacgaaaaggacggcgccgggggccgaaaac

SEQ ID NO: 211671 - RNA, 34 nt, Homo sapiens
cggcccacgaggccagggcgaagagagaacacgc

SEQ ID NO: 211672 - RNA, 71 nt, Homo sapiens
gagggaacaacggcgccagaaggcaagacgcagaggcccggacggagcccccccggcgccggcagcgcccg

SEQ ID NO: 211673 - RNA, 76 nt, Homo sapiens
agaaagggacaaagagaggagcaggcaaaagcagaccggaaaacccaccggcaagaccacacccgaggggagccca

SEQ ID NO: 211674 - RNA, 53 nt, Homo sapiens
gggaacaggcggaaacccaaccaagaaggcccagaccgaaacaaggacccccc

SEQ ID NO: 211675 - RNA, 62 nt, Homo sapiens
agccgacagcccagccagcccaccgcaaccagcaagcaagaaccgagcagacaaggagaaca

SEQ ID NO: 211676 - RNA, 67 nt, Homo sapiens
caaggggccgggggagggaaaacgggccagaccggaagagaacgacaggcccaaacagacggggaac

SEQ ID NO: 211677 - RNA, 55 nt, Homo sapiens
accagagaaagagacacacgaccaacaccaaggaaagcacagggagaagacgcca

SEQ ID NO: 211678 - RNA, 61 nt, Homo sapiens
cggcgcgcgcccgaggcgaggaggagcgcggcggcagaccagcaggacagcacggccaaac

SEQ ID NO: 211679 - RNA, 75 nt, Homo sapiens
acaggggagccacgcgcggccccaagaacaacacagccaacgcaacccaacaagaggagccgccgcgcccaggcg

SEQ ID NO: 211680 - RNA, 85 nt, Homo sapiens
cgcgcgcaccggagcccagcccggcggccacgcccgccggaccgcgcccaggccccccaggcgccagcagaaccggcggggagcc

SEQ ID NO: 211681 - RNA, 81 nt, Homo sapiens
cgcacggagggagcaccgggcccgggacgcccgagcccgcaaacaacacccaacagcccaaagcaaaggagcaacagccca

SEQ ID NO: 211682 - RNA, 67 nt, Homo sapiens
agacaccaagggcacagggggccaaggaacgcaccaggcagccagaggggacggcagagacaaaacc

SEQ ID NO: 211683 - RNA, 78 nt, Homo sapiens
agccaagccgagccgccacccggcgcccggacggagacacacggacacccaggaggaaggggcgcgagccagcaacag

SEQ ID NO: 211684 - RNA, 76 nt, Homo sapiens
ggcagcgagagggagacaccagggagaggccaaagagagccacaacagcagaagcacacaaggaagacaggaggcc

SEQ ID NO: 211685 - RNA, 76 nt, Homo sapiens
aaccagcaggcagggagagaggggcggaaagaagccagcgagaagaccgagaggccgcgacccaacaccgcaacgc

SEQ ID NO: 211686 - RNA, 73 nt, Homo sapiens
caggagagcaaggagaaggacgccagggcggaggaccccaacgaaccgcaaagaagccaaaaacaacacagac

SEQ ID NO: 211687 - RNA, 83 nt, Homo sapiens
caagcggccaagcacaaagagcgccccacgagagaacggcacacgcgagcgcccgcagagcccagggagaggaagaccgcccg

SEQ ID NO: 211688 - RNA, 76 nt, Homo sapiens
ccacgcaagaaggagcgcgccacccggccagcagaccgacacaggaaacgccagggaacgggccagagaaacaccc

SEQ ID NO: 211689 - RNA, 88 nt, Homo sapiens
gcgcagcccagcgccaccgggcagcagcggcgccggccgcccagccggggccaaagcgaccaaccccccaccgcacgcagggggcccc

SEQ ID NO: 211690 - RNA, 94 nt, Homo sapiens
aagaagcgacagcgcaaagggcaccgggaggaagccacacaaagaacaaagcagggagacgagacgccccccggagccccaggccggaagcgcg

SEQ ID NO: 211691 - RNA, 52 nt, Homo sapiens
cacaggagcgcccgcggaggagcgcccgggcaacaccgggcgcgcacagaag

SEQ ID NO: 211692 - RNA, 68 nt, Homo sapiens
ccacgccccagaaggcaggaagggggcccagccaaagaaaggcgggggcggagggcaagacgacgaca

SEQ ID NO: 211693 - RNA, 70 nt, Homo sapiens
ggaaaggaggaagaagacaccggggacagacaggcacaaaagggaccgccagcgcacacagaagaacccg

SEQ ID NO: 211694 - RNA, 80 nt, Homo sapiens
gggcggaccaagcaggccaagagcccaaggcgacccaaagaacaacaagaggcaccaggcaggaccgacagagcacgaag

SEQ ID NO: 211695 - RNA, 78 nt, Homo sapiens
agagacaaaagaaacgggccccgacgacagaagcgaaggggacagggggagaaccgccagggaaacccgggggacaga

SEQ ID NO: 211696 - RNA, 107 nt, Homo sapiens
gaagcacaaagcaaacgaggagaaggaagacgaaccagaaaacacgcaaaggcggagccccccccaagggcgagcagcggccggacaagaaggccaagaaccgcgag

SEQ ID NO: 211697 - RNA, 82 nt, Homo sapiens
gaggcaggggcagggcgggcggcgagccaggccccgagccccggccccaaagacccaaaacagagacaccccccagcccccg

SEQ ID NO: 211698 - RNA, 72 nt, Homo sapiens
cgaacaaggcgacaacacagaggcgcgaacagggcccacccgccacgacacaggggaagaagaccaccgcac

SEQ ID NO: 211699 - RNA, 75 nt, Homo sapiens
acgcgaggcaggggggccggggccgggcgcgcgcagagagaacggacgagaccaacgcggaaaccagcaagaaaa

SEQ ID NO: 211700 - RNA, 35 nt, Homo sapiens
ccccagcaccgggcggacgcggcggagaaaccacc

SEQ ID NO: 211701 - RNA, 80 nt, Homo sapiens
acccagacagacgccggggaggcagcgcgggacccagcccaggcggcgcggacggggcgggacagcccaaggcggaaaag

SEQ ID NO: 211702 - RNA, 70 nt, Homo sapiens
agaaacacggcccagccccagaaaaggaacacaagaaaacaccagacagacccgaacccgcccccgcaaa

SEQ ID NO: 211703 - RNA, 81 nt, Homo sapiens
aggaaacaagcccacccagaaaaaggcccgggacccaggaaccaggggcacaacagcaggacgcccagaacagcgcaccgg

SEQ ID NO: 211704 - RNA, 73 nt, Homo sapiens
aacaccacccaaaaacgggggcaaaccgagggacacccagcgagcacaagcacaaggcggacagcaaacagga

SEQ ID NO: 211705 - RNA, 78 nt, Homo sapiens
gcacgggccccggcgccaccggagagaggccgcgccgggcagaggcaaggccccagcccaagcgggccgacgagagga

SEQ ID NO: 211706 - RNA, 74 nt, Homo sapiens
gggacagcgaacagggaggagagacggcggcggaaaaccccaaaaggacaaaggcagcgggcggaggacggggc

SEQ ID NO: 211707 - RNA, 117 nt, Homo sapiens
gcagaggggagcagcgccggggccgccgaccaacacccgaggcggacgcagagacaggaaaaccagagacccagacacgcgaaggaacgaaaggccaaaaggcaaaagacgacggaa

SEQ ID NO: 211708 - RNA, 54 nt, Homo sapiens
gggaaaaccccggaagcaaggacagaaaacagccacgcaaagggaggaggaggg

SEQ ID NO: 211709 - RNA, 61 nt, Homo sapiens
ccacaacaccaggaggaccagcggacgacccccgggacagaaccaaaggcccaggccaaag

SEQ ID NO: 211710 - RNA, 88 nt, Homo sapiens
ccagcaacgcgagggcgagcgcacagcgaggaggggggcgcgcagcccggggaccccccgccccagcaggcacccagacggagacccc

SEQ ID NO: 211711 - RNA, 73 nt, Homo sapiens
aaggaaaccggaaagcaccagccggagggcagaggacaacagcaaccaagaagacgagcaccccccgcaccga

SEQ ID NO: 211712 - RNA, 47 nt, Homo sapiens
gaagacacacaaccacaagggaaaaggaacgcagcaccagcccacga

SEQ ID NO: 211713 - RNA, 61 nt, Homo sapiens
ccgcaagaagaacagagacagcagccaaacccccaggagaaggccccaggcaaggcacgca

SEQ ID NO: 211714 - RNA, 56 nt, Homo sapiens
ggggcaaagcggagaccgagccggcgcgaaacggaagagagaggacggaaaaggga

SEQ ID NO: 211715 - RNA, 79 nt, Homo sapiens
caaagcagccagggagacccaaaccgaaggcagcacggcacacgccaaaaaacgacagaagcacgacaacaacgggcag

SEQ ID NO: 211716 - RNA, 59 nt, Homo sapiens
caggcccgggggcggcggccacgccaaggacgggccgagaagaaagcggaggcacaaaa

SEQ ID NO: 211717 - RNA, 74 nt, Homo sapiens
gggacgagagccaggaagaaagaagcgaaggacgacagcagccagaaacagagaccaggggccacaacggaaac

SEQ ID NO: 211718 - RNA, 71 nt, Homo sapiens
aagcgccaaaggaggcaacaagggagaagcagcaacgcaccaacaagacgcaaaaccagcaggccgcgaag

SEQ ID NO: 211719 - RNA, 75 nt, Homo sapiens
ccagccgcaccaccaagggcggaaacagcagaagagcgcggcaagcggccacgacgaaggggcaagccgcccaac

SEQ ID NO: 211720 - RNA, 44 nt, Homo sapiens
ggggggagccccgagagcaagggagagaccagaaacgagggcaa

SEQ ID NO: 211721 - RNA, 65 nt, Homo sapiens
gagcgccaaacgcccgaaagaagcggacggaggacagacccgagaaaccggacagcagaggaaac

SEQ ID NO: 211722 - RNA, 81 nt, Homo sapiens
caacaccccggaacaaggccggccaacggagacaggagcaggacacgagacacaggccgcacgcacgcgggggaccccaag

SEQ ID NO: 211723 - RNA, 56 nt, Homo sapiens
gcgaacaaaacgacgcagaacaaggcggggcaccaggcccagacggcgaacccgag

SEQ ID NO: 211724 - RNA, 72 nt, Homo sapiens
ccacaaagcagaagaagaggaaagacagaaccagccaacaaaaggcgaccggcccgaggaccgccgcacgac

SEQ ID NO: 211725 - RNA, 66 nt, Homo sapiens
acacgccaccccggagaccaccgagggggcggcaagaggggggaacggaacccaaccaggaaacag

SEQ ID NO: 211726 - RNA, 80 nt, Homo sapiens
aaaaacaaacacacgcaaaggagaaaggaaccgacagagcagcagcagagaaacgagcagaacaaaaaggggacaagaga

SEQ ID NO: 211727 - RNA, 76 nt, Homo sapiens
gagaaggagcagcacgaaaggaggccacagaccccaccagcacgaagggacacgggggcagaaaaccaaccaaggg

SEQ ID NO: 211728 - RNA, 73 nt, Homo sapiens
ccaaagcagcggcgccggccgccccaccggcggaacccagcaagcaggacgaaaggacaggaaacagaccaca

SEQ ID NO: 211729 - RNA, 78 nt, Homo sapiens
cagcagagggaccggcgccccgaggccggaaaaggccgcccggcgcccgcaggagcagccaacaagcccaaaggaaaa

SEQ ID NO: 211730 - RNA, 83 nt, Homo sapiens
cggcgcccgcgcacgcgcaagaccgcgaggcgagacccaggagcccaagggggcacaagaccacaagggacgccagcgcagca

SEQ ID NO: 211731 - RNA, 39 nt, Homo sapiens
caggacccacggaagccagaaagaggcggagaagaaccc

SEQ ID NO: 211732 - RNA, 57 nt, Homo sapiens
gaggaagacggcgaaggcccaggaaacaaagagccccgggaaaagaaaaaaaacgcc

SEQ ID NO: 211733 - RNA, 86 nt, Homo sapiens
aagcagagcgggagccgagacccaaggaagggcaaaggcgagccaaagccacaggagccagaaaagcggaagcgggcccccaggca

SEQ ID NO: 211734 - RNA, 70 nt, Homo sapiens
ccccacacaccagagccccgagggcggcgacggccgaggagcgcaggggacgagggaagaagggccaagg

SEQ ID NO: 211735 - RNA, 80 nt, Homo sapiens
ggaagaggggaaccaaagagagcgcccagagaaggaacgaagaaggacagaacggacaaggcagagcaaggaaaagacgg

SEQ ID NO: 211736 - RNA, 81 nt, Homo sapiens
cagcaaccccggcccaagccagacagacacagcacagcagccacgaagagcaaagcaagccgaaaaaccgaaacaaaaaaa

SEQ ID NO: 211737 - RNA, 65 nt, Homo sapiens
cggggcgcaaagaaggcaccccccagacgaggaggcggcgcccacccgcgcaccggacaaagacc

SEQ ID NO: 211738 - RNA, 75 nt, Homo sapiens
gcgaagccgaagaagaaaacacggggccagaggaaggggaagacacagaaaacaccagaccgaaaggggaaacac

SEQ ID NO: 211739 - RNA, 54 nt, Homo sapiens
agggagaaaagcggacgccggggaggccaaaaaggaaagaccacagcaagacca

SEQ ID NO: 211740 - RNA, 75 nt, Homo sapiens
cccacgagaggacagcccaggccggggggggcacagagccccggaagacagcccccagcgaccagacccagggcc

SEQ ID NO: 211741 - RNA, 42 nt, Homo sapiens
agagccaaggacgcagccacagagccagacaacacagggaca

SEQ ID NO: 211742 - RNA, 84 nt, Homo sapiens
aaaaggagcggggcgacggccccacccccgagcccagcaccgcgggaaggcgaccgggagacccagccagaccgcccagacgga

SEQ ID NO: 211743 - RNA, 119 nt, Homo sapiens
acagcgccgcagaggaccaaggaggacccacggagaacaaaacgcaccggaaagagagcgagggagaagacgcaacaagaagaggacccacaggagaaccacaacaagaggagagagca

SEQ ID NO: 211744 - RNA, 76 nt, Homo sapiens
gcgccggcccagcaccccgagaaccgcaggagccagaggaaaagcggccaggaccaccaggcggccacgggccccc

SEQ ID NO: 211745 - RNA, 76 nt, Homo sapiens
cagaaagaggagcagagacgccggacagacacgagagaagacagggcgccgaccacaaagagccggccgccgagag

SEQ ID NO: 211746 - RNA, 48 nt, Homo sapiens
agaacaccaacggaaaaaccccgcaagagcagaaagaacaagggaccc

SEQ ID NO: 211747 - RNA, 76 nt, Homo sapiens
cccggggggagcggccagcaggagcgccggggccggggcgaacgcggccggaaggagcaaaggagagccagcccac

SEQ ID NO: 211748 - RNA, 76 nt, Homo sapiens
agcccgcggggccggagcggcgcagccggagggggccggagccgcagaaagcaacaaagcgagagcacaagaaaac

SEQ ID NO: 211749 - RNA, 78 nt, Homo sapiens
gcgcggagagcaacgccgggacagcgcaaggcaaaccgacaccagcgacacaagcgcgagggaaccacagaggacagg

SEQ ID NO: 211750 - RNA, 79 nt, Homo sapiens
cccccgacaccccgcacaacacggggggcaggaagaggagaacacagcaacagaagagaccaacccaagcgacccgccg

SEQ ID NO: 211751 - RNA, 74 nt, Homo sapiens
aacaccgaaaaccgccgaagcagcaaaggaagcagagcagaaaagcgcccaggaagcggaaaaacaaaagagcc

SEQ ID NO: 211752 - RNA, 79 nt, Homo sapiens
gcgaagcgagggcgaagcacgacacagaaggggaggggagggaaaggcccaggaaaaagcagcccggcacagccacaaa

SEQ ID NO: 211753 - RNA, 96 nt, Homo sapiens
cgggaccacaagacaacgcggagcggcgaagagcaaccagggacaaacagcaggggccaagaaagaaggagagggggcgacaggacaccagacgaa

SEQ ID NO: 211754 - RNA, 77 nt, Homo sapiens
cagagcgcacccggcaggcgcaacagagcgccggcgaaagagaaccacaaaggaccaggccaagaggaggccgaccc

SEQ ID NO: 211755 - RNA, 82 nt, Homo sapiens
cacacgccaggagcccgacccccggaccaagacgacccacggcaggaggccagcgacgcaggccgaaaccgaaccggagagg

SEQ ID NO: 211756 - RNA, 77 nt, Homo sapiens
cggaggggcgacaggaggcaggccccccagccaccggccggccagcacgaccagcgaccccggcccccaccccgggg

SEQ ID NO: 211757 - RNA, 66 nt, Homo sapiens
cgacgccaagcagccgggacaagacaacgaagagaggaaagaagcggaaaggagggagcacacaac

SEQ ID NO: 211758 - RNA, 77 nt, Homo sapiens
ccaagcagcacgggaagggggaggccaaggggaagagaccacacagacccgccagagagaggcaggaacagaaccgg

SEQ ID NO: 211759 - RNA, 85 nt, Homo sapiens
ccgacccgacgcgccggcccacgcgcggccaaggcccccacagggcaggaagccgccgcccagccaggacggggaggagcagcag

SEQ ID NO: 211760 - RNA, 70 nt, Homo sapiens
agaacacagcaacggccacgggggggcaaaccgagggacacccagcgagcacaagcacaaggcggacagc

SEQ ID NO: 211761 - RNA, 74 nt, Homo sapiens
agaaaaacgggaaaaaaccgcaaaaagaggcccgccaggggagccccacgccggcccggcccggccgccgggac

SEQ ID NO: 211762 - RNA, 74 nt, Homo sapiens
gcggacgaagagccccccccccaacaccgcgacacgcagcaccccgcagcagcacaccagaacaaggccgcggg

SEQ ID NO: 211763 - RNA, 75 nt, Homo sapiens
gaaacaacgagagagccgaggagccagagcaaggggaacgccacggacgggaggcgggaggccgaaggcaccaac

SEQ ID NO: 211764 - RNA, 78 nt, Homo sapiens
cacggccaaggccggggaggcggagaaacgcaccgccaacgcagcacgggccgccggcacccccacgcggacgacggg

SEQ ID NO: 211765 - RNA, 63 nt, Homo sapiens
cgacccgccgcacaccaaaggggcaaagaaaaaggagagaaaaagaggcaaaacaacaagaag

SEQ ID NO: 211766 - RNA, 74 nt, Homo sapiens
cgaggaagggcggaccaaccacggcaaaccaacaagcagaggggaagacacacgaagccggcaggaagaaccag

SEQ ID NO: 211767 - RNA, 59 nt, Homo sapiens
cccgacgcgcggcgacccagcgcagcgccaccgccgggggcggaacaaggaccgggaga

SEQ ID NO: 211768 - RNA, 65 nt, Homo sapiens
caacaggaaccaaccccagcggggaccagcgaccgacaacaacggcaagcggagaagagcaaggc

SEQ ID NO: 211769 - RNA, 87 nt, Homo sapiens
cgcgccgcagagaggaccgggccgaaggccagcggagcgcggcgcgcggggccgcgggggcgggcgcccgcgccggcagaggaggcg

SEQ ID NO: 211770 - RNA, 71 nt, Homo sapiens
ggaacaggcacaccccacacaagcacgccaagaagcacccaagccagggagcggcaaaagcaaaagggcca

SEQ ID NO: 211771 - RNA, 76 nt, Homo sapiens
gccagaaggacacccggacccaacagcagggacgcagccagcgaggccaccagcgccccgcgaaaggagcgcccga

SEQ ID NO: 211772 - RNA, 35 nt, Homo sapiens
cgacacgcagcagcggccagcaaacccaggaacac

SEQ ID NO: 211773 - RNA, 82 nt, Homo sapiens
gcccgaggccgagggcggccgacagagccccggcccccccgcagacccccgggaaagaccccgacaaaagacaacaccggga

SEQ ID NO: 211774 - RNA, 69 nt, Homo sapiens
agcaagaagacgagcgagcggcaggcgcagcgcagccgccagcgcaaggagcaagacccagagaacccc

SEQ ID NO: 211775 - RNA, 74 nt, Homo sapiens
aagcagcaaggcgcggggggccacgcgaggccgagcacagcgacgaacacacacaccagaccggagaagcacag

SEQ ID NO: 211776 - RNA, 81 nt, Homo sapiens
ccaccgccggcgcgggaaacgggcgaagcgacgagccgcgaggaggcgaagggagggccgccccaaccgacgcaccagccg

SEQ ID NO: 211777 - RNA, 57 nt, Homo sapiens
gccaccgagacccggaggaggcgaagcgagaggacaggcgagcagggcacaagacac

SEQ ID NO: 211778 - RNA, 69 nt, Homo sapiens
gagcacggaccaaaagccacccaaaagcaagaaagaaagaagcagaaaaccagaaacagcacaaggccc

SEQ ID NO: 211779 - RNA, 66 nt, Homo sapiens
ccgggccaaaggacgaagaacccacagaggcacggagggcagaagccgcaggacagaagcacaaca

SEQ ID NO: 211780 - RNA, 76 nt, Homo sapiens
ggcaagaggagcccgggggcagcggagcccaggacccaaggccagccagccccaggcaccagcggacaggacaggg

SEQ ID NO: 211781 - RNA, 83 nt, Homo sapiens
gccggcgcgggaaacgggcgaagcgacgagccgcgaggaggagcacagcaagcgggagcaggcagaccaaaggaacagaagcc

SEQ ID NO: 211782 - RNA, 61 nt, Homo sapiens
ccggccacccaaagcacgggggcaacagagcccgacggagcagcagcgccgggaaggaaag

SEQ ID NO: 211783 - RNA, 70 nt, Homo sapiens
cagcccacgaacagaaagggagaaacaccggcgcacacacaaggcgcccgccaggcgaacgcgacagccc

SEQ ID NO: 211784 - RNA, 59 nt, Homo sapiens
cgagcaggaggcgccacaggggcaagacgccaagagaaaaggcgagagcacaaagcacc

SEQ ID NO: 211785 - RNA, 82 nt, Homo sapiens
aaacccgggccccacagcaaccccacaaggggaagcacagcaacccccacaccccccccagacagccaggagccaccaacac

SEQ ID NO: 211786 - RNA, 63 nt, Homo sapiens
aggaagcaaaggaggaggagagcagcaccaacgcaaaacggaggaggcagggagagagcaccg

SEQ ID NO: 211787 - RNA, 92 nt, Homo sapiens
aaaaaacaaaacaaaagaacagaaagcgagcagagcccgcgaacaagacaaggacaagccacacaagaaggagaaaaaaaagagaaggcacc

SEQ ID NO: 211788 - RNA, 58 nt, Homo sapiens
aaaaagagaaagacccgccaaaggcaagaagcaccggagcacgacgacagcagaagcc

SEQ ID NO: 211789 - RNA, 84 nt, Homo sapiens
ccgaggccggcgaagccagggcgccgggaccccgccgccgccgccgccgccgccgcggccccagaagcaagggcaagagagaag

SEQ ID NO: 211790 - RNA, 72 nt, Homo sapiens
aggccgccgcgggccccggcgcccggcgcggagccgcgccgcacgcgcgaccccggggaccaggaggagaag

SEQ ID NO: 211791 - RNA, 62 nt, Homo sapiens
gcacggcccaggaccgcacaagggaaccaggagccgacaacaacccgacgcaaggcagccac

SEQ ID NO: 211792 - RNA, 78 nt, Homo sapiens
ggaagagcccgcaaaccaccaccaacggcaagaaaggaacagacggcgaccaacaaagccacaaaagacccagcacag

SEQ ID NO: 211793 - RNA, 80 nt, Homo sapiens
acacagacagaacaccaaagcccccgaaggaccggaaggccccaagccagcccccgacaaagagagggacgccaggccca

SEQ ID NO: 211794 - RNA, 79 nt, Homo sapiens
gcgagggcacgggcggcagcccgagaccgcagcaggaccagcccaaaaccaggcccaaggaacgagagaggaagcaaag

SEQ ID NO: 211795 - RNA, 73 nt, Homo sapiens
acgcgcacccggccggggagccaaaggggacaagagcaaggaccaaggggaaggcaagaccaacaaaggcaca

SEQ ID NO: 211796 - RNA, 73 nt, Homo sapiens
cgccccccggcgaggacgacgcgcaacgcgcaccaacccaggaagagagaagggcacagaccaagacaacgaa

SEQ ID NO: 211797 - RNA, 129 nt, Homo sapiens
gggccggggcgaggaggccgccaagagccgcagccaagcccggaagacgcgaccgggcaccggcgggacacccagaaggcaagcaccacagggcagaagcggaggccggggacggacaacccaggaccg

SEQ ID NO: 211798 - RNA, 81 nt, Homo sapiens
accacgcaccaaaaggaaccgagacagaaagaggaccagaaaccaagaagcacgaagagaggagagacagcaaagcaggga

SEQ ID NO: 211799 - RNA, 76 nt, Homo sapiens
cacagagaggaaccgcagcagacggagaccagaggagggaaggagcagccagcacgcagaggccggacgcagaggg

SEQ ID NO: 211800 - RNA, 80 nt, Homo sapiens
aaaggggaaacagcagagaccccagacgccaccacaacccccagacgcaagccaaggagccaaggggaaaggagaaaaca

SEQ ID NO: 211801 - RNA, 57 nt, Homo sapiens
ggcccaacccccaccccgcccaaggaggcccagcggccgccaggcacagagaaggca

SEQ ID NO: 211802 - RNA, 62 nt, Homo sapiens
aagggcggaaacagcccccccagaaccaggccggcggcaggccgcccaaggcggagaaaacc

SEQ ID NO: 211803 - RNA, 69 nt, Homo sapiens
aagcccggaacaaaagacccagaacaaaaaaaggagcaggaaagacgagccaccagaaaggaacagaaa

SEQ ID NO: 211804 - RNA, 72 nt, Homo sapiens
caaaaccccccacacaccccgccggagaccaggggagcccagcccccgcccggagcgcagagggaaacggcc

SEQ ID NO: 211805 - RNA, 68 nt, Homo sapiens
aaagaccggagcagcaacgcaagacaccggcacgcaacagggcaggcacgaggggaaaccaggaacag

SEQ ID NO: 211806 - RNA, 66 nt, Homo sapiens
gagagaagcacacacgaagccagaaaaacggcgaagagccgagagcagaacacagcccgaggaaca

SEQ ID NO: 211807 - RNA, 79 nt, Homo sapiens
cagaagccgcaacaggaaagcagcccgaaaaagacgcgagaagccacacggaaaggaagccgggggaccaacaacaaag

SEQ ID NO: 211808 - RNA, 76 nt, Homo sapiens
ggcggccaccgagggcgcggcgggcagacccaacagaggaagccgcaagaaacgggacgacaggaaggccagagaa

SEQ ID NO: 211809 - RNA, 40 nt, Homo sapiens
agagagcccaaggccgcaacacgcaggagcgccgggaaga

SEQ ID NO: 211810 - RNA, 77 nt, Homo sapiens
ggacgacaaagggacacccacaggcgcacagagagacgaggcgccagggccaggcggccaaacccacccagggacca

SEQ ID NO: 211811 - RNA, 77 nt, Homo sapiens
cacaggcccggccaggcacaagggcaccacaaagagaccgcagcccacaccccgacggaagagcaaggaaagcagaa

SEQ ID NO: 211812 - RNA, 76 nt, Homo sapiens
cccccgcgcgcgcgccgcgcgcgcgcccgccggcgccgggcgcggaagggcggagaacggaaaagcaccaggaagc

SEQ ID NO: 211813 - RNA, 73 nt, Homo sapiens
ccgccccaggaccccggcagggaccggcgacgaggccggagagagggccaccaaaaggagaccccccgagcgc

SEQ ID NO: 211814 - RNA, 70 nt, Homo sapiens
gaaacaccaaagcagcagccaccgaacgcccccgccagccgaacgacaacaggagaacccagcgacgaca

SEQ ID NO: 211815 - RNA, 81 nt, Homo sapiens
cccgaaccgccgggcccaccacgcccgccggccgccgggagagaaggcgcgcaggagagcgcagagacccgcccggaagcg

SEQ ID NO: 211816 - RNA, 78 nt, Homo sapiens
aagggaccagcggcaggagggagaaaagcaaaggaaaggacaaccccacagggagaaccggagacaaagcaggacccc

SEQ ID NO: 211817 - RNA, 77 nt, Homo sapiens
aaccaggacccaaaaaaggcaccgcgcaaggaccccacacccccaaagagcacagaacacaccggaaaccgacaaaa

SEQ ID NO: 211818 - RNA, 71 nt, Homo sapiens
cccgggacggccaacgccaagaggggagcgcccccagcgcagaaaagagcaccggccagcagaaccagccg

SEQ ID NO: 211819 - RNA, 107 nt, Homo sapiens
ccggaaaaaaccaaaaaaccaagaacggagaacgaaaaacccaccagcagacaacagcagcgagagagaaaagaaggaaggcaggacgggcaagggcaccacccaac

SEQ ID NO: 211820 - RNA, 83 nt, Homo sapiens
gcgcagcggggacgaggggacgaggggcgggccgaggagacgaagagcggcggaggcagcgggcaggagaaagaagaagagcc

SEQ ID NO: 211821 - RNA, 50 nt, Homo sapiens
ggacggcgagacagaaacagagaaacagacaggagccaaaccggagcagg

SEQ ID NO: 211822 - RNA, 77 nt, Homo sapiens
gcaaagcaacccagaccaaggaagaggcgaacaagcggaaaggaccagaagaggggcagccaggccggcccaacaga

SEQ ID NO: 211823 - RNA, 77 nt, Homo sapiens
ccacacggggaacgagaacaaacagcacagaacgaggaaggggagggaaaaaccgcagcggaggaggagaaagagag

SEQ ID NO: 211824 - RNA, 72 nt, Homo sapiens
aacggcacccaggccaggcaccggccgccaccagggcacgccgacgaccccagcccgggggcggcgaggagg

SEQ ID NO: 211825 - RNA, 84 nt, Homo sapiens
cgcgaggccacccaggccgaccgagaccaggcggcaaaacacagaggaggagaggacacggaaaccagggaaaacacaaaacac

SEQ ID NO: 211826 - RNA, 76 nt, Homo sapiens
ggaggccgccagcagaggcggagcccgcagaccgcagaaggccggagacaccagcagaacccacaggagggccaga

SEQ ID NO: 211827 - RNA, 77 nt, Homo sapiens
cacccgcccacgagcggaagaaccagcagaagcagaaaacacagagaaaacacggagaaacagcaacaggagaaaag

SEQ ID NO: 211828 - RNA, 36 nt, Homo sapiens
acagcaaggggcaaaggaacaaaccgagcgcacagc

SEQ ID NO: 211829 - RNA, 83 nt, Homo sapiens
aacaagcagacggaggaaggaccaccccggcaaagcgggagggaggaggggacacaaaggaagaggcagccagacagcaccag

SEQ ID NO: 211830 - RNA, 79 nt, Homo sapiens
caaccgcaaccagacgccagcgggacgaggaccgagaccgcggccgggaccgagggaccgcgcagacgcgcaggacgga

SEQ ID NO: 211831 - RNA, 82 nt, Homo sapiens
aagccggaggagaagcaagaaggcccggacacagcaaaccgggccacagacgcccccgcaaaacggcccaacacgaagcggc

SEQ ID NO: 211832 - RNA, 82 nt, Homo sapiens
ggcaggacggcggacggcgcggccacggagaagggcgcggaagcaccacacccacccaaggagccccagagcacgcccagcc

SEQ ID NO: 211833 - RNA, 62 nt, Homo sapiens
ccaacaaggaggccagggcggccagacccgggaggcccccgggagaagaagacgaggaccag

SEQ ID NO: 211834 - RNA, 76 nt, Homo sapiens
ccacaaccagcccagcagcagcaagcagcccaaaaggacaaaacagcaacaaggcaccagacacaccaaccaagga

SEQ ID NO: 211835 - RNA, 80 nt, Homo sapiens
agaaacgaagaagaaacaacaagagaaagacccaggaagcagaagaagcgaggagaagaagaggcccgcaagaagcccag

SEQ ID NO: 211836 - RNA, 76 nt, Homo sapiens
cccaagacagcaggggggaaagggagcacggcagccagcaggcaccacacgcccagcccagaggaaaacgcacaac

SEQ ID NO: 211837 - RNA, 51 nt, Homo sapiens
cgccacagccgacagaacgaagagaggggggcagagccagcggccaagcaa

SEQ ID NO: 211838 - RNA, 44 nt, Homo sapiens
agaaaaacaacgaacggaccagaagcagaagaccgcaggaaagc

SEQ ID NO: 211839 - RNA, 94 nt, Homo sapiens
gcgcccagacgcagcgcagcccggccaagcccgccgcgcccggaaacacgagccccaccaaagcaaaggccggaccaggagagagcacccacag

SEQ ID NO: 211840 - RNA, 73 nt, Homo sapiens
gaaagagaacaagcaacgggcacggcacggcccggacgcacaccccaggagaagaacccagaaaagacagcaa

SEQ ID NO: 211841 - RNA, 69 nt, Homo sapiens
gccagaagacgacagcccgccgcaggccacacagcaggggaaggacgagaccgaaacaaggaccccccg

SEQ ID NO: 211842 - RNA, 80 nt, Homo sapiens
cagaagaaaacggcaccgagaaccaggagagaagacgaaaaagaagaagcagcgaacagcgaaaagcccaaacgggcaca

SEQ ID NO: 211843 - RNA, 82 nt, Homo sapiens
cgggagcgcgaacgagcgacggcggaacccggggccgggacgcagcccggcggcagcagggcgcaagaggcagacagacagg

SEQ ID NO: 211844 - RNA, 72 nt, Homo sapiens
cgggcgagaaagccaggacaaaacagacgcgcccagagcgcagcacgggcgcaggaagaagaagcgcacaag

SEQ ID NO: 211845 - RNA, 53 nt, Homo sapiens
cgacccgcccggggcagcaggaagagaccagaagagcaggaggaaacaaagga

SEQ ID NO: 211846 - RNA, 74 nt, Homo sapiens
cgcagacggagcccaggcggacagaggacgaaggggcagaaagcaccagggaaaagaagccaaaccaacaaagg

SEQ ID NO: 211847 - RNA, 71 nt, Homo sapiens
cggcacagcccgccgaacccgaaaggaggaaagcaacccaccacaagacaaagaccaccaggacacgaaag

SEQ ID NO: 211848 - RNA, 78 nt, Homo sapiens
cacgaccacgccacccccgaaggaaccgcgaccacaggggccggcacgaggcacacagacaaccaaaacccaaggcaa

SEQ ID NO: 211849 - RNA, 66 nt, Homo sapiens
ggagacgacagaccggacagcgcagcaaagcgcagcgcggaagagaccgagaccaggaaccaggca

SEQ ID NO: 211850 - RNA, 60 nt, Homo sapiens
aggaccacagcgcagcaaagaacacagaggagggaccggaaggggcggcggccgacaggg

SEQ ID NO: 211851 - RNA, 78 nt, Homo sapiens
gcgagagggcggcgaaggaggcagaggcacagcgcaggacggggaaagaccgaggcaccgagagcagggaaaccagca

SEQ ID NO: 211852 - RNA, 63 nt, Homo sapiens
gcaagacccaaaacaaggcaggaaacgcacccgaccccagagggccaccgggggccggcaaag

SEQ ID NO: 211853 - RNA, 85 nt, Homo sapiens
ccccccagaaagcaagaaacccaggacagcagcggacaacaagcagaacccgaccaggagcgcaccccccccaacgaccccaggc

SEQ ID NO: 211854 - RNA, 87 nt, Homo sapiens
ggccgagaagaaggcgcggcaaaggggacgcccaacgaagagaccaccgcccgagcagcaccaggagacaaagccacaaaaacacca

SEQ ID NO: 211855 - RNA, 80 nt, Homo sapiens
gcacacggcggaaggaggaaaccagacgagacggggcgacggggagaggcaggcgaggggacgaccggcaccgccgaggc

SEQ ID NO: 211856 - RNA, 70 nt, Homo sapiens
ccgccgcccgacggcccccgacgcagcgcaccagacaggaagggaaggggcggagacgggcggaacgcag

SEQ ID NO: 211857 - RNA, 41 nt, Homo sapiens
cagaaacaaaagcaacaaagaggaggccggaagagcgggag

SEQ ID NO: 211858 - RNA, 81 nt, Homo sapiens
agcacggcccgccacggcagaccacaggagcggaaagagcagccaaagccaaagaagacgaaaaaagggagaaccaaccag

SEQ ID NO: 211859 - RNA, 80 nt, Homo sapiens
gcggcgcgagccgggggccgcccgccccgcgcgcggccggcggcccaggcgcacaccgcggccccagcccaagagccgca

SEQ ID NO: 211860 - RNA, 37 nt, Homo sapiens
ggaggcagcgcgagcccaggccagccccgagagcgca

SEQ ID NO: 211861 - RNA, 71 nt, Homo sapiens
cggccccccaagaccgggagcagcggccaggcgacgagagaggcgggagggaagcgggagacacgggaaag

SEQ ID NO: 211862 - RNA, 70 nt, Homo sapiens
ccgaccacacgagaaacaacgaacgagcaaggaagggccaaggcagaccccacaccggagaacgcaacca

SEQ ID NO: 211863 - RNA, 53 nt, Homo sapiens
ccgccccagacagaccggcggcggcccggacaaccagcggccacacccggcaa

SEQ ID NO: 211864 - RNA, 70 nt, Homo sapiens
aacccccgggccaggccaaccacgagacacgccgaagggcaagagggcacagaagacggcgccccacaca

SEQ ID NO: 211865 - RNA, 77 nt, Homo sapiens
gaacaggcaaagcccaaaaggcaaggcacaagggcggggaacagaccagggaaggggaggagaagagccgggaaaaa

SEQ ID NO: 211866 - RNA, 73 nt, Homo sapiens
cccaaggcaaaaagcaaaccaaagcgcaagaccaggaagggacgaaaacggaaggccccaggaccggcacccg

SEQ ID NO: 211867 - RNA, 82 nt, Homo sapiens
ggaagagccggcacgggcgacagcaggcacagggacgagggggcggaagcgagcgacgcgcccacggaggaggcgggggccc

SEQ ID NO: 211868 - RNA, 74 nt, Homo sapiens
caccgaaccccagcccaagccgcgcccgaagaagggagaccgggagagaaaagagaagcaaggaggcaggggca

SEQ ID NO: 211869 - RNA, 78 nt, Homo sapiens
gccggaggaggggaggagggccacgggccccagcagcccaggcaggcagccccaaaacccagagggagccagggaaac

SEQ ID NO: 211870 - RNA, 87 nt, Homo sapiens
gagcgggggcgcgcccgccgacccgcgcccgccccccagcaccgggcggacgggacaaacagcaggggccaagaaagaaggagaggg

SEQ ID NO: 211871 - RNA, 67 nt, Homo sapiens
cccacgagcacccgacgccgacagaggacacagcaggggccagacaaccagacccgggaggcaagag

SEQ ID NO: 211872 - RNA, 84 nt, Homo sapiens
aacggcagaagccaccacaaaagcgaaagggcacaccacagcaagcacaaccaagcagaagagagaggagggcacaaaggaggg

SEQ ID NO: 211873 - RNA, 78 nt, Homo sapiens
gggaccaggcgaagcggccgagcaggcgagcgaacgacggcaccaagcagccgaagagaaacaagggacagcagacaa

SEQ ID NO: 211874 - RNA, 85 nt, Homo sapiens
cggccaagcagagcgggggggcggggccggcaccgcagaggcccagcggggcaacagcagacccccgaaccccacccaggagcga

SEQ ID NO: 211875 - RNA, 78 nt, Homo sapiens
aaagcggccgggagcgcgccccccaccccgagacaggcagggacacagcggaaagaaaaacgaagaaaaagagagcag

SEQ ID NO: 211876 - RNA, 74 nt, Homo sapiens
aaaaaaaccccaggacgacgaagcggaaacacaggaacccagaggcaagaaacaacagcgaccagagccgaaga

SEQ ID NO: 211877 - RNA, 82 nt, Homo sapiens
gccaacgccaggcgccgcccacagccaagagaaaccaccaagagccaggaaggcaaaggccgagagagagccccagcaccag

SEQ ID NO: 211878 - RNA, 72 nt, Homo sapiens
gacggaaacaaggcaacagaaagagcaacagcagggcaacaggaacaggcgcccgaagggcaaaacagcagc

SEQ ID NO: 211879 - RNA, 87 nt, Homo sapiens
gagaaccagaccggcgacccgcgacgccgagcacccaggcgacgcccaccaaggaagccgagacccccgcgagggacgagaggcggc

SEQ ID NO: 211880 - RNA, 80 nt, Homo sapiens
gggcaaccacgaagcaggccagcgggccggcggacggagcacgcagacccgcaaagccagaggagaccgaagaagacgga

SEQ ID NO: 211881 - RNA, 80 nt, Homo sapiens
ccccaacccacccaacccaccaagaagagaagaagagggagccggacaagacaaggacaggaagcccggggcggcgacgg

SEQ ID NO: 211882 - RNA, 74 nt, Homo sapiens
ccaaacgcacgcccgaagaagcacgaccacaggacagcccacaaccaagaagcgacaggaagcgacagcagaag

SEQ ID NO: 211883 - RNA, 76 nt, Homo sapiens
ggagacaacgaagcgaacagccaaggaacggaagacccacaccagagcgaagaagcgccggccgcagcagaccgca

SEQ ID NO: 211884 - RNA, 80 nt, Homo sapiens
ccgcgccgcccgagcacgccgcgcagcccggccgccggcccccaacagcgccgcaaagcagcccgaggaggcacgcaaaa

SEQ ID NO: 211885 - RNA, 84 nt, Homo sapiens
ggagacggcggacacacggaggcgcggggccgagaaacagacaacccacagaacaaagcggaccaaggcacccccagagcgagc

SEQ ID NO: 211886 - RNA, 79 nt, Homo sapiens
gaaaagcagccgaccgaaggaaaacccgcccgccgaccggacacccccaaccgcagaaaagggacccaacacagaagag

SEQ ID NO: 211887 - RNA, 83 nt, Homo sapiens
ggaggagaccgcacgcccagcgacagaacagcaaaagacgagaggaccgacaccagagcagaaggcagagcggagaaggagcg

SEQ ID NO: 211888 - RNA, 72 nt, Homo sapiens
cgcccacagacgcagccacgcggcccaggggccccaggcaagcacgaagagggcagggggccacaacgccac

SEQ ID NO: 211889 - RNA, 79 nt, Homo sapiens
ggcgcgggaaacgggcgaagcgacgagccgcgaggagacgaagggaacgcacgggaaagcgcgcaaaagacgcacacgg

SEQ ID NO: 211890 - RNA, 79 nt, Homo sapiens
aaaggagcgccccaaaaggaaacaaacggccggggggcgagcgaccgaaagacagaaacagagaaaccaacggacccca

SEQ ID NO: 211891 - RNA, 74 nt, Homo sapiens
ccgaaccaaagagcagcaggagacagagggcgcgccgggcaccaaagcgaaccagacaggggaacggaaaggag

SEQ ID NO: 211892 - RNA, 74 nt, Homo sapiens
caccggcagaggggagaggaggacgagggagcggagagaccaaagcagggcagggacaggacagcagaccacag

SEQ ID NO: 211893 - RNA, 79 nt, Homo sapiens
cgcccgggacccgcggccccgccgcggggccagaaagcgaggagaacgccagggcggggacagacagaggacggagagc

SEQ ID NO: 211894 - RNA, 71 nt, Homo sapiens
cgggaagacgcagacaaaaagcgacgaaggagaacagccgcagcccacgaagaagcggcgccaaccgggaa

SEQ ID NO: 211895 - RNA, 73 nt, Homo sapiens
acgacccagaagagccaaaacccaagcaaggggggggacagagcaaagaaaggaggaaaagccggaaacaaaa

SEQ ID NO: 211896 - RNA, 76 nt, Homo sapiens
gccgaccccccggcgccgcgccggcggcggccggggggggcacagagccccggaagacagcccccagcgaccagac

SEQ ID NO: 211897 - RNA, 75 nt, Homo sapiens
gcccgcgcaccacagcccaccccagaagaccggccccgcaaccacgaaaagagaccgcacaggggcccgccacaa

SEQ ID NO: 211898 - RNA, 72 nt, Homo sapiens
accaccccagcacgaacagacaggaacgaagcagagcccaacaggggagccgagaagccgaagcagaaggaa

SEQ ID NO: 211899 - RNA, 74 nt, Homo sapiens
aagcgccaaggaaaaggacgagaacgccgcgacagaaagggccggaggacgcggggaaccagaccgggccagac

SEQ ID NO: 211900 - RNA, 121 nt, Homo sapiens
cgaacggcaagagaaccccgcggggaaggggggcagaggccggaccccagcacacagaagccgagacgcagacaggcagcaaagaaaggaggagaagcccagccgcgcgagggcgggaggg

SEQ ID NO: 211901 - RNA, 83 nt, Homo sapiens
gcaagccacagaaaagcagagaaagcaaaaggccgaggaaacgcgagagccggccgaacgggggagcgggcaggcagaagaag

SEQ ID NO: 211902 - RNA, 71 nt, Homo sapiens
acaaaaaaagcagcaaggagcaagccggggcagagcgacggaggggccacaacagagcggcaggacccgaa

SEQ ID NO: 211903 - RNA, 35 nt, Homo sapiens
cgccggagcgaacgagcggccccaacgcaaaacgg

SEQ ID NO: 211904 - RNA, 84 nt, Homo sapiens
ccgcgcgcgcccgggaggaaggaacgaggcaaggagcaaagcagcggcgcagcccgggcgcaacggaccgaaccgaaaaacaga

SEQ ID NO: 211905 - RNA, 51 nt, Homo sapiens
gcacaggcccgggcgaaggggccacgcgaaacaaaccaggggagggaaacg

SEQ ID NO: 211906 - RNA, 97 nt, Homo sapiens
cacggaggacggggccgggcgaccgggcaccagcaggacccgaggccaggagccaggggcccagaagggaaagcaggcaggagggagagcgccgaag

SEQ ID NO: 211907 - RNA, 39 nt, Homo sapiens
gggaagcgcaccagcacggcagggccgcccacccaggcg

SEQ ID NO: 211908 - RNA, 73 nt, Homo sapiens
ggccggccgcccacgcgagcggcccgagacccgaggaaacccacccaccacccgagaggaaacgcaaccaaga

SEQ ID NO: 211909 - RNA, 76 nt, Homo sapiens
accaggcacccgggcccagccgggaacccccacgcggccagcgaaaacgcccaggaccgcggcaagcgggagcgga

SEQ ID NO: 211910 - RNA, 64 nt, Homo sapiens
gacaaaggcaccaggccaccacagaaacaaaagcaacaaagaggccagcggaccacaagcaaac

SEQ ID NO: 211911 - RNA, 123 nt, Homo sapiens
acccagaaggacgagaagacagcccgggggcggacacaaccgcgggcccgggacagacacagagagcccggcagggaaccaacccagccacaaccaccccagggcgaccacagagcgccggcc

SEQ ID NO: 211912 - RNA, 40 nt, Homo sapiens
ggaggggaggaagaaaacgccgaaaaaccggaggggagca

SEQ ID NO: 211913 - RNA, 76 nt, Homo sapiens
cgaacagaaccaaagcgacacacgcacacacagaaaaggcccagaaaaaagcagcaagcccggcagcagcaacccc

SEQ ID NO: 211914 - RNA, 79 nt, Homo sapiens
cggggaagcgcaaaaacaagacggggcgccccacagaggggcgacggacagaagagcagaagacagagaaggaaaagaa

SEQ ID NO: 211915 - RNA, 74 nt, Homo sapiens
caaaagagagagagacagaccgagggaggcaaaggcacccggaccgaacagcgccgacgccgaaaggggaggga

SEQ ID NO: 211916 - RNA, 87 nt, Homo sapiens
cgcccgggagaggccgcggcggccaggccccagacacagacgagcaggggaaggaggggaggccggaaaggcgcaccaagagagaag

SEQ ID NO: 211917 - RNA, 81 nt, Homo sapiens
acacggagcgcgccggccccacgggaaacaaagggggagacacgccacgcggccaaaggaacacggaggaaaagcagccag

SEQ ID NO: 211918 - RNA, 90 nt, Homo sapiens
agaccggaccagaaaccaggagccacggacaagaccaaaagcgaaggaagaggacaccccaagacaaaacagccagggggaaaaagacgc

SEQ ID NO: 211919 - RNA, 80 nt, Homo sapiens
cacccaggagcccacggccaggggggcaccaaagcaggaccacccgggaagagacaaaaggcaacaaacaggcacccaca

SEQ ID NO: 211920 - RNA, 51 nt, Homo sapiens
agaagacagagggcgaggaaaagacaggcagggaggcagcggcaagcggac

SEQ ID NO: 211921 - RNA, 76 nt, Homo sapiens
cagcacgggacgcacggcccggggggagacagccacgggaaggaaacgccaagagcgagcggacgaggagcccgga

SEQ ID NO: 211922 - RNA, 79 nt, Homo sapiens
gagaggcacaaccccaaaacaaaaacggagggagccaccagccacacaagacaggccgagcagaaccaagccagcgaag

SEQ ID NO: 211923 - RNA, 72 nt, Homo sapiens
cggccgagacaaaggcaccaggccaccacagaaacaaaagcaacaaagagggaagggaaacccgcagaagaa

SEQ ID NO: 211924 - RNA, 63 nt, Homo sapiens
aaacgcaagacgggccgagaagcagcgcgaggaagaagacggcacgggacccccagcacaggc

SEQ ID NO: 211925 - RNA, 81 nt, Homo sapiens
aggagaaccgccccgccaaggagacgccccacgaggcccaaaccgccaagccacacgcaggggagaagaacggaaagagag

SEQ ID NO: 211926 - RNA, 76 nt, Homo sapiens
gcgggcccgccaacggggaacgagaaggccagagaccccaaggcacagagggacgcgggaaacagcggaagaggac

SEQ ID NO: 211927 - RNA, 71 nt, Homo sapiens
ggacggagaggaaccagcacagcagagacaaccaggccccaggagaagcggaccagagggaccgaacagcg

SEQ ID NO: 211928 - RNA, 53 nt, Homo sapiens
acaccgcaagaccccgaagcccagccggccagaacacacagaaaagggccaaa

SEQ ID NO: 211929 - RNA, 72 nt, Homo sapiens
gagaaagcgggagcacgccggcccagcccaaacgggcagcgaagggcagccaggcccaccaccagccggaca

SEQ ID NO: 211930 - RNA, 79 nt, Homo sapiens
cacacaaccggagagccacaagccaaacagcaggagaagaaaggaagagacgacagccagcaggcaggagcccgcccag

SEQ ID NO: 211931 - RNA, 84 nt, Homo sapiens
ccccccggacacacaggagaccccaagaagccgggagcaccgacgccgcggggccagccggaaacagcaccaggggaggggaga

SEQ ID NO: 211932 - RNA, 77 nt, Homo sapiens
caaacgcgacacacaacccagagagagaagacgaaaaggcgaacccccaggaagaaaaccagagaagaacacagaca

SEQ ID NO: 211933 - RNA, 39 nt, Homo sapiens
acacaggcagaagaggccccgggaccaaggacacgcaga

SEQ ID NO: 211934 - RNA, 44 nt, Homo sapiens
ggggacccgacgcccgcacggcgcacacacaaaggggagccagg

SEQ ID NO: 211935 - RNA, 93 nt, Homo sapiens
gcgacgggaacggagcccgaggccccgcgcggcccgggccggcgcccgaggggaagagcggcccggcccgagcaaaccagccagcacgggggc

SEQ ID NO: 211936 - RNA, 73 nt, Homo sapiens
ggcacggccaccacaccgggcagaaccgcgcaccagccgaacacgcagggagaggagcaggccaaacgcgcaa

SEQ ID NO: 211937 - RNA, 74 nt, Homo sapiens
aaagaagacgcggagaggagggcacacagaaccagcgagagggaagcacgagaccgagaacagccaggcccacc

SEQ ID NO: 211938 - RNA, 86 nt, Homo sapiens
ggaaacggcgcaagcgggagccccgcgggccaaggagccacgagaaggagacccaacaccccggccagacgggccaccaggccggc

SEQ ID NO: 211939 - RNA, 81 nt, Homo sapiens
aaagcggccagggagcacagaagcagcaaaaccccagaagaggcgaaccgcaggaaaccagagcaagaaacgagcgacaac

SEQ ID NO: 211940 - RNA, 85 nt, Homo sapiens
cgacaccgggcgccgaggcgccacaaaaggcgcacccacgacgcgcacaccaccggcagaccggcgccacagcaccacccgacgg

SEQ ID NO: 211941 - RNA, 85 nt, Homo sapiens
cggcgaaggacccggccgaggcgggcgcaagagaaggcaccaagaggaagcaaaagggacagcaaacaaacggaaaacaaaagac

SEQ ID NO: 211942 - RNA, 68 nt, Homo sapiens
cacaggccgccccaacaccagggaagagacacacccagacagcagcacgacagagccacggcggccgc

SEQ ID NO: 211943 - RNA, 86 nt, Homo sapiens
cccagccgaaggagaagggggagaaccaaggacgggaagcagaaaaaagaacaagacagcgacgccagcaggagccacaacaacag

SEQ ID NO: 211944 - RNA, 61 nt, Homo sapiens
gggcggcgcgccgccgcgcggggcagcaaaaaacccagaaggggagaaagaacacggcgac

SEQ ID NO: 211945 - RNA, 75 nt, Homo sapiens
ggacccaaccagagaaagacaaccaaccccaccgaggaggacagagacgcaacacccgaaagagcgaaagcccag

SEQ ID NO: 211946 - RNA, 55 nt, Homo sapiens
gaagagccaccagcgacaaacaggaaaggaagccgccggacccacccgaacccac

SEQ ID NO: 211947 - RNA, 68 nt, Homo sapiens
agaagaggacggagacagccagacaggcaagcgacacaaaggacggggaagccaaaggacaggccggc

SEQ ID NO: 211948 - RNA, 40 nt, Homo sapiens
gcaacagggccgcacgcaaggaagccgagccacggagcac

SEQ ID NO: 211949 - RNA, 76 nt, Homo sapiens
accgggcagcgggggagcggcgcagcggcggcagcggagagcgagagaggggagcaggaaagcaccggggaagaaa

SEQ ID NO: 211950 - RNA, 77 nt, Homo sapiens
gagcccggccccgcaccaggaggaggacgacagcacggagcagccgcaacagcgcaccgacacaagcccagaagccc

SEQ ID NO: 211951 - RNA, 79 nt, Homo sapiens
gcgagaagaagaccgccccgcccagacggccgaggaggaccgggcagccgcaagagcccccagcgccagcagccagccc

SEQ ID NO: 211952 - RNA, 77 nt, Homo sapiens
ggaccagagccagacacgaaggaacgcaagcacaggaccagaaacgaaaggcagcagaagaggaaagccagaaagac

SEQ ID NO: 211953 - RNA, 80 nt, Homo sapiens
cccacgggccccccccgggacggacgaacagcggggacgccccagcagaccgcccaggagaggaaagcaggaggaaagac

SEQ ID NO: 211954 - RNA, 77 nt, Homo sapiens
agcaccccgagaaccgcaggagccagaggccccgagccccggccccaaagacccaaaacagagacaccccccagccc

SEQ ID NO: 211955 - RNA, 71 nt, Homo sapiens
acaaaaaaggggcaggagaaagagagaaccaaagggaagagccacaaagggaaccaggcgaagaggaaaaa

SEQ ID NO: 211956 - RNA, 80 nt, Homo sapiens
aacccaggcccacggaggaagagccgggcagcccggagcgggccagaccgagccacgcagacccaagacagaaagagcgg

SEQ ID NO: 211957 - RNA, 77 nt, Homo sapiens
aggacccccgcaggccgcagaccaccgacaccgggagaagacagaggagccagaccaagagacagcacaggcgagcg

SEQ ID NO: 211958 - RNA, 88 nt, Homo sapiens
ccgccgagcccgcgcgccaggccgcggcccgaggcgcagcagcaggaggaggaccgcagcaagggccacagcagccaggagcacggga

SEQ ID NO: 211959 - RNA, 72 nt, Homo sapiens
gagaagagcaagacagggggccgggaaacaacaaacccagaaaggaggaacccaagagggacagaaaaaaac

SEQ ID NO: 211960 - RNA, 93 nt, Homo sapiens
gccggagggaccccgaggaggaggaggaggagccgcagccacgccacacggccgggaggccgagggcgcagaagggggggccccagcccggcc

SEQ ID NO: 211961 - RNA, 82 nt, Homo sapiens
cacaaacaagcagaaagccagaaaagacgcgcccccgccgcacggaaaaggaaagagcaccgaaaccaggcggaaacacggc

SEQ ID NO: 211962 - RNA, 60 nt, Homo sapiens
aagagacagaagaagaggaagccgggaagcacacaaagcgacagcgaccgaagaacagag

SEQ ID NO: 211963 - RNA, 79 nt, Homo sapiens
aaagaaaccgaaggcccggcggcaacagggccagcccgcaaggaccagaggacgcaccagaagacagggcaaccagaag

SEQ ID NO: 211964 - RNA, 82 nt, Homo sapiens
caagcaaccacgcggggagccgacgccgaggcccaccgccaccgggcaggaaccacagagaacagcccggacacgcgcaccc

SEQ ID NO: 211965 - RNA, 67 nt, Homo sapiens
ggaacacccgcagcccgagggaaggccggccgccagggcccacaggccacccgccagacgcagcggg

SEQ ID NO: 211966 - RNA, 54 nt, Homo sapiens
cagcggcgaagggacaaggagcaaagacacagcaacgagggaagaaccaggcag

SEQ ID NO: 211967 - RNA, 49 nt, Homo sapiens
aaacgggagccccgaaccaaggaaaacagcaagagagcagacgccaaag

SEQ ID NO: 211968 - RNA, 68 nt, Homo sapiens
gagaagagagaagcacacacgaagccagaaaaacggcgaagggcaagagccaagacggcagcaccaac

SEQ ID NO: 211969 - RNA, 81 nt, Homo sapiens
acagggcagaccacggggccgaggccgcccagaggcaccgaccgcagaacagagcaccaggaggaggaggagacgaggaag

SEQ ID NO: 211970 - RNA, 77 nt, Homo sapiens
cccgcaggaccgccggagacagggcaagccacaaagagcggccagaacggacgaaggccggggaaagagcccacagc

SEQ ID NO: 211971 - RNA, 68 nt, Homo sapiens
cgcgcacaaccggcccagcaggcacccgagcagcgccacgcaaggccccgggaccaaggacacgcaga

SEQ ID NO: 211972 - RNA, 78 nt, Homo sapiens
cggcggcggcaccacaaccaggaggcgggagcagaggaaaaggcccggcgggacacaaccacagggaggagagagagc

SEQ ID NO: 211973 - RNA, 81 nt, Homo sapiens
gggaaaagagccgccaggcacgcaccacagaaacaggagcaggcgagaagaaacgccagggcgcacagggaggggcagaag

SEQ ID NO: 211974 - RNA, 70 nt, Homo sapiens
cggggacggcgacccaggagaggagagcagaaaaccggggcagagaaaaacaggcgcagaggcaacgaca

SEQ ID NO: 211975 - RNA, 77 nt, Homo sapiens
caaacaccacaggccagaaggggagcgaacggcaacagagggaaaagacaaacggagcaggaaaaagaacaggaggg

SEQ ID NO: 211976 - RNA, 82 nt, Homo sapiens
agacgcacccagaggagaagcaaggcgacgccagaggaggaaaggaagacaagacccaacagaggaagccgcaagaaacggg

SEQ ID NO: 211977 - RNA, 80 nt, Homo sapiens
cgagaagggcaagaggagcgagcccaagcaagaagccgcggaaccaaaccccaccgagacagagaaaggaaagggcggca

SEQ ID NO: 211978 - RNA, 77 nt, Homo sapiens
ccgcccgcgggccaagaaacggagaaaccggaggacccgccgcaagcccaggagaaggcaacaagcgaggccaggga

SEQ ID NO: 211979 - RNA, 54 nt, Homo sapiens
ccccacccgccgcagcaagcagaggcaccaagccacaaaacaggccagaccggg

SEQ ID NO: 211980 - RNA, 70 nt, Homo sapiens
acaggcaagcagccgacaaagcaacgcacgggaacagcagaagggacaggaaaaaagcagcagccggcaa

SEQ ID NO: 211981 - RNA, 74 nt, Homo sapiens
aggcacacacgcaaacggacggaacggggccaaacgaagacaccagcagcagcagaggaagagaccagaaccaa

SEQ ID NO: 211982 - RNA, 87 nt, Homo sapiens
cgagagcgggaagaggcggcagacagcgggaccccgccaggaccgggaccggcaaacgagggccaggcccgaggacgccacgcggcc

SEQ ID NO: 211983 - RNA, 83 nt, Homo sapiens
cgacaagccaacaacaggacggaagccccaacaggcacaaggcccacaaagaaaaaaacacacacgaggaaagacggaagcaa

SEQ ID NO: 211984 - RNA, 65 nt, Homo sapiens
gcccacggaccgagaaaagagaccccaagacacgagaacggcaccaccagaagcagcacccaaag

SEQ ID NO: 211985 - RNA, 76 nt, Homo sapiens
gcagcagacgcccagccggcaacccacccaccacacaacaaagcggagaggagaaaaagaaacccaaaggggcaca

SEQ ID NO: 211986 - RNA, 76 nt, Homo sapiens
gaacaccgaaacgacccaaaaggcccccaaaggaagggagaccgaagaaagggaaggaaaaaaggccggaaggagg

SEQ ID NO: 211987 - RNA, 72 nt, Homo sapiens
caccaaggaaaaggaaaacacagcaaaggcagaaacaagagagaagaagcaacccgaagaaagaaaggagca

SEQ ID NO: 211988 - RNA, 81 nt, Homo sapiens
gggcaagggcaaccgcggggaagcggggcggcaccggacaccaagacggagggggacagaggagccaaaggccaaaccacc

SEQ ID NO: 211989 - RNA, 71 nt, Homo sapiens
gacgaggcaagggaacagaaggagcaggaccccgcgcccacccaacaaggcaggcgaaacagcaggagagg

SEQ ID NO: 211990 - RNA, 94 nt, Homo sapiens
aggggccacgcgggcccgaggcgcaccaagggcgaaggagccggcccaagccgacaaccccggaacgcgggcaaaaggccccaggggaccgggg

SEQ ID NO: 211991 - RNA, 76 nt, Homo sapiens
gaaagcaggacagccccacccccgcccagccgcgagccagacccaggcccgccgccggagcacaaccccaccgccc

SEQ ID NO: 211992 - RNA, 85 nt, Homo sapiens
cagagggaggaggaccagaagcgaaagagccaagaaggacaagaaggggagaagaaaagaaacggcaaaagaaaaaagaaaagag

SEQ ID NO: 211993 - RNA, 101 nt, Homo sapiens
gccggcgcggccaggaggcacacccgcccgcagaagagagcgaccggagcggggaacacggccacagcacaccagagaagcaagggacagaaagaggaggg

SEQ ID NO: 211994 - RNA, 54 nt, Homo sapiens
gaaaaagcgacggaccgcgcaagccccagacgagaccggaccaaaccagagaca

SEQ ID NO: 211995 - RNA, 65 nt, Homo sapiens
gagaaggaccaagaaccagggggagaaaaggccaagccaagacgccaacaacaaaaaaaaacgga

SEQ ID NO: 211996 - RNA, 75 nt, Homo sapiens
agacacccccagggcagaaaagcgaccaggcgaggaacgaaaacgacgggggaggagaacgggacgacagacggg

SEQ ID NO: 211997 - RNA, 65 nt, Homo sapiens
gcgacgaaagacaccaccagggacaacagaaggaaacccgagaaggccccccgaaaacgcgcgga

SEQ ID NO: 211998 - RNA, 81 nt, Homo sapiens
gggaggcccagagcgccagcacgacacccacaggacaccgggagcaggcggccacccggagaaaggccacggccccagccc

SEQ ID NO: 211999 - RNA, 69 nt, Homo sapiens
gcccgaccgcccgggagacggagcgaaggccggagcgacgcggggccacccacagcaagagacaaggga

SEQ ID NO: 212000 - RNA, 73 nt, Homo sapiens
gagaccagccgggcaacagagaaagagaagcacccaccacagagaccaggaccagcgaaaagcagaagagcag

SEQ ID NO: 212001 - RNA, 73 nt, Homo sapiens
gaaccaacagagacacaagagcccgggaaccccaacccccccacagcccccaggcgggcacagaggcacagga

SEQ ID NO: 212002 - RNA, 66 nt, Homo sapiens
gccagccccgccgccccgcaaccggcagccgccgccgggaaggcgaaccacgggaacaaaggcgag

SEQ ID NO: 212003 - RNA, 81 nt, Homo sapiens
acacccacagagaacccagacaacaggacgccgccaagaacggccgagcgaccaggagaggagcccccgcccgaagaccgg

SEQ ID NO: 212004 - RNA, 88 nt, Homo sapiens
acagccggcgaagaagaagcagggaagacacgggacgacgggacccagcggaacgaagcgccaaggccagaggcggccaagaagcgag

SEQ ID NO: 212005 - RNA, 60 nt, Homo sapiens
agacaaggaagaacaaaacggccgaaaaaaagcgaccaaccccggagccccccgagggcg

SEQ ID NO: 212006 - RNA, 76 nt, Homo sapiens
cccgcgcgaggcgcggaccgggcccggcgggaagcagacggcccgccacgggccccgcagccgcgcccgagcgccc

SEQ ID NO: 212007 - RNA, 54 nt, Homo sapiens
cccggcagggaccggcgacgaggccgcggaggagcggacaacccagagagaaac

SEQ ID NO: 212008 - RNA, 85 nt, Homo sapiens
cggcgagcgagaacggagagaaggcggcaagaggcagaagagggaggggacgcacaaccaaggggggaagcgaggcaggaagccc

SEQ ID NO: 212009 - RNA, 76 nt, Homo sapiens
acgaggggaagcaggagaaggagaaagcgaaaaccccgaacaagagggcccaagggagggaacacagccaggcgac

SEQ ID NO: 212010 - RNA, 118 nt, Homo sapiens
cacaggagaagacgagacgccccgaaggagagaaagggaccagaggaagagcaaggccaggccacagggcaccacaacacgcccacccaggaggcggccggccaagcccagccaggcg

SEQ ID NO: 212011 - RNA, 72 nt, Homo sapiens
aggagacgagaagaagacaagaggagaagaagcaggcacagaccccaagaagacccagcggacggggagggg

SEQ ID NO: 212012 - RNA, 79 nt, Homo sapiens
gcacccacgccggaggaggcaaacgagaccgggaagagggggaggccagggacaccgaagacagcgcccgccgaacccc

SEQ ID NO: 212013 - RNA, 60 nt, Homo sapiens
gaaagaacgacagaaaaagggaaccccaaagacaaaacacaaggagggacggaaacagac

SEQ ID NO: 212014 - RNA, 58 nt, Homo sapiens
gcgccacgaggacgggcgggggagccagaccgggggcaggaccaaaaaccaccaacca

SEQ ID NO: 212015 - RNA, 78 nt, Homo sapiens
cgcggcgcgcagagcgaggcgcgggaccccaggagggggacaggaggcgcggggcccagggcggaagagcgcgggagg

SEQ ID NO: 212016 - RNA, 70 nt, Homo sapiens
caccggcaccaccaaagaggcacccagacagagagcgaagagacgaacacaaagcacagacagccccgca

SEQ ID NO: 212017 - RNA, 77 nt, Homo sapiens
gcaaacaggaccacaggcccggaaaagagcgccccacacaaggaaaagacggagcagggccggggagcaagcgaacc

SEQ ID NO: 212018 - RNA, 73 nt, Homo sapiens
ggggccgcggggagaggggccagcgcggaggcgagggcgggggaacgaagcccaaaaggcagagacggaccga

SEQ ID NO: 212019 - RNA, 79 nt, Homo sapiens
gagaaaccggacagcagaggaaacgagggacaacacagacccaccagcagaggcagaacccgacaacgacaaccagaga

SEQ ID NO: 212020 - RNA, 62 nt, Homo sapiens
agaggcagcagcggaaggcagcgggagccgaaaacggaagccacgagagaagaaagaaaaag

SEQ ID NO: 212021 - RNA, 79 nt, Homo sapiens
gccgccgccgcccgggcgggagccaggagcgacgcaccgccaggcaggcacaaagacagaaggcgcgggagaaaagcca

SEQ ID NO: 212022 - RNA, 80 nt, Homo sapiens
ccacacagcgcccggcacggcccacaagaccagcccgcaagagaaggaagccagccaacggcgacaaagagcgaaagggc

SEQ ID NO: 212023 - RNA, 79 nt, Homo sapiens
cacgagcacagcagcagagggcggaggggaaccgaccggagacagaacgacaaggacccgagccccaaagacagaaaag

SEQ ID NO: 212024 - RNA, 92 nt, Homo sapiens
agaaggcaggcagcaagaagacgagcgagcggcaggcgcagcgcagccgccagcgcaagagcagcggagcccaccaaaaaacacggcgggcg

SEQ ID NO: 212025 - RNA, 57 nt, Homo sapiens
gggcccggaagcccaccagcccagccgcagccccaagagggcgggcccgggcccagg

SEQ ID NO: 212026 - RNA, 81 nt, Homo sapiens
ccgcaagcagcccaccacgccacaaacgccgcaccaggcgagcagcgcccccggcgaccgggcaaaaggggcccccccggc

SEQ ID NO: 212027 - RNA, 80 nt, Homo sapiens
cagaagcaagaagaacacccgaacacgggacaaaccagcaccagcgcaaacaacaccaagagaaggacaagggcaggaca

SEQ ID NO: 212028 - RNA, 68 nt, Homo sapiens
gcgacccggagacagcccaaaacccggaagagcgccccaggagaaacaagacaaccagagggaaaaaa

SEQ ID NO: 212029 - RNA, 80 nt, Homo sapiens
gccgcggaggcgagggaaggcggcgaccgagccggagcgccgacgaccaagaggcgaagagggcccggccaggccccacc

SEQ ID NO: 212030 - RNA, 74 nt, Homo sapiens
gcacagacgcaaaaacagaccacaggcccaccaaccgggcaccgaccgcacgaggccggaaccaccgagagcgg

SEQ ID NO: 212031 - RNA, 71 nt, Homo sapiens
cggcccgagcgggggcagccgcagaggcgcggaaaaccaggcagagaaggaacagcagcaagaacaccaaa

SEQ ID NO: 212032 - RNA, 68 nt, Homo sapiens
aaaaccgcaaagcagaggaagaagcaccgcaccaacgaccgaagcaccaggcacacccacaagccgag

SEQ ID NO: 212033 - RNA, 70 nt, Homo sapiens
aagagaaacccggagggcgccgggcaggagcggcccccaggacaaagacaaggaagcgaaagagagaagc

SEQ ID NO: 212034 - RNA, 81 nt, Homo sapiens
cggcagcaagaacagagagagaggggacagacgagagaacgaggggacagcgccagcccgaccaggcagccaagaacgaga

SEQ ID NO: 212035 - RNA, 69 nt, Homo sapiens
agggcaggaagaaggcgagcggaggcgaaaaccggcaccgcggacggagccacggcgcccaggcggagg

SEQ ID NO: 212036 - RNA, 73 nt, Homo sapiens
ggcggcaaggagcgagggaacagacacccccgaggacaaaccggcgaccacacacggggacgacggggaagcc

SEQ ID NO: 212037 - RNA, 78 nt, Homo sapiens
gcgaggaacagaaaccagccacaaggcagccagcagcagcaggacaccgggcccccgccaaaccacccagcccacgaa

SEQ ID NO: 212038 - RNA, 81 nt, Homo sapiens
gaccgagaccggaccgagagcggaccgagagcgcgaaacgcacgagaagccagcggaccacaagcaaacaaaagccaacac

SEQ ID NO: 212039 - RNA, 64 nt, Homo sapiens
gggagcccgcgcccgccgcgggagagagacggaagcccccaaagcagaaacacaagaggacagg

SEQ ID NO: 212040 - RNA, 38 nt, Homo sapiens
ggcgaggcgggcggacacaagaagaaaagggggcacca

SEQ ID NO: 212041 - RNA, 79 nt, Homo sapiens
accccacagaaacaagccaccaggagaagcaaaagagacaaaaacagccacaggaaagaagcccagcaaagagccaacc

SEQ ID NO: 212042 - RNA, 74 nt, Homo sapiens
ccacaaccgccagacaaccggagccacgccccacgaccgccaggcgggccgcccacgaacgggacccgaaaagg

SEQ ID NO: 212043 - RNA, 107 nt, Homo sapiens
ggcgagacgcccggaccaggaagcggacgcgggacggaagcacacgcggcgaacccccaaagacaacaaggagcaccaaaagagaagagcagacagaagcagaccac

SEQ ID NO: 212044 - RNA, 68 nt, Homo sapiens
caagcaaagcgcgaaccgccgcaaagagagagcgccacagggaaggaaggcccggggacggaaggcac

SEQ ID NO: 212045 - RNA, 38 nt, Homo sapiens
ggagaaacagggagaggcgaagaaaccgaagaaccagc

SEQ ID NO: 212046 - RNA, 77 nt, Homo sapiens
gggagaggccggaggacaccaacaggaaggaagagagagacaccagccccaaaacaccggagccacaagaaaccagg

SEQ ID NO: 212047 - RNA, 74 nt, Homo sapiens
cccgccccgcccagcccccgaacccgaggcccgccacacaggacccccaccagccagaggagccacccgcgccc

SEQ ID NO: 212048 - RNA, 69 nt, Homo sapiens
agaaggaccaagaaccaggaccgggggcccgcgcacagaccaaacgggcccgaggaagcaggcgcgaga

SEQ ID NO: 212049 - RNA, 76 nt, Homo sapiens
gaagggaacaagaggggcagcaagggccaaaggagccaggaagagacaagcaacgaggaaaagaaacaaaacacgg

SEQ ID NO: 212050 - RNA, 72 nt, Homo sapiens
ggcccgagaagagcgaccagaccaggacgacaaagaggaaacagaagagagagggaaagaaaaaggaaaccc

SEQ ID NO: 212051 - RNA, 57 nt, Homo sapiens
ccggcggacagccgcacccgcgccccagcagggccacccccaaccaggaccaaagac

SEQ ID NO: 212052 - RNA, 77 nt, Homo sapiens
aaaagcaaagcaagacaaagacagcaaggccagggagaagggccaaaagcgagacaagacgaaaggacgccacaagg

SEQ ID NO: 212053 - RNA, 78 nt, Homo sapiens
cacacccaggaagcagggcggccccacaagaagggaccagaccccacaagaaaacacacaaccacaggcccaagcaaa

SEQ ID NO: 212054 - RNA, 58 nt, Homo sapiens
cgagccgcgccgaccagcggagcgacgcagggggggccgcccgcccaaggcaggaaga

SEQ ID NO: 212055 - RNA, 64 nt, Homo sapiens
ggccagcggccgcgcacccccggccggaggcaccagcgcacgagccaggggcgcccccaccggc

SEQ ID NO: 212056 - RNA, 96 nt, Homo sapiens
cgaccccaaaagaaacaacagaaacggcacccaaagaggaggggccaagggagaagcacgagccgcggcaggagagcaagcgcagaagaagcggcg

SEQ ID NO: 212057 - RNA, 79 nt, Homo sapiens
gcgggagaaaacggcgcaccggagagacgcagaggggcggcgggggagagaagaagaaggaggccgcggccagaaaccc

SEQ ID NO: 212058 - RNA, 81 nt, Homo sapiens
ggaggagcggcgcaggcgacgcggcgcacacggccaccggagggcagaagagcagaggagcggggaggagccaccgcgccc

SEQ ID NO: 212059 - RNA, 81 nt, Homo sapiens
gcaggccgccggacgggaggcccggccgccccggagggagacgcgcgccgaggagaacccagcggcacccaggccacagag

SEQ ID NO: 212060 - RNA, 69 nt, Homo sapiens
gggaacgcacgacaccaaacaccgcgggaaacaggacagggccgaggagggcggaaccacccggaggag

SEQ ID NO: 212061 - RNA, 49 nt, Homo sapiens
aacaaaaaggacgcagcagaccgacaccagaaagcccggccaaagaacc

SEQ ID NO: 212062 - RNA, 74 nt, Homo sapiens
acggacacgagaccagcacccaagagccaacagcgaaggccaccgcaagaaacgggcaacaacgccgcccaaag

SEQ ID NO: 212063 - RNA, 54 nt, Homo sapiens
gcccccgagaggggacacaggcggccacgaaccaagcaccgcgggggaaagccc

SEQ ID NO: 212064 - RNA, 74 nt, Homo sapiens
aggggccaacacagaggcccagggaacgagaggacagagacgaggcgggcccaagggcaccaccggcacccaca

SEQ ID NO: 212065 - RNA, 61 nt, Homo sapiens
gaaccaggagagagcagccagagggggagccgccaccaaaagcagacggaaaacccacggg

SEQ ID NO: 212066 - RNA, 79 nt, Homo sapiens
aaagccccaagaagaacggaaaagccagccaggacaggggaggcagggcacaacccagccgcgcaaccccgcccccggg

SEQ ID NO: 212067 - RNA, 72 nt, Homo sapiens
agagccaacacccccgggagccaaggaagacagaggaacccccggcgaaggaaagccgcacagcagcacaaa

SEQ ID NO: 212068 - RNA, 82 nt, Homo sapiens
gaacccaccaacacagagagagcgacgaccgcaaggaagcgccccgggcacgccggcccccccagagcgcaagcgaaaaacc

SEQ ID NO: 212069 - RNA, 80 nt, Homo sapiens
ggccacaccagccccccacggacccaaaccagaagaaaaccgaaccgaggcccagacggagcggacagacggaagaagaa

SEQ ID NO: 212070 - RNA, 49 nt, Homo sapiens
accaaccccacaacaccgccggagacagccaaggacaggaacggccgaa

SEQ ID NO: 212071 - RNA, 80 nt, Homo sapiens
gaagaagaaaacaaggcggcagccacacggaagagcaccccaagccggggggcggacgggcggcccaggcagagaccgcg

SEQ ID NO: 212072 - RNA, 65 nt, Homo sapiens
cagggccagcagagggcgcccaaagccaggccaaccccgcccccggagacagcaaccaggagcca

SEQ ID NO: 212073 - RNA, 78 nt, Homo sapiens
cgacggcccaggcagggcacacaacgagcagaagggacagcgaaacagcaaccgagcagcacggccccaccccaacga

SEQ ID NO: 212074 - RNA, 106 nt, Homo sapiens
caaaacgagggaaacagcggccccccgggaaaaccaacacccgagaagaaacagaacgggcccgagggcaggacagcaggcaccggcgaagcacagagaggcgcga

SEQ ID NO: 212075 - RNA, 67 nt, Homo sapiens
agcgaaacgagaaacaggccaacaaaaagccacggggaaaaggaaggccggaggaggcaacagcgga

SEQ ID NO: 212076 - RNA, 79 nt, Homo sapiens
cgaggcggaaccgcagggccacgcacaccggcgcgcagaggacaagcccaagcgacgcccaggagaagcgaaacgagga

SEQ ID NO: 212077 - RNA, 80 nt, Homo sapiens
ggagccgccgcccacccacagaacacacgcaggacgaaagagacaaaagccacacgagaacaggaacagaaaacggcagc

SEQ ID NO: 212078 - RNA, 75 nt, Homo sapiens
gcgaggcggcggcgcccggagggcagcgagcggaggcacccaccacgggccaggcgggccagaggcaagccgcgg

SEQ ID NO: 212079 - RNA, 66 nt, Homo sapiens
ggcgaccaggggggaaagcgccccagggcagacagggggagaggcaaggaaacgacaagagaagaa

SEQ ID NO: 212080 - RNA, 90 nt, Homo sapiens
gcccagcaggaggcaggacagcccaggaagagggggagcacagcaggccggggaacgaggcccagcaaggagccgggggacccgcccgaa

SEQ ID NO: 212081 - RNA, 78 nt, Homo sapiens
gacggggcgccccacagaggggcgacgggaagcagagagcaaccaagcaccaccaagcccacagcagcaggaacaaga

SEQ ID NO: 212082 - RNA, 73 nt, Homo sapiens
gcaagcagggggcacccaagcaggagcgagacgacgggaccgaaggaccccgccagagacaaccgagcgccag

SEQ ID NO: 212083 - RNA, 67 nt, Homo sapiens
gggacccccccaacccccgggccaccggggggagcaccagcggaccagaggacaagacaaagggagc

SEQ ID NO: 212084 - RNA, 79 nt, Homo sapiens
gcaggaccaaaagacgcgcaaggaaccaggagggaagcagaggaaccagaggaaagcacacggggaaaggagaaaagag

SEQ ID NO: 212085 - RNA, 68 nt, Homo sapiens
caggaaagggagggaaaggaaggacaacccgggggacgccgccacgaagaagagacgccacaaacccc

SEQ ID NO: 212086 - RNA, 78 nt, Homo sapiens
cagaaaaggaaccaagaccaacaagccacccacggcgccacccaaaagcacgggagcccccggccaggccgcacggag

SEQ ID NO: 212087 - RNA, 86 nt, Homo sapiens
ggcccccgggaagacggccggcgcggaagaggccggcggcgggacggccccacgggacccgccccgaccacagcagcgacaccgag

SEQ ID NO: 212088 - RNA, 74 nt, Homo sapiens
gaagccaacggagaaccaaggccaagaccagaaccagcccgggaaagcggaacacgggcaacgggggaagacgg

SEQ ID NO: 212089 - RNA, 88 nt, Homo sapiens
aaaaagcaggaaaacagccacagcggggaaacaagaagacacagagcagaccgggagacccgaggagaggaccgagacaacagcaaac

SEQ ID NO: 212090 - RNA, 62 nt, Homo sapiens
gagcagcgcagcgaccggggaccggagcgacgccagggcaacaccggaggacagcaaccccc

SEQ ID NO: 212091 - RNA, 79 nt, Homo sapiens
ggcgccaaagcgagagagggaagcgcccggccggaggcaggggaaagggaaagggagcagcaccggccacacccacagc

SEQ ID NO: 212092 - RNA, 72 nt, Homo sapiens
aaagaagggcgagccggagcagggacgccaaagcccccccccaggggccggagacccccgcgccccaagcgc

SEQ ID NO: 212093 - RNA, 69 nt, Homo sapiens
cgcggcggcgacaaggaccgaagacaacgaccggaagaaggaaaacacaggccccaccaagagagagca

SEQ ID NO: 212094 - RNA, 73 nt, Homo sapiens
caagaggacacaacggaaaaacaggccaaagagaacgggccagcacaacagaaaggagcacagggacaggccg

SEQ ID NO: 212095 - RNA, 79 nt, Homo sapiens
aggcgaacccacggccagcgccccggcccaacagaagagaggagcaacagaggaagaacagggaaccgagaacagccaa

SEQ ID NO: 212096 - RNA, 80 nt, Homo sapiens
cagaaccccagacgaagcgcagccacaggacagagcgggagccaccagcgccaaagggaagccaggagcccgggggcacg

SEQ ID NO: 212097 - RNA, 79 nt, Homo sapiens
aaagccagaggaagccagcccacgcgccgcccagggaagaagacaagaggccccagaaaagaaaccagcaaggagcggc

SEQ ID NO: 212098 - RNA, 40 nt, Homo sapiens
cccgagagcgggacacaggcagagggcaggagcgagacac

SEQ ID NO: 212099 - RNA, 68 nt, Homo sapiens
aaccgagacaagcaccccgaagcgccgggagggaaccacagcaccgcgggacgcaccaggcaggcaca

SEQ ID NO: 212100 - RNA, 81 nt, Homo sapiens
cgggaccagcgcggaggaggcggggaccgggaccgggacggaccgggagggggacaaccggaggaacgaacgacccgcgaa

SEQ ID NO: 212101 - RNA, 60 nt, Homo sapiens
ccccgccgaagccaccaaaaccaccaggcaagggcaacaaagcaggaaccaggacagccc

SEQ ID NO: 212102 - RNA, 55 nt, Homo sapiens
cgggcccagcagaagaggaacccgaaaaccccaggaccaggaaagaaaaggagca

SEQ ID NO: 212103 - RNA, 87 nt, Homo sapiens
ggagaaggagaggcgcggcgaaacagcaagaacgccggcaggacaaaggaggaaaacgacccagacagccaaaacaaaacaccaaaa

SEQ ID NO: 212104 - RNA, 81 nt, Homo sapiens
gaagacgaaaagccacgaagaaaaggggaaggaggcgaacaggaagggaacgccgcagaaagaagaaggggcaagaacagc

SEQ ID NO: 212105 - RNA, 83 nt, Homo sapiens
ccgccgggccgcgccagcgccgcccaccgagggccgcgcgcggccgccgccgggccgggacgacccagccgaaagggaaacac

SEQ ID NO: 212106 - RNA, 77 nt, Homo sapiens
aaaaagcgcaccccgaaggccggagcagccgccggggccagcgcagcaagcgggacggagcggcggcacacagcccg

SEQ ID NO: 212107 - RNA, 52 nt, Homo sapiens
cagaccacagaagaaagggccggaaggcaggcgccgggaggggccgggggcc

SEQ ID NO: 212108 - RNA, 83 nt, Homo sapiens
cggacggcgagcgcgagcggcgcgagaaagaccaagaacgcccagcccgcgggcaccggcagaaaggaggaggaaaacacccc

SEQ ID NO: 212109 - RNA, 73 nt, Homo sapiens
ggcaggggcagaaacagagaaggaacaggaggagacacacagccccagacgggaggaaaaaaggaaggaccgc

SEQ ID NO: 212110 - RNA, 79 nt, Homo sapiens
gcaaggaacaaaccgaagaacagcgggaaagaaggcaaaacacggaacacccggccaaggcagagcgacccgaaccaaa

SEQ ID NO: 212111 - RNA, 75 nt, Homo sapiens
aaagagacaaaacaacagcacgaaggagacaggccgcaaaagcacgaaagacgcagaggagagaaggcgaggaag

SEQ ID NO: 212112 - RNA, 82 nt, Homo sapiens
caacagacaaccaccaaaggggaaacagaaacaaggcaggaagagacgaagagaaaaaaagggaacggagcaaagcgaagag

SEQ ID NO: 212113 - RNA, 92 nt, Homo sapiens
gcgcacaggcgcgagaaaggaaagaaacaaggcccagcgggggacacagcaggccaggaaagacgaacaacaccccagaacagaggagccca

SEQ ID NO: 212114 - RNA, 70 nt, Homo sapiens
agacgcccaccgaaccgacagcgacgacaggaacgggaggagaaagcacaggaggcacaacaaggcaagc

SEQ ID NO: 212115 - RNA, 64 nt, Homo sapiens
gaggggacgggcggcccagcgggcgagacggaggagagaagacggcccagcagagcacccaacc

SEQ ID NO: 212116 - RNA, 86 nt, Homo sapiens
cacagaagacaggacacaaagcacgcgacaggaaccagacacagaaaagcccacgaggaaaaacggccaacaaaaacacagcgcag

SEQ ID NO: 212117 - RNA, 53 nt, Homo sapiens
aaggaccaagaaccagcggagaaccccgccaaccagaggcaagcacaaaccag

SEQ ID NO: 212118 - RNA, 73 nt, Homo sapiens
cgagcgagggggggcgcgccggaaaccggagcgcgcagcagggccggcaccaagggcagaagcgccaaacggc

SEQ ID NO: 212119 - RNA, 84 nt, Homo sapiens
caacccagggagcggcgcagaccgagacccggacagggcaggaaacaggagacgaggacgaggaggaggaggaggaaggagaag

SEQ ID NO: 212120 - RNA, 57 nt, Homo sapiens
ccgcagagcacgcggagcgacccgccacgcggggaacacaagccgagaacagccgag

SEQ ID NO: 212121 - RNA, 75 nt, Homo sapiens
gaggggcggacgcggccgccgcccggggagaggaaccaaccaccaaaccccaggaaccacccaacggcacgaaga

SEQ ID NO: 212122 - RNA, 78 nt, Homo sapiens
ggagcaagacccaggaagcacagagcgaccagacacggcccacggccagcgaaccaggaaaaagaacggaggcggaca

SEQ ID NO: 212123 - RNA, 54 nt, Homo sapiens
aggaggaagcgcagacccgcgacgccccgcagcgccgccggaagcgaagcaccc

SEQ ID NO: 212124 - RNA, 76 nt, Homo sapiens
caggggccagggaaaggagcagagagagagagcagaagccccgccacaagaagagggcagacaggagggaaagcac

SEQ ID NO: 212125 - RNA, 82 nt, Homo sapiens
cccaaagccaagagcagaggcgcaccaagacagaaccgcaccaagggcagggggccggccgccaaggccaccgagccacaag

SEQ ID NO: 212126 - RNA, 56 nt, Homo sapiens
gcaggagggaaggcaagacacgaaccagacgcaccggaccaaaggagcaaaaagcc

SEQ ID NO: 212127 - RNA, 78 nt, Homo sapiens
ccagcgaacggagaggagccagagccccacgggaaggagagcagccagcagcgcccgggccagcggagggagccgacg

SEQ ID NO: 212128 - RNA, 73 nt, Homo sapiens
ccaaccgccgagacaggaagaggggcgcacccaacgcgcaccgagaagaacgagaggcacaggaccggcgcac

SEQ ID NO: 212129 - RNA, 67 nt, Homo sapiens
aggacagaagccgccaaagggaacgggcaacgaagaggagaagcaggaccaagacacgcagacaccg

SEQ ID NO: 212130 - RNA, 72 nt, Homo sapiens
agagacagccagcacaccccgcgagcaagggccgcaagagacaccacaaaaggacacccgagcgcggaaaaa

SEQ ID NO: 212131 - RNA, 97 nt, Homo sapiens
caaccaacgcgaaggagccgggcccagaccagaaaggaaggccaaaaaagcaccaggaaagcaaaaggaggacgagcagaccgcagccaagagaaaa

SEQ ID NO: 212132 - RNA, 81 nt, Homo sapiens
aaagggagacgacagaccggggcaagccccgggcgggacagaaaaacaaccaccagcgagcaaaaaggcaaagaccaagac

SEQ ID NO: 212133 - RNA, 73 nt, Homo sapiens
gacacgggaccacccagggcaaaccccgccagaggcacacacgggacaagcacaacagaaccacaaggcaagc

SEQ ID NO: 212134 - RNA, 77 nt, Homo sapiens
acccccggcaaccgcacgcaacaagggcagggcaagcagagcgaccagccgccaaaggcacagggaaggacccagaa

SEQ ID NO: 212135 - RNA, 72 nt, Homo sapiens
cacccaacggaagacgaaaagacccgccaagaagaaagagcggccaagcaccagaaggccaacacaaccaag

SEQ ID NO: 212136 - RNA, 76 nt, Homo sapiens
gaagaccaggaccaacacagacaaagacacacaacaaggagacaaaacggcacgcaaacaaggaaaaggaagaaca

SEQ ID NO: 212137 - RNA, 72 nt, Homo sapiens
aaaaaggaagaaagacagaaccccacgagcgggcgagcccaaagccgcccaggcagccacacccggaagcga

SEQ ID NO: 212138 - RNA, 79 nt, Homo sapiens
agaagaaggggcggaccggggcagagaacacaggaccaggccacccaaggccgaaggagccgggcagagaaaagaacgc

SEQ ID NO: 212139 - RNA, 81 nt, Homo sapiens
cggacagggccacgagcccaaagaagagacagaaaggacgcagcacaagccagaaagaacagagaggcacccagacgcccc

SEQ ID NO: 212140 - RNA, 75 nt, Homo sapiens
gcaaggaaaagacccggaaagaagagacacagaggagccacacccccaggagacaggcaagcggaggcaaagaac

SEQ ID NO: 212141 - RNA, 68 nt, Homo sapiens
caaacaccccacgagaaagggagagcaagaggaaaacccggaggcccgaccgaagcgccggccagacc

SEQ ID NO: 212142 - RNA, 61 nt, Homo sapiens
gggccgaccggagcgggccaggccgggagagaaaagacacagacgacccagaacgaaggaa

SEQ ID NO: 212143 - RNA, 80 nt, Homo sapiens
cagcaacgaggcagcggcaggccagggcagccgcgcacgggagccggaggcgcagagccgaaggggcacaggagacaacg

SEQ ID NO: 212144 - RNA, 73 nt, Homo sapiens
ccaaccccagagagcagacgaacagccaaagcaccaaagacgccaagagaagacaacgaggcaagagagcaaa

SEQ ID NO: 212145 - RNA, 81 nt, Homo sapiens
accccgaccacgcggccgagaggagcagggccgccccgaggagagcgacgcccgggcgcgccccggcagagcgagccaaaa

SEQ ID NO: 212146 - RNA, 103 nt, Homo sapiens
cacggagccacaaagcagcgaaacagaaaggggcgccgcgggcagcggacggcacgggaaacacgagaccggcgcagcagagcagaaacaacaccgcccgacg

SEQ ID NO: 212147 - RNA, 60 nt, Homo sapiens
cgagagcggaccgagagcgcgaaacgcacgagaagaaaacgaaggaaggaggacccgagg

SEQ ID NO: 212148 - RNA, 54 nt, Homo sapiens
aagagcccgaggaccacaggcggaaaaccaaaagcccgaaaggacggaacccag

SEQ ID NO: 212149 - RNA, 73 nt, Homo sapiens
ggaaagaaagaaagagacaacgacagccaacagccagggaacagccaaaccaggaaaggaaccagaggaaagc

SEQ ID NO: 212150 - RNA, 80 nt, Homo sapiens
gaggcagaaggcgccccacccagcacgagaaaaaaaggaaggaacagagccacagagaaaaagacgccacaacagaagag

SEQ ID NO: 212151 - RNA, 72 nt, Homo sapiens
agcgcagcagaccacaaaggcagacacaaccccagcgaaagggaagcaccgggcacaagacgaagacccccg

SEQ ID NO: 212152 - RNA, 62 nt, Homo sapiens
cgcccgggagcggccggagaacccaaccaccagccacggcaccggaccacggaagcacacac

SEQ ID NO: 212153 - RNA, 80 nt, Homo sapiens
gagggaccggaacggcggcgacaaggggcccgaacagagggggacagggaagggaaacaggagacgggacccccaaaaag

SEQ ID NO: 212154 - RNA, 80 nt, Homo sapiens
ggggaagaacacaaaccccagacaccgcaccacaaaccggaagagagaaggaaaaggccaaccccaaccgaaacgcgcaa

SEQ ID NO: 212155 - RNA, 91 nt, Homo sapiens
gggagccacggaccagggggacggcgacagcgccgaacaggaaaaggcaagacacggcagcaaacccccccacggggcccgcccaggcagc

SEQ ID NO: 212156 - RNA, 38 nt, Homo sapiens
gccccgacggccacccggcggccccccaggcccaaacc

SEQ ID NO: 212157 - RNA, 79 nt, Homo sapiens
ggccccgccggcgcggcccgcggggcggcccccgggagcggagcaaggggagcccacccagaggcagggggcgacccga

SEQ ID NO: 212158 - RNA, 77 nt, Homo sapiens
gcgaccaaacccgacccaggcccccgaggagcccagacagcgcagccacagcccccgacaagaaagccacacgaggg

SEQ ID NO: 212159 - RNA, 120 nt, Homo sapiens
ccacaggaacaaggagaagaccaggaagagaaagagaaaggacaagcaggaacccccaggcacaggcacaaggacggacaagaacacccaggaggagggcagcaaaggccccgcagaaga

SEQ ID NO: 212160 - RNA, 91 nt, Homo sapiens
aagaggcgaaaggaagcaagcagcagaagagccaaggaaaaacagcaagaacccaaaaggccaccgccccaccaacggggccaaccaaaag

SEQ ID NO: 212161 - RNA, 78 nt, Homo sapiens
gaccacgagagagaaaggggggaaacaaaaccacacagcacgggaccggaaaaggacgcgcgagacccgaccacagcc

SEQ ID NO: 212162 - RNA, 74 nt, Homo sapiens
ggagaagggaaagaagcagagcaggaacacagggacgccacgaaccgcccaaaggcaggcccggcaccgaggcc

SEQ ID NO: 212163 - RNA, 78 nt, Homo sapiens
cccagccccgagagcgggaacagagacaagaccgcccccccggccggccccaagagacaaagaaaagaaggaacaagg

SEQ ID NO: 212164 - RNA, 73 nt, Homo sapiens
ggcgagggaaacaggaaagaaacagcccacccggaacaggaaaaagggcaagaagcaccaaaaggaagagaaa

SEQ ID NO: 212165 - RNA, 90 nt, Homo sapiens
acccgggacccaccacccaggccccgacgccccgagggcgaccagacgaggggagacggacgggggagagaggccaaacggacaagggaa

SEQ ID NO: 212166 - RNA, 56 nt, Homo sapiens
agcgacccccgaccgcacacaggaacccaacaaggaccgagcgaaagcagagacca

SEQ ID NO: 212167 - RNA, 61 nt, Homo sapiens
caccggagccaccacagacaccccacgggagggcaggagcaccacgaagaaacgcccagag

SEQ ID NO: 212168 - RNA, 75 nt, Homo sapiens
caggcgccaccagcccggaggaaacacgccgcaccagggaggagagaaacgacaccccccacccgaaggacccgg

SEQ ID NO: 212169 - RNA, 78 nt, Homo sapiens
aagagaaaggaggcaagggagccacggaaaggcagagacccaaggagcagacccgaaacagcgaagagcgcagagcgg

SEQ ID NO: 212170 - RNA, 78 nt, Homo sapiens
cgggcaaaggacgaaggcacgagggcgggggagggggagccaaacccggcgcacgagaacgcaaagcagcccgaggag

SEQ ID NO: 212171 - RNA, 56 nt, Homo sapiens
gggcagacgagcggaggacacccaacccggcaaaccagccggcgggcgccacaacg

SEQ ID NO: 212172 - RNA, 54 nt, Homo sapiens
ccgagagcccgccgcccccacccacacgaggcagcgagaagaaaaagaagagag

SEQ ID NO: 212173 - RNA, 80 nt, Homo sapiens
ggcgagggcaccccgccacgcccaacgggcgcggcccgcgaggcgcaacagagacccgagcggaagagaagccaaggaac

SEQ ID NO: 212174 - RNA, 68 nt, Homo sapiens
cccccgagagaagacgaagggagaccagcccaccgacaagccaagaaagccggacagggccagcaaac

SEQ ID NO: 212175 - RNA, 73 nt, Homo sapiens
ggagccagagcgcggaacccaagaccacagccccagccacagaccggcccacaaaaagccgccaggagaaaga

SEQ ID NO: 212176 - RNA, 82 nt, Homo sapiens
ggagacccgagccagcgagcggcgaagggcccagggacgaccagaaaggagagcgaagaccaaagaacaaaggccgagggac

SEQ ID NO: 212177 - RNA, 81 nt, Homo sapiens
ccgcagagccccccagcagacgagcccagaccgacagcagcgaaagaccaggacgacgggaggcggcgccggaggagaccc

SEQ ID NO: 212178 - RNA, 68 nt, Homo sapiens
gggcgccgcccccccggcccccgggacggcccaaggccagcccgcaggcgggccacaggcagaagcaa

SEQ ID NO: 212179 - RNA, 75 nt, Homo sapiens
gcccagaagaccccgaggggacacgaagcaggaaaagagaggcaagcaaccccggggaagaggccaggcagccac

SEQ ID NO: 212180 - RNA, 79 nt, Homo sapiens
cagacgccaccacgggcacccgcgccgggcaccgaggaccagccaagacagacacagggaaaggaggcgcaccgaggaa

SEQ ID NO: 212181 - RNA, 53 nt, Homo sapiens
gaaaccaggacagcagcaacggagaagccccggagccagcgggggccaagaca

SEQ ID NO: 212182 - RNA, 72 nt, Homo sapiens
gcagccccggcccacggcgagggggaggagcgagccgggaagagaggcgcaggaacaaacggcagggccggg

SEQ ID NO: 212183 - RNA, 79 nt, Homo sapiens
ccccgagcgggcgagagggccaagggagccgcccgaggaccaggggagcgaagggggaggggggagcacaggccggcgg

SEQ ID NO: 212184 - RNA, 64 nt, Homo sapiens
ggaaacgagagcaaaccaagagcaagcagaggccaagggaagacaaggcccccagcccgagggc

SEQ ID NO: 212185 - RNA, 77 nt, Homo sapiens
ggggcagcacggaaccacacagggccgccaccaacagagaagacagagcaccaacgagaaaccccaagccggaagac

SEQ ID NO: 212186 - RNA, 78 nt, Homo sapiens
ggagacaaaagaagagagacacaaagagcacaaaaaagcggaaaaacgaggggacccagaaagaagcacaaaacaaac

SEQ ID NO: 212187 - RNA, 82 nt, Homo sapiens
aagaaaccggagaaggaacagaccccggaggagcacccgagggacccgaggagcccaccaagccgaccgcaggcaagggccg

SEQ ID NO: 212188 - RNA, 68 nt, Homo sapiens
caacagcccgacaaccagaagcgaggggaccagaagaaggagaacccacgacgaaagcaacaaccaaa

SEQ ID NO: 212189 - RNA, 74 nt, Homo sapiens
aggggcagcgcggacccgagcacaccaaaccagacacgaagacgagagaagaagaagggaaaacaaaggaacca

SEQ ID NO: 212190 - RNA, 84 nt, Homo sapiens
cccagagcccagggcaggacaccgacaggaacagggaccacggggagccaggacaaaaccaggcagaaccaacacgaacccaag

SEQ ID NO: 212191 - RNA, 62 nt, Homo sapiens
aacgagacagaacaggaaaaaggaccgaaacaaggaccccccgggagaagaaaagcgggacg

SEQ ID NO: 212192 - RNA, 80 nt, Homo sapiens
cagaagacggggcccgggaccacaggccccggcccagaacaagcagaccggaagaccgacggaagaccacaccccgaggg

SEQ ID NO: 212193 - RNA, 75 nt, Homo sapiens
cccgcagaagccgagaaaacaggaagaagaggccaacaacggccccaaacaccggcgaacaacccagcgggacaa

SEQ ID NO: 212194 - RNA, 77 nt, Homo sapiens
acaggcggaaacccaaccaagaaggcccaggcaccgacacgaggcccaggagagaggagccgggcacgagaaacagc

SEQ ID NO: 212195 - RNA, 62 nt, Homo sapiens
caagaggacaggagggcgccagggcgcaagaggcagacagacaggcgacgggcagccaacaa

SEQ ID NO: 212196 - RNA, 53 nt, Homo sapiens
gcggaggacggaaccaggggagagcgacccaaacaaagacccgagaagaacca

SEQ ID NO: 212197 - RNA, 78 nt, Homo sapiens
gccgagcggcaaccaacagagccagggagaagacaacgcgcaccaaccaccccccggccagagaggccccgcagagca

SEQ ID NO: 212198 - RNA, 74 nt, Homo sapiens
gagaacgcaggcccccgagggcagcccgagacccaccagagggcgccacaaacggagagccaccaaagaagacc

SEQ ID NO: 212199 - RNA, 52 nt, Homo sapiens
caacaccaaaaacaaaacgaaccaggacggcaaaaggggccgcccgaaagaa

SEQ ID NO: 212200 - RNA, 57 nt, Homo sapiens
acagaaacgggacacaggaaaagcagagagggagcgaggaccaggaggagaagcaac

SEQ ID NO: 212201 - RNA, 78 nt, Homo sapiens
cgccggaaggcccccggcgcgagacccgccggaggaacgacaaggagaagaaagccacgaaaaccaggaagagagccc

SEQ ID NO: 212202 - RNA, 75 nt, Homo sapiens
caggcccagggccggcccccccaggacaacccagaggcaacaaaggcgagaacaccagcaggaaaaaagagcggc

SEQ ID NO: 212203 - RNA, 74 nt, Homo sapiens
ccggacgacccccagcgagccagcggagcgcggcgccaaaagcagggcccgacacgcaaacgccagcgcacggc

SEQ ID NO: 212204 - RNA, 85 nt, Homo sapiens
cgcgaaccaacggagcggggcaggggcgacgagagcgcgcgggagcccaggccaagacagagagggggggcagccccaggaggga

SEQ ID NO: 212205 - RNA, 73 nt, Homo sapiens
acgacccagcaaaccagggaaaaagcaacacgaaagaaaacacggcaggaagaagcacaaagagcgaagcaaa

SEQ ID NO: 212206 - RNA, 73 nt, Homo sapiens
agcccaccacaggaacgaaaccggaagggacgggcaagggcccgagggcaggacagcaggcaccggcgaagca

SEQ ID NO: 212207 - RNA, 78 nt, Homo sapiens
acggagaaagccgccgcaaaaaaaccacccccagagaggggcggaaaacaaaaggggggggcagggccagccgaaccc

SEQ ID NO: 212208 - RNA, 78 nt, Homo sapiens
acaagaacgagaggaggcgggcagaggagccagaagggggaagcccaagggggaagagaccaccggaaaccgagggcg

SEQ ID NO: 212209 - RNA, 51 nt, Homo sapiens
agaacccacacaaggacaaggaaaaaaacagaggcgggaaacacggcaaac

SEQ ID NO: 212210 - RNA, 82 nt, Homo sapiens
ccacccgcaggccccaggccgaccccgggacacacccagcccgggacccagacaccgggaggggagaccgaacccgacccag

SEQ ID NO: 212211 - RNA, 84 nt, Homo sapiens
cacaccggccagaccgggaccgccacgccacgcggagaacaccagccaggcagccaaagcccccaagaaggccaagagccgacg

SEQ ID NO: 212212 - RNA, 68 nt, Homo sapiens
aacagcccaccccgggcacgaccaagggaagaaggagaaagggccaaccccgaagaagcaaacagaaa

SEQ ID NO: 212213 - RNA, 76 nt, Homo sapiens
ccaggagggcgccccagggacagcaacagcggccgggaacgaccgaaacaccaggcaaccgggaccaaaaacacca

SEQ ID NO: 212214 - RNA, 70 nt, Homo sapiens
aacaccaagacaaaaacaaaggccgggccgagaacgaacagcacacgccaaagagggcagcaccccaccc

SEQ ID NO: 212215 - RNA, 75 nt, Homo sapiens
gccccggcacgccggcgcgagcacagaggcgaacgggagccaaagggccccgggagacgccggggcccggcgcca

SEQ ID NO: 212216 - RNA, 86 nt, Homo sapiens
cgcccccaaccccagcaaccgcccagggcagcggggccgcccacgcccagaaggaacagcgaccagcaggacccaggagaagcgcc

SEQ ID NO: 212217 - RNA, 57 nt, Homo sapiens
caggaaacgcagcaaagccacgggggagaagcggacgaaaagaacaagcgcccggag

SEQ ID NO: 212218 - RNA, 87 nt, Homo sapiens
cagcggagggacggcagccgcgcggacggagacgagcagagggggcacggaggcgcaggagcgggggaggcgggaagcggagcgaag

SEQ ID NO: 212219 - RNA, 57 nt, Homo sapiens
aagggccaaagcccaagaacgaggccgagaaacagacaacccacagaacaaagcgga

SEQ ID NO: 212220 - RNA, 78 nt, Homo sapiens
acccgggcggggcagagcagcccccagccagccgcgagaccccaagcggaccaaggaaaaaagaggaccaaccacccc

SEQ ID NO: 212221 - RNA, 80 nt, Homo sapiens
agagacgggccgcgccgcccgcaagcagaggggcaacaaacgccgaccagggagaggaaggggagagcgaggaggccacg

SEQ ID NO: 212222 - RNA, 60 nt, Homo sapiens
caaaggggaccggacaacacacacaccagaagcagccccagcagagaccagagaagcccc

SEQ ID NO: 212223 - RNA, 72 nt, Homo sapiens
aaggcgaaggaaaaccccagcgaaacaccaagaggaacaccagaagcagccgaaacgaaccaagaaccgaag

SEQ ID NO: 212224 - RNA, 79 nt, Homo sapiens
cgcacccccggccggaggcaccagcggcaccagcagcggagggcgcagccaggaggggaagcagggcagcgcagcggcc

SEQ ID NO: 212225 - RNA, 75 nt, Homo sapiens
caggcagcgcggaggggcgagccagcggccaggagaagacagaggagccagaccaagagacagcacaggcgagcg

SEQ ID NO: 212226 - RNA, 76 nt, Homo sapiens
agagcgggaggccagcgccgcacaccaggcaaaacgggagacgcaccacaggggggagaccaaggggaagagagac

SEQ ID NO: 212227 - RNA, 75 nt, Homo sapiens
ccccgagggaagggaggcggcggccccaaaaccaagcgaaagacagaggcccagccgaaagaggggaggcacgac

SEQ ID NO: 212228 - RNA, 77 nt, Homo sapiens
caaccaaaagacacaagggcacgaaagagaaaaggagcaacgggagccacccacccgaaagagcggcggaaacaagg

SEQ ID NO: 212229 - RNA, 64 nt, Homo sapiens
aaagcacacccagcgccaagaaacaaacccggggcaaaaagggggaacgcaggaggcaacgaac

SEQ ID NO: 212230 - RNA, 72 nt, Homo sapiens
gggacccccagcagaccagccagcggcggcccaggagaaccgcgagacaacaaaagccgaaacagacagcag

SEQ ID NO: 212231 - RNA, 72 nt, Homo sapiens
agcgccaagggcacgggaagaccggaggggacgaagaacggggcggaaacagggagggccacagcccccgcc

SEQ ID NO: 212232 - RNA, 75 nt, Homo sapiens
ggcggccgccgcccgcggagggaagcgccccccacaggaggggcccgagagaagagaagagcggaggaacaggac

SEQ ID NO: 212233 - RNA, 79 nt, Homo sapiens
cggaggaccggagcggagggcggagccaggggggggccggaggaaaggaacaccacagaaaaagcggaaggaggaaccc

SEQ ID NO: 212234 - RNA, 36 nt, Homo sapiens
ccaagcccccccacaagcaagacagggggccacaag

SEQ ID NO: 212235 - RNA, 60 nt, Homo sapiens
cagcagaccggagcacaccgccaggaccacagagcccccacacccaggcccagcccagcc

SEQ ID NO: 212236 - RNA, 73 nt, Homo sapiens
caacagagcgccggcgaaaaaccacagaccaggacccaagaaaacccagcggggaccggccacaaggacagca

SEQ ID NO: 212237 - RNA, 41 nt, Homo sapiens
cgacacgagaagaagagacacagggccaccgcccaggcgga

SEQ ID NO: 212238 - RNA, 84 nt, Homo sapiens
cggccgcaccgccagggcgcaggcacagcccgagaaaccgcagcacacacgaagaagacggcacgggacccccagcacaggcag

SEQ ID NO: 212239 - RNA, 60 nt, Homo sapiens
caccggccccaccagcggaagcgcgcgcgggggaaggccccagggagcgccaggcccgcg

SEQ ID NO: 212240 - RNA, 67 nt, Homo sapiens
gaagaaggcgggaggacgcagcagggcaacaggcggagaaaaaccacagaaaagagaggccgccagc

SEQ ID NO: 212241 - RNA, 78 nt, Homo sapiens
accagccgcgggagggaaaaggccagaccaaggccgcaagagagaggggaaaggagggaaagcagcgagagcaaaccg

SEQ ID NO: 212242 - RNA, 73 nt, Homo sapiens
aggggacacaagccggaaaggccccgagagcaaccgacgcacaagggaaacggccacgaagccggaaagcaac

SEQ ID NO: 212243 - RNA, 75 nt, Homo sapiens
cagaaaccgaagagaaaggccaacgagaacaagcacagacgcgacaaccggaaggagccgaaaaggcacggaggc

SEQ ID NO: 212244 - RNA, 81 nt, Homo sapiens
ggagccccggcaggcacagccggccgcgacaccccgggcacaggagcgaggacggaggggagagcaggagggggacgacgg

SEQ ID NO: 212245 - RNA, 66 nt, Homo sapiens
cggcgcccgacccggcccaccaggggcggaaacgcggggacgccacaagaagcggagcaaaccccg

SEQ ID NO: 212246 - RNA, 78 nt, Homo sapiens
gaaaggaggccaggacggagagggagaagacgaacaggaggcagaaccaacagaacgacggggcccccagagaaccga

SEQ ID NO: 212247 - RNA, 77 nt, Homo sapiens
aaaaggacgagaacgccgcgacagaaagggggaccaaggcaacgaacacaagcagcgggcaacaacagaacagaaaa

SEQ ID NO: 212248 - RNA, 48 nt, Homo sapiens
ggcagccaaagaagacacgcggaagcgagaagccaccgacaggagccc

SEQ ID NO: 212249 - RNA, 87 nt, Homo sapiens
gaggaagggcagaaggaagcagcccaagcgaagacaaggacacgggaagagaagaggaacaggggagacaggagaaagagaaaaaag

SEQ ID NO: 212250 - RNA, 72 nt, Homo sapiens
aaggcacggcgcagggcccggggccccagacgcacaggaaccaaccacagaacggcgaggggacggggccga

SEQ ID NO: 212251 - RNA, 71 nt, Homo sapiens
acaggacacaaggcagcgcgcagaccagcaagaaggaagagcaagcacaacaaaaggagcagaacaaaagg

SEQ ID NO: 212252 - RNA, 80 nt, Homo sapiens
ccggggcacccagccggccggggccgcagcggccacccgcccagcggcgggccaagagagccggggaaccagaagaggcc

SEQ ID NO: 212253 - RNA, 78 nt, Homo sapiens
ccaacgcaagagcacaccacacgacaggccacaccacaaacagagaggacagaaagcagcaacacgcccagggagcag

SEQ ID NO: 212254 - RNA, 77 nt, Homo sapiens
gaagccacggcagacacacaacccgacccgacgaggaggcagggaaaagcagcaacagggaaccggaggaacccacg

SEQ ID NO: 212255 - RNA, 76 nt, Homo sapiens
gcaccgcgccccccaacacgccgcgcaggaacgggccgacgacaccaggcgggccaaaggagaaacaagaaggaga

SEQ ID NO: 212256 - RNA, 76 nt, Homo sapiens
gaaggagccccagagccaagggggaccacagcagcacccccagcagcacacagggagggcagggagaggaagggag

SEQ ID NO: 212257 - RNA, 67 nt, Homo sapiens
ggacaggagagaaagacggggaaggcgaggggggagggaaaagccagagaagagcccagcgaagaga

SEQ ID NO: 212258 - RNA, 67 nt, Homo sapiens
aggagccgcaggggggcgaaaggcggcagccccccggggccccgcggcaagaggaggaacgacgaga

SEQ ID NO: 212259 - RNA, 66 nt, Homo sapiens
cacaggaaaaacagccacccagaccagccccaggggaacaggcgggcgcggacggcaggggcgccg

SEQ ID NO: 212260 - RNA, 74 nt, Homo sapiens
ggacaacagcggaagggaggaacaccggacaaaaaggacgggacaagaaacgaaggaagaggaggaaagcaccg

SEQ ID NO: 212261 - RNA, 73 nt, Homo sapiens
gggcagccaccgcagaggaggcccggcccaccgcaccgggacccaagccagcaacaaggcccaaagggcgaaa

SEQ ID NO: 212262 - RNA, 70 nt, Homo sapiens
caaacggaccggacgggagggcggaaggaaccagccaggccgaaggccaggacagagaaccgaaggacca

SEQ ID NO: 212263 - RNA, 76 nt, Homo sapiens
cgcagggggagggccggggaacaggcccgcaccgcaggcccagaggacagagcaggccgcccgaaccgaggaccgg

SEQ ID NO: 212264 - RNA, 79 nt, Homo sapiens
ggcccgaagcccccgcaggaaccacaacccaaccagaacagcgcgagccacaaggcaaggaagcaggcggcaccaccca

SEQ ID NO: 212265 - RNA, 78 nt, Homo sapiens
ggcacgggaccccaaccaggacgcaggcgacaagggaggcagggagcccagaaagaagagaaaaagagagagaagcca

SEQ ID NO: 212266 - RNA, 59 nt, Homo sapiens
caaagcaaggagggcagaaagcaacccacagaggaagcccaagaggaacagggcagcag

SEQ ID NO: 212267 - RNA, 66 nt, Homo sapiens
caccaaaaaacacagaaccaccaaaggcagagcaacagggacacaagcaagaagaaagggaccgac

SEQ ID NO: 212268 - RNA, 86 nt, Homo sapiens
aagcaggccagaggagcagcgcagcggagcgggcgcgggaggcagagcgcagagcgcgaggcaacagaaacagcacccggggaccc

SEQ ID NO: 212269 - RNA, 83 nt, Homo sapiens
gagaggaacccgaagaagaaaggacgacagccagagagagcagggcagaacgggagcacggggaccagagccccacgcacccg

SEQ ID NO: 212270 - RNA, 56 nt, Homo sapiens
gcgggaagacggaaccgagaccagaggggaggccgcgagcccggggagccccggag

SEQ ID NO: 212271 - RNA, 58 nt, Homo sapiens
aacgccagccagcagcaaggaaggcaggacaaccccaccgaaaaggacccagagcacc

SEQ ID NO: 212272 - RNA, 60 nt, Homo sapiens
gaacagaagcacaaccagagccggccccgggccaagacggcagaggcccgcacggacaac

SEQ ID NO: 212273 - RNA, 73 nt, Homo sapiens
ggcgcgagacgggggaacggacccccagaagcagcgacacaggagagaacgagcgggagagcacgacaacacg

SEQ ID NO: 212274 - RNA, 87 nt, Homo sapiens
ggccgaggcaggccccgaggaggagacccaggaggcaccacaaccagagcgccaccccccccacgggagagacccgagaccagaaag

SEQ ID NO: 212275 - RNA, 78 nt, Homo sapiens
cgcccgggccccagaaaccccccgaagaagaccccccacacggggcggagaacggaaaagcaccaggaagcagagagg

SEQ ID NO: 212276 - RNA, 55 nt, Homo sapiens
gcgcgacgcagcgggccgggcggcaccaggacgccgaaaagcgaccggacgcagg

SEQ ID NO: 212277 - RNA, 65 nt, Homo sapiens
agaagaagggagggcgagagagcgacgaagcacaagaaggaagcccagcgcaccaccaaccagcc

SEQ ID NO: 212278 - RNA, 67 nt, Homo sapiens
aagggaaaaggcacacagccacagagaggaaacagcacgggaacgaggaaacaccgggaaaaccacc

SEQ ID NO: 212279 - RNA, 81 nt, Homo sapiens
gcaggcaaagcaagcagcagcggaggaggagcagaagaaagcacgaggggaagcgcggacacccaaaggacggcgggaaga

SEQ ID NO: 212280 - RNA, 69 nt, Homo sapiens
agcacacccgaaaagcgccaaggaaaaggacgagaacgccgcgacagaaaaaagccaaggacacgcagg

SEQ ID NO: 212281 - RNA, 78 nt, Homo sapiens
gcgcgcccagaagaagggaaggcgcgaggaggaaaggaggacgagacccgccccgccacgagaacacacccccaggcg

SEQ ID NO: 212282 - RNA, 71 nt, Homo sapiens
gcaacacgacacccgccacacccgacccgccaagaagccgcgagcaccacaggacgggccaacgcacggcc

SEQ ID NO: 212283 - RNA, 80 nt, Homo sapiens
gacggcagccacaggggcagcgggggggcgaagggggccaaagggcgagggcacaaaaaaccacaccccccaccgaggaa

SEQ ID NO: 212284 - RNA, 83 nt, Homo sapiens
ccaaccagcgaagagcgacaagccgcggcagccgcggaccaccgccgccaggaccgaggccaaaagaaaggaagaaaaccccc

SEQ ID NO: 212285 - RNA, 73 nt, Homo sapiens
gcgggaaccagaccaggcccggaccccaagaccaagcgcgccacgcgcggcgcgccgcagaaaacacagagaa

SEQ ID NO: 212286 - RNA, 77 nt, Homo sapiens
aaccaacagccccccagcaacacgggaggaaacgaaccacacaccagccaccaagcgagagcagacagaacaccccc

SEQ ID NO: 212287 - RNA, 72 nt, Homo sapiens
agaaccccgaagacagccacccacccacgcagcacaaggaaagccccaagcggaggcgcagccgagccaaag

SEQ ID NO: 212288 - RNA, 78 nt, Homo sapiens
ggccaagaggccaaccagagccaaacacgagggcacgcccaagggaacaaaagagggaaaaagacgggaccggacagg

SEQ ID NO: 212289 - RNA, 83 nt, Homo sapiens
agacccacagcgaaagcaacagggaccaagaaaggcccagggaccaaagcccggacaaggcccgagcaccaggaccgcagaag

SEQ ID NO: 212290 - RNA, 82 nt, Homo sapiens
ggaaaagaaacccaccagggcaacccccgccacccagaaaaggcgaccgaacgggacacccacgcgaaacccccgccaggaa

SEQ ID NO: 212291 - RNA, 84 nt, Homo sapiens
caggaggggagcgaagaagaggaagaacgaccagagcgacccgagcagcgcagaccccagaaagacaagagcaccacagcaaaa

SEQ ID NO: 212292 - RNA, 55 nt, Homo sapiens
aggagcggagaaccggagcggccaacggcaggagaccgcaggcgggacaagaaaa

SEQ ID NO: 212293 - RNA, 55 nt, Homo sapiens
aaggagggggcagagcgagggcaaacaggaagcaagccagaaagccagggacgca

SEQ ID NO: 212294 - RNA, 76 nt, Homo sapiens
ccagcgcgcacaaggaccgaccgggcgagcgagagagagcaagcgcagcgccacaaacagaggagccaccgcgccc

SEQ ID NO: 212295 - RNA, 82 nt, Homo sapiens
agcaaccacagaaacaaggggccgagacgcaccagagccggaccggggacgcgaagcaggcccgggagacgaccgaccgcag

SEQ ID NO: 212296 - RNA, 70 nt, Homo sapiens
ccccagcaccccgcccccagccacgggaccaaggccgcgaagaggaaacaaaagcgcaggagagaccagg

SEQ ID NO: 212297 - RNA, 76 nt, Homo sapiens
cgaaggagcagcccaggaccgagaccggagcagccggggcggagcgggaaaggagaagcagcgagggcaggagaag

SEQ ID NO: 212298 - RNA, 72 nt, Homo sapiens
gagaaagaagagcccgcgaaggagaaagaaaagcccaaggacaagacgacaagacagcgacagaggaaacac

SEQ ID NO: 212299 - RNA, 74 nt, Homo sapiens
gagaccccaggccccagaggagaaggagcaagggcgcggcagagcagagaggagcccaggggaagagaggggcc

SEQ ID NO: 212300 - RNA, 74 nt, Homo sapiens
caagccagacgcggagacacccgcagggggaggcccaccaggaggcgggacaacacaagggaaccaaggagggc

SEQ ID NO: 212301 - RNA, 77 nt, Homo sapiens
gcaccggagaggggccgcggaaaccggagggaagggcaggacgggggaggaaggaccgcgccccgaaaccgcgaggg

SEQ ID NO: 212302 - RNA, 79 nt, Homo sapiens
aaaccaagaccaccggcaaaaggcgacccagcaaaagaacgcgagacaggaggggggccgcagcgcagggacacgaccc

SEQ ID NO: 212303 - RNA, 76 nt, Homo sapiens
cacacaccacaggaagccacgcgggggccgcccgccagaggccgcagcaggcgccgggccggaaagggcacagcga

SEQ ID NO: 212304 - RNA, 79 nt, Homo sapiens
ccccggcggcggccggcgggaccaaagggcaaccaaaaaccccccccaaaaaggcaaagagcagacccagaaagaaaaa

SEQ ID NO: 212305 - RNA, 74 nt, Homo sapiens
gcggagccccagccaggacccaagcacagggaggcgggacagaacgaacaaaagggaaagagaaagccaaagaa

SEQ ID NO: 212306 - RNA, 67 nt, Homo sapiens
ggaccagaccaagaagaagccaaaggcaggagcagaaacggaaagcacccaccgaggacggagggcc

SEQ ID NO: 212307 - RNA, 83 nt, Homo sapiens
cagaccaagagaggcggggaccgcagcagcgagaaaggagccggggaccccccaaagacaaggaacagagacagacccggggg

SEQ ID NO: 212308 - RNA, 77 nt, Homo sapiens
accaggggaagcgggacaacggggcagggcagaaaagaacagacccagaagaagcgaaaggggagaaagaagaaagc

SEQ ID NO: 212309 - RNA, 80 nt, Homo sapiens
gcaacagggacggcaaaggcgcaacggccccaacgccagcaacacccaacacaaagcggaagaacacagaaacagccaga

SEQ ID NO: 212310 - RNA, 38 nt, Homo sapiens
gagcccccagagagaaagagagacggggcgccggagcc

SEQ ID NO: 212311 - RNA, 67 nt, Homo sapiens
aaggaccaagaaccagcaaaagcaggcaccaaggccagaaggaccgagcgggcagcgaccagaggag

SEQ ID NO: 212312 - RNA, 74 nt, Homo sapiens
gagaagaacaaaagaacagaaaggccgcaccacaacccgcacagaggacaagaaaaccccaggacacagagcgg

SEQ ID NO: 212313 - RNA, 78 nt, Homo sapiens
aaggcagggagggaggggaaagacccacaccaagagaaggaccacgggcgcgaggagcgcagcagcaggacgggagcg

SEQ ID NO: 212314 - RNA, 74 nt, Homo sapiens
cgaaggggagccacaggagagcgcccagacaagggaggcgaggacggacaaaaggaaacggacgggaggccagc

SEQ ID NO: 212315 - RNA, 57 nt, Homo sapiens
aagccggcgacccgcacagccgcaccccaacccccaggccccggggagccggaagga

SEQ ID NO: 212316 - RNA, 66 nt, Homo sapiens
aggggcaggacgccaaaaacagagggaagaaagggaagagcgaagagcaaccacagccagaaccac

SEQ ID NO: 212317 - RNA, 83 nt, Homo sapiens
gcagccccgagcgccgcggacgcgcacgagggacggggaaaggaaaccccccaggcaagaggcgcaggaccgggaagaccaac

SEQ ID NO: 212318 - RNA, 84 nt, Homo sapiens
aagaacaaagacacaggcaccaaaaggcagaaagaggaagaagcaagccggacccacgacggcaggaaaggaggccaggacgga

SEQ ID NO: 212319 - RNA, 61 nt, Homo sapiens
gaacagaaaaaaagagagaaccaagacgaaaacaaacggaacgccgacggccaggagaaag

SEQ ID NO: 212320 - RNA, 69 nt, Homo sapiens
gccaaggcaagcaagagccgggacaggcgcaacagccagacccgccgaaccccacaggggcaggaagac

SEQ ID NO: 212321 - RNA, 80 nt, Homo sapiens
gagaccccggaggagggaagggcgcaggagccggagccagcgcagccgcgcccgcagcagaggagccaccgcgcccaggc

SEQ ID NO: 212322 - RNA, 72 nt, Homo sapiens
caggccccaggaaccacagcgccagaaggccaggaaggacaacggccaacggcggaagcagcgcaagacccc

SEQ ID NO: 212323 - RNA, 76 nt, Homo sapiens
ccacaaaaaggaaagcagagaaggagaagaagggaccaggggaaggaacaaagcagagaaaccaaaaggccagacg

SEQ ID NO: 212324 - RNA, 43 nt, Homo sapiens
aaagcaaggccaaagacagggagaagaggaaccggagaagaaa

SEQ ID NO: 212325 - RNA, 80 nt, Homo sapiens
cggggagcacccagcaaagagcccacacaggggaaccgcccaccgcgcccccagaacagggagagaacagcacacagagg

SEQ ID NO: 212326 - RNA, 87 nt, Homo sapiens
gggcggccaccggcgccgcgccagcgcccgccgcgcggccaaacacacaggaacgccagaccccagccgagggaggcaacagcaaag

SEQ ID NO: 212327 - RNA, 75 nt, Homo sapiens
acggcgcaggaccggggaaccgccaaagcccgggcgcggaagaagccaaggggcgagcaccagcacaacaaggag

SEQ ID NO: 212328 - RNA, 74 nt, Homo sapiens
gcaaagaagagcccgaacaaacaaacacccagaaacaagaggccggaaggggggcgacgcggaaggcacaacac

SEQ ID NO: 212329 - RNA, 70 nt, Homo sapiens
ggaaccccacgcgaagcaaagccagaccccgccacagagaaggaaaaaacacggaccggaagaccccgag

SEQ ID NO: 212330 - RNA, 78 nt, Homo sapiens
ggccccccagcgcccccggggcaaacccgagccaggccgagacgcaccagagccggaccggggacgcgaagcaggccc

SEQ ID NO: 212331 - RNA, 73 nt, Homo sapiens
gagaacggcgccagcccagccccaacccccgcccagagacgaacccgcgcccagaagggaaggccacggacgg

SEQ ID NO: 212332 - RNA, 86 nt, Homo sapiens
agggcaggccaccgggccccagccgccggggggcaccaagcccaccggaagggcggcgaccaaggcaagagacgaagcacggaaac

SEQ ID NO: 212333 - RNA, 76 nt, Homo sapiens
cgaggacgcaagcaagcaccaaggaaggcggagcagcaagccgagagccaccccgaacccgaggcaggggaagcgg

SEQ ID NO: 212334 - RNA, 75 nt, Homo sapiens
aaaagacgcgcccccgccgcacggaaaagagccaaaaaccgaacacccggaaggggacaagggacggcgaacaga

SEQ ID NO: 212335 - RNA, 84 nt, Homo sapiens
ccgcacacggacagaccccaggccggcggcccccagccgccgcccacgcagcagggacagcagcagaccagccccggggcgcgc

SEQ ID NO: 212336 - RNA, 53 nt, Homo sapiens
cgacgcacgacaaggagggcggaacggcggaagagaccgaaggagcagacgag

SEQ ID NO: 212337 - RNA, 74 nt, Homo sapiens
cagggagaaaggaaaaaaagccacagggcccggagagccaggggaaggccggaaaaacccgcaacaacgaccac

SEQ ID NO: 212338 - RNA, 68 nt, Homo sapiens
ggggcccggaccccaagacggccacggaggagaccacaaacagccacaagcagccagcgaggaacaag

SEQ ID NO: 212339 - RNA, 80 nt, Homo sapiens
ggaaagcggcgagacaggaagcagagggcagggggcaaacaagccgaccggaaaaaggggccgggagaggaaggccccaa

SEQ ID NO: 212340 - RNA, 72 nt, Homo sapiens
aacgcggagcaaacgcagccaacgggggggaaaaggcagccaggacaggacagggacaagcgcacagcggag

SEQ ID NO: 212341 - RNA, 52 nt, Homo sapiens
ccggaagagcagcccgaccagcaggagcacacgcagacacagaaaagcaacg

SEQ ID NO: 212342 - RNA, 82 nt, Homo sapiens
gcgccggccggggccgaggacaccgcggccgcccgggccgcgggaagcgaggagcccgggaagaacaacaagcggaggccgg

SEQ ID NO: 212343 - RNA, 71 nt, Homo sapiens
ccgcagccgcaaccacggacagaaacccaaagaaccaaagccgagagggaaaagacgggccaggccacggc

SEQ ID NO: 212344 - RNA, 83 nt, Homo sapiens
gcccaacaggccaggaggacaacgaagaagaggaaagacgccaggaccagcacccgcacgacgccccggagaagaacgccccc

SEQ ID NO: 212345 - RNA, 85 nt, Homo sapiens
cggggagccgcagcggccgagcggggcccaacaggcggagagagaggggagccggcccccgaaagaggagagacgggggcaccag

SEQ ID NO: 212346 - RNA, 71 nt, Homo sapiens
acgagcaggcgcgagacgggggaacggacccccaggaagagcgagcacggaaaccccagggacacaaggcg

SEQ ID NO: 212347 - RNA, 76 nt, Homo sapiens
agaccaggacggacaagcacagccggaagccgaccagaaacggccggcggcccggcagaccaggaccgcaggaaaa

SEQ ID NO: 212348 - RNA, 83 nt, Homo sapiens
gggaccaggcccgggggcggcggccacgccaaggacggggaaacgccgccacgaaggaccgcaccccagaaggaaacgaccag

SEQ ID NO: 212349 - RNA, 76 nt, Homo sapiens
gcccacaccccgaccgcgacaccccacgggaccggccaccagagaggggcagcacccaccacggagccgccgcgcc

SEQ ID NO: 212350 - RNA, 40 nt, Homo sapiens
aagggcagagaaggggacggggccaaccacccagcagcac

SEQ ID NO: 212351 - RNA, 67 nt, Homo sapiens
cggagagcccaaacaccaccaccaaggcacacagagaaaaaaagggaacaaaacacagcaagcagac

SEQ ID NO: 212352 - RNA, 81 nt, Homo sapiens
accgcgcgcgcgccgccccggggccgcacccggccgcccggcgccccggggacgccgccccccgggcgaagaaagggaggc

SEQ ID NO: 212353 - RNA, 58 nt, Homo sapiens
ggcgcagaccggggcacggggcggccggggaaggagaagggggaacacccgcccagcc

SEQ ID NO: 212354 - RNA, 77 nt, Homo sapiens
ggcccgaaaggagaggcacggaccacggcccccaaaaaacgaaggaaggaggacccgaggagagagaagacggaaag

SEQ ID NO: 212355 - RNA, 89 nt, Homo sapiens
aaacgggcagccaggcccccacagcccgcagagcgcgggggaagggagcagccccacaccagcgccccgggaaggcagcccggagaccc

SEQ ID NO: 212356 - RNA, 66 nt, Homo sapiens
cacccccgccagcagccgccggagccagccaacgagcgcggccggagcgggacggaaggggacaca

SEQ ID NO: 212357 - RNA, 74 nt, Homo sapiens
ggacagcccccccacggccaggccgcaacccaggagcccccggcagcagcgaaagccaccagggccacgggcgg

SEQ ID NO: 212358 - RNA, 56 nt, Homo sapiens
ccaacggcgccggagaagagggcggcgaaggcgcgccacggagccacccaagcggc

SEQ ID NO: 212359 - RNA, 78 nt, Homo sapiens
gggacagggcccgcgcaacgaagaaaaccagacgagagacagaagacgaaagggcaagaaagagagcacggacaagag

SEQ ID NO: 212360 - RNA, 86 nt, Homo sapiens
gccgccacccggcgcgagggggcgcaggaccggccgcaggccaccgacacgagacaaccgggagccgggaagcgcacaagccaaag

SEQ ID NO: 212361 - RNA, 80 nt, Homo sapiens
gacccagccagaaaacaagggccacacagggcagcagcagccagaaagacccagagaagcgagaagcagagacaaaggaa

SEQ ID NO: 212362 - RNA, 83 nt, Homo sapiens
cgacgaagacacgcacacacagggacacggccaaaagaagacccagacaagaaagaggaagacgaagccagaaaccaaaggga

SEQ ID NO: 212363 - RNA, 58 nt, Homo sapiens
gaagcaacagccacgggagcaagaacggcacacaaagagaaagggaaagaagaaagcc

SEQ ID NO: 212364 - RNA, 84 nt, Homo sapiens
cagaacgagggacgccggacgaccacagccagccaacgcgggccggcaggccgagacagaaggcaggcggcgcagccccccacg

SEQ ID NO: 212365 - RNA, 73 nt, Homo sapiens
aaggcagcgcccagcagcgcaggcaaggaaccgaaggaacaagccaaaagggaggagcagcagagcgaacagc

SEQ ID NO: 212366 - RNA, 65 nt, Homo sapiens
gaaggaacggaggcgcggcaagccacgcggacacaaaccccggggccaccgagaaccccacagcg

SEQ ID NO: 212367 - RNA, 80 nt, Homo sapiens
cggcacagacgcggcggggcgcaaaccgagacaagcaccccgaagcgccggcgggcgaccaccaaccacaaggcacaggc

SEQ ID NO: 212368 - RNA, 57 nt, Homo sapiens
aacaaaaagaagacacagaaaggagaggggaacggccagaaggcagacaacacagac

SEQ ID NO: 212369 - RNA, 75 nt, Homo sapiens
gacggagaggaggcacacaccaacggacggcccagaccggcgccacaagaccaccaccacggacgccaaggagcc

SEQ ID NO: 212370 - RNA, 67 nt, Homo sapiens
ccgaaccccgcacagagcagacgaaaccgacaagcgcgcaaagagcaccacaagcaaggaacaaaag

SEQ ID NO: 212371 - RNA, 40 nt, Homo sapiens
ccgcccggcagcgccccgcgagaaacggagccgccgcacc

SEQ ID NO: 212372 - RNA, 56 nt, Homo sapiens
ccagggaaacacagaggaaaacaggcaaaagcacggagaagggaaaagaaagagcg

SEQ ID NO: 212373 - RNA, 59 nt, Homo sapiens
agggccaaagaagggagagagccagaggagcagccaagaagccccccaggggcccgcag

SEQ ID NO: 212374 - RNA, 60 nt, Homo sapiens
cccgggggcccgcgcagcgcggcaggacagcagccgcccaaaacacaaaccaaagaagaa

SEQ ID NO: 212375 - RNA, 83 nt, Homo sapiens
cgagcaggcggcgccgcggggccagcggcgaggcgacccgcacaggacaggaggccagggcacgggaaggcagcacgaggcaa

SEQ ID NO: 212376 - RNA, 70 nt, Homo sapiens
aaacccacaagcccacaagaaagaagaacgagacagacacaggcccccacagagagcacacaaacaaagc

SEQ ID NO: 212377 - RNA, 83 nt, Homo sapiens
ggacgcgagcggagcagcgcgccacggacgagacaagggcaacgagacacccagcggcccggccccgccgggagaccacaaga

SEQ ID NO: 212378 - RNA, 80 nt, Homo sapiens
gcgacgggggccgcgcacaccaaccccgacacggcgagggcgccacggcaggggggacagagcgaagaaccccccaagaa

SEQ ID NO: 212379 - RNA, 75 nt, Homo sapiens
gagcccgcgcggcgagagcccacaggcccccacagcaaaaccgcccaaagggggaagcggccggaaaggagccac

SEQ ID NO: 212380 - RNA, 64 nt, Homo sapiens
gaacccagcccgacggggacccaccaggccacacccagcggaaaagaccgccagcaacagacca

SEQ ID NO: 212381 - RNA, 73 nt, Homo sapiens
aaagccacgcacagcagccagagaacagggaagacacaggaagcgccgaggaaggaaaccagcccagaaccgc

SEQ ID NO: 212382 - RNA, 63 nt, Homo sapiens
gacgcggcggcgcgaagaggcggaaaggcaggggcacagggaccgaagcccagcaacaccgag

SEQ ID NO: 212383 - RNA, 92 nt, Homo sapiens
ccagaagaaaacgaggggcggaacacccgccaaagcagagaaaaacacagaaaagcccacgaggaaaaacggccaacaaaaacacagcgcag

SEQ ID NO: 212384 - RNA, 77 nt, Homo sapiens
accaggacagccccagggaaccgggccgcaccacggggagagaccccgagaagcaggcaaggagaagccgaaaaagg

SEQ ID NO: 212385 - RNA, 53 nt, Homo sapiens
caaacgggggacaacccaagagaagaagcgcgagagacgacgacggaccccac

SEQ ID NO: 212386 - RNA, 76 nt, Homo sapiens
cgcggggacgcgggcggcgcggccgcgccagacaggcgggacaagggcgcaccggggcgcagcgagggaggacaac

SEQ ID NO: 212387 - RNA, 77 nt, Homo sapiens
gaaggccacagagagccagccccaaccgaacccagacgcagaacgaaaagacgagggaagaagaccgacaacaacca

SEQ ID NO: 212388 - RNA, 72 nt, Homo sapiens
agcaaggagacgccgggaccaaaagcccggacagagaggaccccaaaggacaagaaagcagagaggcagcca

SEQ ID NO: 212389 - RNA, 92 nt, Homo sapiens
cgcacagacggaagcaaggaacaaaccgaagaacagcgggaaagaaggcaaaacacgggacccggacaggaccacccaaagcaagaaagcgg

SEQ ID NO: 212390 - RNA, 88 nt, Homo sapiens
ggaggaggaggcgagggcggagaggcgcacggcgaggcggagaccgagggggagccccgcgcgcggcgcggccaagacggcaaacggg

SEQ ID NO: 212391 - RNA, 72 nt, Homo sapiens
agagcggcagaagcccaacagcgggagcgaaacagacccagcgccacgccccgggggaagcacagagaagca

SEQ ID NO: 212392 - RNA, 103 nt, Homo sapiens
gacggcggaacccggggccgggacgcagcccggcggcagcaggagaacacgagacccgcacaaaaccccgccccccaggccacacaggggccgagacgggggg

SEQ ID NO: 212393 - RNA, 79 nt, Homo sapiens
gggagaaggaagaggggaaaagacgaaagaggcggacgaacccaaggaggcaggaggaggcccagcccacggcccagcc

SEQ ID NO: 212394 - RNA, 64 nt, Homo sapiens
cggagaccagaggcaccgacgggagagggcccacgaggacggggagaagccgagaacaaggaag

SEQ ID NO: 212395 - RNA, 68 nt, Homo sapiens
ccacggaggccagcgcacgaaaaggcaaaacgacaagaggccacaggggagacaaccccaggacgggc

SEQ ID NO: 212396 - RNA, 70 nt, Homo sapiens
gcaagggggccgaagcaaccaggcgagcacgacaccaccgccggcacccccgaggcggacagcccgggac

SEQ ID NO: 212397 - RNA, 57 nt, Homo sapiens
ccggcccaccaaacagaaacgaggcaaccagggaccaggaggaaggagcggagaggc

SEQ ID NO: 212398 - RNA, 79 nt, Homo sapiens
cagagcccagaccagcagagacacagacgcgggcgggcgaaacgccagcagagacgccgcagggcaagcccaacaagca

SEQ ID NO: 212399 - RNA, 74 nt, Homo sapiens
gaaggaccaagaaccaggagaccaggcccaggaaggaacgaggaagggccagaacggagacggggcgcgccgag

SEQ ID NO: 212400 - RNA, 55 nt, Homo sapiens
aaaccaacccaaaagaaaggagggacaggcaaaggaggggcagcagcaggacagg

SEQ ID NO: 212401 - RNA, 79 nt, Homo sapiens
gggaccgggaggcgggcagccagaaggcaggccgacagcccagagaaccggaaggcagcccaggaaaccagagaaaaac

SEQ ID NO: 212402 - RNA, 79 nt, Homo sapiens
agccgaccaaaccgcggcgaggacggggcgccggcgccgccgcccccgggccgcggccgcaggagagccacccgcacga

SEQ ID NO: 212403 - RNA, 115 nt, Homo sapiens
gcgccaccccaccaagccccccggaccccagcaacgcagaggcaacccagagaaggcaagcagccacaccagcggacagccaccaagaggccagaaggcagaacagcgacacgaa

SEQ ID NO: 212404 - RNA, 84 nt, Homo sapiens
gcggcacccgggcagcccggcggacgcaggagcgaggcagcgaccgaaagccgccagggcaggaccccaaacgggcgaggagac

SEQ ID NO: 212405 - RNA, 75 nt, Homo sapiens
caacgcgcagggcagcggcccccgcccgcagaccgcgcgaaacgcccagaaaccaagaagcagcacgccggaaaa

SEQ ID NO: 212406 - RNA, 80 nt, Homo sapiens
ccaagccagcagccgggcaaggaggggaggcgagaacacgaggaggagaccggaaaccgagagaaacgaagacgaagaaa

SEQ ID NO: 212407 - RNA, 68 nt, Homo sapiens
gaacaccggcagccggaggaccccgcgcccacccaacaaggcaggcgaaacagcaggagagggaagag

SEQ ID NO: 212408 - RNA, 79 nt, Homo sapiens
ggaacaccccacggcccgggccggcgcgggagggcgggaggcccggagcgcccggagccggagaccccgaggcgcgccc

SEQ ID NO: 212409 - RNA, 70 nt, Homo sapiens
aggacccaagagcagcggaaagcagaccacaccaggaaacgagggaaagagcacggaccgcggaagcaag

SEQ ID NO: 212410 - RNA, 40 nt, Homo sapiens
ccgcgccgcgaggagacagaaggcggaggaagggcacgac

SEQ ID NO: 212411 - RNA, 71 nt, Homo sapiens
gaagagaggagggagaacaagcaacggacacaggcggggccggggagcccgggccagaccccccagaccca

SEQ ID NO: 212412 - RNA, 64 nt, Homo sapiens
cccggcgccaggggagccgccacagggacggaaaaggcgcacacgacccggagaaccccacgaa

SEQ ID NO: 212413 - RNA, 77 nt, Homo sapiens
aaacgccgaggaacccggcgaggcggcaggacgcgccgccaggaggaccccccgcggagggagcaccccgagcacgc

SEQ ID NO: 212414 - RNA, 76 nt, Homo sapiens
aaaggaccagacaaaaaagaaagggagcagacaaaacgccaagacagcagaacagagaagaagaaacaaaagacga

SEQ ID NO: 212415 - RNA, 66 nt, Homo sapiens
cggagcccgagggagccggagcgggagccgaaagggggagaagagggagacccgaacgaagacgca

SEQ ID NO: 212416 - RNA, 73 nt, Homo sapiens
cgccccaaggcccgggcaggggaagaaaccacgagggagaaccggagcaacaaagagagaacccacccgcccc

SEQ ID NO: 212417 - RNA, 75 nt, Homo sapiens
ggaggaccaagagagggggaggagcgggcaggagaggagccaagcccaacgggacgggaaaacggccacagccaa

SEQ ID NO: 212418 - RNA, 77 nt, Homo sapiens
agcaacagggcagaaaaccagccccaggaggggacaaaaccccgaaaaaggcacgggccaccagagaacccaggagc

SEQ ID NO: 212419 - RNA, 59 nt, Homo sapiens
gacgccgagagcgagaaacaaagccacccagccaagaagacccccccagcaaaggccag

SEQ ID NO: 212420 - RNA, 71 nt, Homo sapiens
agggaagagaaagcaaacgagcagggcaaggaagcaggaaaaaagaacaagaacgcaaggacaacaaggca

SEQ ID NO: 212421 - RNA, 62 nt, Homo sapiens
cccccgggcggcggcgccagaggaccgcaaaggcgaacaggaagcccggggcggcgacggag

SEQ ID NO: 212422 - RNA, 73 nt, Homo sapiens
cgcgccgcgccgccgcccacaagcggcgccgcgccccggccgcacggggaagacacacccaggaccaaccgaa

SEQ ID NO: 212423 - RNA, 72 nt, Homo sapiens
gcgccgaagcggcggggcggaggaagcggccccgcaggaacggagaaggcgcagccacagccacgcgcacaa

SEQ ID NO: 212424 - RNA, 72 nt, Homo sapiens
cggcagcagcaccgagaaacaaggcaaacaacggacagaggccaaggcagggaagcaccaacgagaacccgc

SEQ ID NO: 212425 - RNA, 56 nt, Homo sapiens
aacaaacagggaaccacgaaagacaacagacaacaggcacaaagagagaaggaaca

SEQ ID NO: 212426 - RNA, 45 nt, Homo sapiens
cacacgcgaggggcaagcccaacacaaggagaagcaaaaagccac

SEQ ID NO: 212427 - RNA, 71 nt, Homo sapiens
cggaacccgggccccgccaaagaagacaagagcagacgagggagaagcgggcaaaacagacaaaggaaaca

SEQ ID NO: 212428 - RNA, 53 nt, Homo sapiens
cccagaaagaggccaaagcaagagggaacagaaagaacagccaaaagagaaag

SEQ ID NO: 212429 - RNA, 78 nt, Homo sapiens
ggaaagaccccacggcaggagccaaaagaaacccccaaaaccggaagaaagagaaggaacagaggacacgcacaccac

SEQ ID NO: 212430 - RNA, 68 nt, Homo sapiens
acaagagaagacgaaaaaaagggaggcgaggagcggggaggaagcaggaaaaaagaacaagaacgcaa

SEQ ID NO: 212431 - RNA, 73 nt, Homo sapiens
gccaggggaagaagggacggcgcaaaccagcaacgaagacggcaccaggcggccaggggaccgccaggcaaag

SEQ ID NO: 212432 - RNA, 65 nt, Homo sapiens
acgcaccgggggagcgggagcgcggaaagagccaaccggaagcaagaagcagagggaaagaaaag

SEQ ID NO: 212433 - RNA, 72 nt, Homo sapiens
ggccaaacaccggagccgccaccacacaagcgccaaccgaggagaacccgcaagaaggccaccagcgcccac

SEQ ID NO: 212434 - RNA, 74 nt, Homo sapiens
gcgggccgcgagcggggcgacccgaggagggcaacaacaagcagagacgcgacaaagaggggggggagaccgga

SEQ ID NO: 212435 - RNA, 71 nt, Homo sapiens
aggagccagggccgagcacgggaaccgccaggagcaaggcagcgacccagggcacagcggggcacagcccc

SEQ ID NO: 212436 - RNA, 81 nt, Homo sapiens
ccgcggccgcgcggcggcgacaagggcagccggaggagggcagaaaggagcaagaggagcgggagaagagggggaccggca

SEQ ID NO: 212437 - RNA, 84 nt, Homo sapiens
ccgccgccgaggaggcccggggagcgaaggagcgcagcaccagagacaaagcaggaggacacaagaagggaggaaaggcggacc

SEQ ID NO: 212438 - RNA, 52 nt, Homo sapiens
cgcagggcgcccccgggccggagcgagggagagcaggaacacagagaggagg

SEQ ID NO: 212439 - RNA, 74 nt, Homo sapiens
agcggcgagaccagaccaggacaaagacaacaggcacaaagagagaaggaacacccacagggcagacagagaaa

SEQ ID NO: 212440 - RNA, 72 nt, Homo sapiens
aaccagagggagcgcaagccggcagccagccgagacggccaccccccggccaaacccagacgcaaccacccc

SEQ ID NO: 212441 - RNA, 68 nt, Homo sapiens
aaaggagaggcagacaacacacacgcagaagaagcagacacaggccggacagacacgcaaaaagaaga

SEQ ID NO: 212442 - RNA, 75 nt, Homo sapiens
accgccaccaaaaacaaagaggagagaagaaacaacggacacccccgggaacccaccaaaaaggacaccgaaaga

SEQ ID NO: 212443 - RNA, 81 nt, Homo sapiens
ggacaacagacccgggggagacgccgccaagaaaggccaaagaagagacgaagcaaaggcgcccggagccccagaaccgaa

SEQ ID NO: 212444 - RNA, 86 nt, Homo sapiens
aaccagagaagggaaacgacacgagcaaaaacggggaggagaaccaggaccaaagcaccagcacagaagggaagaacgccaaagga

SEQ ID NO: 212445 - RNA, 82 nt, Homo sapiens
gcacccggcacgccccgccagaccacgggagaacaaaccaagaagcacaggcagggaacaggaagaaggcacaagaagaaag

SEQ ID NO: 212446 - RNA, 74 nt, Homo sapiens
cccaggcgccgcggggagggcgggcccgggcagccgcgggcgcaaagacgcaggaagccgggccccgaggaccg

SEQ ID NO: 212447 - RNA, 55 nt, Homo sapiens
agccgacccacgacagcaacggcgcaaaggaacagagacagacccgggggccccc

SEQ ID NO: 212448 - RNA, 82 nt, Homo sapiens
agcgcagaagggacggagcccagccgaggaccgcgaagaggaacaaggggccgccagagcaagaaccaggcacggagaagga

SEQ ID NO: 212449 - RNA, 84 nt, Homo sapiens
agcggacgagcggagaaggccacaccacgcagaacgcaacaccaaggcacaccaccccagggcaagaaagccagagcccgaacg

SEQ ID NO: 212450 - RNA, 78 nt, Homo sapiens
gacagcaagagcgcaccccgcggagcaccaggcagaaaaagcaggccgaggaggccacacagacaaccacacccagaa

SEQ ID NO: 212451 - RNA, 80 nt, Homo sapiens
gggcccaccaacgggcaacacggccagaaccggcccgcaggggcgacagagcgaaagaaacgagccaggccaagacggga

SEQ ID NO: 212452 - RNA, 78 nt, Homo sapiens
gagaaagaagagccagccaccaacaggccccagcgcagccagcagggaacgagcgggcgcccgcacacacccgccacc

SEQ ID NO: 212453 - RNA, 66 nt, Homo sapiens
gaacaaagagaagacacaccaccacgccaaggaagccagcagaccgcagaacggccccgggaccca

SEQ ID NO: 212454 - RNA, 71 nt, Homo sapiens
cgcgagaggagcgagggcccagcggaaaaaagagcccagggccgccggggccaacagggcaacaaggaccc

SEQ ID NO: 212455 - RNA, 74 nt, Homo sapiens
cacggcgcgggagcaagagacagggaaggccagcaagacgcaggccacggggccagcgggggccgccagcacga

SEQ ID NO: 212456 - RNA, 51 nt, Homo sapiens
gcgggcccgccaggggcgaagggagccagggaacaggagcgaggccccgga

SEQ ID NO: 212457 - RNA, 78 nt, Homo sapiens
ggagaacaccgcccaccccaggccgcagagaaaaaggcacaaacccagcacagagaagacggcgacaagcaaaagacg

SEQ ID NO: 212458 - RNA, 84 nt, Homo sapiens
agcacagggcaagacccaacgccaaaaggcaaggccgccaggccaaacagcgcaggcccgaaggcagacgggacgacacaaccc

SEQ ID NO: 212459 - RNA, 82 nt, Homo sapiens
caaggcgggggagccacccccggggggggcgccaggggccgcccgaccaagggaacggaagccccagcccgcgcgagccagg

SEQ ID NO: 212460 - RNA, 86 nt, Homo sapiens
cgccagaaggcgccgggcagaggaccggaggccgggaagccaacgaccacacgcaaacgaagcgcgcggcaggcgcgcgccgcccc

SEQ ID NO: 212461 - RNA, 85 nt, Homo sapiens
gcggagcgaaggaagggggcccaggggggccaggcgacgaaacagagagacaaacaggccagccaaggaaccgaaccagccacga

SEQ ID NO: 212462 - RNA, 75 nt, Homo sapiens
cccaagagcacagccggaagaggcagccccaaaacccagagggagccagggaaaccccagaccaacaaccagaga

SEQ ID NO: 212463 - RNA, 38 nt, Homo sapiens
ccaaggccaaccaagaagacaaaggaccagggaagaac

SEQ ID NO: 212464 - RNA, 76 nt, Homo sapiens
cccagaagagaagagaagaagaagcaaaaaaggaacacagcacaaaacaaccagccgaaaacggaaaaggaagcca

SEQ ID NO: 212465 - RNA, 75 nt, Homo sapiens
agcagaacagccccgcggcccggggagaagggaaacaccgccaagccccacccggacccaagcccggggcggggg

SEQ ID NO: 212466 - RNA, 82 nt, Homo sapiens
ccgggcgccccgcagccccccaacaccgcccgccaggacgacggcgaaaagccaggagcaaaagacgagcgcgacgccacca

SEQ ID NO: 212467 - RNA, 83 nt, Homo sapiens
gaccagccaccacggagaacacaccgaagccagaggaggagaccccgaccaagaaaggcacaggaacagaaggacaggaagca

SEQ ID NO: 212468 - RNA, 82 nt, Homo sapiens
cgacaggcgcgacggcagccacaggggcagcgggggggcgaagagccggcagcgcccgagggagcaaggagaagagcggaac

SEQ ID NO: 212469 - RNA, 55 nt, Homo sapiens
gagcccagggggcacgcggaaacgggaagaaaacacgaagaaacgcaggagccca

SEQ ID NO: 212470 - RNA, 76 nt, Homo sapiens
ccccgggcacaaagaacccgaaagacaagccagcagaggagcgacacaggggagcacgccagacacccagaaccac

SEQ ID NO: 212471 - RNA, 71 nt, Homo sapiens
ggagaagcagcgcggaaaagcagaagaccggagagaacagaaaaaaagcggcccgggaccaggaaagacag

SEQ ID NO: 212472 - RNA, 75 nt, Homo sapiens
ggccgcccgcccaggggcagcggaacgcgccgacgccgcaaccagcaccccgaggagcggaaccagaccgccggg

SEQ ID NO: 212473 - RNA, 62 nt, Homo sapiens
caagccggcgaagccacggcgggacaggaagccacaccgggcccagcaaccggcgcagacaa

SEQ ID NO: 212474 - RNA, 69 nt, Homo sapiens
caggcccaccagggaacggccccggaagacagcacacaccaagcccgaaggcacgaacggagcagcccc

SEQ ID NO: 212475 - RNA, 75 nt, Homo sapiens
gccagagaaaaccacagagagcagcggagacccaagcaccggcccagaggaagaagaaccgcagagaggaaaggc

SEQ ID NO: 212476 - RNA, 72 nt, Homo sapiens
gaagggcaccagcgccgcggcggcgggcaagggcccacacaggacccgaacacggaagaaagacacgcagga

SEQ ID NO: 212477 - RNA, 88 nt, Homo sapiens
aaccgagcaacagggaagcagaggagaaccgggagccacagaaaagaagcagagggaagagccagacagcgccaaccacgcacagcac

SEQ ID NO: 212478 - RNA, 72 nt, Homo sapiens
cccgcgcagcggcccggcggggcccggcaccaggaccaccgcggcagcacgcggcggaaaccccacgcccga

SEQ ID NO: 212479 - RNA, 80 nt, Homo sapiens
cagcacacagaggagagcgacgagaagacgcaaacagcagacggaagaccccacggcaaaaccacacccgaggcgagccc

SEQ ID NO: 212480 - RNA, 84 nt, Homo sapiens
gagcgccaaggacggcagccggaacgggcaacccagccgaggggaccagcggcagagcacgggagccagggcagaaacccccac

SEQ ID NO: 212481 - RNA, 66 nt, Homo sapiens
aagaacaagcgcaaagaacagaaggaagaaaccaaacgaaacacaacgaccaacgggaagcggaaa

SEQ ID NO: 212482 - RNA, 121 nt, Homo sapiens
gccaggaagacacaggagccacccagccagaacagagagcacagaagcaaccacaacaaggaaagccccgcccacccgcgaccggcaagccaggagacgacaacggagccggacacagcac

SEQ ID NO: 212483 - RNA, 81 nt, Homo sapiens
ccgggcacggggggcgcgcggagcaccagagacgagacagcgcagaggagccaaagccaccgcccagcccagacaagcccc

SEQ ID NO: 212484 - RNA, 82 nt, Homo sapiens
cgggcacagcgccagccgggcacaacgcacggaaggagaggaacaacgaaaaacaggaaagacggccgaaacgaaaaaacaa

SEQ ID NO: 212485 - RNA, 58 nt, Homo sapiens
aaagggccaaagaagggagagagggacacggccaacacgggaaggaaaagcgggagga

SEQ ID NO: 212486 - RNA, 67 nt, Homo sapiens
gaccgaaccgaaccgaggcaaaagaaaggcagccaccggcaggggagcgcagcggccagggcaggac

SEQ ID NO: 212487 - RNA, 79 nt, Homo sapiens
aaccccgccgggccgggcggccgccgcccgcggagggaagcgccccccacagggggagaggcaccagcaacagaccaac

SEQ ID NO: 212488 - RNA, 82 nt, Homo sapiens
gaaaaagcaaacgaccagacggcagggaggcacaaaggggaacacaggccagagggcccaaagcggagaggcacgagcacag

SEQ ID NO: 212489 - RNA, 97 nt, Homo sapiens
agcgaacgaagagcaccgggagcggcgaagaggcaccggaggaggcaaaagcagaccggaaaacccaccggcaagaccacacccgaggggagcccag

SEQ ID NO: 212490 - RNA, 77 nt, Homo sapiens
ggacaacgggccgggcaagacaacggaaggcaagaagaccgcaagaaaccaccaaagcaggcaccagccaggagccc

SEQ ID NO: 212491 - RNA, 75 nt, Homo sapiens
ggagcgcaacgagaacggagccggaagaaggagaggcagagaacacaaaggcccagcaagagaacaagcaggacg

SEQ ID NO: 212492 - RNA, 80 nt, Homo sapiens
gcgaggcaccggagacccgagcaccccaacgggcagacgggcggcagagaagagaagagcacagcgggaggaaagggaga

SEQ ID NO: 212493 - RNA, 78 nt, Homo sapiens
gcggacgccgcagagcgccgaggaggcccgcggggcaaccgccacgagacaccaaggggccacacgcggacccggagg

SEQ ID NO: 212494 - RNA, 66 nt, Homo sapiens
gagaaggcaaagcaggcggagagaggcgcaaaggagcggcagcccacaagcaggaagaccagcccc

SEQ ID NO: 212495 - RNA, 64 nt, Homo sapiens
gaaagcccacagagacacaaccggagcccagagccacgcaaagagggagcaacaacaaggagca

SEQ ID NO: 212496 - RNA, 69 nt, Homo sapiens
agaaaacaacgaagaaaaaagcgcgcaccaggaagaaacggaccaggcagacgaccaaggagcaggcgg

SEQ ID NO: 212497 - RNA, 74 nt, Homo sapiens
gaagaaccagaggaacgggacaaagcggccagggagcacagaagaaaaccggaggaggacccgccagaggaccc

SEQ ID NO: 212498 - RNA, 82 nt, Homo sapiens
ggacgccgccggcgcgcccgcaaagagaggaggacggaagaaagaccccaaaaaagaaagacccacacagcaaggagaagag

SEQ ID NO: 212499 - RNA, 81 nt, Homo sapiens
ggcagcaaagacagaaggcgggaagacgccgaggacgggcacacggcagaaggaaccaaagcaaacgacagcccagagaga

SEQ ID NO: 212500 - RNA, 65 nt, Homo sapiens
caggaccagcccaaccacccaacgggcccgggcaagcacaacggggcaggcccggacccaggggc

SEQ ID NO: 212501 - RNA, 78 nt, Homo sapiens
cggggccggacagccgcgcgcgagggccggggcgggcgccgcgggacccccgggccagggacaggagagacaacggag

SEQ ID NO: 212502 - RNA, 79 nt, Homo sapiens
aggaaagcagcccgaaaaagacgcgagaagccacacggaacgcaagcacaggaccagaaacgaaaggcagcagaagagg

SEQ ID NO: 212503 - RNA, 81 nt, Homo sapiens
ccaggagagcccgcacaagccccaccgagggccgcccgccacccaagagaagcgggagggaaaagcgaagacgcagccaag

SEQ ID NO: 212504 - RNA, 39 nt, Homo sapiens
gccccaaccacagcccgcaagacgccacacacagaacga

SEQ ID NO: 212505 - RNA, 83 nt, Homo sapiens
aggcacaagaagaccaaggaagcggcccaagaaacaaagccggaagaacaaaaagcgacaggaagaggcacaacaaagaaaag

SEQ ID NO: 212506 - RNA, 73 nt, Homo sapiens
agggggggcgaaaggaaacccagcaggagaacaaagccaccgaaaacaggaaaaaagcccgaacaagaaaagg

SEQ ID NO: 212507 - RNA, 72 nt, Homo sapiens
aaggaccccgccaaaggacccaaagacaggaccacgcaccagcagagaaggaaagcaaaccgaagcaggcgg

SEQ ID NO: 212508 - RNA, 81 nt, Homo sapiens
cccccagccaagagcaggcagggagaaggaaggcaggcagcaggcaggcgccggaggaccacagcagagaggcagaggagc

SEQ ID NO: 212509 - RNA, 81 nt, Homo sapiens
gcaggaccagaggcgagagggccccagccgggccagaagcagggaaacccagacgacaaggaaggccaagggacccacgac

SEQ ID NO: 212510 - RNA, 73 nt, Homo sapiens
gaaggcggacggacacagacaccaagggaggccacagagacaagagagagaggcagggcagcaccagagcaaa

SEQ ID NO: 212511 - RNA, 90 nt, Homo sapiens
gacaagacgaccacacggaaaagccagagccggaggcccacgaaaccaaaaggccaagaacccaaagcaaggcgagacaaggggccaacc

SEQ ID NO: 212512 - RNA, 86 nt, Homo sapiens
acgcccggccaagaagcacggcacgcagaaaagcgagccacccgcgccccgacgagcggaacaaccgagaccgggagaagcccgcc

SEQ ID NO: 212513 - RNA, 70 nt, Homo sapiens
gggaaggaccagacggggacgcacacggaagaaacgcaacccagcccacacgcagccacgcacagccaaa

SEQ ID NO: 212514 - RNA, 83 nt, Homo sapiens
caaggcaccaacaccaccagggggaccggccccaggaccggaggggaacagcagcgaaaggccgggcaacggcggagcagagc

SEQ ID NO: 212515 - RNA, 73 nt, Homo sapiens
ccacggaggggcgaccgccgaccacccggaagggggaaggcgagcgaggacaggccgccgccaccgccagagc

SEQ ID NO: 212516 - RNA, 49 nt, Homo sapiens
caagaaggacgggaccgggggagcggccgaggacaagcacaagcagcac

SEQ ID NO: 212517 - RNA, 76 nt, Homo sapiens
gaggagacggagcgcagcggcacgcacgcgaagacagcggcagccaacacagcacccggcagcggcagccccagcc

SEQ ID NO: 212518 - RNA, 75 nt, Homo sapiens
gcccacgcccacgcccccgcgccggagccccgggccaggaaggacaacccgggggacgccgccacgaagaagaga

SEQ ID NO: 212519 - RNA, 59 nt, Homo sapiens
cgcaggacggaacaaggacagaaggaacaaggggagaacggacagcaggccgaccccaa

SEQ ID NO: 212520 - RNA, 72 nt, Homo sapiens
accgaggccccgcgcgggacccgaccccagaccagcacacaaacaaggccagaggaaggcgcgaggcaccaa

SEQ ID NO: 212521 - RNA, 73 nt, Homo sapiens
cggcccccgcgagccgcgcgcccagccaggggacaccagggggggagccgcacgacccgaacgccagagacaa

SEQ ID NO: 212522 - RNA, 43 nt, Homo sapiens
aaggggagggcagcagcccaggccgagcaggagcccgcgggcc

SEQ ID NO: 212523 - RNA, 63 nt, Homo sapiens
caaaacgccaggcggaccagaaggccagcaaagagaaaaaggagagacaaacaggcagaagaa

SEQ ID NO: 212524 - RNA, 60 nt, Homo sapiens
agaaggcagggcaaaccagaaagacgcggagaagcgacggaggagggggggaggacagcc

SEQ ID NO: 212525 - RNA, 71 nt, Homo sapiens
gcacccccaggggaagacgagccaccgaggcacagaacggcagcgcggagggggccgcacggaggacacgc

SEQ ID NO: 212526 - RNA, 66 nt, Homo sapiens
cggcgaccgccaagaaaggcagcgaggggagagcgaagaggccccaggaccggcgaggcccccccc

SEQ ID NO: 212527 - RNA, 71 nt, Homo sapiens
ccacaagcggaccacagggagagccagaccaagaaccgacacaccgggccccagcacccagcccccacaac

SEQ ID NO: 212528 - RNA, 74 nt, Homo sapiens
agccgcaacagccggcaagaccgcaggccccacaccacccccggggacagcccaccacaagcaggccccaagcc

SEQ ID NO: 212529 - RNA, 82 nt, Homo sapiens
gcagcgcgggacccagcccaggcggcgcggacggggcggagcaccaaccaaagcgcaagaaccaacgcacagggaaggaggg

SEQ ID NO: 212530 - RNA, 76 nt, Homo sapiens
acagaaggacgggagaacaccccacagggaagaggacacgcacagaacccaaagcccaagagggccccagggaccc

SEQ ID NO: 212531 - RNA, 62 nt, Homo sapiens
gcccgcggacgccaggggccagacccacaccacagcaccgggaagccagcagcggcagaggg

SEQ ID NO: 212532 - RNA, 63 nt, Homo sapiens
aggaaacggcaccggaaaagaacgcagcccaggaggaggaaaaccggaggacaacgaagccgg

SEQ ID NO: 212533 - RNA, 72 nt, Homo sapiens
agggaagaaaggcagaagagccggcacccgagaccccgacagagggccaggccgcagcggcccaagaccacc

SEQ ID NO: 212534 - RNA, 67 nt, Homo sapiens
caaggggaacgccacggacggggacccaagcggccaccagccagaaacccacggcggaaccaccaga

SEQ ID NO: 212535 - RNA, 67 nt, Homo sapiens
ccacaggaaaaggccagaaccaagcagagggacacagaaagacagaacgcgggagagaacacaaccg

SEQ ID NO: 212536 - RNA, 78 nt, Homo sapiens
aagaccaaaaagaaaagaagggcgggcccagccagacaccagaagaagccgacggcaaccgaaccgccaggaaaggca

SEQ ID NO: 212537 - RNA, 51 nt, Homo sapiens
gggcagagcaaaccacccccaagggcaggaagaaccaggaaagccgcgaag

SEQ ID NO: 212538 - RNA, 75 nt, Homo sapiens
gggacacaccagcagagggagaagaaggaagccaacccacagcggaagacagagaaggaggagccaggcagaggg

SEQ ID NO: 212539 - RNA, 84 nt, Homo sapiens
gcagggggcaaacaagccgaccggaaaaagcgccacgcagagccccgccaggaagacacgccggggaacgaagcagaagacgga

SEQ ID NO: 212540 - RNA, 74 nt, Homo sapiens
agaaccgaaaacaccagcagaagcaccaggagacaaagccacaaaaacaccagaaaaaccaagcagaaaaggag

SEQ ID NO: 212541 - RNA, 71 nt, Homo sapiens
gaaaacacggaaacacccaacaaggaagcgacaaggcaaaacggacaacgagaacggcaacgggggccaac

SEQ ID NO: 212542 - RNA, 69 nt, Homo sapiens
cgcgaggcacagggagagaaagggggcgcacaaggaggaaagcgcagaccaggccggaaaaaccccgaa

SEQ ID NO: 212543 - RNA, 38 nt, Homo sapiens
agcccaacgcacgccagaaagcaagcacgcagagaaga

SEQ ID NO: 212544 - RNA, 73 nt, Homo sapiens
ggaaacggaggaacacaaccagggagcggggaggagaaggggagccaggaagcaggaacgacgccaccagacg

SEQ ID NO: 212545 - RNA, 79 nt, Homo sapiens
caaggacccccagaaaaaaaaggaccaaagagagaacacaacagccagccggcccggccggacgaaagaagcaccaggg

SEQ ID NO: 212546 - RNA, 70 nt, Homo sapiens
ccccaccagaaccagccacgcgccaacaccacgcaagccaccccaagccagcaacgaagcaggaaaccga

SEQ ID NO: 212547 - RNA, 68 nt, Homo sapiens
agggcgcccccggcaaagggaacggaaacaagaagcgaacagggccgaacgaagcgcccacgggagcc

SEQ ID NO: 212548 - RNA, 81 nt, Homo sapiens
gaaggacagccccgcgcgggacccggggcgccacgggggccagaagcagggacgcggcgcggcagccagccccccaccgaa

SEQ ID NO: 212549 - RNA, 51 nt, Homo sapiens
gcggggccaggaccacacaggaaacgcaggccaacaaaacgagcaaaaggg

SEQ ID NO: 212550 - RNA, 66 nt, Homo sapiens
ggacgagaggggacgccaccccggcgcaggaacacaggacggccgaacacgacgcacacagaaaca

SEQ ID NO: 212551 - RNA, 66 nt, Homo sapiens
acaaccaccagccaaacaagaaccaaaaccaaaggaaaagggaccagaaaaggaaagagcacagaa

SEQ ID NO: 212552 - RNA, 54 nt, Homo sapiens
cggaaggacaacagcccgacaaccagaagacaggccagaaacccagaaagaaag

SEQ ID NO: 212553 - RNA, 40 nt, Homo sapiens
gcgaacaaggcgacaacacagaaacgaaggaggcccaacc

SEQ ID NO: 212554 - RNA, 66 nt, Homo sapiens
ccgccgcgcccgcccgacccgccaccgccaggccaggcaaccagacacacaaccaccagaaggaga

SEQ ID NO: 212555 - RNA, 82 nt, Homo sapiens
cgaaggcccgcaagcgcaacgaaaccacggacgggccccaagcgacaagggcggggcaaccaaggaaaagacaagacacggg

SEQ ID NO: 212556 - RNA, 69 nt, Homo sapiens
acccacggacaagaaccaagagcagaacccggcacgacgacggagagaggaagaagacggggcggcacc

SEQ ID NO: 212557 - RNA, 77 nt, Homo sapiens
aggggaccagccacaggaggcggccgcacaaagggcggcgacggcggcgcgaggaccgaccgggcccgcggacgaag

SEQ ID NO: 212558 - RNA, 67 nt, Homo sapiens
gaagcaaagcgaagcaccacacagcaaagcgacagaaaagccgaggcgacgggccacacgaacccag

SEQ ID NO: 212559 - RNA, 82 nt, Homo sapiens
gcgaagcaagcagacgaggcacacgcagcaggcggacgggccggcgcagcaggaggaggggcacccggccgccgccagggca

SEQ ID NO: 212560 - RNA, 71 nt, Homo sapiens
accgcacaagaccgggaggggccgcccgcgcgcccccacaggaagccggagggcgccgacccgaaccccac

SEQ ID NO: 212561 - RNA, 76 nt, Homo sapiens
gcaagagaccagggaagcagcaccacggggagacaagcaagacagcgcccgcgccgaccccacggacgggccagcg

SEQ ID NO: 212562 - RNA, 69 nt, Homo sapiens
gaccaaaaagaagcaaaaccacgccagaaccgcaaagaagaacaccaagaaccaggccgaggaaggcgg

SEQ ID NO: 212563 - RNA, 80 nt, Homo sapiens
aaaaaaagaaagaaaacacaggcggggacggcccgcccgcacggcaaagcaaagaagagccgcgcagaacagaaggacag

SEQ ID NO: 212564 - RNA, 78 nt, Homo sapiens
gccaccaaaacgccaggcagaaagacggaccgccaccagaaccacacgggagcgaaaagacaagcggcagggaaacag

SEQ ID NO: 212565 - RNA, 70 nt, Homo sapiens
cccaaaaagccaccgaggaccacacggagaaaacgggaaacggaaaaagagcgcagaggaaggccagcaa

SEQ ID NO: 212566 - RNA, 72 nt, Homo sapiens
gcccacgcagaacccgggagaggagaccagaacgaacccccccccccgggccagccggaaggaaagaccagc

SEQ ID NO: 212567 - RNA, 100 nt, Homo sapiens
cgcaccccagacaggaacaaaggcagcggaggcacggacaccacacacacacagcggcggagggcggcggccccaccccgggcgggacaggaggaagccg

SEQ ID NO: 212568 - RNA, 47 nt, Homo sapiens
caccgaagacgcacgccaagacagccaaaagcaggccggcaccggag

SEQ ID NO: 212569 - RNA, 76 nt, Homo sapiens
cggcaacccacacaagcgaaggcgcgcaccggaagcaccagcgaggaagcaccgcacccacaaagccaagagacaa

SEQ ID NO: 212570 - RNA, 82 nt, Homo sapiens
agcccagaaggcggcgaccgggcgcgggcaaggcggaaagcaacccaccacaagacaaagaccaccaggacacgaaagcaag

SEQ ID NO: 212571 - RNA, 71 nt, Homo sapiens
aaacggcaccagacaaggaaaggagcccgagcaggaagacagaagagcgaaaagcaggaacaagcaggaac

SEQ ID NO: 212572 - RNA, 74 nt, Homo sapiens
acagccggaaccgcaccagaggagaaccgcccacgagagagaaccagccgagggggggccgcccgcccaaggca

SEQ ID NO: 212573 - RNA, 77 nt, Homo sapiens
agaaaaggcccggggcccgggacgagggaaggaaccaaaaacaggaagaagaaagacagaagagagcagagagaaaa

SEQ ID NO: 212574 - RNA, 69 nt, Homo sapiens
cgaccacgacaaggagccagggccccgaggacccagaaaggccagcagcagcgaggccccgccagcgac

SEQ ID NO: 212575 - RNA, 73 nt, Homo sapiens
ccccagcaaaggaaagggaccgaaaccgcaaggcccaccccgacccaaggagaagccggggaaaacccgcccc

SEQ ID NO: 212576 - RNA, 64 nt, Homo sapiens
ccacaccgggcgccccaggcgcaaaacccgagaaagggcaacccggcggagaaaccaccacaaa

SEQ ID NO: 212577 - RNA, 75 nt, Homo sapiens
cggcaggcgcccggacacagaagaggacagacaaacccagaaaggaggaacccaagagggacagaaaaaaaccaa

SEQ ID NO: 212578 - RNA, 72 nt, Homo sapiens
caggagccaggcccaaggcagacgagaccggagaaggaaagacaagccgagagagggaggcccgaggaagag

SEQ ID NO: 212579 - RNA, 62 nt, Homo sapiens
gcccggagcccggaccggcggcagcggacggagccccggcgagcacaggaagccggagaacc

SEQ ID NO: 212580 - RNA, 81 nt, Homo sapiens
ccagggggacgggaggccaagacaggcggggaccaagagaagagcagaggaccagcaccgccgagacacgcacacaccgca

SEQ ID NO: 212581 - RNA, 61 nt, Homo sapiens
cccccaaaggcgggagacagggaggggaggccaccggcgcgacgccaccccaaagaccagc

SEQ ID NO: 212582 - RNA, 73 nt, Homo sapiens
agcaaacggagccgaagaccaaagagaaagagcacaagcccgggggaaaggcagcgcgcagcagcggcacaca

SEQ ID NO: 212583 - RNA, 72 nt, Homo sapiens
aaaagcaaagcaaacacaaggagcagagcagccaaaggcagggaagaaaaagaagacaccagagaaacacga

SEQ ID NO: 212584 - RNA, 70 nt, Homo sapiens
cggaaaaccggccgcgggccccagaccaaagaaacgcgacagagccgcgcaagaccgcagagaagaacac

SEQ ID NO: 212585 - RNA, 38 nt, Homo sapiens
gagcagaggacgaccgaaggaaagagaagagaagaagg

SEQ ID NO: 212586 - RNA, 72 nt, Homo sapiens
cgcggcgaagcaaaggaacgcgccggaagaaaaggccgaccgcaaacaagcaagagaaaaaaacaagaagag

SEQ ID NO: 212587 - RNA, 81 nt, Homo sapiens
ccccaagagcgggaccacaggccaacgagaaccgacaagagcacgaaggaagaaaggggaggacgaccaggacgcccaggc

SEQ ID NO: 212588 - RNA, 64 nt, Homo sapiens
aacggcacagccccagcaacaccccgcagccgcgcaaaaaaaggaaacacaagaccggaggcca

SEQ ID NO: 212589 - RNA, 74 nt, Homo sapiens
ccagccaccacgcggcgcacaacgcaggaacaccgcacgcgcggaggagcgcgggggcgcggagggccccccaa

SEQ ID NO: 212590 - RNA, 81 nt, Homo sapiens
gccccgccgcccccgccgccgcggacccaggggcgcccacgccaggcacgcagcacgggggcaggggccgacccagaacgc

SEQ ID NO: 212591 - RNA, 76 nt, Homo sapiens
cggccgggcaaggcccggcgccggcgacgaccgccccgcgcagcggccccggcgggaaaagagcaccggccagcag

SEQ ID NO: 212592 - RNA, 56 nt, Homo sapiens
ggcgaagcaaaagcgaaaaaccccaagcagacagcaaagcagccagagaaacagaa

SEQ ID NO: 212593 - RNA, 76 nt, Homo sapiens
agaagaggccagaaaccgcccggagcacgaccgaggcggacaagaaaagcgaaccccagcacgccgcagcaccgga

SEQ ID NO: 212594 - RNA, 77 nt, Homo sapiens
gccgccggcccccaacagcgccgacgaaacagagcaaagcccgggcgggccggagggagagaagggccacaaggcaa

SEQ ID NO: 212595 - RNA, 68 nt, Homo sapiens
agggcgaggcccgcccgcccgaggagggagcccggcccgggggccgcaggggggaagaggaagaagca

SEQ ID NO: 212596 - RNA, 83 nt, Homo sapiens
agaaaggggacacggaaggcggcggaggccggggaaaaccaagacaggaggacacccaggcagacgggaggaagaagaggagg

SEQ ID NO: 212597 - RNA, 75 nt, Homo sapiens
gaccacaaaaaagagacccacagccagcaacaccaagacccagccaggacgcacaaaggacggacccaaagaacc

SEQ ID NO: 212598 - RNA, 79 nt, Homo sapiens
gccagcccacccaaaaagacccagcggagcaggaagcgggaaaccacaaaggaagacccacaggaccgcgaacaaggag

SEQ ID NO: 212599 - RNA, 74 nt, Homo sapiens
gagacaaccagggacaccgaaagcagcgacgggcaggccggagagcagcgggcaaggcgagcggccaagggccg

SEQ ID NO: 212600 - RNA, 62 nt, Homo sapiens
acggccgggcgagcggcacagccacgccaagcaggagaaggaccaaaaggaacgagacggaa

SEQ ID NO: 212601 - RNA, 83 nt, Homo sapiens
gaagaagggccacagcagacaaaggaaaacgaccaggccaggaaaaagcagccggcacccgcacaacccagggggccgaaccc

SEQ ID NO: 212602 - RNA, 101 nt, Homo sapiens
ggccccagcagacgcaggcagccccaaagccgaacaggcagggccagacccagaacgaagcgcgcggcaggcgcgcgccgccccaggccgcaagacccagc

SEQ ID NO: 212603 - RNA, 76 nt, Homo sapiens
gcggcaacgcgcagcggagggacacggaccgaagggggaaacaccccgagccgaggccgacaagagaacccccacc

SEQ ID NO: 212604 - RNA, 81 nt, Homo sapiens
aaggacgagaccacggaaaccaccgagggggaagaccgcaggggggaagccagcgggcccgagagcggagaaggagagcgg

SEQ ID NO: 212605 - RNA, 73 nt, Homo sapiens
ggagcgcagcagcccaccgcgcaggccacgaaaccccggaacgaagaggcaggaacgaaccaacgcaggacca

SEQ ID NO: 212606 - RNA, 77 nt, Homo sapiens
cgcccccagcagcccaaggacccacccaggcccgccagccccgccggacagcgagagaacgccagcgagggaaagcg

SEQ ID NO: 212607 - RNA, 80 nt, Homo sapiens
ggacgcacggggcaggcgcgccccccggggcccaggccgccggcccggacgggcagcggggaagaagaaaaggaaccgag

SEQ ID NO: 212608 - RNA, 78 nt, Homo sapiens
gcacgaacacccaaagccaaagacagggaccagaaaagaaacggccaccgaagaaaaaacaaacacgaaaaacaaaaa

SEQ ID NO: 212609 - RNA, 76 nt, Homo sapiens
gaaagaccggcagcccacggggcccgcgaagccgggggagcacccagaacagcagcaaggcaagaaaggcaaggga

SEQ ID NO: 212610 - RNA, 72 nt, Homo sapiens
ccacccaggcccaagaagaagccgaggccgccagcgccaagaaaaaaacaaggccaaagccagccccagaaa

SEQ ID NO: 212611 - RNA, 107 nt, Homo sapiens
aggacgggaccaggcgaagcggccgagcaggcgagcgaacgacggcccgggcaggacggggcggggaccaggagaggcgccaccgcccggaccgggggggggcagga

SEQ ID NO: 212612 - RNA, 61 nt, Homo sapiens
cccagccacccacaaacagagagaaggaaccacccacgcaggcaggcaagcccaaggggaa

SEQ ID NO: 212613 - RNA, 81 nt, Homo sapiens
cggacacccagcggcgacacgcgacgcgccaaaacccgcccggaaaggggacaccggccagcaccaaggggaggggaagcc

SEQ ID NO: 212614 - RNA, 82 nt, Homo sapiens
gcggccaggggacacaccaaggcacaaagcccggaggccgacggggaaaaccacaggaccaaagaacagaaaacaccaacac

SEQ ID NO: 212615 - RNA, 80 nt, Homo sapiens
aagccacaaccacaaaaaggaaagcagagaaggagaagaagggaccagccgaggccgccggagccccagacaccccccac

SEQ ID NO: 212616 - RNA, 80 nt, Homo sapiens
ccagcaacccagacgcccacaggacaacacccggaggagaagaggcgcggaacaagcgggagagcaaggaaagcgaagag

SEQ ID NO: 212617 - RNA, 74 nt, Homo sapiens
gcaggaacacagcccagaaggggcaaaggacccgaagacacccaggggaagagggaacaccccaaagagaagaa

SEQ ID NO: 212618 - RNA, 77 nt, Homo sapiens
gcgccaccgcaccgccaccggcccgacccaggggggccccagcccggccgaacgggcgcacgacacaaacacaaccg

SEQ ID NO: 212619 - RNA, 83 nt, Homo sapiens
gcccgccgcgccaggcccgaagaccccggcacagggcggaaaacaccccaaaagccaaaagggaaaggaaaagaccaacaaca

SEQ ID NO: 212620 - RNA, 84 nt, Homo sapiens
cagcaacagaagagaggccagccgggaggacacacaagcggccggccccagcaaaccagcaggagcgaccacacacaaagccca

SEQ ID NO: 212621 - RNA, 64 nt, Homo sapiens
ccggcagaagggaagccaaaggaagcacaagaaaggagaagacaaaaccgcggagcgcaagggg

SEQ ID NO: 212622 - RNA, 67 nt, Homo sapiens
cccggggacccccgacgccaggcagcgcccccaaacgccccacccaagaagagcgaggcgggacaaa

SEQ ID NO: 212623 - RNA, 73 nt, Homo sapiens
cgcacgcagcagcgaccagaagcaaggcacagcaagcaacccggccgaggggggcaccccgggaggaagcaac

SEQ ID NO: 212624 - RNA, 57 nt, Homo sapiens
ccggagacccagacaacacaggaacagagccgacaggcacgaagaaaaggaaaaccc

SEQ ID NO: 212625 - RNA, 76 nt, Homo sapiens
ccccaggcccaggagacggagagggacaggagagagggcaagagacgacaagcagagagaacaccagggcaggaac

SEQ ID NO: 212626 - RNA, 78 nt, Homo sapiens
cgccgcggaccagaggcgccgagcacgcagggagaagcacaccgccagagacaaagacacaggaagaagagggggaag

SEQ ID NO: 212627 - RNA, 76 nt, Homo sapiens
aaaacaccgaagcgacagcaaccaaggaacaagagagcaagaggacaccccgcagggacagcggggaaagaacagg

SEQ ID NO: 212628 - RNA, 66 nt, Homo sapiens
ggcccgggggcggcggccacgccaaggacggaaaaggcacggacgccacaggacgaagacggaaga

SEQ ID NO: 212629 - RNA, 85 nt, Homo sapiens
agccgggcccgcgcgcccggccaagaggcaaaggggaggacgcagcaaaccaccagaagggcggaaaacaccccaaaagccaaaa

SEQ ID NO: 212630 - RNA, 78 nt, Homo sapiens
acccaagggaccccagcggaacgagaacgagcgagcaaaaagaaccgccgagggggccgagacagacgcccaaaggac

SEQ ID NO: 212631 - RNA, 80 nt, Homo sapiens
cgggccgggagacgccagcggccggccggcagggccccagggagcgggacgcggggagaggcaggggcaaaaaagcgccc

SEQ ID NO: 212632 - RNA, 109 nt, Homo sapiens
gcggggaccacgccgcgcccgcaagaacggccaagaaagcccgaaaaccaacacaagagggccagggaccaggggacgcccaagacggccacccgcgaaggggcccccg

SEQ ID NO: 212633 - RNA, 66 nt, Homo sapiens
cccccggcccccacccagcacaccacaaggaggaaggccggccaagcaggaaaagacagcgaaaaa

SEQ ID NO: 212634 - RNA, 78 nt, Homo sapiens
cccccgccccgaggacggacaagagcggggcccggcgcacccaccaccgccgcccacggcagcccagggacccgagca

SEQ ID NO: 212635 - RNA, 61 nt, Homo sapiens
gggggccaagacccacaccaccagcagcaagaggaagaagaacaaaacaagaagaaagaca

SEQ ID NO: 212636 - RNA, 67 nt, Homo sapiens
aaagaagggagcccgaaggggcagggccccagggcagggaccaggaggcagcaacgaagaggcacgg

SEQ ID NO: 212637 - RNA, 73 nt, Homo sapiens
ccacccgcgcgccgccgccgaggagaaagcccggaccaagagacgaggaaaaccccacccacaaaggcgagcc

SEQ ID NO: 212638 - RNA, 72 nt, Homo sapiens
aaaagcaaaaggcaacagccagagccgcccgacacacaaacaaaaaaggacccccccgcaagccaaaagcca

SEQ ID NO: 212639 - RNA, 79 nt, Homo sapiens
gcggaggcaccaacacggccggacgcagaagcggcggacaaccagggggcgcccaacccccgaccggaacagggaccaa

SEQ ID NO: 212640 - RNA, 79 nt, Homo sapiens
gccaggcgggcccccgcggcccgggcgagcccggagaagaggaagggcagagaggcgaagagggagcgaagagacagca

SEQ ID NO: 212641 - RNA, 72 nt, Homo sapiens
acgcaggaagaccgaaggaaaaagacccgagaagcgcagacccaccagggaaagcaaaggcagggccaaaaa

SEQ ID NO: 212642 - RNA, 61 nt, Homo sapiens
aaccaccccaaaacaccagagcgccgcaggcgccaaaaggaaacacggaagaccacaacac

SEQ ID NO: 212643 - RNA, 53 nt, Homo sapiens
acccgagagcaaccagacagaccaggcagcccaagagaacgaaagcaaaaagc

SEQ ID NO: 212644 - RNA, 77 nt, Homo sapiens
aaaaacaagaaggaaaaacgccacgcaccggagagagcacaggagaccaaagaccagacggaggaagcagccagaag

SEQ ID NO: 212645 - RNA, 79 nt, Homo sapiens
agaagccccccacgccagcccagcaaggaagccggcaagacagccacaggagccccccgggggacgcgccccaacacaa

SEQ ID NO: 212646 - RNA, 78 nt, Homo sapiens
cgggaaaagagccagaaccaaccaaaaaaacacaccgacagcagaacacacgcgaaaggaaaccaagcggaagggaag

SEQ ID NO: 212647 - RNA, 76 nt, Homo sapiens
cccggaccgcagaagggagaccacagcaagacgccgggaccccggaaaccagaaaggcagagccacaggaaccccg

SEQ ID NO: 212648 - RNA, 79 nt, Homo sapiens
gggcggcggcgggcgaggacgcggccacgccgaaaggcgaccccgacagccaggaaggcaggaacagaccaacccccgg

SEQ ID NO: 212649 - RNA, 71 nt, Homo sapiens
gcgcaaagacggggcggggaaacaacgagaaggcgaccaaaggagagcggaccgcacaaacagcgcccggg

SEQ ID NO: 212650 - RNA, 71 nt, Homo sapiens
ggaaagacgccaaagaaagcagcaacgaccaagcacccacggaagcaccacaaacaagcaaaaaaaacccg

SEQ ID NO: 212651 - RNA, 82 nt, Homo sapiens
cacagagaagcagagcagcacaagccagaaccgaccgcgcacaggaacgcaagcacaggaccagaaacgaaaggcagcagaa

SEQ ID NO: 212652 - RNA, 79 nt, Homo sapiens
acggcgaagagaagcacaaaaagccgaggaagcacacggaaacacaaaagccaggaagacaagagcagaagaaacagac

SEQ ID NO: 212653 - RNA, 78 nt, Homo sapiens
caagggggagccggcaaaacaccagaggccagaggacaaaacccagccggcacaaaccaggaaaggaagccggagcgg

SEQ ID NO: 212654 - RNA, 74 nt, Homo sapiens
aggcagcgcccagcagcgcagccggcaaggagggagacggcgagcagaggcgccccaccacgccacccccaacc

SEQ ID NO: 212655 - RNA, 72 nt, Homo sapiens
agacacaaaaacggccccgggagggagcccggacggacccgccacaagcagacgaggaccagggggcagcaa

SEQ ID NO: 212656 - RNA, 70 nt, Homo sapiens
aggaaacggcaccacgggcgcacaaggggacgcacagaaaagacaaaacaaagacgcgccacaggaagaa

SEQ ID NO: 212657 - RNA, 74 nt, Homo sapiens
gcggaggggccggcccccggagcgacagaaacaagggcagaagaaccgacgacagaaacggagggggccaaagg

SEQ ID NO: 212658 - RNA, 75 nt, Homo sapiens
agaggagcccacccagagcaggacgccgggaaggccaaagggcacagaggcccacgcggaccggcagcgccaccg

SEQ ID NO: 212659 - RNA, 86 nt, Homo sapiens
agagacgcaccgcggaccaccacgcccgaaaacaggacacagaacagagaagaagcagacgagacagaaaaagaaccagacagaga

SEQ ID NO: 212660 - RNA, 79 nt, Homo sapiens
ccccgggacccccccggaccgagccgacgccgcggggcagcgggccggcgccggcgcgggcggaaaacaccccaaaagc

SEQ ID NO: 212661 - RNA, 82 nt, Homo sapiens
cgaaaccaggacagaccaagaccggaagcaaaaaagcgggccacacaccaggcggcggacaaaacccaaaacccagaagcca

SEQ ID NO: 212662 - RNA, 73 nt, Homo sapiens
cgccacgccccaacgccggaggagaggaagaagcggcgcgacgcaacggaccagcgcacaggacaggccgagg

SEQ ID NO: 212663 - RNA, 76 nt, Homo sapiens
aacaggaagaaaaaaaggaaaaaaccggccgaagagaggcaaaaaggggcacaggggcaagacggaagcaaggcaa

SEQ ID NO: 212664 - RNA, 81 nt, Homo sapiens
cccagggaacagcagagcccagagaaccggcaccagccccccagcacaaacgcggggaagacccgggaagggagcccaaaa

SEQ ID NO: 212665 - RNA, 77 nt, Homo sapiens
ggcggcgcgcgcccgcacgccaaggaccccaacaccaaaagacccgcggccacgaacgacggcacgaagcagaagag

SEQ ID NO: 212666 - RNA, 80 nt, Homo sapiens
gaccccaacgcacaaaagagccaagaagagagccaggcgaacaaaagcaaaggcgagaggcagccccagcggacccgcaa

SEQ ID NO: 212667 - RNA, 64 nt, Homo sapiens
agaagggacgaggagggagaagacgaggagagcggaaaaaccccaaggcaaaagcagaccggaa

SEQ ID NO: 212668 - RNA, 99 nt, Homo sapiens
ccgacacaacagaagaggagcacggaggagccgaccgcagcgagggaccagcgcgccacagagcccaaacccgcgcgacggcgcagaagacagacacag

SEQ ID NO: 212669 - RNA, 79 nt, Homo sapiens
cgcccccaggaggcgagcccgcggaaccgcagccaggggagcgacagaaaagcagcacaacccccggagaaccgaaggg

SEQ ID NO: 212670 - RNA, 78 nt, Homo sapiens
aggccgcgagaacagcaagcagggaagaggagcgcaagcgccggggagccggccagaaggaggacaggaaaaagccga

SEQ ID NO: 212671 - RNA, 64 nt, Homo sapiens
cagagaccagcacaaaggcaaaggcaacagggggacacgccagcggcgcagccgacggaagacc

SEQ ID NO: 212672 - RNA, 75 nt, Homo sapiens
aaaagaacaaaacccaaagccaaaagagaaaagggaaagagacaaagaccggaaaaaggaaccgaggagcaagga

SEQ ID NO: 212673 - RNA, 78 nt, Homo sapiens
ggcagacgcaggcgggaccagagcgacacagcccacccgcagcagccacccagggaggagcacagggcgccagccccc

SEQ ID NO: 212674 - RNA, 77 nt, Homo sapiens
cagaggcccaaagaggcgcaagagagaggagggggcaccgagcaacgagggcagacaagcccagcagagcgagggac

SEQ ID NO: 212675 - RNA, 53 nt, Homo sapiens
ggcgagcgcagcgcgaccgggaggcccagccgcgggccgcagaggcaacagcc

SEQ ID NO: 212676 - RNA, 88 nt, Homo sapiens
cgcgccgggagaccgcggaggccgacaggacgggcgccgccccgcgcggcaggaggcgcggccagcgaagaagacgcagccagacccg

SEQ ID NO: 212677 - RNA, 56 nt, Homo sapiens
cgcggcgggcgcacaccacgccggggaaaaagaaaagggcgaagacccgaagcagc

SEQ ID NO: 212678 - RNA, 81 nt, Homo sapiens
aaacaggcaacaggcccaagcgaggaccaacaggggcaaggccgaggggaacagcacacagagaggaggcggaagcacgcc

SEQ ID NO: 212679 - RNA, 58 nt, Homo sapiens
gcggccggcagccggcagcgcagcggagagcaggcccagaggagaaaggagcaggggg

SEQ ID NO: 212680 - RNA, 37 nt, Homo sapiens
ggcgagcgggggccgggcaggaagaagagagggcgaa

SEQ ID NO: 212681 - RNA, 74 nt, Homo sapiens
caccagggggcggacaaagagcagccccgagaagaacccaaggacagcaggcacagccccacaaagcgccaggc

SEQ ID NO: 212682 - RNA, 75 nt, Homo sapiens
cggaaaccgacgcccgggggaaacagagaaagaaggcggccaggccaaccgaagaccaagggaacggaagcccca

SEQ ID NO: 212683 - RNA, 40 nt, Homo sapiens
gagcggagcccccgggaccagggcgacccccggacgcccc

SEQ ID NO: 212684 - RNA, 76 nt, Homo sapiens
ccccaagagcgggaccacagaggccagagccccaagcccccgcacacccgggccaaacgaacgcagagaaaaagac

SEQ ID NO: 212685 - RNA, 76 nt, Homo sapiens
cggggaaaaggcaaaaacccacaccgcaacccagcgagagaaaggaccaagaacgcccagcccgcgggcaccggca

SEQ ID NO: 212686 - RNA, 70 nt, Homo sapiens
agacgaacgccccgcagggagaaaaaaacccgccaggccaagcaacccccaagagcagacaaaaaagcca

SEQ ID NO: 212687 - RNA, 60 nt, Homo sapiens
acaaagggacgaccgaggaaggaaacacacccggccgggccgcccgcagcggccgcacca

SEQ ID NO: 212688 - RNA, 74 nt, Homo sapiens
gaaggaggacacagaaaccgaaggacaggggcacaagaaggccaaccccaaaagagagaacacaggcaagacga

SEQ ID NO: 212689 - RNA, 70 nt, Homo sapiens
gccccaaacccaacaagcaagcagaccacgaaagacggaaaacacggaccaggacacggaggagaacagg

SEQ ID NO: 212690 - RNA, 65 nt, Homo sapiens
gacccacaacaccaggcgccaggcggggagcagaagcccggaaagcgcgccgggcccaacacgag

SEQ ID NO: 212691 - RNA, 79 nt, Homo sapiens
gcaggagcagaccaggagcagccaagaccccacagcgaccaggaccgcggcaagcgggagcggacccacccaagccacc

SEQ ID NO: 212692 - RNA, 68 nt, Homo sapiens
agccgaacccgcgcgacaaaaggaccagacaaacaaaaggggggccaaggaggaagcaagacagccca

SEQ ID NO: 212693 - RNA, 56 nt, Homo sapiens
cagaagcagcagagaagaaaaacagaaccacacaaacgagccaccaaaaccggcaa

SEQ ID NO: 212694 - RNA, 74 nt, Homo sapiens
cacagcaccccagcacgaagacaaaaaggaaccaccaggcaaaaacccagcccacagagacgagcgggcacgag

SEQ ID NO: 212695 - RNA, 74 nt, Homo sapiens
caaccggaagcaaaaccgagagcagacccccaaagggcagggagagagcgaagaaagggggcaggcgggccacg

SEQ ID NO: 212696 - RNA, 65 nt, Homo sapiens
agaagaaaagagggggaacgaagcagaaccggcccgccgcccggagcacggagcccacgggagcg

SEQ ID NO: 212697 - RNA, 78 nt, Homo sapiens
ggacaagaaagaccgcaaggggaaggggggagcgacacccaacaggaagaagacccccgaagcagccagccccgagcc

SEQ ID NO: 212698 - RNA, 40 nt, Homo sapiens
cgcccgggagccacagccgaggccagcgcgcgggaggaaa

SEQ ID NO: 212699 - RNA, 78 nt, Homo sapiens
gggaagaaaacaaccaacagagcccgcagagcaccaggcccaccggaaaggacgacaagggagcgaagaaaagaaacg

SEQ ID NO: 212700 - RNA, 74 nt, Homo sapiens
cagacgggaggagagagaaaggcacggacccggaagaacagcaaccagaacaaagacaggagggcaggaaggac

SEQ ID NO: 212701 - RNA, 69 nt, Homo sapiens
cgcagaacgggcagagaccgcaggaagaagcgaagaggcagacagagacggagaccgccggccaggcca

SEQ ID NO: 212702 - RNA, 79 nt, Homo sapiens
caccaggcagaagagggaacagaggaagacacacggcccccagccaggaacaggagcgaaaacgccacaacagaggggg

SEQ ID NO: 212703 - RNA, 58 nt, Homo sapiens
cggagcagacagcagcaccagccaagggagaaaagggagaaaaagaaggccaaacaaa

SEQ ID NO: 212704 - RNA, 60 nt, Homo sapiens
gagaggcgacgccccgaccggaacaggagacccccgcagcccagccagcaccagaaccac

SEQ ID NO: 212705 - RNA, 61 nt, Homo sapiens
caacagcaaggacagcaccaagagacaccaggcgccgagaaggccagcagagaaacaggca

SEQ ID NO: 212706 - RNA, 71 nt, Homo sapiens
gcaggacacggcgaagagaagaggaggagccaagcgggaaaaggggcaccgacgcaccagcgccggacaca

SEQ ID NO: 212707 - RNA, 80 nt, Homo sapiens
ggcgcggggcgcgggacgacgaagccaggcagcgagcgggagcagacagggaaccgaaggcagcagaaaagaaggccagc

SEQ ID NO: 212708 - RNA, 80 nt, Homo sapiens
cgaggccagacaagccagaaggcgcgggggaagggaaggaacaggaaggacaccgcgaccagcaccacccaaacaagacc

SEQ ID NO: 212709 - RNA, 80 nt, Homo sapiens
caggaccagaggccgccacaaccgccagacaaccggagccacgccccacgaccgccagggaacacaagccgagaacagcc

SEQ ID NO: 212710 - RNA, 76 nt, Homo sapiens
aaacaggaacacggaaaaagagcacaagccgggggaggcaccacccaggaccgcggcgcagagcgaagcagggaaa

SEQ ID NO: 212711 - RNA, 71 nt, Homo sapiens
acgaaaaggaaaaggagagagccagagcaagagcggaccgccgccagaggggacggcaccccaaggggaaa

SEQ ID NO: 212712 - RNA, 69 nt, Homo sapiens
gggccacgggacaacaagccacgagcagaccaaaacaaagcaccagagagagacggcggaaacgaaaga

SEQ ID NO: 212713 - RNA, 76 nt, Homo sapiens
gcaccacacagaaaccacgaggaggggagacgagcagcaggaaaggaacacccgaaacccgaccagggaaagcaag

SEQ ID NO: 212714 - RNA, 78 nt, Homo sapiens
caggaccccacgcacgcaccgccccgccaaggcacgccggccaaccggacaggcagggcgcaaccagaagacgaagca

SEQ ID NO: 212715 - RNA, 67 nt, Homo sapiens
ccagaggcgaccagaacgaccccgggacaagaccccacgaagccaaggccagcagagcccaagggcg

SEQ ID NO: 212716 - RNA, 68 nt, Homo sapiens
aagggaagagccggccaaaaaacaacaaggaagccagaaggccgaccgggacaagcaggaggaggggc

SEQ ID NO: 212717 - RNA, 63 nt, Homo sapiens
aacagaacagcgcccgcgaaaggcccccccagcgccgccgcccagccagccccagggaagaga

SEQ ID NO: 212718 - RNA, 55 nt, Homo sapiens
gggacgacacacacacggagggaccggagggccggaagcgggccgggacaacggg

SEQ ID NO: 212719 - RNA, 77 nt, Homo sapiens
ccggggaggcgaggacccacgagacccagagaggacgcgggggaaggacacagccaaaagaagaacccggacccgac

SEQ ID NO: 212720 - RNA, 75 nt, Homo sapiens
gccgggcagcagcccagcggcagcagaaagagcagacgggacagacaaggacccgacagcccgcccgccggagcc

SEQ ID NO: 212721 - RNA, 72 nt, Homo sapiens
ggcaagccaggccaaaggcgccaggaaggagacaccaaaaaggcaaggacagaacccaagcaggccggagaa

SEQ ID NO: 212722 - RNA, 84 nt, Homo sapiens
ggcggcgcggggcccccagaaggacgccagcggagaacgcggcaaagcgaggcaggaacacagccaggcccccacccccaggag

SEQ ID NO: 212723 - RNA, 84 nt, Homo sapiens
ccaccaccaccgcagcgccccaccgggagacccacacggagccccgccaaagcccagaagcggggaaggcagagagaccaagga

SEQ ID NO: 212724 - RNA, 70 nt, Homo sapiens
ccaagcacggaccaaaggaaaacgaggcgccacaaaaaccagcccacacagcgcagaccgggccgcaaca

SEQ ID NO: 212725 - RNA, 74 nt, Homo sapiens
ccgaggcccccagccagagaacgggaaaaagaaaagggcgaagacccgaagcagcgcaggaacagaagagaaga

SEQ ID NO: 212726 - RNA, 78 nt, Homo sapiens
cccaccgcgacggaccgccagccagacccgggcgcagcgccaagagggggcggggaagagacacagaagggaggcgag

SEQ ID NO: 212727 - RNA, 37 nt, Homo sapiens
ccacgggcgggcaggcaagacacagaaaagcccacga

SEQ ID NO: 212728 - RNA, 57 nt, Homo sapiens
aaggaggccgaccccacacggcccgcaagcgaccgcagcgagagcccagagaaggga

SEQ ID NO: 212729 - RNA, 77 nt, Homo sapiens
aagaccacagagggacccggacaaccagaggcagccagcagggggagccaaaggagccgaacccaaaaagagcagca

SEQ ID NO: 212730 - RNA, 82 nt, Homo sapiens
ggcgcggcggcgccgcgcgcgcagggccgccggcccgcagccgccaccacccaggaccagaaggaaacacagacccagacca

SEQ ID NO: 212731 - RNA, 45 nt, Homo sapiens
gggacagaacggcgcaacacgagcccgcacggaggcacaaagaga

SEQ ID NO: 212732 - RNA, 111 nt, Homo sapiens
cgggccagaccagccccagaaaccagccacccgccgcgccgacgccagggaccccacgccgcgaggaaaccccaaagagaggagaaacagcgacgacccaaaggggaaacg

SEQ ID NO: 212733 - RNA, 81 nt, Homo sapiens
ccgcccagcccgagcaggccaacccaggccaggacgaaggacagagagggacgggcagacgccccgacacgcagcgaaaga

SEQ ID NO: 212734 - RNA, 75 nt, Homo sapiens
gggcggcaagcaccacaccaaacgcagaaccagcaacacacaagaaacccagccaccaagggaaaagagaagcaa

SEQ ID NO: 212735 - RNA, 62 nt, Homo sapiens
gaagagagggagagaacaaccagcggaaggaagggcaacgcggggcgagccacagagacaac

SEQ ID NO: 212736 - RNA, 91 nt, Homo sapiens
agccgagacaccagcccgaaacaccaccaaggagcaggccgggcccgccagggcacgcgcccgccacgggaagcccgagaagccgcgcagc

SEQ ID NO: 212737 - RNA, 83 nt, Homo sapiens
ccaagacaacccaagaggaaacgaaggaggcccaaccacaaaaggagccgacggaacccagacggagaacaaaaggaagaaag

SEQ ID NO: 212738 - RNA, 74 nt, Homo sapiens
aagcaccaggaagcagagaggaccgcagaagggaaggagagagaaggacggaagaggggccggagagaccgggc

SEQ ID NO: 212739 - RNA, 70 nt, Homo sapiens
gcaccgcccgcggcgcgaaacggcgcgcccaggaagcgaggaggaaagagagcccaccaaggcaccagaa

SEQ ID NO: 212740 - RNA, 77 nt, Homo sapiens
ggcggagcccagagcagcgcgcgggaaaggcagcccgagcgaggacagaggcacgaagaagacaagagcagacgagg

SEQ ID NO: 212741 - RNA, 54 nt, Homo sapiens
aggacacgggcccggcggccagaggggggacagggaccaggaggagaagcaacc

SEQ ID NO: 212742 - RNA, 75 nt, Homo sapiens
gcggaggacacaccaaacagggaacccaagccgcaccggccacgaaacagagacacaccgacgaacccccaagag

SEQ ID NO: 212743 - RNA, 80 nt, Homo sapiens
ccccacacaacagcagcaccccaggccacccacagacagggccggcaccaacggggaaagcaggggagaaaagaaaagaa

SEQ ID NO: 212744 - RNA, 82 nt, Homo sapiens
cagccgccgccaccccgcggccgcacccccgccccagccagagcccgggcgcgggaagagacagaccgggagaacaagcgaa

SEQ ID NO: 212745 - RNA, 87 nt, Homo sapiens
gccaccgagacggcgaccgggcgccgagacaccagagccacaaggaaagaaggaccaggaagggggggaagcaaaaggacgacgaag

SEQ ID NO: 212746 - RNA, 89 nt, Homo sapiens
cgcccaggcagcgcgggggccgcgggacccgccagagcgcaggcggaggggcggcgcacgggagccggcccaggagcagcagggaggcg

SEQ ID NO: 212747 - RNA, 76 nt, Homo sapiens
gagcaggcccggggagggggaccgcgaggagcgcagccgcaaggcgggcacaaaccgaagaggacaaggagagaag

SEQ ID NO: 212748 - RNA, 73 nt, Homo sapiens
cgcaacccaccgcgacccgccacccacagcagcccgcgaggcggggaagacccgacaagccaccagggcaccc

SEQ ID NO: 212749 - RNA, 69 nt, Homo sapiens
cgggcccaagacaaaagggagaagccaaaggccagggagggaggagggcggcacgaagcgagagccacg

SEQ ID NO: 212750 - RNA, 80 nt, Homo sapiens
cccacccccccagcggccgcagggccgacaagcggaccaagccagacccaaggggaccacgcagcagcggaaagagacag

SEQ ID NO: 212751 - RNA, 77 nt, Homo sapiens
ccgcgcacacgccgggacgcgacgccagcacgacccaccgcacgcagaagcgggaaaacgaaaaacgggcagggaca

SEQ ID NO: 212752 - RNA, 62 nt, Homo sapiens
ggcgaagggagaggacagcagggaggcgggacgcggaggcccgcgggcaccaggaccaacgg

SEQ ID NO: 212753 - RNA, 100 nt, Homo sapiens
ggccacagggaagcccgggggggcacaacggggggaacgccaaagggagcagggaaaaccgaggggaaccggcccccaaggcggcccccagggaacgggc

SEQ ID NO: 212754 - RNA, 92 nt, Homo sapiens
cgcgagcgagccgcgaaccgagcgggcggcgggcgcgcgcaccagggggagaaacccgggaccagcgcgagccggcccggccgaccagaaga

SEQ ID NO: 212755 - RNA, 72 nt, Homo sapiens
cgacggggcccgcaccccagaaccggcgcaagcagcgaagaagggaaagccccggccaggaggagcggagaa

SEQ ID NO: 212756 - RNA, 75 nt, Homo sapiens
caccagccccaggaacaaggaaaagcaccaggcaaaccaccacacaccagcaaagggaccaagaagacacaaaaa

SEQ ID NO: 212757 - RNA, 71 nt, Homo sapiens
gcaaagaaaaagaacccaaacaagacgcaagaggcgacacaggaggggagaaccacccaaagaacaaagag

SEQ ID NO: 212758 - RNA, 83 nt, Homo sapiens
cgagcaggacaggacgaagccggaggaggcggcagaggacgccccagagcagcgcggccagcaacgaaaggagaacagggaac

SEQ ID NO: 212759 - RNA, 42 nt, Homo sapiens
ccacaccaccccgcgcagggaggcgagcccagagggccagaa

SEQ ID NO: 212760 - RNA, 84 nt, Homo sapiens
gaggacaggggcggggggcgggaggcgccacccagcccccccgcgaacgcccaagggcggagaacggaaaagcaccaggaagca

SEQ ID NO: 212761 - RNA, 72 nt, Homo sapiens
gaccccaccgggcggggaccccggcccggcagcagcgacggaaaaccagacgacaggccagccacaccgaag

SEQ ID NO: 212762 - RNA, 62 nt, Homo sapiens
aacgaccgcgccgccgcgccccaccgggcaaaccgcggacgcaacagcacccacccggagcc

SEQ ID NO: 212763 - RNA, 76 nt, Homo sapiens
gaaaggaaagagccggagaccccgcagcagaagaggggggaccagcagccacaagaaccagcagagagagaggcgg

SEQ ID NO: 212764 - RNA, 76 nt, Homo sapiens
gacaccgcggagcaaggaaaagacccggaaagaagagacacagaggagccacacccccaggagggcaggagaaagg

SEQ ID NO: 212765 - RNA, 80 nt, Homo sapiens
cgccggggcggggcccaggagacggagggggggccgaagaagccagggggaggaaagcagacagacccaccaagagggcg

SEQ ID NO: 212766 - RNA, 56 nt, Homo sapiens
gggacaaacaccgagaaacaccgaacgaccggagcgagcacagaggacacacccca

SEQ ID NO: 212767 - RNA, 61 nt, Homo sapiens
agaacccagaggcgggaggggccgggaggcagaggggcaggggggcaaagaaaaaggagag

SEQ ID NO: 212768 - RNA, 57 nt, Homo sapiens
agcagcgcgcaaggaacccgaggacccaaggagagggcccgcgcacagagccaccgc

SEQ ID NO: 212769 - RNA, 72 nt, Homo sapiens
aggagcccgaccgggagaggacaagaccacgagccagggcaaagacgacacccggcgaaaaaaaggaaaccg

SEQ ID NO: 212770 - RNA, 77 nt, Homo sapiens
ggccgggcgcgaggacgcacgagccaggagaaggacagacagagaaccgaacgggcgcggacccaggaaccggagac

SEQ ID NO: 212771 - RNA, 81 nt, Homo sapiens
gagcgcgagggggacggccggcggcacccgcacccggggacaagcgcgggaacggcgcggaagaaaagaccacagcgccaa

SEQ ID NO: 212772 - RNA, 108 nt, Homo sapiens
ccaccccgcgcccaggcgggaagaggcgaaggccagagcacgagcacgggaagcagggcagaaaagaacagacccagaagaagcgaaaggggagaaagaagaaagcaa

SEQ ID NO: 212773 - RNA, 73 nt, Homo sapiens
caaaacgaagagggaaacagccacaaggcccaggaggcaagagcgagaagagcgcaagacagaaagcgaaagc

SEQ ID NO: 212774 - RNA, 59 nt, Homo sapiens
ccagacgcaccgccagaagcgcggccaacgcacacccaaaaagagaggagccgccgcac

SEQ ID NO: 212775 - RNA, 65 nt, Homo sapiens
cgaccccccggcgccgcgccggcggcgcagcccgagccaaaaagcaccacccccaaccgggaggc

SEQ ID NO: 212776 - RNA, 79 nt, Homo sapiens
ccccacccccacaccggaccgaaaagaccaccacaagccaccccgaggaagagaaaccacagaagaaaccagaagcaac

SEQ ID NO: 212777 - RNA, 35 nt, Homo sapiens
caaaagaggagaaagacgggcagacacagcccccc

SEQ ID NO: 212778 - RNA, 51 nt, Homo sapiens
gcccggacacagcaaaccgggccacagaaacacaggggaaacacgagagag

SEQ ID NO: 212779 - RNA, 76 nt, Homo sapiens
ggaggagaggagaagggaggccccgaggagccagaaccagagaaagggacagcagggaccccagcagagagcgaac

SEQ ID NO: 212780 - RNA, 75 nt, Homo sapiens
ggagaccaaaccggaaaccgccaaaaccccccacacaccccgccggggcaaacaacccccagggggccacccacc

SEQ ID NO: 212781 - RNA, 70 nt, Homo sapiens
gcggcggcgcccccagccggagccccagacaacccggacggccggccaaaggggagaggcaccagcaaca

SEQ ID NO: 212782 - RNA, 59 nt, Homo sapiens
cccgaggggcggacccccgccgcgacccgggccgggaacggcagacgcagcagagagac

SEQ ID NO: 212783 - RNA, 75 nt, Homo sapiens
gccgaggacgcggagcccagcaagacgaaaccacaaaacgcccaccagcacagcggcagaaacaaagcaacccca

SEQ ID NO: 212784 - RNA, 91 nt, Homo sapiens
gaggagaagaggaaagagaaagccaagaccacaccggaagaagaaacagccagaggaagggcagaagcacagaagaagagggcgagcaccc

SEQ ID NO: 212785 - RNA, 81 nt, Homo sapiens
ggagagcggcgagacgacagcgagacccccaggcccgcggcgccgcaacaggagcgaagcaacagcaacagaaacagacaa

SEQ ID NO: 212786 - RNA, 59 nt, Homo sapiens
cgaccagccgcggagccgggggcagcgcagaaccggccgaaaagcacaaacagcaagaa

SEQ ID NO: 212787 - RNA, 73 nt, Homo sapiens
acacaggaccagagaagaagaggagcaccccacacagaccaaaaagaccagcggagcagaccaccgcccagca

SEQ ID NO: 212788 - RNA, 39 nt, Homo sapiens
gaccccggaagccaaaaaggaggcgaaagcgcgccaaga

SEQ ID NO: 212789 - RNA, 60 nt, Homo sapiens
caaaccaaggggcacacgacagcccaaccgccacagggaggaggcccaaagcccagccaa

SEQ ID NO: 212790 - RNA, 72 nt, Homo sapiens
ccccgcgcgcccccaggccgggggccggaggacgcggggaaccagaccgggccagaccccacgggacagacc

SEQ ID NO: 212791 - RNA, 85 nt, Homo sapiens
ggcgaggagcgagcgcgcgaggggcggccgagggagcccacccagaggcagggggcgacccgaacccaaaggaggaaacagcggc

SEQ ID NO: 212792 - RNA, 89 nt, Homo sapiens
aacccaggagaaggacaggagaccaaggagaacagcagagcaccggccagaacaagccaaggagccaagacgagagggacacacggaca

SEQ ID NO: 212793 - RNA, 81 nt, Homo sapiens
agggcaggacaccgacaggaacagggaccacggggaacagaaaggaccaagcgggcccgagacaagcggccgcacaccaag

SEQ ID NO: 212794 - RNA, 82 nt, Homo sapiens
cgcgaggccggagaaacaggcgccgcgggcccgcgcccggccggacccgggcccgaggacgaagcaaaggagagaacccaag

SEQ ID NO: 212795 - RNA, 78 nt, Homo sapiens
agagccacccgcagagccgcgacaggacggaggaagccacgcaacaggaacacagaaacgccccgggccagccgccaa

SEQ ID NO: 212796 - RNA, 81 nt, Homo sapiens
caccgccaccggcccgacccaaacccaggagaaacgagagggacagcaaggaagacgccagagagcggcacaccgccgaaa

SEQ ID NO: 212797 - RNA, 78 nt, Homo sapiens
ggcccgcggggcccagcggagccaccgagcgaggacgagggcgccggcgacgggccggggccagggccaccggccagc

SEQ ID NO: 212798 - RNA, 69 nt, Homo sapiens
agagcgaccggcggcggcagcgccccccgagacccaggacccggccccgccgccggggcgccacggcaa

SEQ ID NO: 212799 - RNA, 87 nt, Homo sapiens
ggacgcgggaacacgaacaacagggcaagagaacagcacccggacaaccagccagaaccagagaacagcagaggcccaggaaacagc

SEQ ID NO: 212800 - RNA, 60 nt, Homo sapiens
ggaccggacagcaccaggaagcccggcagggggggaagaggaagaagcaaacgacaggga

SEQ ID NO: 212801 - RNA, 75 nt, Homo sapiens
agagggggggcggaacggaccagcaggacgcccaccggagggcagacacacgcaggcagcggcaccaagggcacc

SEQ ID NO: 212802 - RNA, 75 nt, Homo sapiens
ccaagacacgcgacgcggacccacggcgccgacaaaggagaggggcgccccccccggaagacagcccacccccca

SEQ ID NO: 212803 - RNA, 76 nt, Homo sapiens
acgacccccgaacacacggggaccagcgggggcaccaccaggacgcagggacaccggcggaggcaaggcgccaccg

SEQ ID NO: 212804 - RNA, 55 nt, Homo sapiens
cccaaagggaaaaaacgcagcgccaccagcaaaaccagagaaacaggcagagaaa

SEQ ID NO: 212805 - RNA, 82 nt, Homo sapiens
ggggcagagcaggggccggaagcaccaggacagaagaagcccaggacccaggaaggagacacaggaaaacaaagccccacgc

SEQ ID NO: 212806 - RNA, 81 nt, Homo sapiens
ggcccccaggggcgggaaggcggaccgccagcacaagccgacgggccaaaccagccggcgcgggagcgcacgccacgagga

SEQ ID NO: 212807 - RNA, 61 nt, Homo sapiens
gaacggggaacgacggcccagcaggcggggaagagaaaggggacacaggcaaggggagacc

SEQ ID NO: 212808 - RNA, 75 nt, Homo sapiens
ccggcgcagggcggaaggacaacagcccgacaaccaggaaaagaaggaggccagcgggacacacaaagaaagacg

SEQ ID NO: 212809 - RNA, 90 nt, Homo sapiens
agggcggcgggcaggcgcccgggagagcggagccccgcgcagcgcgacgcgcgaccagaccggcccccccgaggagaaagacagcaaaga

SEQ ID NO: 212810 - RNA, 81 nt, Homo sapiens
cgcaccaccccgcgcccccgcgccgccccgaagcccagggacgcacaccgagacgaacacagaacagcacgaccagagggg

SEQ ID NO: 212811 - RNA, 73 nt, Homo sapiens
aaacacccccagacaaaggagcggccgaaaggcggcgaaaagacagccaaccccgaaaacaacccagagcaaa

SEQ ID NO: 212812 - RNA, 71 nt, Homo sapiens
ggagcacaagaaaagcccaggaaaaagaaggaaccacgcagacaaccccaaacacagacggacagaacccc

SEQ ID NO: 212813 - RNA, 76 nt, Homo sapiens
gggcaccgcagcgaccacccacacaaacccgggacgggccgagagcagcagggacgcaccaaaacggacagccgaa

SEQ ID NO: 212814 - RNA, 75 nt, Homo sapiens
gaagaaaaggaagaagaaagagcgaagaccacacaggcccgagccgccaggggggagaacaccccccccccagca

SEQ ID NO: 212815 - RNA, 74 nt, Homo sapiens
gggaaagacccaggagaagccgcccaaagaacgggcaagacggacgagacgcgcgggcagaggcagaacggcgg

SEQ ID NO: 212816 - RNA, 76 nt, Homo sapiens
ccggaggagcggggagggggacacacaaccgcccagccggcgagggacgccgcagacaacggcaagcggagaagag

SEQ ID NO: 212817 - RNA, 77 nt, Homo sapiens
aaaagcggcgcgcgcgcgcgcgcagcaccaggagaggagggaacgcggagcgggccaagacaacaaaaaagggagaa

SEQ ID NO: 212818 - RNA, 52 nt, Homo sapiens
aagagcagagaaaaccagaaaaaggccaagaacgcgcacaggaagagaaagc

SEQ ID NO: 212819 - RNA, 78 nt, Homo sapiens
gccacaggaggaggggaggagaagcggagagggagggggacccgggggaggagagcccccagagagaccccgaaggac

SEQ ID NO: 212820 - RNA, 84 nt, Homo sapiens
agaagagaaacaaacagaccccggacaaagggaaaagggggaaacacgaaaggaaaaaggagacagaaaaggcaagcagccaag

SEQ ID NO: 212821 - RNA, 80 nt, Homo sapiens
gaacgcaggaaacaggaaacgagccaacacagcgggaggccccagggaaaggaccgaggcaggaaagaggccagacgcag

SEQ ID NO: 212822 - RNA, 77 nt, Homo sapiens
ggcagcccccaaagacaggagcacaggacagggcagaccgccagcagcacagcaagccacagagagggccggcaggg

SEQ ID NO: 212823 - RNA, 84 nt, Homo sapiens
gaaggcgagaccagagggccccccagcaaacggaccccgccagcccggcgcggggcgcacacacagagccgccagccagccagg

SEQ ID NO: 212824 - RNA, 73 nt, Homo sapiens
gccgccaaagccaagccaccaaacgaagagccccagcaggaggggagccaggacaggagaggaaaaccaagcg

SEQ ID NO: 212825 - RNA, 70 nt, Homo sapiens
gacagggaaacaggaaaaaaaaggaggcgacaagcaacaacaacaagcgagccagacacaccaacgggcg

SEQ ID NO: 212826 - RNA, 62 nt, Homo sapiens
caggaccacccccggccacgccccgggccggcccacaaagggaaagggagcagcaccggcca

SEQ ID NO: 212827 - RNA, 67 nt, Homo sapiens
aacgaagacccagcgagcgaagcggaaccgggaaaaggcaacggacacaggacaccacgggagagcg

SEQ ID NO: 212828 - RNA, 55 nt, Homo sapiens
aacaagcagcagaaagaaaacgacacaggaagaaaggggggcagaaagaagagga

SEQ ID NO: 212829 - RNA, 68 nt, Homo sapiens
gcagcccacccaagggaaagaaaggcaaagcgagcaagagggagaccaaccaggcgggaaacgaccgc

SEQ ID NO: 212830 - RNA, 79 nt, Homo sapiens
ggcagggcgaggcacggggagggacgaaggggccgaccccagccggggccaaagcgaccaaccccccaccgcacgcagg

SEQ ID NO: 212831 - RNA, 72 nt, Homo sapiens
aaaggaagcggacaaagcaaagaaaacaacaggaacaggggccaaggcgaaccagacaagaaaagcagacgc

SEQ ID NO: 212832 - RNA, 63 nt, Homo sapiens
aaccaagggacacagagaggaaaacaccgaaccgacgaaagaggacgggaaagaaaagaaaga

SEQ ID NO: 212833 - RNA, 73 nt, Homo sapiens
aaagcacccacagcagagcgcaggaaagacaagccgggagcagacaagaggccaccagcccccgggccaagag

SEQ ID NO: 212834 - RNA, 71 nt, Homo sapiens
agcagcacgcacgaccaaaagcaggaccaaaagcgggggaacggcgagggaacccaggaaggagggcgaca

SEQ ID NO: 212835 - RNA, 112 nt, Homo sapiens
cgccaccagaaggcccacccacgccaggagccccgacaccacccggagacacggcgccagccgaggaaacccagaagaagcgccaaaagaagaagacaagcagcacacggca

SEQ ID NO: 212836 - RNA, 75 nt, Homo sapiens
gagggaggagagaaagaaaggaagagcagcagaaggaccgcgaagcccagagcacccaaggaccacccccacagg

SEQ ID NO: 212837 - RNA, 53 nt, Homo sapiens
agaacaaaccaaaccacgaaggccaagagagcaccgccggccaggaggagagc

SEQ ID NO: 212838 - RNA, 82 nt, Homo sapiens
ccccggccgccaaccggcgccgggggacggcgcggaagaagcgcgcggagcgcgggagggcaaggaaccaccccagccccaa

SEQ ID NO: 212839 - RNA, 86 nt, Homo sapiens
gcgagcacagagcccgccgccgaccgccgcccgccacacccgccgccaggcggccacagggaccaacgcacaaaagcaacacaagc

SEQ ID NO: 212840 - RNA, 82 nt, Homo sapiens
gggcccagacccggcggagcagaagagggccgagacacacgcggaccaagcgcacaagagaaggagaggcacaaacaaaaca

SEQ ID NO: 212841 - RNA, 54 nt, Homo sapiens
ggcgaaaagacaccaaaacaaggaagaaaacaggccagccagcaggcaacaggc

SEQ ID NO: 212842 - RNA, 71 nt, Homo sapiens
ccaccaaagccagcgcaaagccacaaacagaaggaagagcccagaagcgaggcgaagcagcggcgagaaac

SEQ ID NO: 212843 - RNA, 96 nt, Homo sapiens
aaaaccgaccagggcaacaccaaaaacaaaacgaaccaggacggcaaccgggaagaccagaggaccagaacgccacaacccacgggggaccggaca

SEQ ID NO: 212844 - RNA, 67 nt, Homo sapiens
gcgcaccagaggcacacagaagggcacgaaaggcaagagagggcacaaagcaaccccaacagagcgg

SEQ ID NO: 212845 - RNA, 79 nt, Homo sapiens
cacccaggccccaagagcaaagccacgaggcccggccaacgcaacagggagcccacgcaagaggggccggggaccgccc

SEQ ID NO: 212846 - RNA, 77 nt, Homo sapiens
gcgcgagcgggaaaggccgcgggggcaacggagaaaacccggaaccgcgacggcggcagccaccaccgcccagcgcg

SEQ ID NO: 212847 - RNA, 54 nt, Homo sapiens
cacaggcaggggagagcgaagaagcaaacaagggcagacccaagcgagaggcac

SEQ ID NO: 212848 - RNA, 80 nt, Homo sapiens
ggcagagaggaacgggcgggggaggagcgcgagcccggcagagccaggacaaaaccaggcagaaccaacacgaacccaag

SEQ ID NO: 212849 - RNA, 79 nt, Homo sapiens
cgaggcagaagacggggcccgggaccacaggccccggcccagaggggcacccgaggaggaagagggcagggcccacgga

SEQ ID NO: 212850 - RNA, 72 nt, Homo sapiens
gaggcccacagaaaacgggcaccggaagccagaaagaggaggaaaacagcgcacagaagcagcagcaaaccg

SEQ ID NO: 212851 - RNA, 112 nt, Homo sapiens
ggaagagcgagagaagcggcggaggacgagcccgggagcgacccgcgcaaacaaacagaccaggcccaccggcgaaaaacacagccgggagacagaggaacagagggggagc

SEQ ID NO: 212852 - RNA, 74 nt, Homo sapiens
gcgcgggaccaagggcgcccggaagaggcccccccggaaaccagcaggagccaccggaacgacggagcagagga

SEQ ID NO: 212853 - RNA, 83 nt, Homo sapiens
cacgagccagccgaccgggcagcggcgaggggacggagccggacaggagccgccgccgccaacaggaccagcccaggagagga

SEQ ID NO: 212854 - RNA, 85 nt, Homo sapiens
gagaggacgggaccaggcgaagcggccgagcaggcgagcgaacgacgagcccgcaggaagcacacccaggcggcagacaggagca

SEQ ID NO: 212855 - RNA, 73 nt, Homo sapiens
gggccagccaccagaaccggagacgccgggcagcaacccaccagacgacaacaccgaaacaaacaacagaaaa

SEQ ID NO: 212856 - RNA, 78 nt, Homo sapiens
agccgcaccacaggcgggccgcaaggagcggacccaccggccaccggcggagcgaggcgagagccacagaaggaggag

SEQ ID NO: 212857 - RNA, 88 nt, Homo sapiens
agacagcggagaggagagcgggcggaggacgaggaaggaagcagccaccccgccaggccccccgcccgccgcccccggaggaggacga

SEQ ID NO: 212858 - RNA, 75 nt, Homo sapiens
ccgcccaaggcgcaacgggggggaaacacaaagaagacaccagaagggccagcaccacgacaacacggcgacaga

SEQ ID NO: 212859 - RNA, 87 nt, Homo sapiens
cccacaggcccgcaagcggcagcgggggcagagacggggaacagggccacccacacggacgccaacgcgggggcagaaccggagcgg

SEQ ID NO: 212860 - RNA, 60 nt, Homo sapiens
gaccaccccgggagggaagccccgaagaacggccccccagcaggcacccagccaggagac

SEQ ID NO: 212861 - RNA, 47 nt, Homo sapiens
caggcacagagagcaaccaaacggcggccaaagcgccagacaagggc

SEQ ID NO: 212862 - RNA, 37 nt, Homo sapiens
ggagcaagaaacgagagcacaggcgcaaagccacaag

SEQ ID NO: 212863 - RNA, 70 nt, Homo sapiens
caggcgggccaagcaggaaccagcaccgccggacccaggacacggggaacaccaggcaggaaaacaagca

SEQ ID NO: 212864 - RNA, 76 nt, Homo sapiens
aaaccaacaccgaccaaggagaccccaaggaaaaaaccggccaggaaacgcgagaagcaccggaaccaaaagggag

SEQ ID NO: 212865 - RNA, 79 nt, Homo sapiens
gaaaaccaaccaccaacaacacaaagaaaaaacgcgccagagaaacacaaaaagacgcacaaaggccggcccaggcgga

SEQ ID NO: 212866 - RNA, 71 nt, Homo sapiens
gacagcagagacgacgcggcaagcagcggaagaggacgacgcgacacaaacaaaagaaccaaagaagagcc

SEQ ID NO: 212867 - RNA, 83 nt, Homo sapiens
ggggaccgagccgggaggccggccgggccagcacccggccgagacggcggcagcagcggcacagacaagccgagaccaccagg

SEQ ID NO: 212868 - RNA, 82 nt, Homo sapiens
gcagaagaaaacagaaaaacccagacacccgcgacagagacagccgacgaaaagagacaccaggcgccgagaaggccagcag

SEQ ID NO: 212869 - RNA, 77 nt, Homo sapiens
accccggcccacggccgacagacggcagccggcacccgcacaacccagggggccgaacccagaccaacaaaaggacc

SEQ ID NO: 212870 - RNA, 60 nt, Homo sapiens
caagaacaacagcaggccaagcccgccggagaggaagcccaaaaggaaagaaccagagac

SEQ ID NO: 212871 - RNA, 56 nt, Homo sapiens
aaggccggagacaccagcaggcaaacgccggaagaacacagagggccaagagcgac

SEQ ID NO: 212872 - RNA, 47 nt, Homo sapiens
gaccgagaccgcggccgggaccgagggccaggcgcacgaagaaaagg

SEQ ID NO: 212873 - RNA, 76 nt, Homo sapiens
acaccagagccgggccagaaaggcacgcaaaaacagccaacgaaagaaacggcgaggccccaagaccagccacgag

SEQ ID NO: 212874 - RNA, 67 nt, Homo sapiens
gccggcagagaggggcaggaggccaaaaggggggcccacaaggagcgcccgcggggccagagagccg

SEQ ID NO: 212875 - RNA, 62 nt, Homo sapiens
cgacgccggacccagaaagacaaacgcagaggccaaggagcgggcaaaggaagggaggggcc

SEQ ID NO: 212876 - RNA, 82 nt, Homo sapiens
ggcgcacacagagcagagacgagcgaggcggagggagaagcccgacggagcagcagcgccgggaaggaaagcacacaggaca

SEQ ID NO: 212877 - RNA, 83 nt, Homo sapiens
ccaccggagaagcgagaacggaccaaccaagaagcgaagaaaagagaaagaaacagacaagcgagagagcagcgcaacaggaa

SEQ ID NO: 212878 - RNA, 83 nt, Homo sapiens
ccccacagcccgaaaaccagggacacgcgccaaaggcgcgggaagcgcagggaagggaaccgaaaccagggggcacaacaaag

SEQ ID NO: 212879 - RNA, 74 nt, Homo sapiens
gcgcccaagaccggagagagggagacgcagcaaagagccacaagcccgcaccaagcccagaccaggagccggag

SEQ ID NO: 212880 - RNA, 82 nt, Homo sapiens
ccgcaaggggcccgcgggggcgacggcccccggggggggagccccgccagggcccaggacagaagccccagccccagcccac

SEQ ID NO: 212881 - RNA, 61 nt, Homo sapiens
agaacacgaacaaagagcgaccgagaaaaaccgaaagagccagcaaccccgcacaaaccca

SEQ ID NO: 212882 - RNA, 79 nt, Homo sapiens
gagcaaaaggcgaggagagagcgcgacgggggagaggcaccagcaacagaccaaccgcagcaagcacagagacaggaag

SEQ ID NO: 212883 - RNA, 81 nt, Homo sapiens
gaggggcaggaaagccacaggcagcgggcggcagcacagccccaggggagggccaaagcaccaaggccgaggacgcgaagc

SEQ ID NO: 212884 - RNA, 77 nt, Homo sapiens
aggcgcccggcggagcagaggaaccacacgcgacagggaagcaaagcgaagcaaacccccgaagcagagcaggaagg

SEQ ID NO: 212885 - RNA, 34 nt, Homo sapiens
accagagacgcccaaggaaccaagaacagagacc

SEQ ID NO: 212886 - RNA, 92 nt, Homo sapiens
gcaaagagacaaggagagaagaaccaaagaagcaaaacacgagaacacgggcagaaggagaccacacgagaaacaacggaaggagcgcaggc

SEQ ID NO: 212887 - RNA, 80 nt, Homo sapiens
cgcagcagcaccaggaaccggaggccggccggagaggagccggaacaagcagggaccgacacaggcaggagaagggcacc

SEQ ID NO: 212888 - RNA, 106 nt, Homo sapiens
gagcgggggcgcgcccgccgacccgcgcccgccccccagcaccgggcggacggaagcgaaagggggcagacagaagagagacgagcaacccacgcaaaaaggagag

SEQ ID NO: 212889 - RNA, 75 nt, Homo sapiens
ccagggaaggggcagcacagaaaaccagagacccagacacgcgaaggaacgaaaggccaaaaggcaaaagacgac

SEQ ID NO: 212890 - RNA, 63 nt, Homo sapiens
aagcggcggggagcggagcgcgggcaccacgcaagagccacccaccagaagccggccagaccg

SEQ ID NO: 212891 - RNA, 75 nt, Homo sapiens
ggccccccgaacagcaggcgccaccagcccggaggcacggccccggcccgcaggagcggccgggggaggaccgcg

SEQ ID NO: 212892 - RNA, 35 nt, Homo sapiens
cagcccaaaacagggcgcagcaccagaccgagcac

SEQ ID NO: 212893 - RNA, 86 nt, Homo sapiens
aggaggagcgaacaccgccgcggcccccgccggcgcgggagccgggaaaccgaagaaggcagagaaggcaaacaggaggcgcggga

SEQ ID NO: 212894 - RNA, 78 nt, Homo sapiens
agccgcagacaagaaacacgagagaggaagaaggggaaaagcacagaaaccaggacggggcgggaaccaggagaaaag

SEQ ID NO: 212895 - RNA, 86 nt, Homo sapiens
agacagacacaagcgggccaacaaaaggcccccgacagcgcccgggagccgcccccgacacccgagccccgccggcgcccccgccc

SEQ ID NO: 212896 - RNA, 73 nt, Homo sapiens
agcaaaaccgccggccggaccagaccggggggaaaggcgggcgacgccaggagcacaccgaaaagaaaggaaa

SEQ ID NO: 212897 - RNA, 82 nt, Homo sapiens
aaaacacaaagaggcagcaaagggggacgaccaccagccaggccggggacaaacaggcaaccgacggggaggggcaagggca

SEQ ID NO: 212898 - RNA, 85 nt, Homo sapiens
gcgccggagcccgagggacggggacggagagaacacgagcccacaggcgaggaaaaccaccacacaggggaaacacccagacaac

SEQ ID NO: 212899 - RNA, 79 nt, Homo sapiens
cccggaacaccaggacgcggagacaaacaggaccaaccggaaacaggggcaagaaaggaagaaaacgaagcagaaaagg

SEQ ID NO: 212900 - RNA, 79 nt, Homo sapiens
cagaagacacggaagagcagccgggagggccgcaaagggaccccgggaagacgaaacaggacggcccaaaagaggggca

SEQ ID NO: 212901 - RNA, 79 nt, Homo sapiens
aagggcacacaaaggacccaccgggaaaggacagagcagcacccaaaacacccgaggcaaccaacacaaggacagagac

SEQ ID NO: 212902 - RNA, 61 nt, Homo sapiens
accgggaagcagcagaccagggaggcaagaccgacagccaggggggaggagagggcccggg

SEQ ID NO: 212903 - RNA, 71 nt, Homo sapiens
aaaagaacccagacaagaggcaccacagaaggagacccccacagccaccccgcagcaacgaacgagcagcg

SEQ ID NO: 212904 - RNA, 58 nt, Homo sapiens
acaggccaaaacggacccgccagggagaccagggggcaggggaggagcgcccaggcga

SEQ ID NO: 212905 - RNA, 70 nt, Homo sapiens
gaaaagcaaaaaagacagggcccaagcagagacaaagagggccgagacaagaaacggaagaaagaccccc

SEQ ID NO: 212906 - RNA, 69 nt, Homo sapiens
agcacccggcaagaagaacacagggggaagccaagcagaacaagagagaacggcacggggaaaagggac

SEQ ID NO: 212907 - RNA, 85 nt, Homo sapiens
agaggagcagaaggagcaaaaggcggacaggcagcgccccccccaacccaacggcaccaaggaagagagaagggaaaccaaagga

SEQ ID NO: 212908 - RNA, 79 nt, Homo sapiens
agcgacgccggcgccgagggacaccgcagagaggcagagagaggagccagccacacggaaagaagaaaagaaaagagag

SEQ ID NO: 212909 - RNA, 58 nt, Homo sapiens
aggacaggaagggccccgaaaagaacagaagaggggagcaccccggggagacaccccg

SEQ ID NO: 212910 - RNA, 76 nt, Homo sapiens
gaccaaggggaccccaggcccgccacccaaagcaccaccgcgccggagcgcaccaggagacgcggcaggcaagaac

SEQ ID NO: 212911 - RNA, 81 nt, Homo sapiens
agacccaagacacgaacgcgacgcggacacaagcaaggaggaagaaccaacagagaaaaaaaccagaaacaacccaaaccc

SEQ ID NO: 212912 - RNA, 74 nt, Homo sapiens
ggagaaggaccaagaaccagggcggagaacggaaaagcaccaggaagcagagaggaccgcagaagggaaggaga

SEQ ID NO: 212913 - RNA, 59 nt, Homo sapiens
ggcaacccaggcacgaggccagccgaaggacaaggaagagaggcccaagacccagagga

SEQ ID NO: 212914 - RNA, 69 nt, Homo sapiens
aagccacagcaccccagcacccagacgggaagacagggccaccgcagcccaggccgccaggagcgcggc

SEQ ID NO: 212915 - RNA, 53 nt, Homo sapiens
ccgcgacagcgaacagcgcggccgcagggagcaggaagaagagagccaagcga

SEQ ID NO: 212916 - RNA, 75 nt, Homo sapiens
gggggcagccgcagaggcgcgaacacccagccacccaccagcgacaaggcagggccagccaacagccagccccca

SEQ ID NO: 212917 - RNA, 75 nt, Homo sapiens
cagcacccggccgagacggcggcagcagcggcacaggaacggggacagaacaaacgggaaacaggaaccaagcca

SEQ ID NO: 212918 - RNA, 60 nt, Homo sapiens
caaaaaagaacgcaagagaagcacccagaagaacgcccagcagcccgagaaaagcacagc

SEQ ID NO: 212919 - RNA, 72 nt, Homo sapiens
ccagcaccgcggccggcgcagcaacaaggggacccccaaaagacaagggcaaaacggaccagacacaaagag

SEQ ID NO: 212920 - RNA, 70 nt, Homo sapiens
cgcgcgggcaccgcgcggagcaaaaaccgaaaccgaaaaggccaacggaacaaagcccggcacgagacac

SEQ ID NO: 212921 - RNA, 71 nt, Homo sapiens
ggacagaacacagaaggacaaagaaccaagcagacagccaacaaaaggagcagggacggggggaaaagcgc

SEQ ID NO: 212922 - RNA, 71 nt, Homo sapiens
aaggaacagcagacaagacgagcccaccacggacagcaaacagggccccgagacaaggccccggcgccgac

SEQ ID NO: 212923 - RNA, 68 nt, Homo sapiens
aagaagaccagaaccgaagagacccaaccaccagagcggacggcagcggaaacgaccaagagacggac

SEQ ID NO: 212924 - RNA, 72 nt, Homo sapiens
cgacgcaccgagaaaggaaggaaaaccgacgaagggaacaggcacgccccacccgccagccgagcccccgac

SEQ ID NO: 212925 - RNA, 66 nt, Homo sapiens
gcaacaagacacggagcaaggaggaaaacacacggaacgcaggagaaaagagaagagacacgccac

SEQ ID NO: 212926 - RNA, 75 nt, Homo sapiens
gccgggaagcccggagacacagcggcgcaagcaccgcgccggcaggaacggcaggggaaaaagaaaagggcgaag

SEQ ID NO: 212927 - RNA, 74 nt, Homo sapiens
gcgagggaagcggcacgaacaccaaggcagaacagcgaacaaccaccccccaaccacgggagcggaagacccgg

SEQ ID NO: 212928 - RNA, 72 nt, Homo sapiens
gacggacagaggagcacgccaacccaaccgaacacacaggaacaaaagaaaaagcagcagaaaaccccaaaa

SEQ ID NO: 212929 - RNA, 66 nt, Homo sapiens
gggagaacaagcaacggcggacacagcccagccaacagggcagagaagaccggcagagccaggaac

SEQ ID NO: 212930 - RNA, 79 nt, Homo sapiens
gacacagcaagacggagacagcagaaggaagaacgagacgccaaacaagaagaaggaaccacaacagagcgcagaagga

SEQ ID NO: 212931 - RNA, 88 nt, Homo sapiens
gaccccgcaaaacccgcgccgacagggaggcgggcagggaccggaaggccgaaaacgaaaggaggagccaagccacaggacccaagag

SEQ ID NO: 212932 - RNA, 71 nt, Homo sapiens
cagaacaagagagaccaggggcgaccaaggaacgaccaaagcagaagccgcaaacagccaaacgaaacaga

SEQ ID NO: 212933 - RNA, 75 nt, Homo sapiens
aggaaggagaaaaggggccccagaaaggggacagaaggaccaccagggccaggggccggaggcagcggcaggcac

SEQ ID NO: 212934 - RNA, 50 nt, Homo sapiens
cgcaagacagggaagcgccccacagcccacccggcggccaccaggaagcg

SEQ ID NO: 212935 - RNA, 73 nt, Homo sapiens
gagcacgaaggggagaaaagggaaggccccaagccaagggcggagaacggaaaagcaccaggaagcagagagg

SEQ ID NO: 212936 - RNA, 32 nt, Homo sapiens
cgaaacgcacgagaagagcccgccagcagcca

SEQ ID NO: 212937 - RNA, 87 nt, Homo sapiens
gaagcccagaagaccagcggggaaacagggagaaacaaacaccaggagagaaggaaccggacgacgaacacaggcccgccgccgggc

SEQ ID NO: 212938 - RNA, 74 nt, Homo sapiens
cagcaaccgaggagcaaggccaaaaaaggacaagcaaacgggccaccccaggccaccagcaagaccaccccccg

SEQ ID NO: 212939 - RNA, 75 nt, Homo sapiens
aagaacgaacgagacgacagaagaccagaagccacaccaggcccccggccacacggccacaccagagcccacagc

SEQ ID NO: 212940 - RNA, 64 nt, Homo sapiens
gaaagaagccacggaaaccagacggccagcagagaggaaaaaggcggacgggccccgaagccca

SEQ ID NO: 212941 - RNA, 69 nt, Homo sapiens
ggccggaaaaaggcgacgggcagaggaaggcgaagcacaaggaccgaggaaccacgccagggccccaaa

SEQ ID NO: 212942 - RNA, 62 nt, Homo sapiens
gggaaaggcgacgcccacgcgcccgcaacaggagaacggagaaacgaggccggagaaagggc

SEQ ID NO: 212943 - RNA, 101 nt, Homo sapiens
accgcggagcaagaaaaagagccgacggaagagacagagagggaagaacccccagaaaacgaaggaaggaggacccgaggagagagaagacggaaaggaaa

SEQ ID NO: 212944 - RNA, 74 nt, Homo sapiens
aaaccgcgccccaaagggaagaccgacacaggaggaacccaccaaaccaacacccagccaaggggcaggagaga

SEQ ID NO: 212945 - RNA, 82 nt, Homo sapiens
ggcgggagcccgggagggcggccgcagggagagcgggacggccccaaggccacagaaaaggagaccagccccacgcaggagc

SEQ ID NO: 212946 - RNA, 89 nt, Homo sapiens
gcaaacgcagaaggacgcccacgagcaaccaagaggcaccgcacaagcacgcaaccggccagcgcacaaaagggcgagagagggccgcg

SEQ ID NO: 212947 - RNA, 102 nt, Homo sapiens
cgccgagacgcagagcccgggccgggccagcaggcccacaacggggcacgaccgagggcaggaacagagacagacccgggggcccccaaggagagggaagaa

SEQ ID NO: 212948 - RNA, 54 nt, Homo sapiens
gagggcccacgggccccggaacacaggggcggacgcagcccccaacccgaccgg

SEQ ID NO: 212949 - RNA, 51 nt, Homo sapiens
cagacaccgccccgagacgagcggaaggagagacaggaagggcacagaaac

SEQ ID NO: 212950 - RNA, 61 nt, Homo sapiens
ggaaaggaaaaggaacagaaacacggacagcccgaaacagcccacgccaaaaagggaaaaa

SEQ ID NO: 212951 - RNA, 70 nt, Homo sapiens
acccagcccaccaaacacgccggaaaccccgcccacagcacgaggggggagaaaaggccaagggcaggag

SEQ ID NO: 212952 - RNA, 72 nt, Homo sapiens
cacgggggagaaagcggcagacgggcgaagagagaacacgcacggaaggaaggagaccacgagaaagaaaaa

SEQ ID NO: 212953 - RNA, 84 nt, Homo sapiens
caaccgggccacaagagaaagagcacgcgaagccgacgagcccgaacagacgcaccagcgggaggaagagggacggcccaggag

SEQ ID NO: 212954 - RNA, 67 nt, Homo sapiens
ccgaacgcgagggcggcgcccggggacggagcgcgcgcaaagggggggccccagcccggccgaacgg

SEQ ID NO: 212955 - RNA, 80 nt, Homo sapiens
ggcggcgccgaggggaggaggcggaaccgaggggggcgccgggccacggggacccgcccgagcgcggcagcgggaccagc

SEQ ID NO: 212956 - RNA, 57 nt, Homo sapiens
agaaggacaaagagacaagccgagagaaagcaagcaaaggaggcacaaagagagacg

SEQ ID NO: 212957 - RNA, 80 nt, Homo sapiens
ggacacagcaacaagcacccgacaggaggacgcccgccaggggagcagacagaacacccgggcccagccggggaccgcac

SEQ ID NO: 212958 - RNA, 76 nt, Homo sapiens
gcaggcacacagcaaagggccgcggaggggagccggccagccccacgaagccgaacccagaaaacgcgggaaacga

SEQ ID NO: 212959 - RNA, 76 nt, Homo sapiens
gcgacggcagggcgaggcacggggagggacgaaggggccgaccccagggccggcacgggccggaccacagaaggcc

SEQ ID NO: 212960 - RNA, 75 nt, Homo sapiens
ccgcggcaagaagacgcccacgaagccggaaaaagccaagccagaccccgcagacagggaggacccgagcccggc

SEQ ID NO: 212961 - RNA, 55 nt, Homo sapiens
ccggaagccaggcacaccgcaaggacccaaaggggagggcaaggccagagaaggc

SEQ ID NO: 212962 - RNA, 53 nt, Homo sapiens
acgaccgaaaccacagcgaagggaaaagaagagacaagggcagagccaagcgc

SEQ ID NO: 212963 - RNA, 74 nt, Homo sapiens
accgggacggaccgagaccggaccgagagcggaccgagagcgcgaaacgcacgagaaggcgggggaaagaaccg

SEQ ID NO: 212964 - RNA, 81 nt, Homo sapiens
caacgaccggagaggggaacagacgcagggcagggccccgcccggcggggaagggcggcacccaccccccgagcccgcccg

SEQ ID NO: 212965 - RNA, 77 nt, Homo sapiens
ccaaggccgagagccggaacaaacgagggcccgggaggaccgacgcagccaggagcgaggagcaagagaacccagaa

SEQ ID NO: 212966 - RNA, 71 nt, Homo sapiens
cccccagaaaagcaaaccagcagcggggaacagaggccgaaaggggaaacagggacgacagaaaaaaaaaa

SEQ ID NO: 212967 - RNA, 75 nt, Homo sapiens
ggcagacaaaagggccaaagaagggagagagggcccaccgaaaagcgagaaaggccccagaccaccaacaccagc

SEQ ID NO: 212968 - RNA, 87 nt, Homo sapiens
cggggcccaacaggcggagagagaggggagccggcccccgaaagagggaacaaaccgaaggcaacggcacaaaacagaagcaggcca

SEQ ID NO: 212969 - RNA, 72 nt, Homo sapiens
cacggcgccccgcaaggcggagccccggccacacccgccccaccaaggagaggaagaggagagcggagcacg

SEQ ID NO: 212970 - RNA, 84 nt, Homo sapiens
ggcgaggcagacggaagccagaagcaggcccccaccaaggaaaaaacgagaagaccccaaaaccagaaaaaggccacaccacgc

SEQ ID NO: 212971 - RNA, 73 nt, Homo sapiens
ccggccggagccccagggccgaggccgcagccaagccggaacaggagcggcgagcccaaacgcaagggggaag

SEQ ID NO: 212972 - RNA, 75 nt, Homo sapiens
gaggaaaaggacagaaggcaagagaaagaagacacagaaaaagagagacgcaaaggagaagagagagccaacgga

SEQ ID NO: 212973 - RNA, 70 nt, Homo sapiens
ccgcccaccggcggccacgcaccgcgcgaagacggaagacgcgcccgcgccgggcgggaaaaagaaagcc

SEQ ID NO: 212974 - RNA, 73 nt, Homo sapiens
gccaaaacgcccggcggaccacggccgcagcacgccaccacagagaagacaccgaaacggcgcacaccacagg

SEQ ID NO: 212975 - RNA, 52 nt, Homo sapiens
ccggcaccaccaaagaaccgcgggagcgacggaggccacaccggaggaaagg

SEQ ID NO: 212976 - RNA, 69 nt, Homo sapiens
ggggccggggcccgcagaccggaagccaacagcagcaggggaacccaacccagccgccgagccccagag

SEQ ID NO: 212977 - RNA, 68 nt, Homo sapiens
gaccaggaaaagcagaaaacgagcacggaacaacagagaacggaagccgaagcagcgcggaagcagca

SEQ ID NO: 212978 - RNA, 37 nt, Homo sapiens
acccaccacagacagggaggccgagccgaggaagagc

SEQ ID NO: 212979 - RNA, 75 nt, Homo sapiens
acgagaagccccccgagagaaagggcgcaaaaagaaagaaaacaaaagccagccaaaaacagaccgaaaaaccca

SEQ ID NO: 212980 - RNA, 77 nt, Homo sapiens
gcgccacgaaccaaagggcaggcgccccaggagccacacgggcagcggggagaaaagaaggacggcccgccgagggg

SEQ ID NO: 212981 - RNA, 74 nt, Homo sapiens
caacaaggagcagcaccagcaccaacaggaccaaagacccagacagacagcgcggcaggagcacccaaggggga

SEQ ID NO: 212982 - RNA, 82 nt, Homo sapiens
gaagagaagcaaaaggaaggaggcaaaaagaagaacaaagaaggacggagaggaggcgagcgagagggaaaagaggacgagg

SEQ ID NO: 212983 - RNA, 73 nt, Homo sapiens
gagaccaaaggcagggcaaggaaacggccacaagcagcagggcggccaggacgagcccggaaaaccacgaagc

SEQ ID NO: 212984 - RNA, 74 nt, Homo sapiens
gggccgaccgccacaccacccgggaaaccacaagaaccgagggaggaaggaaggccaagggagcagcgaaagac

SEQ ID NO: 212985 - RNA, 71 nt, Homo sapiens
aaaacggaaacacgacagaagcagggcgaaccagagaaaacggcaaggaagcgccagaggaccaaagaaaa

SEQ ID NO: 212986 - RNA, 72 nt, Homo sapiens
gaagccgacagacaaccagggaccacgacaaagggaggacgagaacccggaggagggcagccggacacgcac

SEQ ID NO: 212987 - RNA, 73 nt, Homo sapiens
caaaccggaaacagcacaaacacagcggggggggccccgcgaaggcacggaaaagcccaagcagcaaaggcac

SEQ ID NO: 212988 - RNA, 87 nt, Homo sapiens
aagaggaggacaaaaccgccaaagccggccccggcaaggaggaaggggcaccggcacaccgaagaggcaaggcagcgagggaccaga

SEQ ID NO: 212989 - RNA, 78 nt, Homo sapiens
agcccccccagccgaaacccgagggccccagagcaaaggccagccccccagcgcggccaaggagccaggaccagcaag

SEQ ID NO: 212990 - RNA, 79 nt, Homo sapiens
caccgcccaggcgcggaagagaagcagcggcaggaggagcaaccccacaagcaggacagccggacacacaagaaaggga

SEQ ID NO: 212991 - RNA, 69 nt, Homo sapiens
aacaggaaaacagacggcgggggaaccaagaccaggacaaagaagacccggagagacaagccggaggac

SEQ ID NO: 212992 - RNA, 82 nt, Homo sapiens
aaaagaaagcaggcgcgaaagcacgagaggaacagaaaggccaaacgaccaagaaagcgggacgcggaaaacgggacccgca

SEQ ID NO: 212993 - RNA, 83 nt, Homo sapiens
cacacccaagggcagcaacggagccaggcagaggaccacaccgggcaccccccccacgcaaaagacccagcggcgccaagaac

SEQ ID NO: 212994 - RNA, 68 nt, Homo sapiens
cggcccggcccgcgccgacacgggcggggacccgccgcgacaccggcgcaggccaaagaccccccccc

SEQ ID NO: 212995 - RNA, 72 nt, Homo sapiens
accgccacgccccgcagggacaacacacacaaagaggcagaaaaagaaaacgggaacaaccaccgcaaagcg

SEQ ID NO: 212996 - RNA, 79 nt, Homo sapiens
gaccgcacacggccacccgagggaaagggagcagcaccggccacacccacagcacgaccggaacccagcgaccgacgcc

SEQ ID NO: 212997 - RNA, 70 nt, Homo sapiens
acacaccacggggccagggagcagcacagacccagacaagagcgagcaagccgccgcagcaagccagaga

SEQ ID NO: 212998 - RNA, 59 nt, Homo sapiens
cagcggaaaagaccagcacagccacccacacagaaagccagggccggagggagaacaga

SEQ ID NO: 212999 - RNA, 78 nt, Homo sapiens
gccggcgcaggcggcggccaaaccccgacaggcaagaacagaagaccggggaccagaagggagaagaagcaaaaggaa

SEQ ID NO: 213000 - RNA, 68 nt, Homo sapiens
aacggcaaccggccccgcgacgacagacaaaggaaacagaagacagccgaaccaagggcgacaaccag

SEQ ID NO: 213001 - RNA, 75 nt, Homo sapiens
aagcaccccagagcaagagaggccagaccaacgggagccgcaaggacaacagccgcggccagacagcggccggag

SEQ ID NO: 213002 - RNA, 65 nt, Homo sapiens
cacaaaaacccacgcagccgggagaaaaccggcgcagagccaaaaggaaccgaggaaaagcaggg

SEQ ID NO: 213003 - RNA, 80 nt, Homo sapiens
cgggacccggccccggcccacaggggggggcaaacccgagagaacggaccaaaaaaggacccaaagagcaacgaccacaa

SEQ ID NO: 213004 - RNA, 71 nt, Homo sapiens
gaagagccagagcgggaggacgacgagagagaaggccgaggagagagcacccagaaagaagagaccaccgc

SEQ ID NO: 213005 - RNA, 65 nt, Homo sapiens
ggaccgcagcagcgagaaaggagccggggaccccccaaagacaaggagccagcaccgccgaccgc

SEQ ID NO: 213006 - RNA, 57 nt, Homo sapiens
ccagaggccggcacggagcgcgaaaggcacaaggaaaggaaggaagggaacacggac

SEQ ID NO: 213007 - RNA, 78 nt, Homo sapiens
acagagcgcgcagacccagagaccggagccccaggcggggccagaaaaggacacgacccaccgaggggcgaccggggc

SEQ ID NO: 213008 - RNA, 79 nt, Homo sapiens
caaaaaggagggcaaaggagaggagccacgccgggaacccaggcagcgaccccagccccgcaaaaacagaaccaaaaaa

SEQ ID NO: 213009 - RNA, 67 nt, Homo sapiens
ccgcacccccggcgccaagaggccgcgcgaaaggccaaccggcgccaaacgccccgggcccacgacc

SEQ ID NO: 213010 - RNA, 73 nt, Homo sapiens
gaccgaccccaacgcagggaggggcaaagacaaggcaggggcgccccagaacaaaccagaagcagaagggagg

SEQ ID NO: 213011 - RNA, 77 nt, Homo sapiens
gcaggccgggcaggcggcaaccaaacggcgccaaggcagaccgaccaaacagggagcagcggacaggagacaggaac

SEQ ID NO: 213012 - RNA, 70 nt, Homo sapiens
cagagacagagaagacaacgcggaagaggagaaccggaaccgggagcacaggaggcgcgagacggcagcc

SEQ ID NO: 213013 - RNA, 68 nt, Homo sapiens
gacgcacacgaggcagcagaacgccaggagccagaaccccgaggaaaggggaaaagccgcaaccggca

SEQ ID NO: 213014 - RNA, 70 nt, Homo sapiens
cccagagaagaagggcaacgaacaagggcaagggaagaagaggagaacgaacggagaccaagaggagagg

SEQ ID NO: 213015 - RNA, 75 nt, Homo sapiens
accacagaacccaacaggagacaaccgccacgccaaagaccacgggggccaaacaccaggagaagggcgagccaa

SEQ ID NO: 213016 - RNA, 77 nt, Homo sapiens
aaacaagcgaagcagcggaaaaggggggaaaccccgaaacaccggaaggacggcacaagaaagaaaggcggcagaga

SEQ ID NO: 213017 - RNA, 63 nt, Homo sapiens
ccccccagcgggcgcgggacaaggcccaggaggccaccagcacggccacgggcggcacggagg

SEQ ID NO: 213018 - RNA, 78 nt, Homo sapiens
gaccgagaccggaccgagagcggaccgagagcgcgaaacgcacgagaagcaacgagggggaaccaagggcggacagcc

SEQ ID NO: 213019 - RNA, 55 nt, Homo sapiens
cccaggccgacagggccggaaggaggaaaagagaagcgggcggaggcgcaaaggc

SEQ ID NO: 213020 - RNA, 49 nt, Homo sapiens
ccccagcgcagcagagcgccaagacgacccggcaggcaccgcccggagc

SEQ ID NO: 213021 - RNA, 86 nt, Homo sapiens
ggcaacgaccgcggggaagaaggccgcgaaagaagggccccacaccaaaccgccacgcaacagacgcagagccagccaggagcccg

SEQ ID NO: 213022 - RNA, 76 nt, Homo sapiens
aagccagaggaagggagcccaaaggacccggcggccaagaccaccaaagagggcccccgaggccacgcggcagcac

SEQ ID NO: 213023 - RNA, 84 nt, Homo sapiens
cacaaaaccacagaaacaaagaccagaccaaggagggacccaacagggacagagccccagcccccagcagccgacaggaggccc

SEQ ID NO: 213024 - RNA, 72 nt, Homo sapiens
ccacccaaagcagacaagaaaagcaagagaaaaggacagagagacgcggccacaaggaaaaagccaggccgc

SEQ ID NO: 213025 - RNA, 80 nt, Homo sapiens
gcaggacaaacagcacaagagcggacaagggccaagcgacagagaagcgacggaacagaaggagggagaagaaaaggacc

SEQ ID NO: 213026 - RNA, 61 nt, Homo sapiens
gagaaggcagaacgaaaggaggcagagccaacagaagggccgccgggcagaagcacgagga

SEQ ID NO: 213027 - RNA, 72 nt, Homo sapiens
cccaggaagcagccagaccaagaacaaccgcggacacggagaggaagggacgacgggggacagaagaggaaa

SEQ ID NO: 213028 - RNA, 75 nt, Homo sapiens
cgggacacaagaaacaaacgaagcacccccaggcagaacggggccccgcacccagacaaacaggcccgcagcccc

SEQ ID NO: 213029 - RNA, 76 nt, Homo sapiens
agcaaaaggaacacacagagagacgcaggaaaaccgcagacgaagaagcaggagggaagaaggagaacaaggagga

SEQ ID NO: 213030 - RNA, 62 nt, Homo sapiens
gcggcagcaagaacagagagagaggggacagacgagagaacgagagcaaaaagcggaaccac

SEQ ID NO: 213031 - RNA, 68 nt, Homo sapiens
aggagccggcgccgcggccgccgcaaggaaacacaacgagaaggacaaacggacaccaggccggcgag

SEQ ID NO: 213032 - RNA, 71 nt, Homo sapiens
gagaccccaggcaccacagcccgaggcccggagcgaccaggggagcgggaggggccaaccgcgcgagcggc

SEQ ID NO: 213033 - RNA, 38 nt, Homo sapiens
cccaccaccgcaaacaggagagaacagcacacagaggc

SEQ ID NO: 213034 - RNA, 75 nt, Homo sapiens
cagcgggggaaccggcgcgccggcgcgcggcgcggacaggcccaaacggacccaaagacaggaccacgcaccagc

SEQ ID NO: 213035 - RNA, 83 nt, Homo sapiens
ccccccgggaacgcagcgcgcaggaccacggggaaagccaagagcaccacacgaaccgaggcacaccaaaggcggaaggagga

SEQ ID NO: 213036 - RNA, 87 nt, Homo sapiens
aaccccagagccccgcggcccggcccggggcagccaggaccgcaggaagaaggagccgcccggcaaagcgaaagcgcaggaccgagg

SEQ ID NO: 213037 - RNA, 76 nt, Homo sapiens
gagccaggacaccccgaaagccggaaaacgacaagagagggcggcagaaggaacaccgagaaaccgcacaccggag

SEQ ID NO: 213038 - RNA, 75 nt, Homo sapiens
cacacaagaacaagccgcggccgagggagaaaggaggccacacccaaaaaagggagggacaaaggccacagcgga

SEQ ID NO: 213039 - RNA, 75 nt, Homo sapiens
agggagacgggccccgcgaagaacgaacaagccggacaaaaaacagcaaaggacagagaaaagccagcgcaagga

SEQ ID NO: 213040 - RNA, 92 nt, Homo sapiens
aagggccgggaccgaaaccagccccggacgagaagcgcagcaacggcgggggaccacgagagcggcgccgaccgaagaaagggaagacaggg

SEQ ID NO: 213041 - RNA, 56 nt, Homo sapiens
acaaaagcaacaaagaggccgcagacccaagcagagaccaaccccccccccagcaa

SEQ ID NO: 213042 - RNA, 79 nt, Homo sapiens
acccccaagcgaccaaggaggagccgccagaacgcggaagcgagcaagaaggccacggccaacagccgaaaacagcaag

SEQ ID NO: 213043 - RNA, 60 nt, Homo sapiens
aggaccaagaaccaggacggcaagccgcaccaccgacacgaacccaagcaacaaaggccc

SEQ ID NO: 213044 - RNA, 83 nt, Homo sapiens
cccaagagggccacggagaagaaagaaggcgcagccaccgccaaccaggccagcaaaccagccagcacgggggcccagccagc

SEQ ID NO: 213045 - RNA, 60 nt, Homo sapiens
gaagccaacacagcgagcgcaggaccaaccaggcaaaagcagaccggaaaacccaccggc

SEQ ID NO: 213046 - RNA, 70 nt, Homo sapiens
aacggggccagaagcaagggcaggaaaggagggcgaaacacaagcaccacccccggaagcaccaggagcc

SEQ ID NO: 213047 - RNA, 36 nt, Homo sapiens
gccgacagcacgccgagaagagaaagagcgcgcacg

SEQ ID NO: 213048 - RNA, 94 nt, Homo sapiens
gaagaggagagggaccacccaggaaggaggggaggggcgcggagacagagcccccggccagcggggagcagaacagcccgggcccccacagccc

SEQ ID NO: 213049 - RNA, 74 nt, Homo sapiens
ccggcagcacccaccccgagccccggcacccagcaagcaacccccagccacaacgcgaaccgggcggacgaagg

SEQ ID NO: 213050 - RNA, 80 nt, Homo sapiens
gggcgccgcgccgcacgagcaccagccagagccaggcaaggacacggagccagcgaaggacggagaacgagccgccaaga

SEQ ID NO: 213051 - RNA, 84 nt, Homo sapiens
gaggagcaccggaaggggacccgaaagaaacgaggagggagccaggagcgcgggagcgaaggccagccacacgcgcaccgccca

SEQ ID NO: 213052 - RNA, 80 nt, Homo sapiens
aagaggaaaaggggagcaggaggcgacaagaggcaaagaagaggacacagagggagacccacggaccagaaaggaacggc

SEQ ID NO: 213053 - RNA, 63 nt, Homo sapiens
gcaagaccaaacccaggaccggaacaagacaacacacacgcaccagggcagaaaaagggagaa

SEQ ID NO: 213054 - RNA, 57 nt, Homo sapiens
acacgcccaacacaagaagggggggccgcccgcccaaggcaggaagaggggccgcaa

SEQ ID NO: 213055 - RNA, 84 nt, Homo sapiens
aagaagggaaggcgcgaggaggaaaggaggacgagaccccaccccggacagaagcaggccaaccacgcggaaccccaaaccccc

SEQ ID NO: 213056 - RNA, 83 nt, Homo sapiens
cagccccgggcagccccgcccggacaggccagggagcggagagcagagaggcagagcaagacgccggacacccacaaggagca

SEQ ID NO: 213057 - RNA, 75 nt, Homo sapiens
gacagccaccaaggagggcccgaccaccacccacagaacccgcaagcccccaaaggagcgcacaccaccccaggc

SEQ ID NO: 213058 - RNA, 75 nt, Homo sapiens
cccgcgaggcgccgagcggcagaccacaggaaagcgcacaaaagaaccggaccaaagcccccaggaacacacaag

SEQ ID NO: 213059 - RNA, 87 nt, Homo sapiens
gaaccggcccgggaccgcaggccccaagaagcccaggacacaaagccgcagaaagaaccgagcaagccaagcccgaagcagaagagg

SEQ ID NO: 213060 - RNA, 78 nt, Homo sapiens
ccccccgcaggcaccgggcccggggcccggcagccccgaggcccccacaacccgaccggagacccagggaagagccga

SEQ ID NO: 213061 - RNA, 84 nt, Homo sapiens
acaagaccacacgaaccgcaccaccagcggacgacccgcgggacaggaagcgaggacgggaagaccacgccccaagggagcaaa

SEQ ID NO: 213062 - RNA, 72 nt, Homo sapiens
caagcgaggaagaaacagaaaagaccaagaccaccaaggcaaaggggcggcaccaggaaaaagaaagacggc

SEQ ID NO: 213063 - RNA, 81 nt, Homo sapiens
cagagacagccaacaaaaacaggcgaggaagggagaagacgaacggggaggcgagaagaggcacgagagacaggaagggga

SEQ ID NO: 213064 - RNA, 40 nt, Homo sapiens
agaaccgaacacacaaagggagacaacagccacacaaagc

SEQ ID NO: 213065 - RNA, 69 nt, Homo sapiens
cgcgaaagcaggaaagggcaaaagcggcaaagggaaaaaggcgcaccgccggccaggaggagagcgcac

SEQ ID NO: 213066 - RNA, 74 nt, Homo sapiens
agcaccaccaaagcgagccagggaaggcgaggggcgagaacgaccggaccggagaagaagagaaacggcaaaag

SEQ ID NO: 213067 - RNA, 74 nt, Homo sapiens
gaagacaaagaagaaggcggacaaaggaaagccaaaacacgacaggaaaaaacaccccagagcgccggggaccg

SEQ ID NO: 213068 - RNA, 79 nt, Homo sapiens
cccggaccggggcgcagggaagaggagagggaagaagggaaggaagagaggggcagaggagacccaggaaccccggagg

SEQ ID NO: 213069 - RNA, 46 nt, Homo sapiens
cgccaagaccgcgcagccgcggcgagagacgaccccagcaaagcga

SEQ ID NO: 213070 - RNA, 79 nt, Homo sapiens
agccccaggccagaagagagacccgacgacggaccgcacacggagaaggaagcagagacggggcaccgcgagccaggag

SEQ ID NO: 213071 - RNA, 45 nt, Homo sapiens
ccaaggaccaccgccccacccagcgccacaggagaagaaaacaac

SEQ ID NO: 213072 - RNA, 55 nt, Homo sapiens
caggacgaaaaaagggcaagaagccagaaggaaagccgcagcggggagaagccca

SEQ ID NO: 213073 - RNA, 81 nt, Homo sapiens
aggcgggaggagcggcagccgcgaggaggcgcgggagggcgagaacgaccccgagacgagggaaaacgggaacacaagcca

SEQ ID NO: 213074 - RNA, 86 nt, Homo sapiens
agagacagaggcaccccggacagagacggaagcacgaaaaacaaaggaggagaggcccaagaccagcgaaccccccgcccacaccc

SEQ ID NO: 213075 - RNA, 82 nt, Homo sapiens
gcgaggcgacggcgcaggcgcaccgccggcaacgccgaggcgccgcacggggccgaggccaccaagcacaaccggggaggcc

SEQ ID NO: 213076 - RNA, 80 nt, Homo sapiens
cgaccccaagacacaggcccccgcagacaccacggaagcccgccaggacaccacccagggaccaagaaaggcccagggac

SEQ ID NO: 213077 - RNA, 73 nt, Homo sapiens
acacaaagggaaagaggagaggcacccgaaagccaggccagaaaacagggacaaaggccacagaaagaggcag

SEQ ID NO: 213078 - RNA, 82 nt, Homo sapiens
gaagaggaagagaggaggcgcgagagcgggaagaggcggcagacagcggggagaagacagaggagccagaccaagagacagc

SEQ ID NO: 213079 - RNA, 62 nt, Homo sapiens
aacaccgcagcgggccacacaaggggaacccggaggcaagacacgaggagaggcgcccagcc

SEQ ID NO: 213080 - RNA, 66 nt, Homo sapiens
ggcgggccgggcagcccggccgacaaccacgggaaccaaggagcaaagcagaagaagccaagaaag

SEQ ID NO: 213081 - RNA, 77 nt, Homo sapiens
acgcacccacgccggaggaggcaaacgagaccgggaagaaggaggcagcggccacaaaagccacagcggaaccggaa

SEQ ID NO: 213082 - RNA, 79 nt, Homo sapiens
aaaaagcacaccggggcagcaagaccccagccaagggaaggaccaggaagcaggcaaggcacacgcaaagcaccccgag

SEQ ID NO: 213083 - RNA, 98 nt, Homo sapiens
cgcggcgcgcgcggacgaagagccccccccccaacaccgcgacacgcaggagggagaagaccaaagaagagagagcaggaccaccaccgcccacagcc

SEQ ID NO: 213084 - RNA, 76 nt, Homo sapiens
gaaggacacagagaaaccaaaagaaccccaaaaagacagcaggaagacagccggacacagagggcgcgggacacgg

SEQ ID NO: 213085 - RNA, 78 nt, Homo sapiens
agaccaaagggcccgcccaagagcgacagccccagaagcaagagaggaaaacagaagcgggcggacagcagccacgcc

SEQ ID NO: 213086 - RNA, 76 nt, Homo sapiens
gcgccaacagccaggaggacccggacggggacagagagcgagaaggcccccggaagcgaagcgccgcgcagaccac

SEQ ID NO: 213087 - RNA, 75 nt, Homo sapiens
gaagcacacaaacaagcagcgagaaaggacagaagccacaaaacacggcacgccagacacaacgagggccagccc

SEQ ID NO: 213088 - RNA, 78 nt, Homo sapiens
aagaacgccagacaaacagaaagacgcaaggcgcgccagcgaaaggaagagcgggcgagacagaaccaggggagcaga

SEQ ID NO: 213089 - RNA, 79 nt, Homo sapiens
ccgcagcgacacaccaagcggaggggacgccacgcaacgccgagggaacaggcacgccccacccgccagccgagccccc

SEQ ID NO: 213090 - RNA, 76 nt, Homo sapiens
gggaacccggcgcaaggcccgacgccgccgcaggaagagggaagcggaggcggagcgcgcggggcaggagcgcggc

SEQ ID NO: 213091 - RNA, 91 nt, Homo sapiens
agccggcaagacgagaaagcagccacgaaggaagacaggaggccgaggagaaagcggcagccaggcagcccaaagaaaacagccccccagg

SEQ ID NO: 213092 - RNA, 73 nt, Homo sapiens
acgcgccgccccccgcgcagccagcccgacgagcggcccggaccgaccagggccgcacaacgagcgcgcgcgg

SEQ ID NO: 213093 - RNA, 73 nt, Homo sapiens
ccgggcaccaccgcacgacaacacacgcccgaccaacaagaggaagcccgagaacacgaaacaaggaagaaag

SEQ ID NO: 213094 - RNA, 83 nt, Homo sapiens
gcaccggcgaccgcaccacaagggacgagaccaaacggaagagaacaggccgagggagagggaaaagcggaacccaccggcgc

SEQ ID NO: 213095 - RNA, 76 nt, Homo sapiens
gaagacccgcccaaaggcaacccggcccccgcccgaccggaacccgggagggcgcagagaaagcgcagaccaggcc

SEQ ID NO: 213096 - RNA, 57 nt, Homo sapiens
cggccaagcgcggagaagcagacaggaagaccgaaaagacgcggccccaaaggaaac

SEQ ID NO: 213097 - RNA, 84 nt, Homo sapiens
cccccccggagacgggccggaacccaagaaggaggcagccggggcggcaagcgggcgaaggacagaaaacgggccccagacaca

SEQ ID NO: 213098 - RNA, 79 nt, Homo sapiens
gaggcggaggcagaggggaggcgcgaaagaacggccgagcgaccaggagaggagcccccgcccgaagaccggggagggc

SEQ ID NO: 213099 - RNA, 106 nt, Homo sapiens
gcccagacaacccaaaacaacggaaaagcaaggacaaggccagggaccaagaaaggcccagggaccaaagcccggacaaggcccgagcaccaggaccgcagaaggc

SEQ ID NO: 213100 - RNA, 83 nt, Homo sapiens
gcagaaagaaagcagagaagaacagggcgggaaaacgcggaacagggcaggagaagagaagggggacagcaggaccacacggg

SEQ ID NO: 213101 - RNA, 74 nt, Homo sapiens
cggggcgagaccccgcccggaccgcagaaagcacaccgagcgccaaacaccgaagaacaaagaaacacgaaaca

SEQ ID NO: 213102 - RNA, 64 nt, Homo sapiens
aaccccaggagggaaaaccagggaagcccagagggggcccggaggggcgcccaggccgagcacc

SEQ ID NO: 213103 - RNA, 60 nt, Homo sapiens
ggaaaggccagaccacagaaggcgaaggggcgccgaaccgagcccgaagggaagggccgg

SEQ ID NO: 213104 - RNA, 79 nt, Homo sapiens
gaaaaggcgaacaacacgaaacagcacagagaaaccgggcgaagcagaaaccacggcgcgagccccggaagccagagga

SEQ ID NO: 213105 - RNA, 68 nt, Homo sapiens
ggagggcccacgcagcgccggacaacacacgaccgcgagagggcgaagaacgccaaaacccaccaacc

SEQ ID NO: 213106 - RNA, 48 nt, Homo sapiens
gaagagcaagagcagcagggaggcgagggaggcggccggagccaaacc

SEQ ID NO: 213107 - RNA, 70 nt, Homo sapiens
accccaaaccaggaaagacagccacggggaaaaggaaggccggaggaggcaacagcggacagcaggaaga

SEQ ID NO: 213108 - RNA, 132 nt, Homo sapiens
gaagaacgagagagaaaagagaggcaaccacagaagagccaaaaccaaaaccaccccaaacagggaccaccaagccaccgcagagcgcagccccgcggacccgaggaccgcccgcgcgcagccgagcagcaa

SEQ ID NO: 213109 - RNA, 78 nt, Homo sapiens
cgggccgaccaaggaccccaagggcggcggaagacgggcagaggagcgaggcaggcaggagacccacccagaagcccg

SEQ ID NO: 213110 - RNA, 55 nt, Homo sapiens
ggcggaccggggcaccggagcgagcgagagccgagaaaagaggagacagagcacc

SEQ ID NO: 213111 - RNA, 73 nt, Homo sapiens
gccccgagagcgggacacagcggaacagagggacaaaaggacgacacccacggaagccggagaaaaccaggaa

SEQ ID NO: 213112 - RNA, 56 nt, Homo sapiens
cgcagaccaccccagagagaagcagccagccaccaagggaggagagaaggaccaac

SEQ ID NO: 213113 - RNA, 80 nt, Homo sapiens
gaagacccagccaaagaaaaaacaggacaagggacagccagagacacaaaaggaggccaaggaaaacaagaagacgaaga

SEQ ID NO: 213114 - RNA, 56 nt, Homo sapiens
agccagccaagaaggccacccggacgaaggcgggcgacgcggggaagggggacagc

SEQ ID NO: 213115 - RNA, 73 nt, Homo sapiens
gaccaagaccacaagaccggcggggggaggacaggcggaggggcccagaaacaggcgcagggagcaggagaag

SEQ ID NO: 213116 - RNA, 74 nt, Homo sapiens
gcgcaaagaaaaccagcccggacccaaagggcagaagcggaagcggagggggcaagacaacacagggcagccca

SEQ ID NO: 213117 - RNA, 60 nt, Homo sapiens
gagacggaggagagggccgggcacaaaggagccagaggaggcgaagagccacgccaagac

SEQ ID NO: 213118 - RNA, 75 nt, Homo sapiens
gaaacagccggaaacgccaaaccccagcaagcagaaaagaagacacggacaacacacaacaggaaggcagcaacg

SEQ ID NO: 213119 - RNA, 76 nt, Homo sapiens
gacagaagaccaggagacagggccccaggggagccgccaccaaaagcagacggaaaacccacggggaagaccacac

SEQ ID NO: 213120 - RNA, 79 nt, Homo sapiens
ccaacagcgccaggggaccacaggcagcaagagcaaccaaaacaggacaagaaacaccaaacaagcaacagccaagaaa

SEQ ID NO: 213121 - RNA, 75 nt, Homo sapiens
gggaaacaagggggccagagaggggcccaagacgccagagacagaccggcagacggcacggcagcaccccacacc

SEQ ID NO: 213122 - RNA, 73 nt, Homo sapiens
gagcagacccggacggaacaggcaaaagaaaccaaaggcagacccagaagagcacaaaacagagaaaagggaa

SEQ ID NO: 213123 - RNA, 80 nt, Homo sapiens
gagcaccagagccaaagaagagggaaaggaacaaccaaacccgaagagggagagacggaagggcagcagcaggaacagga

SEQ ID NO: 213124 - RNA, 61 nt, Homo sapiens
ccacaagagcgcagggagcccaccgggcgggccggccaagggaaacaacacgaggaggacg

SEQ ID NO: 213125 - RNA, 66 nt, Homo sapiens
acggcacaccagcaggggaagaacaaaacaggggaacaaagggacaaagcccccagaggaaccggg

SEQ ID NO: 213126 - RNA, 102 nt, Homo sapiens
aaggagggagaacagcaaaggaggaccaggcagcacaaccgccagaaggaagacaaggcacggccgggaaccccaggccggaggacgggggagcgcgcccgg

SEQ ID NO: 213127 - RNA, 72 nt, Homo sapiens
gaacaacgagagagagcaaaaacaccagacaagaaggggcgggcgcacaggggacaggacaagaggaggagc

SEQ ID NO: 213128 - RNA, 44 nt, Homo sapiens
ccaggggcggaaggggaggcggcgccccaggaccccgggcagcg

SEQ ID NO: 213129 - RNA, 56 nt, Homo sapiens
agaggcggaccagagacccaaacagacaacaggaagccaaagcagaaccaagacaa

SEQ ID NO: 213130 - RNA, 68 nt, Homo sapiens
cagcgacccaagaaccgggccaaggagaggcagacccagacaggagggccagggaggcggaccgagcc

SEQ ID NO: 213131 - RNA, 77 nt, Homo sapiens
cagaagagaaccagacagcccacagggagcgaagcacagaaagcaacagaggaaggaaaaaagaacccggaaagcgg

SEQ ID NO: 213132 - RNA, 62 nt, Homo sapiens
cagcaacagccccaccccgaaacgccccgaaaagacgggcaacagaggagacaaacaagaag

SEQ ID NO: 213133 - RNA, 79 nt, Homo sapiens
ccagcagcaacaccccaaacagcggcgcacggggcacaacaggcccaaaaacccagaacagaagacaaagagaggagcc

SEQ ID NO: 213134 - RNA, 63 nt, Homo sapiens
aagaacgggagcagaaaacagcccccgcagaaaagggggaaagcagcaggggccagaagacaa

SEQ ID NO: 213135 - RNA, 44 nt, Homo sapiens
aaaagacgaccaagaggcaacagagacacagaaaaaaagaggca

SEQ ID NO: 213136 - RNA, 75 nt, Homo sapiens
caaagccgagagaggaaacacagcagaaacaaagaagcagcgcgaaagggaaacaggccagccacgcagcagcag

SEQ ID NO: 213137 - RNA, 70 nt, Homo sapiens
gccgcgggccgggccggaaaggaagggccaggacaccagggcagcaggaacagcaggagagccccccacc

SEQ ID NO: 213138 - RNA, 80 nt, Homo sapiens
ccacagaaggacgggagaacaccccacagggaagagggaccgggccaaggggggggaagaagcggaaaggaggggccccg

SEQ ID NO: 213139 - RNA, 78 nt, Homo sapiens
acgcgagaggaagacacccgaccgacaaaagcccgggcgcgccaggcacagccaagagcggaccggcagcggccagcg

SEQ ID NO: 213140 - RNA, 60 nt, Homo sapiens
gcggggacaagcaggcgcacggcaaacgagcggaacagcgaggaacccggccccaccgcg

SEQ ID NO: 213141 - RNA, 76 nt, Homo sapiens
accgacaacccccccccacgccgcagaaaaggcggcggagcgcagacaacagacggggacagaagacccacgccga

SEQ ID NO: 213142 - RNA, 32 nt, Homo sapiens
acacacggcagacagacagaaggcgacacagg

SEQ ID NO: 213143 - RNA, 72 nt, Homo sapiens
caagcggcacaaaggaggaaacagaaacaggaggcaggaggaaaaacgcgaaccagcaaggcaggaagaaag

SEQ ID NO: 213144 - RNA, 65 nt, Homo sapiens
ggaaagcaggccaggggaaccgcgccgccgcaacaggggcaagagaggccgaccgagccgaaccc

SEQ ID NO: 213145 - RNA, 76 nt, Homo sapiens
ggaggcagaggggcaggggggcagcgagacacacgggcaggaccccccaggggcgggggcggagcagagagccccc

SEQ ID NO: 213146 - RNA, 71 nt, Homo sapiens
ccgcccgcaccagcggcgggcaggagaggcagcagaaaaggccaaagcagcagccggggaggccaaaggaa

SEQ ID NO: 213147 - RNA, 70 nt, Homo sapiens
agcggcaaagccagaaagaggaggccagagcgggggccaccgcaggccgcgcgcgcgggacgcgacccag

SEQ ID NO: 213148 - RNA, 42 nt, Homo sapiens
gcgaggagccggcgggcccggacccgaggcccccggacaagg

SEQ ID NO: 213149 - RNA, 68 nt, Homo sapiens
agccgaacaagggaaggacaacagcaaggacagcaccaagggcaggcagggccaaagacccagggaca

SEQ ID NO: 213150 - RNA, 68 nt, Homo sapiens
gaaggacaccccagagcagcaggccacagcacagcaaccacacaacaggagcagcccgagccaaaaag

SEQ ID NO: 213151 - RNA, 48 nt, Homo sapiens
cgcgggagagaggacccccccccccccccaaggcagaagacgaggaaa

SEQ ID NO: 213152 - RNA, 58 nt, Homo sapiens
gccacagaagccagcccgaaaaccgggaagcaggaagccaaggggagaagcccgacag

SEQ ID NO: 213153 - RNA, 54 nt, Homo sapiens
cggggaaccagcaaacaaggagcaaagaacgagagagcaaagcagcaaggggaa

SEQ ID NO: 213154 - RNA, 77 nt, Homo sapiens
agcagcgcacgcgccgggcccggacccgcgcagcgagcccgagcggcagcgccggagccccaaaagcacgcacgaaa

SEQ ID NO: 213155 - RNA, 51 nt, Homo sapiens
ccggagcgccaaacggcaccagaaaggacaggggggaaccacaaagaacgg

SEQ ID NO: 213156 - RNA, 83 nt, Homo sapiens
gagggaggaaaacaaccgagggcagagcagaggaggagcgagaggacaggagaagggaagcggacaacaggcgcaccccaacc

SEQ ID NO: 213157 - RNA, 74 nt, Homo sapiens
accaaaccaagccgaaggaaaggcagaacgccgaacaggagcaacaggggcgagaaaaaggccaaacgaacccg

SEQ ID NO: 213158 - RNA, 70 nt, Homo sapiens
ccaaaaacagaggagaaaaggcggacagcagcgcaggcaaaaaacaggacagccagcacaaaaaaacaaa

SEQ ID NO: 213159 - RNA, 75 nt, Homo sapiens
cagccacccccggcaaccgcacgcaacaagggcagggcaagcagagcgaccagccgccaaagaggagcaccggcc

SEQ ID NO: 213160 - RNA, 58 nt, Homo sapiens
caacagcccaggccgccgacgcacgagaagccggggggaaagacagcccgcagccaac

SEQ ID NO: 213161 - RNA, 77 nt, Homo sapiens
cggaaaccaccacgaccccagaaagagaaggcagaacagaggaagaccagaaacccagagacccacacgaaaaccca

SEQ ID NO: 213162 - RNA, 114 nt, Homo sapiens
cggccgagacaaaggcaccaggccaccacagaaacaaaagcaacaaagaggaggaggaaggaccgagcgcaggaaccaggccagcgcccagcaagcggaaggccacgggccggc

SEQ ID NO: 213163 - RNA, 55 nt, Homo sapiens
aaaacccggaaccgcgacggcggcagcccaccacagcggagaagagaacccgacc

SEQ ID NO: 213164 - RNA, 75 nt, Homo sapiens
aagcccaagcgcaagacaggagcggaggcaaccagaaacaagagacagccaagaacgagagaggccgagggagcg

SEQ ID NO: 213165 - RNA, 58 nt, Homo sapiens
gggccgggacccagccaggcagaccccgggcagcaggggcggagaacggaaaagcacc

SEQ ID NO: 213166 - RNA, 75 nt, Homo sapiens
gagccacaggccaccgggccaagcgcccgaggaacggcgcgccaacccaggcccagcccggagcgagagcgagag

SEQ ID NO: 213167 - RNA, 85 nt, Homo sapiens
gaagaacagccgagagagcaacaagccagcccgggaccgaggaagagcccaccggacgcaaaggaaaagcagacagacagaggag

SEQ ID NO: 213168 - RNA, 55 nt, Homo sapiens
ccgccgcaccccggggcaggaagaaggaaggacccccaaccgaggagcaccgcgc

SEQ ID NO: 213169 - RNA, 64 nt, Homo sapiens
aagaaaggccaaagcagcagcacccagccaaacccaggcccgagaagaagaggaaaacccacca

SEQ ID NO: 213170 - RNA, 70 nt, Homo sapiens
agcaggagaaaagggaccggcgcggaagaaacagcgagggcggagcccacgccccaggacacgcagagga

SEQ ID NO: 213171 - RNA, 79 nt, Homo sapiens
cacggcgcgaaagccagggaagagcaaaggcaggagagggaaaaccagcagacagagaaaagaacagcgagcacggaaa

SEQ ID NO: 213172 - RNA, 81 nt, Homo sapiens
ccgccacggaaggggcccccggggaggccgacccaccaggacagcccagagcaagcacacggaggcccgggagccagaccg

SEQ ID NO: 213173 - RNA, 78 nt, Homo sapiens
acaaccgcggacacggagaggaagggcaacgaaagcaaaccgagagcaggcgaaggccgggacccaggcccaccaccg

SEQ ID NO: 213174 - RNA, 80 nt, Homo sapiens
acccagccaagcagaggccacacgaacggccggaaccgggaaccgaaaacaaagcagcccgaagaaaacagaagagcgag

SEQ ID NO: 213175 - RNA, 86 nt, Homo sapiens
gggcgccaaggggagcagaaggaccggacacaggcccagcccccggacacgggcggccggaaggcgaggccccgccagcccgccgg

SEQ ID NO: 213176 - RNA, 82 nt, Homo sapiens
gcagagcgccccgccgaacacccgagaagggggaccccggagaggaccaccgagagggaacagggcagcagaagaagccgaa

SEQ ID NO: 213177 - RNA, 45 nt, Homo sapiens
ggggcagccacaaccgaaacaacagagcagaggccggaagaaggc

SEQ ID NO: 213178 - RNA, 79 nt, Homo sapiens
ggcaggaaaaccagccaaagaaaggccgggcgccgccgaaccagcaaagacagaaagagcacaagagaggacaaaaaac

SEQ ID NO: 213179 - RNA, 38 nt, Homo sapiens
gaacacaacagaccacgagaagccggccccaaacagga

SEQ ID NO: 213180 - RNA, 74 nt, Homo sapiens
cagcgcaccccaccgaccagcggacacggccacaaggagaagagaaggagcgcgggcgcgccacgcccgccaca

SEQ ID NO: 213181 - RNA, 60 nt, Homo sapiens
cgggaagcgggccggcagcgcccggacgaggagggcaaacagcacagaagaaggcaaaga

SEQ ID NO: 213182 - RNA, 57 nt, Homo sapiens
ggagccgcggggcccgcccagaacagaaggcgagaaccgaagggaggagacgagcag

SEQ ID NO: 213183 - RNA, 85 nt, Homo sapiens
ccccgaacacgagacgcgggcggggaaccagcacagggaaggggacccccggagaaggagaggcggaggcaaggcgggaccggcc

SEQ ID NO: 213184 - RNA, 78 nt, Homo sapiens
agcgagacaccaagaggggaaagccaaggagagcgaggaacgaccaagcaaaaaccagacagggaggccgcacagagg

SEQ ID NO: 213185 - RNA, 68 nt, Homo sapiens
gacaggaccacgcaaccccagcgccagacaaagaagacaggcagaaagccaaacagggaggcccagag

SEQ ID NO: 213186 - RNA, 70 nt, Homo sapiens
aggggagagcaccccaccacgccgggcagaaggccgaaagagcacggacccggaaggcccgggggcgaaa

SEQ ID NO: 213187 - RNA, 58 nt, Homo sapiens
aacgaaagcaggacggaggagcgaccaccggggccggacaagggagggcaagaaccca

SEQ ID NO: 213188 - RNA, 66 nt, Homo sapiens
gccagccagacccccggccgacaggcggcgcgggcggcgaaagaccacacagggaaacgaccaggg

SEQ ID NO: 213189 - RNA, 84 nt, Homo sapiens
ccgggaagaggaggaagagcgaagaccaagcggaccgggacccacgcagggccacggacagagcgaaggggagaggaggaggcg

SEQ ID NO: 213190 - RNA, 74 nt, Homo sapiens
cagcgcaccccacgcggccgaggacagcagcggacggccggaccaagaggcgccgccccccagcaaacgagaaa

SEQ ID NO: 213191 - RNA, 58 nt, Homo sapiens
gagcaggagcgaaggggacgccgccgccacgccaccaccagagccagggcagaaaccc

SEQ ID NO: 213192 - RNA, 79 nt, Homo sapiens
accggcgcgccccgggaaagaggacaccgcaccacagcaaggacgcccaaagagagcccgcaaggagccgcacaaaggc

SEQ ID NO: 213193 - RNA, 67 nt, Homo sapiens
ccgagcggagcgccgcggcgcagccaggacccagcagccagcgaagccccaaggaagccgggacgcc

SEQ ID NO: 213194 - RNA, 79 nt, Homo sapiens
gaagagggaaacaccaggggaagaggagagagaaaggcgggaagaggaagaagaaggacgagaagaagagaagagagga

SEQ ID NO: 213195 - RNA, 80 nt, Homo sapiens
ccgaaaaaccggaaaggaggaaaagcgcacaggccgcagaaaagagagaaaggggaggggcgaagggaagaagaagagaa

SEQ ID NO: 213196 - RNA, 67 nt, Homo sapiens
cgcagacgcacaacccagcgggaaaaacagagcgccgaggcccacaggccacccgccagacgcagcg

SEQ ID NO: 213197 - RNA, 75 nt, Homo sapiens
agacggcggaggggcggacgccacgccaaaggacccgaacacggaagaaagacacgcaggaggccgcggccgagc

SEQ ID NO: 213198 - RNA, 70 nt, Homo sapiens
ggagacgcaaagaacgagagaaccaagccagacaacagacggacagaacggccgagaacccggcgagacg

SEQ ID NO: 213199 - RNA, 83 nt, Homo sapiens
agaacgaggagagaagcagagaaagagccaccccaggcaagggcaacccgcccagaagaggcaccaggcccaccaaagagggg

SEQ ID NO: 213200 - RNA, 74 nt, Homo sapiens
cggacccgaaacaccaagcaccagacgcgaccccgaccccacacaggcggcggccccacccaaagcagaacaag

SEQ ID NO: 213201 - RNA, 75 nt, Homo sapiens
gacgcaagcccaagcagcgcacacagcgggagcaggagcggagagccaaaaggagaagcgaacaaaaaaaacccc

SEQ ID NO: 213202 - RNA, 77 nt, Homo sapiens
gacacccgccacacccgacccgccaagaagccgcgagcaccacagcaacagggagcgggcggaaggggacgggaagg

SEQ ID NO: 213203 - RNA, 53 nt, Homo sapiens
gcccggggccgggcagcgagcccacacaggccgaggcgaaaccccagaagaga

SEQ ID NO: 213204 - RNA, 56 nt, Homo sapiens
ggccggaccgcgaagagaaaagccccaaagaagagcccccaacagccaagaaaaaa

SEQ ID NO: 213205 - RNA, 72 nt, Homo sapiens
cccgagaggcgcccgccccgagagcaaggcccaggaggcaagagcgagaagagcgcaagacagaaagcgaaa

SEQ ID NO: 213206 - RNA, 73 nt, Homo sapiens
cggcgccgccaacgcgcccccgagaacgggaggcaacagaaggggagaagcacacagaacccaaagagcaccc

SEQ ID NO: 213207 - RNA, 75 nt, Homo sapiens
agaaccaagaaaaccgaagaccaccacggcaacccaaagacggaaaagaaaagaaagaggagcaggcagacgaga

SEQ ID NO: 213208 - RNA, 43 nt, Homo sapiens
ccccaagacccagggcaaccgggaggaagaccccagagaaaca

SEQ ID NO: 213209 - RNA, 73 nt, Homo sapiens
cacagaaacaaggcgcggcggcggagcggcgcggagcgaccggccgggccgaccacggcgcgcgcacacacac

SEQ ID NO: 213210 - RNA, 32 nt, Homo sapiens
cgcgcagggcgccaggacgaaaaggcccaggc

SEQ ID NO: 213211 - RNA, 86 nt, Homo sapiens
aggcgcggacgggcgcggcggggacggcgcccgcgccaccaccggcgaagggccgagaacacggggcgggccagaacacacggacg

SEQ ID NO: 213212 - RNA, 81 nt, Homo sapiens
cgcagaccgcgacgcgccgcacagagcaacgcgccccagcacaggcggagaaaacgaagacagcgcccagagaaggagagc

SEQ ID NO: 213213 - RNA, 75 nt, Homo sapiens
cgccacccggcgcgaccgcccggcaccgggagaaccaccgccaccgccaccagaccccgccccccgaggcgcagc

SEQ ID NO: 213214 - RNA, 76 nt, Homo sapiens
gaaaaagcaccgccccagaccgcaaacagcggaagccgacaccggaacagaaacacaaacagggaccaccccaaag

SEQ ID NO: 213215 - RNA, 37 nt, Homo sapiens
gcccaaaagcgacaagaagagggaccaggggagacgg

SEQ ID NO: 213216 - RNA, 67 nt, Homo sapiens
gaggcccagggaggcaggggcagaaacagagaaggaacagagcgcgacagagggagagcacccgcca

SEQ ID NO: 213217 - RNA, 83 nt, Homo sapiens
ccagcaccacgcccgcgccgcgccgccgccaccagcccaagagaaaggccaaaacagaagaggcaaagcccagccacagcagc

SEQ ID NO: 213218 - RNA, 76 nt, Homo sapiens
aggcggagcacagccacgggccgagaccgcacccgagcaggagggggagccacgcgcccccagcgcccggccccgc

SEQ ID NO: 213219 - RNA, 80 nt, Homo sapiens
gacagacccagcccaccccccggggccccaggagggagggcacacagggcgcgggaggggcgagcccagcgccggaccgc

SEQ ID NO: 213220 - RNA, 85 nt, Homo sapiens
gcaccaccggccccggaagagggcaccaacaaagcgccagccagcgggcagacgccacggcacgagaaggcaccagaccccaaga

SEQ ID NO: 213221 - RNA, 82 nt, Homo sapiens
ccaaaggagaccgagacaacaaggacccccagagcaagagcgcacaagccccgggggacccccaaaagacaagggcaaaacg

SEQ ID NO: 213222 - RNA, 73 nt, Homo sapiens
ggaccacaagcaagcgaaggaggccagaagaccagaagcgacagggcgaaggaacaaaagacgcaagaaaacg

SEQ ID NO: 213223 - RNA, 56 nt, Homo sapiens
ccgaggcggcggggggcgcgcaggccgcgacgagggcgcgaggcacacagagaaaa

SEQ ID NO: 213224 - RNA, 88 nt, Homo sapiens
ggagggcgaggcgggagggcccgcagaaccggagaacgggaaggacaagcggagcgcgcgacccccccaagacacaagacccaccacc

SEQ ID NO: 213225 - RNA, 72 nt, Homo sapiens
cacggaccaaaggccgggcgcagaacccccagaccacagccccagggcaggggcccggagagcgcgcccccc

SEQ ID NO: 213226 - RNA, 84 nt, Homo sapiens
gcaggagacagacgacagaccggggacgacgacgaggcaccaccccagccgacaagagcgagcgcaccacacccgaagaacccc

SEQ ID NO: 213227 - RNA, 90 nt, Homo sapiens
gagcgcgcaagcggcggaaagggcgcgcgggcccccgaagcaggaagaagacggcacgggacccccagcacaggcagcaggccgggagag

SEQ ID NO: 213228 - RNA, 71 nt, Homo sapiens
cggggaaagggacaggaaggcaacggcacaccagaaacacgcagcaaaaagccccggagccagggccaaga

SEQ ID NO: 213229 - RNA, 76 nt, Homo sapiens
cggaccaccacgagcacacgcagaagggggaaagagaccgggacagaacaggcacgggacgcgggcggggcaccgg

SEQ ID NO: 213230 - RNA, 61 nt, Homo sapiens
cgaccggggaccggagcgacgccaaaggccgggacagcagaaaacagccagcagaaaaagc

SEQ ID NO: 213231 - RNA, 86 nt, Homo sapiens
ccccgccaaccgcaaccagacgccagcgggacgaggaccgagaccgcggccgggaccgaggcgccggccgcccgcaggacaccgag

SEQ ID NO: 213232 - RNA, 77 nt, Homo sapiens
ccagcaggcgcggcccgccagggaggaaaaaggaacaagagcaagaaaaaaacaaaacgcagaagcacggagacgcg

SEQ ID NO: 213233 - RNA, 82 nt, Homo sapiens
cagcaacgcagagccccacccccaaaaaacagaaggagcaaggaagaaaggggaccaaaacaaaacgagagcaagaggaaag

SEQ ID NO: 213234 - RNA, 77 nt, Homo sapiens
cacccgccgcacggccgcccgccggggggcggggcacagaacggcagggggacccccggaacacaggcccaggagcc

SEQ ID NO: 213235 - RNA, 81 nt, Homo sapiens
ggccgggcgcggcggcggcggggcgggccgcgcgaggccgcaccagccagaggagacgggcacgcgacgccccagaaccac

SEQ ID NO: 213236 - RNA, 81 nt, Homo sapiens
agggggccggagcgagaccgggcggccacagccgcagggagaacccgaggcgggcccaccagaagagccgacaagccggca

SEQ ID NO: 213237 - RNA, 78 nt, Homo sapiens
cgccgccagacagcgagcgaggcggagaaagacagaaccagcacagcaaaaaaggcagcgcaccgaccccaacgaaca

SEQ ID NO: 213238 - RNA, 72 nt, Homo sapiens
gcagacgggcgggcgccccgcgcggagggaagggggcccgaccgagaggcgccagcggaaaccacgccaaga

SEQ ID NO: 213239 - RNA, 76 nt, Homo sapiens
caccggccgcagccgcaggggacgcccgccacggcccgccagaacgggcgggcccgcacagcccagaagaacggca

SEQ ID NO: 213240 - RNA, 77 nt, Homo sapiens
agcccccggacggcaagaccgaacggacacacgagcagcagcagaccaggggcacgagccccaccgggagagagaca

SEQ ID NO: 213241 - RNA, 79 nt, Homo sapiens
aagggaacagcaaaaaggcgagaaggagaaagcagaaagaacgcagcgaaaccgacgaggaagagaggagagcgaaccg

SEQ ID NO: 213242 - RNA, 70 nt, Homo sapiens
ggccacgcacaggaagggaggcggggagcaggagcgcaggggccagggagaggcacacccccccacgccg

SEQ ID NO: 213243 - RNA, 64 nt, Homo sapiens
agccacagcagggagaaaaggaccagggacgcacaaagcccagggacccccagaccaccgggcg

SEQ ID NO: 213244 - RNA, 51 nt, Homo sapiens
ccgcagagaaaaagggacggcagcggaacccaaccgaagaagaacagaccc

SEQ ID NO: 213245 - RNA, 37 nt, Homo sapiens
gccagagccagacaaagcaccaccgaggagagaaaag

SEQ ID NO: 213246 - RNA, 79 nt, Homo sapiens
gcagcaggcacgagcaaaggaacacaacgggccaagggcggccgggggggcaacaaccagagcagccagaacccgcgga

SEQ ID NO: 213247 - RNA, 77 nt, Homo sapiens
aaacgaccgccccaaaacgacaaggacggagcaaacggaaaaagaagcggaaccaaacgggaccgacacggcaagcc

SEQ ID NO: 213248 - RNA, 74 nt, Homo sapiens
gggagcacccacgccggggacaagccggcaacacacggaagcccggcgaccacaagaacaccaacaagagaaac

SEQ ID NO: 213249 - RNA, 72 nt, Homo sapiens
ccacaccgccagagccgacgacccagcacagaacccccagcaaggaccagaaggacccaaggacgaaggcag

SEQ ID NO: 213250 - RNA, 62 nt, Homo sapiens
aacacaacaaggaagggacaacacgaccacccaaaacagggaggggggaagacagggcccag

SEQ ID NO: 213251 - RNA, 72 nt, Homo sapiens
cgaacaagaacaccgccgggcaaaaaccagcaggcgaagacgcaggagagcacagacggacccgcacgaccc

SEQ ID NO: 213252 - RNA, 79 nt, Homo sapiens
caagaagacacaagcgcaagcacacccaccgaaacaagacagacccgggccagccgccggaacccgaacgggcgggcgg

SEQ ID NO: 213253 - RNA, 83 nt, Homo sapiens
gaccccacggagccccagcgcccacgcaccccaccggcgcgcgcggcggcccgcgcacagacgaggagcgccaggaaagaggc

SEQ ID NO: 213254 - RNA, 75 nt, Homo sapiens
agacggcagcggccccggagacacaccggccagaagaaggaagggagaggcaagaacgccaccgaaaacaaacac

SEQ ID NO: 213255 - RNA, 71 nt, Homo sapiens
gcgggcccaaggaccgcgagcgcagaagagaagcacgaaaacgcaggacagagaacgagaggaaccgcgac

SEQ ID NO: 213256 - RNA, 59 nt, Homo sapiens
acagcacagacccgagcagacaagagcagagagaacacgaagcacgagaggaaaccggc

SEQ ID NO: 213257 - RNA, 54 nt, Homo sapiens
gcacacggaacggaccccagggaaagagagcgggaggaagaaggaggaccaccg

SEQ ID NO: 213258 - RNA, 74 nt, Homo sapiens
agcggaggagcgaagacaggcggcggaggaaacaacaggagcgacaaccaaggacaccccgaaacggaacagcc

SEQ ID NO: 213259 - RNA, 86 nt, Homo sapiens
ccgaggcgaccggcgcgcgcgggcggggcgcgggccgaagcgcccggagcgggagcgagcggcgcggcccgcgcaccccccggagg

SEQ ID NO: 213260 - RNA, 54 nt, Homo sapiens
ggaagagcaagcgggggaccgaacaaggcaaaagggacacagaggaaaaagaca

SEQ ID NO: 213261 - RNA, 73 nt, Homo sapiens
cgggggcgagcacaaacggggcggggccggggaacacacagaaacagccaacccgcaacaacggcagaagaaa

SEQ ID NO: 213262 - RNA, 71 nt, Homo sapiens
ccagggagggagccgcagccgagggacacacaggaagacgaacacggaacgggcgagaagaaagcagagag

SEQ ID NO: 213263 - RNA, 55 nt, Homo sapiens
aggcggagcccgcagaccgcagaaggccggagacaccagcagaggagaagcaagg

SEQ ID NO: 213264 - RNA, 88 nt, Homo sapiens
gaggggcgagaaaggcccacgcagcccccaagcaggagggcaagcaggcggaccgcccccggcgaccccacaacagggcagcgcagac

SEQ ID NO: 213265 - RNA, 66 nt, Homo sapiens
cccagccccaccgcgaccgcagccccaggccccagagggcgcaagcagccccagacaagccaaaaa

SEQ ID NO: 213266 - RNA, 54 nt, Homo sapiens
gccgaaagagcccccagggacacccaaagacacgcagcagccgggcacaggagg

SEQ ID NO: 213267 - RNA, 78 nt, Homo sapiens
gccggggggcccaggcagcccgacggggccaccgcggcggcgcccgcaccgcgcccgcaaagccccaccgaggcacca

SEQ ID NO: 213268 - RNA, 76 nt, Homo sapiens
ggcccggaacaccaaaaacagaggagagcacacgacgaaggaggacagggaacgaagacccggagacacagagcac

SEQ ID NO: 213269 - RNA, 81 nt, Homo sapiens
gaagcagcaccacggggagacaagcaagagaaagacagcaaagaaaaggagaagaaaggaaaaaaacaaccccgggcaccc

SEQ ID NO: 213270 - RNA, 78 nt, Homo sapiens
gagcaacggaaacgacgcccagaaaaaggaggaccggacaggaaacaggaacacgaaagaggaaaaacgcacaagaaa

SEQ ID NO: 213271 - RNA, 76 nt, Homo sapiens
accaagaaccagggaagggcacaaggccaaaggaagcacaagggggcccgcacaccagcccccaagcccccaggca

SEQ ID NO: 213272 - RNA, 60 nt, Homo sapiens
gaaggcacggagcgccgcggagcgcagggcggggaacagaccagggaaggggaggagaag

SEQ ID NO: 213273 - RNA, 95 nt, Homo sapiens
cggaaccggcgcgcccgaaggcggggcacgccaacgcaccaccacggggacggacagaacgagcgcaggagcccgccccaccgccccggggagca

SEQ ID NO: 213274 - RNA, 53 nt, Homo sapiens
gaggccccaccgccaccgcaggacaacaggagcacgaggcagccccggccaag

SEQ ID NO: 213275 - RNA, 71 nt, Homo sapiens
ccccaccggaggagcccaccggcccaaaggcccggacccaaaacaggaagggccggagagggcggagggac

SEQ ID NO: 213276 - RNA, 68 nt, Homo sapiens
agagagggcagccggggagaagaaacgaagaggaaagcaaaaagaaaccaacaggagaaggcccaaga

SEQ ID NO: 213277 - RNA, 59 nt, Homo sapiens
ggcccagcaccccgagaaccgcaggagccagaggccaggcgaaccagccgaaaaaggag

SEQ ID NO: 213278 - RNA, 56 nt, Homo sapiens
ggccaggcaagggaaagacaagaagggaacgcacagcgaagacaccccaacgggac

SEQ ID NO: 213279 - RNA, 68 nt, Homo sapiens
cagaacaagccccgagcgacggcgagacccagaagagcaaggggcacccggcaaggagaaacacgaaa

SEQ ID NO: 213280 - RNA, 55 nt, Homo sapiens
cagaagagcagagccccaggcagagcaagacaggccacaaggaagcgagagagag

SEQ ID NO: 213281 - RNA, 85 nt, Homo sapiens
cagaaccaggcgccaggacgccgcgaccaccccaacacggaacagcaccgccgcaggggacacggaaaacgacagaacgaagcag

SEQ ID NO: 213282 - RNA, 83 nt, Homo sapiens
agcggaccgccgccacggggcagccagcacaacgggcggaggggcgcgcccccagaagccccgccgcagggccggcagaagaa

SEQ ID NO: 213283 - RNA, 76 nt, Homo sapiens
agggcagccggaagaccacagcagccaaggacagggagcccaaggcagaaccgagggaagaagggccgaggagccc

SEQ ID NO: 213284 - RNA, 77 nt, Homo sapiens
ggagcgaggaaccagaacgaaaagcgccagaaagaggcacccaaggaaccacagaaacaagggaagaagaaagaaga
